United States Patent Application Publication US 2023/0338579 A1 - sequence listing, part 2

SEQ ID NO: 2380 - RNA, 2226 nt, synthetic construct
  misc_feature 1..2226: note = MAGE-D4__Homo_sapiens__AAH63838
  source 1..2226: mol_type = other RNA
atggctgagggaagcttcagcgtgcaatcggaaagctacagtgttgaagacatggatgagggtagcgacgaagtcggggaggaagagatggttgaaggcaacgactatgaagaattcggtgcgtttggtggctatggcaccctcaccagctttgacatccatatcctcagagccttcggaagcttgggtccaggccttcgcatcttatcgaatgagccctgggaactggaaaaccctgtgctggcccagaccctggtggaggcattgcagctggatccggaaacacttgccaatgagacggccgcccgtgctgccaacgtagcccgcgccgccgcctccaaccgtgcggctcgggccgctgccgccgctgcccgtaccgccttcagtcaggtggtcgctagccaccgggtggccacgccgcaggtctcaggagaggatacccagcccacgacctacgccgccgaggctcaggggcccacccctgagccaccccttgcttctccgcagacctcccagatgttagtcaccagtaagatggctgcccccgaggctccggcaacctccgcacagtcccagacaggctccccggcccaggaggctgctactgagggccctagtagcgcctgtgctttctctcaggctccgtgtgccagggaggtggacgccaaccggcccagcacagccttcctgggccagaatgatgtcttcgatttcactcagccggcaggtgtcagtggcatggccttcccgcgccccaagagacctgccccagcccaagaggctgccacagagggccccagtgctgcctctggtgtgccccagacgggacctggcagggaggtggcagccacccggcccaagaccaccaagtcggggaaggcgctggccaagactcggtgggtggagcctcagaatgttgtggcagcagctgctgccaaggccaagatggccacgagcatccctgagccggagggtgcagctgctgccactgctcagcacagtgctgagccctgggccaggatgggaggcaagaggaccaagaagtccaagcacctggatgatgagtatgagagcagcgaggaggagagagagactcccgcggtcccacccacctggagagcatcacagccctcattgacggtgcgggctcagttggcccctcggcccccgatggccccgaggtcccagataccctcaaggcacgtactgtgcctgcccccccgcaacgtgacccttctgcaggagagggcaaataagttggtgaaatacctgatgattaaggactacaagaagatccccatcaagcgcgcagacatgctgaaggatgtcatcagagaatatgatgaacatttccctgagatcattgaacgagcaacgtacaccctggaaaagaagtttgggatccacctgaaggagatcgacaaggaagaacacctgtatattcttgtctgcacacgggactcctcagctcgcctccttggaaaaaccaaggacactcccaggctgagtctcctcttggtgattctgggcgtcatcttcatgaatggcaaccgtgccagcgaggctgtcctctgggaggcactacgcaagatgggactgcgccctggggtgaggcacccattcctcggcgatctgaggaagctcatcacagatgactttgtgaagcagaagtacctggaatacaagaagatccccaacagcaacccacctgagtatgaattcctctggggcctgcgagcccgccatgagaccagcaagatgagggtcctgagattcatcgcccagaatcagaaccgagacccccgggaatggaaggctcatttcttggaggctgtggatgatgctttcaagacaatggatgtggatatggccgaggaacatgccagggcccagatgagggcccagatgaatatcggggatgaagcgctgattggacggtggagctgggatgacatacaagtcgagctcctgacctgggatgaggacggagattttggcgatgcctgggccaggatcccctttgctttctgggccagataccatcagtacattctgaatagcaaccgtgccaacaggagggccacgtggagagctggcgtcagcagtggcaccaatggaggggccagcaccagcgtcctagatggccccagcaccagctccaccatccggaccagaaatgctgccagagctggcgccagcttcttctcctggatccagcaccgttga

SEQ ID NO: 2381 - RNA, 2226 nt, synthetic construct
  misc_feature 1..2226: note = derived and/or modified sequence opt1 fromMAGE-D4__Homo_sapiens__AAH63838
  source 1..2226: mol_type = other RNA
atggccgagggcagcttctccgtgcagagcgagtcctacagcgtcgaggacatggacgaggggtccgacgaggtgggcgaggaggagatggtggaggggaacgactacgaggagttcggcgccttcgggggctacggcaccctgaccagcttcgacatccacatcctccgcgcgttcgggtccctgggccccgggctgcggatcctcagcaacgagccgtgggagctggagaaccccgtcctggcccagacgctcgtggaggccctgcagctggaccccgagaccctcgccaacgagaccgccgcgcgcgccgccaacgtggcccgggcggccgcctccaaccgcgccgcccgggcggccgccgccgccgcgcgcaccgccttcagccaggtcgtggcctcccaccgggtggccacgccccaggtcagcggcgaggacacccagccgaccacctacgccgcggaggcccaggggcccacgcccgagcccccgctggccagcccccagaccagccagatgctggtgacctccaagatggccgcccccgaggcgcccgccaccagcgcccagtcccagacgggcagcccggcccaggaggcggccaccgagggcccctccagcgcctgcgccttcagccaggccccctgcgcgcgcgaggtggacgccaaccggccctccaccgccttcctcgggcagaacgacgtcttcgacttcacccagccggccggcgtgagcgggatggccttcccccgccccaagcggcccgcgccggcccaggaggccgccacggagggcccctccgccgcgagcggcgtgccccagaccgggcccggccgcgaggtcgccgccacccggccgaagaccacgaagtccgggaaggccctggcgaagacccgctgggtggagccccagaacgtggtcgccgccgccgccgcgaaggccaagatggccaccagcatccccgagcccgagggcgccgccgcggccaccgcccagcactccgccgagccgtgggcccggatgggcgggaagcgcacgaagaagtccaagcacctggacgacgagtacgagtccagcgaggaggagcgggagacccccgcggtgcccccgacctggcgcgcctcccagcccagcctcaccgtgcgggcccagctggccccgcgcccgcccatggcgccccggtcccagatccccagccgccacgtcctgtgcctcccgccccgcaacgtgacgctgctgcaggagcgggccaacaagctcgtgaagtacctgatgatcaaggactacaagaagatccccatcaagcgcgccgacatgctgaaggacgtcatccgggagtacgacgagcacttccccgagatcatcgagcgcgccacctacaccctcgagaagaagttcggcatccacctgaaggagatcgacaaggaggagcacctgtacatcctcgtgtgcacccgggactccagcgcccgcctgctggggaagacgaaggacacgccccggctctccctgctgctcgtcatcctgggcgtgatcttcatgaacgggaaccgcgcgagcgaggccgtgctgtgggaggccctccggaagatgggcctgcgccccggggtccggcaccccttcctgggcgacctccgcaagctgatcaccgacgacttcgtgaagcagaagtacctggagtacaagaagatccccaactccaacccgcccgagtacgagttcctctggggcctgcgggcccgccacgagaccagcaagatgcgggtgctgcgcttcatcgcccagaaccagaaccgggacccccgcgagtggaaggcgcacttcctcgaggccgtcgacgacgccttcaagaccatggacgtggacatggccgaggagcacgcccgggcgcagatgcgcgcccagatgaacatcggggacgaggccctgatcggccgctggagctgggacgacatccaggtggagctgctcacctgggacgaggacggggacttcggcgacgcctgggcccggatccccttcgcgttctgggcccgctaccaccagtacatcctgaactccaaccgggccaaccgccgggccacctggcgcgcgggggtcagctccggcaccaacggcggggccagcacctccgtgctggacggccccagcacgtccagcaccatccggacccgcaacgccgcccgggccggggcgtccttcttcagctggatccagcaccgctga

SEQ ID NO: 2382 - RNA, 2226 nt, synthetic construct
  misc_feature 1..2226: note = derived and/or modified sequence opt2 fromMAGE-D4__Homo_sapiens__AAH63838
  source 1..2226: mol_type = other RNA
atggccgagggctccttctccgtccagtccgagtcctactccgtcgaggacatggacgagggctccgacgaggtcggcgaggaggagatggtcgagggcaacgactacgaggagttcggcgccttcggcggctacggcaccctcacctccttcgacatccacatcctccgcgccttcggctccctcggccccggcctccgcatcctctccaacgagccctgggagctcgagaaccccgtcctcgcccagaccctcgtcgaggccctccagctcgaccccgagaccctcgccaacgagaccgccgcccgcgccgccaacgtcgcccgcgccgccgcctccaaccgcgccgcccgcgccgccgccgccgccgcccgcaccgccttctcccaggtcgtcgcctcccaccgcgtcgccaccccccaggtctccggcgaggacacccagcccaccacctacgccgccgaggcccagggccccacccccgagccccccctcgcctccccccagacctcccagatgctcgtcacctccaagatggccgcccccgaggcccccgccacctccgcccagtcccagaccggctcccccgcccaggaggccgccaccgagggcccctcctccgcctgcgccttctcccaggccccctgcgcccgcgaggtcgacgccaaccgcccctccaccgccttcctcggccagaacgacgtcttcgacttcacccagcccgccggcgtctccggcatggccttcccccgccccaagcgccccgcccccgcccaggaggccgccaccgagggcccctccgccgcctccggcgtcccccagaccggccccggccgcgaggtcgccgccacccgccccaagaccaccaagtccggcaaggccctcgccaagacccgctgggtcgagccccagaacgtcgtcgccgccgccgccgccaaggccaagatggccacctccatccccgagcccgagggcgccgccgccgccaccgcccagcactccgccgagccctgggcccgcatgggcggcaagcgcaccaagaagtccaagcacctcgacgacgagtacgagtcctccgaggaggagcgcgagacccccgccgtcccccccacctggcgcgcctcccagccctccctcaccgtccgcgcccagctcgccccccgcccccccatggccccccgctcccagatcccctcccgccacgtcctctgcctccccccccgcaacgtcaccctcctccaggagcgcgccaacaagctcgtcaagtacctcatgatcaaggactacaagaagatccccatcaagcgcgccgacatgctcaaggacgtcatccgcgagtacgacgagcacttccccgagatcatcgagcgcgccacctacaccctcgagaagaagttcggcatccacctcaaggagatcgacaaggaggagcacctctacatcctcgtctgcacccgcgactcctccgcccgcctcctcggcaagaccaaggacaccccccgcctctccctcctcctcgtcatcctcggcgtcatcttcatgaacggcaaccgcgcctccgaggccgtcctctgggaggccctccgcaagatgggcctccgccccggcgtccgccaccccttcctcggcgacctccgcaagctcatcaccgacgacttcgtcaagcagaagtacctcgagtacaagaagatccccaactccaacccccccgagtacgagttcctctggggcctccgcgcccgccacgagacctccaagatgcgcgtcctccgcttcatcgcccagaaccagaaccgcgacccccgcgagtggaaggcccacttcctcgaggccgtcgacgacgccttcaagaccatggacgtcgacatggccgaggagcacgcccgcgcccagatgcgcgcccagatgaacatcggcgacgaggccctcatcggccgctggtcctgggacgacatccaggtcgagctcctcacctgggacgaggacggcgacttcggcgacgcctgggcccgcatccccttcgccttctgggcccgctaccaccagtacatcctcaactccaaccgcgccaaccgccgcgccacctggcgcgccggcgtctcctccggcaccaacggcggcgcctccacctccgtcctcgacggcccctccacctcctccaccatccgcacccgcaacgccgcccgcgccggcgcctccttcttctcctggatccagcaccgctga

SEQ ID NO: 2383 - RNA, 2226 nt, synthetic construct
  misc_feature 1..2226: note = derived and/or modified sequence opt3 fromMAGE-D4__Homo_sapiens__AAH63838
  source 1..2226: mol_type = other RNA
atggccgagggcagcttctccgtgcagtctgaatcatacagtgtcgaggacatggatgaagggagcgacgaggttggagaagaggagatggtggaaggtaacgattatgaggaatttggcgctttcgggggatacggcaccctgacatcctttgacatccacattctcagagcattcggttctcttgggcccggactgaggatattgtcgaatgagccttgggagttagaaaacccagtactggcccaaactctagtggaggcgctccagctggatccggaaacgcttgctaatgagaccgccgcacgggccgctaacgtcgcacgcgccgctgcctcaaatcgagcggcacgtgccgctgccgcagctgccagaacagcgtttagccaggtggttgccagtcatagggtggcaactccccaggtctccggcgaagacacccaacctacaacctatgctgccgaggctcagggcccaactcccgagcctccactggcctctccccagacaagccagatgttggtgacctccaagatggcagcccctgaagctccagcgacgtcagcacaaagtcagactgggagcccggcccaggaggctgccaccgaaggaccctcttccgcatgcgccttctcacaggctccttgtgcccgggaggtagatgcaaaccgcccaagcacagcgtttctcggtcaaaatgacgttttcgattttactcagcccgctggcgtgagtgggatggccttccctagaccaaaaaggcccgcaccggcccaggaagctgccaccgagggaccttctgcagcttccggcgtcccccaaacaggtccagggcgggaggtggccgcgacccgccctaagacgactaaaagcggaaaggccctggctaaaacacgatgggtggaaccccagaacgtcgttgcagccgctgccgcaaaggcgaagatggccacctcgatcccagagcccgaaggcgctgccgcagctactgcccagcactctgcagagccttgggccagaatgggcgggaaaaggacaaagaaatccaagcatctggacgatgaatacgagtcaagtgaggaggaacgggaaaccccagctgtgccgcccacgtggcgtgcgagccagccttccctcaccgtacgcgcccaattagcaccaagaccccctatggctccaaggtctcagattcccagccggcacgtgctgtgccttccgcctcgaaatgtcacattgctgcaggagcgcgccaacaagctagtgaaatatctcatgatcaaggactacaaaaagattccaatcaaaagagccgatatgctgaaggacgttataagggagtatgacgaacattttcccgagatcattgaacgggctacttacacccttgagaaaaagttcggaatccacctgaaagaaattgataaggaggagcacttgtacatcctcgtgtgtacacgcgactcaagtgcaagactgttaggtaagactaaagatacccctaggctgtccctccttctggtcatattgggcgtgatttttatgaatgggaaccgtgccagcgaagcggtactatgggaggctctgcggaagatgggactccgacccggcgttagacatccattcctgggtgaccttaggaaactgatcacagatgacttcgtgaagcagaaatatttggaatacaagaagattcctaattctaatcccccagagtatgaatttctctgggggctgcgcgcccggcacgagacctcaaaaatgagagtcttaaggttcatcgcacaaaaccagaaccgcgatccgcgagagtggaaggcccattttctggaagctgtggacgatgcattcaaaactatggacgtcgatatggccgaggaacacgcgcgggctcagatgcgtgcccagatgaacatcggcgacgaggcactaattggaagatggagttgggacgatatacaagtggaactcctgacgtgggacgaggatggcgactttggggatgcctgggctaggatccctttcgccttttgggcacgctaccaccagtatattcttaatagcaaccgggctaatagaagggccacatggcgagcgggagtttcctctggtaccaacggcggggcctcgactagcgtgttggacggaccctccacctcaagtacaatccgcacccggaatgcagctagagccggcgcttctttctttagctggatacagcataggtga

SEQ ID NO: 2384 - RNA, 2226 nt, synthetic construct
  misc_feature 1..2226: note = derived and/or modified sequence opt4 fromMAGE-D4__Homo_sapiens__AAH63838
  source 1..2226: mol_type = other RNA
atggccgagggcagcttcagcgtgcagagcgagagctacagcgtggaggacatggacgagggcagcgacgaggtgggcgaggaggagatggtggagggcaacgactacgaggagttcggcgccttcggcggctacggcaccctgaccagcttcgacatccacatcctgagagccttcggcagcctgggccccggcctgagaatcctgagcaacgagccctgggagctggagaaccccgtgctggcccagaccctggtggaggccctgcagctggaccccgagaccctggccaacgagaccgccgccagagccgccaacgtggccagagccgccgccagcaacagagccgccagagccgccgccgccgccgccagaaccgccttcagccaggtggtggccagccacagagtggccaccccccaggtgagcggcgaggacacccagcccaccacctacgccgccgaggcccagggccccacccccgagccccccctggccagcccccagaccagccagatgctggtgaccagcaagatggccgcccccgaggcccccgccaccagcgcccagagccagaccggcagccccgcccaggaggccgccaccgagggccccagcagcgcctgcgccttcagccaggccccctgcgccagagaggtggacgccaacagacccagcaccgccttcctgggccagaacgacgtgttcgacttcacccagcccgccggcgtgagcggcatggccttccccagacccaagagacccgcccccgcccaggaggccgccaccgagggccccagcgccgccagcggcgtgccccagaccggccccggcagagaggtggccgccaccagacccaagaccaccaagagcggcaaggccctggccaagaccagatgggtggagccccagaacgtggtggccgccgccgccgccaaggccaagatggccaccagcatccccgagcccgagggcgccgccgccgccaccgcccagcacagcgccgagccctgggccagaatgggcggcaagagaaccaagaagagcaagcacctggacgacgagtacgagagcagcgaggaggagagagagacccccgccgtgccccccacctggagagccagccagcccagcctgaccgtgagagcccagctggcccccagaccccccatggcccccagaagccagatccccagcagacacgtgctgtgcctgccccccagaaacgtgaccctgctgcaggagagagccaacaagctggtgaagtacctgatgatcaaggactacaagaagatccccatcaagagagccgacatgctgaaggacgtgatcagagagtacgacgagcacttccccgagatcatcgagagagccacctacaccctggagaagaagttcggcatccacctgaaggagatcgacaaggaggagcacctgtacatcctggtgtgcaccagagacagcagcgccagactgctgggcaagaccaaggacacccccagactgagcctgctgctggtgatcctgggcgtgatcttcatgaacggcaacagagccagcgaggccgtgctgtgggaggccctgagaaagatgggcctgagacccggcgtgagacaccccttcctgggcgacctgagaaagctgatcaccgacgacttcgtgaagcagaagtacctggagtacaagaagatccccaacagcaacccccccgagtacgagttcctgtggggcctgagagccagacacgagaccagcaagatgagagtgctgagattcatcgcccagaaccagaacagagaccccagagagtggaaggcccacttcctggaggccgtggacgacgccttcaagaccatggacgtggacatggccgaggagcacgccagagcccagatgagagcccagatgaacatcggcgacgaggccctgatcggcagatggagctgggacgacatccaggtggagctgctgacctgggacgaggacggcgacttcggcgacgcctgggccagaatccccttcgccttctgggccagataccaccagtacatcctgaacagcaacagagccaacagaagagccacctggagagccggcgtgagcagcggcaccaacggcggcgccagcaccagcgtgctggacggccccagcaccagcagcaccatcagaaccagaaacgccgccagagccggcgccagcttcttcagctggatccagcacagatga

SEQ ID NO: 2385 - RNA, 2226 nt, synthetic construct
  misc_feature 1..2226: note = derived and/or modified sequence opt5 fromMAGE-D4__Homo_sapiens__AAH63838
  source 1..2226: mol_type = other RNA
atggccgagggcagcttctccgtgcagtctgaaagctactccgtcgaggacatggatgaagggtctgacgaggttggagaagaggagatggtggaaggcaacgattatgaggaatttggggctttcggaggctacgggaccctgacatcctttgacatccacattctcagagccttcggatccctgggccccggccttcggatcctgtctaatgagccttgggagctcgaaaacccggtgctggcgcaaacgcttgtcgaggctctgcagctcgatcccgaaaccctggccaatgagacagccgctcgcgccgctaacgtggccagagcggccgctagcaatcgggccgctcgcgccgcggccgctgccgctagaaccgccttttcccaggttgtggccagccatcgggtcgctacacctcaggtgtctggggaagacacccaacccacaacctatgcggccgaggctcagggacctacgcccgagcctccgctggccagcccccagaccagccagatgctcgttacatctaagatggccgctcctgaagcccccgcgacctccgctcaaagccagacaggctctcctgcccaggaggccgctaccgaagggccctccagcgcctgcgctttctcccaggccccgtgtgcgcgcgaggtggatgccaacagaccttctacggcttttctgggacaaaatgacgtcttcgattttacacagcccgccggcgtgagcgggatggctttccctcggcccaaacgccccgcccctgcgcaggaagccgctaccgagggaccgtccgccgctagcggcgtgccccaaacaggccctgggagagaggtcgccgccacccggcccaagaccacaaaatctggaaaggctcttgcgaaaacgcgctgggttgaacctcagaacgtggtggccgctgccgccgctaaggccaagatggcgacctccattcccgagccggaaggcgctgccgccgctacagcccagcacagcgcggagccttgggctagaatgggagggaaacggaccaagaaatctaagcatctggacgatgaatacgagagctccgaggaggaacgcgaaacacccgccgtccctcccacctggagagcctctcagcctagcctcacggtgcgggctcaactggcccccagaccgcctatggctccccgctcccagatccccagccggcacgttctttgcctgcctccgagaaatgtgacactcctgcaggagcgcgccaacaaactggtcaagtatctcatgattaaggactacaaaaagatccccatcaaacgggcggatatgctgaaggacgtgattagagagtatgacgaacattttcctgagatcattgaacgcgccacctacacccttgagaaaaagttcggcatccacctgaaagaaattgataaggaggagcacctctacatcctggtttgtacacgggactcttccgctagacttctggggaagaccaaagatacaccccgcctcagcctgctgctcgtgattctgggagtcatctttatgaatggcaaccgggcctctgaagctgtgctttgggaggccctgagaaagatgggcctccgccctggggtccggcatcccttcctgggagaccttagaaaactgatcacggatgacttcgtgaagcagaaatatctcgaatacaagaagattcctaattccaatcccccggagtatgaatttctgtggggcctgcgggcccgccacgagaccagcaaaatgagagttctccggttcatcgctcaaaatcagaacagagatcctcgcgagtggaaggcgcattttctggaagccgtggacgatgctttcaaaacaatggacgtcgatatggccgaggaacacgcccgggctcagatgagagcccagatgaacattggggacgaggcgcttatcggacgctggtcctgggacgatattcaagtggaactgctcacctgggacgaggatggcgactttggggatgcttgggccagaatccccttcgccttttgggctcggtaccaccagtatatcctgaactctaaccgcgccaatagacgggcgacatggcgcgctggcgttagctccggaaccaacggcggggcctctacgagcgtgctggacggaccttccaccagctctacaattagaacccggaatgccgctcgcgccggcgcttccttctttagctggatccagcatagatga

SEQ ID NO: 2386 - protein, 373 aa, synthetic construct [sequence omitted]

SEQ ID NO: 2387 - RNA, 1122 nt, synthetic construct
  misc_feature 1..1122: note = MAGE-_E1__Homo_sapiens__CAG33449
  source 1..1122: mol_type = other RNA
atgcctcccgttccaggcgttccattccgcaacgttgacaacgactccccgacctcagttgagttagaagactgggtagatgcacagcatcccacagatgaggaagaggaggaagcctcctccgcctcttccactttgtacttagtattttccccctcttctttctccacatcctcttctctgattcttggtggtcctgaggaggaggaggtgccctctggtgtgataccaaatcttaccgagagcattcccagtagtcctccacagggtcctccacagggtccttcccagagtcctctgagctcctgctgctcctctttttcatggagctcattcagtgaggagtccagcagccagaaaggggaggatacaggcacctgtcagggcctgccagacagtgagtcctctttcacatatacactagatgaaaaggtggccgagttagtggagttcctgctcctcaaatacgaagcagaggagcctgtaacagaggcagagatgctgatgattgtcatcaagtacaaagattactttcctgtgatactcaagagagcccgtgagttcatggagcttctttttggccttgccctgatagaagtgggccctgaccacttctgtgtgtttgcaaacacagtaggcctcaccgatgagggtagtgatgatgagggcatgcccgagaacagcctcctgattattattctgagtgtgatcttcataaagggcaactgtgcctctgaggaggtcatctgggaagtgctgaatgcagtaggggtatatgctgggagggagcacttcgtctatggggagcctagggagctcctcactaaagtttgggtgcagggacattacctggagtatcgggaggtgccccacagttctcctccatattatgaattcctgtggggtccaagagcccattcagaaagcatcaagaagaaagtactagagtttttagccaagctgaacaacactgttcctagttcctttccatcctggtacaaggatgctttgaaagatgtggaagagagagtccaggccacaattgataccgcagatgatgccactgtcatggccagtgaaagcctcagtgtcatgtccagcaacgtctccttttctgattaa

SEQ ID NO: 2388 - RNA, 1122 nt, synthetic construct
  misc_feature 1..1122: note = derived and/or modified sequence opt1 fromMAGE-_E1__Homo_sapiens__CAG33449
  source 1..1122: mol_type = other RNA
atgccgcccgtgcccggcgtccccttccgcaacgtggacaacgacagccccacctccgtggagctggaggactgggtcgacgcccagcaccccaccgacgaggaggaggaggaggccagctccgcgagctccacgctctacctggtgttcagcccctccagcttctccaccagctccagcctgatcctcgggggccccgaggaggaggaggtgccctccggggtcatcccgaacctgaccgagagcatcccctccagcccgccccagggcccgccccaggggccctcccagagccccctgtccagctgctgcagctccttcagctggtccagcttctccgaggagagctccagccagaagggcgaggacaccggcacgtgccaggggctcccggactccgagagctccttcacctacaccctggacgagaaggtggccgagctggtggagttcctcctgctgaagtacgaggccgaggagcccgtcaccgaggccgagatgctcatgatcgtgatcaagtacaaggactacttccccgtgatcctgaagcgggcccgcgagttcatggagctcctgttcggcctggcgctgatcgaggtcgggcccgaccacttctgcgtgttcgccaacacggtgggcctcaccgacgaggggagcgacgacgagggcatgccggagaactccctgctgatcatcatcctcagcgtcatcttcatcaagggcaactgcgcctccgaggaggtgatctgggaggtgctgaacgccgtcggggtgtacgcgggccgggagcacttcgtgtacggggagccccgcgagctgctcaccaaggtctgggtgcagggccactacctggagtaccgggaggtgccccacagctccccgccctactacgagttcctgtggggcccccgcgcccacagcgagtccatcaagaagaaggtcctcgagttcctggccaagctgaacaacaccgtgcccagcagcttcccctcctggtacaaggacgccctcaaggacgtcgaggagcgggtgcaggccacgatcgacaccgcggacgacgccaccgtgatggccagcgagtccctgagcgtcatgtccagcaacgtgtccttcagcgactga

SEQ ID NO: 2389 - RNA, 1122 nt, synthetic construct
  misc_feature 1..1122: note = derived and/or modified sequence opt2 fromMAGE-_E1__Homo_sapiens__CAG33449
  source 1..1122: mol_type = other RNA
atgccccccgtccccggcgtccccttccgcaacgtcgacaacgactcccccacctccgtcgagctcgaggactgggtcgacgcccagcaccccaccgacgaggaggaggaggaggcctcctccgcctcctccaccctctacctcgtcttctccccctcctccttctccacctcctcctccctcatcctcggcggccccgaggaggaggaggtcccctccggcgtcatccccaacctcaccgagtccatcccctcctcccccccccagggccccccccagggcccctcccagtcccccctctcctcctgctgctcctccttctcctggtcctccttctccgaggagtcctcctcccagaagggcgaggacaccggcacctgccagggcctccccgactccgagtcctccttcacctacaccctcgacgagaaggtcgccgagctcgtcgagttcctcctcctcaagtacgaggccgaggagcccgtcaccgaggccgagatgctcatgatcgtcatcaagtacaaggactacttccccgtcatcctcaagcgcgcccgcgagttcatggagctcctcttcggcctcgccctcatcgaggtcggccccgaccacttctgcgtcttcgccaacaccgtcggcctcaccgacgagggctccgacgacgagggcatgcccgagaactccctcctcatcatcatcctctccgtcatcttcatcaagggcaactgcgcctccgaggaggtcatctgggaggtcctcaacgccgtcggcgtctacgccggccgcgagcacttcgtctacggcgagccccgcgagctcctcaccaaggtctgggtccagggccactacctcgagtaccgcgaggtcccccactcctcccccccctactacgagttcctctggggcccccgcgcccactccgagtccatcaagaagaaggtcctcgagttcctcgccaagctcaacaacaccgtcccctcctccttcccctcctggtacaaggacgccctcaaggacgtcgaggagcgcgtccaggccaccatcgacaccgccgacgacgccaccgtcatggcctccgagtccctctccgtcatgtcctccaacgtctccttctccgactga

SEQ ID NO: 2390 - RNA, 1122 nt, synthetic construct
  misc_feature 1..1122: note = derived and/or modified sequence opt3 fromMAGE-_E1__Homo_sapiens__CAG33449
  source 1..1122: mol_type = other RNA
atgccccctgtgccaggcgtcccgttcagaaacgttgacaatgatagccccacctccgtggagctggaagactgggtagatgcccagcaccctacagacgaggaagaggaagaggcttcttcagcaagtagcactctctaccttgtgttttccccatcttcgttctcaacgagcagttccctgatcttagggggacccgaggaagaggaagtcccttctggtgtgattccaaacttgaccgagagcataccctcctcacctccacaaggcccgccccaggggcctagtcagagcccactgtcttcctgctgtagctcatttagttggtcttccttcagcgaggaatcgtcttcccagaagggagaggatacaggcacttgccaaggtctacccgactcagaaagtagctttacctatacactcgatgagaaagttgccgaactggtggagttccttctgttgaagtacgaggcggaagaacctgtcaccgaagctgagatgctcatgatcgtgattaaatataaggactactttccagtaatcctgaaaagggcccgggagttcatggagctgctctttgggttagcactgattgaggttggacccgatcatttctgtgtgtttgccaatactgtcggccttacagacgaaggctccgatgacgaggggatgccggaaaactctttgctgatcataatcctaagcgtgattttcatcaagggaaattgcgcttcagaggaagtgatttgggaggtcctcaacgcagttggtgtgtatgccggccgcgagcactttgtatacggggaacctcgagagctgcttaccaaggtgtgggtccagggacattatctggaataccgtgaggtgccccacagttccccaccttactatgagttcttgtggggccccagagctcatagcgaatctatcaaaaagaaagttctcgagttcctggccaagttaaataacacggtgccatcaagttttcccagctggtacaaagatgcgctgaaggacgtcgaagagagggtgcaggcaactatagacaccgccgatgacgctacagtaatggcctccgaatctctctcggttatgagctccaatgtgtcattcagtgattga

SEQ ID NO: 2391 - RNA, 1122 nt, synthetic construct
  misc_feature 1..1122: note = derived and/or modified sequence opt4 fromMAGE-_E1__Homo_sapiens__CAG33449
  source 1..1122: mol_type = other RNA
atgccccccgtgcccggcgtgcccttcagaaacgtggacaacgacagccccaccagcgtggagctggaggactgggtggacgcccagcaccccaccgacgaggaggaggaggaggccagcagcgccagcagcaccctgtacctggtgttcagccccagcagcttcagcaccagcagcagcctgatcctgggcggccccgaggaggaggaggtgcccagcggcgtgatccccaacctgaccgagagcatccccagcagccccccccagggccccccccagggccccagccagagccccctgagcagctgctgcagcagcttcagctggagcagcttcagcgaggagagcagcagccagaagggcgaggacaccggcacctgccagggcctgcccgacagcgagagcagcttcacctacaccctggacgagaaggtggccgagctggtggagttcctgctgctgaagtacgaggccgaggagcccgtgaccgaggccgagatgctgatgatcgtgatcaagtacaaggactacttccccgtgatcctgaagagagccagagagttcatggagctgctgttcggcctggccctgatcgaggtgggccccgaccacttctgcgtgttcgccaacaccgtgggcctgaccgacgagggcagcgacgacgagggcatgcccgagaacagcctgctgatcatcatcctgagcgtgatcttcatcaagggcaactgcgccagcgaggaggtgatctgggaggtgctgaacgccgtgggcgtgtacgccggcagagagcacttcgtgtacggcgagcccagagagctgctgaccaaggtgtgggtgcagggccactacctggagtacagagaggtgccccacagcagccccccctactacgagttcctgtggggccccagagcccacagcgagagcatcaagaagaaggtgctggagttcctggccaagctgaacaacaccgtgcccagcagcttccccagctggtacaaggacgccctgaaggacgtggaggagagagtgcaggccaccatcgacaccgccgacgacgccaccgtgatggccagcgagagcctgagcgtgatgagcagcaacgtgagcttcagcgactga

SEQ ID NO: 2392 - RNA, 1122 nt, synthetic construct
  misc_feature 1..1122: note = derived and/or modified sequence opt5 fromMAGE-_E1__Homo_sapiens__CAG33449
  source 1..1122: mol_type = other RNA
atgccccctgtgccgggcgtccccttcagaaacgttgacaatgatagccctacctccgtggagctggaagactgggtggatgcccagcaccccacagacgaggaagaggaagaggcttctagcgcctcctctacgctctacctggtctttagcccttcctctttcagcacctccagctctcttatcctcgggggacccgaggaagaggaagtgccttccggcgttattccgaacctgacagagagcatcccctcttcccctccccaagggcctccccagggaccgagccagtctcctctgtccagctgctgttcctcttttagctggtccagcttctctgaggaatccagctctcagaagggcgaggataccgggacatgccaaggacttcccgacagcgaatcctcttttacctatacactggatgagaaagtggcggaactcgtcgagttcctgctgctcaagtacgaggctgaagaacctgtgaccgaagccgagatgctgatgattgttatcaaatataaggactactttcccgtgattcttaaacgggcccgcgagttcatggagctgctctttggcctggctcttatcgaggtcggccccgatcatttctgtgtgtttgccaatacggtggggctgaccgacgaaggaagcgatgacgagggcatgcctgaaaactccctcctgatcattatcctgagcgtcattttcatcaaggggaattgcgcttctgaggaagttatttgggaggtgctcaacgccgtgggagtctatgcgggcagagagcactttgtgtacggggaaccgcgggagctgcttacaaaggtttgggtgcagggacattatctggaataccgcgaggtcccccactccagccctccctactatgagttcctctggggccctagagcccattctgaatccatcaaaaagaaagtgctggagttccttgctaagctgaataacaccgttcccagctcctttccgtcttggtacaaagatgccctcaaggacgtggaggaacgggtccaggctacaattgacaccgccgatgacgcgacggtgatggccagcgaatccctgtctgtcatgagctccaatgtgagcttctctgattga

SEQ ID NO: 2393 - protein, 957 aa, synthetic construct
  REGION 1..957: note = MAGE-E1_(MAGE1)__Homo_sapiens__Q9HCI5
MSLVSQNSRRRRRRVAKATAHNSSWGEMQAPNAPGLPADVPGSDVPQGPSDSQILQGLCASEGPSTSVLPTSAEGPSTFVPPTISEASSASGQPTISEGPGTSVLPTPSEGLSTSGPPTISKGLCTSVTLAASEGRNTSRPPTSSEEPSTSVPPTASEVPSTSLPPTPGEGTSTSVPPTAYEGPSTSVVPTPDEGPSTSVLPTPGEGPGTSVPLAATEGLSTSVQATPDEGPSTSVPPTATEGLSTPVPPTRDEGPSTSVPATPGEGPSTSVLPAASDGQSISLVPTRGKGSSTSVPPTATEGLSTSVQPTAGEGSSTSVPPTPGGGLSTSVPPTATEELSTSVPPTPGEGPSTSVLPIPGEGLSTSVPPTASDGSDTSVPPTPGEGASTLVQPTAPDGPGSSVLPNPGEGPSTLFSSSASVDRNPSKCSLVLPSPRVTKASVDSDSEGPKGAEGPIEFEVLRDCESPNSISIMGLNTSRVAITLKPQDPMEQNVAELLQFLLVKDQSKYPIRESEMREYIVKEYRNQFPEILRRAAAHLECIFRFELRELDPEAHTYILLNKLGPVPFEGLEESPNGPKMGLLMMILGQIFLNGNQAKEAEIWEMLWRMGVQRERRLSIFGNPKRLLSVEFVWQRYLDYRPVTDCKPVEYEFFWGPRSHLETTKMKILKFMAKIYNKDPMDWPEKYNEALEEDAARAFAEGWQALPHFRRPFFEEAAAEVPSPDSEVSSYSSKYAPHSWPESRLESKARKLVQLFLLMDSTKLPIPKKGILYYIGRECSKVFPDLLNRAARTLNHVYGTELVVLDPRNHSYTLYNRREMEETEEIVDSPNRPGNNFLMQVLSFIFIMGNHARESAVWAFLRGLGVQAGRKHVITCRYLSQRYIDSLRVPDSDPVQYEFVWGPRARLETSKMKALRYVARIHRKEPQDWPQQYREAMEDEANRADVGHRQIFVHNFR

SEQ ID NO: 2394 - RNA, 2874 nt, synthetic construct
  misc_feature 1..2874: note = MAGE-E1_(MAGE1)__Homo_sapiens__AAM08354
  source 1..2874: mol_type = other RNA
atgtctctggtaagccagaattcgcgccgccgccgccgccgcgttgcaaaggctactgcgcacaacagcagctggggcgaaatgcaggcccctaatgcccccggtctccccgctgatgtgccaggctcagacgtcccccagggtcccagcgattcccagatcctccagggcctctgcgcctctgagggcccaagcacctccgttctgcccacctccgctgagggcccaagcacctttgtgccgcccaccatctctgaggcctcaagcgcctccgggcagcccaccatctctgagggacctggcacctccgtgctgcccacccccagtgagggcctaagcacctccgggcctcccaccatctctaaggggctgtgcacctctgtgacgcttgccgcctctgagggccggaacacctccaggccgcccacttcctctgaggaacctagcacctccgtgccgcccaccgcctctgaggtaccgagcacctccctgccgcccacccctggtgagggaacgagcacctccgtgccgcccacagcctatgagggaccaagcacctccgtggtgcccacccctgatgagggaccaagcacctccgtgctgcctacacctggtgagggaccaggcacctccgtgccgctcgccgccactgagggcctgagcacctccgtgcaggccactcctgatgagggaccgagcacctccgtgccgcccaccgccactgagggcctaagcacccccgtgccacccacccgtgatgagggaccgagcacctccgtgccggccactcctggtgagggaccgagcacctccgtgctgcccgccgcctctgacggacaaagcatctccttggtgcccacccgcggtaagggatcaagcacctccgtgccccccaccgccaccgagggcctgagcacctccgtgcagcccactgctggtgagggatcgagcacctccgtgccgcccacccctggtgggggactgagcacctccgtgccgcccaccgccactgaggagttgagcacctccgtgccgcccactcccggtgagggaccaagcacttccgtactgccaatccccggtgagggactgagcacctctgtgccgcccaccgcctctgatggatcggacacctccgtgccgcccactcctggtgagggcgcaagcaccttagtgcagcccaccgcccctgacggaccgggaagctccgtgctgcctaaccctggtgagggcccgagcacattgtttagctctagtgcttctgtggaccggaacccctccaagtgttcccttgttttgccaagccctagggtaaccaaggcctccgtggactcagattctgagggtcctaagggtgcagaaggccctatagaattcgaggtcctgagagactgtgagagccccaactccattagtattatgggcctcaatacttcccgggttgcaattaccctgaagccccaagaccctatggaacagaacgtagctgagctgttgcagttcctgctggtgaaggatcagagcaagtaccctatccgggagtctgaaatgcgggaatatattgttaaagaatatcgcaaccagtttcctgagatactcaggcgagcagcagcccacctggagtgcatttttaggtttgaattgagagaacttgaccctgaggcacacacctacattctgttaaacaaactgggacctgtgccctttgaagggttagaagagagcccaaatgggccaaagatgggcctcctgatgatgattctaggccaaatattcctgaatggcaaccaagccaaggaggctgagatttgggaaatgctctggaggatgggggtgcagcgggaaaggaggctttccatttttgggaacccaaagagacttctgtctgtggagtttgtatggcagcgttacttagactacaggccagtaactgactgtaaaccagtggagtatgagtttttctggggcccaagatcccacctagaaaccaccaagatgaaaattctgaagttcatggcgaaaatatataacaaagatcctatggattggccagagaaatacaacgaagctctggaagaagatgctgccagagcctttgctgagggttggcaggctctccctcactttaggaggcccttttttgaggaagctgctgcagaggtaccatcccctgattcagaggtttccagctattcctcaaaatatgccccacattcatggcctgagtcaagattggagagcaaggcaaggaagctggtgcagttatttctgcttatggattcaactaagctgcctataccaaagaaaggaattctgtactacattggccgagagtgcagcaaagtgttccctgacctcctgaatcgtgctgcccgcaccctgaaccatgtctatgggacagaactagtggtacttgatcccaggaatcactcctatactctgtacaaccgaagggagatggaagaaactgaggagatcgtagacagtccaaacaggcctggcaacaactttttgatgcaggtcctaagcttcatctttattatgggcaaccatgccagggagtctgcagtctgggcctttctgcggggcttaggggttcaagctgggagaaagcatgtgattacctgcagatacttgagtcagcgctatatagacagtttacgggttcctgacagtgatccagtgcaatatgagtttgtatggggtcctagagcccgtttggaaacctctaagatgaaagccttgcgatatgtggccagaatccacagaaaggaaccacaggactggccacagcagtacagggaggcaatggaagatgaggccaatagagctgatgttgggcacaggcaaatctttgttcacaacttcaggtag

SEQ ID NO: 2395 - RNA, 2874 nt, synthetic construct
  misc_feature 1..2874: note = derived and/or modified sequence opt1 fromMAGE-E1_(MAGE1)__Homo_sapiens__AAM08354
  source 1..2874: mol_type = other RNA
atgagcctggtgtcccagaacagccgccggcgccggcgccgggtcgccaaggccaccgcgcacaactccagctggggcgagatgcaggcccccaacgccccggggctccccgccgacgtgcccggctccgacgtgccccaggggccgagcgactcccagatcctgcagggcctgtgcgccagcgaggggccctccaccagcgtcctccccacgtccgcggagggccccagcaccttcgtgccgcccaccatctccgaggccagctccgccagcggccagcccaccatctccgaggggcccggcacgagcgtgctgccgaccccctccgaggggctgagcaccagcggcccgcccaccatctccaaggggctctgcacgagcgtcaccctggccgcgtccgagggccgcaacaccagccggccgcccacctccagcgaggagccctccacgagcgtgccgcccaccgcctccgaggtgcccagcacctccctgccgcccacccccggcgaggggacgagcacctccgtcccgcccaccgcctacgagggccccagcacctccgtggtgcccacgcccgacgaggggcccagcacctccgtcctccccacccccggcgagggccccgggaccagcgtgcccctggccgccacggagggcctgtccaccagcgtgcaggcgaccccggacgaggggcccagcacctccgtcccgcccacggccaccgagggcctcagcacccccgtgccgcccacccgcgacgaggggccctccacgagcgtgcccgccacccccggcgagggcccctccaccagcgtcctgcccgccgcctccgacgggcagagcatctccctggtgccgacccggggcaaggggagctccacgagcgtgccgcccaccgcgaccgagggcctctccaccagcgtccagcccaccgccggggagggctccagcacgtccgtgccgcccacccccggcgggggcctgagcaccagcgtgccgcccaccgccacggaggagctgtccaccagcgtcccgcccacccccggggagggcccctccaccagcgtgctccccatccccggggagggcctgtccacgagcgtcccgcccaccgcctccgacggcagcgacacctccgtgccgcccacccccggggagggcgccagcacgctggtgcagcccaccgcgcccgacgggcccggctccagcgtcctccccaaccccggcgaggggccctccaccctgttcagctccagcgcctccgtggaccgcaaccccagcaagtgctccctggtgctcccgagcccccgggtcaccaaggccagcgtggactccgacagcgagggccccaagggggccgagggccccatcgagttcgaggtgctgcgcgactgcgagtccccgaacagcatctccatcatggggctgaacacgagccgggtcgccatcaccctcaagccccaggaccccatggagcagaacgtggcggagctgctgcagttcctcctggtgaaggaccagtccaagtaccccatccgcgagagcgagatgcgggagtacatcgtcaaggagtaccgcaaccagttcccggagatcctgcggcgcgccgccgcccacctcgagtgcatcttccggttcgagctgcgcgagctggaccccgaggcgcacacctacatcctcctgaacaagctgggccccgtgcccttcgagggcctcgaggagtccccgaacgggcccaagatgggcctgctgatgatgatcctcgggcagatcttcctgaacggcaaccaggccaaggaggccgagatctgggagatgctgtggcggatgggggtgcagcgcgagcgccggctcagcatcttcggcaaccccaagcgcctgctgtccgtcgagttcgtgtggcagcggtacctcgactaccgcccggtgaccgactgcaagcccgtcgagtacgagttcttctggggcccccggagccacctggagacgaccaagatgaagatcctgaagttcatggccaagatctacaacaaggaccccatggactggccggagaagtacaacgaggccctggaggaggacgcggcccgcgccttcgccgaggggtggcaggccctcccccacttccggcgccccttcttcgaggaggcggccgccgaggtgccctccccggacagcgaggtgtccagctactccagcaagtacgcgccccactcctggcccgagagccggctggagagcaaggcccgcaagctggtccagctgttcctcctgatggactccaccaagctccccatcccgaagaagggcatcctgtactacatcgggcgggagtgcagcaaggtgttccccgacctgctcaaccgcgccgcccggaccctgaaccacgtgtacggcacggagctggtcgtgctcgacccccgcaaccactcctacaccctgtacaaccggcgcgagatggaggagaccgaggagatcgtggacagccccaaccggccggggaacaacttcctgatgcaggtcctctccttcatcttcatcatgggcaaccacgcccgcgagagcgccgtgtgggcgttcctgcggggcctgggggtgcaggccggccgcaagcacgtcatcacgtgccgctacctctcccagcggtacatcgacagcctgcgcgtgcccgactccgaccccgtgcagtacgagttcgtctgggggccccgggcccgcctggagaccagcaagatgaaggccctccggtacgtggcccgcatccaccggaaggagccgcaggactggccccagcagtaccgcgaggcgatggaggacgaggccaaccgggccgacgtgggccaccgccagatcttcgtccacaacttccggtga

SEQ ID NO: 2396 - RNA, 2874 nt, synthetic construct
  misc_feature 1..2874: note = derived and/or modified sequence opt2 fromMAGE-E1_(MAGE1)__Homo_sapiens__AAM08354
  source 1..2874: mol_type = other RNA
atgtccctcgtctcccagaactcccgccgccgccgccgccgcgtcgccaaggccaccgcccacaactcctcctggggcgagatgcaggcccccaacgcccccggcctccccgccgacgtccccggctccgacgtcccccagggcccctccgactcccagatcctccagggcctctgcgcctccgagggcccctccacctccgtcctccccacctccgccgagggcccctccaccttcgtcccccccaccatctccgaggcctcctccgcctccggccagcccaccatctccgagggccccggcacctccgtcctccccaccccctccgagggcctctccacctccggcccccccaccatctccaagggcctctgcacctccgtcaccctcgccgcctccgagggccgcaacacctcccgcccccccacctcctccgaggagccctccacctccgtcccccccaccgcctccgaggtcccctccacctccctcccccccacccccggcgagggcacctccacctccgtcccccccaccgcctacgagggcccctccacctccgtcgtccccacccccgacgagggcccctccacctccgtcctccccacccccggcgagggccccggcacctccgtccccctcgccgccaccgagggcctctccacctccgtccaggccacccccgacgagggcccctccacctccgtcccccccaccgccaccgagggcctctccacccccgtcccccccacccgcgacgagggcccctccacctccgtccccgccacccccggcgagggcccctccacctccgtcctccccgccgcctccgacggccagtccatctccctcgtccccacccgcggcaagggctcctccacctccgtcccccccaccgccaccgagggcctctccacctccgtccagcccaccgccggcgagggctcctccacctccgtcccccccacccccggcggcggcctctccacctccgtcccccccaccgccaccgaggagctctccacctccgtcccccccacccccggcgagggcccctccacctccgtcctccccatccccggcgagggcctctccacctccgtcccccccaccgcctccgacggctccgacacctccgtcccccccacccccggcgagggcgcctccaccctcgtccagcccaccgcccccgacggccccggctcctccgtcctccccaaccccggcgagggcccctccaccctcttctcctcctccgcctccgtcgaccgcaacccctccaagtgctccctcgtcctcccctccccccgcgtcaccaaggcctccgtcgactccgactccgagggccccaagggcgccgagggccccatcgagttcgaggtcctccgcgactgcgagtcccccaactccatctccatcatgggcctcaacacctcccgcgtcgccatcaccctcaagccccaggaccccatggagcagaacgtcgccgagctcctccagttcctcctcgtcaaggaccagtccaagtaccccatccgcgagtccgagatgcgcgagtacatcgtcaaggagtaccgcaaccagttccccgagatcctccgccgcgccgccgcccacctcgagtgcatcttccgcttcgagctccgcgagctcgaccccgaggcccacacctacatcctcctcaacaagctcggccccgtccccttcgagggcctcgaggagtcccccaacggccccaagatgggcctcctcatgatgatcctcggccagatcttcctcaacggcaaccaggccaaggaggccgagatctgggagatgctctggcgcatgggcgtccagcgcgagcgccgcctctccatcttcggcaaccccaagcgcctcctctccgtcgagttcgtctggcagcgctacctcgactaccgccccgtcaccgactgcaagcccgtcgagtacgagttcttctggggcccccgctcccacctcgagaccaccaagatgaagatcctcaagttcatggccaagatctacaacaaggaccccatggactggcccgagaagtacaacgaggccctcgaggaggacgccgcccgcgccttcgccgagggctggcaggccctcccccacttccgccgccccttcttcgaggaggccgccgccgaggtcccctcccccgactccgaggtctcctcctactcctccaagtacgccccccactcctggcccgagtcccgcctcgagtccaaggcccgcaagctcgtccagctcttcctcctcatggactccaccaagctccccatccccaagaagggcatcctctactacatcggccgcgagtgctccaaggtcttccccgacctcctcaaccgcgccgcccgcaccctcaaccacgtctacggcaccgagctcgtcgtcctcgacccccgcaaccactcctacaccctctacaaccgccgcgagatggaggagaccgaggagatcgtcgactcccccaaccgccccggcaacaacttcctcatgcaggtcctctccttcatcttcatcatgggcaaccacgcccgcgagtccgccgtctgggccttcctccgcggcctcggcgtccaggccggccgcaagcacgtcatcacctgccgctacctctcccagcgctacatcgactccctccgcgtccccgactccgaccccgtccagtacgagttcgtctggggcccccgcgcccgcctcgagacctccaagatgaaggccctccgctacgtcgcccgcatccaccgcaaggagccccaggactggccccagcagtaccgcgaggccatggaggacgaggccaaccgcgccgacgtcggccaccgccagatcttcgtccacaacttccgctga

SEQ ID NO: 2397 - RNA, 2874 nt, synthetic construct
  misc_feature 1..2874: note = derived and/or modified sequence opt3 fromMAGE-E1_(MAGE1)__Homo_sapiens__AAM08354
  source 1..2874: mol_type = other RNA
atgagcctggtgtcccagaactctagaaggcggcgccgacgtgtcgccaaggctaccgcacacaattcaagttggggcgagatgcaagcccccaacgcgcctgggctcccagctgacgttccgggaagcgatgtgccccagggtccttccgactctcagatccttcagggcctgtgcgcctcggaagggccatcaacaagcgtattgcccacgagtgcagagggaccttccactttcgtgccacccaccatttctgaagccagctccgcttcaggccaacctacaataagtgagggtccagggactagcgtcttaccgaccccctctgaaggactgtccacatcaggccctccaaccatcagcaaaggcctatgtacaagtgtgactctcgcagcctctgaggggagaaatacctccaggccccctacgagctcggaggaaccatctacttccgttcccccgaccgcttcagaggtgcctagtacaagcctgcccccaactcctggagaaggtacctccacatctgtccctccaaccgcctacgagggccccagcacgtcagtggtacctactccagatgaggggccgagtacatccgttcttcccacccctggagaaggcccaggtactagcgtgcccctggcggcaacagaggggttgtctacctcagtccaggccacgcctgacgaaggaccaagtaccagcgtgcccccgacagctactgagggcctctccacccctgtgccacccacacgggatgaaggcccttctacttcggtccccgccaccccaggggagggacctagcacatccgttctgcccgcagcttcagacggtcagagtatttctctggtgccaacccgcggcaaggggagctccacttcagtaccgcctacggccacagagggactcagcacctctgtgcagcccactgcgggcgaaggttccagtaccagcgtcccacccacacctgggggcggattatctacctccgtgccacccactgccacagaggaactgtcaacgagtgttcctccgaccccaggcgaggggcccagcacttcggtgcttcctatcccaggagaaggtttgtccacatctgtgccccctaccgcaagcgatggctcagacacaagtgtcccgcccactccaggggagggagcttccaccctggtacaacctacggcccccgatggcccaggttctagcgttctacctaaccccggggagggcccatccaccctcttttcaagcagtgcttctgtggacagaaatccgtccaaatgcagcctggtccttccttcgcccagggtgacaaaggcctcagtcgattctgacagtgaaggaccaaaaggcgcagaggggcccattgagttcgaagtgctgcgggattgtgaatcccctaacagcatctctataatgggattgaatactagccgcgttgccatcaccctcaagccacaggaccccatggagcagaacgtggctgagctgttacagtttctgctcgtaaaggaccaatccaaatatcctattcgagaatcagagatgagagaatacatcgtcaaggagtataggaatcagttcccggagattcttcggcgtgcggcagcccatctggaatgcatctttcgcttcgagttgagagaactagatccagaggctcacacatacatactgctcaacaaactgggtcccgtgccttttgaaggccttgaggagagtcccaatgggccaaagatgggactgttgatgatgattctcggccagatcttcctgaacggtaatcaagccaaagaagcagagatttgggaaatgttatggaggatgggggttcagcgggagcgacgcctgagcatctttggcaaccctaagagactactctctgtggagttcgtctggcagaggtatctggactaccggcccgtgactgattgtaagccagtagaatatgagtttttctggggacctcgctcccatcttgaaaccacgaaaatgaagatcttgaaatttatggccaagatttacaataaagacccgatggattggcccgagaagtacaacgaagctctggaggaagacgccgcaagagcgttcgctgagggctggcaggccctcccacacttcaggcgtccctttttcgaggaagcagccgctgaggtgccctcaccagatagtgaagttagctcctattcttcgaaatacgcccctcatagctggcccgagtcacggctggagtccaaggcacgaaaacttgtccaactgtttttgctcatggacagtacaaagctgccgataccaaagaaagggatcttatattacattggaagagaatgctctaaggtgttccctgatctgctaaacagggctgcccgcaccctcaatcacgtgtatggcactgagctggtcgttcttgacccccggaaccacagctacacattgtataatagaagggaaatggaggaaaccgaggagatcgtggattccccaaaccgccccggtaataactttctgatgcaagtgctctcattcatatttattatggggaatcatgcgcgagaatctgccgtatgggctttcctgcggggattaggcgtccaggcaggtcgtaaacacgtgatcacttgtagatacctgagccagaggtacatcgacagtcttcgcgttcctgactccgatccggtgcagtatgagtttgtctggggcccccgggccagattggaaaccagcaagatgaaggctctcaggtacgtggcccgcattcatcgaaaagagccacaggactggcctcagcagtatcgggaagcaatggaggatgaggcgaacagagccgacgttgggcacaggcaaatcttcgtgcacaattttcgttga

SEQ ID NO: 2398 - RNA, 2874 nt, synthetic construct
  misc_feature 1..2874: note = derived and/or modified sequence opt4 fromMAGE-E1_(MAGE1)__Homo_sapiens__AAM08354
  source 1..2874: mol_type = other RNA
atgagcctggtgagccagaacagcagaagaagaagaagaagagtggccaaggccaccgcccacaacagcagctggggcgagatgcaggcccccaacgcccccggcctgcccgccgacgtgcccggcagcgacgtgccccagggccccagcgacagccagatcctgcagggcctgtgcgccagcgagggccccagcaccagcgtgctgcccaccagcgccgagggccccagcaccttcgtgccccccaccatcagcgaggccagcagcgccagcggccagcccaccatcagcgagggccccggcaccagcgtgctgcccacccccagcgagggcctgagcaccagcggcccccccaccatcagcaagggcctgtgcaccagcgtgaccctggccgccagcgagggcagaaacaccagcagaccccccaccagcagcgaggagcccagcaccagcgtgccccccaccgccagcgaggtgcccagcaccagcctgccccccacccccggcgagggcaccagcaccagcgtgccccccaccgcctacgagggccccagcaccagcgtggtgcccacccccgacgagggccccagcaccagcgtgctgcccacccccggcgagggccccggcaccagcgtgcccctggccgccaccgagggcctgagcaccagcgtgcaggccacccccgacgagggccccagcaccagcgtgccccccaccgccaccgagggcctgagcacccccgtgccccccaccagagacgagggccccagcaccagcgtgcccgccacccccggcgagggccccagcaccagcgtgctgcccgccgccagcgacggccagagcatcagcctggtgcccaccagaggcaagggcagcagcaccagcgtgccccccaccgccaccgagggcctgagcaccagcgtgcagcccaccgccggcgagggcagcagcaccagcgtgccccccacccccggcggcggcctgagcaccagcgtgccccccaccgccaccgaggagctgagcaccagcgtgccccccacccccggcgagggccccagcaccagcgtgctgcccatccccggcgagggcctgagcaccagcgtgccccccaccgccagcgacggcagcgacaccagcgtgccccccacccccggcgagggcgccagcaccctggtgcagcccaccgcccccgacggccccggcagcagcgtgctgcccaaccccggcgagggccccagcaccctgttcagcagcagcgccagcgtggacagaaaccccagcaagtgcagcctggtgctgcccagccccagagtgaccaaggccagcgtggacagcgacagcgagggccccaagggcgccgagggccccatcgagttcgaggtgctgagagactgcgagagccccaacagcatcagcatcatgggcctgaacaccagcagagtggccatcaccctgaagccccaggaccccatggagcagaacgtggccgagctgctgcagttcctgctggtgaaggaccagagcaagtaccccatcagagagagcgagatgagagagtacatcgtgaaggagtacagaaaccagttccccgagatcctgagaagagccgccgcccacctggagtgcatcttcagattcgagctgagagagctggaccccgaggcccacacctacatcctgctgaacaagctgggccccgtgcccttcgagggcctggaggagagccccaacggccccaagatgggcctgctgatgatgatcctgggccagatcttcctgaacggcaaccaggccaaggaggccgagatctgggagatgctgtggagaatgggcgtgcagagagagagaagactgagcatcttcggcaaccccaagagactgctgagcgtggagttcgtgtggcagagatacctggactacagacccgtgaccgactgcaagcccgtggagtacgagttcttctggggccccagaagccacctggagaccaccaagatgaagatcctgaagttcatggccaagatctacaacaaggaccccatggactggcccgagaagtacaacgaggccctggaggaggacgccgccagagccttcgccgagggctggcaggccctgccccacttcagaagacccttcttcgaggaggccgccgccgaggtgcccagccccgacagcgaggtgagcagctacagcagcaagtacgccccccacagctggcccgagagcagactggagagcaaggccagaaagctggtgcagctgttcctgctgatggacagcaccaagctgcccatccccaagaagggcatcctgtactacatcggcagagagtgcagcaaggtgttccccgacctgctgaacagagccgccagaaccctgaaccacgtgtacggcaccgagctggtggtgctggaccccagaaaccacagctacaccctgtacaacagaagagagatggaggagaccgaggagatcgtggacagccccaacagacccggcaacaacttcctgatgcaggtgctgagcttcatcttcatcatgggcaaccacgccagagagagcgccgtgtgggccttcctgagaggcctgggcgtgcaggccggcagaaagcacgtgatcacctgcagatacctgagccagagatacatcgacagcctgagagtgcccgacagcgaccccgtgcagtacgagttcgtgtggggccccagagccagactggagaccagcaagatgaaggccctgagatacgtggccagaatccacagaaaggagccccaggactggccccagcagtacagagaggccatggaggacgaggccaacagagccgacgtgggccacagacagatcttcgtgcacaacttcagatga

SEQ ID NO: 2399 - RNA, 2874 nt, synthetic construct
  misc_feature 1..2874: note = derived and/or modified sequence opt5 fromMAGE-E1_(MAGE1)__Homo_sapiens__AAM08354
  source 1..2874: mol_type = other RNA
atgagcctggtgtcccagaactctagacggcgcagacggcgcgtcgccaaggctaccgcccacaatagctcctggggcgagatgcaagcgcccaacgctcctgggctcccggccgacgttcccggatctgatgtgcctcagggccccagcgactcccagatcctgcaggggctttgcgcctctgaaggacctagcacatccgtgctgcccacgagcgctgagggcccttctaccttcgtcccgcccacaatttccgaagccagctctgcttccgggcaacctaccatcagcgagggacccggcacatctgtgctccctaccccctccgaaggcctgagcacatccgggccgcctaccatttctaaaggactttgtacgagcgttaccctggccgcgtccgagggcagaaatacaagccggccccctacctcttccgaggaacccagcacatctgtgccccctaccgccagcgaggtcccgtccacgtctctgccccctacacccggggaaggaaccagcacatccgtgcctcccaccgcttacgagggcccgagcacctctgttgtgcctacacccgatgaggggccttccacgagcgtcctccccacccctggagaaggccccggcacatctgtgccgctggccgctaccgaggggctctccacaagcgtgcaggccacccctgacgaaggaccctccacgtctgtgccccctacagcgaccgagggcctgagcaccccggttccccctacacgcgatgaagggccctccacctctgtgcctgccacacccggagagggccctagcacgtccgtgcttcccgctgccagcgacgggcagtctatctccctggtcccgaccagaggaaagggcagctctacatccgtgcctcccaccgctacagagggcctcagcacctctgttcagcctacggccggggaaggaagctccaccagcgtgcccccgacacctggcgggggactgtctacctccgtgccccctacagccaccgaggaacttagcacgtccgtccctcccacacccggcgaggggccgtctaccagcgttctgcccattcctggcgaaggactctccacatctgtgccccctaccgctagcgatggctccgacacctctgtgccccctacaccgggggagggagcgagcacgctggtccaacccaccgcccctgatggccccgggtccagcgtcctgcctaaccccggagagggcccgtctacactcttttccagctctgcttccgtggaccggaatcctagcaaatgctctctggttcttcccagcccccgcgtgaccaaggcctccgtcgattccgacagcgaagggcctaaaggcgccgagggacccatcgagttcgaagtgctgagagattgtgaatctcctaacagcatctccattatgggcctcaatacatctcgggttgctatcaccctgaagccgcaggaccccatggagcagaacgtggccgagcttctgcagtttctcctggtcaaggaccaaagcaaatatcctattcgcgaatccgagatgagagaatacatcgtgaaggagtatcggaatcagttccccgagattctgcgcagagcggctgcccatctcgaatgcatctttcggttcgagctgagagaacttgatcctgaggcccacacgtacattctgctcaacaaactggggcccgtgccgtttgaaggacttgaggagtctcctaatggccccaagatggggctgctcatgatgatcctgggacagatcttcctgaacggcaatcaagctaaagaagccgagatttgggaaatgctctggcgcatgggggttcagcgggagagacgcctgagcatctttggcaaccctaagcggcttctgtccgtcgagttcgtgtggcagagatatctcgactaccgccccgtgacagattgtaagcctgtcgaatatgagtttttctggggaccccggtctcatctggaaaccaccaaaatgaagattctgaaatttatggctaagatctacaataaagacccgatggattggcctgagaagtacaacgaagcccttgaggaagacgcggccagagctttcgccgagggctggcaggctctcccccacttccgccggccctttttcgaggaagccgcggccgaggtgcctagcccggattccgaagttagctcttattccagcaaatacgctccccattcttggcctgagtccagactggagagcaaggcccgcaagctggtgcaactctttctgcttatggactccacaaaactgcccattcctaagaaagggatcctctattacatcggacgggaatgctctaaggtcttccccgatctgctgaacagagctgcccggacccttaatcacgtgtatggcacagagctcgttgtgctggaccctcgcaaccacagctacacgctgtataatagacgggaaatggaggaaaccgaggagattgtcgattccccgaacagacccgggaataactttctcatgcaggtcctgagcttcatctttattatgggaaatcatgcccgcgaatctgctgtttgggcgttccttcggggcctgggggtgcaggccggcagaaaacacgtcatcacatgtcgctacctctcccagagatacattgacagcctgcgggtgcctgactctgatcccgtgcaatatgagtttgtctggggacctcgcgctagactggaaaccagcaagatgaaggcccttcggtacgttgcccgcatccatagaaaagagccccaggactggccgcagcagtatcgggaagctatggaggatgaggccaaccgcgcggacgtgggccacagacaaatcttcgtgcacaattttcggtga

SEQ ID NO: 2400 - protein, 523 aa, synthetic construct
  REGION 1..523: note = MAGE-E2__Homo_sapiens__Q8TD90
MSLVSQNARHCSAEITADYGDGRGEIQATNASGSPTSMLVVDAPQCPQAPINSQCVNTSQAVQDPNDLEVLIDEQSRRLGALRVHDPLEDRSIALVNFMRMKSQTEGSIQQSEMLEFLREYSDQFPEILRRASAHLDQVFGLNLRVIDPQADTYNLVSKRGFQITDRIAESLDMPKASLLALVLGHILLNGNRAREASIWDLLLKVDMWDKPQRINNLFGNTRNLLTTDFVCMRFLEYWPVYGTNPLEFEFLWGSRAHREITKMEALKFVSDAHDEEPWSWPEEYNKALEGDKTKERSLTAGLEFWSEDTMNDKANDLVQLAISVTEEMLPIHQDELLAHTGKEFEDVFPNILNRATLILDMFYGLSLIEVDTSEHIYLLVQQPESEEEQVMLESLGRPTQEYVMPILGLIFLMGNRVKEANVWNLLRRFSVDVGRKHSITRKLMRQRYLECRPLSYSNPVEYELLWGPRAHHETIKMKVLEYMARLYRKRPQNWPEQYREAVEDEEARAKSEATIMFFLDPT

SEQ ID NO: 2401 - RNA, 1572 nt, synthetic construct
  misc_feature 1..1572: note = MAGE-E2__Homo_sapiens__AAH93964
  source 1..1572: mol_type = other RNA
atgtctctggtaagccagaatgcacgccactgtagcgcagagatcactgcagattacggcgacggcagaggtgaaatacaagctactaacgcctccgggtcccccacctccatgctagtcgttgatgccccccagtgccctcaggcgccaatcaactctcagtgtgtcaacacttcccaggccgttcaggacccgaatgacctggaggtcctgatcgacgagcagtccagacgtttgggggcgctcagggtccatgaccctctagaagacaggtcgattgctttggtgaatttcatgagaatgaaaagccagacggaggggtctatccagcagtccgagatgctggagtttctcagagagtactcagatcagttccctgagatcctcagacgagcctcagctcacctggaccaggtctttgggttgaacctgagagttattgatcctcaggctgacacctacaatttagtcagcaaacggggtttccagatcaccgataggatagcggagtccctggacatgccaaaagcaagtctcctggccctagtcctaggccacatcctcttgaatgggaaccgagcaagagaggcctccatttgggacttgctgctaaaagttgatatgtgggataagcctcagaggatcaacaacctctttgggaacacaaggaacctcctcactactgactttgtgtgcatgcgattcttggagtactggccggtgtatggcactaatccccttgagtttgagttcttgtggggctctagagcccacagggaaatcacaaagatggaagccctgaagtttgtgtcagatgcccatgatgaagaaccctggagctggccagaagaatataataaggccctggaaggtgacaaaaccaaagaaagaagcctgactgctggcttagagttctggtcggaggacactatgaatgataaggcaaatgatttggtccagttggctattagtgtcactgaggagatgctgcctatacatcaggatgagctattggctcacactggcaaagaatttgaggatgtgttcccaaatatcctcaatagagctactctaattcttgatatgttctatgggttgtctctgattgaggttgataccagtgagcacatctacctccttgtccagcaaccagaatcagaggaagagcaagtgatgctagagagcctggggagacccactcaagaatatgtaatgccaatcctaggtttgatcttcctgatgggcaaccgtgtcaaagaggccaatgtctggaacttgcttcgaagatttagtgtggatgtagggagaaagcattccatcacccgtaagcttatgagacagcgctatctggaatgcaggccactgtcctactctaatccagttgaatatgagcttctatggggtcctcgagctcaccatgaaaccatcaaaatgaaagtcttggagtacatggccaggctctacagaaagcgaccacagaactggccagaacaatatagggaggctgtggaagatgaggaggccagagccaaatctgaggcaactatcatgtttttccttgaccccacgtga

SEQ ID NO: 2402 - RNA, 1572 nt, synthetic construct
  misc_feature 1..1572: note = derived and/or modified sequence opt1 fromMAGE-E2__Homo_sapiens__AAH93964
  source 1..1572: mol_type = other RNA
atgagcctggtgtcccagaacgcccgccactgcagcgccgagatcaccgcggactacggcgacgggcggggcgagatccaggccaccaacgcctccgggagccccacgtccatgctcgtcgtggacgccccgcagtgcccccaggcccccatcaacagccagtgcgtgaacacctcccaggcggtccaggaccccaacgacctggaggtgctgatcgacgagcagagccgccggctcggcgccctgcgcgtgcacgacccgctggaggaccggtccatcgccctcgtcaacttcatgcgcatgaagtcccagaccgaggggagcatccagcagagcgagatgctggagttcctgcgggagtactccgaccagttccccgagatcctccgccgggccagcgcgcacctggaccaggtgttcggcctgaacctccgcgtgatcgacccccaggccgacacctacaacctggtctccaagcggggcttccagatcacggaccgcatcgccgagagcctggacatgcccaaggcctccctcctggccctggtgctcgggcacatcctgctgaacggcaaccgggcgcgcgaggccagcatctgggacctcctgctgaaggtggacatgtgggacaagccgcagcggatcaacaacctcttcgggaacacccgcaacctgctgaccaccgacttcgtctgcatgcggttcctcgagtactggcccgtgtacggcacgaaccccctggagttcgagttcctgtgggggtcccgcgcccaccgggagatcaccaagatggaggccctcaagttcgtgagcgacgcccacgacgaggagccctggagctggccggaggagtacaacaaggcgctggagggcgacaagaccaaggagcgctccctgaccgccggcctcgagttctggagcgaggacacgatgaacgacaaggccaacgacctggtccagctggccatctccgtgaccgaggagatgctccccatccaccaggacgagctgctggcccacaccgggaaggagttcgaggacgtgttccccaacatcctcaaccgggcgaccctgatcctggacatgttctacggcctcagcctgatcgaggtcgacacgtccgagcacatctacctgctcgtgcagcagcccgagagcgaggaggagcaggtcatgctggagtccctggggcgcccgacccaggagtacgtgatgcccatcctcggcctgatcttcctgatgggcaaccgcgtgaaggaggccaacgtgtggaacctgctccggcgcttcagcgtcgacgtggggcggaagcactccatcacccgcaagctgatgcggcagcgctacctggagtgccggcccctcagctactccaaccccgtcgagtacgagctgctgtggggcccgcgcgcccaccacgagaccatcaagatgaaggtgctcgagtacatggcccggctgtaccgcaagcggccccagaactggcccgagcagtaccgcgaggccgtggaggacgaggaggcgcgggccaagagcgaggccacgatcatgttcttcctggaccccacctga

SEQ ID NO: 2403 - RNA, 1572 nt, synthetic construct
  misc_feature 1..1572: note = derived and/or modified sequence opt2 fromMAGE-E2__Homo_sapiens__AAH93964
  source 1..1572: mol_type = other RNA
atgtccctcgtctcccagaacgcccgccactgctccgccgagatcaccgccgactacggcgacggccgcggcgagatccaggccaccaacgcctccggctcccccacctccatgctcgtcgtcgacgccccccagtgcccccaggcccccatcaactcccagtgcgtcaacacctcccaggccgtccaggaccccaacgacctcgaggtcctcatcgacgagcagtcccgccgcctcggcgccctccgcgtccacgaccccctcgaggaccgctccatcgccctcgtcaacttcatgcgcatgaagtcccagaccgagggctccatccagcagtccgagatgctcgagttcctccgcgagtactccgaccagttccccgagatcctccgccgcgcctccgcccacctcgaccaggtcttcggcctcaacctccgcgtcatcgacccccaggccgacacctacaacctcgtctccaagcgcggcttccagatcaccgaccgcatcgccgagtccctcgacatgcccaaggcctccctcctcgccctcgtcctcggccacatcctcctcaacggcaaccgcgcccgcgaggcctccatctgggacctcctcctcaaggtcgacatgtgggacaagccccagcgcatcaacaacctcttcggcaacacccgcaacctcctcaccaccgacttcgtctgcatgcgcttcctcgagtactggcccgtctacggcaccaaccccctcgagttcgagttcctctggggctcccgcgcccaccgcgagatcaccaagatggaggccctcaagttcgtctccgacgcccacgacgaggagccctggtcctggcccgaggagtacaacaaggccctcgagggcgacaagaccaaggagcgctccctcaccgccggcctcgagttctggtccgaggacaccatgaacgacaaggccaacgacctcgtccagctcgccatctccgtcaccgaggagatgctccccatccaccaggacgagctcctcgcccacaccggcaaggagttcgaggacgtcttccccaacatcctcaaccgcgccaccctcatcctcgacatgttctacggcctctccctcatcgaggtcgacacctccgagcacatctacctcctcgtccagcagcccgagtccgaggaggagcaggtcatgctcgagtccctcggccgccccacccaggagtacgtcatgcccatcctcggcctcatcttcctcatgggcaaccgcgtcaaggaggccaacgtctggaacctcctccgccgcttctccgtcgacgtcggccgcaagcactccatcacccgcaagctcatgcgccagcgctacctcgagtgccgccccctctcctactccaaccccgtcgagtacgagctcctctggggcccccgcgcccaccacgagaccatcaagatgaaggtcctcgagtacatggcccgcctctaccgcaagcgcccccagaactggcccgagcagtaccgcgaggccgtcgaggacgaggaggcccgcgccaagtccgaggccaccatcatgttcttcctcgaccccacctga

SEQ ID NO: 2404 - RNA, 1572 nt, synthetic construct
  misc_feature 1..1572: note = derived and/or modified sequence opt3 fromMAGE-E2__Homo_sapiens__AAH93964
  source 1..1572: mol_type = other RNA
atgagcctggtgtcccagaacgccagacactgctctgctgagatcaccgcagactacggcgatgggaggggagaaattcaagccacaaatgcgtcaggtagtcccactagcatgctcgtcgttgacgctcctcagtgtccacaggccccgataaactcccagtgcgtgaatacgtctcaagcagtacaggatcccaacgaccttgaggtgctgatcgatgaacagtcgcggcgcttgggcgccttacgagtccatgaccctctggaggatcgttcaattgctctagtgaatttcatgagaatgaaaagccagaccgaagggagtatccaacagtccgagatgctcgagtttctgagggaatattctgaccagttcccagagattcttcggcgcgcaagcgcccacctggatcaggtttttggattgaacctcagagtgatcgacccccaagctgatacatacaatctggtctccaagaggggcttccagataactgaccggatcgccgaatcactggatatgcctaaggcgagtctcttagcactggtgcttggtcatattttgctgaacgggaatcgcgcccgagaggctagcatctgggacctactcctgaaagtagacatgtgggataagccacagagaattaacaatctttttggaaacaccaggaatctgttgacaaccgacttcgtttgtatgcggtttctcgagtattggcccgtgtacggcactaaccctctggagttcgagtttttatggggctctcgtgcccaccgcgaaatcacaaaaatggaggcactgaagttcgtctccgatgctcatgacgaagaaccatggtcatggccggaggaatataataaggccctcgagggggataaaaccaaggaaagaagccttacggcgggactggagttttggagtgaagacactatgaacgataaagccaacgacttggtgcaactagcaatatctgtgaccgaggagatgctgcccattcaccaggatgaactcctggctcacacaggtaaggagttcgaagacgtctttcctaatatccttaacagggccactctgattttggatatgttctacggcctctccctgatcgaggttgacaccagcgaacatatctatttactggtgcagcagccagagtcggaggaggaacaagtaatgctagaatctctcgggcggcccacacaggagtacgtgatgcctattctgggacttatattcttgatgggcaatcgagtcaaagaggctaacgtgtggaatctgctccgcagattttccgttgacgtgggtaggaagcactcaatcacccggaagctgatgcgccagagataccttgaatgcaggccactgagttatagcaaccccgtcgagtacgaattgctctgggggccgcgtgcccatcacgagacgattaaaatgaaggtgctggaatatatggcacggttataccgaaaaagacctcagaattggcccgagcaatatagggaggccgtagaagatgaggaagctcgcgcgaagtccgaggcaactatcatgttctttctggacccaacatga

SEQ ID NO: 2405 - RNA, 1572 nt, synthetic construct
  misc_feature 1..1572: note = derived and/or modified sequence opt4 fromMAGE-E2__Homo_sapiens__AAH93964
  source 1..1572: mol_type = other RNA
atgagcctggtgagccagaacgccagacactgcagcgccgagatcaccgccgactacggcgacggcagaggcgagatccaggccaccaacgccagcggcagccccaccagcatgctggtggtggacgccccccagtgcccccaggcccccatcaacagccagtgcgtgaacaccagccaggccgtgcaggaccccaacgacctggaggtgctgatcgacgagcagagcagaagactgggcgccctgagagtgcacgaccccctggaggacagaagcatcgccctggtgaacttcatgagaatgaagagccagaccgagggcagcatccagcagagcgagatgctggagttcctgagagagtacagcgaccagttccccgagatcctgagaagagccagcgcccacctggaccaggtgttcggcctgaacctgagagtgatcgacccccaggccgacacctacaacctggtgagcaagagaggcttccagatcaccgacagaatcgccgagagcctggacatgcccaaggccagcctgctggccctggtgctgggccacatcctgctgaacggcaacagagccagagaggccagcatctgggacctgctgctgaaggtggacatgtgggacaagccccagagaatcaacaacctgttcggcaacaccagaaacctgctgaccaccgacttcgtgtgcatgagattcctggagtactggcccgtgtacggcaccaaccccctggagttcgagttcctgtggggcagcagagcccacagagagatcaccaagatggaggccctgaagttcgtgagcgacgcccacgacgaggagccctggagctggcccgaggagtacaacaaggccctggagggcgacaagaccaaggagagaagcctgaccgccggcctggagttctggagcgaggacaccatgaacgacaaggccaacgacctggtgcagctggccatcagcgtgaccgaggagatgctgcccatccaccaggacgagctgctggcccacaccggcaaggagttcgaggacgtgttccccaacatcctgaacagagccaccctgatcctggacatgttctacggcctgagcctgatcgaggtggacaccagcgagcacatctacctgctggtgcagcagcccgagagcgaggaggagcaggtgatgctggagagcctgggcagacccacccaggagtacgtgatgcccatcctgggcctgatcttcctgatgggcaacagagtgaaggaggccaacgtgtggaacctgctgagaagattcagcgtggacgtgggcagaaagcacagcatcaccagaaagctgatgagacagagatacctggagtgcagacccctgagctacagcaaccccgtggagtacgagctgctgtggggccccagagcccaccacgagaccatcaagatgaaggtgctggagtacatggccagactgtacagaaagagaccccagaactggcccgagcagtacagagaggccgtggaggacgaggaggccagagccaagagcgaggccaccatcatgttcttcctggaccccacctga

SEQ ID NO: 2406 - RNA, 1572 nt, synthetic construct
  misc_feature 1..1572: note = derived and/or modified sequence opt5 fromMAGE-E2__Homo_sapiens__AAH93964
  source 1..1572: mol_type = other RNA
atgagcctggtgtcccagaacgccagacactgctctgctgagatcaccgccgactacggcgatgggcggggagaaattcaagcgacaaatgctagcggctcccccacgtctatgctcgtcgttgacgcccctcagtgtccgcaggcccccatcaacagccagtgcgtgaatacctcccaagctgtgcaggatcctaacgacctggaggtccttattgatgaacagtctcgcagactgggggccctccgggtgcatgaccccctggaggatcgcagcatcgctcttgttaatttcatgagaatgaagtcccagacagaaggaagcattcaacagtctgagatgctggagtttctccgggaatattccgaccagttccctgagatcctgcgcagagccagcgcgcacctggatcaggtgtttggcctcaacctgcgggtcatcgacccccaagccgatacctacaatcttgtgtctaaacgcgggttccagattacagacagaatcgctgaatccctggatatgcctaaggccagcctcctggctcttgttctgggacatattctcctgaacggcaatcgggcccgcgaggcgtctatctgggacctgctcctgaaagtggacatgtgggataagccgcagagaattaacaatctttttggcaacacccggaatctgctcacaaccgacttcgtctgtatgcgctttctggagtattggcccgtgtacgggacgaaccctcttgagttcgagtttctgtggggatccagagcccaccgggaaatcaccaaaatggaggctctcaagttcgtgagcgatgcccatgacgaagaaccctggtcctggcctgaggaatataataaggctctggagggcgataaaacaaaggaaagatctctgaccgccgggctcgagttttggagcgaagacacaatgaacgataaagccaacgacctggtccaacttgctatttccgttaccgaggagatgctgcccatccaccaggatgaactcctggcgcacacgggaaaggagttcgaagacgtgtttccgaatatccttaaccgcgccacactgattctcgatatgttctacggcctgagcctgatcgaggtggacacctctgaacatatttatctcctggtccagcagcctgagtccgaggaggaacaagtgatgcttgaaagcctggggcggcccacacaggagtacgttatgcctatcctcggactgattttcctgatgggcaatagagtgaaagaggctaacgtctggaatcttctccgccggttttctgtggacgttggcagaaagcacagcatcacccgcaagctgatgcggcagagatacctggaatgccgccccctctcctattctaaccccgtggagtacgaactgctttgggggcctcgggcccatcacgagaccatcaaaatgaaggtcctggaatatatggccagactctaccgcaaacggccgcagaattggcccgagcaatatagagaggctgtggaagatgaggaagcccgggctaagagcgaggcgacaattatgttctttctggaccctacgtga

SEQ ID NO: 2407 - protein, 307 aa, synthetic construct
  REGION 1..307: note = MAGE-F1__Homo_sapiens__Q9HAY2
MLQTPESRGLPVPQAEGEKDGGHDGETRAPTASQERPKEELGAGREEGAAEPALTRKGARALAAKALARRRAYRRLNRTVAELVQFLLVKDKKKSPITRSEMVKYVIGDLKILFPDIIARAAEHLRYVFGFELKQFDRKHHTYILINKLKPLEEEEEEDLGGDGPRLGLLMMILGLIYMRGNSAREAQVWEMLRRLGVQPSKYHFLFGYPKRLIMEDFVQQRYLSYRRVPHTNPPEYEFSWGPRSNLEISKMEVLGFVAKLHKKEPQHWPVQYREALADEADRARAKARAEASMRARASARAGIHLW

SEQ ID NO: 2408 - RNA, 924 nt, synthetic construct
  misc_feature 1..924: note = MAGE-F1__Homo_sapiens__CCDS3269.1
  source 1..924: mol_type = other RNA
atgttgcagacaccagagagcagggggctcccggtcccgcaggccgagggggagaaggatggcggccatgatggtgagacccgggccccgaccgcctcgcaggagcgccccaaggaggagcttggcgccgggagggaggagggggctgcggagcccgccctcacccggaaaggcgcgagggccttggcggccaaagccttggcaaggcgcagggcctaccgccggctgaatcggacggtggcggagttggtgcagttcctcctggtgaaagacaagaagaagagtcccatcacacgctcggagatggtgaaatacgttattggagacttgaagattctgttcccggacatcatcgcaagggccgcagagcatctgcggtatgtctttggttttgagctgaaacagtttgaccgcaagcaccacacttacatcctgatcaacaaactaaaacctctggaggaggaggaggaggaggatctgggaggagatggccccagattgggtctgttaatgatgatcctgggccttatctatatgagaggtaatagcgccagggaggcccaggtctgggagatgctgcgtcggttgggggtgcaaccctcaaagtatcatttcctctttgggtatccgaagaggcttattatggaagattttgtgcagcagcgatatctcagttacaggcgggtgcctcacaccaatccaccagaatatgaattctcttggggtccccgaagcaacctggaaatcagcaagatggaagtcctggggttcgtggccaaactgcataagaaggaaccgcagcactggccagtgcagtaccgtgaggccctagcagacgaggccgacagggccagagccaaggccagagctgaagccagtatgagggccagggccagtgctagggccggcatccacctctggtga

SEQ ID NO: 2409 - RNA, 924 nt, synthetic construct
  misc_feature 1..924: note = derived and/or modified sequence opt1 fromMAGE-F1__Homo_sapiens__CCDS3269.1
  source 1..924: mol_type = other RNA
atgctgcagacccccgagagccgcggcctcccggtgccccaggccgagggggagaaggacggcgggcacgacggcgagacccgggcccccacggcgtcccaggagcgccccaaggaggagctgggggccggccgggaggagggcgccgccgagccggccctgacccgcaagggggcgcgggccctcgccgccaaggcgctggcccgccggcgcgcctaccggcgcctgaaccggaccgtcgccgagctcgtgcagttcctgctggtgaaggacaagaagaagtcccccatcacccgcagcgagatggtcaagtacgtgatcggcgacctcaagatcctgttccccgacatcatcgcccgggcggccgagcacctccgctacgtgttcgggttcgagctgaagcagttcgaccggaagcaccacacgtacatcctgatcaacaagctgaagcccctcgaggaggaggaggaggaggacctgggcggggacggcccgcgcctgggcctcctgatgatgatcctggggctcatctacatgcggggcaacagcgcccgcgaggcccaggtctgggagatgctgcggcgcctgggggtgcagccctccaagtaccacttcctcttcggctaccccaagcggctgatcatggaggacttcgtgcagcagcgctacctgagctaccgccgggtcccccacaccaacccgcccgagtacgagttctcctggggcccccgcagcaacctcgagatctccaagatggaggtgctggggttcgtggccaagctgcacaagaaggagccccagcactggccggtccagtaccgggaggcgctcgccgacgaggccgaccgcgcccgggccaaggcgcgcgccgaggccagcatgcgggcccgcgcctccgcgcgggccggcatccacctgtggtga

SEQ ID NO: 2410 - RNA, 924 nt, synthetic construct
  misc_feature 1..924: note = derived and/or modified sequence opt2 fromMAGE-F1__Homo_sapiens__CCDS3269.1
  source 1..924: mol_type = other RNA
atgctccagacccccgagtcccgcggcctccccgtcccccaggccgagggcgagaaggacggcggccacgacggcgagacccgcgcccccaccgcctcccaggagcgccccaaggaggagctcggcgccggccgcgaggagggcgccgccgagcccgccctcacccgcaagggcgcccgcgccctcgccgccaaggccctcgcccgccgccgcgcctaccgccgcctcaaccgcaccgtcgccgagctcgtccagttcctcctcgtcaaggacaagaagaagtcccccatcacccgctccgagatggtcaagtacgtcatcggcgacctcaagatcctcttccccgacatcatcgcccgcgccgccgagcacctccgctacgtcttcggcttcgagctcaagcagttcgaccgcaagcaccacacctacatcctcatcaacaagctcaagcccctcgaggaggaggaggaggaggacctcggcggcgacggcccccgcctcggcctcctcatgatgatcctcggcctcatctacatgcgcggcaactccgcccgcgaggcccaggtctgggagatgctccgccgcctcggcgtccagccctccaagtaccacttcctcttcggctaccccaagcgcctcatcatggaggacttcgtccagcagcgctacctctcctaccgccgcgtcccccacaccaacccccccgagtacgagttctcctggggcccccgctccaacctcgagatctccaagatggaggtcctcggcttcgtcgccaagctccacaagaaggagccccagcactggcccgtccagtaccgcgaggccctcgccgacgaggccgaccgcgcccgcgccaaggcccgcgccgaggcctccatgcgcgcccgcgcctccgcccgcgccggcatccacctctggtga

SEQ ID NO: 2411 - RNA, 924 nt, synthetic construct
  misc_feature 1..924: note = derived and/or modified sequence opt3 fromMAGE-F1__Homo_sapiens__CCDS3269.1
  source 1..924: mol_type = other RNA
atgctgcagacccccgagagcagaggcctccctgtgccacaagccgaaggggagaaggacggaggtcacgatggcgaaacaagggctccgactgcatcccaggagcggcccaaagaagaacttggggccggacgcgaggaaggcgcggctgagcctgccctgacgcgaaagggtgcacgtgccttggctgcaaaagccttagctagaaggcgggcctaccgcagactgaacaggaccgtcgcggagctagttcagttcctcctggtgaaggacaaaaagaagtctccaatcacacggtcagagatggtaaaatatgtgattggggatcttaagatactgtttcccgacatcattgcacgcgccgctgagcatttgcgatacgtcttcggatttgaactcaaacagttcgatagaaagcaccatacttatatcctgattaataaactgaagcctctcgaggaagaggaagaggaggacttaggcggcgatgggccaaggctgggacttttgatgatgatcctgggtctaatatacatgcggggcaacagtgcccgtgaagcacaagtgtgggagatgctccgcagactgggggttcagcccagcaagtatcactttcttttcggataccctaaaaggctgatcatggaagactttgtgcagcagcggtatttgtcctaccgacgcgtcccacataccaatccgcccgagtacgagttctcttggggccctagatcgaacctcgaaatttcaaagatggaggtgctgggttttgtagctaaattacacaagaaagaaccacaacactggcccgttcagtatagggaggccctggcggatgaagccgaccgggcacgcgctaaggccagagctgaggccagcatgagggcacgtgccagtgctcgggcggggatccatctctggtga

SEQ ID NO: 2412 - RNA, 924 nt, synthetic construct
  misc_feature 1..924: note = derived and/or modified sequence opt4 fromMAGE-F1__Homo_sapiens__CCDS3269.1
  source 1..924: mol_type = other RNA
atgctgcagacccccgagagcagaggcctgcccgtgccccaggccgagggcgagaaggacggcggccacgacggcgagaccagagcccccaccgccagccaggagagacccaaggaggagctgggcgccggcagagaggagggcgccgccgagcccgccctgaccagaaagggcgccagagccctggccgccaaggccctggccagaagaagagcctacagaagactgaacagaaccgtggccgagctggtgcagttcctgctggtgaaggacaagaagaagagccccatcaccagaagcgagatggtgaagtacgtgatcggcgacctgaagatcctgttccccgacatcatcgccagagccgccgagcacctgagatacgtgttcggcttcgagctgaagcagttcgacagaaagcaccacacctacatcctgatcaacaagctgaagcccctggaggaggaggaggaggaggacctgggcggcgacggccccagactgggcctgctgatgatgatcctgggcctgatctacatgagaggcaacagcgccagagaggcccaggtgtgggagatgctgagaagactgggcgtgcagcccagcaagtaccacttcctgttcggctaccccaagagactgatcatggaggacttcgtgcagcagagatacctgagctacagaagagtgccccacaccaacccccccgagtacgagttcagctggggccccagaagcaacctggagatcagcaagatggaggtgctgggcttcgtggccaagctgcacaagaaggagccccagcactggcccgtgcagtacagagaggccctggccgacgaggccgacagagccagagccaaggccagagccgaggccagcatgagagccagagccagcgccagagccggcatccacctgtggtga

SEQ ID NO: 2413 - RNA, 924 nt, synthetic construct
  misc_feature 1..924: note = derived and/or modified sequence opt5 fromMAGE-F1__Homo_sapiens__CCDS3269.1
  source 1..924: mol_type = other RNA
atgctgcagacccccgagagcagaggcctccctgtgccgcaagccgaaggggagaaggacggaggccacgatggggaaacacgggctcccacggcctcccaggagcgccctaaagaagaactgggagcgggcagagaggaaggggctgccgagcccgcccttacccggaagggagctcgcgccctggctgccaaagcgctcgccagacggcgcgcttacagacggctgaaccgcacagtcgccgaacttgttcagttcctgctcgtgaaggacaaaaagaagtctcctatcaccagaagcgagatggtgaaatatgtcattggcgatctgaagatcctgtttcccgacattatcgctcgggccgcggagcatctccgctacgtgttcggctttgaactgaaacagttcgatagaaagcaccatacatatattcttatcaataaactgaagcctctcgaggaagaggaagaggaggaccttgggggagatggcccgcggctggggctgctcatgatgatcctgggactgatttacatgcgcggcaactccgccagagaagctcaagtttgggagatgctccggagactgggggtgcagccctctaagtatcactttcttttcggataccctaaacgcctgatcatggaagactttgtccagcagcggtatctcagctacagacgcgtgccccataccaatcctcccgagtacgagttctcctggggcccgcggtctaacctggagattagcaagatggaggttcttggctttgtggccaaactgcacaagaaagaacctcaacactggcccgtccagtatagagaggctctcgccgatgaagccgaccgcgctcgggcgaaggccagagctgaggcctccatgcgcgcccgggctagcgccagagcggggatccatctgtggtga

SEQ ID NO: 2414 - protein, 219 aa, synthetic construct
  REGION 1..219: note = MAGE-H1__Homo_sapiens__Q9H213
MPRGRKSRRRRNARAAEENRNNRKIQASEASETPMAASVVASTPEDDLSGPEEDPSTPEEASTTPEEASSTAQAQKPSVPRSNFQGTKKSLLMSILALIFIMGNSAKEALVWKVLGKLGMQPGRQHSIFGDPKKIVTEEFVRRGYLIYKPVPRSSPVEYEFFWGPRAHVESSKLKVMHFVARVRNRCSKDWPCNYDWDSDDDAEVEAILNSGARGYSAP

SEQ ID NO: 2415 - RNA, 660 nt, synthetic construct
  misc_feature 1..660: note = MAGE-H1__Homo_sapiens__AAD31314
  source 1..660: mol_type = other RNA
atgcctcggggacgaaagagtcggcgccgccgtaatgcgagagccgcagaagagaaccgcaacaatcgcaaaatccaggcctcagaggcctccgagacccctatggccgcctctgtggtagcgagcacccccgaagacgacctgagcggccccgaggaagacccgagcactccagaggaggcctctaccacccctgaagaagcctcgagcactgcccaagcacaaaagccttcagtgccccggagcaattttcagggcaccaagaaaagtctcctgatgtctatattagcgctcatcttcatcatgggcaacagcgccaaggaagctctggtctggaaagtgctggggaagttaggaatgcagcctggacgtcagcacagcatctttggagatccgaagaagatcgtcacagaagagtttgtgcgcagagggtacctgatttataaaccggtgccccgtagcagtccggtggagtatgagttcttctgggggccccgagcacacgtggaatcgagcaaactgaaagtcatgcattttgtggcaagggttcgtaaccgatgctctaaagactggccttgtaattatgactgggattcggacgatgatgcagaggttgaggctatcctcaattcaggtgctaggggttattccgccccttaa

SEQ ID NO: 2416 - RNA, 660 nt, synthetic construct
  misc_feature 1..660: note = derived and/or modified sequence opt1 fromMAGE-H1__Homo_sapiens__AAD31314
  source 1..660: mol_type = other RNA
atgccccgcggccgcaagagccggcggcgccggaacgcccgcgccgcggaggagaaccggaacaaccgcaagatccaggcctccgaggccagcgagaccccgatggccgcctccgtggtcgcgagcacccccgaggacgacctgtccgggcccgaggaggaccccagcacgccggaggaggcctccaccacccccgaggaggccagctccaccgcccaggcgcagaagcccagcgtgccccggtccaacttccagggcacgaagaagtccctcctgatgagcatcctggccctcatcttcatcatggggaacagcgccaaggaggccctggtgtggaaggtcctgggcaagctcgggatgcagccgggccgccagcactccatcttcggcgaccccaagaagatcgtgaccgaggagttcgtgcggcgcgggtacctgatctacaagcccgtcccccggagctccccggtggagtacgagttcttctggggcccccgcgcccacgtggagagctccaagctgaaggtcatgcacttcgtggcgcgggtgcgcaaccggtgcagcaaggactggccctgcaactacgactgggacagcgacgacgacgccgaggtcgaggccatcctcaactccggggcccgcggctacagcgccccctga

SEQ ID NO: 2417 - RNA, 660 nt, synthetic construct
  misc_feature 1..660: note = derived and/or modified sequence opt2 fromMAGE-H1__Homo_sapiens__AAD31314
  source 1..660: mol_type = other RNA
atgccccgcggccgcaagtcccgccgccgccgcaacgcccgcgccgccgaggagaaccgcaacaaccgcaagatccaggcctccgaggcctccgagacccccatggccgcctccgtcgtcgcctccacccccgaggacgacctctccggccccgaggaggacccctccacccccgaggaggcctccaccacccccgaggaggcctcctccaccgcccaggcccagaagccctccgtcccccgctccaacttccagggcaccaagaagtccctcctcatgtccatcctcgccctcatcttcatcatgggcaactccgccaaggaggccctcgtctggaaggtcctcggcaagctcggcatgcagcccggccgccagcactccatcttcggcgaccccaagaagatcgtcaccgaggagttcgtccgccgcggctacctcatctacaagcccgtcccccgctcctcccccgtcgagtacgagttcttctggggcccccgcgcccacgtcgagtcctccaagctcaaggtcatgcacttcgtcgcccgcgtccgcaaccgctgctccaaggactggccctgcaactacgactgggactccgacgacgacgccgaggtcgaggccatcctcaactccggcgcccgcggctactccgccccctga

SEQ ID NO: 2418 - RNA, 660 nt, synthetic construct
  misc_feature 1..660: note = derived and/or modified sequence opt3 fromMAGE-H1__Homo_sapiens__AAD31314
  source 1..660: mol_type = other RNA
atgcccagaggcaggaagtcgcggcgccgacgtaacgccagagctgcagaggaaaataggaacaatcggaaaatccaggcctccgaggcgtctgaaacccctatggctgcctcagtggtcgcaagtacaccagaggacgatctgagcgggccggaagaggacccctccactcctgaggaagcctctacgaccccagaggaagctagctcaacagcacaagcccagaagcccagcgttcctcgcagtaacttccagggaactaaaaagtccctccttatgtctattctggctttgatatttatcatgggtaatagcgccaaagaggcgttagtgtggaaggtactgggcaagctagggatgcagccaggaagacaacactccattttcggcgatcccaaaaagatcgtgaccgaggaatttgtcaggcggggttacctcatttataaacctgtgccacgctcaagtccggttgagtacgagttcttttgggggccccgagcacatgtggaaagctctaagctgaaagtcatgcacttcgtggccagagtaaggaaccggtgctccaaggactggccttgtaattatgattgggactcagatgacgatgctgaagttgaggccatccttaacagcggagcacgtggctacagtgctccatga

SEQ ID NO: 2419 - RNA, 660 nt, synthetic construct
  misc_feature 1..660: note = derived and/or modified sequence opt4 fromMAGE-H1__Homo_sapiens__AAD31314
  source 1..660: mol_type = other RNA
atgcccagaggcagaaagagcagaagaagaagaaacgccagagccgccgaggagaacagaaacaacagaaagatccaggccagcgaggccagcgagacccccatggccgccagcgtggtggccagcacccccgaggacgacctgagcggccccgaggaggaccccagcacccccgaggaggccagcaccacccccgaggaggccagcagcaccgcccaggcccagaagcccagcgtgcccagaagcaacttccagggcaccaagaagagcctgctgatgagcatcctggccctgatcttcatcatgggcaacagcgccaaggaggccctggtgtggaaggtgctgggcaagctgggcatgcagcccggcagacagcacagcatcttcggcgaccccaagaagatcgtgaccgaggagttcgtgagaagaggctacctgatctacaagcccgtgcccagaagcagccccgtggagtacgagttcttctggggccccagagcccacgtggagagcagcaagctgaaggtgatgcacttcgtggccagagtgagaaacagatgcagcaaggactggccctgcaactacgactgggacagcgacgacgacgccgaggtggaggccatcctgaacagcggcgccagaggctacagcgccccctga

SEQ ID NO: 2420 - RNA, 660 nt, synthetic construct
  misc_feature 1..660: note = derived and/or modified sequence opt5 fromMAGE-H1__Homo_sapiens__AAD31314
  source 1..660: mol_type = other RNA
atgcccagaggccggaagtctcgcagacggcgcaacgccagagctgccgaggaaaatcggaacaatcgcaaaatccaggcgtccgaggcttctgaaacccctatggccgccagcgtggtcgcttccacaccggaggacgatctgtctgggcccgaagaggaccctagcacgcccgaggaagcctccaccacacctgaggaagctagcagcaccgcccaagcgcagaagccctccgttcctagaagcaacttccagggaacaaagaagtctctcctgatgtccattcttgccctgatctttattatgggcaatagcgctaaagaggccctcgtgtggaaggtgctggggaaacttggaatgcagccgggccggcaacactctatcttcggggatcccaaaaagattgtcaccgaggaatttgtgcgcagaggatacctgatctataaacctgttccccggtccagccctgtggagtacgagttcttttggggcccccgcgctcatgtcgaatcttccaagctcaaagtgatgcacttcgttgccagagtgcggaaccgctgcagcaaggactggccgtgtaattatgattgggactccgatgacgatgcggaagtcgaggccatcctgaactctggcgctagagggtacagcgccccttga

SEQ ID NO: 2421 - protein, 1249 aa, synthetic construct
  REGION 1..1249: note = MAGEL2__Homo_sapiens__Q9UJ55
MSQLSKNLGDSSPPAEAPKPPVYSRPTVLMRAPPASSRAPPVPWDPPPIDLQASLAAWQAPQPAWEAPQGQLPAPVVPMTQPPALGGPIVPAPPLGGPMGKPPTPGVLMVHPPPPGAPMAQPPTPGVLMVHPSAPGAPMAHPPPPGTPMSHPPPPGTPMAHPPPPGTPMAHPPPPGTPMVHPPPPGTPMAHPPPPGTPMAHPPPPGTPMAHPPPPGTPMAHPPPPGTPMAQPPAPGVLMAQPLTPGVLMVQPAAPGAPMVQPPPAAMMTQPQPSGAPMAKPPGPGVLMIHPPGARAPMTQPPASGAPMAQPAAPPAQPMAPPAQPMASWAPQAQPLILQIQSQVIRAPPQVPQGPQAPPAQLATPPGWQATSPGWQATQQGWQATPLTWQTTQVTWQAPAVTWQVPPPMRQGPPPIRPGPPPIRPGPPPVRQAPPLIRQAPPVIRQAPPVIRQAPPVIRQAPAVIRQAPPVIRQAPPVIRQAPPVIRQAPPLIRQAPPPIRPAPQVLATQPPLWQALPPPPPLRQAPQARLPAPQVQAAPQVPTAPPATQVPAAPPAGPQVPQPVLPAPLSAPLSAPQAVHCPSIIWQAPKGQPPVPHEIPTSMEFQEVQQTQALAWQAQKAPTHIWQPLPAQEAQRQAPPLVQLEQPFQGAPPSQKAVQIQLPPQQAQASGPQAEVPTLPLQPSWQAPPAVLQAQPGPPVAAANFPLGSAKSLMTPSGECRASSIDRRGSSKERRTSSKERRAPSKDRMIFAATFCAPKAVSAARAHLPAAWKNLPATPETFAPSSSVFPATSQFQPASLNAFKGPSAASETPKSLPYALQDPFACVEALPAVPWVPQPNMNASKASQAVPTFLMATAAAPQATATTQEASKTSVEPPRRSGKATRKKKHLEAQEDSRGHTLAFHDWQGPRPWENLNLSDWEVQSPIQVSGDWEHPNTPRGLSGWEGPSTSRILSGWEGPSASWALSAWEGPSTSRALGLSESPGSSLPVVVSEVASVSPGSSATQDNSKVEAQPLSPLDERANALVQFLLVKDQAKVPVQRSEMVKVILREYKDECLDIINRANNKLECAFGYQLKEIDTKNHAYIIINKLGYHTGNLVASYLDRPKFGLLMVVLSLIFMKGNCVREDLIFNFLFKLGLDVRETNGLFGNTKKLITEVFVRQKYLEYRRIPYTEPAEYEFLWGPRAFLETSKMLVLRFLAKLHKKDPQSWPFHYLEALAECEWEDTDEDEPDTGDSAHGPTSRPPPR

SEQ ID NO: 2422 - RNA, 3750 nt, synthetic construct
  misc_feature 1..3750: note = MAGEL2__Homo_sapiens__CCDS73700.1
  source 1..3750: mol_type = other RNA
atgtcgcagctaagtaagaatctgggtgactcgagtcctccggcggaggccccgaagccgcctgtctatagccgccctacggttctgatgcgggccccgcccgcttcctcccgggctccgccagtcccttgggatccacctccaattgacttgcaggcttcattggccgcttggcaggcacctcagcctgcctgggaggccccacagggccagctgcccgccccggtggttccgatgacccagcctcctgccctagggggcccgatagtcccggctcccccgctggggggcccgatgggtaagcctccgactcccggggtcctgatggtgcatcctccacctccgggagccccgatggcccagcctccgaccccgggagtcctgatggtgcatccttcagctcccggagctcccatggcccatcctcctcctccggggaccccaatgtcccaccctccccctccggggaccccaatggcccatcctcctcctccggggaccccgatggcccatcctcctcctccggggaccccgatggtgcatcctcctcctccggggaccccgatggctcatcctccccctccggggacaccgatggctcatcctccccctccggggacaccgatggctcatcctccacctccggggacaccgatggctcatcctccccctccgggtacaccgatggcccagcctccagctccgggagtcctgatggcccagcctctgactccgggagtcctgatggtccagcctgctgctccgggagcaccgatggtccagccgcctccagcagccatgatgacccagcctcagccttcaggagcaccgatggccaagcctccaggtccaggagtcctgatgattcatcctccaggtgcgagagctccgatgacccagcctccagcttcaggagcaccgatggcacagccggcggccccacctgcacagccgatggccccacctgcacagccgatggcttcttgggccccgcaggctcagcctctgatcctgcaaatccagtctcaagttataagggctcctccgcaggttccccagggcccgcaggcacccccagcgcagctagccacacccccgggctggcaggcgacctcgccaggatggcaggccacgcagcaaggctggcaggccactcccctgacttggcagaccacgcaggtcacctggcaggcaccagccgttacctggcaggtgccgccgcccatgcgccaggggcccccgcccatccgccctggcccaccacccatccgccctggcccaccaccggtgcgacaggccccaccgctgatccgccaggccccaccggtgatccgccaggccccacccgtgatccgccaggccccacccgtgatccgccaggcccccgctgtgatccgccaggccccacctgtgatccgccaggccccacctgtgatccgccaggctccacctgtgatccgccaggccccgccgctgatccgccaggcgccgccgcccatccgacctgccccacaggtcctggccacccagccaccgctctggcaggccctgccacccccacctccactgcggcaggccccgcaggctaggctgccggccccgcaggtgcaggcggcgccgcaggtgcctacggccccacctgctacgcaggtacccgcggcgccgcccgctggcccgcaggtgccccagcctgtgctgccggccccgctgtctgccccactgtctgccccgcaggctgtgcactgcccttccatcatctggcaggcccccaaaggtcagcccccggtgccacacgagattccaacgtcaatggaattccaggaggtgcagcagacacaggcgctggcctggcaggcccagaaggcccccactcacatctggcagcccctgcctgcccaggaggcccagaggcaggctccccccttggtccagctggagcagccctttcagggagccccgccctcccaaaaagccgtgcaaatccagctacccccccagcaggcccaggcatcgggtccgcaagcggaggtgcccacactgccgctccagccttcctggcaggcaccgcctgcagtcttgcaggcccagcccggacccccggtagcagcggcaaattttcccctgggctccgctaaatcattgatgactccatcaggagaatgcagggcctcttctatagaccgcaggggctcctctaaagagcgcaggacctcctcgaaggagcgcagggccccttcaaaagaccgcatgatctttgctgccaccttctgtgctcccaaggcagtgtcagctgcgcgagcacacctgccagctgcctggaaaaacctgcctgccacaccggagacctttgctccctcctcaagtgtcttcccagctacctcccagtttcagcctgcctctctgaatgcctttaaaggcccctctgctgcctcagagaccccaaagtcactgccatatgctctgcaggatccctttgcctgtgtagaggccctgcctgcagttccatgggtcccacagcccaatatgaatgcctcaaaggcatcgcaggcagtgcccaccttcctgatggctacagcagctgccccccaggcaactgccaccactcaagaggcctccaagacctccgtcgagccgccacgccgctccggcaaggccacccggaagaagaagcatctggaagcccaagaggacagccgtggccacacgctagcctttcatgactggcagggcccaaggccctgggagaatctaaatctgagtgactgggaggtccaaagccctatccaggtctcgggtgactgggagcacccaaacaccccccgtggcctgagtggttgggagggccctagcacctccaggatcctgagtggctgggaagggcccagcgcatcctgggccctgagtgcctgggagggcccgagcacctccagggccctgggtctctctgaaagcccagggagctctctgcccgtagttgtgtctgaggtcgcaagtgtctctccgggatccagtgccacccaggataattccaaggtggaggcacagcccttgtctcccttggatgagagggcaaatgcgttggtgcagttcctcttagtcaaggaccaagccaaggtgcctgtccagcgctcggagatggtgaaagtcatcctccgagagtataaagatgagtgcttagatatcatcaaccgtgccaacaataagctggagtgtgcctttggttatcaattgaaagaaattgataccaaaaaccacgcctatattatcatcaacaagctgggctaccatacagggaatttggtggcatcctatttagacaggcccaagtttggccttctgatggtggtcttgagcctcatctttatgaaaggcaactgtgtcagggaggatctgatctttaattttctgttcaagttagggttggatgtccgggagacaaacggtctctttggaaatactaagaagctcatcaccgaagtgtttgtcaggcagaagtacctagagtacaggcgaatcccttacactgagcccgcagagtatgagttcctctggggccctcgagcattcctggaaaccagcaagatgcttgtcctgaggtttttggccaagctccataagaaagatccacagagctggccattccattaccttgaagcgctcgcagagtgtgagtgggaagacacagatgaggatgaacctgacaccggtgacagtgcccacggccccaccagcaggccccctccccgctaa

SEQ ID NO: 2423 - RNA, 3750 nt, synthetic construct
  misc_feature 1..3750: note = derived and/or modified sequence opt1 fromMAGEL2__Homo_sapiens__CCDS73700.1
  source 1..3750: mol_type = other RNA
atgagccagctgtccaagaacctcggcgacagctcccccccggccgaggcccccaagccccccgtgtacagccgcccgaccgtcctgatgcgggcgccccccgcctccagccgcgcccccccggtgccctgggacccccccccgatcgacctgcaggcctccctcgccgcgtggcaggccccccagcccgcctgggaggccccccaggggcagctgccggcgcccgtggtccccatgacccagcccccggccctgggcgggcccatcgtgcccgcccccccgctcggcgggcccatgggcaagccccccacgccgggcgtgctgatggtccacccccccccgcccggggcccccatggcccagcccccgacccccggcgtgctgatggtgcaccccagcgcgcccggggccccgatggcccaccccccccccccgggcacccccatgtcccacccccccccgcccgggacccccatggcccaccccccgccccccggcacgcccatggcccacccgccccccccgggcacccccatggtccacccccccccgcccgggacccccatggcgcaccccccgccccccggcacccccatggcccacccgcccccccccgggacgccgatggcccaccccccccccccgggcacccccatggcccacccccccccgcccggcacccccatggcccagcccccggcgcccggggtgctcatggcccagcccctgaccccgggcgtgctgatggtccagcccgccgcccccggggcccccatggtgcagccgccccccgcggccatgatgacgcagccccagccgagcggcgcccccatggccaagccccccgggccgggcgtgctcatgatccacccccccggcgcgcgggcccccatgacccagccgcccgcctccggggcccccatggcccagcccgcggccccgcccgcccagcccatggcccccccggcccagcccatggcgagctgggccccccaggcccagcccctgatcctgcagatccagtcccaggtcatccgcgccccgccccaggtgccccagggcccgcaggccccccccgcgcagctcgccacccccccggggtggcaggccaccagccccggctggcaggccacgcagcaggggtggcaggcgacccccctgacctggcagaccacgcaggtgacctggcaggcccccgccgtcacctggcaggtgccgccccccatgcggcagggccccccgcccatccgccccggccccccgcccatccggcccgggcccccgcccgtgcgccaggccccccccctgatccggcaggccccgcccgtcatccgccaggcgcccccggtgatccggcaggccccccccgtgatccgccaggcccccgccgtcatccggcaggccccgcccgtgatccgccaggcgccccccgtcatccggcaggccccgcccgtgatccgccaggccccccccctcatccggcaggccccgccccccatccgccccgccccgcaggtgctggcgacccagccccccctgtggcaggccctccccccgcccccccccctgcggcaggccccgcaggcccgcctgcccgcgccccaggtccaggccgccccccaggtgccgacggccccccccgccacccaggtgccggcggccccccccgccggcccccaggtcccgcagcccgtgctccccgcccccctgtccgccccgctgagcgcgccccaggccgtgcactgcccctccatcatctggcaggcccccaaggggcagccgcccgtcccccacgagatccccaccagcatggagttccaggaggtgcagcagacccaggccctcgcctggcaggcgcagaaggccccgacgcacatctggcagcccctgcccgcccaggaggcccagcggcaggcccccccgctggtgcagctcgagcagcccttccagggcgcgcccccctcccagaaggccgtccagatccagctgccgccccagcaggcccaggccagcgggccccaggcggaggtgcccaccctgccgctccagcccagctggcaggcccccccggccgtgctgcaggcccagcccggcccccccgtcgccgcggccaacttcccgctgggctccgccaagagcctcatgaccccctccggggagtgccgcgccagctccatcgaccgccggggcagctccaaggagcgccggaccagctccaaggagcgccgggcccccagcaaggaccgcatgatcttcgcggccacgttctgcgcccccaaggccgtgtccgccgcgcgggcccacctgccggccgcctggaagaacctgcccgcgacccccgagaccttcgcccccagctccagcgtgttcccggccacctcccagttccagcccgccagcctcaacgccttcaaggggccctccgcggccagcgagacgcccaagtccctgccgtacgccctgcaggaccccttcgcctgcgtcgaggccctccccgcggtgccctgggtgccgcagcccaacatgaacgccagcaaggccagccaggccgtccccaccttcctgatggccaccgcggccgccccccaggccaccgcgaccacgcaggaggcctccaagaccagcgtggagccgccccgccggtccggcaaggccacccgcaagaagaagcacctggaggcccaggaggacagccggggccacaccctcgccttccacgactggcaggggccccgcccctgggagaacctgaacctgtccgactgggaggtgcagagcccgatccaggtctccggcgactgggagcaccccaacacgccccgggggctcagcggctgggaggggccgtccaccagccgcatcctgtccggctgggagggccccagcgcgtcctgggccctgagcgcctgggaggggccctccaccagccgggccctgggcctctccgagagccccgggagctccctgccggtggtggtcagcgaggtggcctccgtgagccccggctccagcgcgacccaggacaactccaaggtcgaggcccagcccctgagccccctcgacgagcgcgccaacgccctggtgcagttcctgctcgtgaaggaccaggccaaggtcccggtgcagcggtccgagatggtgaaggtcatcctgcgcgagtacaaggacgagtgcctggacatcatcaaccgggcgaacaacaagctcgagtgcgccttcgggtaccagctgaaggagatcgacacgaagaaccacgcctacatcatcatcaacaagctgggctaccacaccggcaacctcgtggccagctacctggaccgccccaagttcgggctgctcatggtggtcctgtccctgatcttcatgaagggcaactgcgtgcgcgaggacctcatcttcaacttcctgttcaagctggggctcgacgtgcgggagaccaacggcctgttcgggaacaccaagaagctgatcacggaggtcttcgtgcgccagaagtacctcgagtaccggcgcatcccctacaccgagcccgccgagtacgagttcctgtggggcccgcgggcgttcctggagaccagcaagatgctcgtgctgcgcttcctggccaagctccacaagaaggacccccagtcctggcccttccactacctggaggccctggccgagtgcgagtgggaggacaccgacgaggacgagcccgacacgggcgacagcgcgcacgggccgacctcccggccccccccccgctga

SEQ ID NO: 2424 - RNA, 3750 nt, synthetic construct
  misc_feature 1..3750: note = derived and/or modified sequence opt2 fromMAGEL2__Homo_sapiens__CCDS73700.1
  source 1..3750: mol_type = other RNA
atgtcccagctctccaagaacctcggcgactcctccccccccgccgaggcccccaagccccccgtctactcccgccccaccgtcctcatgcgcgccccccccgcctcctcccgcgccccccccgtcccctgggaccccccccccatcgacctccaggcctccctcgccgcctggcaggccccccagcccgcctgggaggccccccagggccagctccccgcccccgtcgtccccatgacccagccccccgccctcggcggccccatcgtccccgccccccccctcggcggccccatgggcaagccccccacccccggcgtcctcatggtccacccccccccccccggcgcccccatggcccagccccccacccccggcgtcctcatggtccacccctccgcccccggcgcccccatggcccacccccccccccccggcacccccatgtcccacccccccccccccggcacccccatggcccacccccccccccccggcacccccatggcccacccccccccccccggcacccccatggtccacccccccccccccggcacccccatggcccacccccccccccccggcacccccatggcccacccccccccccccggcacccccatggcccacccccccccccccggcacccccatggcccacccccccccccccggcacccccatggcccagccccccgcccccggcgtcctcatggcccagcccctcacccccggcgtcctcatggtccagcccgccgcccccggcgcccccatggtccagcccccccccgccgccatgatgacccagccccagccctccggcgcccccatggccaagccccccggccccggcgtcctcatgatccacccccccggcgcccgcgcccccatgacccagccccccgcctccggcgcccccatggcccagcccgccgccccccccgcccagcccatggccccccccgcccagcccatggcctcctgggccccccaggcccagcccctcatcctccagatccagtcccaggtcatccgcgcccccccccaggtcccccagggcccccaggccccccccgcccagctcgccaccccccccggctggcaggccacctcccccggctggcaggccacccagcagggctggcaggccacccccctcacctggcagaccacccaggtcacctggcaggcccccgccgtcacctggcaggtccccccccccatgcgccagggccccccccccatccgccccggccccccccccatccgccccggccccccccccgtccgccaggccccccccctcatccgccaggccccccccgtcatccgccaggccccccccgtcatccgccaggccccccccgtcatccgccaggcccccgccgtcatccgccaggccccccccgtcatccgccaggccccccccgtcatccgccaggccccccccgtcatccgccaggccccccccctcatccgccaggcccccccccccatccgccccgccccccaggtcctcgccacccagccccccctctggcaggccctccccccccccccccccctccgccaggccccccaggcccgcctccccgccccccaggtccaggccgccccccaggtccccaccgccccccccgccacccaggtccccgccgccccccccgccggcccccaggtcccccagcccgtcctccccgcccccctctccgcccccctctccgccccccaggccgtccactgcccctccatcatctggcaggcccccaagggccagccccccgtcccccacgagatccccacctccatggagttccaggaggtccagcagacccaggccctcgcctggcaggcccagaaggcccccacccacatctggcagcccctccccgcccaggaggcccagcgccaggccccccccctcgtccagctcgagcagcccttccagggcgcccccccctcccagaaggccgtccagatccagctccccccccagcaggcccaggcctccggcccccaggccgaggtccccaccctccccctccagccctcctggcaggccccccccgccgtcctccaggcccagcccggcccccccgtcgccgccgccaacttccccctcggctccgccaagtccctcatgaccccctccggcgagtgccgcgcctcctccatcgaccgccgcggctcctccaaggagcgccgcacctcctccaaggagcgccgcgccccctccaaggaccgcatgatcttcgccgccaccttctgcgcccccaaggccgtctccgccgcccgcgcccacctccccgccgcctggaagaacctccccgccacccccgagaccttcgccccctcctcctccgtcttccccgccacctcccagttccagcccgcctccctcaacgccttcaagggcccctccgccgcctccgagacccccaagtccctcccctacgccctccaggaccccttcgcctgcgtcgaggccctccccgccgtcccctgggtcccccagcccaacatgaacgcctccaaggcctcccaggccgtccccaccttcctcatggccaccgccgccgccccccaggccaccgccaccacccaggaggcctccaagacctccgtcgagcccccccgccgctccggcaaggccacccgcaagaagaagcacctcgaggcccaggaggactcccgcggccacaccctcgccttccacgactggcagggcccccgcccctgggagaacctcaacctctccgactgggaggtccagtcccccatccaggtctccggcgactgggagcaccccaacaccccccgcggcctctccggctgggagggcccctccacctcccgcatcctctccggctgggagggcccctccgcctcctgggccctctccgcctgggagggcccctccacctcccgcgccctcggcctctccgagtcccccggctcctccctccccgtcgtcgtctccgaggtcgcctccgtctcccccggctcctccgccacccaggacaactccaaggtcgaggcccagcccctctcccccctcgacgagcgcgccaacgccctcgtccagttcctcctcgtcaaggaccaggccaaggtccccgtccagcgctccgagatggtcaaggtcatcctccgcgagtacaaggacgagtgcctcgacatcatcaaccgcgccaacaacaagctcgagtgcgccttcggctaccagctcaaggagatcgacaccaagaaccacgcctacatcatcatcaacaagctcggctaccacaccggcaacctcgtcgcctcctacctcgaccgccccaagttcggcctcctcatggtcgtcctctccctcatcttcatgaagggcaactgcgtccgcgaggacctcatcttcaacttcctcttcaagctcggcctcgacgtccgcgagaccaacggcctcttcggcaacaccaagaagctcatcaccgaggtcttcgtccgccagaagtacctcgagtaccgccgcatcccctacaccgagcccgccgagtacgagttcctctggggcccccgcgccttcctcgagacctccaagatgctcgtcctccgcttcctcgccaagctccacaagaaggacccccagtcctggcccttccactacctcgaggccctcgccgagtgcgagtgggaggacaccgacgaggacgagcccgacaccggcgactccgcccacggccccacctcccgcccccccccccgctga

SEQ ID NO: 2425 - RNA, 3750 nt, synthetic construct
  misc_feature 1..3750: note = derived and/or modified sequence opt3 fromMAGEL2__Homo_sapiens__CCDS73700.1
  source 1..3750: mol_type = other RNA
atgagccagctgtccaagaacctcggcgactcttcaccccctgccgaggctccaaaaccgcccgtgtacagtagacctaccgtccttatgagggcaccacccgccagctcccgggcgcctccagttccctgggatcctccaccgatcgacctgcaggcttctttggccgcatggcaagctccccagcctgcctgggaagcaccacaggggcaattacccgcccctgtggtaccaatgacacagcccccggctctgggaggtcctattgtgcccgccccacctctaggcgggcccatgggaaagccacccactcctggcgtcctcatggtgcacccaccgccccctggtgcgccaatggcacagccccctacgccaggggttctgatggtgcatccctcggccccgggagctcctatggcccacccaccccctcccggcaccccaatgtcacatcctcccccaccgggcacacctatggcacacccaccaccccctgggactccaatggctcatccccctccgccaggaacccccatggtccaccctccaccccctggtacaccgatggcccatcccccacctcccggcaccccaatggcgcaccctcccccaccggggactcctatggcccacccaccaccccctggaacaccaatggcacatccccctccgccaggcacccccatggctcagcctcccgccccaggtgtgcttatggctcaacctctgacgcccggggtattgatggttcagccagccgcacctggagccccgatggtgcagccccctcccgctgcgatgatgactcagccccaaccaagcggcgcacctatggccaaacccccgggcccaggggtcctcatgatacaccctcccggagctcgcgccccaatgacccagccccctgcaagtggtgccccgatggctcagcccgccgcaccccctgcgcaacccatggctcctccagcccagcccatggcatcctgggcccctcaggctcagccactgatcctgcaaattcagtctcaggtgatccgagccccgccccaggtgcctcaaggcccacaggcaccccctgctcagctcgccacaccacccgggtggcaggcgactagcccgggatggcaagccacccagcagggctggcaggctacacctttaacctggcaaacgactcaggtcacatggcaggcacccgccgttacctggcaagtgccacctcccatgcgtcagggtccaccccctattagaccagggccgccccctatcaggccaggaccccctccagtacggcaggctccccctctgatacgccaggccccgccagtgatcagacaagcaccccctgtcattaggcaggcgcccccagtgatccggcaggcccctgctgttattcgccaggcacccccagtgatccgacaagccccgcctgtcataagacaggctcccccagtgattaggcaggcaccccctcttatccggcaggccccaccccctattcgtccggccccacaagtattggctactcagccccctctgtggcaggcgctaccaccccctcccccactccgccaagccccgcaggcaagactgcctgctccccaggttcaggccgccccacaagtgcctacagctcccccagcaacccaggtccctgccgcgcccccggctggcccacaggtgcctcagcccgtccttccagcacccctgtccgcccctttgtcagccccgcaagctgtgcactgcccaagtatcatctggcaggcacccaagggccagcctcccgttccacatgagattcctacgagcatggagttccaggaagtgcaacagacccaggccctcgcgtggcaggctcaaaaagcccccacacacatatggcagccactgcctgcacaggaagcccaaaggcaggctccgcccttagtacagctggagcagccatttcaaggggcccctccctctcagaaggcagtccagatccagctcccacctcaacaggctcaggcctccggaccccaggcggaggtgccgactcttccactgcaaccttcatggcaggcacccccagccgttttgcaggctcaacccggtcctcccgtggccgctgcaaatttcccactaggcagcgccaagagtctgatgaccccttctggggaatgtcgggcctccagcattgatcgacgcggatcgtctaaagagagaaggacatcctcaaaggaacggcgcgctccgagtaaagacagaatgatctttgcggcaactttctgcgcccccaaggctgtcagcgccgcaagggcccatctcccagctgcgtggaaaaacctgcctgccacccccgagacatttgcaccatcctctagcgtgttccctgctacctcacagtttcagcccgccagtcttaatgcattcaagggcccgtccgccgctagcgagactcctaagtctctgccatatgccttgcaggatccctttgcgtgtgtagaagcactccctgccgtgccatgggttccccaacctaacatgaatgcttcaaaagccagtcaggctgtcccaacgttcctgatggcaacagccgctgcaccccaggccaccgcgactacccaggaggccagcaagacatccgtggaaccgcctcgtcggtctggtaaagctacccgaaagaaaaagcacttagaggcccaagaagactcgagagggcatactctggcatttcacgattggcagggccccaggccatgggagaacctaaatctcagcgactgggaggtgcagtcccccatacaggtctcaggagattgggaacaccctaacacaccacgcggcctgagtgggtgggagggaccctctacgagccggattctttccggttgggaaggcccttcagctagctgggccttgtctgcatgggaggggccatccaccagtagagccctgggactcagcgaatctccgggctcctcactgcccgttgtggtgagtgaggtagctagcgtctcgcctggttcctctgcgactcaagacaatagcaaagtggaggcccagccactttcacccctggatgaaagggcaaacgctttggttcagttcctcctggtgaaggaccaggccaaggtccctgtgcaacgcagtgagatggttaaagtgatcttacgagaatacaaggatgagtgcctggacatcattaatcgggccaacaataaactagaatgtgcatttgggtatcagctcaaggagatcgacaccaaaaaccatgcttacattataatcaataagctgggctatcacacaggaaaccttgtagcctcctacttggatcgtccaaagttcggcctgctcatggtcgtgctgtctttaattttcatgaaagggaactgcgtgagagaggacctgatctttaatttcctttttaagttgggactcgatgtcagggaaacaaacggcctgttcggtaatactaaaaagctaatcaccgaggtttttgtgcgccagaaatatctggaataccggaggattccctacacggagccggcggagtatgagttcctctgggggcctagagcttttctggaaaccagcaagatgcttgtattgcgattcctggccaagttacataaaaaggacccacaatcctggccctttcactacctcgaagcactggccgagtgtgaatgggaggatacagacgaggatgaacctgacactggagattcagctcacggccccaccagccgcccaccgcctcggtga

SEQ ID NO: 2426 - RNA, 3750 nt, synthetic construct
  misc_feature 1..3750: note = derived and/or modified sequence opt4 fromMAGEL2__Homo_sapiens__CCDS73700.1
  source 1..3750: mol_type = other RNA
atgagccagctgagcaagaacctgggcgacagcagcccccccgccgaggcccccaagccccccgtgtacagcagacccaccgtgctgatgagagccccccccgccagcagcagagccccccccgtgccctgggaccccccccccatcgacctgcaggccagcctggccgcctggcaggccccccagcccgcctgggaggccccccagggccagctgcccgcccccgtggtgcccatgacccagccccccgccctgggcggccccatcgtgcccgccccccccctgggcggccccatgggcaagccccccacccccggcgtgctgatggtgcacccccccccccccggcgcccccatggcccagccccccacccccggcgtgctgatggtgcaccccagcgcccccggcgcccccatggcccacccccccccccccggcacccccatgagccacccccccccccccggcacccccatggcccacccccccccccccggcacccccatggcccacccccccccccccggcacccccatggtgcacccccccccccccggcacccccatggcccacccccccccccccggcacccccatggcccacccccccccccccggcacccccatggcccacccccccccccccggcacccccatggcccacccccccccccccggcacccccatggcccagccccccgcccccggcgtgctgatggcccagcccctgacccccggcgtgctgatggtgcagcccgccgcccccggcgcccccatggtgcagcccccccccgccgccatgatgacccagccccagcccagcggcgcccccatggccaagccccccggccccggcgtgctgatgatccacccccccggcgccagagcccccatgacccagccccccgccagcggcgcccccatggcccagcccgccgccccccccgcccagcccatggccccccccgcccagcccatggccagctgggccccccaggcccagcccctgatcctgcagatccagagccaggtgatcagagcccccccccaggtgccccagggcccccaggccccccccgcccagctggccaccccccccggctggcaggccaccagccccggctggcaggccacccagcagggctggcaggccacccccctgacctggcagaccacccaggtgacctggcaggcccccgccgtgacctggcaggtgcccccccccatgagacagggccccccccccatcagacccggccccccccccatcagacccggccccccccccgtgagacaggccccccccctgatcagacaggccccccccgtgatcagacaggccccccccgtgatcagacaggccccccccgtgatcagacaggcccccgccgtgatcagacaggccccccccgtgatcagacaggccccccccgtgatcagacaggccccccccgtgatcagacaggccccccccctgatcagacaggcccccccccccatcagacccgccccccaggtgctggccacccagccccccctgtggcaggccctgcccccccccccccccctgagacaggccccccaggccagactgcccgccccccaggtgcaggccgccccccaggtgcccaccgccccccccgccacccaggtgcccgccgccccccccgccggcccccaggtgccccagcccgtgctgcccgcccccctgagcgcccccctgagcgccccccaggccgtgcactgccccagcatcatctggcaggcccccaagggccagccccccgtgccccacgagatccccaccagcatggagttccaggaggtgcagcagacccaggccctggcctggcaggcccagaaggcccccacccacatctggcagcccctgcccgcccaggaggcccagagacaggccccccccctggtgcagctggagcagcccttccagggcgccccccccagccagaaggccgtgcagatccagctgcccccccagcaggcccaggccagcggcccccaggccgaggtgcccaccctgcccctgcagcccagctggcaggccccccccgccgtgctgcaggcccagcccggcccccccgtggccgccgccaacttccccctgggcagcgccaagagcctgatgacccccagcggcgagtgcagagccagcagcatcgacagaagaggcagcagcaaggagagaagaaccagcagcaaggagagaagagcccccagcaaggacagaatgatcttcgccgccaccttctgcgcccccaaggccgtgagcgccgccagagcccacctgcccgccgcctggaagaacctgcccgccacccccgagaccttcgcccccagcagcagcgtgttccccgccaccagccagttccagcccgccagcctgaacgccttcaagggccccagcgccgccagcgagacccccaagagcctgccctacgccctgcaggaccccttcgcctgcgtggaggccctgcccgccgtgccctgggtgccccagcccaacatgaacgccagcaaggccagccaggccgtgcccaccttcctgatggccaccgccgccgccccccaggccaccgccaccacccaggaggccagcaagaccagcgtggagccccccagaagaagcggcaaggccaccagaaagaagaagcacctggaggcccaggaggacagcagaggccacaccctggccttccacgactggcagggccccagaccctgggagaacctgaacctgagcgactgggaggtgcagagccccatccaggtgagcggcgactgggagcaccccaacacccccagaggcctgagcggctgggagggccccagcaccagcagaatcctgagcggctgggagggccccagcgccagctgggccctgagcgcctgggagggccccagcaccagcagagccctgggcctgagcgagagccccggcagcagcctgcccgtggtggtgagcgaggtggccagcgtgagccccggcagcagcgccacccaggacaacagcaaggtggaggcccagcccctgagccccctggacgagagagccaacgccctggtgcagttcctgctggtgaaggaccaggccaaggtgcccgtgcagagaagcgagatggtgaaggtgatcctgagagagtacaaggacgagtgcctggacatcatcaacagagccaacaacaagctggagtgcgccttcggctaccagctgaaggagatcgacaccaagaaccacgcctacatcatcatcaacaagctgggctaccacaccggcaacctggtggccagctacctggacagacccaagttcggcctgctgatggtggtgctgagcctgatcttcatgaagggcaactgcgtgagagaggacctgatcttcaacttcctgttcaagctgggcctggacgtgagagagaccaacggcctgttcggcaacaccaagaagctgatcaccgaggtgttcgtgagacagaagtacctggagtacagaagaatcccctacaccgagcccgccgagtacgagttcctgtggggccccagagccttcctggagaccagcaagatgctggtgctgagattcctggccaagctgcacaagaaggacccccagagctggcccttccactacctggaggccctggccgagtgcgagtgggaggacaccgacgaggacgagcccgacaccggcgacagcgcccacggccccaccagcagacccccccccagatga

SEQ ID NO: 2427 - RNA, 3750 nt, synthetic construct
  misc_feature 1..3750: note = derived and/or modified sequence opt5 fromMAGEL2__Homo_sapiens__CCDS73700.1
  source 1..3750: mol_type = other RNA
atgagccagctgtccaagaacctcggcgactctagcccgcctgccgaggctccgaaaccccctgtgtactccagacccaccgtcctgatgcgggcccctcccgcgtctagccgcgctcctccggttccctgggatcctccccctatcgaccttcaagcctccctggccgcttggcaggcgccccagccggcttgggaagcccctcaggggcaactccccgcgcctgtggtgcccatgacacagccccctgccctgggaggcccgattgtccccgctcctccccttgggggacctatgggcaagcccccgacgcctggggtgctgatggttcatccccctccccctggagcccccatggctcagccgcctacccccggcgtgctcatggtccacccctctgcccctggcgcgccgatggcccatccccctccccctgggacacccatgagccaccctcccccgcctggaacccccatggctcaccctcccccgcctggcacacccatggcccatcctcctccgcccgggacccccatggtgcatccccctccccctggaacacccatggctcaccctccgccccctggcacccccatggcccaccctcccccgcctgggacgcccatggcccatccccctccccctggaaccccgatggctcatccccctccccctggcacacccatggcgcagccgcctgcccccggcgttctgatggctcaacctctgacccccggggtgctcatggtccagcctgccgcccccggagctccgatggtgcagcctcctcccgccgcgatgatgacacagccccaaccgtccggcgctcccatggccaaacctcccgggcctggagtgctgatgatccatccccctggcgccagagctccgatgacccagccccctgccagcggggctcccatggcccagcctgcggctcccccggcccaacctatggcccctcccgctcagcccatggcctcttgggcgccccaggcccagcctcttattctgcaaatccagtcccaggtcattcgggctccgccccaggttcctcaaggaccccaggcccctcccgctcagctcgccacgccgcctggctggcaggccacaagccccggctggcaagctacccagcaggggtggcaggcgacacctctgacctggcaaaccacacaggtgacgtggcaggcccccgctgtgacctggcaagtccctcccccgatgcgccagggacctcctcccatcagacccggcccgccccctatccggcccgggcctccccctgtgcgccaggctcccccgcttattagacaggcccctcccgttatccggcaagcccctcccgtgattcgccaggccccgcctgtcatcagacaggcgcccgctgtgattcggcaggctccccctgttatccgccaagcgccccctgtgattagacaggccccgcccgtcatccggcaggcccctcccctgatccgccaggcccctccccctattagaccggctccccaagtgctcgccacacagcctcccctgtggcaggccctgcctcccccgcctcccctccggcaagctccccaggccagactgcctgctccccaggtccaggccgcgcctcaagtgccgaccgctccccctgccacacaggttcccgccgctcctcccgccggaccccaggtgcctcagcccgtccttcctgctcccctgtctgccccgctctccgcgcctcaagccgtgcactgccccagcatcatttggcaggctcccaagggccagcctcccgttcctcacgagatcccgacctctatggagttccaggaagtgcaacagacgcaggccctggcctggcaggctcaaaaagcccccacacacatttggcagcctcttcccgcgcaggaagctcaacgccaggcccctcccctggtccagctcgagcagccttttcaaggggccccgccctcccagaaggctgtgcagatccagctgcctccccaacaggcccaggcgagcggccctcaggctgaggtgcccaccctgccgctccaaccttcctggcaggcccctcccgccgttctgcaggctcaacccggaccccctgtcgccgctgccaatttcccgcttggctctgccaagagcctgatgaccccctccggggaatgtcgggccagctctatcgatagacgcggatccagcaaagagcggagaacatctagcaaggaacgccgggctccttccaaagacagaatgatttttgccgctaccttctgcgcccccaaggccgtgtctgctgcgcgcgcccacctccctgctgcctggaaaaacctgcccgccacaccggagacgtttgctcctagctccagcgtgttccccgccacctctcagtttcagcctgcgtcccttaatgctttcaagggccccagcgccgcctctgagacacctaagtccctgccctatgctctccaggatccgtttgcctgtgtcgaagcgctgcccgccgtgccttgggttccccaacctaacatgaatgctagcaaagcctcccaggctgtgccgaccttcctgatggccacagctgccgcgccccaggccaccgctacgacccaggaggcctctaagacaagcgtcgaacctccccggagatccgggaaagctacccgcaagaaaaagcacctcgaggcccaagaagactctcggggacatacactggcctttcacgattggcagggccctagaccctgggagaaccttaatctgagcgactgggaggtgcagtcccctatccaggttagcggggattgggaacaccccaacaccccgcggggcctctctggatgggagggcccttccacgagccgcattctgtctgggtgggaaggaccctccgctagctgggcgctgtctgcctgggagggccctagcacatccagagctcttgggctcagcgaatctcccggatccagcctgccggtggtcgtgtccgaggttgcctctgtgagccctggctcctctgccacccaagacaatagcaaagtcgaggctcagcccctgtctcccctcgatgaacgggccaacgcgctggtgcagttccttctggtgaaggaccaggccaaggtccctgttcaaagatccgagatggtgaaagtgatcctccgcgaatacaaggatgagtgcctggacattatcaatcgggctaacaataaactggaatgtgcctttgggtatcagcttaaggagatcgacaccaaaaaccatgcttacattatcattaataagctcggctatcacacaggaaacctggtcgccagctacctggatagacccaagttcggcctcctgatggtggttctttccctgatcttcatgaaagggaactgcgtgcgcgaggacctcatttttaatttcctgtttaagctgggacttgatgtcagagaaaccaacggcctcttcgggaatacgaaaaagctgatcacagaggtgtttgttcggcagaaatatctggaataccgccggattccttacaccgagccggcggagtatgagttcctctggggacccagagcctttctggaaacaagcaagatgcttgtgctgcgcttcctcgctaagctgcataaaaaggaccctcaatcttggccctttcactacctggaagcccttgctgagtgtgaatgggaggataccgacgaggatgaacctgacacaggcgattccgcccacgggcccaccagcagaccgcctccccggtga

SEQ ID NO: 2428 - protein, 93 aa, synthetic construct
  REGION 1..93: note = mammaglobin_A__Homo_sapiens__Q13296
MKLLMVLMLAALSQHCYAGSGCPLLENVISKTINPQVSKTEYKELLQEFIDDNATTNAIDELKECFLNQTDETLSNVEVFMQLIYDSSLCDLF

SEQ ID NO: 2429 - RNA, 282 nt, synthetic construct
  misc_feature 1..282: note = mammaglobin_A__Homo_sapiens__AAC39608
  source 1..282: mol_type = other RNA
atgaagttgctgatggtcctcatgctggcggccctctcccagcactgctacgcaggctctggctgccccttattggagaatgtgatttccaagacaatcaatccacaagtgtctaagactgaatacaaagaacttcttcaagagttcatagacgacaatgccactacaaatgccatagatgaattgaaggaatgttttcttaaccaaacggatgaaactctgagcaatgttgaggtgtttatgcaattaatatatgacagcagtctttgtgatttattttaa

SEQ ID NO: 2430 - RNA, 282 nt, synthetic construct
  misc_feature 1..282: note = derived and/or modified sequence opt1 frommammaglobin_A__Homo_sapiens__AAC39608
  source 1..282: mol_type = other RNA
atgaagctgctcatggtgctgatgctggccgccctcagccagcactgctacgcgggctccgggtgcccgctgctggagaacgtcatcagcaagaccatcaacccccaggtgtccaagaccgagtacaaggagctcctgcaggagttcatcgacgacaacgccacgaccaacgccatcgacgagctgaaggagtgcttcctcaaccagaccgacgagaccctgagcaacgtggaggtcttcatgcagctgatctacgactccagcctctgcgacctgttctga

SEQ ID NO: 2431 - RNA, 282 nt, synthetic construct
  misc_feature 1..282: note = derived and/or modified sequence opt2 frommammaglobin_A__Homo_sapiens__AAC39608
  source 1..282: mol_type = other RNA
atgaagctcctcatggtcctcatgctcgccgccctctcccagcactgctacgccggctccggctgccccctcctcgagaacgtcatctccaagaccatcaacccccaggtctccaagaccgagtacaaggagctcctccaggagttcatcgacgacaacgccaccaccaacgccatcgacgagctcaaggagtgcttcctcaaccagaccgacgagaccctctccaacgtcgaggtcttcatgcagctcatctacgactcctccctctgcgacctcttctga

SEQ ID NO: 2432 - RNA, 282 nt, synthetic construct
  misc_feature 1..282: note = derived and/or modified sequence opt3 frommammaglobin_A__Homo_sapiens__AAC39608
  source 1..282: mol_type = other RNA
atgaagctgctcatggtgcttatgctggccgctttgagccagcactgctacgcaggctccgggtgtcccttactggagaacgtcatctctaaaaccattaatcctcaagtttcaaagacagaatataaagagctactccaggagttcatagacgataacgccactacgaatgcgatcgacgaactgaaggaatgctttcttaaccagaccgatgagacactgagtaatgtggaggtattcatgcagttgatttacgacagctccctctgtgatctgttttga

SEQ ID NO: 2433 - RNA, 282 nt, synthetic construct
  misc_feature 1..282: note = derived and/or modified sequence opt4 frommammaglobin_A__Homo_sapiens__AAC39608
  source 1..282: mol_type = other RNA
atgaagctgctgatggtgctgatgctggccgccctgagccagcactgctacgccggcagcggctgccccctgctggagaacgtgatcagcaagaccatcaacccccaggtgagcaagaccgagtacaaggagctgctgcaggagttcatcgacgacaacgccaccaccaacgccatcgacgagctgaaggagtgcttcctgaaccagaccgacgagaccctgagcaacgtggaggtgttcatgcagctgatctacgacagcagcctgtgcgacctgttctga

SEQ ID NO: 2434 - RNA, 282 nt, synthetic construct
  misc_feature 1..282: note = derived and/or modified sequence opt5 frommammaglobin_A__Homo_sapiens__AAC39608
  source 1..282: mol_type = other RNA
atgaagctgctcatggtgctgatgcttgccgctctgagccagcactgctacgccggctccgggtgtcccctcctggagaacgtcatctctaaaaccattaatcctcaagttagcaagacagaatataaagagcttctgcaggaatttatcgacgataacgcgacgaccaatgctattgacgagctcaaggaatgctttctgaaccagacagatgagaccctgtccaatgtggaggtgttcatgcagctcatctacgactctagcctgtgtgatcttttctga

SEQ ID NO: 2435 - protein, 120 aa, synthetic construct
  REGION 1..120: note = mammaglobin_A__Homo_sapiens__Q6NX70
MKLLMVLMLAALSQHCYAGSGCPLLENVISKTINPQVSKTEYKELLQEFIDDNATTNAIDELKECFLNQTDETLSNVEVFMVISFSSYKLFKSPDQGQVGSSFLTDNAKATSEQAFSYIG

SEQ ID NO: 2436 - RNA, 363 nt, synthetic construct
  misc_feature 1..363: note = mammaglobin_A__Homo_sapiens__AAH67220
  source 1..363: mol_type = other RNA
atgaagttgctgatggtcctcatgctggcggccctctcccagcactgctacgcaggctctggctgccccttattggagaatgtgatttccaagacaatcaatccacaagtgtctaagactgaatacaaagaacttcttcaagagttcatagacgacaatgccactacaaatgccatagatgaattgaaggaatgttttcttaaccaaacggatgaaactctgagcaatgttgaggtgtttatggtaatttcattttcttcctataagctttttaaatcccctgaccagggacaagtgggctcttcatttctcactgacaatgccaaagccactagtgaacaagccttttcttacattggttaa

SEQ ID NO: 2437 - RNA, 363 nt, synthetic construct
  misc_feature 1..363: note = derived and/or modified sequence opt1 frommammaglobin_A__Homo_sapiens__AAH67220
  source 1..363: mol_type = other RNA
atgaagctgctcatggtgctgatgctggccgccctcagccagcactgctacgcgggctccgggtgccccctgctggagaacgtcatcagcaagaccatcaacccccaggtgtccaagaccgagtacaaggagctcctgcaggagttcatcgacgacaacgccacgaccaacgccatcgacgagctgaaggagtgcttcctcaaccagaccgacgagaccctgagcaacgtggaggtcttcatggtgatctccttcagctcctacaagctgttcaagagcccggaccagggccaggtggggtccagcttcctcacggacaacgccaaggccacctccgagcaggcgttcagctacatcggctga

SEQ ID NO: 2438 - RNA, 363 nt, synthetic construct
  misc_feature 1..363: note = derived and/or modified sequence opt2 frommammaglobin_A__Homo_sapiens__AAH67220
  source 1..363: mol_type = other RNA
atgaagctcctcatggtcctcatgctcgccgccctctcccagcactgctacgccggctccggctgccccctcctcgagaacgtcatctccaagaccatcaacccccaggtctccaagaccgagtacaaggagctcctccaggagttcatcgacgacaacgccaccaccaacgccatcgacgagctcaaggagtgcttcctcaaccagaccgacgagaccctctccaacgtcgaggtcttcatggtcatctccttctcctcctacaagctcttcaagtcccccgaccagggccaggtcggctcctccttcctcaccgacaacgccaaggccacctccgagcaggccttctcctacatcggctga

SEQ ID NO: 2439 - RNA, 363 nt, synthetic construct
  misc_feature 1..363: note = derived and/or modified sequence opt3 frommammaglobin_A__Homo_sapiens__AAH67220
  source 1..363: mol_type = other RNA
atgaagctgctcatggtgcttatgctggccgctttgagccagcactgctacgcaggctccgggtgtcccttactggagaacgtcatctctaaaaccattaatcctcaagtttcaaagacagaatataaagagctactccaggagttcatagacgataacgccactacgaatgcgatcgacgaactgaaggaatgctttcttaaccagaccgatgagacactgagtaatgtggaggtattcatggtgattagcttttcctcttacaaattgttcaagtcgccagaccagggacaagtcggtagctcatttctcactgataacgctaaggccaccagtgaacaggcattctcctatatcggctga

SEQ ID NO: 2440 - RNA, 363 nt, synthetic construct
  misc_feature 1..363: note = derived and/or modified sequence opt4 frommammaglobin_A__Homo_sapiens__AAH67220
  source 1..363: mol_type = other RNA
atgaagctgctgatggtgctgatgctggccgccctgagccagcactgctacgccggcagcggctgccccctgctggagaacgtgatcagcaagaccatcaacccccaggtgagcaagaccgagtacaaggagctgctgcaggagttcatcgacgacaacgccaccaccaacgccatcgacgagctgaaggagtgcttcctgaaccagaccgacgagaccctgagcaacgtggaggtgttcatggtgatcagcttcagcagctacaagctgttcaagagccccgaccagggccaggtgggcagcagcttcctgaccgacaacgccaaggccaccagcgagcaggccttcagctacatcggctga

SEQ ID NO: 2441 - RNA, 363 nt, synthetic construct
  misc_feature 1..363: note = derived and/or modified sequence opt5 frommammaglobin_A__Homo_sapiens__AAH67220
  source 1..363: mol_type = other RNA
atgaagctgctcatggtgctgatgcttgccgctctgagccagcactgctacgccggctccgggtgtcccctcctggagaacgtcatctctaaaaccattaatcctcaagttagcaagacagaatataaagagcttctgcaggagttcatcgacgataacgcgacgaccaatgctattgacgaactcaaggaatgctttctgaaccagacagatgagaccctgtccaatgtggaggtgttcatggtcatctcttttagctcctacaaactcttcaagtctccggaccagggacaagtgggcagctcctttctgacagataacgccaaggccaccagcgaacaggctttctcttatattgggtga

SEQ ID NO: 2442 - protein, 118 aa, synthetic construct
  REGION 1..118: note = MART-1/melan-A__Homo_sapiens__Q16655
MPREDAHFIYGYPKKGHGHSYTTAEEAAGIGILTVILGVLLLIGCWYCRRRNGYRALMDKSLHVGTQCALTRRCPQEGFDHRDSKVSLQEKNCEPVVPNAPPAYEKLSAEQSPPPYSP

SEQ ID NO: 2443 - RNA, 357 nt, synthetic construct
  misc_feature 1..357: note = MART-1/melan-A__Homo_sapiens__AAA19238
  source 1..357: mol_type = other RNA
atgccaagagaagatgctcacttcatctatggttaccccaagaaggggcacggccactcttacaccacggctgaagaggccgctgggatcggcatcctgacagtgatcctgggagtcttactgctcatcggctgttggtattgtagaagacgaaatggatacagagccttgatggataaaagtcttcatgttggcactcaatgtgccttaacaagaagatgcccacaagaagggtttgatcatcgggacagcaaagtgtctcttcaagagaaaaactgtgaacctgtggttcccaatgctccacctgcttatgagaaactctctgcagaacagtcaccaccaccttattcaccttaa

SEQ ID NO: 2444 - RNA, 357 nt, synthetic construct
  misc_feature 1..357: note = derived and/or modified sequence opt1 fromMART-1/melan-A__Homo_sapiens__AAA19238
  source 1..357: mol_type = other RNA
atgccccgcgaggacgcccacttcatctacggctaccccaagaaggggcacggccacagctacaccaccgccgaggaggcggccgggatcggcatcctgacggtgatcctcggggtcctgctgctcatcggctgctggtactgccggcgccggaacggctaccgcgccctgatggacaagtccctgcacgtggggacccagtgcgccctcacccggcgctgcccccaggagggcttcgaccaccgggacagcaaggtgtccctgcaggagaagaactgcgagcccgtcgtgcccaacgccccgcccgcgtacgagaagctgagcgccgagcagtccccgccgccctacagcccctga

SEQ ID NO: 2445 - RNA, 357 nt, synthetic construct
  misc_feature 1..357: note = derived and/or modified sequence opt2 fromMART-1/melan-A__Homo_sapiens__AAA19238
  source 1..357: mol_type = other RNA
atgccccgcgaggacgcccacttcatctacggctaccccaagaagggccacggccactcctacaccaccgccgaggaggccgccggcatcggcatcctcaccgtcatcctcggcgtcctcctcctcatcggctgctggtactgccgccgccgcaacggctaccgcgccctcatggacaagtccctccacgtcggcacccagtgcgccctcacccgccgctgcccccaggagggcttcgaccaccgcgactccaaggtctccctccaggagaagaactgcgagcccgtcgtccccaacgccccccccgcctacgagaagctctccgccgagcagtccccccccccctactccccctga

SEQ ID NO: 2446 - RNA, 357 nt, synthetic construct
  misc_feature 1..357: note = derived and/or modified sequence opt3 fromMART-1/melan-A__Homo_sapiens__AAA19238
  source 1..357: mol_type = other RNA
atgcccagagaggacgcccacttcatctacggctatcctaagaaagggcatggacacagctacaccacagctgaagaggcagccggtattggcatactgactgtgatcctcggggtccttctgttgattggatgctggtattgtaggcggcgcaacggctaccgagcgttaatggataagtccctgcatgttggtacgcagtgcgctctaacccgtagatgtccacaagaagggtttgaccacagggattctaaagtgtcactccaggagaagaattgcgaaccggtagtgcccaacgcccctccagcatatgagaaactgagtgccgagcagagccctcccccatactccccctga

SEQ ID NO: 2447 - RNA, 357 nt, synthetic construct
  misc_feature 1..357: note = derived and/or modified sequence opt4 fromMART-1/melan-A__Homo_sapiens__AAA19238
  source 1..357: mol_type = other RNA
atgcccagagaggacgcccacttcatctacggctaccccaagaagggccacggccacagctacaccaccgccgaggaggccgccggcatcggcatcctgaccgtgatcctgggcgtgctgctgctgatcggctgctggtactgcagaagaagaaacggctacagagccctgatggacaagagcctgcacgtgggcacccagtgcgccctgaccagaagatgcccccaggagggcttcgaccacagagacagcaaggtgagcctgcaggagaagaactgcgagcccgtggtgcccaacgccccccccgcctacgagaagctgagcgccgagcagagcccccccccctacagcccctga

SEQ ID NO: 2448 - RNA, 357 nt, synthetic construct
  misc_feature 1..357: note = derived and/or modified sequence opt5 fromMART-1/melan-A__Homo_sapiens__AAA19238
  source 1..357: mol_type = other RNA
atgcccagagaggacgcccacttcatctacggctatcctaagaaagggcatggacacagctacaccacagctgaagaggccgcgggcattgggatcctgacggtgattctcggagtcctgcttctgatcggctgctggtattgtcggcgcagaaacgggtaccgggctctcatggataagtccctgcatgttggaacccagtgcgcccttacacgcagatgtccgcaagaaggctttgaccaccgggattctaaagtgagcctgcaggagaagaattgcgaacccgtggtccctaacgctccccctgcctatgagaaactctccgccgagcagtctccccctccgtacagcccctga

SEQ ID NO: 2449 - protein, 493 aa, synthetic construct
  REGION 1..493: note = MART-2__Homo_sapiens__Q5VTY9
MLPRWELALYLLASLGFHFYSFYEVYKVSREHEEELDQEFELETDTLFGGLKKDATDFEWSFWMEWGKQWLVWLLLGHMVVSQMATLLARKHRPWILMLYGMWACWCVLGTPGVAMVLLHTTISFCVAQFRSQLLTWLCSLLLLSTLRLQGVEEVKRRWYKTENEYYLLQFTLTVRCLYYTSFSLELCWQQLPAASTSYSFPWMLAYVFYYPVLHNGPILSFSEFIKQMQQQEHDSLKASLCVLALGLGRLLCWWWLAELMAHLMYMHAIYSSIPLLETVSCWTLGGLALAQVLFFYVKYLVLFGVPALLMRLDGLTPPALPRCVSTMFSFTGMWRYFDVGLHNFLIRYVYIPVGGSQHGLLGTLFSTAMTFAFVSYWHGGYDYLWCWAALNWLGVTVENGVRRLVETPCIQDSLARYFSPQARRRFHAALASCSTSMLILSNLVFLGGNEVGKTYWNRIFIQGWPWVTLSVLGFLYCYSHVGIAWAQTYATD

SEQ ID NO: 2450 - RNA, 1482 nt, synthetic construct
  misc_feature 1..1482: note = MART-2__Homo_sapiens__EAW93427
  source 1..1482: mol_type = other RNA
atgctgccccgatgggaactggcactttacctacttgcctcactaggcttccacttctattccttctatgaagtttacaaagtctccagagaacacgaagaggagctggaccaggaatttgagctggagactgacactttatttggaggattaaagaaggatgcgaccgactttgagtggagcttctggatggaatgggggaagcagtggctggtgtggcttctccttggccacatggtagtgtctcaaatggccacactgctggcaagaaagcacagaccctggattctcatgctctatgggatgtgggcctgctggtgtgtgctggggacccctggtgtggctatggttttgctccataccaccatctctttctgcgtggcccagttccggtctcagctcctgacgtggctctgttctctcctcctcctctccacactgaggctgcagggtgtggaagaagttaagagaaggtggtacaagacagaaaacgagtactacctgctgcagttcacgctgaccgttcgctgcctctactacaccagcttcagcctggagctctgctggcagcagctgcctgctgcatcgacctcctactcctttccctggatgctggcctatgtcttttattatccagtcttacacaatgggcccatcctcagcttctcggagttcatcaaacagatgcagcagcaggagcatgactccctgaaggccagcctgtgtgtcctggccctggggctgggccgccttctttgctggtggtggctggccgagctgatggctcacctgatgtacatgcatgccatctacagcagcatccccctcctggagactgtctcttgttggaccttaggaggactggcgttagcccaggtgctctttttctacgtgaagtacttggtgctctttggcgtgcctgctctgctcatgcgcctggatggactcactccacccgccctcccccgctgcgtgagcaccatgttcagtttcaccgggatgtggaggtattttgatgttggactgcataatttcttaatcaggtatgtgtacattccagtgggcgggtcccagcatggcctgctggggacactgttttccacggcgatgacatttgcatttgtgagctactggcatggcggctacgactacctctggtgctgggcagcgctcaactggctgggagtcactgtggagaatggagtccggaggctggtggagactccctgcatccaggacagtctggcccgatacttctccccacaagctcgccgtcgattccacgctgcccttgcttcttgttccacctcgatgctgatcctgtccaacctggtatttcttgggggcaatgaggttgggaaaacctactggaataggatcttcatacaaggctggccttgggtgaccctctctgtcctgggattcctgtactgctactcccacgtgggcattgcctgggcccagacctacgccacggactaa

SEQ ID NO: 2451 - RNA, 1482 nt, synthetic construct
  misc_feature 1..1482: note = derived and/or modified sequence opt1 fromMART-2__Homo_sapiens__EAW93427
  source 1..1482: mol_type = other RNA
atgctgccccgctgggagctcgccctgtacctgctcgccagcctgggcttccacttctactccttctacgaggtgtacaaggtcagccgggagcacgaggaggagctggaccaggagttcgagctcgagaccgacaccctgttcgggggcctgaagaaggacgcgacggacttcgagtggtccttctggatggagtgggggaagcagtggctcgtgtggctgctgctcggccacatggtggtcagccagatggccaccctgctggcccgcaagcaccggccgtggatcctcatgctgtacgggatgtgggcctgctggtgcgtgctgggcacccccggcgtggccatggtcctcctgcacaccacgatctccttctgcgtggcgcagttccgcagccagctgctcacctggctgtgctccctgctcctgctgagcaccctccggctgcagggggtggaggaggtcaagcgccggtggtacaagaccgagaacgagtactacctgctccagttcacgctgaccgtgcgctgcctgtactacacctccttcagcctcgagctgtgctggcagcagctgcccgccgcctccaccagctactccttcccctggatgctcgcctacgtgttctactacccggtcctgcacaacggccccatcctgagcttctccgagttcatcaagcagatgcagcagcaggagcacgacagcctcaaggcgtccctgtgcgtgctggccctcgggctgggccggctgctctgctggtggtggctggccgagctgatggcccacctcatgtacatgcacgccatctacagctccatccccctgctggagacggtgagctgctggaccctcgggggcctggcgctggcccaggtcctgttcttctacgtgaagtacctcgtgctgttcggcgtccccgccctgctcatgcgcctggacgggctgaccccgcccgccctcccccggtgcgtgagcaccatgttctccttcacgggcatgtggcgctacttcgacgtggggctgcacaacttcctgatccggtacgtctacatccccgtgggcggcagccagcacgggctcctgggcaccctgttctccaccgccatgaccttcgcgttcgtgagctactggcacgggggctacgactacctctggtgctgggccgccctgaactggctgggggtcacggtggagaacggcgtccgccggctcgtggagaccccgtgcatccaggactccctggcccgctacttcagcccccaggcccggcgccggttccacgcggccctggcctcctgcagcacctccatgctcatcctgagcaacctggtgttcctcggcgggaacgaggtcggcaagacctactggaaccgcatcttcatccaggggtggccctgggtgacgctgtccgtgctgggcttcctctactgctacagccacgtcgggatcgcctgggcccagacctacgcgaccgactga

SEQ ID NO: 2452 - RNA, 1482 nt, synthetic construct
  misc_feature 1..1482: note = derived and/or modified sequence opt2 fromMART-2__Homo_sapiens__EAW93427
  source 1..1482: mol_type = other RNA
atgctcccccgctgggagctcgccctctacctcctcgcctccctcggcttccacttctactccttctacgaggtctacaaggtctcccgcgagcacgaggaggagctcgaccaggagttcgagctcgagaccgacaccctcttcggcggcctcaagaaggacgccaccgacttcgagtggtccttctggatggagtggggcaagcagtggctcgtctggctcctcctcggccacatggtcgtctcccagatggccaccctcctcgcccgcaagcaccgcccctggatcctcatgctctacggcatgtgggcctgctggtgcgtcctcggcacccccggcgtcgccatggtcctcctccacaccaccatctccttctgcgtcgcccagttccgctcccagctcctcacctggctctgctccctcctcctcctctccaccctccgcctccagggcgtcgaggaggtcaagcgccgctggtacaagaccgagaacgagtactacctcctccagttcaccctcaccgtccgctgcctctactacacctccttctccctcgagctctgctggcagcagctccccgccgcctccacctcctactccttcccctggatgctcgcctacgtcttctactaccccgtcctccacaacggccccatcctctccttctccgagttcatcaagcagatgcagcagcaggagcacgactccctcaaggcctccctctgcgtcctcgccctcggcctcggccgcctcctctgctggtggtggctcgccgagctcatggcccacctcatgtacatgcacgccatctactcctccatccccctcctcgagaccgtctcctgctggaccctcggcggcctcgccctcgcccaggtcctcttcttctacgtcaagtacctcgtcctcttcggcgtccccgccctcctcatgcgcctcgacggcctcaccccccccgccctcccccgctgcgtctccaccatgttctccttcaccggcatgtggcgctacttcgacgtcggcctccacaacttcctcatccgctacgtctacatccccgtcggcggctcccagcacggcctcctcggcaccctcttctccaccgccatgaccttcgccttcgtctcctactggcacggcggctacgactacctctggtgctgggccgccctcaactggctcggcgtcaccgtcgagaacggcgtccgccgcctcgtcgagaccccctgcatccaggactccctcgcccgctacttctccccccaggcccgccgccgcttccacgccgccctcgcctcctgctccacctccatgctcatcctctccaacctcgtcttcctcggcggcaacgaggtcggcaagacctactggaaccgcatcttcatccagggctggccctgggtcaccctctccgtcctcggcttcctctactgctactcccacgtcggcatcgcctgggcccagacctacgccaccgactga

SEQ ID NO: 2453 - RNA, 1482 nt, synthetic construct
  misc_feature 1..1482: note = derived and/or modified sequence opt3 fromMART-2__Homo_sapiens__EAW93427
  source 1..1482: mol_type = other RNA
atgctgcccagatgggagctcgccctttacctgttggctagcttaggcttccacttttattccttctacgaagtgtataaggtctctagggagcatgaagaggaactggaccaggagtttgagctagaaaccgatacactcttcgggggactgaaaaaggacgcaactgattttgagtggtcattctggatggaatggggtaaacaatggcttgtttggctgttgctcggccacatggtggtaagtcagatggccacgctgctggcgcggaagcatcgcccttggatcctcatgttatacgggatgtgggcttgctggtgtgtgctgggaaccccaggcgtcgccatggtgcttttgcacacaactattagcttttgcgttgcacagttccgatcccagctgctaacctggctctgttctctgcttctgttgtcgacactccgtctgcaaggtgtggaggaggtcaaaagaaggtggtataagaccgaaaacgagtactatttactgcagtttactctcacagtgcggtgcctttactacacctcattcagcctggaattgtgttggcagcagctaccggccgctagtacgtcctattcttttccctggatgctggcatacgtattctattaccctgttctccataatgggccaatactgagcttttccgagttcatcaagcaaatgcagcagcaggaacacgactcacttaaagccagtctgtgcgtgttggctctcggactgggccgcttactgtgttggtggtggctagccgagctcatggcgcacctgatgtatatgcatgcaatttacagctctatcccccttttggagactgtctcctgctggaccctgggcgggctcgccctggctcaagtgcttttcttttatgtgaagtacctggtcttgttcggagttcctgccctcctgatgagattagatggtctgacaccacccgcactacctaggtgtgtgtcaactatgtttagcttcaccggcatgtggcggtactttgacgtagggctccacaacttcctgattcgctatgtgtacatcccagtcggaggcagtcagcatggtcttttggggacactgttttctaccgctatgacgttcgcctttgtgtcctattggcacggaggctacgattatctctggtgctgggcggccctgaattggttaggcgttactgtggaaaacggggtccgaagactggtggagacaccgtgtatacaggacagccttgcaaggtacttctcgccccaagctcggcgtcgctttcacgccgctttggcctcttgctccacctcaatgctcatcctgagtaatctagtattcctgggaggtaacgaagttggcaaaacttattggaatagaatttttatccaggggtggccttgggtgacactcagcgtcctgggattcctttactgctactcccatgtgggcattgcatgggcccagacctatgctacggattga

SEQ ID NO: 2454 - RNA, 1482 nt, synthetic construct
  misc_feature 1..1482: note = derived and/or modified sequence opt4 fromMART-2__Homo_sapiens__EAW93427
  source 1..1482: mol_type = other RNA
atgctgcccagatgggagctggccctgtacctgctggccagcctgggcttccacttctacagcttctacgaggtgtacaaggtgagcagagagcacgaggaggagctggaccaggagttcgagctggagaccgacaccctgttcggcggcctgaagaaggacgccaccgacttcgagtggagcttctggatggagtggggcaagcagtggctggtgtggctgctgctgggccacatggtggtgagccagatggccaccctgctggccagaaagcacagaccctggatcctgatgctgtacggcatgtgggcctgctggtgcgtgctgggcacccccggcgtggccatggtgctgctgcacaccaccatcagcttctgcgtggcccagttcagaagccagctgctgacctggctgtgcagcctgctgctgctgagcaccctgagactgcagggcgtggaggaggtgaagagaagatggtacaagaccgagaacgagtactacctgctgcagttcaccctgaccgtgagatgcctgtactacaccagcttcagcctggagctgtgctggcagcagctgcccgccgccagcaccagctacagcttcccctggatgctggcctacgtgttctactaccccgtgctgcacaacggccccatcctgagcttcagcgagttcatcaagcagatgcagcagcaggagcacgacagcctgaaggccagcctgtgcgtgctggccctgggcctgggcagactgctgtgctggtggtggctggccgagctgatggcccacctgatgtacatgcacgccatctacagcagcatccccctgctggagaccgtgagctgctggaccctgggcggcctggccctggcccaggtgctgttcttctacgtgaagtacctggtgctgttcggcgtgcccgccctgctgatgagactggacggcctgaccccccccgccctgcccagatgcgtgagcaccatgttcagcttcaccggcatgtggagatacttcgacgtgggcctgcacaacttcctgatcagatacgtgtacatccccgtgggcggcagccagcacggcctgctgggcaccctgttcagcaccgccatgaccttcgccttcgtgagctactggcacggcggctacgactacctgtggtgctgggccgccctgaactggctgggcgtgaccgtggagaacggcgtgagaagactggtggagaccccctgcatccaggacagcctggccagatacttcagcccccaggccagaagaagattccacgccgccctggccagctgcagcaccagcatgctgatcctgagcaacctggtgttcctgggcggcaacgaggtgggcaagacctactggaacagaatcttcatccagggctggccctgggtgaccctgagcgtgctgggcttcctgtactgctacagccacgtgggcatcgcctgggcccagacctacgccaccgactga

SEQ ID NO: 2455 - RNA, 1482 nt, synthetic construct
  misc_feature 1..1482: note = derived and/or modified sequence opt5 fromMART-2__Homo_sapiens__EAW93427
  source 1..1482: mol_type = other RNA
atgctgcccagatgggagctcgccctgtaccttctggctagcctcggcttccacttttattccttctacgaagtgtataaggtctctcgggagcatgaagaggaactggaccaggagtttgagcttgaaaccgatacactgttcgggggactcaaaaaggacgccacggattttgagtggagcttctggatggaatggggcaaacaatggctggtttggctgctcctggggcacatggtggtgtcccagatggcgacccttctggctcgcaagcatagaccttggatcctcatgctgtacggaatgtgggcctgctggtgtgtccttggcacaccgggggtggccatggttctgctccacaccacaatttctttttgcgtggctcagttccggagccagctgctgacctggctctgttccctgcttctgctctctacactgcgccttcaaggagtcgaggaggtgaaaagacggtggtataagaccgaaaacgagtactatctgctccagtttacgctgaccgttcgctgcctgtactacacatccttctccctcgaactgtgttggcagcagcttcccgccgctagcacctcttattcctttccttggatgctggcctacgtgttctattaccccgtcctccataatggccctatcctgagcttttctgagttcattaagcaaatgcagcagcaggaacacgactcccttaaagcgagcctgtgcgtgctcgccctgggcctggggagactcctgtgttggtggtggcttgctgagctgatggcccacctcatgtatatgcatgctatctactcttccattcccctgctggagacagtgagctgctggacccttggaggcctcgccctggcgcaagtcctgttcttttatgttaagtacctcgtgctgttcggggtgcctgcccttctgatgcggctcgatggactgacgccgcccgctctgcctcgctgtgtctccacaatgttttctttcaccggcatgtggagatactttgacgtggggcttcacaacttcctcatccggtatgtttacatccccgtgggaggcagccagcatggcctgctggggacactcttttccaccgccatgaccttcgcttttgtcagctattggcacggaggctacgattatctgtggtgctgggccgcccttaattggctgggggtgacagttgaaaacggagtgcgcagactcgtcgagacgccttgtattcaggactctctggctcggtacttcagcccccaagcgcgcagacggtttcacgccgctctggccagctgctctaccagcatgcttatcctctccaatctggtgttcctgggcgggaacgaagtcggaaaaacatattggaatagaatttttatccagggctggccgtgggtgaccctctctgttctgggcttcctttactgctacagccatgtggggattgcctgggctcagacatatgccaccgattga

SEQ ID NO: 2456 - protein, 317 aa, synthetic construct
  REGION 1..317: note = MC1_R__Homo_sapiens__Q01726
MAVQGSQRRLLGSLNSTPTAIPQLGLAANQTGARCLEVSISDGLFLSLGLVSLVENALVVATIAKNRNLHSPMYCFICCLALSDLLVSGSNVLETAVILLLEAGALVARAAVLQQLDNVIDVITCSSMLSSLCFLGAIAVDRYISIFYALRYHSIVTLPRARRAVAAIWVASVVFSTLFIAYYDHVAVLLCLVVFFLAMLVLMAVLYVHMLARACQHAQGIARLHKRQRPVHQGFGLKGAVTLTILLGIFFLCWGPFFLHLTLIVLCPEHPTCGCIFKNFNLFLALIICNAIIDPLIYAFHSQELRRTLKEVLTCSW

SEQ ID NO: 2457 - RNA, 954 nt, synthetic construct
  misc_feature 1..954: note = MC1_R__Homo_sapiens__AAD41349
  source 1..954: mol_type = other RNA
atggctgtgcagggatcccagagaagacttctgggctccctcaactccacccccacagccatcccccagctggggctggctgccaaccagacaggagcccggtgcctggaggtgtccatctctgacgggctcttcctcagcctggggctggtgagcttggtggagaacgcgctggtggtggccaccatcgccaagaaccggaacctgcactcacccatgtactgcttcatctgctgcctggccttgtcggacctgctggtgagcgggagcaacgtgctggagacggccgtcatcctcctgctggaggccggtgcactggtggcccgggctgcggtgctgcagcagctggacaatgtcattgacgtgatcacctgcagctccatgctgtccagcctctgcttcctgggcgccatcgccgtggaccgctacatctccatcttctacgcactgcgctaccacagcatcgtgaccctgccgcgggcgcggcgagccgttgcggccatctgggtggccagtgtcgtcttcagcacgctcttcatcgcctactacgaccacgtggccgtcctgctgtgcctcgtggtcttcttcctggctatgctggtgctcatggccgtgctgtacgtccacatgctggcccgggcctgccagcacgcccagggcatcgcccggctccacaagaggcagcgcccggtccaccagggctttggccttaaaggcgctgtcaccctcaccatcctgctgggcattttcttcctctgctggggccccttcttcctgcatctcacactcatcgtcctctgccccgagcaccccacgtgcggctgcatcttcaagaacttcaacctctttctcgccctcatcatctgcaatgccatcatcgaccccctcatctacgccttccacagccaggagctccgcaggacgctcaaggaggtgctgacatgctcctggtga

SEQ ID NO: 2458 - RNA, 954 nt, synthetic construct
  misc_feature 1..954: note = derived and/or modified sequence opt1 fromMC1_R__Homo_sapiens__AAD41349
  source 1..954: mol_type = other RNA
atggccgtgcagggcagccagcgccggctgctcgggtccctgaacagcacccccaccgccatcccccagctgggcctcgcggccaaccagacgggggcccgctgcctggaggtctccatcagcgacggcctgttcctctccctggggctggtgagcctcgtggagaacgccctggtcgtggccaccatcgcgaagaaccggaacctgcactcccccatgtactgcttcatctgctgcctcgccctgagcgacctgctcgtgtccggcagcaacgtcctggagaccgccgtgatcctgctcctggaggccggcgcgctggtggcccgcgccgccgtcctccagcagctggacaacgtgatcgacgtgatcacgtgctccagcatgctgtccagcctctgcttcctgggggccatcgcggtcgaccggtacatctccatcttctacgccctgcgctaccacagcatcgtgaccctcccccgggcccgccgggccgtggccgcgatctgggtcgcctccgtggtgttcagcaccctgttcatcgcctactacgaccacgtcgccgtgctgctctgcctggtggtcttcttcctggccatgctcgtgctgatggcggtgctgtacgtccacatgctcgcccgcgcctgccagcacgcccagggcatcgcccggctgcacaagcgccagcggcccgtgcaccaggggttcggcctgaagggggcggtcaccctcaccatcctgctgggcatcttcttcctctgctggggcccgttcttcctgcacctgacgctcatcgtgctgtgccccgagcacccgacctgcgggtgcatcttcaagaacttcaacctgttcctcgccctgatcatctgcaacgccatcatcgaccccctgatctacgccttccactcccaggagctgcgccggaccctcaaggaggtgctgacctgcagctggtga

SEQ ID NO: 2459 - RNA, 954 nt, synthetic construct
  misc_feature 1..954: note = derived and/or modified sequence opt2 fromMC1_R__Homo_sapiens__AAD41349
  source 1..954: mol_type = other RNA
atggccgtccagggctcccagcgccgcctcctcggctccctcaactccacccccaccgccatcccccagctcggcctcgccgccaaccagaccggcgcccgctgcctcgaggtctccatctccgacggcctcttcctctccctcggcctcgtctccctcgtcgagaacgccctcgtcgtcgccaccatcgccaagaaccgcaacctccactcccccatgtactgcttcatctgctgcctcgccctctccgacctcctcgtctccggctccaacgtcctcgagaccgccgtcatcctcctcctcgaggccggcgccctcgtcgcccgcgccgccgtcctccagcagctcgacaacgtcatcgacgtcatcacctgctcctccatgctctcctccctctgcttcctcggcgccatcgccgtcgaccgctacatctccatcttctacgccctccgctaccactccatcgtcaccctcccccgcgcccgccgcgccgtcgccgccatctgggtcgcctccgtcgtcttctccaccctcttcatcgcctactacgaccacgtcgccgtcctcctctgcctcgtcgtcttcttcctcgccatgctcgtcctcatggccgtcctctacgtccacatgctcgcccgcgcctgccagcacgcccagggcatcgcccgcctccacaagcgccagcgccccgtccaccagggcttcggcctcaagggcgccgtcaccctcaccatcctcctcggcatcttcttcctctgctggggccccttcttcctccacctcaccctcatcgtcctctgccccgagcaccccacctgcggctgcatcttcaagaacttcaacctcttcctcgccctcatcatctgcaacgccatcatcgaccccctcatctacgccttccactcccaggagctccgccgcaccctcaaggaggtcctcacctgctcctggtga

SEQ ID NO: 2460 - RNA, 954 nt, synthetic construct
  misc_feature 1..954: note = derived and/or modified sequence opt3 fromMC1_R__Homo_sapiens__AAD41349
  source 1..954: mol_type = other RNA
atggccgtgcagggcagccaaagaaggctgctcgggtcccttaactctacccccacagctatccctcagctgggattggcagccaatcagactggtgcgcggtgcttagaggtctcaattagtgacggcctgttcctaagcctcgggctggtttcccttgtggaaaacgctctggtagtggccacgatagcaaagaatcgcaacttgcactctccaatgtactgttttatctgctgtctcgccctgtcggatctgctcgtctcaggaagcaatgtgttagagaccgctgttattctgcttttggaagcaggcgccctggtggctcgagccgcggtcctacagcaactcgacaacgtgatcgatgtaattacatgcagttccatgctgtctagcctttgtttcctgggtgcaatcgccgttgaccgttatatatccatcttttacgctttgagatatcattcaattgtgactctcccgagggcccggcgcgcagtcgctgccatctgggtggcgagtgtggtcttcagcaccctgtttattgcctactatgatcacgttgcagtgttactgtgcctcgtagtgttctttcttgctatgctggtcttgatggccgtgctatacgttcatatgctggctagagcctgtcagcacgcacaggggatcgccaggctccataaacggcagcgccccgtgcaccaaggattcggcctgaagggcgctgtcacacttaccatactgttggggatctttttcctctgctggggaccatttttcctgcacttaactctgattgtgctatgtcctgagcatcccacatgcggttgtatttttaaaaatttcaacctcttcctggcgcttatcatctgcaatgcaattatagaccctttgatctatgcctttcactctcaggaactgcgaagaaccctcaaggaggtactgacgtgctcctggtga

SEQ ID NO: 2461 - RNA, 954 nt, synthetic construct
  misc_feature 1..954: note = derived and/or modified sequence opt4 fromMC1_R__Homo_sapiens__AAD41349
  source 1..954: mol_type = other RNA
atggccgtgcagggcagccagagaagactgctgggcagcctgaacagcacccccaccgccatcccccagctgggcctggccgccaaccagaccggcgccagatgcctggaggtgagcatcagcgacggcctgttcctgagcctgggcctggtgagcctggtggagaacgccctggtggtggccaccatcgccaagaacagaaacctgcacagccccatgtactgcttcatctgctgcctggccctgagcgacctgctggtgagcggcagcaacgtgctggagaccgccgtgatcctgctgctggaggccggcgccctggtggccagagccgccgtgctgcagcagctggacaacgtgatcgacgtgatcacctgcagcagcatgctgagcagcctgtgcttcctgggcgccatcgccgtggacagatacatcagcatcttctacgccctgagataccacagcatcgtgaccctgcccagagccagaagagccgtggccgccatctgggtggccagcgtggtgttcagcaccctgttcatcgcctactacgaccacgtggccgtgctgctgtgcctggtggtgttcttcctggccatgctggtgctgatggccgtgctgtacgtgcacatgctggccagagcctgccagcacgcccagggcatcgccagactgcacaagagacagagacccgtgcaccagggcttcggcctgaagggcgccgtgaccctgaccatcctgctgggcatcttcttcctgtgctggggccccttcttcctgcacctgaccctgatcgtgctgtgccccgagcaccccacctgcggctgcatcttcaagaacttcaacctgttcctggccctgatcatctgcaacgccatcatcgaccccctgatctacgccttccacagccaggagctgagaagaaccctgaaggaggtgctgacctgcagctggtga

SEQ ID NO: 2462 - RNA, 954 nt, synthetic construct
  misc_feature 1..954: note = derived and/or modified sequence opt5 fromMC1_R__Homo_sapiens__AAD41349
  source 1..954: mol_type = other RNA
atggccgtgcagggcagccaaagacggctgctcgggtccctgaactctacccccacagctatccctcagcttggactggccgcgaatcagacgggcgctcgctgcctcgaggtcagcatttccgacgggctgttcctttctctgggactcgttagcctggtggaaaacgccctggtggtcgccaccatcgctaagaatagaaacctccactccccgatgtactgttttatttgctgtctggccctttctgatctgctcgtgagcggctccaatgttctggagacagctgtgatccttctgctcgaagccggggcgctggtcgcccgggctgccgtgctgcagcaactcgacaacgttattgatgtgattacctgcagctctatgctgtccagcctttgtttcctgggagctatcgccgtcgaccgctatatctctatcttttacgcgctcagatatcattccattgtgacactgccccgggcccgcagagctgtggccgctatctgggtcgccagcgttgtgttctctaccctttttattgcctactatgatcacgtggctgtcctgctctgcctggtggttttctttctggcgatgctcgtgctgatggccgtcctttacgtgcatatgctggctcgggcctgtcagcacgcccagggcatcgctcgcctccataaaagacagcggcctgttcaccaaggcttcgggctgaagggagccgtgacacttaccattctgctcggcatctttttcctgtgctgggggccctttttcctgcacctcacgctgatcgtcctttgtcctgagcatcctacctgcggatgtatttttaaaaatttcaacctgttcctcgcgctgatcatttgcaatgctatcattgaccccctgatctatgcctttcactcccaggaacttcgcagaacactcaaggaggtgctgacctgcagctggtga

SEQ ID NO: 2463 - protein, 317 aa, synthetic construct; identical to SEQ ID NO: 2456
  REGION 1..317: note = MC1_R__Homo_sapiens__Q1JUL4

SEQ ID NO: 2464 - RNA, 954 nt, synthetic construct; identical to SEQ ID NO: 2457
  misc_feature 1..954: note = MC1_R__Homo_sapiens__AHC09522
  source 1..954: mol_type = other RNA

SEQ ID NO: 2465 - RNA, 954 nt, synthetic construct; identical to SEQ ID NO: 2458
  misc_feature 1..954: note = derived and/or modified sequence opt1 fromMC1_R__Homo_sapiens__AHC09522
  source 1..954: mol_type = other RNA

SEQ ID NO: 2466 - RNA, 954 nt, synthetic construct; identical to SEQ ID NO: 2459
  misc_feature 1..954: note = derived and/or modified sequence opt2 fromMC1_R__Homo_sapiens__AHC09522
  source 1..954: mol_type = other RNA

SEQ ID NO: 2467 - RNA, 954 nt, synthetic construct; identical to SEQ ID NO: 2460
  misc_feature 1..954: note = derived and/or modified sequence opt3 fromMC1_R__Homo_sapiens__AHC09522
  source 1..954: mol_type = other RNA

SEQ ID NO: 2468 - RNA, 954 nt, synthetic construct; identical to SEQ ID NO: 2461
  misc_feature 1..954: note = derived and/or modified sequence opt4 fromMC1_R__Homo_sapiens__AHC09522
  source 1..954: mol_type = other RNA

SEQ ID NO: 2469 - RNA, 954 nt, synthetic construct; identical to SEQ ID NO: 2462
  misc_feature 1..954: note = derived and/or modified sequence opt5 fromMC1_R__Homo_sapiens__AHC09522
  source 1..954: mol_type = other RNA

SEQ ID NO: 2470 - protein, 317 aa, synthetic construct
  REGION 1..317: note = MC1_R__Homo_sapiens__Q1JUL6
MAVQGSQRRLLGSLNSTPTAIPQLGLAANQTGARCLEVSISDGLFLSLGLVSLVENALVVATIAKNRNLHSPMYCFICCLALSDLLVSGSNVLETAVILLLEAGALVARAAVLQQLDNVIDVITCSSMLSSLCFLGAIAVDRYISIFYALRYHSIVTLPRARQAVAAIWVASVVFSTLFIAYYDHVAVLLCLVVFFLAMLVLMAVLYVHMLARACQHAQGIARLHKRQRPVHQGFGLKGAVTLTILLGIFFLCWGPFFLHLTLIVLCPEHPTCGCIFKNFNLFLALIICNAIIDPLIYAFHSQELRRTLKEVLTCSW

SEQ ID NO: 2471 - RNA, 954 nt, synthetic construct
  misc_feature 1..954: note = MC1_R__Homo_sapiens__AHC09804
  source 1..954: mol_type = other RNA
atggctgtgcagggatcccagagaagacttctgggctccctcaactccacccccacagccatcccccagctggggctggctgccaaccagacaggagcccggtgcctggaggtgtccatctctgacgggctcttcctcagcctggggctggtgagcttggtggagaacgcgctggtggtggccaccatcgccaagaaccggaacctgcactcacccatgtactgcttcatctgctgcctggccttgtcggacctgctggtgagcgggagcaacgtgctggagacggccgtcatcctcctgctggaggccggtgcactggtggcccgggctgcggtgctgcagcagctggacaatgtcattgacgtgatcacctgcagctccatgctgtccagcctctgcttcctgggcgccatcgccgtggaccgctacatctccatcttctacgcactgcgctaccacagcatcgtgaccctgccgcgggcgcggcaagccgttgcggccatctgggtggccagtgtcgtcttcagcacgctcttcatcgcctactacgaccacgtggccgtcctgctgtgcctcgtggtcttcttcctggctatgctggtgctcatggccgtgctgtacgtccacatgctggcccgggcctgccagcacgcccagggcatcgcccggctccacaagaggcagcgcccggtccaccagggctttggccttaaaggcgctgtcaccctcaccatcctgctgggcattttcttcctctgctggggccccttcttcctgcatctcacactcatcgtcctctgccccgagcaccccacgtgcggctgcatcttcaagaacttcaacctctttctcgccctcatcatctgcaatgccatcatcgaccccctcatctacgccttccacagccaggagctccgcaggacgctcaaggaggtgctgacatgctcctggtga

SEQ ID NO: 2472 - RNA, 954 nt, synthetic construct
  misc_feature 1..954: note = derived and/or modified sequence opt1 fromMC1_R__Homo_sapiens__AHC09804
  source 1..954: mol_type = other RNA
atggccgtgcagggcagccagcgccggctgctcgggtccctgaacagcacccccaccgccatcccccagctgggcctcgcggccaaccagacgggggcccgctgcctggaggtctccatcagcgacggcctgttcctctccctggggctggtgagcctcgtggagaacgccctggtcgtggccaccatcgcgaagaaccggaacctgcactcccccatgtactgcttcatctgctgcctcgccctgagcgacctgctcgtgtccggcagcaacgtcctggagaccgccgtgatcctgctcctggaggccggcgcgctggtggcccgcgccgccgtcctccagcagctggacaacgtgatcgacgtgatcacgtgctccagcatgctgtccagcctctgcttcctgggggccatcgcggtcgaccggtacatctccatcttctacgccctgcgctaccacagcatcgtgaccctcccccgggcccgccaggccgtggccgcgatctgggtcgcctccgtggtgttcagcaccctgttcatcgcctactacgaccacgtcgccgtgctgctctgcctggtggtcttcttcctggccatgctcgtgctgatggcggtgctgtacgtccacatgctcgcccgggcctgccagcacgcccagggcatcgcccgcctgcacaagcggcagcgccccgtgcaccaggggttcggcctgaagggggcggtcaccctcaccatcctgctgggcatcttcttcctctgctggggcccgttcttcctgcacctgacgctcatcgtgctgtgccccgagcacccgacctgcgggtgcatcttcaagaacttcaacctgttcctcgccctgatcatctgcaacgccatcatcgaccccctgatctacgccttccactcccaggagctgcggcgcaccctcaaggaggtgctgacctgcagctggtga

SEQ ID NO: 2473 - RNA, 954 nt, synthetic construct
  misc_feature 1..954: note = derived and/or modified sequence opt2 fromMC1_R__Homo_sapiens__AHC09804
  source 1..954: mol_type = other RNA
atggccgtccagggctcccagcgccgcctcctcggctccctcaactccacccccaccgccatcccccagctcggcctcgccgccaaccagaccggcgcccgctgcctcgaggtctccatctccgacggcctcttcctctccctcggcctcgtctccctcgtcgagaacgccctcgtcgtcgccaccatcgccaagaaccgcaacctccactcccccatgtactgcttcatctgctgcctcgccctctccgacctcctcgtctccggctccaacgtcctcgagaccgccgtcatcctcctcctcgaggccggcgccctcgtcgcccgcgccgccgtcctccagcagctcgacaacgtcatcgacgtcatcacctgctcctccatgctctcctccctctgcttcctcggcgccatcgccgtcgaccgctacatctccatcttctacgccctccgctaccactccatcgtcaccctcccccgcgcccgccaggccgtcgccgccatctgggtcgcctccgtcgtcttctccaccctcttcatcgcctactacgaccacgtcgccgtcctcctctgcctcgtcgtcttcttcctcgccatgctcgtcctcatggccgtcctctacgtccacatgctcgcccgcgcctgccagcacgcccagggcatcgcccgcctccacaagcgccagcgccccgtccaccagggcttcggcctcaagggcgccgtcaccctcaccatcctcctcggcatcttcttcctctgctggggccccttcttcctccacctcaccctcatcgtcctctgccccgagcaccccacctgcggctgcatcttcaagaacttcaacctcttcctcgccctcatcatctgcaacgccatcatcgaccccctcatctacgccttccactcccaggagctccgccgcaccctcaaggaggtcctcacctgctcctggtga

SEQ ID NO: 2474 - RNA, 954 nt, synthetic construct
  misc_feature 1..954: note = derived and/or modified sequence opt3 fromMC1_R__Homo_sapiens__AHC09804
  source 1..954: mol_type = other RNA
atggccgtgcagggcagccaaagaaggctgctcgggtcccttaactctacccccacagctatccctcagctgggattggcagccaatcagactggtgcgcggtgcttagaggtctcaattagtgacggcctgttcctaagcctcgggctggtttcccttgtggaaaacgctctggtagtggccacgatagcaaagaatcgcaacttgcactctccaatgtactgttttatctgctgtctcgccctgtcggatctgctcgtctcaggaagcaatgtgttagagaccgctgttattctgcttttggaagcaggcgccctggtggctcgagccgcggtcctacagcaactcgacaacgtgatcgatgtaattacatgcagttccatgctgtctagcctttgtttcctgggtgcaatcgccgttgaccgttatatatccatcttttacgctttgagatatcattcaattgtgactctcccgagggcccggcaggcagtcgctgccatctgggtggcgagtgtggtcttcagcaccctgtttattgcctactatgatcacgttgcagtgttactgtgcctcgtagtgttctttcttgctatgctggtcttgatggccgtgctatacgttcatatgctggctcgcgcctgtcagcacgcacaggggatcgccagactccataaaaggcaacggcccgtgcaccagggattcggcctgaagggcgctgtcacacttaccatactgttggggatctttttcctctgctggggaccatttttcctgcacttaactctgattgtgctatgtcctgagcatcccacatgcggttgtatttttaaaaatttcaacctcttcctggcgcttatcatctgcaatgcaattatagaccctttgatctatgcctttcactctcaggaactgcgccgaaccctcaaggaggtactgacgtgctcctggtga

SEQ ID NO: 2475 - RNA, 954 nt, synthetic construct
  misc_feature 1..954: note = derived and/or modified sequence opt4 fromMC1_R__Homo_sapiens__AHC09804
  source 1..954: mol_type = other RNA
atggccgtgcagggcagccagagaagactgctgggcagcctgaacagcacccccaccgccatcccccagctgggcctggccgccaaccagaccggcgccagatgcctggaggtgagcatcagcgacggcctgttcctgagcctgggcctggtgagcctggtggagaacgccctggtggtggccaccatcgccaagaacagaaacctgcacagccccatgtactgcttcatctgctgcctggccctgagcgacctgctggtgagcggcagcaacgtgctggagaccgccgtgatcctgctgctggaggccggcgccctggtggccagagccgccgtgctgcagcagctggacaacgtgatcgacgtgatcacctgcagcagcatgctgagcagcctgtgcttcctgggcgccatcgccgtggacagatacatcagcatcttctacgccctgagataccacagcatcgtgaccctgcccagagccagacaggccgtggccgccatctgggtggccagcgtggtgttcagcaccctgttcatcgcctactacgaccacgtggccgtgctgctgtgcctggtggtgttcttcctggccatgctggtgctgatggccgtgctgtacgtgcacatgctggccagagcctgccagcacgcccagggcatcgccagactgcacaagagacagagacccgtgcaccagggcttcggcctgaagggcgccgtgaccctgaccatcctgctgggcatcttcttcctgtgctggggccccttcttcctgcacctgaccctgatcgtgctgtgccccgagcaccccacctgcggctgcatcttcaagaacttcaacctgttcctggccctgatcatctgcaacgccatcatcgaccccctgatctacgccttccacagccaggagctgagaagaaccctgaaggaggtgctgacctgcagctggtga

SEQ ID NO: 2476 - RNA, 954 nt, synthetic construct
  misc_feature 1..954: note = derived and/or modified sequence opt5 fromMC1_R__Homo_sapiens__AHC09804
  source 1..954: mol_type = other RNA
atggccgtgcagggcagccaaagacggctgctcgggtccctgaactctacccccacagctatccctcagcttggactggccgcgaatcagacgggcgctcgctgcctcgaggtcagcatttccgacgggctgttcctttctctgggactcgttagcctggtggaaaacgccctggtggtcgccaccatcgctaagaatagaaacctccactccccgatgtactgttttatttgctgtctggccctttctgatctgctcgtgagcggctccaatgttctggagacagctgtgatccttctgctcgaagccggggcgctggtcgcccgggctgccgtgctgcagcaactcgacaacgttattgatgtgattacctgcagctctatgctgtccagcctttgtttcctgggagctatcgccgtcgaccgctatatctctatcttttacgcgctcagatatcattccattgtgacactgccccgggcccgccaggctgtggccgctatctgggtcgccagcgttgtgttctctaccctttttattgcctactatgatcacgtggctgtcctgctctgcctggtggttttctttctggcgatgctcgtgctgatggccgtcctttacgtgcatatgctggctagagcctgtcagcacgcccagggcatcgctcggctccataaacgccaaagacctgttcaccagggcttcgggctgaagggagccgtgacacttaccattctgctcggcatctttttcctgtgctgggggccctttttcctgcacctcacgctgatcgtcctttgtcctgagcatcctacctgcggatgtatttttaaaaatttcaacctgttcctcgcgctgatcatttgcaatgctatcattgaccccctgatctatgcctttcactcccaggaacttcggcgcacactcaaggaggtgctgacctgcagctggtga

SEQ ID NO: 2477 - protein, 317 aa, synthetic construct
  REGION 1..317: note = MC1_R__Homo_sapiens__Q1JUL8
MAVQGSQRRLLGSLNSTPTAIPQLGLAANQTGARCLEVSISDGLFLSLGLVSLVENALVVATIAKNRNLHSPMYCFICCLALSDLLVSGSNVLETAVILLLEAGALVARAAVLQQLDNVTDVITCSSMLSSLCFLGAIAVDRYISIFYALRYHSIVTLPRARRAVAAIWVASVVFSTLFIAYYDHVAVLLCLVVFFLAMLVLMAVLYVHMLARACQHAQGIARLHKRQRPVHQGFGLKGAVTLTILLGIFFLCWGPFFLHLTLIVLCPEHPTCGCIFKNFNLFLALIICNAIIDPLIYAFHSQELRRTLKEVLTCSW

SEQ ID NO: 2478 - RNA, 954 nt, synthetic construct
  misc_feature 1..954: note = MC1_R__Homo_sapiens__BAE94313
  source 1..954: mol_type = other RNA
atggctgtgcagggatcccagagaagacttctgggctccctcaactccacccccacagccatcccccagctggggctggctgccaaccagacaggagcccggtgcctggaggtgtccatctctgacgggctcttcctcagcctggggctggtgagcttggtggagaacgcgctggtggtggccaccatcgccaagaaccggaacctgcactcacccatgtactgcttcatctgctgcctggccttgtcggacctgctggtgagcgggagcaacgtgctggagacggccgtcatcctcctgctggaggccggtgcactggtggcccgggctgcggtgctgcagcagctggacaatgtcactgacgtgatcacctgcagctccatgctgtccagcctctgcttcctgggcgccatcgccgtggaccgctacatctccatcttctacgcactgcgctaccacagcatcgtgaccctgccgcgggcgcggcgagccgttgcggccatctgggtggccagtgtcgtcttcagcacgctcttcatcgcctactacgaccacgtggccgtcctgctgtgcctcgtggtcttcttcctggctatgctggtgctcatggccgtgctgtacgtccacatgctggcccgggcctgccagcacgcccagggcatcgcccggctccacaagaggcagcgcccggtccaccagggctttggccttaaaggcgctgtcaccctcaccatcctgctgggcattttcttcctctgctggggccccttcttcctgcatctcacactcatcgtcctctgccccgagcaccccacgtgcggctgcatcttcaagaacttcaacctctttctcgccctcatcatctgcaatgccatcatcgaccccctcatctacgccttccacagccaggagctccgcaggacgctcaaggaggtgctgacatgctcctggtga

SEQ ID NO: 2479 - RNA, 954 nt, synthetic construct
  misc_feature 1..954: note = derived and/or modified sequence opt1 fromMC1_R__Homo_sapiens__BAE94313
  source 1..954: mol_type = other RNA
atggccgtgcagggcagccagcgccggctgctcgggtccctgaacagcacccccaccgccatcccccagctgggcctcgcggccaaccagacgggggcccgctgcctggaggtctccatcagcgacggcctgttcctctccctggggctggtgagcctcgtggagaacgccctggtcgtggccaccatcgcgaagaaccggaacctgcactcccccatgtactgcttcatctgctgcctcgccctgagcgacctgctcgtgtccggcagcaacgtcctggagaccgccgtgatcctgctcctggaggccggcgcgctggtggcccgcgccgccgtcctccagcagctggacaacgtgaccgacgtgatcacgtgctccagcatgctgtccagcctctgcttcctgggggccatcgcggtcgaccggtacatctccatcttctacgccctgcgctaccacagcatcgtgaccctcccccgggcccgccgggccgtggccgcgatctgggtcgcctccgtggtgttcagcaccctgttcatcgcctactacgaccacgtcgccgtgctgctctgcctggtggtcttcttcctggccatgctcgtgctgatggcggtgctgtacgtccacatgctcgcccgcgcctgccagcacgcccagggcatcgcccggctgcacaagcgccagcggcccgtgcaccaggggttcggcctgaagggggcggtcaccctcacgatcctgctgggcatcttcttcctctgctggggcccgttcttcctgcacctgaccctcatcgtgctgtgccccgagcacccgacctgcgggtgcatcttcaagaacttcaacctgttcctcgccctgatcatctgcaacgccatcatcgaccccctgatctacgccttccactcccaggagctgcgccggaccctcaaggaggtgctgacgtgcagctggtga

SEQ ID NO: 2480 - RNA, 954 nt, synthetic construct
  misc_feature 1..954: note = derived and/or modified sequence opt2 fromMC1_R__Homo_sapiens__BAE94313
  source 1..954: mol_type = other RNA
atggccgtccagggctcccagcgccgcctcctcggctccctcaactccacccccaccgccatcccccagctcggcctcgccgccaaccagaccggcgcccgctgcctcgaggtctccatctccgacggcctcttcctctccctcggcctcgtctccctcgtcgagaacgccctcgtcgtcgccaccatcgccaagaaccgcaacctccactcccccatgtactgcttcatctgctgcctcgccctctccgacctcctcgtctccggctccaacgtcctcgagaccgccgtcatcctcctcctcgaggccggcgccctcgtcgcccgcgccgccgtcctccagcagctcgacaacgtcaccgacgtcatcacctgctcctccatgctctcctccctctgcttcctcggcgccatcgccgtcgaccgctacatctccatcttctacgccctccgctaccactccatcgtcaccctcccccgcgcccgccgcgccgtcgccgccatctgggtcgcctccgtcgtcttctccaccctcttcatcgcctactacgaccacgtcgccgtcctcctctgcctcgtcgtcttcttcctcgccatgctcgtcctcatggccgtcctctacgtccacatgctcgcccgcgcctgccagcacgcccagggcatcgcccgcctccacaagcgccagcgccccgtccaccagggcttcggcctcaagggcgccgtcaccctcaccatcctcctcggcatcttcttcctctgctggggccccttcttcctccacctcaccctcatcgtcctctgccccgagcaccccacctgcggctgcatcttcaagaacttcaacctcttcctcgccctcatcatctgcaacgccatcatcgaccccctcatctacgccttccactcccaggagctccgccgcaccctcaaggaggtcctcacctgctcctggtga

SEQ ID NO: 2481 - RNA, 954 nt, synthetic construct
  misc_feature 1..954: note = derived and/or modified sequence opt3 fromMC1_R__Homo_sapiens__BAE94313
  source 1..954: mol_type = other RNA
atggccgtgcagggcagccaaagaaggctgctcgggtcccttaactctacccccacagctatccctcagctgggattggcagccaatcagactggtgcgcggtgcttagaggtctcaattagtgacggcctgttcctaagcctcgggctggtttcccttgtggaaaacgctctggtagtggccacgatagcaaagaatcgcaacttgcactctccaatgtactgttttatctgctgtctcgccctgtcggatctgctcgtctcaggaagcaatgtgttagagaccgctgttattctgcttttggaagcaggcgccctggtggctcgagccgcggtcctacagcaactcgacaacgtgacagatgtaatcacttgcagttccatgctgtctagcctttgtttcctgggtgcaattgccgttgaccgttatatctccatattttacgctttgagatatcattcaatcgtgaccctcccgagggcccggcgcgcagtcgctgccatttgggtggcgagtgtggtcttcagcacactgtttatcgcctactatgatcacgttgcagtgttactgtgcctcgtagtgttctttcttgctatgctggtcttgatggccgtgctatacgttcatatgctggctagagcctgtcagcacgcacaggggattgccaggctccataaacggcagcgccccgtgcaccaaggattcggcctgaagggcgctgtcacccttactatcctgttggggatatttttcctctgctggggaccctttttcctgcacttaacactgattgtgctatgtccagagcatcctacctgcggttgtatctttaaaaatttcaacctcttcctggcgcttattatctgcaatgcaatcattgaccctttgatatatgcctttcactctcaggaactgcgaagaacgctcaaggaggtactgacttgctcctggtga

SEQ ID NO: 2482 - RNA, 954 nt, synthetic construct
  misc_feature 1..954: note = derived and/or modified sequence opt4 fromMC1_R__Homo_sapiens__BAE94313
  source 1..954: mol_type = other RNA
atggccgtgcagggcagccagagaagactgctgggcagcctgaacagcacccccaccgccatcccccagctgggcctggccgccaaccagaccggcgccagatgcctggaggtgagcatcagcgacggcctgttcctgagcctgggcctggtgagcctggtggagaacgccctggtggtggccaccatcgccaagaacagaaacctgcacagccccatgtactgcttcatctgctgcctggccctgagcgacctgctggtgagcggcagcaacgtgctggagaccgccgtgatcctgctgctggaggccggcgccctggtggccagagccgccgtgctgcagcagctggacaacgtgaccgacgtgatcacctgcagcagcatgctgagcagcctgtgcttcctgggcgccatcgccgtggacagatacatcagcatcttctacgccctgagataccacagcatcgtgaccctgcccagagccagaagagccgtggccgccatctgggtggccagcgtggtgttcagcaccctgttcatcgcctactacgaccacgtggccgtgctgctgtgcctggtggtgttcttcctggccatgctggtgctgatggccgtgctgtacgtgcacatgctggccagagcctgccagcacgcccagggcatcgccagactgcacaagagacagagacccgtgcaccagggcttcggcctgaagggcgccgtgaccctgaccatcctgctgggcatcttcttcctgtgctggggccccttcttcctgcacctgaccctgatcgtgctgtgccccgagcaccccacctgcggctgcatcttcaagaacttcaacctgttcctggccctgatcatctgcaacgccatcatcgaccccctgatctacgccttccacagccaggagctgagaagaaccctgaaggaggtgctgacctgcagctggtga

SEQ ID NO: 2483 - RNA, 954 nt, synthetic construct
  misc_feature 1..954: note = derived and/or modified sequence opt5 fromMC1_R__Homo_sapiens__BAE94313
  source 1..954: mol_type = other RNA
atggccgtgcagggcagccaaagacggctgctcgggtccctgaactctacccccacagctatccctcagcttggactggccgcgaatcagacgggcgctcgctgcctcgaggtcagcatttccgacgggctgttcctttctctgggactcgttagcctggtggaaaacgccctggtggtcgccaccatcgctaagaatagaaacctccactccccgatgtactgttttatttgctgtctggccctttctgatctgctcgtgagcggctccaatgttctggagacagctgtgatccttctgctcgaagccggggcgctggtcgcccgggctgccgtgctgcagcaactcgacaacgttaccgatgtgattacatgcagctctatgctgtccagcctttgtttcctgggagctatcgccgtcgaccgctatatctctatcttttacgcgctcagatatcattccattgtgaccctgccccgggcccgcagagctgtggccgctatttgggtcgccagcgttgtgttctctacactttttatcgcctactatgatcacgtggctgtcctgctctgcctggtggttttctttctggcgatgctcgtgctgatggccgtcctttacgtgcatatgctggctcgggcctgtcagcacgcccagggcattgctcgcctccataaaagacagcggcctgttcaccaaggcttcgggctgaagggagccgtgacccttacgatcctgctcggcatctttttcctgtgctgggggccctttttcctgcacctcaccctgattgtcctttgtcctgagcatcccacatgcggatgtatctttaaaaatttcaacctgttcctcgcgctgattatctgcaatgctattatcgaccctctgatttatgcctttcactcccaggaacttcgcagaaccctcaaggaggtgctgacatgcagctggtga

SEQ ID NO: 2484 - protein, 317 aa, synthetic construct [sequence omitted]

SEQ ID NO: 2485 - RNA, 954 nt, synthetic construct
  misc_feature 1..954: note = MC1_R__Homo_sapiens__AHC09531
  source 1..954: mol_type = other RNA
atggctgtgcagggatcccagagaagacttctgggctccctcaactccacccccacagccatcccccagctggggctggctgccaaccagacaggagcccggtgcctggaggtgtccatctctgacgggctcttcctcagcctggggctggtgagcttggtggagaacgcgctggtggtggccaccatcgccaagaaccggaacctgcactcacccatgtactgcttcatctgctgcctggccttgtcggacctgctggtgagcgggagcaacatgctggagacggccgtcatcctcctgctggaggccggtgcactggtggcccgggctgcggtgctgcagcagctggacaatgtcattgacgtgatcacctgcagctccatgctgtccagcctctgcttcctgggcgccatcgccgtggaccgctacatctccatcttctacgcactgcgctaccacagcatcgtgaccctgccgcgggcgcggcgagccgttgcggccatctgggtggccagtgtcgtcttcagcacgctcttcatcgcctactacgaccacgtggccgtcctgctgtgcctcgtggtcttcttcctggctatgctggtgctcatggccgtgctgtacgtccacatgctggcccgggcctgccagcacgcccagggcatcgcccggctccacaagaggcagcgcccggtccaccagggctttggccttaaaggcgctgtcaccctcaccatcctgctgggcattttcttcctctgctggggccccttcttcctgcatctcacactcatcgtcctctgccccgagcaccccacgtgcggctgcatcttcaagaacttcaacctctttctcgccctcatcatctgcaatgccatcatcgaccccctcatctacgccttccacagccaggagctccgcaggacgctcaaggaggtgctgacgtgctcctggtga

SEQ ID NO: 2486 - RNA, 954 nt, synthetic construct
  misc_feature 1..954: note = derived and/or modified sequence opt1 fromMC1_R__Homo_sapiens__AHC09531
  source 1..954: mol_type = other RNA
atggccgtgcagggcagccagcgccggctgctcgggtccctgaacagcacccccaccgccatcccccagctgggcctcgcggccaaccagacgggggcccgctgcctggaggtctccatcagcgacggcctgttcctctccctggggctggtgagcctcgtggagaacgccctggtcgtggccaccatcgcgaagaaccggaacctgcactcccccatgtactgcttcatctgctgcctcgccctgagcgacctgctcgtgtccggcagcaacatgctggagaccgccgtcatcctgctcctggaggccggcgcgctggtggcccgcgccgccgtgctccagcagctggacaacgtcatcgacgtgatcacgtgctccagcatgctgtccagcctctgcttcctgggggccatcgcggtggaccggtacatctccatcttctacgccctgcgctaccacagcatcgtcaccctcccccgggcccgccgggccgtggccgcgatctgggtggcctccgtcgtgttcagcaccctgttcatcgcctactacgaccacgtggccgtcctgctctgcctggtggtgttcttcctggccatgctcgtcctgatggcggtgctgtacgtgcacatgctcgcccgcgcctgccagcacgcccagggcatcgcccggctgcacaagcgccagcggcccgtccaccaggggttcggcctgaagggggcggtgaccctcaccatcctgctgggcatcttcttcctctgctggggcccgttcttcctgcacctgacgctcatcgtcctgtgccccgagcacccgacctgcgggtgcatcttcaagaacttcaacctgttcctcgccctgatcatctgcaacgccatcatcgaccccctgatctacgccttccactcccaggagctgcgccggaccctcaaggaggtgctgacctgcagctggtga

SEQ ID NO: 2487 - RNA, 954 nt, synthetic construct
  misc_feature 1..954: note = derived and/or modified sequence opt2 fromMC1_R__Homo_sapiens__AHC09531
  source 1..954: mol_type = other RNA
atggccgtccagggctcccagcgccgcctcctcggctccctcaactccacccccaccgccatcccccagctcggcctcgccgccaaccagaccggcgcccgctgcctcgaggtctccatctccgacggcctcttcctctccctcggcctcgtctccctcgtcgagaacgccctcgtcgtcgccaccatcgccaagaaccgcaacctccactcccccatgtactgcttcatctgctgcctcgccctctccgacctcctcgtctccggctccaacatgctcgagaccgccgtcatcctcctcctcgaggccggcgccctcgtcgcccgcgccgccgtcctccagcagctcgacaacgtcatcgacgtcatcacctgctcctccatgctctcctccctctgcttcctcggcgccatcgccgtcgaccgctacatctccatcttctacgccctccgctaccactccatcgtcaccctcccccgcgcccgccgcgccgtcgccgccatctgggtcgcctccgtcgtcttctccaccctcttcatcgcctactacgaccacgtcgccgtcctcctctgcctcgtcgtcttcttcctcgccatgctcgtcctcatggccgtcctctacgtccacatgctcgcccgcgcctgccagcacgcccagggcatcgcccgcctccacaagcgccagcgccccgtccaccagggcttcggcctcaagggcgccgtcaccctcaccatcctcctcggcatcttcttcctctgctggggccccttcttcctccacctcaccctcatcgtcctctgccccgagcaccccacctgcggctgcatcttcaagaacttcaacctcttcctcgccctcatcatctgcaacgccatcatcgaccccctcatctacgccttccactcccaggagctccgccgcaccctcaaggaggtcctcacctgctcctggtga

SEQ ID NO: 2488 - RNA, 954 nt, synthetic construct
  misc_feature 1..954: note = derived and/or modified sequence opt3 fromMC1_R__Homo_sapiens__AHC09531
  source 1..954: mol_type = other RNA
atggccgtgcagggcagccaaagaaggctgctcgggtcccttaactctacccccacagctatccctcagctgggattggcagccaatcagactggtgcgcggtgcttagaggtctcaattagtgacggcctgttcctaagcctcgggctggtttcccttgtggaaaacgctctggtagtggccacgatagcaaagaatcgcaacttgcactctccaatgtactgttttatctgctgtctcgccctgtcggatctgctcgtctcaggaagcaatatgttagagaccgctgtgattctgcttttggaagcaggcgccctggttgctcgagccgcggtgctacagcaactcgacaacgtcatcgatgtgattacatgcagttccatgctgtctagcctttgtttcctgggtgcaatcgccgtagaccgttatatatccatcttttacgctttgagatatcattcaattgttactctcccgagggcccggcgcgcagtggctgccatctgggtcgcgagtgtggtgttcagcaccctgtttattgcctactatgatcacgtcgcagttttactgtgcctcgtggtattctttcttgctatgctggtgttgatggccgtcctatacgtgcatatgctggctagagcctgtcagcacgcacaggggatcgccaggctccataaacggcagcgccccgttcaccaaggattcggcctgaagggcgctgtgacacttaccatactgttggggatctttttcctctgctggggaccatttttcctgcacttaactctgattgtcctatgtcctgagcatcccacatgcggttgtatttttaaaaatttcaacctcttcctggcgcttatcatctgcaatgcaattatagaccctttgatctatgcctttcactctcaggaactgcgaagaaccctcaaggaggtgctgacgtgctcctggtga

SEQ ID NO: 2489 - RNA, 954 nt, synthetic construct
  misc_feature 1..954: note = derived and/or modified sequence opt4 fromMC1_R__Homo_sapiens__AHC09531
  source 1..954: mol_type = other RNA
atggccgtgcagggcagccagagaagactgctgggcagcctgaacagcacccccaccgccatcccccagctgggcctggccgccaaccagaccggcgccagatgcctggaggtgagcatcagcgacggcctgttcctgagcctgggcctggtgagcctggtggagaacgccctggtggtggccaccatcgccaagaacagaaacctgcacagccccatgtactgcttcatctgctgcctggccctgagcgacctgctggtgagcggcagcaacatgctggagaccgccgtgatcctgctgctggaggccggcgccctggtggccagagccgccgtgctgcagcagctggacaacgtgatcgacgtgatcacctgcagcagcatgctgagcagcctgtgcttcctgggcgccatcgccgtggacagatacatcagcatcttctacgccctgagataccacagcatcgtgaccctgcccagagccagaagagccgtggccgccatctgggtggccagcgtggtgttcagcaccctgttcatcgcctactacgaccacgtggccgtgctgctgtgcctggtggtgttcttcctggccatgctggtgctgatggccgtgctgtacgtgcacatgctggccagagcctgccagcacgcccagggcatcgccagactgcacaagagacagagacccgtgcaccagggcttcggcctgaagggcgccgtgaccctgaccatcctgctgggcatcttcttcctgtgctggggccccttcttcctgcacctgaccctgatcgtgctgtgccccgagcaccccacctgcggctgcatcttcaagaacttcaacctgttcctggccctgatcatctgcaacgccatcatcgaccccctgatctacgccttccacagccaggagctgagaagaaccctgaaggaggtgctgacctgcagctggtga

SEQ ID NO: 2490 - RNA, 954 nt, synthetic construct
  misc_feature 1..954: note = derived and/or modified sequence opt5 fromMC1_R__Homo_sapiens__AHC09531
  source 1..954: mol_type = other RNA
atggccgtgcagggcagccaaagacggctgctcgggtccctgaactctacccccacagctatccctcagcttggactggccgcgaatcagacgggcgctcgctgcctcgaggtcagcatttccgacgggctgttcctttctctgggactcgttagcctggtggaaaacgccctggtggtcgccaccatcgctaagaatagaaacctccactccccgatgtactgttttatttgctgtctggccctttctgatctgctcgtgagcggctccaatatgctggagacagctgttatccttctgctcgaagccggggcgctggtggcccgggctgccgtcctgcagcaactcgacaacgtgattgatgttattacctgcagctctatgctgtccagcctttgtttcctgggagctatcgccgtggaccgctatatctctatcttttacgcgctcagatatcattccattgtcacactgccccgggcccgcagagctgtggccgctatctgggtggccagcgtcgttttctctaccctttttattgcctactatgatcacgtggctgtgctgctctgcctggtcgtgttctttctggcgatgctcgttctgatggccgtgctttacgtccatatgctggctcgggcctgtcagcacgcccagggcatcgctcgcctccataaaagacagcggcctgtgcaccaaggcttcgggctgaagggagccgttacacttaccattctgctcggcatctttttcctgtgctgggggccctttttcctgcacctcacgctgatcgtgctttgtcctgagcatcctacctgcggatgtatttttaaaaatttcaacctgttcctcgcgctgatcatttgcaatgctatcattgaccccctgatctatgcctttcactcccaggaacttcgcagaacactcaaggaggtcctgacctgcagctggtga

SEQ ID NO: 2491 - protein, 317 aa, synthetic construct [sequence omitted]

SEQ ID NO: 2492 - RNA, 954 nt, synthetic construct
  misc_feature 1..954: note = MC1_R__Homo_sapiens__BAE94311
  source 1..954: mol_type = other RNA
atggctgtgcagggatcccagagaagacttctgggctccctcaactccacccccacagccatcccccagctggggctggctgccaaccagacaggagcccggtgcctggaggtgtccatctctgacgggctcttcctcagcctggggctggtgagcttggtggagaacgcgctggtggtggccaccatcgccaagaaccagaacctgcactcacccatgtactgcttcatctgctgcctggccttgtcggacctgctggtgagcgggagcaacgtgctggagacggccgtcatcctcctgctggaggccggtgcactggtggcccgggctgcggtgctgcagcagctggacaatgtcattgacgtgatcacctgcagctccatgctgtccagcctctgcttcctgggcgccatcgccgtggaccgctacatctccatcttctacgcactgcgctaccacagcatcgtgaccctgccgcgggcgcggcaagccgttgcggccatctgggtggccagtgtcgtcttcagcacgctcttcatcgcctactacgaccacgtggccgtcctgctgtgcctcgtggtcttcttcctggctatgctggtgctcatggccgtgctgtacgtccacatgctggcccgggcctgccagcacgcccagggcatcgcccggctccacaagaggcagcgcccggtccaccagggctttggccttaaaggcgctgtcaccctcaccatcctgctgggcattttcttcctctgctggggccccttcttcctgcatctcacactcatcgtcctctgccccgagcaccccacgtgcggctgcatcttcaagaacttcaacctctttctcgccctcatcatctgcaatgccatcatcgaccccctcatctacgccttccacagccaggagctccgcaggacgctcaaggaggtgctgacatgctcctggtga

SEQ ID NO: 2493 - RNA, 954 nt, synthetic construct
  misc_feature 1..954: note = derived and/or modified sequence opt1 fromMC1_R__Homo_sapiens__BAE94311
  source 1..954: mol_type = other RNA
atggccgtgcagggcagccagcgccggctgctcgggtccctgaacagcacccccaccgccatcccccagctgggcctcgcggccaaccagacgggggcccgctgcctggaggtctccatcagcgacggcctgttcctctccctggggctggtgagcctcgtggagaacgccctggtcgtggccaccatcgcgaagaaccagaacctgcactcccccatgtactgcttcatctgctgcctcgccctgagcgacctgctcgtgtccggcagcaacgtcctggagaccgccgtgatcctgctcctggaggccggcgcgctggtggcccgggccgccgtcctccagcagctggacaacgtgatcgacgtgatcacgtgctccagcatgctgtccagcctctgcttcctgggggccatcgcggtcgaccgctacatctccatcttctacgccctgcggtaccacagcatcgtgaccctcccccgcgcccggcaggccgtggccgcgatctgggtcgcctccgtggtgttcagcaccctgttcatcgcctactacgaccacgtcgccgtgctgctctgcctggtggtcttcttcctggccatgctcgtgctgatggcggtgctgtacgtccacatgctcgcccgcgcctgccagcacgcccagggcatcgcccggctgcacaagcgccagcggcccgtgcaccaggggttcggcctgaagggggcggtcaccctcaccatcctgctgggcatcttcttcctctgctggggcccgttcttcctgcacctgacgctcatcgtgctgtgccccgagcacccgacctgcgggtgcatcttcaagaacttcaacctgttcctcgccctgatcatctgcaacgccatcatcgaccccctgatctacgccttccactcccaggagctgcgccggaccctcaaggaggtgctgacctgcagctggtga

SEQ ID NO: 2494 - RNA, 954 nt, synthetic construct
  misc_feature 1..954: note = derived and/or modified sequence opt2 fromMC1_R__Homo_sapiens__BAE94311
  source 1..954: mol_type = other RNA
atggccgtccagggctcccagcgccgcctcctcggctccctcaactccacccccaccgccatcccccagctcggcctcgccgccaaccagaccggcgcccgctgcctcgaggtctccatctccgacggcctcttcctctccctcggcctcgtctccctcgtcgagaacgccctcgtcgtcgccaccatcgccaagaaccagaacctccactcccccatgtactgcttcatctgctgcctcgccctctccgacctcctcgtctccggctccaacgtcctcgagaccgccgtcatcctcctcctcgaggccggcgccctcgtcgcccgcgccgccgtcctccagcagctcgacaacgtcatcgacgtcatcacctgctcctccatgctctcctccctctgcttcctcggcgccatcgccgtcgaccgctacatctccatcttctacgccctccgctaccactccatcgtcaccctcccccgcgcccgccaggccgtcgccgccatctgggtcgcctccgtcgtcttctccaccctcttcatcgcctactacgaccacgtcgccgtcctcctctgcctcgtcgtcttcttcctcgccatgctcgtcctcatggccgtcctctacgtccacatgctcgcccgcgcctgccagcacgcccagggcatcgcccgcctccacaagcgccagcgccccgtccaccagggcttcggcctcaagggcgccgtcaccctcaccatcctcctcggcatcttcttcctctgctggggccccttcttcctccacctcaccctcatcgtcctctgccccgagcaccccacctgcggctgcatcttcaagaacttcaacctcttcctcgccctcatcatctgcaacgccatcatcgaccccctcatctacgccttccactcccaggagctccgccgcaccctcaaggaggtcctcacctgctcctggtga

SEQ ID NO: 2495 - RNA, 954 nt, synthetic construct
  misc_feature 1..954: note = derived and/or modified sequence opt3 fromMC1_R__Homo_sapiens__BAE94311
  source 1..954: mol_type = other RNA
atggccgtgcagggcagccaaagaaggctgctcgggtcccttaactctacccccacagctatccctcagctgggattggcagccaatcagactggtgcgcggtgcttagaggtctcaattagtgacggcctgttcctaagcctcgggctggtttcccttgtggaaaacgctctggtagtggccacgatagcaaagaatcagaacttgcactctccaatgtactgttttatctgctgtctcgccctgtcggatctgctcgtctcaggaagcaatgtgttagagaccgctgttattctgcttttggaagcaggcgccctggtggctcgcgccgcggtcctacaacagctcgacaacgtgatcgatgtaattacatgcagttccatgctgtctagcctttgtttcctgggtgcaatcgccgttgaccgatatatatccatcttttacgctttgcgttatcattcaattgtgactctcccgagagccaggcaggcagtcgctgccatctgggtggcgagtgtggtcttcagcaccctgtttattgcctactatgatcacgttgcagtgttactgtgcctcgtagtgttctttcttgctatgctggtcttgatggccgtgctatacgttcatatgctggctcgggcctgtcagcacgcacaagggatcgcccgcctccataaaagacagaggcccgtgcaccagggattcggcctgaagggcgctgtcacacttaccatactgttggggatctttttcctctgctggggaccatttttcctgcacttaactctgattgtgctatgtcctgagcatcccacatgcggttgtatttttaaaaatttcaacctcttcctggcgcttatcatctgcaatgcaattatagaccctttgatctatgcctttcactctcaggaactgcggcgcaccctcaaggaggtactgacgtgctcctggtga

SEQ ID NO: 2496 - RNA, 954 nt, synthetic construct
  misc_feature 1..954: note = derived and/or modified sequence opt4 fromMC1_R__Homo_sapiens__BAE94311
  source 1..954: mol_type = other RNA
atggccgtgcagggcagccagagaagactgctgggcagcctgaacagcacccccaccgccatcccccagctgggcctggccgccaaccagaccggcgccagatgcctggaggtgagcatcagcgacggcctgttcctgagcctgggcctggtgagcctggtggagaacgccctggtggtggccaccatcgccaagaaccagaacctgcacagccccatgtactgcttcatctgctgcctggccctgagcgacctgctggtgagcggcagcaacgtgctggagaccgccgtgatcctgctgctggaggccggcgccctggtggccagagccgccgtgctgcagcagctggacaacgtgatcgacgtgatcacctgcagcagcatgctgagcagcctgtgcttcctgggcgccatcgccgtggacagatacatcagcatcttctacgccctgagataccacagcatcgtgaccctgcccagagccagacaggccgtggccgccatctgggtggccagcgtggtgttcagcaccctgttcatcgcctactacgaccacgtggccgtgctgctgtgcctggtggtgttcttcctggccatgctggtgctgatggccgtgctgtacgtgcacatgctggccagagcctgccagcacgcccagggcatcgccagactgcacaagagacagagacccgtgcaccagggcttcggcctgaagggcgccgtgaccctgaccatcctgctgggcatcttcttcctgtgctggggccccttcttcctgcacctgaccctgatcgtgctgtgccccgagcaccccacctgcggctgcatcttcaagaacttcaacctgttcctggccctgatcatctgcaacgccatcatcgaccccctgatctacgccttccacagccaggagctgagaagaaccctgaaggaggtgctgacctgcagctggtga

SEQ ID NO: 2497 - RNA, 954 nt, synthetic construct
  misc_feature 1..954: note = derived and/or modified sequence opt5 fromMC1_R__Homo_sapiens__BAE94311
  source 1..954: mol_type = other RNA
atggccgtgcagggcagccaaagacggctgctcgggtccctgaactctacccccacagctatccctcagcttggactggccgcgaatcagacgggcgctcgctgcctcgaggtcagcatttccgacgggctgttcctttctctgggactcgttagcctggtggaaaacgccctggtggtcgccaccatcgctaagaatcagaacctccactccccgatgtactgttttatttgctgtctggccctttctgatctgctcgtgagcggctccaatgttctggagacagctgtgatccttctgctcgaagccggggcgctggtcgccagagctgccgtgctgcaacagctcgacaacgttattgatgtgattacctgcagctctatgctgtccagcctttgtttcctgggagctatcgccgtcgaccggtatatctctatcttttacgcgctccgctatcattccattgtgacactgcccagagcccggcaggctgtggccgctatctgggtcgccagcgttgtgttctctaccctttttattgcctactatgatcacgtggctgtcctgctctgcctggtggttttctttctggcgatgctcgtgctgatggccgtcctttacgtgcatatgctggctcgcgcctgtcagcacgcccaaggcatcgctagactccataaacggcagcgccctgttcaccagggcttcgggctgaagggagccgtgacacttaccattctgctcggcatctttttcctgtgctgggggccctttttcctgcacctcacgctgatcgtcctttgtcctgagcatcctacctgcggatgtatttttaaaaatttcaacctgttcctcgcgctgatcatttgcaatgctatcattgaccccctgatctatgcctttcactcccaggaacttagacggacactcaaggaggtgctgacctgcagctggtga

SEQ ID NO: 2498 - protein, 317 aa, synthetic construct [sequence omitted]

SEQ ID NO: 2499 - RNA, 954 nt, synthetic construct
  misc_feature 1..954: note = MC1_R__Homo_sapiens__BAE94309
  source 1..954: mol_type = other RNA
atggctgtgcagggatcccagagaagacttctgggctccctcaactccacccccacagccatcccccagctggggctggctgccaaccagacaggagcccggtgcctggaggtgtccatctctgacgggctcttcctcagcctggggctggtgagcttggtggagaacgcgctggtggtggccaccatcgccaagaaccggaacctgcactcacccatgtactgcttcatctgctgcctggccttgtcggacctgctggtgagcgggagcaacgtgctggagacggccgtcatcctcctgctggaggccggtgcactggtggcccgggctgcggtgctgcagcagctggacaatgtcattgacgtgatcacctgcagctccatgctgtccagcctctgcttcctgggcgccatcgccgtggaccgctacatctccatcttctacgcactgcgctaccacagcatcgtgaccctgccgcgggcgcggcaagccgttggggccatctgggtggccagtgtcgtcttcagcacgctcttcatcgcctactacgaccacgtggccgtcctgctgtgcctcgtggtcttcttcctggctatgctggtgctcatggccgtgctgtacgtccacatgctggcccgggcctgccagcacgcccagggcatcgcccggctccacaagaggcagcgcccggtccaccagggctttggccttaaaggcgctgtcaccctcaccatcctgctgggcattttcttcctctgctggggccccttcttcctgcatctcacactcatcgtcctctgccccgagcaccccacgtgcggctgcatcttcaagaacttcaacctctttctcgccctcatcatctgcaatgccatcatcgaccccctcatctacgccttccacagccaggagctccgcaggacgctcaaggaggtgctgacatgctcctggtga

SEQ ID NO: 2500 - RNA, 954 nt, synthetic construct
  misc_feature 1..954: note = derived and/or modified sequence opt1 fromMC1_R__Homo_sapiens__BAE94309
  source 1..954: mol_type = other RNA
atggccgtgcagggcagccagcgccggctgctcgggtccctgaacagcacccccaccgccatcccccagctgggcctcgcggccaaccagacgggggcccgctgcctggaggtctccatcagcgacggcctgttcctctccctggggctggtgagcctcgtggagaacgccctggtcgtggccaccatcgcgaagaaccggaacctgcactcccccatgtactgcttcatctgctgcctcgccctgagcgacctgctcgtgtccggcagcaacgtcctggagaccgccgtgatcctgctcctggaggccggcgcgctggtggcccgcgccgccgtcctccagcagctggacaacgtgatcgacgtgatcacgtgctccagcatgctgtccagcctctgcttcctgggggccatcgcggtcgaccggtacatctccatcttctacgccctgcgctaccacagcatcgtgaccctcccccgggcccgccaggccgtgggcgccatctgggtcgcgtccgtggtgttcagcaccctgttcatcgcctactacgaccacgtcgccgtgctgctctgcctggtggtcttcttcctggccatgctcgtgctgatggccgtgctgtacgtccacatgctcgcgcgggcctgccagcacgcccaggggatcgcccgcctgcacaagcggcagcgccccgtgcaccagggcttcgggctgaagggcgccgtcaccctcaccatcctgctgggcatcttcttcctctgctgggggccgttcttcctgcacctgacgctcatcgtgctgtgccccgagcacccgacctgcggctgcatcttcaagaacttcaacctgttcctcgcgctgatcatctgcaacgccatcatcgaccccctgatctacgccttccactcccaggagctgcggcgcaccctcaaggaggtgctgacctgcagctggtga

SEQ ID NO: 2501 - RNA, 954 nt, synthetic construct
  misc_feature 1..954: note = derived and/or modified sequence opt2 fromMC1_R__Homo_sapiens__BAE94309
  source 1..954: mol_type = other RNA
atggccgtccagggctcccagcgccgcctcctcggctccctcaactccacccccaccgccatcccccagctcggcctcgccgccaaccagaccggcgcccgctgcctcgaggtctccatctccgacggcctcttcctctccctcggcctcgtctccctcgtcgagaacgccctcgtcgtcgccaccatcgccaagaaccgcaacctccactcccccatgtactgcttcatctgctgcctcgccctctccgacctcctcgtctccggctccaacgtcctcgagaccgccgtcatcctcctcctcgaggccggcgccctcgtcgcccgcgccgccgtcctccagcagctcgacaacgtcatcgacgtcatcacctgctcctccatgctctcctccctctgcttcctcggcgccatcgccgtcgaccgctacatctccatcttctacgccctccgctaccactccatcgtcaccctcccccgcgcccgccaggccgtcggcgccatctgggtcgcctccgtcgtcttctccaccctcttcatcgcctactacgaccacgtcgccgtcctcctctgcctcgtcgtcttcttcctcgccatgctcgtcctcatggccgtcctctacgtccacatgctcgcccgcgcctgccagcacgcccagggcatcgcccgcctccacaagcgccagcgccccgtccaccagggcttcggcctcaagggcgccgtcaccctcaccatcctcctcggcatcttcttcctctgctggggccccttcttcctccacctcaccctcatcgtcctctgccccgagcaccccacctgcggctgcatcttcaagaacttcaacctcttcctcgccctcatcatctgcaacgccatcatcgaccccctcatctacgccttccactcccaggagctccgccgcaccctcaaggaggtcctcacctgctcctggtga

SEQ ID NO: 2502 - RNA, 954 nt, synthetic construct
  misc_feature 1..954: note = derived and/or modified sequence opt3 fromMC1_R__Homo_sapiens__BAE94309
  source 1..954: mol_type = other RNA
atggccgtgcagggcagccaaagaaggctgctcgggtcccttaactctacccccacagctatccctcagctgggattggcagccaatcagactggtgcgcggtgcttagaggtctcaattagtgacggcctgttcctaagcctcgggctggtttcccttgtggaaaacgctctggtagtggccacgatagcaaagaatcgcaacttgcactctccaatgtactgttttatctgctgtctcgccctgtcggatctgctcgtctcaggaagcaatgtgttagagaccgctgttattctgcttttggaagcaggcgccctggtggctcgagccgcggtcctacagcaactcgacaacgtgatcgatgtaattacatgcagttccatgctgtctagcctttgtttcctgggtgcaatcgccgttgaccgttatatatccatcttttacgctttgagatatcattcaattgtgactctcccgagggcccggcaggcagtcggggctatctgggtggccagtgtggtcttcagcaccctgtttattgcgtactatgatcacgttgccgtgttactgtgcctcgtagtgttctttcttgcaatgctggtcttgatggctgtgctatacgttcatatgctggcccgcgcttgtcagcacgcccagggaatcgcaagactccataaaaggcaacggcccgtgcaccagggcttcggcctgaagggggccgtcacacttaccatactgttgggaatctttttcctctgctggggtccatttttcctgcacttaactctgattgtgctatgtcctgagcatcccacatgcggctgtatttttaaaaatttcaacctcttcctggctcttatcatctgcaatgcgattatagaccctttgatctatgcatttcactctcaggaactgcgccgaaccctcaaggaggtactgacgtgctcctggtga

SEQ ID NO: 2503 - RNA, 954 nt, synthetic construct
  misc_feature 1..954: note = derived and/or modified sequence opt4 fromMC1_R__Homo_sapiens__BAE94309
  source 1..954: mol_type = other RNA
atggccgtgcagggcagccagagaagactgctgggcagcctgaacagcacccccaccgccatcccccagctgggcctggccgccaaccagaccggcgccagatgcctggaggtgagcatcagcgacggcctgttcctgagcctgggcctggtgagcctggtggagaacgccctggtggtggccaccatcgccaagaacagaaacctgcacagccccatgtactgcttcatctgctgcctggccctgagcgacctgctggtgagcggcagcaacgtgctggagaccgccgtgatcctgctgctggaggccggcgccctggtggccagagccgccgtgctgcagcagctggacaacgtgatcgacgtgatcacctgcagcagcatgctgagcagcctgtgcttcctgggcgccatcgccgtggacagatacatcagcatcttctacgccctgagataccacagcatcgtgaccctgcccagagccagacaggccgtgggcgccatctgggtggccagcgtggtgttcagcaccctgttcatcgcctactacgaccacgtggccgtgctgctgtgcctggtggtgttcttcctggccatgctggtgctgatggccgtgctgtacgtgcacatgctggccagagcctgccagcacgcccagggcatcgccagactgcacaagagacagagacccgtgcaccagggcttcggcctgaagggcgccgtgaccctgaccatcctgctgggcatcttcttcctgtgctggggccccttcttcctgcacctgaccctgatcgtgctgtgccccgagcaccccacctgcggctgcatcttcaagaacttcaacctgttcctggccctgatcatctgcaacgccatcatcgaccccctgatctacgccttccacagccaggagctgagaagaaccctgaaggaggtgctgacctgcagctggtga

SEQ ID NO: 2504 - RNA, 954 nt, synthetic construct
  misc_feature 1..954: note = derived and/or modified sequence opt5 fromMC1_R__Homo_sapiens__BAE94309
  source 1..954: mol_type = other RNA
atggccgtgcagggcagccaaagacggctgctcgggtccctgaactctacccccacagctatccctcagcttggactggccgcgaatcagacgggcgctcgctgcctcgaggtcagcatttccgacgggctgttcctttctctgggactcgttagcctggtggaaaacgccctggtggtcgccaccatcgctaagaatagaaacctccactccccgatgtactgttttatttgctgtctggccctttctgatctgctcgtgagcggctccaatgttctggagacagctgtgatccttctgctcgaagccggggcgctggtcgcccgggctgccgtgctgcagcaactcgacaacgttattgatgtgattacctgcagctctatgctgtccagcctttgtttcctgggagctatcgccgtcgaccgctatatctctatcttttacgcgctcagatatcattccattgtgacactgccccgggcccgccaggctgtgggcgccatctgggtcgctagcgttgtgttctctaccctttttattgcctactatgatcacgtggccgtcctgctctgcctggtggttttctttctggctatgctcgtgctgatggcggtcctttacgtgcatatgctggccagagcttgtcagcacgcccagggcatcgcccggctccataaacgccaaagacctgttcaccaggggttcggactgaagggcgctgtgacacttaccattctgctcgggatctttttcctgtgctggggaccctttttcctgcacctcacgctgatcgtcctttgtcctgagcatcctacctgcggctgtatttttaaaaatttcaacctgttcctcgccctgatcatttgcaatgcgatcattgaccccctgatctatgcttttcactcccaggaacttcggcgcacactcaaggaggtgctgacctgcagctggtga

SEQ ID NO: 2505 - protein, 317 aa, synthetic construct [sequence omitted]

SEQ ID NO: 2506 - RNA, 954 nt, synthetic construct
  misc_feature 1..954: note = MC1_R__Homo_sapiens__BAE94308
  source 1..954: mol_type = other RNA
atggctgtgcagggatcccagagaagacttctgggctccctcaactccacccccacagccatcccccagctggggctggctgccaaccagacaggagcccggtgcctggaggtgtccatctctgacgggctcttcctcagcctggggctggtgagcttggtggagaacgcgctggtggtggccaccatcgccaagaaccggaacctgcactcacccatgtactgcttcatctgctgcctggccttgtcggacctgctggtgagcgggagcaacgtgctggagacggccgtcatcctcctgctggaggccggtgcactggtggcccgggctgcggtgctgcagcagctggacaatgtcactgacgtgatcacctgcagctccatgctgtccagcctctgcttcctgggcgccatcgccgtggaccgctacatctccatcttctacgcactgcgctaccacagcatcgtgaccctgacgcgggcgcggcgagccgttgcggccatctgggtggccagtgtcgtcttcagcacgctcttcatcgcctactacgaccacgtggccgtcctgctgtgcctcgtggtcttcttcctggctatgctggtgctcatggccgtgctgtacgtccacatgctggcccgggcctgccagcacgcccagggcatcgcccggctccacaagaggcagcgcccggtccaccagggctttggccttaaaggcgctgtcaccctcaccatcctgctgggcattttcttcctctgctggggccccttcttcctgcatctcacactcatcgtcctctgccccgagcaccccacgtgcggctgcatcttcaagaacttcaacctctttctcgccctcatcatctgcaatgccatcatcgaccccctcatctacgccttccacagccaggagctccgcaggacgctcaaggaggtgctgacatgctcctggtga

SEQ ID NO: 2507 - RNA, 954 nt, synthetic construct
  misc_feature 1..954: note = derived and/or modified sequence opt1 fromMC1_R__Homo_sapiens__BAE94308
  source 1..954: mol_type = other RNA
atggccgtgcagggcagccagcgccggctgctcgggtccctgaacagcacccccaccgccatcccccagctgggcctcgcggccaaccagacgggggcccgctgcctggaggtctccatcagcgacggcctgttcctctccctggggctggtgagcctcgtggagaacgccctggtcgtggccaccatcgcgaagaaccggaacctgcactcccccatgtactgcttcatctgctgcctcgccctgagcgacctgctcgtgtccggcagcaacgtcctggagaccgccgtgatcctgctcctggaggccggcgcgctggtggcccgcgccgccgtcctccagcagctggacaacgtgaccgacgtgatcacgtgctccagcatgctgtccagcctctgcttcctgggggccatcgcggtcgaccggtacatctccatcttctacgccctgcgctaccacagcatcgtgaccctcacccgggcccgccgggccgtggccgcgatctgggtcgcctccgtggtgttcagcaccctgttcatcgcctactacgaccacgtcgccgtgctgctctgcctggtggtcttcttcctggccatgctcgtgctgatggcggtgctgtacgtccacatgctcgcccgcgcctgccagcacgcccagggcatcgcccggctgcacaagcgccagcggcccgtgcaccaggggttcggcctgaagggggcggtcacgctcaccatcctgctgggcatcttcttcctctgctggggccccttcttcctgcacctgaccctcatcgtgctgtgcccggagcacccgacctgcgggtgcatcttcaagaacttcaacctgttcctcgccctgatcatctgcaacgccatcatcgaccccctgatctacgccttccactcccaggagctgcgccggacgctcaaggaggtgctgacctgcagctggtga

SEQ ID NO: 2508 - RNA, 954 nt, synthetic construct
  misc_feature 1..954: note = derived and/or modified sequence opt2 fromMC1_R__Homo_sapiens__BAE94308
  source 1..954: mol_type = other RNA
atggccgtccagggctcccagcgccgcctcctcggctccctcaactccacccccaccgccatcccccagctcggcctcgccgccaaccagaccggcgcccgctgcctcgaggtctccatctccgacggcctcttcctctccctcggcctcgtctccctcgtcgagaacgccctcgtcgtcgccaccatcgccaagaaccgcaacctccactcccccatgtactgcttcatctgctgcctcgccctctccgacctcctcgtctccggctccaacgtcctcgagaccgccgtcatcctcctcctcgaggccggcgccctcgtcgcccgcgccgccgtcctccagcagctcgacaacgtcaccgacgtcatcacctgctcctccatgctctcctccctctgcttcctcggcgccatcgccgtcgaccgctacatctccatcttctacgccctccgctaccactccatcgtcaccctcacccgcgcccgccgcgccgtcgccgccatctgggtcgcctccgtcgtcttctccaccctcttcatcgcctactacgaccacgtcgccgtcctcctctgcctcgtcgtcttcttcctcgccatgctcgtcctcatggccgtcctctacgtccacatgctcgcccgcgcctgccagcacgcccagggcatcgcccgcctccacaagcgccagcgccccgtccaccagggcttcggcctcaagggcgccgtcaccctcaccatcctcctcggcatcttcttcctctgctggggccccttcttcctccacctcaccctcatcgtcctctgccccgagcaccccacctgcggctgcatcttcaagaacttcaacctcttcctcgccctcatcatctgcaacgccatcatcgaccccctcatctacgccttccactcccaggagctccgccgcaccctcaaggaggtcctcacctgctcctggtga

SEQ ID NO: 2509 - RNA, 954 nt, synthetic construct
  misc_feature 1..954: note = derived and/or modified sequence opt3 fromMC1_R__Homo_sapiens__BAE94308
  source 1..954: mol_type = other RNA
atggccgtgcagggcagccaaagaaggctgctcgggtcccttaactctacccccacagctatccctcagctgggattggcagccaatcagactggtgcgcggtgcttagaggtctcaattagtgacggcctgttcctaagcctcgggctggtttcccttgtggaaaacgctctggtagtggccacgatagcaaagaatcgcaacttgcactctccaatgtactgttttatctgctgtctcgccctgtcggatctgctcgtctcaggaagcaatgtgttagagaccgctgttattctgcttttggaagcaggcgccctggtggctcgagccgcggtcctacagcaactcgacaacgtgacagatgtaatcacttgcagttccatgctgtctagcctttgtttcctgggtgcaattgccgttgaccgttatatctccatattttacgctttgagatatcattcaatcgtgaccctcacaagggcccggcgcgcagtcgctgccatttgggtggcgagtgtggtcttcagcaccctgtttatcgcctactatgatcacgttgcagtgttactgtgcctcgtagtgttctttcttgctatgctggtcttgatggccgtgctatacgttcatatgctggctagagcctgtcagcacgcacaggggattgccaggctccataaacggcagcgcccggtgcaccaaggattcggcctgaagggcgctgtcactcttacaatcctgttggggatatttttcctctgctggggaccctttttcctgcacttaaccctgattgtgctatgtcctgagcatccaacgtgcggttgtatctttaaaaatttcaacctcttcctggcgcttattatctgcaatgcaatcattgaccccttgatatatgcctttcactctcaggaactgcgaagaactctcaaggaggtactgacctgctcctggtga

SEQ ID NO: 2510 - RNA, 954 nt, synthetic construct
  misc_feature 1..954: note = derived and/or modified sequence opt4 fromMC1_R__Homo_sapiens__BAE94308
  source 1..954: mol_type = other RNA
atggccgtgcagggcagccagagaagactgctgggcagcctgaacagcacccccaccgccatcccccagctgggcctggccgccaaccagaccggcgccagatgcctggaggtgagcatcagcgacggcctgttcctgagcctgggcctggtgagcctggtggagaacgccctggtggtggccaccatcgccaagaacagaaacctgcacagccccatgtactgcttcatctgctgcctggccctgagcgacctgctggtgagcggcagcaacgtgctggagaccgccgtgatcctgctgctggaggccggcgccctggtggccagagccgccgtgctgcagcagctggacaacgtgaccgacgtgatcacctgcagcagcatgctgagcagcctgtgcttcctgggcgccatcgccgtggacagatacatcagcatcttctacgccctgagataccacagcatcgtgaccctgaccagagccagaagagccgtggccgccatctgggtggccagcgtggtgttcagcaccctgttcatcgcctactacgaccacgtggccgtgctgctgtgcctggtggtgttcttcctggccatgctggtgctgatggccgtgctgtacgtgcacatgctggccagagcctgccagcacgcccagggcatcgccagactgcacaagagacagagacccgtgcaccagggcttcggcctgaagggcgccgtgaccctgaccatcctgctgggcatcttcttcctgtgctggggccccttcttcctgcacctgaccctgatcgtgctgtgccccgagcaccccacctgcggctgcatcttcaagaacttcaacctgttcctggccctgatcatctgcaacgccatcatcgaccccctgatctacgccttccacagccaggagctgagaagaaccctgaaggaggtgctgacctgcagctggtga

SEQ ID NO: 2511 - RNA, 954 nt, synthetic construct
  misc_feature 1..954: note = derived and/or modified sequence opt5 fromMC1_R__Homo_sapiens__BAE94308
  source 1..954: mol_type = other RNA
atggccgtgcagggcagccaaagacggctgctcgggtccctgaactctacccccacagctatccctcagcttggactggccgcgaatcagacgggcgctcgctgcctcgaggtcagcatttccgacgggctgttcctttctctgggactcgttagcctggtggaaaacgccctggtggtcgccaccatcgctaagaatagaaacctccactccccgatgtactgttttatttgctgtctggccctttctgatctgctcgtgagcggctccaatgttctggagacagctgtgatccttctgctcgaagccggggcgctggtcgcccgggctgccgtgctgcagcaactcgacaacgttaccgatgtgattacatgcagctctatgctgtccagcctttgtttcctgggagctatcgccgtcgaccgctatatctctatcttttacgcgctcagatatcattccattgtgaccctgacacgggcccgcagagctgtggccgctatttgggtcgccagcgttgtgttctctaccctttttatcgcctactatgatcacgtggctgtcctgctctgcctggtggttttctttctggcgatgctcgtgctgatggccgtcctttacgtgcatatgctggctcgggcctgtcagcacgcccagggcattgctcgcctccataaaagacagcggcccgttcaccaaggcttcgggctgaagggagccgtgacgcttaccatcctgctcggcatctttttcctgtgctgggggccctttttcctgcacctcacactgattgtcctttgtcctgagcatcctacctgcggatgtatctttaaaaatttcaacctgttcctcgcgctgattatctgcaatgctattatcgaccccctgatttatgcctttcactcccaggaacttcgcagaacactcaaggaggtgctgacctgcagctggtga

SEQ ID NO: 2512 - protein, 317 aa, synthetic construct [sequence omitted]

SEQ ID NO: 2513 - RNA, 954 nt, synthetic construct
  misc_feature 1..954: note = MC1_R__Homo_sapiens__BAE94307
  source 1..954: mol_type = other RNA
atggctgtgcagggatcccagagaagacttctgggctccctcaactccacccccacagccatcccccagctggggctggctgccaaccagacaggagcccggtgcctggaggtgtccatctctgacgggctcttcctcagcctggggctggtgagcttggtggagaacgcgctggtggtggccaccatcgccaagaaccggaacctgcactcacccatgtactgcttcatctgctgcctggccttgtcggacctgctggtgagcgggagcaacatgctggagacggccgtcatcctcctgctggaggccggtgcactggtggcccgggctgcggtgctgcagcagctggacaatgtcattgacgtgatcacctgcagctccatgctgtccagcctctgcttcctgggcgccatcgccgtggaccgctacatctccatcttctacgcactgcgctaccacagcatcgtgatcctgccgcgggcgcggcgagccgttgcggccatctgggtggccagtgtcgtcttcagcacgctcttcatcgcctactacgaccacgtggccgtcctgctgtgcctcgtggtcttcttcctggctatgctggtgctcatggccgtgctgtacgtccacatgctggcccgggcctgccagcacgcccagggcatcgcccggctccacaagaggcagcgcccggtccaccagggctttggccttaaaggcgctgtcaccctcaccatcctgctgggcattttcttcctctgctggggccccttcttcctgcatctcacactcatcgtcctctgccccgagcaccccacgtgcggctgcatcttcaagaacttcaacctctttctcgccctcatcatctgcaatgccatcatcgaccccctcatctacgccttccacagccaggagctccgcaggacgctcaaggaggtgctgacgtgctcctggtga

SEQ ID NO: 2514 - RNA, 954 nt, synthetic construct
  misc_feature 1..954: note = derived and/or modified sequence opt1 fromMC1_R__Homo_sapiens__BAE94307
  source 1..954: mol_type = other RNA
atggccgtgcagggcagccagcgccggctgctcgggtccctgaacagcacccccaccgccatcccgcagctgggcctcgcggccaaccagacgggggcccgctgcctggaggtctccatcagcgacggcctgttcctctccctggggctggtgagcctcgtggagaacgccctggtcgtggccaccatcgcgaagaaccggaacctgcactcccccatgtactgcttcatctgctgcctcgccctgagcgacctgctcgtgtccggcagcaacatgctggagaccgccgtcatcctgctcctggaggccggcgcgctggtggcccgcgccgccgtgctccagcagctggacaacgtcatcgacgtgatcacgtgctccagcatgctgtccagcctctgcttcctgggggccatcgcggtggaccggtacatctccatcttctacgccctgcgctaccacagcatcgtcatcctcccccgggcccgccgggccgtggccgcgatctgggtggcctccgtcgtgttcagcaccctgttcatcgcctactacgaccacgtggccgtcctgctctgcctggtggtgttcttcctggccatgctcgtcctgatggcggtgctgtacgtgcacatgctcgcccgcgcctgccagcacgcccagggcatcgcccggctgcacaagcgccagcggcccgtccaccaggggttcggcctgaagggggcggtgaccctcaccatcctgctgggcatcttcttcctctgctggggcccgttcttcctgcacctgaccctcatcgtcctgtgccccgagcaccccacgtgcgggtgcatcttcaagaacttcaacctgttcctcgccctgatcatctgcaacgccatcatcgaccccctgatctacgccttccactcccaggagctgcgccggaccctcaaggaggtgctgacctgcagctggtga

SEQ ID NO: 2515 - RNA, 954 nt, synthetic construct
  misc_feature 1..954: note = derived and/or modified sequence opt2 fromMC1_R__Homo_sapiens__BAE94307
  source 1..954: mol_type = other RNA
atggccgtccagggctcccagcgccgcctcctcggctccctcaactccacccccaccgccatcccccagctcggcctcgccgccaaccagaccggcgcccgctgcctcgaggtctccatctccgacggcctcttcctctccctcggcctcgtctccctcgtcgagaacgccctcgtcgtcgccaccatcgccaagaaccgcaacctccactcccccatgtactgcttcatctgctgcctcgccctctccgacctcctcgtctccggctccaacatgctcgagaccgccgtcatcctcctcctcgaggccggcgccctcgtcgcccgcgccgccgtcctccagcagctcgacaacgtcatcgacgtcatcacctgctcctccatgctctcctccctctgcttcctcggcgccatcgccgtcgaccgctacatctccatcttctacgccctccgctaccactccatcgtcatcctcccccgcgcccgccgcgccgtcgccgccatctgggtcgcctccgtcgtcttctccaccctcttcatcgcctactacgaccacgtcgccgtcctcctctgcctcgtcgtcttcttcctcgccatgctcgtcctcatggccgtcctctacgtccacatgctcgcccgcgcctgccagcacgcccagggcatcgcccgcctccacaagcgccagcgccccgtccaccagggcttcggcctcaagggcgccgtcaccctcaccatcctcctcggcatcttcttcctctgctggggccccttcttcctccacctcaccctcatcgtcctctgccccgagcaccccacctgcggctgcatcttcaagaacttcaacctcttcctcgccctcatcatctgcaacgccatcatcgaccccctcatctacgccttccactcccaggagctccgccgcaccctcaaggaggtcctcacctgctcctggtga

SEQ ID NO: 2516 - RNA, 954 nt, synthetic construct
  misc_feature 1..954: note = derived and/or modified sequence opt3 fromMC1_R__Homo_sapiens__BAE94307
  source 1..954: mol_type = other RNA
atggccgtgcagggcagccaaagaaggctgctcgggtcccttaactctacccccacagctatccctcagctgggattggcagccaatcagactggtgcgcggtgcttagaggtctcaattagtgacggcctgttcctaagcctcgggctggtttcccttgtggaaaacgctctggtagtggccacgatagcaaagaatcgcaacttgcactctccaatgtactgttttatctgctgtctcgccctgtcggatctgctcgtctcaggaagcaatatgttagagaccgctgtgattctgcttttggaagcaggcgccctggttgctcgagccgcggtgctacagcaactcgacaacgtcatcgatgtgattacatgcagttccatgctgtctagcctttgtttcctgggtgcaatcgccgtagaccgttatatatccatcttttacgctttgagatatcattcaattgttatcctcccgagggcccggcgcgcagtggctgccatttgggtcgcgagtgtggtgttcagcactctgtttatcgcctactatgatcacgtcgcagttttactgtgcctcgtggtattctttcttgctatgctggtgttgatggccgtcctatacgtgcatatgctggctagagcctgtcagcacgcacaggggatagccaggctccataaacggcagcgccccgttcaccaaggattcggcctgaagggcgctgtgacccttacaattctgttggggatctttttcctctgctggggaccatttttcctgcacttaaccctgattgtcctatgtcctgagcatcccacttgcggttgtatctttaaaaatttcaacctcttcctggcgcttatcatttgcaatgcaataatcgaccctttgatttatgcctttcactctcaggaactgcgaagaacactcaaggaggtgctgacctgctcctggtga

SEQ ID NO: 2517 - RNA, 954 nt, synthetic construct
  misc_feature 1..954: note = derived and/or modified sequence opt4 fromMC1_R__Homo_sapiens__BAE94307
  source 1..954: mol_type = other RNA
atggccgtgcagggcagccagagaagactgctgggcagcctgaacagcacccccaccgccatcccccagctgggcctggccgccaaccagaccggcgccagatgcctggaggtgagcatcagcgacggcctgttcctgagcctgggcctggtgagcctggtggagaacgccctggtggtggccaccatcgccaagaacagaaacctgcacagccccatgtactgcttcatctgctgcctggccctgagcgacctgctggtgagcggcagcaacatgctggagaccgccgtgatcctgctgctggaggccggcgccctggtggccagagccgccgtgctgcagcagctggacaacgtgatcgacgtgatcacctgcagcagcatgctgagcagcctgtgcttcctgggcgccatcgccgtggacagatacatcagcatcttctacgccctgagataccacagcatcgtgatcctgcccagagccagaagagccgtggccgccatctgggtggccagcgtggtgttcagcaccctgttcatcgcctactacgaccacgtggccgtgctgctgtgcctggtggtgttcttcctggccatgctggtgctgatggccgtgctgtacgtgcacatgctggccagagcctgccagcacgcccagggcatcgccagactgcacaagagacagagacccgtgcaccagggcttcggcctgaagggcgccgtgaccctgaccatcctgctgggcatcttcttcctgtgctggggccccttcttcctgcacctgaccctgatcgtgctgtgccccgagcaccccacctgcggctgcatcttcaagaacttcaacctgttcctggccctgatcatctgcaacgccatcatcgaccccctgatctacgccttccacagccaggagctgagaagaaccctgaaggaggtgctgacctgcagctggtga

SEQ ID NO: 2518 - RNA, 954 nt, synthetic construct
  misc_feature 1..954: note = derived and/or modified sequence opt5 fromMC1_R__Homo_sapiens__BAE94307
  source 1..954: mol_type = other RNA
atggccgtgcagggcagccaaagacggctgctcgggtccctgaactctacccccacagctatccctcagcttggactggccgcgaatcagacgggcgctcgctgcctcgaggtcagcatttccgacgggctgttcctttctctgggactcgttagcctggtggaaaacgccctggtggtcgccaccatcgctaagaatagaaacctccactccccgatgtactgttttatttgctgtctggccctttctgatctgctcgtgagcggctccaatatgctggagacagctgttatccttctgctcgaagccggggcgctggtggcccgggctgccgtcctgcagcaactcgacaacgtgattgatgttattacctgcagctctatgctgtccagcctttgtttcctgggagctatcgccgtggaccgctatatctctatcttttacgcgctcagatatcattccattgtcatcctgccccgggcccgcagagctgtggccgctatttgggtggccagcgtcgttttctctacactttttatcgcctactatgatcacgtggctgtgctgctctgcctggtcgtgttctttctggcgatgctcgttctgatggccgtgctttacgtccatatgctggctcgggcctgtcagcacgcccagggcattgctcgcctccataaaagacagcggcctgtgcaccaaggcttcgggctgaagggagccgttacccttacaatcctgctcggcatctttttcctgtgctgggggccctttttcctgcacctcaccctgattgtgctttgtcctgagcatcccacgtgcggatgtatctttaaaaatttcaacctgttcctcgcgctgattatctgcaatgctattatcgaccctctgatctatgcctttcactcccaggaacttcgcagaaccctcaaggaggtcctgacatgcagctggtga

SEQ ID NO: 2519 - protein, 316 aa, synthetic construct
  REGION 1..316: note = MC1_R__Homo_sapiens__Q1JUM5
MAVQGSQRRLLGSLNSTPTAIPQLGLAANQTGARCLEVSISDGLFLSLGLVSLVENALVVATIAKNRNLHSPMYCFICCLALSDLLVSGSNVLETAVILLLEAGALVARAAVLQQLDNVIDVITCSSMLSSLCFLGAIAVDRYISIYALRYHSIVTLPRARQAVAAIWVASVVFSTLFIAYYDHVAVLLCLVVFFLAMLVLMAVLYVHMLARACQHAQGIARLHKRQRPVHQGFGLKGAVTLTILLGIFFLCWGPFFLHLTLIVLCPEHPTCGCIFKNFNLFLALIICNAIIDPLIYAFHSQELRRTLKEVLTCSW

SEQ ID NO: 2520 - RNA, 951 nt, synthetic construct
  misc_feature 1..951: note = MC1_R__Homo_sapiens__BAE94306
  source 1..951: mol_type = other RNA
atggctgtgcagggatcccagagaagacttctgggctccctcaactccacccccacagccatcccccagctggggctggctgccaaccagacaggagcccggtgcctggaggtgtccatctctgacgggctcttcctcagcctggggctggtgagcttggtggagaacgcgctggtggtggccaccatcgccaagaaccggaacctgcactcacccatgtactgcttcatctgctgcctggccttgtcggacctgctggtgagcgggagcaacgtgctggagacggccgtcatcctcctgctggaggccggtgcactggtggcccgggctgcggtgctgcagcagctggacaatgtcattgacgtgatcacctgcagctccatgctgtccagcctctgcttcctgggcgccatcgccgtggaccgctacatctccatctacgcactgcgctaccacagcatcgtgaccctgccgcgggcgcggcaagccgttgcggccatctgggtggccagtgtcgtcttcagcacgctcttcatcgcctactacgaccacgtggccgtcctgctgtgcctcgtggtcttcttcctggctatgctggtgctcatggccgtgctgtacgtccacatgctggcccgggcctgccagcacgcccagggcatcgcccggctccacaagaggcagcgcccggtccaccagggctttggccttaaaggcgctgtcaccctcaccatcctgctgggcattttcttcctctgctggggccccttcttcctgcatctcacactcatcgtcctctgccccgagcaccccacgtgcggctgcatcttcaagaacttcaacctctttctcgccctcatcatctgcaatgccatcatcgaccccctcatctacgccttccacagccaggagctccgcaggacgctcaaggaggtgctgacatgctcctggtga

SEQ ID NO: 2521 - RNA, 951 nt, synthetic construct
  misc_feature 1..951: note = derived and/or modified sequence opt1 fromMC1_R__Homo_sapiens__BAE94306
  source 1..951: mol_type = other RNA
atggccgtgcagggcagccagcgccggctgctcgggtccctgaacagcacccccaccgccatcccccagctgggcctcgcggccaaccagacgggggcccgctgcctggaggtctccatcagcgacggcctgttcctctccctggggctggtgagcctcgtggagaacgccctggtcgtggccaccatcgcgaagaaccggaacctgcactcccccatgtactgcttcatctgctgcctcgccctgagcgacctgctcgtgtccggcagcaacgtcctggagaccgccgtgatcctgctcctggaggccggcgcgctggtggcccgcgccgccgtcctccagcagctggacaacgtgatcgacgtgatcacgtgctccagcatgctgtccagcctctgcttcctgggggccatcgcggtcgaccggtacatctccatctacgccctgcgctaccacagcatcgtgaccctcccccgggcccgccaggccgtggccgcgatctgggtcgcctccgtggtgttcagcaccctgttcatcgcctactacgaccacgtcgccgtgctgctctgcctggtggtcttcttcctggccatgctcgtgctgatggcggtgctgtacgtccacatgctcgcccgggcctgccagcacgcccagggcatcgcccgcctgcacaagcggcagcgccccgtgcaccaggggttcggcctgaagggggcggtcaccctcaccatcctgctgggcatcttcttcctctgctggggcccgttcttcctgcacctgacgctcatcgtgctgtgccccgagcacccgacctgcgggtgcatcttcaagaacttcaacctgttcctcgccctgatcatctgcaacgccatcatcgaccccctgatctacgccttccactcccaggagctgcggcgcaccctcaaggaggtgctgacctgcagctggtga

SEQ ID NO: 2522 - RNA, 951 nt, synthetic construct
  misc_feature 1..951: note = derived and/or modified sequence opt2 fromMC1_R__Homo_sapiens__BAE94306
  source 1..951: mol_type = other RNA
atggccgtccagggctcccagcgccgcctcctcggctccctcaactccacccccaccgccatcccccagctcggcctcgccgccaaccagaccggcgcccgctgcctcgaggtctccatctccgacggcctcttcctctccctcggcctcgtctccctcgtcgagaacgccctcgtcgtcgccaccatcgccaagaaccgcaacctccactcccccatgtactgcttcatctgctgcctcgccctctccgacctcctcgtctccggctccaacgtcctcgagaccgccgtcatcctcctcctcgaggccggcgccctcgtcgcccgcgccgccgtcctccagcagctcgacaacgtcatcgacgtcatcacctgctcctccatgctctcctccctctgcttcctcggcgccatcgccgtcgaccgctacatctccatctacgccctccgctaccactccatcgtcaccctcccccgcgcccgccaggccgtcgccgccatctgggtcgcctccgtcgtcttctccaccctcttcatcgcctactacgaccacgtcgccgtcctcctctgcctcgtcgtcttcttcctcgccatgctcgtcctcatggccgtcctctacgtccacatgctcgcccgcgcctgccagcacgcccagggcatcgcccgcctccacaagcgccagcgccccgtccaccagggcttcggcctcaagggcgccgtcaccctcaccatcctcctcggcatcttcttcctctgctggggccccttcttcctccacctcaccctcatcgtcctctgccccgagcaccccacctgcggctgcatcttcaagaacttcaacctcttcctcgccctcatcatctgcaacgccatcatcgaccccctcatctacgccttccactcccaggagctccgccgcaccctcaaggaggtcctcacctgctcctggtga

SEQ ID NO: 2523 - RNA, 951 nt, synthetic construct
  misc_feature 1..951: note = derived and/or modified sequence opt3 fromMC1_R__Homo_sapiens__BAE94306
  source 1..951: mol_type = other RNA
atggccgtgcagggcagccaaagaaggctgctcgggtcccttaactctacccccacagctatccctcagctgggattggcagccaatcagactggtgcgcggtgcttagaggtctcaattagtgacggcctgttcctaagcctcgggctggtttcccttgtggaaaacgctctggtagtggccacgatagcaaagaatcgcaacttgcactctccaatgtactgttttatctgctgtctcgccctgtcggatctgctcgtctcaggaagcaatgtgttagagaccgctgttattctgcttttggaagcaggcgccctggtggctcgagccgcggtcctacagcaactcgacaacgtgatcgatgtaattacatgcagttccatgctgtctagcctttgtttcctgggtgcaatcgccgttgaccgttatatatccatctacgctttgagatatcattcaattgtgactctcccgagggcccggcaggcagtcgctgccatctgggtggcgagtgtggtctttagcaccctgttcattgcctactatgatcacgttgcagtgttactgtgcctcgtagtgtttttccttgctatgctggtcttgatggccgtgctatacgttcatatgctggctcgcgcctgtcagcacgcacaggggatcgccagactccataaaaggcaacggcccgtgcaccagggatttggcctgaagggcgctgtcacacttaccatactgttggggattttctttctctgctggggacctttctttctgcacttaactctgatcgtgctatgtccagagcatcccacatgcggttgtattttcaaaaattttaacctcttcctggcgcttatcatctgcaatgcaattatagaccctttgatctatgccttccactctcaggaactgcgccgaaccctcaaggaggtactgacgtgctcctggtga

SEQ ID NO: 2524 - RNA, 951 nt, synthetic construct
  misc_feature 1..951: note = derived and/or modified sequence opt4 fromMC1_R__Homo_sapiens__BAE94306
  source 1..951: mol_type = other RNA
atggccgtgcagggcagccagagaagactgctgggcagcctgaacagcacccccaccgccatcccccagctgggcctggccgccaaccagaccggcgccagatgcctggaggtgagcatcagcgacggcctgttcctgagcctgggcctggtgagcctggtggagaacgccctggtggtggccaccatcgccaagaacagaaacctgcacagccccatgtactgcttcatctgctgcctggccctgagcgacctgctggtgagcggcagcaacgtgctggagaccgccgtgatcctgctgctggaggccggcgccctggtggccagagccgccgtgctgcagcagctggacaacgtgatcgacgtgatcacctgcagcagcatgctgagcagcctgtgcttcctgggcgccatcgccgtggacagatacatcagcatctacgccctgagataccacagcatcgtgaccctgcccagagccagacaggccgtggccgccatctgggtggccagcgtggtgttcagcaccctgttcatcgcctactacgaccacgtggccgtgctgctgtgcctggtggtgttcttcctggccatgctggtgctgatggccgtgctgtacgtgcacatgctggccagagcctgccagcacgcccagggcatcgccagactgcacaagagacagagacccgtgcaccagggcttcggcctgaagggcgccgtgaccctgaccatcctgctgggcatcttcttcctgtgctggggccccttcttcctgcacctgaccctgatcgtgctgtgccccgagcaccccacctgcggctgcatcttcaagaacttcaacctgttcctggccctgatcatctgcaacgccatcatcgaccccctgatctacgccttccacagccaggagctgagaagaaccctgaaggaggtgctgacctgcagctggtga

SEQ ID NO: 2525 - RNA, 951 nt, synthetic construct
  misc_feature 1..951: note = derived and/or modified sequence opt5 fromMC1_R__Homo_sapiens__BAE94306
  source 1..951: mol_type = other RNA
atggccgtgcagggcagccaaagacggctgctcgggtccctgaactctacccccacagctatccctcagcttggactggccgcgaatcagacgggcgctcgctgcctcgaggtcagcatttccgacgggctgttcctttctctgggactcgttagcctggtggaaaacgccctggtggtcgccaccatcgctaagaatagaaacctccactccccgatgtactgttttatttgctgtctggccctttctgatctgctcgtgagcggctccaatgttctggagacagctgtgatccttctgctcgaagccggggcgctggtcgcccgggctgccgtgctgcagcaactcgacaacgttattgatgtgattacctgcagctctatgctgtccagcctttgtttcctgggagctatcgccgtcgaccgctatatctctatctacgcgctcagatatcattccattgtgacactgccccgggcccgccaggctgtggccgctatctgggtcgccagcgttgtgttttctacccttttcattgcctactatgatcacgtggctgtcctgctctgcctggtggtgtttttcctggcgatgctcgttctgatggccgtcctttacgtgcatatgctggctagagcctgtcagcacgcccagggcatcgctcggctccataaacgccaaagacctgttcaccagggctttgggctgaagggagccgtgacacttaccattctgctcggcatcttctttctgtgctgggggcccttctttctgcacctcacgctgatcgtcctttgtcctgagcatcctacctgcggatgtattttcaaaaattttaacctgttcctcgcgctgatcatttgcaatgctatcattgaccccctgatctatgccttccactcccaggaacttcggcgcacactcaaggaggtgctgacctgcagctggtga

SEQ ID NO: 2526 - protein, 317 aa, synthetic construct [sequence omitted]

SEQ ID NO: 2527 - RNA, 954 nt, synthetic construct
  misc_feature 1..954: note = MC1_R__Homo_sapiens__AAQ62977
  source 1..954: mol_type = other RNA
atggctgtgcagggatcccagagaagacttctgggctccctcaactccacccccacagccatcccccagctggggctggctgccaaccagacaggagcccggtgcctggaggtgtccatctctgacgggctcttcctcagcctggggctggtgagcttggtggagaacgcgctggtggtggccaccatcgccaagaaccggaacctgcactcacccatgtactgcttcatctgctgcctggccttgtcggacctgctggtgagcgggagcaacgtgctggagacggccgtcatcctcctgctggaggccggtgcactggtggcccgggctgcggtgctgcagcagctggacaatgtcattgacgtgatcacctgcagctccatgctgtccagcctctgcttcctgggcgccatcgccgtggaccgctacatctccatcttctacgcactgcgctaccacagcatcgtgaccctgccgcgggcgcggcgagccgttgcggccatctgggtggccagtgtcgtcttcagcacgctcttcatcgcctactacgaccacgtggccgtcctgctgtgcctcgtggtcttcttcctggctatgctggtgctcatggccgtgctgtacgtccacatgctggcccgggcctgccagcacgcccagggcatcgcccggctccacaagaggcagcgcccggtccaccagggctttggccttaaaggcgctgtcaccctcaccatcctgctgggcattttcttcctctgctggggccccttcttcctgcatctcacactcatcatcctctgccccgagcaccccacgtgcggctgcatcttcaagaacttcaacctctttctcgccctcatcatctgcaatgccatcatcgaccccctcatctacgccttccacagccaggagctccgcaggacgctcaaggaggtgctgacatgctcctggtga

SEQ ID NO: 2528 - RNA, 954 nt, synthetic construct
  misc_feature 1..954: note = derived and/or modified sequence opt1 fromMC1_R__Homo_sapiens__AAQ62977
  source 1..954: mol_type = other RNA
atggccgtgcagggcagccagcgccggctgctcgggtccctgaacagcacccccaccgccatcccccagctgggcctcgcggccaaccagacgggggcccgctgcctggaggtctccatcagcgacggcctgttcctctccctggggctggtgagcctcgtggagaacgccctggtcgtggccaccatcgcgaagaaccggaacctgcactcccccatgtactgcttcatctgctgcctcgccctgagcgacctgctcgtgtccggcagcaacgtcctggagaccgccgtgatcctgctcctggaggccggcgcgctggtggcccgcgccgccgtcctccagcagctggacaacgtgatcgacgtgatcacgtgctccagcatgctgtccagcctctgcttcctgggggccatcgcggtcgaccggtacatctccatcttctacgccctgcgctaccacagcatcgtgaccctcccccgggcccgccgggccgtggccgcgatctgggtcgcctccgtggtgttcagcaccctgttcatcgcctactacgaccacgtcgccgtgctgctctgcctggtggtcttcttcctggccatgctcgtgctgatggcggtgctgtacgtccacatgctcgcccgcgcctgccagcacgcccagggcatcgcccggctgcacaagcgccagcggcccgtgcaccaggggttcggcctgaagggggcggtcaccctcaccatcctgctgggcatcttcttcctctgctggggcccgttcttcctgcacctgacgctcatcatcctgtgccccgagcacccgacctgcgggtgcatcttcaagaacttcaacctgttcctcgccctgatcatctgcaacgccatcatcgaccccctgatctacgccttccactcccaggagctgcgccggaccctcaaggaggtgctgacctgcagctggtga

SEQ ID NO: 2529 - RNA, 954 nt, synthetic construct
  misc_feature 1..954: note = derived and/or modified sequence opt2 fromMC1_R__Homo_sapiens__AAQ62977
  source 1..954: mol_type = other RNA
atggccgtccagggctcccagcgccgcctcctcggctccctcaactccacccccaccgccatcccccagctcggcctcgccgccaaccagaccggcgcccgctgcctcgaggtctccatctccgacggcctcttcctctccctcggcctcgtctccctcgtcgagaacgccctcgtcgtcgccaccatcgccaagaaccgcaacctccactcccccatgtactgcttcatctgctgcctcgccctctccgacctcctcgtctccggctccaacgtcctcgagaccgccgtcatcctcctcctcgaggccggcgccctcgtcgcccgcgccgccgtcctccagcagctcgacaacgtcatcgacgtcatcacctgctcctccatgctctcctccctctgcttcctcggcgccatcgccgtcgaccgctacatctccatcttctacgccctccgctaccactccatcgtcaccctcccccgcgcccgccgcgccgtcgccgccatctgggtcgcctccgtcgtcttctccaccctcttcatcgcctactacgaccacgtcgccgtcctcctctgcctcgtcgtcttcttcctcgccatgctcgtcctcatggccgtcctctacgtccacatgctcgcccgcgcctgccagcacgcccagggcatcgcccgcctccacaagcgccagcgccccgtccaccagggcttcggcctcaagggcgccgtcaccctcaccatcctcctcggcatcttcttcctctgctggggccccttcttcctccacctcaccctcatcatcctctgccccgagcaccccacctgcggctgcatcttcaagaacttcaacctcttcctcgccctcatcatctgcaacgccatcatcgaccccctcatctacgccttccactcccaggagctccgccgcaccctcaaggaggtcctcacctgctcctggtga

SEQ ID NO: 2530 - RNA, 954 nt, synthetic construct
  misc_feature 1..954: note = derived and/or modified sequence opt3 fromMC1_R__Homo_sapiens__AAQ62977
  source 1..954: mol_type = other RNA
atggccgtgcagggcagccaaagaaggctgctcgggtcccttaactctacccccacagctatccctcagctgggattggcagccaatcagactggtgcgcggtgcttagaggtctcaattagtgacggcctgttcctaagcctcgggctggtttcccttgtggaaaacgctctggtagtggccacgatagcaaagaatcgcaacttgcactctccaatgtactgttttatctgctgtctcgccctgtcggatctgctcgtctcaggaagcaatgtgttagagaccgctgttattctgcttttggaagcaggcgccctggtggctcgagccgcggtcctacagcaactcgacaacgtgatcgatgtaattacatgcagttccatgctgtctagcctttgtttcctgggtgcaatcgccgttgaccgttatatatccatcttttacgctttgagatatcattcaattgtgactctcccgagggcccggcgcgcagtcgctgccatctgggtggcgagtgtggtcttcagcaccctgtttattgcctactatgatcacgttgcagtgttactgtgcctcgtagtgttctttcttgctatgctggtcttgatggccgtgctatacgttcatatgctggctagagcctgtcagcacgcacaggggatcgccaggctccataaacggcagcgccccgtgcaccaaggattcggcctgaagggcgctgtcacacttaccatactgttggggatctttttcctctgctggggaccatttttcctgcacttaactctgattattctatgtcctgagcatcccacatgcggttgtatctttaaaaatttcaacctcttcctggcgcttatcatttgcaatgcaataatcgaccctttgatttatgcctttcactctcaggaactgcgaagaaccctcaaggaggtgctgacgtgctcctggtga

SEQ ID NO: 2531 - RNA, 954 nt, synthetic construct
  misc_feature 1..954: note = derived and/or modified sequence opt4 fromMC1_R__Homo_sapiens__AAQ62977
  source 1..954: mol_type = other RNA
atggccgtgcagggcagccagagaagactgctgggcagcctgaacagcacccccaccgccatcccccagctgggcctggccgccaaccagaccggcgccagatgcctggaggtgagcatcagcgacggcctgttcctgagcctgggcctggtgagcctggtggagaacgccctggtggtggccaccatcgccaagaacagaaacctgcacagccccatgtactgcttcatctgctgcctggccctgagcgacctgctggtgagcggcagcaacgtgctggagaccgccgtgatcctgctgctggaggccggcgccctggtggccagagccgccgtgctgcagcagctggacaacgtgatcgacgtgatcacctgcagcagcatgctgagcagcctgtgcttcctgggcgccatcgccgtggacagatacatcagcatcttctacgccctgagataccacagcatcgtgaccctgcccagagccagaagagccgtggccgccatctgggtggccagcgtggtgttcagcaccctgttcatcgcctactacgaccacgtggccgtgctgctgtgcctggtggtgttcttcctggccatgctggtgctgatggccgtgctgtacgtgcacatgctggccagagcctgccagcacgcccagggcatcgccagactgcacaagagacagagacccgtgcaccagggcttcggcctgaagggcgccgtgaccctgaccatcctgctgggcatcttcttcctgtgctggggccccttcttcctgcacctgaccctgatcatcctgtgccccgagcaccccacctgcggctgcatcttcaagaacttcaacctgttcctggccctgatcatctgcaacgccatcatcgaccccctgatctacgccttccacagccaggagctgagaagaaccctgaaggaggtgctgacctgcagctggtga

SEQ ID NO: 2532 - RNA, 954 nt, synthetic construct
  misc_feature 1..954: note = derived and/or modified sequence opt5 fromMC1_R__Homo_sapiens__AAQ62977
  source 1..954: mol_type = other RNA
atggccgtgcagggcagccaaagacggctgctcgggtccctgaactctacccccacagctatccctcagcttggactggccgcgaatcagacgggcgctcgctgcctcgaggtcagcatttccgacgggctgttcctttctctgggactcgttagcctggtggaaaacgccctggtggtcgccaccatcgctaagaatagaaacctccactccccgatgtactgttttatttgctgtctggccctttctgatctgctcgtgagcggctccaatgttctggagacagctgtgatccttctgctcgaagccggggcgctggtcgcccgggctgccgtgctgcagcaactcgacaacgttattgatgtgattacctgcagctctatgctgtccagcctttgtttcctgggagctatcgccgtcgaccgctatatctctatcttttacgcgctcagatatcattccattgtgacactgccccgggcccgcagagctgtggccgctatctgggtcgccagcgttgtgttctctaccctttttattgcctactatgatcacgtggctgtcctgctctgcctggtggttttctttctggcgatgctcgtgctgatggccgtcctttacgtgcatatgctggctcgggcctgtcagcacgcccagggcatcgctcgcctccataaaagacagcggcctgttcaccaaggcttcgggctgaagggagccgtgacacttaccattctgctcggcatctttttcctgtgctgggggccctttttcctgcacctcacgctgatcattctttgtcctgagcatcctacctgcggatgtatctttaaaaatttcaacctgttcctcgcgctgattatctgcaatgctattatcgaccccctgatctatgcctttcactcccaggaacttcgcagaacactcaaggaggtcctgacctgcagctggtga

SEQ ID NO: 2533 - protein, 317 aa, synthetic construct [sequence omitted]

SEQ ID NO: 2534 - RNA, 954 nt, synthetic construct
  misc_feature 1..954: note = MC1_R__Homo_sapiens__AAQ62975
  source 1..954: mol_type = other RNA
atggctgtgcagggatcccagagaagacttctgggctccctcaactccacccccacagccatcccccagctggggctggctgccaaccagacaggagcccggtgcctggaggtgtccatctctgacgggctcttcctcagcctggggctggtgagcttggtggagaacgcgctggtggtggccaccatcgccaagaaccggaacctgcactcacccatgtactgcttcatctgctgcctggccttgtcggacctgctggtgagcgggagcaacgtgctggagacggccgtcatcctcctgctggaggccggtgcactggtggcccgggctgtggtgctgcagcagctggacaatgtcattgacgtgatcacctgcagctccatgctgtccagcctctgcttcctgggcgccatcgccgtggaccgctacatctccatcttctacgcactgcgctaccacagcatcgtgaccctgccgcgggcgcggcgagccgttgcggccatctgggtggccagtgtcgtcttcagcacgctcttcatcgcctactacgaccacgtggccgtcctgctgtgcctcgtggtcttcttcctggctatgctggtgctcatggccgtgctgtacgtccacatgctggcccgggcctgccagcacgcccagggcatcgcccggctccacaagaggcagcgcccggtccaccagggctttggccttaaaggcgctgtcaccctcaccatcctgctgggcattttcttcctctgctggggccccttcttcctgcatctcacactcatcgtcctctgccccgagcaccccacgtgcggctgcatcttcaagaacttcaacctctttctcgccctcatcatctgcaatgccatcatcgaccccctcatctacgccttccacagccaggagctccgcaggacgctcaaggaggtgctgacatgctcctggtga

SEQ ID NO: 2535 - RNA, 954 nt, synthetic construct
  misc_feature 1..954: note = derived and/or modified sequence opt1 fromMC1_R__Homo_sapiens__AAQ62975
  source 1..954: mol_type = other RNA
atggccgtgcagggcagccagcgccggctgctcgggtccctgaacagcacccccaccgccatcccccagctgggcctcgcggccaaccagacgggggcccgctgcctggaggtctccatcagcgacggcctgttcctctccctggggctggtgagcctcgtggagaacgccctggtcgtggccaccatcgcgaagaaccggaacctgcactcccccatgtactgcttcatctgctgcctcgccctgagcgacctgctcgtgtccggcagcaacgtcctggagaccgccgtgatcctgctcctggaggccggcgcgctggtggcccgcgccgtcgtgctccagcagctggacaacgtgatcgacgtcatcacgtgctccagcatgctgtccagcctctgcttcctgggggccatcgccgtggaccggtacatctccatcttctacgcgctgcgctaccacagcatcgtgaccctcccccgggcccgccgggccgtcgccgccatctgggtggcgtccgtggtcttcagcaccctgttcatcgcctactacgaccacgtggccgtgctgctctgcctggtcgtgttcttcctggccatgctcgtgctgatggccgtcctgtacgtgcacatgctcgcgcgcgcctgccagcacgcccagggcatcgcccggctgcacaagcgccagcggcccgtccaccaggggttcggcctgaagggggccgtgaccctcaccatcctgctgggcatcttcttcctctgctggggcccgttcttcctgcacctgacgctcatcgtgctgtgccccgagcacccgacctgcgggtgcatcttcaagaacttcaacctgttcctcgcgctgatcatctgcaacgccatcatcgaccccctgatctacgccttccactcccaggagctgcgccggaccctcaaggaggtcctgacctgcagctggtga

SEQ ID NO: 2536 - RNA, 954 nt, synthetic construct
  misc_feature 1..954: note = derived and/or modified sequence opt2 fromMC1_R__Homo_sapiens__AAQ62975
  source 1..954: mol_type = other RNA
atggccgtccagggctcccagcgccgcctcctcggctccctcaactccacccccaccgccatcccccagctcggcctcgccgccaaccagaccggcgcccgctgcctcgaggtctccatctccgacggcctcttcctctccctcggcctcgtctccctcgtcgagaacgccctcgtcgtcgccaccatcgccaagaaccgcaacctccactcccccatgtactgcttcatctgctgcctcgccctctccgacctcctcgtctccggctccaacgtcctcgagaccgccgtcatcctcctcctcgaggccggcgccctcgtcgcccgcgccgtcgtcctccagcagctcgacaacgtcatcgacgtcatcacctgctcctccatgctctcctccctctgcttcctcggcgccatcgccgtcgaccgctacatctccatcttctacgccctccgctaccactccatcgtcaccctcccccgcgcccgccgcgccgtcgccgccatctgggtcgcctccgtcgtcttctccaccctcttcatcgcctactacgaccacgtcgccgtcctcctctgcctcgtcgtcttcttcctcgccatgctcgtcctcatggccgtcctctacgtccacatgctcgcccgcgcctgccagcacgcccagggcatcgcccgcctccacaagcgccagcgccccgtccaccagggcttcggcctcaagggcgccgtcaccctcaccatcctcctcggcatcttcttcctctgctggggccccttcttcctccacctcaccctcatcgtcctctgccccgagcaccccacctgcggctgcatcttcaagaacttcaacctcttcctcgccctcatcatctgcaacgccatcatcgaccccctcatctacgccttccactcccaggagctccgccgcaccctcaaggaggtcctcacctgctcctggtga

SEQ ID NO: 2537 - RNA, 954 nt, synthetic construct
  misc_feature 1..954: note = derived and/or modified sequence opt3 fromMC1_R__Homo_sapiens__AAQ62975
  source 1..954: mol_type = other RNA
atggccgtgcagggcagccaaagaaggctgctcgggtcccttaactctacccccacagctatccctcagctgggattggcagccaatcagactggtgcgcggtgcttagaggtctcaattagtgacggcctgttcctaagcctcgggctggtttcccttgtggaaaacgctctggtagtggccacgatagcaaagaatcgcaacttgcactctccaatgtactgttttatctgctgtctcgccctgtcggatctgctcgtctcaggaagcaatgtgttagagaccgctgttattctgcttttggaagcaggcgccctggtggctcgagccgtcgtgctacagcaactcgacaacgtaatcgatgttattacatgcagttccatgctgtctagcctttgtttcctgggtgcgatcgcagtggaccgttatatatccatcttttacgccttgagatatcattcaattgtcactctcccgagggctcggcgcgccgtggcagctatctgggtggccagtgtcgttttcagcaccctgtttattgcgtactatgatcacgtggccgtattactgtgcctcgtggtcttctttcttgcaatgctggtgttgatggctgttctatacgtgcatatgctggccagagcttgtcagcacgcccaggggatcgcaaggctccataaacggcagcgccccgtccaccaaggattcggcctgaagggcgccgtgacacttaccatactgttggggatctttttcctctgctggggaccatttttcctgcacttaactctgattgtactatgtcctgagcatcccacatgcggttgtatttttaaaaatttcaacctcttcctggctcttatcatctgcaatgcgattatagaccctttgatctatgcatttcactctcaggaactgcgaagaaccctcaaggaggttctgacgtgctcctggtga

SEQ ID NO: 2538 - RNA, 954 nt, synthetic construct
  misc_feature 1..954: note = derived and/or modified sequence opt4 fromMC1_R__Homo_sapiens__AAQ62975
  source 1..954: mol_type = other RNA
atggccgtgcagggcagccagagaagactgctgggcagcctgaacagcacccccaccgccatcccccagctgggcctggccgccaaccagaccggcgccagatgcctggaggtgagcatcagcgacggcctgttcctgagcctgggcctggtgagcctggtggagaacgccctggtggtggccaccatcgccaagaacagaaacctgcacagccccatgtactgcttcatctgctgcctggccctgagcgacctgctggtgagcggcagcaacgtgctggagaccgccgtgatcctgctgctggaggccggcgccctggtggccagagccgtggtgctgcagcagctggacaacgtgatcgacgtgatcacctgcagcagcatgctgagcagcctgtgcttcctgggcgccatcgccgtggacagatacatcagcatcttctacgccctgagataccacagcatcgtgaccctgcccagagccagaagagccgtggccgccatctgggtggccagcgtggtgttcagcaccctgttcatcgcctactacgaccacgtggccgtgctgctgtgcctggtggtgttcttcctggccatgctggtgctgatggccgtgctgtacgtgcacatgctggccagagcctgccagcacgcccagggcatcgccagactgcacaagagacagagacccgtgcaccagggcttcggcctgaagggcgccgtgaccctgaccatcctgctgggcatcttcttcctgtgctggggccccttcttcctgcacctgaccctgatcgtgctgtgccccgagcaccccacctgcggctgcatcttcaagaacttcaacctgttcctggccctgatcatctgcaacgccatcatcgaccccctgatctacgccttccacagccaggagctgagaagaaccctgaaggaggtgctgacctgcagctggtga

SEQ ID NO: 2539 - RNA, 954 nt, synthetic construct
  misc_feature 1..954: note = derived and/or modified sequence opt5 fromMC1_R__Homo_sapiens__AAQ62975
  source 1..954: mol_type = other RNA
atggccgtgcagggcagccaaagacggctgctcgggtccctgaactctacccccacagctatccctcagcttggactggccgcgaatcagacgggcgctcgctgcctcgaggtcagcatttccgacgggctgttcctttctctgggactcgttagcctggtggaaaacgccctggtggtcgccaccatcgctaagaatagaaacctccactccccgatgtactgttttatttgctgtctggccctttctgatctgctcgtgagcggctccaatgttctggagacagctgtgatccttctgctcgaagccggggcgctggtcgcccgggctgtggttctgcagcaactcgacaacgtgattgatgtcattacctgcagctctatgctgtccagcctttgtttcctgggagccatcgctgtggaccgctatatctctatcttttacgccctcagatatcattccattgtgacactgccccgggcgcgcagagccgtcgctgccatctgggttgctagcgtggtgttctctaccctttttattgcctactatgatcacgtcgccgtgctgctctgcctggttgtgttctttctggctatgctcgtcctgatggcggtgctttacgttcatatgctggcccgggcttgtcagcacgcccagggcatcgcccgcctccataaaagacagcggcctgtgcaccaaggcttcgggctgaagggagctgtcacacttaccattctgctcggcatctttttcctgtgctgggggccctttttcctgcacctcacgctgatcgtgctttgtcctgagcatcctacctgcggatgtatttttaaaaatttcaacctgttcctcgccctgatcatttgcaatgcgatcattgaccccctgatctatgcttttcactcccaggaacttcgcagaacactcaaggaggtcctgacctgcagctggtga

SEQ ID NO: 2540 - protein, 317 aa, synthetic construct [sequence omitted]

SEQ ID NO: 2541 - RNA, 954 nt, synthetic construct
  misc_feature 1..954: note = MC1_R__Homo_sapiens__AAQ62974
  source 1..954: mol_type = other RNA
atggctgtgcagggatcccagagaagacttctgggctccctcaactccacccccacagccatcccccagctggggctggctgccaaccagacaggagcccggtgcctggaggtgtccatctctgacgggctcttcctcagcctggggctggtgagcttggtggagaacgcgctggtggtggccaccatcgccaagaaccggaacctgcactcacccatgtactgcttcatctgctgcctggccttgtcggacctgctggtgagcgggagcaacgtgctggagacggccgtcatcctcctgctggaggccggtgcactggtggcccgggctgcggtgctgcagcagctggacaatgtcattgacgtgatcacctgcagctccatgctgtccagcctctgcttcctgggcgccatcgccgtggaccgctacatctccatcttctacgcactgcgctaccacagcatcgtgaccctgccgcgggcgcggcgagccgttgcggccatctgggtggccagtgtcgtcttcagcacgctcttcatcgcctactacgaccacgtggccgtcctgctgtgcctcgtggtcttcttcctggctatgctggtgctcatggccgtgctgtacgtccacatgctggcccgggcctgccagcacgcccagggcatcgcccggctccacaagaggcagcgcccggtccaccagggctttggccttaaaggcgctgtcaccctcaccatcctgctgggcattttcttcctctgctggggccccttcttcctgcatctcacactcatcgtcctctgccccgagcaccccacgtgcggctgcatcttcaagaacttcaacctctttctcgccctcatcatctgcaatgccatcatcgaccccctcatctacgccttccacagccaggagctccgcaggacgctcaaggaggtgctgacacgctcctggtga

SEQ ID NO: 2542 - RNA, 954 nt, synthetic construct
  misc_feature 1..954: note = derived and/or modified sequence opt1 fromMC1_R__Homo_sapiens__AAQ62974
  source 1..954: mol_type = other RNA
atggccgtgcagggcagccagcgccggctgctcgggtccctgaacagcacccccaccgccatcccccagctgggcctcgcggccaaccagacgggggcccgctgcctggaggtctccatcagcgacggcctgttcctctccctggggctggtgagcctcgtggagaacgccctggtcgtggccaccatcgcgaagaaccggaacctgcactcccccatgtactgcttcatctgctgcctcgccctgagcgacctgctcgtgtccggcagcaacgtcctggagaccgccgtgatcctgctcctggaggccggcgcgctggtggcccgcgccgccgtcctccagcagctggacaacgtgatcgacgtgatcacgtgctccagcatgctgtccagcctctgcttcctgggggccatcgcggtcgaccggtacatctccatcttctacgccctgcgctaccacagcatcgtgaccctcccccgggcccgccgggccgtggccgcgatctgggtcgcctccgtggtgttcagcaccctgttcatcgcctactacgaccacgtcgccgtgctgctctgcctggtggtcttcttcctggccatgctcgtgctgatggcggtgctgtacgtccacatgctcgcccgcgcctgccagcacgcccagggcatcgcccggctgcacaagcgccagcggcccgtgcaccaggggttcggcctgaagggggcggtcaccctcaccatcctgctgggcatcttcttcctctgctggggcccgttcttcctgcacctgacgctcatcgtgctgtgccccgagcacccgacctgcgggtgcatcttcaagaacttcaacctgttcctcgccctgatcatctgcaacgccatcatcgaccccctgatctacgccttccactcccaggagctgcgccggaccctcaaggaggtgctgacccgcagctggtga

SEQ ID NO: 2543 - RNA, 954 nt, synthetic construct
  misc_feature 1..954: note = derived and/or modified sequence opt2 fromMC1_R__Homo_sapiens__AAQ62974
  source 1..954: mol_type = other RNA
atggccgtccagggctcccagcgccgcctcctcggctccctcaactccacccccaccgccatcccccagctcggcctcgccgccaaccagaccggcgcccgctgcctcgaggtctccatctccgacggcctcttcctctccctcggcctcgtctccctcgtcgagaacgccctcgtcgtcgccaccatcgccaagaaccgcaacctccactcccccatgtactgcttcatctgctgcctcgccctctccgacctcctcgtctccggctccaacgtcctcgagaccgccgtcatcctcctcctcgaggccggcgccctcgtcgcccgcgccgccgtcctccagcagctcgacaacgtcatcgacgtcatcacctgctcctccatgctctcctccctctgcttcctcggcgccatcgccgtcgaccgctacatctccatcttctacgccctccgctaccactccatcgtcaccctcccccgcgcccgccgcgccgtcgccgccatctgggtcgcctccgtcgtcttctccaccctcttcatcgcctactacgaccacgtcgccgtcctcctctgcctcgtcgtcttcttcctcgccatgctcgtcctcatggccgtcctctacgtccacatgctcgcccgcgcctgccagcacgcccagggcatcgcccgcctccacaagcgccagcgccccgtccaccagggcttcggcctcaagggcgccgtcaccctcaccatcctcctcggcatcttcttcctctgctggggccccttcttcctccacctcaccctcatcgtcctctgccccgagcaccccacctgcggctgcatcttcaagaacttcaacctcttcctcgccctcatcatctgcaacgccatcatcgaccccctcatctacgccttccactcccaggagctccgccgcaccctcaaggaggtcctcacccgctcctggtga

SEQ ID NO: 2544 - RNA, 954 nt, synthetic construct
  misc_feature 1..954: note = derived and/or modified sequence opt3 fromMC1_R__Homo_sapiens__AAQ62974
  source 1..954: mol_type = other RNA
atggccgtgcagggcagccaaagaaggctgctcgggtcccttaactctacccccacagctatccctcagctgggattggcagccaatcagactggtgcgcggtgcttagaggtctcaattagtgacggcctgttcctaagcctcgggctggtttcccttgtggaaaacgctctggtagtggccacgatagcaaagaatcgcaacttgcactctccaatgtactgttttatctgctgtctcgccctgtcggatctgctcgtctcaggaagcaatgtgttagagaccgctgttattctgcttttggaagcaggcgccctggtggctcgagccgcggtcctacagcaactcgacaacgtgatcgatgtaattacatgcagttccatgctgtctagcctttgtttcctgggtgcaatcgccgttgaccgttatatatccatcttttacgctttgagatatcattcaattgtgactctcccgagggcccggcgcgcagtcgctgccatctgggtggcgagtgtggtcttcagcaccctgtttattgcctactatgatcacgttgcagtgttactgtgcctcgtagtgttctttcttgctatgctggtcttgatggccgtgctatacgttcatatgctggctagagcctgtcagcacgcacaggggatcgccaggctccataaacggcagcgccccgtgcaccaaggattcggcctgaagggcgctgtcacacttaccatactgttggggatctttttcctctgctggggaccatttttcctgcacttaactctgattgtgctatgtcctgagcatcccacatgcggttgtatttttaaaaatttcaacctcttcctggcgcttatcatctgcaatgcaattatagaccctttgatctatgcctttcactctcaggaactgcgaagaaccctcaaggaggtactgacgaggtcctggtga

SEQ ID NO: 2545 - RNA, 954 nt, synthetic construct
  misc_feature 1..954: note = derived and/or modified sequence opt4 fromMC1_R__Homo_sapiens__AAQ62974
  source 1..954: mol_type = other RNA
atggccgtgcagggcagccagagaagactgctgggcagcctgaacagcacccccaccgccatcccccagctgggcctggccgccaaccagaccggcgccagatgcctggaggtgagcatcagcgacggcctgttcctgagcctgggcctggtgagcctggtggagaacgccctggtggtggccaccatcgccaagaacagaaacctgcacagccccatgtactgcttcatctgctgcctggccctgagcgacctgctggtgagcggcagcaacgtgctggagaccgccgtgatcctgctgctggaggccggcgccctggtggccagagccgccgtgctgcagcagctggacaacgtgatcgacgtgatcacctgcagcagcatgctgagcagcctgtgcttcctgggcgccatcgccgtggacagatacatcagcatcttctacgccctgagataccacagcatcgtgaccctgcccagagccagaagagccgtggccgccatctgggtggccagcgtggtgttcagcaccctgttcatcgcctactacgaccacgtggccgtgctgctgtgcctggtggtgttcttcctggccatgctggtgctgatggccgtgctgtacgtgcacatgctggccagagcctgccagcacgcccagggcatcgccagactgcacaagagacagagacccgtgcaccagggcttcggcctgaagggcgccgtgaccctgaccatcctgctgggcatcttcttcctgtgctggggccccttcttcctgcacctgaccctgatcgtgctgtgccccgagcaccccacctgcggctgcatcttcaagaacttcaacctgttcctggccctgatcatctgcaacgccatcatcgaccccctgatctacgccttccacagccaggagctgagaagaaccctgaaggaggtgctgaccagaagctggtga

SEQ ID NO: 2546 - RNA, 954 nt, synthetic construct
  misc_feature 1..954: note = derived and/or modified sequence opt5 fromMC1_R__Homo_sapiens__AAQ62974
  source 1..954: mol_type = other RNA
atggccgtgcagggcagccaaagacggctgctcgggtccctgaactctacccccacagctatccctcagcttggactggccgcgaatcagacgggcgctcgctgcctcgaggtcagcatttccgacgggctgttcctttctctgggactcgttagcctggtggaaaacgccctggtggtcgccaccatcgctaagaatagaaacctccactccccgatgtactgttttatttgctgtctggccctttctgatctgctcgtgagcggctccaatgttctggagacagctgtgatccttctgctcgaagccggggcgctggtcgcccgggctgccgtgctgcagcaactcgacaacgttattgatgtgattacctgcagctctatgctgtccagcctttgtttcctgggagctatcgccgtcgaccgctatatctctatcttttacgcgctcagatatcattccattgtgacactgccccgggcccgcagagctgtggccgctatctgggtcgccagcgttgtgttctctaccctttttattgcctactatgatcacgtggctgtcctgctctgcctggtggttttctttctggcgatgctcgtgctgatggccgtcctttacgtgcatatgctggctcgggcctgtcagcacgcccagggcatcgctcgcctccataaaagacagcggcctgttcaccaaggcttcgggctgaagggagccgtgacacttaccattctgctcggcatctttttcctgtgctgggggccctttttcctgcacctcacgctgatcgtcctttgtcctgagcatcctacctgcggatgtatttttaaaaatttcaacctgttcctcgcgctgatcatttgcaatgctatcattgaccccctgatctatgcctttcactcccaggaacttcgcagaacactcaaggaggtgctgacccggagctggtga

SEQ ID NO: 2547 - protein, 317 aa, synthetic construct [sequence omitted]

SEQ ID NO: 2548 - RNA, 954 nt, synthetic construct
  misc_feature 1..954: note = MC1_R__Homo_sapiens__AAQ62973
  source 1..954: mol_type = other RNA
atggctgtgcagggatcccagagaagacttctgggctccctcaactccacccccacagccatcccccagctggggctggctgccaaccagacaggagcccggtgcctggaggtgtccatctctgacgggctcttcctcagcctggggctggtgagcttggtggagaacgcgctggtggtggccaccatcgccaagaaccggaacctgcactcacccatgtactgcttcatctgctgcctggccttgtcggacctgctggtgagcgggagcaacgtgctggagacggccgtcatcctcctgctggaggccggtgcactggtggcccgggctgcggtgctgcagcagctggacaatgtcattgacgtgatcacctgcagctccatgctgtccagcctctgcttcctgggcgccatcgccgtggaccgctacatctccatcttctacgcactgcgctaccacagcatcgtgaccctgccgcgggcgcggcgagccgttgcggccatctgggtggccagtgtcgtcttcagcacgctcttcatcgcctactacgaccacgtggccgtcctgctgtgcctcgtggtcttcttcctggctatgctggtgctcatggccgtgctgtacgtccacatgctggcccgggcctgccagcacgcccagggcatcgcccggctccacaagaggcagcgcccggtccaccagggctttggccttaaaggcgctgtcaccctcaccatcctgctgggcattttcttcctctgctggggccccttcttcctgcatctcacactcatcgtcctctgccccgagcaccccacgtgcggctgcatcttcaagaacttcaacctctttctcgccctcatcatctgcaatgccatcatcgaccccctcatctacgccttccacagccaggagctccgcaggatgctcaaggaggtgctgacatgctcctggtga

SEQ ID NO: 2549 - RNA, 954 nt, synthetic construct
  misc_feature 1..954: note = derived and/or modified sequence opt1 fromMC1_R__Homo_sapiens__AAQ62973
  source 1..954: mol_type = other RNA
atggccgtgcagggcagccagcgccggctgctcgggtccctgaacagcacccccaccgccatcccccagctgggcctcgcggccaaccagacgggggcccgctgcctggaggtctccatcagcgacggcctgttcctctccctggggctggtgagcctcgtggagaacgccctggtcgtggccaccatcgcgaagaaccggaacctgcactcccccatgtactgcttcatctgctgcctcgccctgagcgacctgctcgtgtccggcagcaacgtcctggagaccgccgtgatcctgctcctggaggccggcgcgctggtggcccgcgccgccgtcctccagcagctggacaacgtgatcgacgtgatcacgtgctccagcatgctgtccagcctctgcttcctgggggccatcgcggtcgaccggtacatctccatcttctacgccctgcgctaccacagcatcgtgaccctcccccgggcccgccgggccgtggccgcgatctgggtcgcctccgtggtgttcagcaccctgttcatcgcctactacgaccacgtcgccgtgctgctctgcctggtggtcttcttcctggccatgctcgtgctgatggcggtgctgtacgtccacatgctcgcccgcgcctgccagcacgcccagggcatcgcccggctgcacaagcgccagcggcccgtgcaccaggggttcggcctgaagggggcggtcaccctcaccatcctgctgggcatcttcttcctctgctggggcccgttcttcctgcacctgacgctcatcgtgctgtgccccgagcacccgacctgcgggtgcatcttcaagaacttcaacctgttcctcgccctgatcatctgcaacgccatcatcgaccccctgatctacgccttccactcccaggagctgcgccggatgctcaaggaggtgctgacctgcagctggtga

SEQ ID NO: 2550 - RNA, 954 nt, synthetic construct
  misc_feature 1..954: note = derived and/or modified sequence opt2 fromMC1_R__Homo_sapiens__AAQ62973
  source 1..954: mol_type = other RNA
atggccgtccagggctcccagcgccgcctcctcggctccctcaactccacccccaccgccatcccccagctcggcctcgccgccaaccagaccggcgcccgctgcctcgaggtctccatctccgacggcctcttcctctccctcggcctcgtctccctcgtcgagaacgccctcgtcgtcgccaccatcgccaagaaccgcaacctccactcccccatgtactgcttcatctgctgcctcgccctctccgacctcctcgtctccggctccaacgtcctcgagaccgccgtcatcctcctcctcgaggccggcgccctcgtcgcccgcgccgccgtcctccagcagctcgacaacgtcatcgacgtcatcacctgctcctccatgctctcctccctctgcttcctcggcgccatcgccgtcgaccgctacatctccatcttctacgccctccgctaccactccatcgtcaccctcccccgcgcccgccgcgccgtcgccgccatctgggtcgcctccgtcgtcttctccaccctcttcatcgcctactacgaccacgtcgccgtcctcctctgcctcgtcgtcttcttcctcgccatgctcgtcctcatggccgtcctctacgtccacatgctcgcccgcgcctgccagcacgcccagggcatcgcccgcctccacaagcgccagcgccccgtccaccagggcttcggcctcaagggcgccgtcaccctcaccatcctcctcggcatcttcttcctctgctggggccccttcttcctccacctcaccctcatcgtcctctgccccgagcaccccacctgcggctgcatcttcaagaacttcaacctcttcctcgccctcatcatctgcaacgccatcatcgaccccctcatctacgccttccactcccaggagctccgccgcatgctcaaggaggtcctcacctgctcctggtga

SEQ ID NO: 2551 - RNA, 954 nt, synthetic construct
  misc_feature 1..954: note = derived and/or modified sequence opt3 fromMC1_R__Homo_sapiens__AAQ62973
  source 1..954: mol_type = other RNA
atggccgtgcagggcagccaaagaaggctgctcgggtcccttaactctacccccacagctatccctcagctgggattggcagccaatcagactggtgcgcggtgcttagaggtctcaattagtgacggcctgttcctaagcctcgggctggtttcccttgtggaaaacgctctggtagtggccacgatagcaaagaatcgcaacttgcactctccaatgtactgttttatctgctgtctcgccctgtcggatctgctcgtctcaggaagcaatgtgttagagaccgctgttattctgcttttggaagcaggcgccctggtggctcgagccgcggtcctacagcaactcgacaacgtgatcgatgtaattacatgcagttccatgctgtctagcctttgtttcctgggtgcaatcgccgttgaccgttatatatccatcttttacgctttgagatatcattcaattgtgactctcccgagggcccggcgcgcagtcgctgccatctgggtggcgagtgtggtcttcagcaccctgtttattgcctactatgatcacgttgcagtgttactgtgcctcgtagtgttctttcttgctatgctggtcttgatggccgtgctatacgttcatatgctggctagagcctgtcagcacgcacaggggatcgccaggctccataaacggcagcgccccgtgcaccaaggattcggcctgaagggcgctgtcacacttaccatactgttggggatctttttcctctgctggggaccatttttcctgcacttaactctgattgtgctatgtcctgagcatcccacatgcggttgtatttttaaaaatttcaacctcttcctggcgcttatcatctgcaatgcaattatagaccctttgatctatgcctttcactctcaggaactgcgaagaatgctcaaggaggtactgacctgctcctggtga

SEQ ID NO: 2552 - RNA, 954 nt, synthetic construct
  misc_feature 1..954: note = derived and/or modified sequence opt4 fromMC1_R__Homo_sapiens__AAQ62973
  source 1..954: mol_type = other RNA
atggccgtgcagggcagccagagaagactgctgggcagcctgaacagcacccccaccgccatcccccagctgggcctggccgccaaccagaccggcgccagatgcctggaggtgagcatcagcgacggcctgttcctgagcctgggcctggtgagcctggtggagaacgccctggtggtggccaccatcgccaagaacagaaacctgcacagccccatgtactgcttcatctgctgcctggccctgagcgacctgctggtgagcggcagcaacgtgctggagaccgccgtgatcctgctgctggaggccggcgccctggtggccagagccgccgtgctgcagcagctggacaacgtgatcgacgtgatcacctgcagcagcatgctgagcagcctgtgcttcctgggcgccatcgccgtggacagatacatcagcatcttctacgccctgagataccacagcatcgtgaccctgcccagagccagaagagccgtggccgccatctgggtggccagcgtggtgttcagcaccctgttcatcgcctactacgaccacgtggccgtgctgctgtgcctggtggtgttcttcctggccatgctggtgctgatggccgtgctgtacgtgcacatgctggccagagcctgccagcacgcccagggcatcgccagactgcacaagagacagagacccgtgcaccagggcttcggcctgaagggcgccgtgaccctgaccatcctgctgggcatcttcttcctgtgctggggccccttcttcctgcacctgaccctgatcgtgctgtgccccgagcaccccacctgcggctgcatcttcaagaacttcaacctgttcctggccctgatcatctgcaacgccatcatcgaccccctgatctacgccttccacagccaggagctgagaagaatgctgaaggaggtgctgacctgcagctggtga

SEQ ID NO: 2553 - RNA, 954 nt, synthetic construct
  misc_feature 1..954: note = derived and/or modified sequence opt5 fromMC1_R__Homo_sapiens__AAQ62973
  source 1..954: mol_type = other RNA
atggccgtgcagggcagccaaagacggctgctcgggtccctgaactctacccccacagctatccctcagcttggactggccgcgaatcagacgggcgctcgctgcctcgaggtcagcatttccgacgggctgttcctttctctgggactcgttagcctggtggaaaacgccctggtggtcgccaccatcgctaagaatagaaacctccactccccgatgtactgttttatttgctgtctggccctttctgatctgctcgtgagcggctccaatgttctggagacagctgtgatccttctgctcgaagccggggcgctggtcgcccgggctgccgtgctgcagcaactcgacaacgttattgatgtgattacctgcagctctatgctgtccagcctttgtttcctgggagctatcgccgtcgaccgctatatctctatcttttacgcgctcagatatcattccattgtgacactgccccgggcccgcagagctgtggccgctatctgggtcgccagcgttgtgttctctaccctttttattgcctactatgatcacgtggctgtcctgctctgcctggtggttttctttctggcgatgctcgtgctgatggccgtcctttacgtgcatatgctggctcgggcctgtcagcacgcccagggcatcgctcgcctccataaaagacagcggcctgttcaccaaggcttcgggctgaagggagccgtgacacttaccattctgctcggcatctttttcctgtgctgggggccctttttcctgcacctcacgctgatcgtcctttgtcctgagcatcctacctgcggatgtatttttaaaaatttcaacctgttcctcgcgctgatcatttgcaatgctatcattgaccccctgatctatgcctttcactcccaggaacttcgcagaatgctcaaggaggtgctgacatgcagctggtga

SEQ ID NO: 2554 - protein, 317 aa, synthetic construct [sequence omitted]

SEQ ID NO: 2555 - RNA, 954 nt, synthetic construct
  misc_feature 1..954: note = MC1_R__Homo_sapiens__AAQ62972
  source 1..954: mol_type = other RNA
atggctgtgcagggatcccagagaagacttctgggctccctcaactccacccccacagccatcccccagctggggctggctgccaaccagacaggagcccggtgcctggaggtgtccatctctgacgggctcttcctcagcctggggctggtgagcttggtggagaacgcgctggtggtggccaccatcgccaagaaccggaacctgcactcacccatgtactgcttcatctgctgcctggccttgtcggacctgctggtgagcgggagcaacgtgctggagacggccgtcatcctcctgctggaggccggtgcactggtggcccgggctgcggtgctgcagcagctggacaatgtcattgacgtgatcacctgcagctccatgctgtccagcctctgcttcctgggcgccatcgccgtggaccgctacatctccatcttctacgcactgcgctaccacagcatcgtgaccctgccgcgggcgcggcgagccgttgcggccatctgggtggccagtgtcgtcttcagcacgctcttcatcgcctactacgaccacgtggccgtcctgctgtgcctcgtggtcttcttcctggctatgctggtgctcatggccgtgctgtacgtccacatgctggcctgggcctgccagcacgcccagggcatcgcccggctccacaagaggcagcgcccggtccaccagggctttggccttaaaggcgctgtcaccctcaccatcctgctgggcattttcttcctctgctggggccccttcttcctgcatctcacactcatcgtcctctgccccgagcaccccacgtgcggctgcatcttcaagaacttcaacctctttctcgccctcatcatctgcaatgccatcatcgaccccctcatctacgccttccacagccaggagctccgcaggacgctcaaggaggtgctgacatgctcctggtga

SEQ ID NO: 2556 - RNA, 954 nt, synthetic construct
  misc_feature 1..954: note = derived and/or modified sequence opt1 fromMC1_R__Homo_sapiens__AAQ62972
  source 1..954: mol_type = other RNA
atggccgtgcagggcagccagcgccggctgctcgggtccctgaacagcacccccaccgccatcccccagctgggcctcgcggccaaccagacgggggcccgctgcctggaggtctccatcagcgacggcctgttcctctccctggggctggtgagcctcgtggagaacgccctggtcgtggccaccatcgcgaagaaccggaacctgcactcccccatgtactgcttcatctgctgcctcgccctgagcgacctgctcgtgtccggcagcaacgtcctggagaccgccgtgatcctgctcctggaggccggcgcgctggtggcccgcgccgccgtcctccagcagctggacaacgtgatcgacgtgatcacgtgctccagcatgctgtccagcctctgcttcctgggggccatcgcggtcgaccggtacatctccatcttctacgccctgcgctaccacagcatcgtgaccctcccccgggcccgccgggccgtggccgcgatctgggtcgcctccgtggtgttcagcaccctgttcatcgcctactacgaccacgtcgccgtgctgctctgcctggtggtcttcttcctggccatgctcgtgctgatggcggtgctgtacgtccacatgctcgcctgggcctgccagcacgcccagggcatcgcccgcctgcacaagcggcagcgccccgtgcaccaggggttcggcctgaagggggcggtcaccctcaccatcctgctgggcatcttcttcctctgctggggcccgttcttcctgcacctgacgctcatcgtgctgtgccccgagcacccgacctgcgggtgcatcttcaagaacttcaacctgttcctcgccctgatcatctgcaacgccatcatcgaccccctgatctacgccttccactcccaggagctgcggcgcaccctcaaggaggtgctgacctgcagctggtga

SEQ ID NO: 2557 - RNA, 954 nt, synthetic construct
  misc_feature 1..954: note = derived and/or modified sequence opt2 fromMC1_R__Homo_sapiens__AAQ62972
  source 1..954: mol_type = other RNA
atggccgtccagggctcccagcgccgcctcctcggctccctcaactccacccccaccgccatcccccagctcggcctcgccgccaaccagaccggcgcccgctgcctcgaggtctccatctccgacggcctcttcctctccctcggcctcgtctccctcgtcgagaacgccctcgtcgtcgccaccatcgccaagaaccgcaacctccactcccccatgtactgcttcatctgctgcctcgccctctccgacctcctcgtctccggctccaacgtcctcgagaccgccgtcatcctcctcctcgaggccggcgccctcgtcgcccgcgccgccgtcctccagcagctcgacaacgtcatcgacgtcatcacctgctcctccatgctctcctccctctgcttcctcggcgccatcgccgtcgaccgctacatctccatcttctacgccctccgctaccactccatcgtcaccctcccccgcgcccgccgcgccgtcgccgccatctgggtcgcctccgtcgtcttctccaccctcttcatcgcctactacgaccacgtcgccgtcctcctctgcctcgtcgtcttcttcctcgccatgctcgtcctcatggccgtcctctacgtccacatgctcgcctgggcctgccagcacgcccagggcatcgcccgcctccacaagcgccagcgccccgtccaccagggcttcggcctcaagggcgccgtcaccctcaccatcctcctcggcatcttcttcctctgctggggccccttcttcctccacctcaccctcatcgtcctctgccccgagcaccccacctgcggctgcatcttcaagaacttcaacctcttcctcgccctcatcatctgcaacgccatcatcgaccccctcatctacgccttccactcccaggagctccgccgcaccctcaaggaggtcctcacctgctcctggtga

SEQ ID NO: 2558 - RNA, 954 nt, synthetic construct
  misc_feature 1..954: note = derived and/or modified sequence opt3 fromMC1_R__Homo_sapiens__AAQ62972
  source 1..954: mol_type = other RNA
atggccgtgcagggcagccaaagaaggctgctcgggtcccttaactctacccccacagctatccctcagctgggattggcagccaatcagactggtgcgcggtgcttagaggtctcaattagtgacggcctgttcctaagcctcgggctggtttcccttgtggaaaacgctctggtagtggccacgatagcaaagaatcgcaacttgcactctccaatgtactgttttatctgctgtctcgccctgtcggatctgctcgtctcaggaagcaatgtgttagagaccgctgttattctgcttttggaagcaggcgccctggtggctcgagccgcggtcctacagcaactcgacaacgtgatcgatgtaattacatgcagttccatgctgtctagcctttgtttcctgggtgcaatcgccgttgaccgttatatatccatcttttacgctttgagatatcattcaattgtgactctcccgagggcccggcgcgcagtcgctgccatctgggtggcgagtgtggtcttcagcaccctgtttattgcctactatgatcacgttgcagtgttactgtgcctcgtagtgttctttcttgctatgctggtcttgatggccgtgctatacgttcatatgctggcttgggcctgtcagcacgcacaggggatcgccagactccataaaaggcagcggcccgtgcaccaaggattcggcctgaagggcgctgtcacacttaccatactgttggggatctttttcctctgctggggaccatttttcctgcacttaactctgattgtgctatgtcctgagcatcccacatgcggttgtatttttaaaaatttcaacctcttcctggcgcttatcatctgcaatgcaattatagaccctttgatctatgcctttcactctcaggaactgcgccgaaccctcaaggaggtactgacgtgctcctggtga

SEQ ID NO: 2559 - RNA, 954 nt, synthetic construct
  misc_feature 1..954: note = derived and/or modified sequence opt4 fromMC1_R__Homo_sapiens__AAQ62972
  source 1..954: mol_type = other RNA
atggccgtgcagggcagccagagaagactgctgggcagcctgaacagcacccccaccgccatcccccagctgggcctggccgccaaccagaccggcgccagatgcctggaggtgagcatcagcgacggcctgttcctgagcctgggcctggtgagcctggtggagaacgccctggtggtggccaccatcgccaagaacagaaacctgcacagccccatgtactgcttcatctgctgcctggccctgagcgacctgctggtgagcggcagcaacgtgctggagaccgccgtgatcctgctgctggaggccggcgccctggtggccagagccgccgtgctgcagcagctggacaacgtgatcgacgtgatcacctgcagcagcatgctgagcagcctgtgcttcctgggcgccatcgccgtggacagatacatcagcatcttctacgccctgagataccacagcatcgtgaccctgcccagagccagaagagccgtggccgccatctgggtggccagcgtggtgttcagcaccctgttcatcgcctactacgaccacgtggccgtgctgctgtgcctggtggtgttcttcctggccatgctggtgctgatggccgtgctgtacgtgcacatgctggcctgggcctgccagcacgcccagggcatcgccagactgcacaagagacagagacccgtgcaccagggcttcggcctgaagggcgccgtgaccctgaccatcctgctgggcatcttcttcctgtgctggggccccttcttcctgcacctgaccctgatcgtgctgtgccccgagcaccccacctgcggctgcatcttcaagaacttcaacctgttcctggccctgatcatctgcaacgccatcatcgaccccctgatctacgccttccacagccaggagctgagaagaaccctgaaggaggtgctgacctgcagctggtga

SEQ ID NO: 2560 - RNA, 954 nt, synthetic construct
  misc_feature 1..954: note = derived and/or modified sequence opt5 fromMC1_R__Homo_sapiens__AAQ62972
  source 1..954: mol_type = other RNA
atggccgtgcagggcagccaaagacggctgctcgggtccctgaactctacccccacagctatccctcagcttggactggccgcgaatcagacgggcgctcgctgcctcgaggtcagcatttccgacgggctgttcctttctctgggactcgttagcctggtggaaaacgccctggtggtcgccaccatcgctaagaatagaaacctccactccccgatgtactgttttatttgctgtctggccctttctgatctgctcgtgagcggctccaatgttctggagacagctgtgatccttctgctcgaagccggggcgctggtcgcccgggctgccgtgctgcagcaactcgacaacgttattgatgtgattacctgcagctctatgctgtccagcctttgtttcctgggagctatcgccgtcgaccgctatatctctatcttttacgcgctcagatatcattccattgtgacactgccccgggcccgcagagctgtggccgctatctgggtcgccagcgttgtgttctctaccctttttattgcctactatgatcacgtggctgtcctgctctgcctggtggttttctttctggcgatgctcgtgctgatggccgtcctttacgtgcatatgctggcttgggcctgtcagcacgcccagggcatcgctcggctccataaacgccagagacctgttcaccaaggcttcgggctgaagggagccgtgacacttaccattctgctcggcatctttttcctgtgctgggggccctttttcctgcacctcacgctgatcgtcctttgtcctgagcatcctacctgcggatgtatttttaaaaatttcaacctgttcctcgcgctgatcatttgcaatgctatcattgaccccctgatctatgcctttcactcccaggaacttcggcgcacactcaaggaggtgctgacctgcagctggtga

SEQ ID NO: 2561 - protein, 317 aa, synthetic construct [sequence omitted]

SEQ ID NO: 2562 - RNA, 954 nt, synthetic construct
  misc_feature 1..954: note = MC1_R__Homo_sapiens__AAQ62971
  source 1..954: mol_type = other RNA
atggctgtgcagggatcccagagaagacttctgggctccctcaactccacccccacagccatcccccagctggggctggctgccaaccagacaggagcccggtgcctggaggtgtccatctctgacgggctcttcctcagcctggggctggtgagcttggtggagaacgcgctggtggtggccaccatcgccaagaaccggaacctgcactcacccatgtactgcttcatctgctgcctggccttgtcggacctgctggtgagcgggagcaacgtgctggagacggccgtcatcctcctgctggaggccggtgcactggtggcccgggctgcggtgctgcagcagctggacaatgtcattgacgtgatcacctgcagctccatgctgtccagcctctgcttcctgggcgccatcgccgtggaccgctacatctccatcttctacgcactgcgctaccacagcatcgtgaccctgccgcaggcgcggcgagccgttgcggccatctgggtggccagtgtcgtcttcagcacgctcttcatcgcctactacgaccacgtggccgtcctgctgtgcctcgtggtcttcttcctggctatgctggtgctcatggccgtgctgtacgtccacatgctggcccgggcctgccagcacgcccagggcatcgcccggctccacaagaggcagcgcccggtccaccagggctttggccttaaaggcgctgtcaccctcaccatcctgctgggcattttcttcctctgctggggccccttcttcctgcatctcacactcatcgtcctctgccccgagcaccccacgtgcggctgcatcttcaagaacttcaacctctttctcgccctcatcatctgcaatgccatcatcgaccccctcatctacgccttccacagccaggagctccgcaggacgctcaaggaggtgctgacatgctcctggtga

SEQ ID NO: 2563 - RNA, 954 nt, synthetic construct
  misc_feature 1..954: note = derived and/or modified sequence opt1 fromMC1_R__Homo_sapiens__AAQ62971
  source 1..954: mol_type = other RNA
atggccgtgcagggcagccagcgccggctgctcgggtccctgaacagcacccccaccgccatcccccagctgggcctcgcggccaaccagacgggggcccgctgcctggaggtctccatcagcgacggcctgttcctctccctggggctggtgagcctcgtggagaacgccctggtcgtggccaccatcgcgaagaaccggaacctgcactcccccatgtactgcttcatctgctgcctcgccctgagcgacctgctcgtgtccggcagcaacgtcctggagaccgccgtgatcctgctcctggaggccggcgcgctggtggcccgcgccgccgtcctccagcagctggacaacgtgatcgacgtgatcacgtgctccagcatgctgtccagcctctgcttcctgggggccatcgcggtcgaccggtacatctccatcttctacgccctgcgctaccacagcatcgtgaccctcccccaggcccggcgcgccgtggccgcgatctgggtcgcctccgtggtgttcagcaccctgttcatcgcctactacgaccacgtcgccgtgctgctctgcctggtggtcttcttcctggccatgctcgtgctgatggcggtgctgtacgtccacatgctcgcccgggcctgccagcacgcccagggcatcgcccgcctgcacaagcggcagcgccccgtgcaccaggggttcggcctgaagggggcggtcaccctcaccatcctgctgggcatcttcttcctctgctggggcccgttcttcctgcacctgacgctcatcgtgctgtgccccgagcacccgacctgcgggtgcatcttcaagaacttcaacctgttcctcgccctgatcatctgcaacgccatcatcgaccccctgatctacgccttccactcccaggagctgcggcgcaccctcaaggaggtgctgacctgcagctggtga

SEQ ID NO: 2564 - RNA, 954 nt, synthetic construct
  misc_feature 1..954: note = derived and/or modified sequence opt2 fromMC1_R__Homo_sapiens__AAQ62971
  source 1..954: mol_type = other RNA
atggccgtccagggctcccagcgccgcctcctcggctccctcaactccacccccaccgccatcccccagctcggcctcgccgccaaccagaccggcgcccgctgcctcgaggtctccatctccgacggcctcttcctctccctcggcctcgtctccctcgtcgagaacgccctcgtcgtcgccaccatcgccaagaaccgcaacctccactcccccatgtactgcttcatctgctgcctcgccctctccgacctcctcgtctccggctccaacgtcctcgagaccgccgtcatcctcctcctcgaggccggcgccctcgtcgcccgcgccgccgtcctccagcagctcgacaacgtcatcgacgtcatcacctgctcctccatgctctcctccctctgcttcctcggcgccatcgccgtcgaccgctacatctccatcttctacgccctccgctaccactccatcgtcaccctcccccaggcccgccgcgccgtcgccgccatctgggtcgcctccgtcgtcttctccaccctcttcatcgcctactacgaccacgtcgccgtcctcctctgcctcgtcgtcttcttcctcgccatgctcgtcctcatggccgtcctctacgtccacatgctcgcccgcgcctgccagcacgcccagggcatcgcccgcctccacaagcgccagcgccccgtccaccagggcttcggcctcaagggcgccgtcaccctcaccatcctcctcggcatcttcttcctctgctggggccccttcttcctccacctcaccctcatcgtcctctgccccgagcaccccacctgcggctgcatcttcaagaacttcaacctcttcctcgccctcatcatctgcaacgccatcatcgaccccctcatctacgccttccactcccaggagctccgccgcaccctcaaggaggtcctcacctgctcctggtga

SEQ ID NO: 2565 - RNA, 954 nt, synthetic construct
  misc_feature 1..954: note = derived and/or modified sequence opt3 fromMC1_R__Homo_sapiens__AAQ62971
  source 1..954: mol_type = other RNA
atggccgtgcagggcagccaaagaaggctgctcgggtcccttaactctacccccacagctatccctcagctgggattggcagccaatcagactggtgcgcggtgcttagaggtctcaattagtgacggcctgttcctaagcctcgggctggtttcccttgtggaaaacgctctggtagtggccacgatagcaaagaatcgcaacttgcactctccaatgtactgttttatctgctgtctcgccctgtcggatctgctcgtctcaggaagcaatgtgttagagaccgctgttattctgcttttggaagcaggcgccctggtggctcgagccgcggtcctacagcaactcgacaacgtgatcgatgtaattacatgcagttccatgctgtctagcctttgtttcctgggtgcaatcgccgttgaccgttatatatccatcttttacgctttgagatatcattcaattgtgactctcccgcaggccaggcgggcagtcgctgccatctgggtggcgagtgtggtcttcagcaccctgtttattgcctactatgatcacgttgcagtgttactgtgcctcgtagtgttctttcttgctatgctggtcttgatggccgtgctatacgttcatatgctggctcgcgcctgtcagcacgcacaggggatcgccagactccataaaaggcaacggcccgtgcaccagggattcggcctgaagggcgctgtcacacttaccatactgttggggatctttttcctctgctggggaccatttttcctgcacttaactctgattgtgctatgtcctgagcatcccacatgcggttgtatttttaaaaatttcaacctcttcctggcgcttatcatctgcaatgcaattatagaccctttgatctatgcctttcactctcaggaactgcgccgaaccctcaaggaggtactgacgtgctcctggtga

SEQ ID NO: 2566 - RNA, 954 nt, synthetic construct
  misc_feature 1..954: note = derived and/or modified sequence opt4 fromMC1_R__Homo_sapiens__AAQ62971
  source 1..954: mol_type = other RNA
atggccgtgcagggcagccagagaagactgctgggcagcctgaacagcacccccaccgccatcccccagctgggcctggccgccaaccagaccggcgccagatgcctggaggtgagcatcagcgacggcctgttcctgagcctgggcctggtgagcctggtggagaacgccctggtggtggccaccatcgccaagaacagaaacctgcacagccccatgtactgcttcatctgctgcctggccctgagcgacctgctggtgagcggcagcaacgtgctggagaccgccgtgatcctgctgctggaggccggcgccctggtggccagagccgccgtgctgcagcagctggacaacgtgatcgacgtgatcacctgcagcagcatgctgagcagcctgtgcttcctgggcgccatcgccgtggacagatacatcagcatcttctacgccctgagataccacagcatcgtgaccctgccccaggccagaagagccgtggccgccatctgggtggccagcgtggtgttcagcaccctgttcatcgcctactacgaccacgtggccgtgctgctgtgcctggtggtgttcttcctggccatgctggtgctgatggccgtgctgtacgtgcacatgctggccagagcctgccagcacgcccagggcatcgccagactgcacaagagacagagacccgtgcaccagggcttcggcctgaagggcgccgtgaccctgaccatcctgctgggcatcttcttcctgtgctggggccccttcttcctgcacctgaccctgatcgtgctgtgccccgagcaccccacctgcggctgcatcttcaagaacttcaacctgttcctggccctgatcatctgcaacgccatcatcgaccccctgatctacgccttccacagccaggagctgagaagaaccctgaaggaggtgctgacctgcagctggtga

SEQ ID NO: 2567 - RNA, 954 nt, synthetic construct
  misc_feature 1..954: note = derived and/or modified sequence opt5 fromMC1_R__Homo_sapiens__AAQ62971
  source 1..954: mol_type = other RNA
atggccgtgcagggcagccaaagacggctgctcgggtccctgaactctacccccacagctatccctcagcttggactggccgcgaatcagacgggcgctcgctgcctcgaggtcagcatttccgacgggctgttcctttctctgggactcgttagcctggtggaaaacgccctggtggtcgccaccatcgctaagaatagaaacctccactccccgatgtactgttttatttgctgtctggccctttctgatctgctcgtgagcggctccaatgttctggagacagctgtgatccttctgctcgaagccggggcgctggtcgcccgggctgccgtgctgcagcaactcgacaacgttattgatgtgattacctgcagctctatgctgtccagcctttgtttcctgggagctatcgccgtcgaccgctatatctctatcttttacgcgctcagatatcattccattgtgacactgccccaggcccggcgcgctgtggccgctatctgggtcgccagcgttgtgttctctaccctttttattgcctactatgatcacgtggctgtcctgctctgcctggtggttttctttctggcgatgctcgtgctgatggccgtcctttacgtgcatatgctggctagagcctgtcagcacgcccagggcatcgctcggctccataaacgccaaagacctgttcaccagggcttcgggctgaagggagccgtgacacttaccattctgctcggcatctttttcctgtgctgggggccctttttcctgcacctcacgctgatcgtcctttgtcctgagcatcctacctgcggatgtatttttaaaaatttcaacctgttcctcgcgctgatcatttgcaatgctatcattgaccccctgatctatgcctttcactcccaggaacttcggcgcacactcaaggaggtgctgacctgcagctggtga

SEQ ID NO: 2568 - protein, 317 aa, synthetic construct [sequence omitted]

SEQ ID NO: 2569 - RNA, 954 nt, synthetic construct
  misc_feature 1..954: note = MC1_R__Homo_sapiens__AAQ62970
  source 1..954: mol_type = other RNA
atggctgtgcagggatcccagagaagacttctgggctccctcaactccacccccacagccatcccccagctggggctggctgccaaccagacaggagcccggtgcctggaggtgtccatctctgacgggctcttcctcagcctggggctggtgagcttggtggagaacgcgctggtggtggccaccatcgccaagaaccggaacctgcactcacccatgtactgcttcatctgctgcctggccttgttggacctgctggtgagcgggagcaacgtgctggagacggccgtcatcctcctgctggaggccggtgcactggtggcccgggctgcggtgctgcagcagctggacaatgtcattgacgtgatcacctgcagctccatgctgtccagcctctgcttcctgggcgccatcgccgtggaccgctacatctccatcttctacgcactgcgctaccacagcatcgtgaccctgccgcgggcgcggcgagccgttgcggccatctgggtggccagtgtcgtcttcagcacgctcttcatcgcctactacgaccacgtggccgtcctgctgtgcctcgtggtcttcttcctggctatgctggtgctcatggccgtgctgtacgtccacatgctggcccgggcctgccagcacgcccagggcatcgcccggctccacaagaggcagcgcccggtccaccagggctttggccttaaaggcgctgtcaccctcaccatcctgctgggcattttcttcctctgctggggccccttcttcctgcatctcacactcatcgtcctctgccccgagcaccccacgtgcggctgcatcttcaagaacttcaacctctttctcgccctcatcatctgcaatgccatcatcgaccccctcatctacgccttccacagccaggagctccgcaggacgctcaaggaggtgctgacatgctcctggtga

SEQ ID NO: 2570 - RNA, 954 nt, synthetic construct
  misc_feature 1..954: note = derived and/or modified sequence opt1 fromMC1_R__Homo_sapiens__AAQ62970
  source 1..954: mol_type = other RNA
atggccgtgcagggcagccagcgccggctgctcgggtccctgaacagcacccccaccgccatcccccagctgggcctcgcggccaaccagacgggggcccgctgcctggaggtctccatcagcgacggcctgttcctctccctggggctggtgagcctcgtggagaacgccctggtcgtggccaccatcgcgaagaaccggaacctgcactcccccatgtactgcttcatctgctgcctcgccctgctggacctcctggtgagcggctccaacgtcctggagaccgccgtgatcctcctgctggaggccggcgcgctcgtggcccgcgccgccgtcctgcagcagctggacaacgtgatcgacgtgatcacgtgcagctccatgctcagctccctgtgcttcctgggggccatcgcggtcgaccggtacatcagcatcttctacgccctccgctaccactccatcgtgaccctgccccgggcccgccgggccgtggccgcgatctgggtcgccagcgtggtgttctccaccctgttcatcgcctactacgaccacgtcgccgtgctcctgtgcctggtggtcttcttcctcgccatgctggtgctgatggcggtgctctacgtccacatgctggcccgcgcctgccagcacgcccagggcatcgcccggctgcacaagcgccagcggcccgtgcaccaggggttcggcctcaagggggcggtcaccctgaccatcctgctcggcatcttcttcctgtgctggggcccgttcttcctgcacctcacgctgatcgtgctgtgccccgagcacccgacctgcgggtgcatcttcaagaacttcaacctcttcctggccctgatcatctgcaacgccatcatcgaccccctgatctacgccttccacagccaggagctccgccggaccctgaaggaggtgctgacctgctcctggtga

SEQ ID NO: 2571 - RNA, 954 nt, synthetic construct
  misc_feature 1..954: note = derived and/or modified sequence opt2 fromMC1_R__Homo_sapiens__AAQ62970
  source 1..954: mol_type = other RNA
atggccgtccagggctcccagcgccgcctcctcggctccctcaactccacccccaccgccatcccccagctcggcctcgccgccaaccagaccggcgcccgctgcctcgaggtctccatctccgacggcctcttcctctccctcggcctcgtctccctcgtcgagaacgccctcgtcgtcgccaccatcgccaagaaccgcaacctccactcccccatgtactgcttcatctgctgcctcgccctcctcgacctcctcgtctccggctccaacgtcctcgagaccgccgtcatcctcctcctcgaggccggcgccctcgtcgcccgcgccgccgtcctccagcagctcgacaacgtcatcgacgtcatcacctgctcctccatgctctcctccctctgcttcctcggcgccatcgccgtcgaccgctacatctccatcttctacgccctccgctaccactccatcgtcaccctcccccgcgcccgccgcgccgtcgccgccatctgggtcgcctccgtcgtcttctccaccctcttcatcgcctactacgaccacgtcgccgtcctcctctgcctcgtcgtcttcttcctcgccatgctcgtcctcatggccgtcctctacgtccacatgctcgcccgcgcctgccagcacgcccagggcatcgcccgcctccacaagcgccagcgccccgtccaccagggcttcggcctcaagggcgccgtcaccctcaccatcctcctcggcatcttcttcctctgctggggccccttcttcctccacctcaccctcatcgtcctctgccccgagcaccccacctgcggctgcatcttcaagaacttcaacctcttcctcgccctcatcatctgcaacgccatcatcgaccccctcatctacgccttccactcccaggagctccgccgcaccctcaaggaggtcctcacctgctcctggtga

SEQ ID NO: 2572 - RNA, 954 nt, synthetic construct
  misc_feature 1..954: note = derived and/or modified sequence opt3 fromMC1_R__Homo_sapiens__AAQ62970
  source 1..954: mol_type = other RNA
atggccgtgcagggcagccaaagaaggctgctcgggtcccttaactctacccccacagctatccctcagctgggattggcagccaatcagactggtgcgcggtgcttagaggtctcaattagtgacggcctgttcctaagcctcgggctggtttcccttgtggaaaacgctctggtagtggccacgatagcaaagaatcgcaacttgcactctccaatgtactgttttatctgctgtctcgccctgctggatctcttagtctcgggatcaaatgtgctggagaccgctgttattcttttgctggaagcaggcgccctagtggctcgagccgcggtcctccagcaactggacaacgtgatcgatgtaattacatgcagcagtatgctttcctctctgtgtttcttgggtgcaatcgccgttgaccgttatataagcatcttttacgctctcagatatcattccattgtgactctgccgagggcccggcgcgcagtcgctgccatctgggtggcgtcagtggtcttcagtaccttatttattgcctactatgatcacgttgcagtgctgctctgccttgtagtgttctttctggctatgttggtcctaatggccgtgctgtacgttcatatgctcgctagagcctgtcagcacgcacaggggatcgccaggctgcataaacggcagcgccccgtgcaccaaggattcggccttaagggcgctgtcacactgaccatattgctcgggatctttttcctgtgctggggaccatttttcttacacctgactctaattgtgctctgtcctgagcatcccacatgcggttgtatttttaaaaatttcaacctgttccttgcgttgatcatctgcaatgcaattatagaccctctgatctatgcctttcacagccaggaactccgaagaaccctgaaggaggtacttacgtgctcttggtga

SEQ ID NO: 2573 - RNA, 954 nt, synthetic construct
  misc_feature 1..954: note = derived and/or modified sequence opt4 fromMC1_R__Homo_sapiens__AAQ62970
  source 1..954: mol_type = other RNA
atggccgtgcagggcagccagagaagactgctgggcagcctgaacagcacccccaccgccatcccccagctgggcctggccgccaaccagaccggcgccagatgcctggaggtgagcatcagcgacggcctgttcctgagcctgggcctggtgagcctggtggagaacgccctggtggtggccaccatcgccaagaacagaaacctgcacagccccatgtactgcttcatctgctgcctggccctgctggacctgctggtgagcggcagcaacgtgctggagaccgccgtgatcctgctgctggaggccggcgccctggtggccagagccgccgtgctgcagcagctggacaacgtgatcgacgtgatcacctgcagcagcatgctgagcagcctgtgcttcctgggcgccatcgccgtggacagatacatcagcatcttctacgccctgagataccacagcatcgtgaccctgcccagagccagaagagccgtggccgccatctgggtggccagcgtggtgttcagcaccctgttcatcgcctactacgaccacgtggccgtgctgctgtgcctggtggtgttcttcctggccatgctggtgctgatggccgtgctgtacgtgcacatgctggccagagcctgccagcacgcccagggcatcgccagactgcacaagagacagagacccgtgcaccagggcttcggcctgaagggcgccgtgaccctgaccatcctgctgggcatcttcttcctgtgctggggccccttcttcctgcacctgaccctgatcgtgctgtgccccgagcaccccacctgcggctgcatcttcaagaacttcaacctgttcctggccctgatcatctgcaacgccatcatcgaccccctgatctacgccttccacagccaggagctgagaagaaccctgaaggaggtgctgacctgcagctggtga

SEQ ID NO: 2574 - RNA, 954 nt, synthetic construct
  misc_feature 1..954: note = derived and/or modified sequence opt5 fromMC1_R__Homo_sapiens__AAQ62970
  source 1..954: mol_type = other RNA
atggccgtgcagggcagccaaagacggctgctcgggtccctgaactctacccccacagctatccctcagcttggactggccgcgaatcagacgggcgctcgctgcctcgaggtcagcatttccgacgggctgttcctttctctgggactcgttagcctggtggaaaacgccctggtggtcgccaccatcgctaagaatagaaacctccactccccgatgtactgttttatttgctgtctggcccttctggatctcctggtgtctggcagcaatgttcttgagacagctgtgatcctgctcctggaagccggggcgctggtcgcccgggctgccgtgctccagcaactggacaacgttattgatgtgattacctgctccagcatgctttcttccctgtgtttcctcggagctatcgccgtcgaccgctatatcagcatcttttacgcgctgagatatcattctattgtgacacttccccgggcccgcagagctgtggccgctatctgggtcgcctccgttgtgttcagcaccctgtttattgcctactatgatcacgtggctgtcctcctgtgcctggtggttttctttctcgcgatgctggtgcttatggccgtcctgtacgtgcatatgctcgctcgggcctgtcagcacgcccagggcatcgctcgcctgcataaaagacagcggcctgttcaccaaggcttcgggcttaagggagccgtgacactgaccattctcctgggcatctttttcctgtgctgggggccctttttcctccacctgacgcttatcgtcctgtgtcctgagcatcctacctgcggatgtatttttaaaaatttcaacctcttcctggcgctgatcatttgcaatgctatcattgacccccttatctatgcctttcactctcaggaactccgcagaacactgaaggaggtgctgacctgctcctggtga

SEQ ID NO: 2575 - protein, 317 aa, synthetic construct [sequence omitted]

SEQ ID NO: 2576 - RNA, 954 nt, synthetic construct
  misc_feature 1..954: note = MC1_R__Homo_sapiens__AAQ62969
  source 1..954: mol_type = other RNA
atggctgtgcagggatcccagagaagacttctgggctccctcaactccacccccacagccatcccccagctggggctggctgccaaccagacaggagcccggtgcctggaggtgtccatctctgacgggctcctcctcagcctggggctggtgagcttggtggagaacgcgctggtggtggccaccatcgccaagaaccggaacctgcactcacccatgtactgcttcatctgctgcctggccttgtcggacctgctggtgagcgggagcaacgtgctggagacggccgtcatcctcctgctggaggccggtgcactggtggcccgggctgcggtgctgcagcagctggacaatgtcattgacgtgatcacctgcagctccatgctgtccagcctctgcttcctgggcgccatcgccgtggaccgctacatctccatcttctacgcactgcgctaccacagcatcgtgaccctgccgcgggcgcggcgagccgttgcggccatctgggtggccagtgtcgtcttcagcacgctcttcatcgcctactacgaccacgtggccgtcctgctgtgcctcgtggtcttcttcctggctatgctggtgctcatggccgtgctgtacgtccacatgctggcccgggcctgccagcacgcccagggcatcgcccggctccacaagaggcagcgcccggtccaccagggctttggccttaaaggcgctgtcaccctcaccatcctgctgggcattttcttcctctgctggggccccttcttcctgcatctcacactcatcgtcctctgccccgagcaccccacgtgcggctgcatcttcaagaacttcaacctctttctcgccctcatcatctgcaatgccatcatcgaccccctcatctacgccttccacagccaggagctccgcaggacgctcaaggaggtgctgacatgctcctggtga

SEQ ID NO: 2577 - RNA, 954 nt, synthetic construct
  misc_feature 1..954: note = derived and/or modified sequence opt1 fromMC1_R__Homo_sapiens__AAQ62969
  source 1..954: mol_type = other RNA
atggccgtgcagggcagccagcgccggctgctcgggtccctgaacagcacccccaccgccatcccccagctgggcctcgcggccaaccagacgggggcccgctgcctggaggtctccatcagcgacggcctgctcctgtccctggggctcgtgagcctggtggagaacgccctggtcgtggccaccatcgcgaagaaccggaacctccactcccccatgtactgcttcatctgctgcctggccctgagcgacctcctggtgtccggcagcaacgtcctggagaccgccgtgatcctcctgctggaggccggcgcgctcgtggcccgcgccgccgtcctgcagcagctggacaacgtgatcgacgtgatcacgtgctccagcatgctctccagcctgtgcttcctgggggccatcgcggtcgaccggtacatctccatcttctacgccctccgctaccacagcatcgtgaccctgccccgggcccgccgggccgtggccgcgatctgggtcgcctccgtggtgttcagcaccctgttcatcgcctactacgaccacgtcgccgtgctcctgtgcctggtggtcttcttcctcgccatgctggtgctgatggcggtgctctacgtccacatgctggcccgcgcctgccagcacgcccagggcatcgcccggctgcacaagcgccagcggcccgtgcaccaggggttcggcctcaagggggcggtcaccctgaccatcctgctcggcatcttcttcctgtgctggggcccgttcttcctgcacctcacgctgatcgtgctgtgccccgagcacccgacctgcgggtgcatcttcaagaacttcaacctcttcctggccctgatcatctgcaacgccatcatcgaccccctgatctacgccttccactcccaggagctccgccggaccctgaaggaggtgctgacctgcagctggtga

SEQ ID NO: 2578 - RNA, 954 nt, synthetic construct
  misc_feature 1..954: note = derived and/or modified sequence opt2 fromMC1_R__Homo_sapiens__AAQ62969
  source 1..954: mol_type = other RNA
atggccgtccagggctcccagcgccgcctcctcggctccctcaactccacccccaccgccatcccccagctcggcctcgccgccaaccagaccggcgcccgctgcctcgaggtctccatctccgacggcctcctcctctccctcggcctcgtctccctcgtcgagaacgccctcgtcgtcgccaccatcgccaagaaccgcaacctccactcccccatgtactgcttcatctgctgcctcgccctctccgacctcctcgtctccggctccaacgtcctcgagaccgccgtcatcctcctcctcgaggccggcgccctcgtcgcccgcgccgccgtcctccagcagctcgacaacgtcatcgacgtcatcacctgctcctccatgctctcctccctctgcttcctcggcgccatcgccgtcgaccgctacatctccatcttctacgccctccgctaccactccatcgtcaccctcccccgcgcccgccgcgccgtcgccgccatctgggtcgcctccgtcgtcttctccaccctcttcatcgcctactacgaccacgtcgccgtcctcctctgcctcgtcgtcttcttcctcgccatgctcgtcctcatggccgtcctctacgtccacatgctcgcccgcgcctgccagcacgcccagggcatcgcccgcctccacaagcgccagcgccccgtccaccagggcttcggcctcaagggcgccgtcaccctcaccatcctcctcggcatcttcttcctctgctggggccccttcttcctccacctcaccctcatcgtcctctgccccgagcaccccacctgcggctgcatcttcaagaacttcaacctcttcctcgccctcatcatctgcaacgccatcatcgaccccctcatctacgccttccactcccaggagctccgccgcaccctcaaggaggtcctcacctgctcctggtga

SEQ ID NO: 2579 - RNA, 954 nt, synthetic construct
  misc_feature 1..954: note = derived and/or modified sequence opt3 fromMC1_R__Homo_sapiens__AAQ62969
  source 1..954: mol_type = other RNA
atggccgtgcagggcagccaaagaaggctgctcgggtcccttaactctacccccacagctatccctcagctgggattggcagccaatcagactggtgcgcggtgcttagaggtctcaattagtgacggcctgctactcagcctggggcttgtttccctggtggaaaacgctttggtagtggccacgatagcaaagaatcgcaacctccactctccaatgtactgtttcatctgctgtctggccctgtcggatctcttagtctcaggaagcaatgtgctggagaccgctgttattcttttgctggaagcaggcgccctagtggctcgagccgcggtcctccagcaactggacaacgtgatcgatgtaattacatgcagttccatgctttctagcctgtgctttttgggtgcaatcgccgttgaccgttatatatccatcttctacgctctcagatatcattcaattgtgactctgccgagggcccggcgcgcagtcgctgccatctgggtggcgagtgtggtctttagcaccttattcattgcctactatgatcacgttgcagtgctgctctgtcttgtagtgtttttcctggctatgttggtcctaatggccgtgctgtacgttcatatgctcgctagagcctgtcagcacgcacaggggatcgccaggctgcataaacggcagcgccccgtgcaccaaggatttggccttaagggcgctgtcacactgaccatattgctcgggattttctttctgtgctggggacctttctttttacacctgactctaatcgtgctctgtccagagcatcccacatgcggttgtattttcaaaaattttaacctgttccttgcgttgatcatctgcaatgcaattatagaccctctgatctatgccttccactctcaggaactccgaagaaccctgaaggaggtacttacgtgctcctggtga

SEQ ID NO: 2580 - RNA, 954 nt, synthetic construct
  misc_feature 1..954: note = derived and/or modified sequence opt4 fromMC1_R__Homo_sapiens__AAQ62969
  source 1..954: mol_type = other RNA
atggccgtgcagggcagccagagaagactgctgggcagcctgaacagcacccccaccgccatcccccagctgggcctggccgccaaccagaccggcgccagatgcctggaggtgagcatcagcgacggcctgctgctgagcctgggcctggtgagcctggtggagaacgccctggtggtggccaccatcgccaagaacagaaacctgcacagccccatgtactgcttcatctgctgcctggccctgagcgacctgctggtgagcggcagcaacgtgctggagaccgccgtgatcctgctgctggaggccggcgccctggtggccagagccgccgtgctgcagcagctggacaacgtgatcgacgtgatcacctgcagcagcatgctgagcagcctgtgcttcctgggcgccatcgccgtggacagatacatcagcatcttctacgccctgagataccacagcatcgtgaccctgcccagagccagaagagccgtggccgccatctgggtggccagcgtggtgttcagcaccctgttcatcgcctactacgaccacgtggccgtgctgctgtgcctggtggtgttcttcctggccatgctggtgctgatggccgtgctgtacgtgcacatgctggccagagcctgccagcacgcccagggcatcgccagactgcacaagagacagagacccgtgcaccagggcttcggcctgaagggcgccgtgaccctgaccatcctgctgggcatcttcttcctgtgctggggccccttcttcctgcacctgaccctgatcgtgctgtgccccgagcaccccacctgcggctgcatcttcaagaacttcaacctgttcctggccctgatcatctgcaacgccatcatcgaccccctgatctacgccttccacagccaggagctgagaagaaccctgaaggaggtgctgacctgcagctggtga

SEQ ID NO: 2581 - RNA, 954 nt, synthetic construct
  misc_feature 1..954: note = derived and/or modified sequence opt5 fromMC1_R__Homo_sapiens__AAQ62969
  source 1..954: mol_type = other RNA
atggccgtgcagggcagccaaagacggctgctcgggtccctgaactctacccccacagctatccctcagcttggactggccgcgaatcagacgggcgctcgctgcctcgaggtcagcatttccgacgggctgcttctgtctctcggactggttagcctggtggaaaacgccctcgtggtcgccaccatcgctaagaatagaaacctgcactccccgatgtactgtttcatttgctgtcttgccctgtctgatctcctggtgagcggctccaatgttcttgagacagctgtgatcctgctcctggaagccggggcgctggtcgcccgggctgccgtgctccagcaactggacaacgttattgatgtgattacctgcagctctatgctttccagcctgtgttttctcggagctatcgccgtcgaccgctatatctctatcttctacgcgctgagatatcattccattgtgacacttccccgggcccgcagagctgtggccgctatctgggtcgccagcgttgtgttttctaccctgttcattgcctactatgatcacgtggctgtcctcctgtgcctggtggtgtttttcctcgcgatgctggttcttatggccgtcctgtacgtgcatatgctcgctcgggcctgtcagcacgcccagggcatcgctcgcctgcataaaagacagcggcctgttcaccaaggctttgggcttaagggagccgtgacactgaccattctcctgggcatcttctttctgtgctgggggcccttctttctccacctgacgcttatcgtcctgtgtcctgagcatcctacctgcggatgtattttcaaaaattttaacctcttcctggcgctgatcatttgcaatgctatcattgacccccttatctatgccttccactcccaggaactccgcagaacactgaaggaggtgctgacctgcagctggtga

SEQ ID NO: 2582 - protein, 317 aa, synthetic construct [sequence omitted]

SEQ ID NO: 2583 - RNA, 954 nt, synthetic construct
  misc_feature 1..954: note = MC1_R__Homo_sapiens__AAO21073
  source 1..954: mol_type = other RNA
atggctgtgcagggatcccagagaagacttctgggctccctcaactccacccccacagccatcccccagctggggctggctgccaaccagacaggagcccggtgcctggaggtgtccatctctgacgggctcttcctcagcctggggctggtgagcttggtggagaacgcgctggtggtggccaccatcgccaagaaccggaacctgcactcacccatgtactgcttcatctgctgcctggccttgtcggacctgctggtgagcgggagcaacgtgcgggagacggccgtcatcctcctgctggaggccggtgcactggtggcccgggctgcggtgctgcagcagctggacaatgtcattgacgtgatcacctgcagctccatgctgtccagcctctgcttcctgggcgccatcgccgtggaccgctacatctccatcttctacgcactgcgctaccacagcatcgtgaccctgccgcgggcgcggcgagccgttgcggccatctgggtggccagtgtcgtcttcagcacgctcttcatcgcctactacgaccacgtggccgtcctgctgtgcctcgtggtcttcttcctggctatgctggtgctcatggccgtgctgtacgtccacatgctggcccgggcctgccagcacgcccagggcatcgcccggctccacaagaggcagcgcccggtccaccagggctttggccttaaaggcgctgtcaccctcaccatcctgctgggcattttcttcctctgctggggccccttcttcctgcatctcacactcatcgtcctctgccccgagcaccccacgtgcggctgcatcttcaagaacttcaacctctttctcgccctcatcatctgcaatgccatcatcgaccccctcatctacgccttccacagccaggagctccgcaggacgctcaaggaggtgctgacatgctcctggtga

SEQ ID NO: 2584 - RNA, 954 nt, synthetic construct
  misc_feature 1..954: note = derived and/or modified sequence opt1 fromMC1_R__Homo_sapiens__AAO21073
  source 1..954: mol_type = other RNA
atggccgtgcagggcagccagcgccggctcctcgggtccctgaacagcacccccaccgccatcccccagctgggcctcgcggccaaccagacgggggcccgctgcctggaggtctccatcagcgacggcctgttcctctccctggggctggtgagcctcgtggagaacgccctggtcgtggccaccatcgcgaagaaccggaacctgcactcccccatgtactgcttcatctgctgcctcgccctgagcgacctgctcgtgtccggcagcaacgtccgcgagaccgccgtgatcctgctgctcgaggccggcgcgctggtggcccgggccgccgtcctgcagcagctcgacaacgtgatcgacgtgatcacgtgctccagcatgctgtccagcctgtgcttcctcggggccatcgcggtcgaccgctacatctccatcttctacgccctgcggtaccacagcatcgtgaccctgccccgcgcccggcgcgccgtggccgcgatctgggtcgcctccgtggtgttcagcaccctcttcatcgcctactacgaccacgtcgccgtgctgctgtgcctcgtggtcttcttcctggccatgctggtgctcatggcggtgctgtacgtccacatgctggcccgggcctgccagcacgcccagggcatcgcccgcctccacaagcggcagcgccccgtgcaccaggggttcggcctgaagggggcggtcaccctgaccatcctcctgggcatcttcttcctgtgctggggcccgttcttcctccacctgacgctgatcgtgctctgccccgagcacccgacctgcgggtgcatcttcaagaacttcaacctgttcctggccctcatcatctgcaacgccatcatcgaccccctgatctacgccttccactcccaggagctgcggcgcaccctgaaggaggtgctgacctgcagctggtga

SEQ ID NO: 2585 - RNA, 954 nt, synthetic construct
  misc_feature 1..954: note = derived and/or modified sequence opt2 fromMC1_R__Homo_sapiens__AAO21073
  source 1..954: mol_type = other RNA
atggccgtccagggctcccagcgccgcctcctcggctccctcaactccacccccaccgccatcccccagctcggcctcgccgccaaccagaccggcgcccgctgcctcgaggtctccatctccgacggcctcttcctctccctcggcctcgtctccctcgtcgagaacgccctcgtcgtcgccaccatcgccaagaaccgcaacctccactcccccatgtactgcttcatctgctgcctcgccctctccgacctcctcgtctccggctccaacgtccgcgagaccgccgtcatcctcctcctcgaggccggcgccctcgtcgcccgcgccgccgtcctccagcagctcgacaacgtcatcgacgtcatcacctgctcctccatgctctcctccctctgcttcctcggcgccatcgccgtcgaccgctacatctccatcttctacgccctccgctaccactccatcgtcaccctcccccgcgcccgccgcgccgtcgccgccatctgggtcgcctccgtcgtcttctccaccctcttcatcgcctactacgaccacgtcgccgtcctcctctgcctcgtcgtcttcttcctcgccatgctcgtcctcatggccgtcctctacgtccacatgctcgcccgcgcctgccagcacgcccagggcatcgcccgcctccacaagcgccagcgccccgtccaccagggcttcggcctcaagggcgccgtcaccctcaccatcctcctcggcatcttcttcctctgctggggccccttcttcctccacctcaccctcatcgtcctctgccccgagcaccccacctgcggctgcatcttcaagaacttcaacctcttcctcgccctcatcatctgcaacgccatcatcgaccccctcatctacgccttccactcccaggagctccgccgcaccctcaaggaggtcctcacctgctcctggtga

SEQ ID NO: 2586 - RNA, 954 nt, synthetic construct
  misc_feature 1..954: note = derived and/or modified sequence opt3 fromMC1_R__Homo_sapiens__AAO21073
  source 1..954: mol_type = other RNA
atggccgtgcagggcagccaaagaaggctgctcgggtcccttaactctacccccacagctatccctcagctgggattggcagccaatcagactggtgcgcggtgcttagaggtctcaattagtgacggcctgttcctaagcctcgggctggtttcccttgtggaaaacgctctggtagtggccacgatagcaaagaatcgcaacttgcactctccaatgtactgttttatctgctgtctcgccctgtcggatctgctcgtctcaggaagcaatgtgcgagagaccgctgttattttactgcttgaagcaggcgccttggtggctcgtgccgcggtcctgcagcaactagacaacgtgatcgatgtaattacatgcagttccatgctctctagcctgtgtttccttggtgcaatcgccgttgacagatatatatccatcttttacgctctgaggtatcattcaattgtgactttgccgcgggcccgcagagcagtcgctgccatctgggtggcgagtgtggtcttcagcaccctctttattgcctactatgatcacgttgcagtgctgttatgcctggtagtgttctttctcgctatgcttgtcctgatggccgtgttgtacgttcatatgctagctagggcctgtcagcacgcacaggggatcgcccggctgcataaacgccagcgacccgtgcaccaaggattcggcctcaagggcgctgtcacactgaccatacttctggggatctttttcttgtgctggggaccatttttcctccacctgactttaattgtgctgtgtcctgagcatcccacatgcggttgtatttttaaaaatttcaacctattcctcgcgctgatcatctgcaatgcaattatagaccctcttatctatgcctttcactctcaggaattgagaaggaccctgaaggaggtactcacgtgctcctggtga

SEQ ID NO: 2587 - RNA, 954 nt, synthetic construct
  misc_feature 1..954: note = derived and/or modified sequence opt4 fromMC1_R__Homo_sapiens__AAO21073
  source 1..954: mol_type = other RNA
atggccgtgcagggcagccagagaagactgctgggcagcctgaacagcacccccaccgccatcccccagctgggcctggccgccaaccagaccggcgccagatgcctggaggtgagcatcagcgacggcctgttcctgagcctgggcctggtgagcctggtggagaacgccctggtggtggccaccatcgccaagaacagaaacctgcacagccccatgtactgcttcatctgctgcctggccctgagcgacctgctggtgagcggcagcaacgtgagagagaccgccgtgatcctgctgctggaggccggcgccctggtggccagagccgccgtgctgcagcagctggacaacgtgatcgacgtgatcacctgcagcagcatgctgagcagcctgtgcttcctgggcgccatcgccgtggacagatacatcagcatcttctacgccctgagataccacagcatcgtgaccctgcccagagccagaagagccgtggccgccatctgggtggccagcgtggtgttcagcaccctgttcatcgcctactacgaccacgtggccgtgctgctgtgcctggtggtgttcttcctggccatgctggtgctgatggccgtgctgtacgtgcacatgctggccagagcctgccagcacgcccagggcatcgccagactgcacaagagacagagacccgtgcaccagggcttcggcctgaagggcgccgtgaccctgaccatcctgctgggcatcttcttcctgtgctggggccccttcttcctgcacctgaccctgatcgtgctgtgccccgagcaccccacctgcggctgcatcttcaagaacttcaacctgttcctggccctgatcatctgcaacgccatcatcgaccccctgatctacgccttccacagccaggagctgagaagaaccctgaaggaggtgctgacctgcagctggtga

SEQ ID NO: 2588 - RNA, 954 nt, synthetic construct
  misc_feature 1..954: note = derived and/or modified sequence opt5 fromMC1_R__Homo_sapiens__AAO21073
  source 1..954: mol_type = other RNA
atggccgtgcagggcagccaaagacggctcctcgggtccctgaactctacccccacagctatccctcagcttggactggccgcgaatcagacgggcgctcgctgcctcgaggtcagcatttccgacgggctgttcctttctctgggactcgttagcctggtggaaaacgccctggtggtcgccaccatcgctaagaatagaaacctccactccccgatgtactgttttatttgctgtctggccctttctgatctgctcgtgagcggctccaatgttcgggagacagctgtgatcctgcttctggaagccggggcgctcgtcgcccgcgctgccgtgctgcagcaactggacaacgttattgatgtgattacctgcagctctatgctctccagcctgtgtttccttggagctatcgccgtcgacagatatatctctatcttttacgcgctgcggtatcattccattgtgacactcccccgcgccagacgggctgtggccgctatctgggtcgccagcgttgtgttctctaccctgtttattgcctactatgatcacgtggctgtccttctgtgcctcgtggttttctttctggcgatgctggtgctcatggccgtcctgtacgtgcatatgcttgctcgcgcctgtcagcacgcccagggcatcgctagactgcataaacggcagcgccctgttcaccaaggcttcgggctcaagggagccgtgacactgaccattcttctgggcatctttttcctctgctgggggccctttttcctgcacctgacgctcatcgtcctgtgtcctgagcatcctacctgcggatgtatttttaaaaatttcaaccttttcctggcgctcatcatttgcaatgctatcattgaccccctgatctatgcctttcactcccaggaactgagacggacacttaaggaggtgctgacctgcagctggtga

SEQ ID NO: 2589 - protein, 317 aa, synthetic construct [sequence omitted]

SEQ ID NO: 2590 - RNA, 954 nt, synthetic construct
  misc_feature 1..954: note = MC1_R__Homo_sapiens__AHC09567
  source 1..954: mol_type = other RNA
atggctgtgcagggatcccagagaagacttctgggctccctcaactccacccccacagccatcccccagctggggctggctgccaaccagacaggagcccggtgcctggaggtgtccatctctgacgggctcttcctcagcctggggctggtgagcttggtggagaacgcgctggtggtggccaccatcgccaagaaccggaacctgcactcacccatgtactgcttcatctgctgcctggccttgccggacctgctggtgagcgggagcaacgtgctggagacggccgtcatcctcctgctggaggccggtgcactggtggcccgggctgcggtgctgcagcagctggacaatgtcattgacgtgatcacctgcagctccatgctgtccagcctctgcttcctgggcgccatcgccgtggaccgctacatctccatcttctacgcactgcgctaccacagcatcgtgaccctgccgcgggcgcggcgagccgttgcggccatctgggtggccagtgtcgtcttcagcacgctcttcatcgcctactacgaccacgtggccgtcctgctgtgcctcgtggtcttcttcctggctatgctggtgctcatggccgtgctgtacgtccacatgctggcccgggcctgccagcacgcccagggcatcgcccggctccacaagaggcagcgcccggtccaccagggctttggccttaaaggcgctgtcaccctcaccatcctgctgggcattttcttcctctgctggggccccttcttcctgcatctcacactcatcgtcctctgccccgagcaccccacgtgcggctgcatcttcaagaacttcaacctctttctcgccctcatcatctgcaatgccatcatcgaccccctcatctacgccttccacagccaggagctccgcaggacgctcaaggaggtgctgacatgctcctggtga

SEQ ID NO: 2591 - RNA, 954 nt, synthetic construct
  misc_feature 1..954: note = derived and/or modified sequence opt1 fromMC1_R__Homo_sapiens__AHC09567
  source 1..954: mol_type = other RNA
atggccgtgcagggcagccagcgccggctgctcgggtccctgaacagcacccccaccgccatcccgcagctgggcctcgcggccaaccagacgggggcccgctgcctggaggtctccatcagcgacggcctgttcctctccctggggctggtgagcctcgtggagaacgccctggtcgtggccaccatcgcgaagaaccggaacctgcactcccccatgtactgcttcatctgctgcctcgccctgcccgacctgctcgtgagcggctccaacgtcctggagaccgccgtgatcctgctcctggaggccggcgcgctggtggcccgcgccgccgtcctccagcagctggacaacgtgatcgacgtgatcacgtgcagctccatgctgagctccctctgcttcctgggggccatcgcggtcgaccggtacatcagcatcttctacgccctgcgctaccactccatcgtgaccctcccccgggcccgccgggccgtggccgcgatctgggtcgccagcgtggtgttctccaccctgttcatcgcctactacgaccacgtcgccgtgctgctctgcctggtggtcttcttcctggccatgctcgtgctgatggcggtgctgtacgtccacatgctcgcccgcgcctgccagcacgcccagggcatcgcccggctgcacaagcgccagcggccggtgcaccaggggttcggcctgaagggggcggtcaccctcaccatcctgctgggcatcttcttcctctgctggggccccttcttcctgcacctgacgctcatcgtgctgtgccccgagcacccgacctgcgggtgcatcttcaagaacttcaacctgttcctcgccctgatcatctgcaacgccatcatcgaccccctgatctacgccttccacagccaggagctgcgccggaccctcaaggaggtgctgacctgctcctggtga

SEQ ID NO: 2592 - RNA, 954 nt, synthetic construct
  misc_feature 1..954: note = derived and/or modified sequence opt2 fromMC1_R__Homo_sapiens__AHC09567
  source 1..954: mol_type = other RNA
atggccgtccagggctcccagcgccgcctcctcggctccctcaactccacccccaccgccatcccccagctcggcctcgccgccaaccagaccggcgcccgctgcctcgaggtctccatctccgacggcctcttcctctccctcggcctcgtctccctcgtcgagaacgccctcgtcgtcgccaccatcgccaagaaccgcaacctccactcccccatgtactgcttcatctgctgcctcgccctccccgacctcctcgtctccggctccaacgtcctcgagaccgccgtcatcctcctcctcgaggccggcgccctcgtcgcccgcgccgccgtcctccagcagctcgacaacgtcatcgacgtcatcacctgctcctccatgctctcctccctctgcttcctcggcgccatcgccgtcgaccgctacatctccatcttctacgccctccgctaccactccatcgtcaccctcccccgcgcccgccgcgccgtcgccgccatctgggtcgcctccgtcgtcttctccaccctcttcatcgcctactacgaccacgtcgccgtcctcctctgcctcgtcgtcttcttcctcgccatgctcgtcctcatggccgtcctctacgtccacatgctcgcccgcgcctgccagcacgcccagggcatcgcccgcctccacaagcgccagcgccccgtccaccagggcttcggcctcaagggcgccgtcaccctcaccatcctcctcggcatcttcttcctctgctggggccccttcttcctccacctcaccctcatcgtcctctgccccgagcaccccacctgcggctgcatcttcaagaacttcaacctcttcctcgccctcatcatctgcaacgccatcatcgaccccctcatctacgccttccactcccaggagctccgccgcaccctcaaggaggtcctcacctgctcctggtga

SEQ ID NO: 2593 - RNA, 954 nt, synthetic construct
  misc_feature 1..954: note = derived and/or modified sequence opt3 fromMC1_R__Homo_sapiens__AHC09567
  source 1..954: mol_type = other RNA
atggccgtgcagggcagccaaagaaggctgctcgggtcccttaactctacccccacagctatccctcagctgggattggcagccaatcagactggtgcgcggtgcttagaggtctcaattagtgacggcctgttcctaagcctcgggctggtttcccttgtggaaaacgctctggtagtggccacgatagcaaagaatcgcaacttgcactctccaatgtactgttttatctgctgtctcgccctgccggatctgctcgtctcgggatcaaatgtgttagagaccgctgttattctgcttttggaagcaggcgccctggtggctcgagccgcggtcctacagcaactcgacaacgtgatcgatgtaattacatgcagcagtatgctgtcctctctttgtttcctgggtgcaatcgccgttgaccgttatataagcatcttttacgctttgagatatcattccattgtgactctccccagggcccggcgcgcagtcgctgccatctgggtggcgtcagtggtcttcagtaccctgtttattgcctactatgatcacgttgcagtgttactgtgcctcgtagtgttctttcttgctatgctggtcttgatggccgtgctatacgttcatatgctggctagagcctgtcagcacgcacaggggatcgccaggctccataaacggcagcgccctgtgcaccaaggattcggcctgaagggcgctgtcacacttaccatactgttggggatctttttcctctgctggggaccatttttcctgcacttaactctgattgtgctatgtcccgagcatcctacatgcggttgtatttttaaaaatttcaacctcttcctggcgcttatcatctgcaatgcaattatagacccattgatctatgcctttcacagccaggaactgcgaagaaccctcaaggaggtactgacgtgctcttggtga

SEQ ID NO: 2594 - RNA, 954 nt, synthetic construct
  misc_feature 1..954: note = derived and/or modified sequence opt4 fromMC1_R__Homo_sapiens__AHC09567
  source 1..954: mol_type = other RNA
atggccgtgcagggcagccagagaagactgctgggcagcctgaacagcacccccaccgccatcccccagctgggcctggccgccaaccagaccggcgccagatgcctggaggtgagcatcagcgacggcctgttcctgagcctgggcctggtgagcctggtggagaacgccctggtggtggccaccatcgccaagaacagaaacctgcacagccccatgtactgcttcatctgctgcctggccctgcccgacctgctggtgagcggcagcaacgtgctggagaccgccgtgatcctgctgctggaggccggcgccctggtggccagagccgccgtgctgcagcagctggacaacgtgatcgacgtgatcacctgcagcagcatgctgagcagcctgtgcttcctgggcgccatcgccgtggacagatacatcagcatcttctacgccctgagataccacagcatcgtgaccctgcccagagccagaagagccgtggccgccatctgggtggccagcgtggtgttcagcaccctgttcatcgcctactacgaccacgtggccgtgctgctgtgcctggtggtgttcttcctggccatgctggtgctgatggccgtgctgtacgtgcacatgctggccagagcctgccagcacgcccagggcatcgccagactgcacaagagacagagacccgtgcaccagggcttcggcctgaagggcgccgtgaccctgaccatcctgctgggcatcttcttcctgtgctggggccccttcttcctgcacctgaccctgatcgtgctgtgccccgagcaccccacctgcggctgcatcttcaagaacttcaacctgttcctggccctgatcatctgcaacgccatcatcgaccccctgatctacgccttccacagccaggagctgagaagaaccctgaaggaggtgctgacctgcagctggtga

SEQ ID NO: 2595 - RNA, 954 nt, synthetic construct
  misc_feature 1..954: note = derived and/or modified sequence opt5 fromMC1_R__Homo_sapiens__AHC09567
  source 1..954: mol_type = other RNA
atggccgtgcagggcagccaaagacggctgctcgggtccctgaactctacccccacagctatccctcagcttggactggccgcgaatcagacgggcgctcgctgcctcgaggtcagcatttccgacgggctgttcctttctctgggactcgttagcctggtggaaaacgccctggtggtcgccaccatcgctaagaatagaaacctccactccccgatgtactgttttatttgctgtctggcccttcccgatctgctcgtgtctggcagcaatgttctggagacagctgtgatccttctgctcgaagccggggcgctggtcgcccgggctgccgtgctgcagcaactcgacaacgttattgatgtgattacctgctccagcatgctgtcttccctttgtttcctgggagctatcgccgtcgaccgctatatcagcatcttttacgcgctcagatatcattctattgtgacactgcctcgggcccgcagagctgtggccgctatctgggtcgcctccgttgtgttcagcaccctttttattgcctactatgatcacgtggctgtcctgctctgcctggtggttttctttctggcgatgctcgtgctgatggccgtcctttacgtgcatatgctggctcgggcctgtcagcacgcccagggcatcgctcgcctccataaaagacagcggcccgttcaccaaggcttcgggctgaagggagccgtgacacttaccattctgctcggcatctttttcctgtgctgggggccctttttcctgcacctcacgctgatcgtcctttgtcctgagcatcctacctgcggatgtatttttaaaaatttcaacctgttcctcgcgctgatcatttgcaatgctatcattgacccgctgatctatgcctttcactctcaggaacttcgcagaacactcaaggaggtgctgacctgctcctggtga

SEQ ID NO: 2596 - protein, 317 aa, synthetic construct [sequence omitted]

SEQ ID NO: 2597 - RNA, 954 nt, synthetic construct
  misc_feature 1..954: note = MC1_R__Homo_sapiens__AHC09812
  source 1..954: mol_type = other RNA
atggctgtgcagggatcccagagaagacttctgggctccctcaactccacccccacagccatcccccagctggggctggctgccaaccagacaggagcccggtgcctggaggtgtccatctctgacgggctcttcctcagcctggggctggtgagcttggtggagaacgcgctggtggtggccaccatcgccaagaaccggaacctgcactcacccatgtactgcttcatctgctgcctggccttgtcggacctgctggtgagcgggagcaacgtgctggagacggccgtcatcctcctgctggaggccggtgcactggtggcccgggctgcggtgctgcagcagctggacaatgtcattgacgtgatcacctgcagctccatgctgtccagcctctgcttcctgggcgccatcgccgtggaccgctacatctccatcttctacgcactgcgctaccacagcatcgtgaccctgccgcgggcgcggcgagccgttgcggccatctgggtggccagtgtcgtcttcagcacgctcttcatcgcctactacgaccacgtggccgtcctgctgtgcctcatggtcttcttcctggctatgctggtgctcatggccgtgctgtacgtccacatgctggcccgggcctgccagcacgcccagggcatcgcccggctccacaagaggcagcgcccggtccaccagggctttggccttaaaggcgctgtcaccctcaccatcctgctgggcattttcttcctctgctggggccccttcttcctgcatctcacactcatcgtcctctgccccgagcaccccacgtgcggctgcatcttcaagaacttcaacctctttctcgccctcatcatctgcaatgccatcatcgaccccctcatctacgccttccacagccaggagctccgcaggacgctcaaggaggtgctgacatgctcctggtga

SEQ ID NO: 2598 - RNA, 954 nt, synthetic construct
  misc_feature 1..954: note = derived and/or modified sequence opt1 fromMC1_R__Homo_sapiens__AHC09812
  source 1..954: mol_type = other RNA
atggccgtgcagggcagccagcgccggctgctcgggtccctgaacagcacccccaccgccatcccccagctgggcctcgcggccaaccagacgggggcccgctgcctggaggtctccatcagcgacggcctgttcctctccctggggctggtgagcctcgtggagaacgccctggtcgtggccaccatcgcgaagaaccggaacctgcactcccccatgtactgcttcatctgctgcctcgccctgagcgacctgctcgtgtccggcagcaacgtcctggagaccgccgtgatcctgctcctggaggccggcgcgctggtggcccgcgccgccgtcctccagcagctggacaacgtgatcgacgtgatcacgtgctccagcatgctgtccagcctctgcttcctgggggccatcgcggtcgaccggtacatctccatcttctacgccctgcgctaccacagcatcgtgaccctcccccgggcccgccgggccgtggccgcgatctgggtcgcctccgtggtgttcagcaccctgttcatcgcctactacgaccacgtcgccgtgctgctctgcctgatggtgttcttcctggccatgctcgtcctgatggcggtgctgtacgtgcacatgctcgcccgcgcctgccagcacgcccagggcatcgcccggctgcacaagcgccagcggcccgtccaccaggggttcggcctgaagggggcggtgaccctcaccatcctgctgggcatcttcttcctctgctggggcccgttcttcctgcacctgacgctcatcgtcctgtgccccgagcacccgacctgcgggtgcatcttcaagaacttcaacctgttcctcgccctgatcatctgcaacgccatcatcgaccccctgatctacgccttccactcccaggagctgcgccggaccctcaaggaggtgctgacctgcagctggtga

SEQ ID NO: 2599 - RNA, 954 nt, synthetic construct
  misc_feature 1..954: note = derived and/or modified sequence opt2 fromMC1_R__Homo_sapiens__AHC09812
  source 1..954: mol_type = other RNA
atggccgtccagggctcccagcgccgcctcctcggctccctcaactccacccccaccgccatcccccagctcggcctcgccgccaaccagaccggcgcccgctgcctcgaggtctccatctccgacggcctcttcctctccctcggcctcgtctccctcgtcgagaacgccctcgtcgtcgccaccatcgccaagaaccgcaacctccactcccccatgtactgcttcatctgctgcctcgccctctccgacctcctcgtctccggctccaacgtcctcgagaccgccgtcatcctcctcctcgaggccggcgccctcgtcgcccgcgccgccgtcctccagcagctcgacaacgtcatcgacgtcatcacctgctcctccatgctctcctccctctgcttcctcggcgccatcgccgtcgaccgctacatctccatcttctacgccctccgctaccactccatcgtcaccctcccccgcgcccgccgcgccgtcgccgccatctgggtcgcctccgtcgtcttctccaccctcttcatcgcctactacgaccacgtcgccgtcctcctctgcctcatggtcttcttcctcgccatgctcgtcctcatggccgtcctctacgtccacatgctcgcccgcgcctgccagcacgcccagggcatcgcccgcctccacaagcgccagcgccccgtccaccagggcttcggcctcaagggcgccgtcaccctcaccatcctcctcggcatcttcttcctctgctggggccccttcttcctccacctcaccctcatcgtcctctgccccgagcaccccacctgcggctgcatcttcaagaacttcaacctcttcctcgccctcatcatctgcaacgccatcatcgaccccctcatctacgccttccactcccaggagctccgccgcaccctcaaggaggtcctcacctgctcctggtga

SEQ ID NO: 2600 - RNA, 954 nt, synthetic construct
  misc_feature 1..954: note = derived and/or modified sequence opt3 fromMC1_R__Homo_sapiens__AHC09812
  source 1..954: mol_type = other RNA
atggccgtgcagggcagccaaagaaggctgctcgggtcccttaactctacccccacagctatccctcagctgggattggcagccaatcagactggtgcgcggtgcttagaggtctcaattagtgacggcctgttcctaagcctcgggctggtttcccttgtggaaaacgctctggtagtggccacgatagcaaagaatcgcaacttgcactctccaatgtactgttttatctgctgtctcgccctgtcggatctgctcgtctcaggaagcaatgtgttagagaccgctgttattctgcttttggaagcaggcgccctggtggctcgagccgcggtcctacagcaactcgacaacgtgatcgatgtaattacatgcagttccatgctgtctagcctttgtttcctgggtgcaatcgccgttgaccgttatatatccatcttttacgctttgagatatcattcaattgtgactctcccgagggcccggcgcgcagtcgctgccatctgggtggcgagtgtggtcttcagcaccctgtttattgcctactatgatcacgttgcagtgttactgtgcctcatggtattctttcttgctatgctggtgttgatggccgtcctatacgtgcatatgctggctagagcctgtcagcacgcacaggggatcgccaggctccataaacggcagcgccccgttcaccaaggattcggcctgaagggcgctgtgacacttaccatactgttggggatctttttcctctgctggggaccatttttcctgcacttaactctgattgtcctatgtcctgagcatcccacatgcggttgtatttttaaaaatttcaacctcttcctggcgcttatcatctgcaatgcaattatagaccctttgatctatgcctttcactctcaggaactgcgaagaaccctcaaggaggtgctgacgtgctcctggtga

SEQ ID NO: 2601 - RNA, 954 nt, synthetic construct
  misc_feature 1..954: note = derived and/or modified sequence opt4 fromMC1_R__Homo_sapiens__AHC09812
  source 1..954: mol_type = other RNA
atggccgtgcagggcagccagagaagactgctgggcagcctgaacagcacccccaccgccatcccccagctgggcctggccgccaaccagaccggcgccagatgcctggaggtgagcatcagcgacggcctgttcctgagcctgggcctggtgagcctggtggagaacgccctggtggtggccaccatcgccaagaacagaaacctgcacagccccatgtactgcttcatctgctgcctggccctgagcgacctgctggtgagcggcagcaacgtgctggagaccgccgtgatcctgctgctggaggccggcgccctggtggccagagccgccgtgctgcagcagctggacaacgtgatcgacgtgatcacctgcagcagcatgctgagcagcctgtgcttcctgggcgccatcgccgtggacagatacatcagcatcttctacgccctgagataccacagcatcgtgaccctgcccagagccagaagagccgtggccgccatctgggtggccagcgtggtgttcagcaccctgttcatcgcctactacgaccacgtggccgtgctgctgtgcctgatggtgttcttcctggccatgctggtgctgatggccgtgctgtacgtgcacatgctggccagagcctgccagcacgcccagggcatcgccagactgcacaagagacagagacccgtgcaccagggcttcggcctgaagggcgccgtgaccctgaccatcctgctgggcatcttcttcctgtgctggggccccttcttcctgcacctgaccctgatcgtgctgtgccccgagcaccccacctgcggctgcatcttcaagaacttcaacctgttcctggccctgatcatctgcaacgccatcatcgaccccctgatctacgccttccacagccaggagctgagaagaaccctgaaggaggtgctgacctgcagctggtga

SEQ ID NO: 2602 - RNA, 954 nt, synthetic construct
  misc_feature 1..954: note = derived and/or modified sequence opt5 fromMC1_R__Homo_sapiens__AHC09812
  source 1..954: mol_type = other RNA
atggccgtgcagggcagccaaagacggctgctcgggtccctgaactctacccccacagctatccctcagcttggactggccgcgaatcagacgggcgctcgctgcctcgaggtcagcatttccgacgggctgttcctttctctgggactcgttagcctggtggaaaacgccctggtggtcgccaccatcgctaagaatagaaacctccactccccgatgtactgttttatttgctgtctggccctttctgatctgctcgtgagcggctccaatgttctggagacagctgtgatccttctgctcgaagccggggcgctggtcgcccgggctgccgtgctgcagcaactcgacaacgttattgatgtgattacctgcagctctatgctgtccagcctttgtttcctgggagctatcgccgtcgaccgctatatctctatcttttacgcgctcagatatcattccattgtgacactgccccgggcccgcagagctgtggccgctatctgggtcgccagcgttgtgttctctaccctttttattgcctactatgatcacgtggctgtcctgctctgcctgatggtgttctttctggcgatgctcgttctgatggccgtgctttacgtccatatgctggctcgggcctgtcagcacgcccagggcatcgctcgcctccataaaagacagcggcctgtgcaccaaggcttcgggctgaagggagccgttacacttaccattctgctcggcatctttttcctgtgctgggggccctttttcctgcacctcacgctgatcgtgctttgtcctgagcatcctacctgcggatgtatttttaaaaatttcaacctgttcctcgcgctgatcatttgcaatgctatcattgaccccctgatctatgcctttcactcccaggaacttcgcagaacactcaaggaggtcctgacctgcagctggtga

SEQ ID NO: 2603 - protein, 317 aa, synthetic construct [sequence omitted]

SEQ ID NO: 2604 - RNA, 954 nt, synthetic construct
  misc_feature 1..954: note = MC1_R__Homo_sapiens__AHC10192
  source 1..954: mol_type = other RNA
atggctgtgcagggatcccagagaagacttctgggctccctcaactccacccccacagccatcccccagctggggctggctgccaaccagacaggagcccggtgcctggaggtgtccatctctgacgggctcttcctcagcctggggctggtgagcttggtggagaacgcgctggtggtggccaccatcgccaagaaccggaacctgcactcacccatgtactgcttcatctgctgcctggccttgtcggacctgctggtgagcgggagcaacgtgctggagacggccgtcatcctcctgctggaggccggtgcactggtggcccgggctgcggtgctgcagcagctggacaatgtcattgacgtgatcacctgcagctccatgctgtccagcctctgcttcctgggcgccatcgccgtggaccgctacatctccatcttctacgcactgcgctaccacagcatcgtgaccctgccgcgggcgcggcgagccgttgcggccatctgggtggccagtgtcgtcttcagcacgctcttcatcgcctactacgaccacgtggccgtcctgctgtgcctcgtggtcttcttcctggctatgctggtgctcatggccgtgctgtacgtccacatgctggcccgggcctgccagcacgcccagggcaccgcccggctccacaagaggcagcgcccggtccaccagggctttggccttaaaggcgctgtcaccctcaccatcctgctgggcattttcttcctctgctggggccccttcttcctgcatctcacactcatcgtcctctgccccgagcaccccacgtgcggctgcatcttcaagaacttcaacctctttctcgccctcatcatctgcaatgccatcatcgaccccctcatctacgccttccacagccaggagctccgcaggacgctcaaggaggtgctgacatgctcctggtga

SEQ ID NO: 2605 - RNA, 954 nt, synthetic construct
  misc_feature 1..954: note = derived and/or modified sequence opt1 fromMC1_R__Homo_sapiens__AHC10192
  source 1..954: mol_type = other RNA
atggccgtgcagggcagccagcgccggctgctcgggtccctgaacagcacccccaccgccatcccccagctgggcctcgcggccaaccagacgggggcccgctgcctggaggtctccatcagcgacggcctgttcctctccctggggctggtgagcctcgtggagaacgccctggtcgtggccaccatcgcgaagaaccggaacctgcactcccccatgtactgcttcatctgctgcctcgccctgagcgacctgctcgtgtccggcagcaacgtcctggagaccgccgtgatcctgctcctggaggccggcgcgctggtggcccgcgccgccgtcctccagcagctggacaacgtgatcgacgtgatcacgtgctccagcatgctgtccagcctctgcttcctgggggccatcgcggtcgaccggtacatctccatcttctacgccctgcgctaccacagcatcgtgaccctcccccgggcccgccgggccgtggccgcgatctgggtcgcctccgtggtgttcagcaccctgttcatcgcctactacgaccacgtcgccgtgctgctctgcctggtggtcttcttcctggccatgctcgtgctgatggcggtgctgtacgtccacatgctcgcccgcgcctgccagcacgcccagggcaccgcccggctgcacaagcgccagcggcccgtgcaccaggggttcggcctgaagggggcggtcaccctcacgatcctgctgggcatcttcttcctctgctggggcccgttcttcctgcacctgaccctcatcgtgctgtgccccgagcacccgacctgcgggtgcatcttcaagaacttcaacctgttcctcgccctgatcatctgcaacgccatcatcgaccccctgatctacgccttccactcccaggagctgcgccggaccctcaaggaggtgctgacgtgcagctggtga

SEQ ID NO: 2606 - RNA, 954 nt, synthetic construct
  misc_feature 1..954: note = derived and/or modified sequence opt2 fromMC1_R__Homo_sapiens__AHC10192
  source 1..954: mol_type = other RNA
atggccgtccagggctcccagcgccgcctcctcggctccctcaactccacccccaccgccatcccccagctcggcctcgccgccaaccagaccggcgcccgctgcctcgaggtctccatctccgacggcctcttcctctccctcggcctcgtctccctcgtcgagaacgccctcgtcgtcgccaccatcgccaagaaccgcaacctccactcccccatgtactgcttcatctgctgcctcgccctctccgacctcctcgtctccggctccaacgtcctcgagaccgccgtcatcctcctcctcgaggccggcgccctcgtcgcccgcgccgccgtcctccagcagctcgacaacgtcatcgacgtcatcacctgctcctccatgctctcctccctctgcttcctcggcgccatcgccgtcgaccgctacatctccatcttctacgccctccgctaccactccatcgtcaccctcccccgcgcccgccgcgccgtcgccgccatctgggtcgcctccgtcgtcttctccaccctcttcatcgcctactacgaccacgtcgccgtcctcctctgcctcgtcgtcttcttcctcgccatgctcgtcctcatggccgtcctctacgtccacatgctcgcccgcgcctgccagcacgcccagggcaccgcccgcctccacaagcgccagcgccccgtccaccagggcttcggcctcaagggcgccgtcaccctcaccatcctcctcggcatcttcttcctctgctggggccccttcttcctccacctcaccctcatcgtcctctgccccgagcaccccacctgcggctgcatcttcaagaacttcaacctcttcctcgccctcatcatctgcaacgccatcatcgaccccctcatctacgccttccactcccaggagctccgccgcaccctcaaggaggtcctcacctgctcctggtga

SEQ ID NO: 2607 - RNA, 954 nt, synthetic construct
  misc_feature 1..954: note = derived and/or modified sequence opt3 fromMC1_R__Homo_sapiens__AHC10192
  source 1..954: mol_type = other RNA
atggccgtgcagggcagccaaagaaggctgctcgggtcccttaactctacccccacagctatccctcagctgggattggcagccaatcagactggtgcgcggtgcttagaggtctcaattagtgacggcctgttcctaagcctcgggctggtttcccttgtggaaaacgctctggtagtggccacgatagcaaagaatcgcaacttgcactctccaatgtactgttttatctgctgtctcgccctgtcggatctgctcgtctcaggaagcaatgtgttagagaccgctgttattctgcttttggaagcaggcgccctggtggctcgagccgcggtcctacagcaactcgacaacgtgatcgatgtaattacatgcagttccatgctgtctagcctttgtttcctgggtgcaatcgccgttgaccgttatatatccatcttttacgctttgagatatcattcaattgtgactctcccgagggcccggcgcgcagtcgctgccatctgggtggcgagtgtggtcttcagcaccctgtttattgcctactatgatcacgttgcagtgttactgtgcctcgtagtgttctttcttgctatgctggtcttgatggccgtgctatacgttcatatgctggctagagcctgtcagcacgcacaggggacagccaggctccataaacggcagcgccccgtgcaccaaggattcggcctgaagggcgctgtcacccttactatcctgttggggatatttttcctctgctggggaccctttttcctgcacttaacactgattgtgctatgtccagagcatcctacctgcggttgtatctttaaaaatttcaacctcttcctggcgcttattatctgcaatgcaatcattgaccctttgatatatgcctttcactctcaggaactgcgaagaacgctcaaggaggtactgacttgctcctggtga

SEQ ID NO: 2608 - RNA, 954 nt, synthetic construct
  misc_feature 1..954: note = derived and/or modified sequence opt4 fromMC1_R__Homo_sapiens__AHC10192
  source 1..954: mol_type = other RNA
atggccgtgcagggcagccagagaagactgctgggcagcctgaacagcacccccaccgccatcccccagctgggcctggccgccaaccagaccggcgccagatgcctggaggtgagcatcagcgacggcctgttcctgagcctgggcctggtgagcctggtggagaacgccctggtggtggccaccatcgccaagaacagaaacctgcacagccccatgtactgcttcatctgctgcctggccctgagcgacctgctggtgagcggcagcaacgtgctggagaccgccgtgatcctgctgctggaggccggcgccctggtggccagagccgccgtgctgcagcagctggacaacgtgatcgacgtgatcacctgcagcagcatgctgagcagcctgtgcttcctgggcgccatcgccgtggacagatacatcagcatcttctacgccctgagataccacagcatcgtgaccctgcccagagccagaagagccgtggccgccatctgggtggccagcgtggtgttcagcaccctgttcatcgcctactacgaccacgtggccgtgctgctgtgcctggtggtgttcttcctggccatgctggtgctgatggccgtgctgtacgtgcacatgctggccagagcctgccagcacgcccagggcaccgccagactgcacaagagacagagacccgtgcaccagggcttcggcctgaagggcgccgtgaccctgaccatcctgctgggcatcttcttcctgtgctggggccccttcttcctgcacctgaccctgatcgtgctgtgccccgagcaccccacctgcggctgcatcttcaagaacttcaacctgttcctggccctgatcatctgcaacgccatcatcgaccccctgatctacgccttccacagccaggagctgagaagaaccctgaaggaggtgctgacctgcagctggtga

SEQ ID NO: 2609 - RNA, 954 nt, synthetic construct
  misc_feature 1..954: note = derived and/or modified sequence opt5 fromMC1_R__Homo_sapiens__AHC10192
  source 1..954: mol_type = other RNA
atggccgtgcagggcagccaaagacggctgctcgggtccctgaactctacccccacagctatccctcagcttggactggccgcgaatcagacgggcgctcgctgcctcgaggtcagcatttccgacgggctgttcctttctctgggactcgttagcctggtggaaaacgccctggtggtcgccaccatcgctaagaatagaaacctccactccccgatgtactgttttatttgctgtctggccctttctgatctgctcgtgagcggctccaatgttctggagacagctgtgatccttctgctcgaagccggggcgctggtcgcccgggctgccgtgctgcagcaactcgacaacgttattgatgtgattacctgcagctctatgctgtccagcctttgtttcctgggagctatcgccgtcgaccgctatatttctatcttttacgcgctcagatatcattccattgtgacactgccccgggcccgcagagctgtggccgctatctgggtcgccagcgttgtgttctctaccctttttattgcctactatgatcacgtggctgtcctgctctgcctggtggttttctttctggcgatgctcgtgctgatggccgtcctttacgtgcatatgctggctcgggcctgtcagcacgcccagggcacagctcgcctccataaaagacagcggcctgttcaccaaggcttcgggctgaagggagccgtgacccttacgatcctgctcggcatctttttcctgtgctgggggccctttttcctgcacctcaccctgatcgtcctttgtcctgagcatcccacatgcggatgtatctttaaaaatttcaacctgttcctcgcgctgattatctgcaatgctattatcgaccctctgatttatgcctttcactcccaggaacttcgcagaaccctcaaggaggtgctgacatgcagctggtga

SEQ ID NO: 2610 - protein, 317 aa, synthetic construct
  REGION 1..317: note = MC1_R__Homo_sapiens__V9Q7F1
MAVQGSQRRLLGSLNSTPTAIPQLGLAANQTGARCLEVSISDGLFLSLGLVSLVENALVVATIAKNRNLHSPMYCFICCLALSDLLVSGSNVLETAVILLLEAGALVARAAVLQQLDNVIDVITCSSMLSSLCFLGAIAVDRYISIFYALRYHSTVTLPRARRAVAAIWVASVVFSTLFIAYYDHVAVLLCLVVFFLAMLVLMAVLYVHMLARACQHAQGIARLHKRQRPVHQGFGLKGAVTLTILLGIFFLCWGPFFLHLTLIVLCPEHPTCGCIFKNFNLFLALIICNAIIDPLIYAFHSQELRRTLKEVLTCSW

SEQ ID NO: 2611 - RNA, 954 nt, synthetic construct
  misc_feature 1..954: note = MC1_R__Homo_sapiens__AHC09641
  source 1..954: mol_type = other RNA
atggctgtgcagggatcccagagaagacttctgggctccctcaactccacccccacagccatcccccagctggggctggctgccaaccagacaggagcccggtgcctggaggtgtccatctctgacgggctcttcctcagcctggggctggtgagcttggtggagaacgcgctggtggtggccaccatcgccaagaaccggaacctgcactcacccatgtactgcttcatctgctgcctggccttgtcggacctgctggtgagcgggagcaacgtgctggagacggccgtcatcctcctgctggaggccggtgcactggtggcccgggctgcggtgctgcagcagctggacaatgtcattgacgtgatcacctgcagctccatgctgtccagcctctgcttcctgggcgccatcgccgtggaccgctacatctccatcttctacgcactgcgctaccacagcaccgtgaccctgccgcgggcgcggcgagccgttgcggccatctgggtggccagtgtcgtcttcagcacgctcttcatcgcctactacgaccacgtggccgtcctgctgtgcctcgtggtcttcttcctggctatgctggtgctcatggccgtgctgtacgtccacatgctggcccgggcctgccagcacgcccagggcatcgcccggctccacaagaggcagcgcccggtccaccagggctttggccttaaaggcgctgtcaccctcaccatcctgctgggcattttcttcctctgctggggccccttcttcctgcatctcacactcatcgtcctctgccccgagcaccccacgtgcggctgcatcttcaagaacttcaacctctttctcgccctcatcatctgcaatgccatcatcgaccccctcatctacgccttccacagccaggagctccgcaggacgctcaaggaggtgctgacgtgctcctggtga

SEQ ID NO: 2612 - RNA, 954 nt, synthetic construct
  misc_feature 1..954: note = derived and/or modified sequence opt1 fromMC1_R__Homo_sapiens__AHC09641
  source 1..954: mol_type = other RNA
atggccgtgcagggcagccagcgccggctgctcgggtccctgaacagcacccccaccgccatcccccagctgggcctcgcggccaaccagacgggggcccgctgcctggaggtctccatcagcgacggcctgttcctctccctggggctggtgagcctcgtggagaacgccctggtcgtggccaccatcgcgaagaaccggaacctgcactcccccatgtactgcttcatctgctgcctcgccctgagcgacctgctcgtgtccggcagcaacgtcctggagaccgccgtgatcctgctcctggaggccggcgcgctggtggcccgcgccgccgtcctccagcagctggacaacgtgatcgacgtgatcacgtgctccagcatgctgtccagcctctgcttcctgggggccatcgcggtcgaccggtacatctccatcttctacgccctgcgctaccacagcaccgtgaccctcccccgggcccgccgggccgtggccgcgatctgggtcgcctccgtggtgttcagcaccctgttcatcgcctactacgaccacgtcgccgtgctgctctgcctggtggtcttcttcctggccatgctcgtgctgatggcggtgctgtacgtccacatgctcgcccgcgcctgccagcacgcccagggcatcgcccggctgcacaagcgccagcggcccgtgcaccaggggttcggcctgaagggggcggtcaccctcacgatcctgctgggcatcttcttcctctgctggggcccgttcttcctgcacctgaccctcatcgtgctgtgccccgagcacccgacctgcgggtgcatcttcaagaacttcaacctgttcctcgccctgatcatctgcaacgccatcatcgaccccctgatctacgccttccactcccaggagctgcgccggaccctcaaggaggtgctgacgtgcagctggtga

SEQ ID NO: 2613 - RNA, 954 nt, synthetic construct
  misc_feature 1..954: note = derived and/or modified sequence opt2 fromMC1_R__Homo_sapiens__AHC09641
  source 1..954: mol_type = other RNA
atggccgtccagggctcccagcgccgcctcctcggctccctcaactccacccccaccgccatcccccagctcggcctcgccgccaaccagaccggcgcccgctgcctcgaggtctccatctccgacggcctcttcctctccctcggcctcgtctccctcgtcgagaacgccctcgtcgtcgccaccatcgccaagaaccgcaacctccactcccccatgtactgcttcatctgctgcctcgccctctccgacctcctcgtctccggctccaacgtcctcgagaccgccgtcatcctcctcctcgaggccggcgccctcgtcgcccgcgccgccgtcctccagcagctcgacaacgtcatcgacgtcatcacctgctcctccatgctctcctccctctgcttcctcggcgccatcgccgtcgaccgctacatctccatcttctacgccctccgctaccactccaccgtcaccctcccccgcgcccgccgcgccgtcgccgccatctgggtcgcctccgtcgtcttctccaccctcttcatcgcctactacgaccacgtcgccgtcctcctctgcctcgtcgtcttcttcctcgccatgctcgtcctcatggccgtcctctacgtccacatgctcgcccgcgcctgccagcacgcccagggcatcgcccgcctccacaagcgccagcgccccgtccaccagggcttcggcctcaagggcgccgtcaccctcaccatcctcctcggcatcttcttcctctgctggggccccttcttcctccacctcaccctcatcgtcctctgccccgagcaccccacctgcggctgcatcttcaagaacttcaacctcttcctcgccctcatcatctgcaacgccatcatcgaccccctcatctacgccttccactcccaggagctccgccgcaccctcaaggaggtcctcacctgctcctggtga

SEQ ID NO: 2614 - RNA, 954 nt, synthetic construct
  misc_feature 1..954: note = derived and/or modified sequence opt3 fromMC1_R__Homo_sapiens__AHC09641
  source 1..954: mol_type = other RNA
atggccgtgcagggcagccaaagaaggctgctcgggtcccttaactctacccccacagctatccctcagctgggattggcagccaatcagactggtgcgcggtgcttagaggtctcaattagtgacggcctgttcctaagcctcgggctggtttcccttgtggaaaacgctctggtagtggccacgatagcaaagaatcgcaacttgcactctccaatgtactgttttatctgctgtctcgccctgtcggatctgctcgtctcaggaagcaatgtgttagagaccgctgttattctgcttttggaagcaggcgccctggtggctcgagccgcggtcctacagcaactcgacaacgtgatcgatgtaattacatgcagttccatgctgtctagcctttgtttcctgggtgcaatcgccgttgaccgttatatatccatcttttacgctttgagatatcattcaactgtgaccctcccgagggcccggcgcgcagtcgctgccatttgggtggcgagtgtggtcttcagcacactgtttatcgcctactatgatcacgttgcagtgttactgtgcctcgtagtgttctttcttgctatgctggtcttgatggccgtgctatacgttcatatgctggctagagcctgtcagcacgcacaggggattgccaggctccataaacggcagcgccccgtgcaccaaggattcggcctgaagggcgctgtcacccttactatcctgttggggatatttttcctctgctggggaccctttttcctgcacttaacactgattgtgctatgtccagagcatcctacctgcggttgtatctttaaaaatttcaacctcttcctggcgcttattatctgcaatgcaatcattgaccctttgatatatgcctttcactctcaggaactgcgaagaacgctcaaggaggtactgacttgctcctggtga

SEQ ID NO: 2615 - RNA, 954 nt, synthetic construct
  misc_feature 1..954: note = derived and/or modified sequence opt4 fromMC1_R__Homo_sapiens__AHC09641
  source 1..954: mol_type = other RNA
atggccgtgcagggcagccagagaagactgctgggcagcctgaacagcacccccaccgccatcccccagctgggcctggccgccaaccagaccggcgccagatgcctggaggtgagcatcagcgacggcctgttcctgagcctgggcctggtgagcctggtggagaacgccctggtggtggccaccatcgccaagaacagaaacctgcacagccccatgtactgcttcatctgctgcctggccctgagcgacctgctggtgagcggcagcaacgtgctggagaccgccgtgatcctgctgctggaggccggcgccctggtggccagagccgccgtgctgcagcagctggacaacgtgatcgacgtgatcacctgcagcagcatgctgagcagcctgtgcttcctgggcgccatcgccgtggacagatacatcagcatcttctacgccctgagataccacagcaccgtgaccctgcccagagccagaagagccgtggccgccatctgggtggccagcgtggtgttcagcaccctgttcatcgcctactacgaccacgtggccgtgctgctgtgcctggtggtgttcttcctggccatgctggtgctgatggccgtgctgtacgtgcacatgctggccagagcctgccagcacgcccagggcatcgccagactgcacaagagacagagacccgtgcaccagggcttcggcctgaagggcgccgtgaccctgaccatcctgctgggcatcttcttcctgtgctggggccccttcttcctgcacctgaccctgatcgtgctgtgccccgagcaccccacctgcggctgcatcttcaagaacttcaacctgttcctggccctgatcatctgcaacgccatcatcgaccccctgatctacgccttccacagccaggagctgagaagaaccctgaaggaggtgctgacctgcagctggtga

SEQ ID NO: 2616 - RNA, 954 nt, synthetic construct
  misc_feature 1..954: note = derived and/or modified sequence opt5 fromMC1_R__Homo_sapiens__AHC09641
  source 1..954: mol_type = other RNA
atggccgtgcagggcagccaaagacggctgctcgggtccctgaactctacccccacagctatccctcagcttggactggccgcgaatcagacgggcgctcgctgcctcgaggtcagcatttccgacgggctgttcctttctctgggactcgttagcctggtggaaaacgccctggtggtcgccaccatcgctaagaatagaaacctccactccccgatgtactgttttatttgctgtctggccctttctgatctgctcgtgagcggctccaatgttctggagacagctgtgatccttctgctcgaagccggggcgctggtcgcccgggctgccgtgctgcagcaactcgacaacgttattgatgtgattacctgcagctctatgctgtccagcctttgtttcctgggagctatcgccgtcgaccgctatatttctatcttttacgcgctcagatatcattccacagtgaccctgccccgggcccgcagagctgtggccgctatttgggtcgccagcgttgtgttctctacactttttatcgcctactatgatcacgtggctgtcctgctctgcctggtggttttctttctggcgatgctcgtgctgatggccgtcctttacgtgcatatgctggctcgggcctgtcagcacgcccagggcattgctcgcctccataaaagacagcggcctgttcaccaaggcttcgggctgaagggagccgtgacccttacgatcctgctcggcatctttttcctgtgctgggggccctttttcctgcacctcaccctgatcgtcctttgtcctgagcatcccacatgcggatgtatctttaaaaatttcaacctgttcctcgcgctgattatctgcaatgctattatcgaccctctgatttatgcctttcactcccaggaacttcgcagaaccctcaaggaggtgctgacatgcagctggtga

SEQ ID NO: 2617 - protein, 317 aa, synthetic construct [sequence omitted]

SEQ ID NO: 2618 - RNA, 954 nt, synthetic construct
  misc_feature 1..954: note = MC1_R__Homo_sapiens__AHC10044
  source 1..954: mol_type = other RNA
atggctgtgcagggatcccagagaagacttctgggctccctcaactccacccccacagccatcccccagctggggctggctgccaaccagacaggagcccggtacctggaggtgtccatctctgacgggctcttcctcagcctggggctggtgagcttggtggagaacgcgctggtggtggccaccatcgccaagaaccggaacctgcactcacccatgtactgcttcatctgctgcctggccttgtcggacctgctggtgagcgggagcaacgtgctggagacggccgtcatcctcctgctggaggccggtgcactggtggcccgggctgcggtgctgcagcagctggacaatgtcattgacgtgatcacctgcagctccatgctgtccagcctctgcttcctgggcgccatcgccgtggaccgctacatctccatcttctacgcactgcgctaccacagcatcgtgaccctgccgcgggcgcggcgagccgttgcggccatctgggtggccagtgtcgtcttcagcacgctcttcatcgcctactacgaccacgtggccgtcctgctgtgcctcgtggtcttcttcctggctatgctggtgctcatggccgtgctgtacgtccacatgctggcccgggcctgccagcacgcccagggcatcgcccggctccacaagaggcagcgcccggtccaccagggctttggccttaaaggcgctgtcaccctcaccatcctgctgggcattttcttcctctgctggggccccttcttcctgcatctcacactcatcgtcctctgccccgagcaccccacgtgcggctgcatcttcaagaacttcaacctctttctcgccctcatcatctgcaatgccatcatcgaccccctcatctacgccttccacagccaggagctccgcaggacgctcaaggaggtgctgacatgctcctggtga

SEQ ID NO: 2619 - RNA, 954 nt, synthetic construct
  misc_feature 1..954: note = derived and/or modified sequence opt1 fromMC1_R__Homo_sapiens__AHC10044
  source 1..954: mol_type = other RNA
atggccgtgcagggcagccagcgccggctgctcgggtccctgaacagcacccccaccgccatcccccagctgggcctcgcggccaaccagacgggggcccgctacctggaggtctccatcagcgacggcctgttcctctccctggggctggtgagcctcgtggagaacgccctggtcgtggccaccatcgcgaagaaccggaacctgcactcccccatgtactgcttcatctgctgcctcgccctgagcgacctgctcgtgtccggcagcaacgtcctggagaccgccgtgatcctgctcctggaggccggcgcgctggtggcccgcgccgccgtcctccagcagctggacaacgtgatcgacgtgatcacgtgctccagcatgctgtccagcctctgcttcctgggggccatcgcggtcgaccggtacatctccatcttctacgccctgcgctaccacagcatcgtgaccctcccccgggcccgccgggccgtggccgcgatctgggtcgcctccgtggtgttcagcaccctgttcatcgcctactacgaccacgtcgccgtgctgctctgcctggtggtcttcttcctggccatgctcgtgctgatggcggtgctgtacgtccacatgctcgcccgcgcctgccagcacgcccagggcatcgcccggctgcacaagcgccagcggcccgtgcaccaggggttcggcctgaagggggcggtcaccctcaccatcctgctgggcatcttcttcctctgctggggcccgttcttcctgcacctgacgctcatcgtgctgtgccccgagcacccgacctgcgggtgcatcttcaagaacttcaacctgttcctcgccctgatcatctgcaacgccatcatcgaccccctgatctacgccttccactcccaggagctgcgccggaccctcaaggaggtgctgacctgcagctggtga

SEQ ID NO: 2620 - RNA, 954 nt, synthetic construct
  misc_feature 1..954: note = derived and/or modified sequence opt2 fromMC1_R__Homo_sapiens__AHC10044
  source 1..954: mol_type = other RNA
atggccgtccagggctcccagcgccgcctcctcggctccctcaactccacccccaccgccatcccccagctcggcctcgccgccaaccagaccggcgcccgctacctcgaggtctccatctccgacggcctcttcctctccctcggcctcgtctccctcgtcgagaacgccctcgtcgtcgccaccatcgccaagaaccgcaacctccactcccccatgtactgcttcatctgctgcctcgccctctccgacctcctcgtctccggctccaacgtcctcgagaccgccgtcatcctcctcctcgaggccggcgccctcgtcgcccgcgccgccgtcctccagcagctcgacaacgtcatcgacgtcatcacctgctcctccatgctctcctccctctgcttcctcggcgccatcgccgtcgaccgctacatctccatcttctacgccctccgctaccactccatcgtcaccctcccccgcgcccgccgcgccgtcgccgccatctgggtcgcctccgtcgtcttctccaccctcttcatcgcctactacgaccacgtcgccgtcctcctctgcctcgtcgtcttcttcctcgccatgctcgtcctcatggccgtcctctacgtccacatgctcgcccgcgcctgccagcacgcccagggcatcgcccgcctccacaagcgccagcgccccgtccaccagggcttcggcctcaagggcgccgtcaccctcaccatcctcctcggcatcttcttcctctgctggggccccttcttcctccacctcaccctcatcgtcctctgccccgagcaccccacctgcggctgcatcttcaagaacttcaacctcttcctcgccctcatcatctgcaacgccatcatcgaccccctcatctacgccttccactcccaggagctccgccgcaccctcaaggaggtcctcacctgctcctggtga

SEQ ID NO: 2621 - RNA, 954 nt, synthetic construct
  misc_feature 1..954: note = derived and/or modified sequence opt3 fromMC1_R__Homo_sapiens__AHC10044
  source 1..954: mol_type = other RNA
atggccgtgcagggcagccaaagaaggctgctcgggtcccttaactctacccccacagctatccctcagctgggattggcagccaatcagactggtgcgcggtacttagaggtctcaattagtgacggcctgttcctaagcctcgggctggtttcccttgtggaaaacgctctggtagtggccacgatagcaaagaatcgcaacttgcactctccaatgtattgctttatctgttgcctcgccctgtcggatctgctcgtctcaggaagcaatgtgttagagaccgctgttattctgcttttggaagcaggcgccctggtggctcgagccgcggtcctacagcaactcgacaacgtgatcgatgtaattacatgtagttccatgctgtctagcctttgcttcctgggtgcaatcgccgttgaccgttacatatccatcttttatgctttgagataccattcaattgtgactctcccgagggcccggcgcgcagtcgctgccatctgggtggcgagtgtggtcttcagcaccctgtttattgcctattacgatcacgttgcagtgttactgtgtctcgtagtgttctttcttgctatgctggtcttgatggccgtgctatatgttcatatgctggctagagcctgccagcacgcacaggggatcgccaggctccataaacggcagcgccccgtgcaccaaggattcggcctgaagggcgctgtcacacttaccatactgttggggatctttttcctctgttggggaccatttttcctgcacttaactctgattgtgctatgccctgagcatcccacatgtggttgcatttttaaaaatttcaacctcttcctggcgcttatcatctgtaatgcaattatagaccctttgatctacgcctttcactctcaggaactgcgaagaaccctcaaggaggtactgacgtgctcctggtga

SEQ ID NO: 2622 - RNA, 954 nt, synthetic construct
  misc_feature 1..954: note = derived and/or modified sequence opt4 fromMC1_R__Homo_sapiens__AHC10044
  source 1..954: mol_type = other RNA
atggccgtgcagggcagccagagaagactgctgggcagcctgaacagcacccccaccgccatcccccagctgggcctggccgccaaccagaccggcgccagatacctggaggtgagcatcagcgacggcctgttcctgagcctgggcctggtgagcctggtggagaacgccctggtggtggccaccatcgccaagaacagaaacctgcacagccccatgtactgcttcatctgctgcctggccctgagcgacctgctggtgagcggcagcaacgtgctggagaccgccgtgatcctgctgctggaggccggcgccctggtggccagagccgccgtgctgcagcagctggacaacgtgatcgacgtgatcacctgcagcagcatgctgagcagcctgtgcttcctgggcgccatcgccgtggacagatacatcagcatcttctacgccctgagataccacagcatcgtgaccctgcccagagccagaagagccgtggccgccatctgggtggccagcgtggtgttcagcaccctgttcatcgcctactacgaccacgtggccgtgctgctgtgcctggtggtgttcttcctggccatgctggtgctgatggccgtgctgtacgtgcacatgctggccagagcctgccagcacgcccagggcatcgccagactgcacaagagacagagacccgtgcaccagggcttcggcctgaagggcgccgtgaccctgaccatcctgctgggcatcttcttcctgtgctggggccccttcttcctgcacctgaccctgatcgtgctgtgccccgagcaccccacctgcggctgcatcttcaagaacttcaacctgttcctggccctgatcatctgcaacgccatcatcgaccccctgatctacgccttccacagccaggagctgagaagaaccctgaaggaggtgctgacctgcagctggtga

SEQ ID NO: 2623 - RNA, 954 nt, synthetic construct
  misc_feature 1..954: note = derived and/or modified sequence opt5 fromMC1_R__Homo_sapiens__AHC10044
  source 1..954: mol_type = other RNA
atggccgtgcagggcagccaaagacggctgctcgggtccctgaactctacccccacagctatccctcagcttggactggccgcgaatcagacgggcgctcgctacctcgaggtcagcatttccgacgggctgttcctttctctgggactcgttagcctggtggaaaacgccctggtggtcgccaccatcgctaagaatagaaacctccactccccgatgtattgctttatttgttgcctggccctttctgatctgctcgtgagcggctccaatgttctggagacagctgtgatccttctgctcgaagccggggcgctggtcgcccgggctgccgtgctgcagcaactcgacaacgttattgatgtgatcacctgtagctctatgctgtccagcctttgcttcctgggagctatcgccgtcgaccgctacatttctatcttttatgcgctcagataccattccattgtgacactgccccgggcccgcagagctgtggccgctatctgggtcgccagcgttgtgttctctaccctttttattgcctattacgatcacgtggctgtcctgctctgtctggtggttttctttctggcgatgctcgtgctgatggccgtcctttatgtgcatatgctggctcgggcctgccagcacgcccagggcatcgctcgcctccataaaagacagcggcctgttcaccaaggcttcgggctgaagggagccgtgacacttaccattctgctcggcatctttttcctgtgttgggggccctttttcctgcacctcacgctgatcgtcctttgccctgagcatcccacctgtggatgcatttttaaaaatttcaacctgttcctcgcgctgatcatttgtaatgctatcattgaccctctgatctacgcctttcactcccaggaacttcgcagaacactcaaggaggtgctgacctgcagctggtga

SEQ ID NO: 2624 - protein, 317 aa, synthetic construct [sequence omitted]

SEQ ID NO: 2625 - RNA, 954 nt, synthetic construct
  misc_feature 1..954: note = MC1_R__Homo_sapiens__AHC09532
  source 1..954: mol_type = other RNA
atggctgtgcagggatcccagagaagacttctgggctccctcaactccacccccacagccatcccccagctggggctggctgccaaccagacaggagcccggtgcctggaggtgtccatctctgacgggctcttcctcagcctggggctggtgagcttggtggagaacgcgctggtgttggccaccatcgccaagaaccggaacctgcactcacccatgtactgcttcatctgctgcctggccttgtcggacctgctggtgagcgggagcaacgtgctggagacggccgtcatcctcctgctggaggccggtgcactggtggcccgggctgcggtgctgcagcagctggacaatgtcattgacgtgatcacctgcagctccatgctgtccagcctctgcttcctgggcgccatcgccgtggaccgctacatctccatcttctacgcactgcgctaccacagcatcgtgaccctgccgcgggcgcggcgagccgttgcggccatctgggtggccagtgtcgtcttcagcacgctcttcatcgcctactacgaccacgtggccgtcctgctgtgcctcgtggtcttcttcctggctatgctggtgctcatggccgtgctgtacgtccacatgctggcccgggcctgccagcacgcccagggcatcgcccggctccacaagaggcagcgcccggtccaccagggctttggccttaaaggcgctgtcaccctcaccatcctgctgggcattttcttcctctgctggggccccttcttcctgcatctcacactcatcgtcctctgccccgagcaccccacgtgcggctgcatcttcaagaacttcaacctctttctcgccctcatcatctgcaatgccatcatcgaccccctcatctacgccttccacagccaggagctccgcaggacgctcaaggaggtgctgacatgctcctggtga

SEQ ID NO: 2626 - RNA, 954 nt, synthetic construct
  misc_feature 1..954: note = derived and/or modified sequence opt1 fromMC1_R__Homo_sapiens__AHC09532
  source 1..954: mol_type = other RNA
atggccgtgcagggcagccagcgccggctgctcgggtccctgaacagcacccccaccgccatcccccagctgggcctcgcggccaaccagacgggggcccgctgcctggaggtctccatcagcgacggcctgttcctctccctggggctggtgagcctcgtggagaacgccctggtcctggccaccatcgcgaagaaccggaacctccactcccccatgtactgcttcatctgctgcctggccctgagcgacctcctggtgtccggcagcaacgtgctggagaccgccgtcatcctcctgctggaggccggcgcgctcgtggcccgcgccgccgtgctgcagcagctggacaacgtcatcgacgtgatcacgtgctccagcatgctctccagcctgtgcttcctgggggccatcgcggtggaccggtacatctccatcttctacgccctccgctaccacagcatcgtcaccctgccccgggcccgccgggccgtggccgcgatctgggtggcctccgtcgtgttcagcaccctgttcatcgcctactacgaccacgtggccgtcctcctgtgcctggtggtgttcttcctcgccatgctggtcctgatggcggtgctctacgtgcacatgctggcccgcgcctgccagcacgcccagggcatcgcccggctgcacaagcgccagcggcccgtccaccaggggttcggcctcaagggggcggtgaccctgaccatcctgctcggcatcttcttcctgtgctggggcccgttcttcctgcacctcacgctgatcgtcctgtgccccgagcacccgacctgcgggtgcatcttcaagaacttcaacctcttcctggccctgatcatctgcaacgccatcatcgaccccctgatctacgccttccactcccaggagctccgccggaccctgaaggaggtgctgacctgcagctggtga

SEQ ID NO: 2627 - RNA, 954 nt, synthetic construct
  misc_feature 1..954: note = derived and/or modified sequence opt2 fromMC1_R__Homo_sapiens__AHC09532
  source 1..954: mol_type = other RNA
atggccgtccagggctcccagcgccgcctcctcggctccctcaactccacccccaccgccatcccccagctcggcctcgccgccaaccagaccggcgcccgctgcctcgaggtctccatctccgacggcctcttcctctccctcggcctcgtctccctcgtcgagaacgccctcgtcctcgccaccatcgccaagaaccgcaacctccactcccccatgtactgcttcatctgctgcctcgccctctccgacctcctcgtctccggctccaacgtcctcgagaccgccgtcatcctcctcctcgaggccggcgccctcgtcgcccgcgccgccgtcctccagcagctcgacaacgtcatcgacgtcatcacctgctcctccatgctctcctccctctgcttcctcggcgccatcgccgtcgaccgctacatctccatcttctacgccctccgctaccactccatcgtcaccctcccccgcgcccgccgcgccgtcgccgccatctgggtcgcctccgtcgtcttctccaccctcttcatcgcctactacgaccacgtcgccgtcctcctctgcctcgtcgtcttcttcctcgccatgctcgtcctcatggccgtcctctacgtccacatgctcgcccgcgcctgccagcacgcccagggcatcgcccgcctccacaagcgccagcgccccgtccaccagggcttcggcctcaagggcgccgtcaccctcaccatcctcctcggcatcttcttcctctgctggggccccttcttcctccacctcaccctcatcgtcctctgccccgagcaccccacctgcggctgcatcttcaagaacttcaacctcttcctcgccctcatcatctgcaacgccatcatcgaccccctcatctacgccttccactcccaggagctccgccgcaccctcaaggaggtcctcacctgctcctggtga

SEQ ID NO: 2628 - RNA, 954 nt, synthetic construct
  misc_feature 1..954: note = derived and/or modified sequence opt3 fromMC1_R__Homo_sapiens__AHC09532
  source 1..954: mol_type = other RNA
atggccgtgcagggcagccaaagaaggctgctcgggtcccttaactctacccccacagctatccctcagctgggattggcagccaatcagactggtgcgcggtgcttagaggtctcaattagtgacggcctgttcctaagcctcgggctggtttcccttgtggaaaacgctctggtattggccacgatagcaaagaatcgcaacctccactctccaatgtactgttttatctgctgtctggccctgtcggatctcttagtgtcaggaagcaatgtcctggagaccgctgtgattcttttgctggaagcaggcgccctagttgctcgagccgcggtgctccagcaactggacaacgtcatcgatgtgattacatgcagttccatgctttctagcctgtgtttcttgggtgcaatcgccgtagaccgttatatatccatcttttacgctctcagatatcattcaattgttactctgccgagggcccggcgcgcagtggctgccatctgggtcgcgagtgtggtgttcagcaccttatttattgcctactatgatcacgtcgcagttctgctctgccttgtggtattctttctggctatgttggtgctaatggccgtcctgtacgtgcatatgctcgctagagcctgtcagcacgcacaggggatcgccaggctgcataaacggcagcgccccgttcaccaaggattcggccttaagggcgctgtgacactgaccatattgctcgggatctttttcctgtgctggggaccatttttcttacacctgactctaattgtcctctgtcctgagcatcccacatgcggttgtatttttaaaaatttcaacctgttccttgcgttgatcatctgcaatgcaattatagaccctctgatctatgcctttcactctcaggaactccgaagaaccctgaaggaggtgcttacgtgctcctggtga

SEQ ID NO: 2629 - RNA, 954 nt, synthetic construct
  misc_feature 1..954: note = derived and/or modified sequence opt4 fromMC1_R__Homo_sapiens__AHC09532
  source 1..954: mol_type = other RNA
atggccgtgcagggcagccagagaagactgctgggcagcctgaacagcacccccaccgccatcccccagctgggcctggccgccaaccagaccggcgccagatgcctggaggtgagcatcagcgacggcctgttcctgagcctgggcctggtgagcctggtggagaacgccctggtgctggccaccatcgccaagaacagaaacctgcacagccccatgtactgcttcatctgctgcctggccctgagcgacctgctggtgagcggcagcaacgtgctggagaccgccgtgatcctgctgctggaggccggcgccctggtggccagagccgccgtgctgcagcagctggacaacgtgatcgacgtgatcacctgcagcagcatgctgagcagcctgtgcttcctgggcgccatcgccgtggacagatacatcagcatcttctacgccctgagataccacagcatcgtgaccctgcccagagccagaagagccgtggccgccatctgggtggccagcgtggtgttcagcaccctgttcatcgcctactacgaccacgtggccgtgctgctgtgcctggtggtgttcttcctggccatgctggtgctgatggccgtgctgtacgtgcacatgctggccagagcctgccagcacgcccagggcatcgccagactgcacaagagacagagacccgtgcaccagggcttcggcctgaagggcgccgtgaccctgaccatcctgctgggcatcttcttcctgtgctggggccccttcttcctgcacctgaccctgatcgtgctgtgccccgagcaccccacctgcggctgcatcttcaagaacttcaacctgttcctggccctgatcatctgcaacgccatcatcgaccccctgatctacgccttccacagccaggagctgagaagaaccctgaaggaggtgctgacctgcagctggtga

SEQ ID NO: 2630 - RNA, 954 nt, synthetic construct
  misc_feature 1..954: note = derived and/or modified sequence opt5 fromMC1_R__Homo_sapiens__AHC09532
  source 1..954: mol_type = other RNA
atggccgtgcagggcagccaaagacggctgctcgggtccctgaactctacccccacagctatccctcagcttggactggccgcgaatcagacgggcgctcgctgcctcgaggtcagcatttccgacgggctgttcctttctctgggactcgttagcctggtggaaaacgccctggtgctcgccaccatcgctaagaatagaaacctgcactccccgatgtactgttttatttgctgtcttgccctgtctgatctcctggtcagcggctccaatgtgcttgagacagctgttatcctgctcctggaagccggggcgctggtggcccgggctgccgtcctccagcaactggacaacgtgattgatgttattacctgcagctctatgctttccagcctgtgtttcctcggagctatcgccgtggaccgctatatctctatcttttacgcgctgagatatcattccattgtcacacttccccgggcccgcagagctgtggccgctatctgggtggccagcgtcgttttctctaccctgtttattgcctactatgatcacgtggctgtgctcctgtgcctggtcgtgttctttctcgcgatgctggttcttatggccgtgctgtacgtccatatgctcgctcgggcctgtcagcacgcccagggcatcgctcgcctgcataaaagacagcggcctgtgcaccaaggcttcgggcttaagggagccgttacactgaccattctcctgggcatctttttcctgtgctgggggccctttttcctccacctgacgcttatcgtgctgtgtcctgagcatcctacctgcggatgtatttttaaaaatttcaacctcttcctggcgctgatcatttgcaatgctatcattgacccccttatctatgcctttcactcccaggaactccgcagaacactgaaggaggtcctgacctgcagctggtga

SEQ ID NO: 2631 - protein, 317 aa, synthetic construct [sequence omitted]

SEQ ID NO: 2632 - RNA, 954 nt, synthetic construct
  misc_feature 1..954: note = MC1_R__Homo_sapiens__AHC11042
  source 1..954: mol_type = other RNA
atggctgtgcagggatcccagagaagacttctgggctccctcaactccacccccacagccatcccccagctggggctggctgccaaccagacaggagcccggtgcctggaggtgtccatctctgacgggctcttcctcagcctggggctggtgagcttggtggagaacgcgctggtggtggccaccatcgccaagaaccggaacctgcactcacccatgtactgcttcatctgctgcctgcccttgtcggacctgctggtgagcgggagcaacgtgctggagacggccgtcatcctcctgctggaggccggtgcactggtggcccgggctgcggtgctgcagcagctggacaatgtcattgacgtgatcacctgcagctccatgctgtccagcctctgcttcctgggcgccatcgccgtggaccgctacatctccatcttctacgcactgcgctaccacagcatcgtgaccctgccgcgggcgcggcgagccgttgcggccatctgggtggccagtgtcgtcttcagcacgctcttcatcgcctactacgaccacgtggccgtcctgctgtgcctcgtggtcttcttcctggctatgctggtgctcatggccgtgctgtacgtccacatgctggcccgggcctgccagcacgcccagggcatcgcccggctccacaagaggcagcgcccggtccaccagggctttggccttaaaggcgctgtcaccctcaccatcctgctgggcattttcttcctctgctggggccccttcttcctgcatctcacactcatcgtcctctgccccgagcaccccacgtgcggctgcatcttcaagaacttcaacctctttctcgccctcatcatctgcaatgccatcatcgaccccctcatctacgccttccacagccaggagctccgcaggacgctcaaggaggtgctgacatgctcctggtga

SEQ ID NO: 2633 - RNA, 954 nt, synthetic construct
  misc_feature 1..954: note = derived and/or modified sequence opt1 fromMC1_R__Homo_sapiens__AHC11042
  source 1..954: mol_type = other RNA
atggccgtgcagggcagccagcgccggctgctcgggtccctgaacagcacccccaccgccatcccgcagctgggcctcgcggccaaccagacgggggcccgctgcctggaggtctccatcagcgacggcctgttcctctccctggggctggtgagcctcgtggagaacgccctggtcgtggccaccatcgcgaagaaccggaacctgcactcccccatgtactgcttcatctgctgcctccccctgagcgacctgctcgtgtccggcagcaacgtcctggagaccgccgtgatcctgctcctggaggccggcgccctggtggcgcgcgccgccgtcctccagcagctggacaacgtgatcgacgtgatcacgtgctccagcatgctgtccagcctctgcttcctgggggccatcgccgtcgaccggtacatctccatcttctacgcgctgcgctaccacagcatcgtgaccctcccccgggcccgccgggccgtggccgccatctgggtcgcgtccgtggtgttcagcaccctgttcatcgcctactacgaccacgtcgccgtgctgctctgcctggtggtcttcttcctggccatgctcgtgctgatggccgtgctgtacgtccacatgctcgcgcgcgcctgccagcacgcccagggcatcgcccggctgcacaagcgccagcggccggtgcaccaggggttcggcctgaagggggccgtcaccctcaccatcctgctgggcatcttcttcctctgctggggccccttcttcctgcacctgacgctcatcgtgctgtgccccgagcacccgacctgcgggtgcatcttcaagaacttcaacctgttcctcgcgctgatcatctgcaacgccatcatcgaccccctgatctacgccttccactcccaggagctgcgccggaccctcaaggaggtgctgacctgcagctggtga

SEQ ID NO: 2634 - RNA, 954 nt, synthetic construct
  misc_feature 1..954: note = derived and/or modified sequence opt2 fromMC1_R__Homo_sapiens__AHC11042
  source 1..954: mol_type = other RNA
atggccgtccagggctcccagcgccgcctcctcggctccctcaactccacccccaccgccatcccccagctcggcctcgccgccaaccagaccggcgcccgctgcctcgaggtctccatctccgacggcctcttcctctccctcggcctcgtctccctcgtcgagaacgccctcgtcgtcgccaccatcgccaagaaccgcaacctccactcccccatgtactgcttcatctgctgcctccccctctccgacctcctcgtctccggctccaacgtcctcgagaccgccgtcatcctcctcctcgaggccggcgccctcgtcgcccgcgccgccgtcctccagcagctcgacaacgtcatcgacgtcatcacctgctcctccatgctctcctccctctgcttcctcggcgccatcgccgtcgaccgctacatctccatcttctacgccctccgctaccactccatcgtcaccctcccccgcgcccgccgcgccgtcgccgccatctgggtcgcctccgtcgtcttctccaccctcttcatcgcctactacgaccacgtcgccgtcctcctctgcctcgtcgtcttcttcctcgccatgctcgtcctcatggccgtcctctacgtccacatgctcgcccgcgcctgccagcacgcccagggcatcgcccgcctccacaagcgccagcgccccgtccaccagggcttcggcctcaagggcgccgtcaccctcaccatcctcctcggcatcttcttcctctgctggggccccttcttcctccacctcaccctcatcgtcctctgccccgagcaccccacctgcggctgcatcttcaagaacttcaacctcttcctcgccctcatcatctgcaacgccatcatcgaccccctcatctacgccttccactcccaggagctccgccgcaccctcaaggaggtcctcacctgctcctggtga

SEQ ID NO: 2635 - RNA, 954 nt, synthetic construct
  misc_feature 1..954: note = derived and/or modified sequence opt3 fromMC1_R__Homo_sapiens__AHC11042
  source 1..954: mol_type = other RNA
atggccgtgcagggcagccaaagaaggctgctcgggtcccttaactctacccccacagctatccctcagctgggattggcagccaatcagactggtgcgcggtgcttagaggtctcaattagtgacggcctgttcctaagcctcgggctggtttcccttgtggaaaacgctctggtagtggccacgatagcaaagaatcgcaacttgcactctccaatgtactgttttatctgctgtctcccgctgtcggatctgctcgtctcaggaagcaatgtgttagagaccgccgttattctgcttttggaagctggcgcactggtggcccgagctgccgtcctacagcaactcgacaacgtgatcgatgtaattacatgcagttccatgctgtctagcctttgtttcctgggtgcgatcgcagttgaccgttatatatccatcttttacgccttgagatatcattcaattgtgactctccccagggctcggcgcgccgtcgcagctatctgggtggccagtgtggtcttcagcaccctgtttattgcgtactatgatcacgttgccgtgttactgtgcctcgtagtgttctttcttgcaatgctggtcttgatggctgtgctatacgttcatatgctggccagagcttgtcagcacgcccaggggatcgcaaggctccataaacggcagcgccctgtgcaccaaggattcggcctgaagggcgccgtcacacttaccatactgttggggatctttttcctctgctggggaccatttttcctgcacttaactctgattgtgctatgtcccgagcatcctacatgcggttgtatttttaaaaatttcaacctcttcctggctcttatcatctgcaatgcgattatagacccattgatctatgcatttcactctcaggaactgcgaagaaccctcaaggaggtactgacgtgctcctggtga

SEQ ID NO: 2636 - RNA, 954 nt, synthetic construct
  misc_feature 1..954: note = derived and/or modified sequence opt4 fromMC1_R__Homo_sapiens__AHC11042
  source 1..954: mol_type = other RNA
atggccgtgcagggcagccagagaagactgctgggcagcctgaacagcacccccaccgccatcccccagctgggcctggccgccaaccagaccggcgccagatgcctggaggtgagcatcagcgacggcctgttcctgagcctgggcctggtgagcctggtggagaacgccctggtggtggccaccatcgccaagaacagaaacctgcacagccccatgtactgcttcatctgctgcctgcccctgagcgacctgctggtgagcggcagcaacgtgctggagaccgccgtgatcctgctgctggaggccggcgccctggtggccagagccgccgtgctgcagcagctggacaacgtgatcgacgtgatcacctgcagcagcatgctgagcagcctgtgcttcctgggcgccatcgccgtggacagatacatcagcatcttctacgccctgagataccacagcatcgtgaccctgcccagagccagaagagccgtggccgccatctgggtggccagcgtggtgttcagcaccctgttcatcgcctactacgaccacgtggccgtgctgctgtgcctggtggtgttcttcctggccatgctggtgctgatggccgtgctgtacgtgcacatgctggccagagcctgccagcacgcccagggcatcgccagactgcacaagagacagagacccgtgcaccagggcttcggcctgaagggcgccgtgaccctgaccatcctgctgggcatcttcttcctgtgctggggccccttcttcctgcacctgaccctgatcgtgctgtgccccgagcaccccacctgcggctgcatcttcaagaacttcaacctgttcctggccctgatcatctgcaacgccatcatcgaccccctgatctacgccttccacagccaggagctgagaagaaccctgaaggaggtgctgacctgcagctggtga

SEQ ID NO: 2637 - RNA, 954 nt, synthetic construct
  misc_feature 1..954: note = derived and/or modified sequence opt5 fromMC1_R__Homo_sapiens__AHC11042
  source 1..954: mol_type = other RNA
atggccgtgcagggcagccaaagacggctgctcgggtccctgaactctacccccacagctatccctcagcttggactggccgcgaatcagacgggcgctcgctgcctcgaggtcagcatttccgacgggctgttcctttctctgggactcgttagcctggtggaaaacgccctggtggtcgccaccatcgctaagaatagaaacctccactccccgatgtactgttttatttgctgtctgcccctttctgatctgctcgtgagcggctccaatgttctggagacagccgtgatccttctgctcgaagctggggccctggtcgcgcgggccgctgtgctgcagcaactcgacaacgttattgatgtgattacctgcagctctatgctgtccagcctttgtttcctgggagccatcgctgtcgaccgctatatctctatcttttacgccctcagatatcattccattgtgacactgcctcgggcgcgcagagccgtggctgccatctgggtcgctagcgttgtgttctctaccctttttattgcctactatgatcacgtggccgtcctgctctgcctggtggttttctttctggctatgctcgtgctgatggcggtcctttacgtgcatatgctggcccgggcttgtcagcacgcccagggcatcgcccgcctccataaaagacagcggcccgttcaccaaggcttcgggctgaagggagctgtgacacttaccattctgctcggcatctttttcctgtgctgggggccctttttcctgcacctcacgctgatcgtcctttgtcctgagcatcctacctgcggatgtatttttaaaaatttcaacctgttcctcgccctgatcatttgcaatgcgatcattgacccgctgatctatgcttttcactcccaggaacttcgcagaacactcaaggaggtgctgacctgcagctggtga

SEQ ID NO: 2638 - protein, 317 aa, synthetic construct [sequence omitted]

SEQ ID NO: 2639 - RNA, 954 nt, synthetic construct
  misc_feature 1..954: note = MC1_R__Homo_sapiens__AHC10733
  source 1..954: mol_type = other RNA
atggctgtgcagggatcccagagaagacttctgggctccctcaactccacccccacagccatcccccagctggggctggctgccaaccagacaggagcccggtgcctggaggtgtccatctctgacgggctcttcctcagcctggggctggtgagcttggtggagaacgcgctggtggtggccaccatcgccaagaaccggaacctgcactcacccatgtactgcttcatctgctgcctggccttgtcggacctgctggtgagcgggagcaacgtgctggagacggccgtcatcctcctgctggaggccggtgcactggtggcccgggctgcggtgctgcagcagctggacaatgtcattgacgtgatcacctgcagctccatgctgtccagcctctgcttcctgggcgccatcgccgtggaccgctacatctccatcttctacgcactgcgctaccacagcatcgtgaccctgccgcgggcgcggcgagccgttgcggccatctgggtggccagtgtcgtcttcagcacgctcttcatcgcctactacgaccacgtggccgtcctgctgtgcctcgtggtcttcttcctggctatgctggtgctcatggccgtgctgtacgtccacatgctggcccgggcctgccagcacgcccagggcatcgcccggctccacaagaggcagcgcccggtccaccagggctttggccttaaaggcgctgtcaccctcaccatcctgctgggcattttcttcctctgctggggccccttcttcctgcatctcacactcatcgtcctctgccccgagcaccccacgtgcggctgcatcttcaagaacttcagcctctttctcgccctcatcatctgcaatgccatcatcgaccccctcatctacgccttccacagccaggagctccgcaggacgctcaaggaggtgctgacatgctcctggtga

SEQ ID NO: 2640 - RNA, 954 nt, synthetic construct
  misc_feature 1..954: note = derived and/or modified sequence opt1 fromMC1_R__Homo_sapiens__AHC10733
  source 1..954: mol_type = other RNA
atggccgtgcagggcagccagcgccggctgctcgggtccctgaacagcacccccaccgccatcccccagctgggcctcgcggccaaccagacgggggcccgctgcctggaggtctccatcagcgacggcctgttcctctccctggggctggtgagcctcgtggagaacgccctggtcgtggccaccatcgcgaagaaccggaacctgcactcccccatgtactgcttcatctgctgcctcgccctgagcgacctgctcgtgtccggcagcaacgtcctggagaccgccgtgatcctgctcctggaggccggcgcgctggtggcccgcgccgccgtcctccagcagctggacaacgtgatcgacgtgatcacgtgctccagcatgctgtccagcctctgcttcctgggggccatcgcggtcgaccggtacatctccatcttctacgccctgcgctaccacagcatcgtgaccctcccccgggcccgccgggccgtggccgcgatctgggtcgcctccgtggtgttcagcaccctgttcatcgcctactacgaccacgtcgccgtgctgctctgcctggtggtcttcttcctggccatgctcgtgctgatggcggtgctgtacgtccacatgctcgcccgcgcctgccagcacgcccagggcatcgcccggctgcacaagcgccagcggcccgtgcaccaggggttcggcctgaagggggcggtcaccctcaccatcctgctgggcatcttcttcctctgctggggcccgttcttcctgcacctgacgctcatcgtgctgtgccccgagcacccgacctgcgggtgcatcttcaagaacttctccctgttcctcgccctgatcatctgcaacgccatcatcgaccccctgatctacgccttccacagccaggagctgcgccggaccctcaaggaggtgctgacctgcagctggtga

SEQ ID NO: 2641 - RNA, 954 nt, synthetic construct
  misc_feature 1..954: note = derived and/or modified sequence opt2 fromMC1_R__Homo_sapiens__AHC10733
  source 1..954: mol_type = other RNA
atggccgtccagggctcccagcgccgcctcctcggctccctcaactccacccccaccgccatcccccagctcggcctcgccgccaaccagaccggcgcccgctgcctcgaggtctccatctccgacggcctcttcctctccctcggcctcgtctccctcgtcgagaacgccctcgtcgtcgccaccatcgccaagaaccgcaacctccactcccccatgtactgcttcatctgctgcctcgccctctccgacctcctcgtctccggctccaacgtcctcgagaccgccgtcatcctcctcctcgaggccggcgccctcgtcgcccgcgccgccgtcctccagcagctcgacaacgtcatcgacgtcatcacctgctcctccatgctctcctccctctgcttcctcggcgccatcgccgtcgaccgctacatctccatcttctacgccctccgctaccactccatcgtcaccctcccccgcgcccgccgcgccgtcgccgccatctgggtcgcctccgtcgtcttctccaccctcttcatcgcctactacgaccacgtcgccgtcctcctctgcctcgtcgtcttcttcctcgccatgctcgtcctcatggccgtcctctacgtccacatgctcgcccgcgcctgccagcacgcccagggcatcgcccgcctccacaagcgccagcgccccgtccaccagggcttcggcctcaagggcgccgtcaccctcaccatcctcctcggcatcttcttcctctgctggggccccttcttcctccacctcaccctcatcgtcctctgccccgagcaccccacctgcggctgcatcttcaagaacttctccctcttcctcgccctcatcatctgcaacgccatcatcgaccccctcatctacgccttccactcccaggagctccgccgcaccctcaaggaggtcctcacctgctcctggtga

SEQ ID NO: 2642 - RNA, 954 nt, synthetic construct
  misc_feature 1..954: note = derived and/or modified sequence opt3 fromMC1_R__Homo_sapiens__AHC10733
  source 1..954: mol_type = other RNA
atggccgtgcagggcagccaaagaaggctgctcgggtcccttaactctacccccacagctatccctcagctgggattggcagccaatcagactggtgcgcggtgcttagaggtctcaattagtgacggcctgttcctaagcctcgggctggtttcccttgtggaaaacgctctggtagtggccacgatagcaaagaatcgcaacttgcactctccaatgtactgttttatctgctgtctcgccctgtcggatctgctcgtctcaggaagcaatgtgttagagaccgctgttattctgcttttggaagcaggcgccctggtggctcgagccgcggtcctacagcaactcgacaacgtgatcgatgtaattacatgcagttccatgctgtctagcctttgtttcctgggtgcaatcgccgttgaccgttatatatccatcttttacgctttgagatatcattcaattgtgactctcccgagggcccggcgcgcagtcgctgccatctgggtggcgagtgtggtcttcagcaccctgtttattgcctactatgatcacgttgcagtgttactgtgcctcgtagtgttctttcttgctatgctggtcttgatggccgtgctatacgttcatatgctggctagagcctgtcagcacgcacaggggatcgccaggctccataaacggcagcgccccgtgcaccaaggattcggcctgaagggcgctgtcacacttaccatactgttggggatctttttcctctgctggggaccatttttcctgcacttaactctgattgtgctatgtcctgagcatcccacatgcggttgtatttttaaaaatttctctctcttcctggcgcttatcatctgcaacgcaattatagaccctttgatctatgcctttcactcccaggaactgcgaagaaccctcaaggaggtactgacgtgctcatggtga

SEQ ID NO: 2643 - RNA, 954 nt, synthetic construct
  misc_feature 1..954: note = derived and/or modified sequence opt4 fromMC1_R__Homo_sapiens__AHC10733
  source 1..954: mol_type = other RNA
atggccgtgcagggcagccagagaagactgctgggcagcctgaacagcacccccaccgccatcccccagctgggcctggccgccaaccagaccggcgccagatgcctggaggtgagcatcagcgacggcctgttcctgagcctgggcctggtgagcctggtggagaacgccctggtggtggccaccatcgccaagaacagaaacctgcacagccccatgtactgcttcatctgctgcctggccctgagcgacctgctggtgagcggcagcaacgtgctggagaccgccgtgatcctgctgctggaggccggcgccctggtggccagagccgccgtgctgcagcagctggacaacgtgatcgacgtgatcacctgcagcagcatgctgagcagcctgtgcttcctgggcgccatcgccgtggacagatacatcagcatcttctacgccctgagataccacagcatcgtgaccctgcccagagccagaagagccgtggccgccatctgggtggccagcgtggtgttcagcaccctgttcatcgcctactacgaccacgtggccgtgctgctgtgcctggtggtgttcttcctggccatgctggtgctgatggccgtgctgtacgtgcacatgctggccagagcctgccagcacgcccagggcatcgccagactgcacaagagacagagacccgtgcaccagggcttcggcctgaagggcgccgtgaccctgaccatcctgctgggcatcttcttcctgtgctggggccccttcttcctgcacctgaccctgatcgtgctgtgccccgagcaccccacctgcggctgcatcttcaagaacttcagcctgttcctggccctgatcatctgcaacgccatcatcgaccccctgatctacgccttccacagccaggagctgagaagaaccctgaaggaggtgctgacctgcagctggtga

SEQ ID NO: 2644 - RNA, 954 nt, synthetic construct
  misc_feature 1..954: note = derived and/or modified sequence opt5 fromMC1_R__Homo_sapiens__AHC10733
  source 1..954: mol_type = other RNA
atggccgtgcagggcagccaaagacggctgctcgggtccctgaactctacccccacagctatccctcagcttggactggccgcgaatcagacgggcgctcgctgcctcgaggtcagcatttccgacgggctgttcctttctctgggactcgttagcctggtggaaaacgccctggtggtcgccaccatcgctaagaatagaaacctccactccccgatgtactgttttatttgctgtctggccctttctgatctgctcgtgagcggctccaatgttctggagacagctgtgatccttctgctcgaagccggggcgctggtcgcccgggctgccgtgctgcagcaactcgacaacgttattgatgtgattacctgcagctctatgctgtccagcctttgtttcctgggagctatcgccgtcgaccgctatatctctatcttttacgcgctcagatatcattccattgtgacactgccccgggcccgcagagctgtggccgctatctgggtcgccagcgttgtgttctctaccctttttattgcctactatgatcacgtggctgtcctgctctgcctggtggttttctttctggcgatgctcgtgctgatggccgtcctttacgtgcatatgctggctcgggcctgtcagcacgcccagggcatcgctcgcctccataaaagacagcggcctgttcaccaaggcttcgggctgaagggagccgtgacacttaccattctgctcggcatctttttcctgtgctgggggccctttttcctgcacctcacgctgatcgtcctttgtcctgagcatcctacctgcggatgtatttttaaaaatttctccctgttcctcgcgctgatcatttgcaacgctatcattgaccccctgatctatgcctttcacagccaggaacttcgcagaacactcaaggaggtgctgacctgctcctggtga

SEQ ID NO: 2645 - protein, 317 aa, synthetic construct [sequence omitted]

SEQ ID NO: 2646 - RNA, 954 nt, synthetic construct
  misc_feature 1..954: note = MC1_R__Homo_sapiens__AHC10696
  source 1..954: mol_type = other RNA
atggctgtgcagggatcccagagaagacttctgggctccctcaactccacccccacagccatcccccagctggggctggctgccaaccagacaggagcccggtgcctggaggtgtccatctctgacgggctcttcctcagcctggggctggtgagcttggtggagaacgcgctggtggtggccaccatcgccaagaaccggaacctgcactcacccatgtactgcttcatctgctgcctggccttgtcggacctgctggtgagcgggagcaacgtgctggagacggccgtcatcctcctgctggaggccggtgcactggtggcccgggctgcggtgctgcagcagctggacaatgtcattgacgtgatcacctgcagctccatgctgtccagcctctgcttcctgggcgccatcgccgtggaccgctacatctccatcttctacgcactgcgctaccacagcatcgtgaccctgccgcgggcgcggcgagccgttgcggccatctgggtggccagtgtcgtcttcagcacgctcttcatcgcctactacgaccacgtggccgtcctgctgtgcctcgtggtcttcttcctggctatgctggtgctcatggccgtgctgtacgtccacatgctggcccgggcctgccagcacgcccagggcatcgcccggctccacaagaggcagcgcccggtccaccagggctttggccttaaaggcgctgtcaccctcaccatcctgctgggcattttcttcctctgctggggccccttcttcctgcatctcacactcatcgtcctctgccccgagcaccccacgtgcggctgcatcttcaagaacttcaacctctttctcgccctcatcatctgcaatgccatcatcgaccccctcatccacgccttccacagccaggagctccgcaggacgctcaaggaggtgctgacatgctcctggtga

SEQ ID NO: 2647 - RNA, 954 nt, synthetic construct
  misc_feature 1..954: note = derived and/or modified sequence opt1 fromMC1_R__Homo_sapiens__AHC10696
  source 1..954: mol_type = other RNA
atggccgtgcagggcagccagcgccggctgctcgggtccctgaacagcacccccaccgccatcccccagctgggcctcgcggccaaccagacgggggcccgctgcctggaggtctccatcagcgacggcctgttcctctccctggggctggtgagcctcgtggagaacgccctggtcgtggccaccatcgcgaagaaccggaacctgcactcccccatgtactgcttcatctgctgcctcgccctgagcgacctgctcgtgtccggcagcaacgtcctggagaccgccgtgatcctgctcctggaggccggcgcgctggtggcccgcgccgccgtcctccagcagctggacaacgtgatcgacgtgatcacgtgctccagcatgctgtccagcctctgcttcctgggggccatcgcggtcgaccggtacatctccatcttctacgccctgcgctaccacagcatcgtgaccctcccccgggcccgccgggccgtggccgcgatctgggtcgcctccgtggtgttcagcaccctgttcatcgcctactacgaccacgtcgccgtgctgctctgcctggtggtcttcttcctggccatgctcgtgctgatggcggtgctgtacgtccacatgctcgcccgcgcctgccagcacgcccagggcatcgcccggctgcacaagcgccagcggcccgtgcaccaggggttcggcctgaagggggcggtcaccctcaccatcctgctgggcatcttcttcctctgctggggcccgttcttcctgcacctgacgctcatcgtgctgtgccccgagcacccgacctgcgggtgcatcttcaagaacttcaacctgttcctcgccctgatcatctgcaacgccatcatcgaccccctgatccacgccttccactcccaggagctgcgccggaccctcaaggaggtgctgacctgcagctggtga

SEQ ID NO: 2648 - RNA, 954 nt, synthetic construct
  misc_feature 1..954: note = derived and/or modified sequence opt2 fromMC1_R__Homo_sapiens__AHC10696
  source 1..954: mol_type = other RNA
atggccgtccagggctcccagcgccgcctcctcggctccctcaactccacccccaccgccatcccccagctcggcctcgccgccaaccagaccggcgcccgctgcctcgaggtctccatctccgacggcctcttcctctccctcggcctcgtctccctcgtcgagaacgccctcgtcgtcgccaccatcgccaagaaccgcaacctccactcccccatgtactgcttcatctgctgcctcgccctctccgacctcctcgtctccggctccaacgtcctcgagaccgccgtcatcctcctcctcgaggccggcgccctcgtcgcccgcgccgccgtcctccagcagctcgacaacgtcatcgacgtcatcacctgctcctccatgctctcctccctctgcttcctcggcgccatcgccgtcgaccgctacatctccatcttctacgccctccgctaccactccatcgtcaccctcccccgcgcccgccgcgccgtcgccgccatctgggtcgcctccgtcgtcttctccaccctcttcatcgcctactacgaccacgtcgccgtcctcctctgcctcgtcgtcttcttcctcgccatgctcgtcctcatggccgtcctctacgtccacatgctcgcccgcgcctgccagcacgcccagggcatcgcccgcctccacaagcgccagcgccccgtccaccagggcttcggcctcaagggcgccgtcaccctcaccatcctcctcggcatcttcttcctctgctggggccccttcttcctccacctcaccctcatcgtcctctgccccgagcaccccacctgcggctgcatcttcaagaacttcaacctcttcctcgccctcatcatctgcaacgccatcatcgaccccctcatccacgccttccactcccaggagctccgccgcaccctcaaggaggtcctcacctgctcctggtga

SEQ ID NO: 2649 - RNA, 954 nt, synthetic construct
  misc_feature 1..954: note = derived and/or modified sequence opt3 fromMC1_R__Homo_sapiens__AHC10696
  source 1..954: mol_type = other RNA
atggccgtgcagggcagccaaagaaggctgctcgggtcccttaactctacccccacagctatccctcagctgggattggcagccaatcagactggtgcgcggtgcttagaggtctcaattagtgacggcctgttcctaagcctcgggctggtttcccttgtggaaaacgctctggtagtggccacgatagcaaagaatcgcaacttgcactctccaatgtactgttttatctgctgtctcgccctgtcggatctgctcgtctcaggaagcaatgtgttagagaccgctgttattctgcttttggaagcaggcgccctggtggctcgagccgcggtcctacagcaactcgacaacgtgatcgatgtaattacatgcagttccatgctgtctagcctttgtttcctgggtgcaatcgccgttgaccgttatatatccatcttttacgctttgagatatcattcaattgtgactctcccgagggcccggcgcgcagtcgctgccatctgggtggcgagtgtggtcttcagcaccctgtttattgcctactatgatcacgttgcagtgttactgtgcctcgtagtgttctttcttgctatgctggtcttgatggccgtgctatacgttcatatgctggctagagcctgtcagcacgcacaggggatcgccaggctccataaacggcagcgccccgtgcaccaaggattcggcctgaagggcgctgtcacacttaccatactgttggggatctttttcctctgctggggaccatttttcctgcacttaactctgattgtgctatgtcctgagcatcccacatgcggttgtatttttaaaaatttcaacctcttcctggcgcttatcatctgcaatgcaattatagaccctttgatccacgcctttcattctcaggaactgcgaagaaccctcaaggaggtactgacgtgctcctggtga

SEQ ID NO: 2650 - RNA, 954 nt, synthetic construct
  misc_feature 1..954: note = derived and/or modified sequence opt4 fromMC1_R__Homo_sapiens__AHC10696
  source 1..954: mol_type = other RNA
atggccgtgcagggcagccagagaagactgctgggcagcctgaacagcacccccaccgccatcccccagctgggcctggccgccaaccagaccggcgccagatgcctggaggtgagcatcagcgacggcctgttcctgagcctgggcctggtgagcctggtggagaacgccctggtggtggccaccatcgccaagaacagaaacctgcacagccccatgtactgcttcatctgctgcctggccctgagcgacctgctggtgagcggcagcaacgtgctggagaccgccgtgatcctgctgctggaggccggcgccctggtggccagagccgccgtgctgcagcagctggacaacgtgatcgacgtgatcacctgcagcagcatgctgagcagcctgtgcttcctgggcgccatcgccgtggacagatacatcagcatcttctacgccctgagataccacagcatcgtgaccctgcccagagccagaagagccgtggccgccatctgggtggccagcgtggtgttcagcaccctgttcatcgcctactacgaccacgtggccgtgctgctgtgcctggtggtgttcttcctggccatgctggtgctgatggccgtgctgtacgtgcacatgctggccagagcctgccagcacgcccagggcatcgccagactgcacaagagacagagacccgtgcaccagggcttcggcctgaagggcgccgtgaccctgaccatcctgctgggcatcttcttcctgtgctggggccccttcttcctgcacctgaccctgatcgtgctgtgccccgagcaccccacctgcggctgcatcttcaagaacttcaacctgttcctggccctgatcatctgcaacgccatcatcgaccccctgatccacgccttccacagccaggagctgagaagaaccctgaaggaggtgctgacctgcagctggtga

SEQ ID NO: 2651 - RNA, 954 nt, synthetic construct
  misc_feature 1..954: note = derived and/or modified sequence opt5 fromMC1_R__Homo_sapiens__AHC10696
  source 1..954: mol_type = other RNA
atggccgtgcagggcagccaaagacggctgctcgggtccctgaactctacccccacagctatccctcagcttggactggccgcgaatcagacgggcgctcgctgcctcgaggtcagcatttccgacgggctgttcctttctctgggactcgttagcctggtggaaaacgccctggtggtcgccaccatcgctaagaatagaaacctccactccccgatgtactgttttatttgctgtctggccctttctgatctgctcgtgagcggctccaatgttctggagacagctgtgatccttctgctcgaagccggggcgctggtcgcccgggctgccgtgctgcagcaactcgacaacgttattgatgtgattacctgcagctctatgctgtccagcctttgtttcctgggagctatcgccgtcgaccgctatatctctatcttttacgcgctcagatatcattccattgtgacactgccccgggcccgcagagctgtggccgctatctgggtcgccagcgttgtgttctctaccctttttattgcctactatgatcacgtggctgtcctgctctgcctggtggttttctttctggcgatgctcgtgctgatggccgtcctttacgtgcatatgctggctcgggcctgtcagcacgcccagggcatcgctcgcctccataaaagacagcggcctgttcaccaaggcttcgggctgaagggagccgtgacacttaccattctgctcggcatctttttcctgtgctgggggccctttttcctgcacctcacgctgatcgtcctttgtcctgagcatcctacctgcggatgtatttttaaaaatttcaacctgttcctcgcgctgatcatttgcaatgctatcattgaccccctgatccacgcctttcattcccaggaacttcgcagaacactcaaggaggtgctgacctgcagctggtga

SEQ ID NO: 2652 - protein, 317 aa, synthetic construct [sequence omitted]

SEQ ID NO: 2653 - RNA, 954 nt, synthetic construct
  misc_feature 1..954: note = MC1_R__Homo_sapiens__AHC09527
  source 1..954: mol_type = other RNA
atggctgtgcagggatcccagagaagacttctgggctccctcaactccacccccacagccatcccccagctggggctggctgccaaccagacaggagcccggtgcctggaggtgtccatctctgacgggctcttcctcagcctggggctggtgagcttggtggagaacgcgctggtggtggccaccatcgccaagaaccggaacctgcactcacccatgtactgcttcatctgctgcctggccttgtcggacctgctggtgagcgggagcaacgtgctggagacggccgtcatcctcctgctggaggccggtgcactggtggcccgggctgcggtgctgcagcagctggacaatgtcattgacgtgatcacctgcagctccatgctgtccagcctctgcttcctgggcgccatcgccgtggaccgctacatctccatcttctacgcactgcgctaccacagcatcgtgaccctgccgcgggcgcggcgagccgttgcggccatctgggtggccagtgtcgtcttcagcacgctcttcatcgcctactacgaccacgtggccgtcctgctgtgcctcgtggtcttcttcctggctatgctggtgctcatggccgtgctgtacgtccacatgctggcccgggcctgccagcacgcccagggcatcgcccggctccacaagaggcagcgcccggtccaccagggctttggccttaaaggcgctgtcaccctcaccatcctgctgggcattttcttcctctgctggggccccttcttcctgcatctcacactcatcgtcctctgccccgagcaccccacgtgcggctgcatcttcaagaacttcaacctctttctcgccctcatcatctgcaatgccatcatccaccccctcatctacgccttccacagccaggagctccgcaggacgctcaaggaggtgctgacatgctcctggtga

SEQ ID NO: 2654 - RNA, 954 nt, synthetic construct
  misc_feature 1..954: note = derived and/or modified sequence opt1 fromMC1_R__Homo_sapiens__AHC09527
  source 1..954: mol_type = other RNA
atggccgtgcagggcagccagcgccggctgctcgggtccctgaacagcacccccaccgccatcccccagctgggcctcgcggccaaccagacgggggcccgctgcctggaggtctccatcagcgacggcctgttcctctccctggggctggtgagcctcgtggagaacgccctggtcgtggccaccatcgcgaagaaccggaacctgcactcccccatgtactgcttcatctgctgcctcgccctgagcgacctgctcgtgtccggcagcaacgtcctggagaccgccgtgatcctgctcctggaggccggcgcgctggtggcccgcgccgccgtcctccagcagctggacaacgtgatcgacgtgatcacgtgctccagcatgctgtccagcctctgcttcctgggggccatcgcggtcgaccggtacatctccatcttctacgccctgcgctaccacagcatcgtgaccctcccccgggcccgccgggccgtggccgcgatctgggtcgcctccgtggtgttcagcaccctgttcatcgcctactacgaccacgtcgccgtgctgctctgcctggtggtcttcttcctggccatgctcgtgctgatggcggtgctgtacgtccacatgctcgcccgcgcctgccagcacgcccagggcatcgcccggctgcacaagcgccagcggcccgtgcaccaggggttcggcctgaagggggcggtcaccctcaccatcctgctgggcatcttcttcctctgctggggcccgttcttcctgcacctgacgctcatcgtgctgtgccccgagcacccgacctgcgggtgcatcttcaagaacttcaacctgttcctcgccctgatcatctgcaacgccatcatccaccccctgatctacgccttccactcccaggagctgcgccggaccctcaaggaggtgctgacctgcagctggtga

SEQ ID NO: 2655 - RNA, 954 nt, synthetic construct
  misc_feature 1..954: note = derived and/or modified sequence opt2 fromMC1_R__Homo_sapiens__AHC09527
  source 1..954: mol_type = other RNA
atggccgtccagggctcccagcgccgcctcctcggctccctcaactccacccccaccgccatcccccagctcggcctcgccgccaaccagaccggcgcccgctgcctcgaggtctccatctccgacggcctcttcctctccctcggcctcgtctccctcgtcgagaacgccctcgtcgtcgccaccatcgccaagaaccgcaacctccactcccccatgtactgcttcatctgctgcctcgccctctccgacctcctcgtctccggctccaacgtcctcgagaccgccgtcatcctcctcctcgaggccggcgccctcgtcgcccgcgccgccgtcctccagcagctcgacaacgtcatcgacgtcatcacctgctcctccatgctctcctccctctgcttcctcggcgccatcgccgtcgaccgctacatctccatcttctacgccctccgctaccactccatcgtcaccctcccccgcgcccgccgcgccgtcgccgccatctgggtcgcctccgtcgtcttctccaccctcttcatcgcctactacgaccacgtcgccgtcctcctctgcctcgtcgtcttcttcctcgccatgctcgtcctcatggccgtcctctacgtccacatgctcgcccgcgcctgccagcacgcccagggcatcgcccgcctccacaagcgccagcgccccgtccaccagggcttcggcctcaagggcgccgtcaccctcaccatcctcctcggcatcttcttcctctgctggggccccttcttcctccacctcaccctcatcgtcctctgccccgagcaccccacctgcggctgcatcttcaagaacttcaacctcttcctcgccctcatcatctgcaacgccatcatccaccccctcatctacgccttccactcccaggagctccgccgcaccctcaaggaggtcctcacctgctcctggtga

SEQ ID NO: 2656 - RNA, 954 nt, synthetic construct
  misc_feature 1..954: note = derived and/or modified sequence opt3 fromMC1_R__Homo_sapiens__AHC09527
  source 1..954: mol_type = other RNA
atggccgtgcagggcagccaaagaaggctgctcgggtcccttaactctacccccacagctatccctcagctgggattggcagccaatcagactggtgcgcggtgcttagaggtctcaattagtgacggcctgttcctaagcctcgggctggtttcccttgtggaaaacgctctggtagtggccacgatagcaaagaatcgcaacttgcactctccaatgtactgttttatctgctgtctcgccctgtcggatctgctcgtctcaggaagcaatgtgttagagaccgctgttattctgcttttggaagcaggcgccctggtggctcgagccgcggtcctacagcaactcgacaacgtgatcgatgtaattacatgcagttccatgctgtctagcctttgtttcctgggtgcaatcgccgttgaccgttatatatccatcttttacgctttgagatatcattcaattgtgactctcccgagggcccggcgcgcagtcgctgccatctgggtggcgagtgtggtcttcagcaccctgtttattgcctactatgatcacgttgcagtgttactgtgcctcgtagtgttctttcttgctatgctggtcttgatggccgtgctatacgttcatatgctggctagagcctgtcagcacgcacaggggatcgccaggctccataaacggcagcgccccgtgcaccaaggattcggcctgaagggcgctgtcacacttaccatactgttggggatctttttcctctgctggggaccatttttcctgcacttaactctgattgtgctatgtcctgagcatcccacatgcggttgtatttttaaaaatttcaacctcttcctggcgcttatcatctgcaatgcaattatacaccctttgatctatgcctttcattctcaggaactgcgaagaaccctcaaggaggtactgacgtgctcctggtga

SEQ ID NO: 2657 - RNA, 954 nt, synthetic construct
  misc_feature 1..954: note = derived and/or modified sequence opt4 fromMC1_R__Homo_sapiens__AHC09527
  source 1..954: mol_type = other RNA
atggccgtgcagggcagccagagaagactgctgggcagcctgaacagcacccccaccgccatcccccagctgggcctggccgccaaccagaccggcgccagatgcctggaggtgagcatcagcgacggcctgttcctgagcctgggcctggtgagcctggtggagaacgccctggtggtggccaccatcgccaagaacagaaacctgcacagccccatgtactgcttcatctgctgcctggccctgagcgacctgctggtgagcggcagcaacgtgctggagaccgccgtgatcctgctgctggaggccggcgccctggtggccagagccgccgtgctgcagcagctggacaacgtgatcgacgtgatcacctgcagcagcatgctgagcagcctgtgcttcctgggcgccatcgccgtggacagatacatcagcatcttctacgccctgagataccacagcatcgtgaccctgcccagagccagaagagccgtggccgccatctgggtggccagcgtggtgttcagcaccctgttcatcgcctactacgaccacgtggccgtgctgctgtgcctggtggtgttcttcctggccatgctggtgctgatggccgtgctgtacgtgcacatgctggccagagcctgccagcacgcccagggcatcgccagactgcacaagagacagagacccgtgcaccagggcttcggcctgaagggcgccgtgaccctgaccatcctgctgggcatcttcttcctgtgctggggccccttcttcctgcacctgaccctgatcgtgctgtgccccgagcaccccacctgcggctgcatcttcaagaacttcaacctgttcctggccctgatcatctgcaacgccatcatccaccccctgatctacgccttccacagccaggagctgagaagaaccctgaaggaggtgctgacctgcagctggtga

SEQ ID NO: 2658 - RNA, 954 nt, synthetic construct
  misc_feature 1..954: note = derived and/or modified sequence opt5 fromMC1_R__Homo_sapiens__AHC09527
  source 1..954: mol_type = other RNA
atggccgtgcagggcagccaaagacggctgctcgggtccctgaactctacccccacagctatccctcagcttggactggccgcgaatcagacgggcgctcgctgcctcgaggtcagcatttccgacgggctgttcctttctctgggactcgttagcctggtggaaaacgccctggtggtcgccaccatcgctaagaatagaaacctccactccccgatgtactgttttatttgctgtctggccctttctgatctgctcgtgagcggctccaatgttctggagacagctgtgatccttctgctcgaagccggggcgctggtcgcccgggctgccgtgctgcagcaactcgacaacgttattgatgtgattacctgcagctctatgctgtccagcctttgtttcctgggagctatcgccgtcgaccgctatatctctatcttttacgcgctcagatatcattccattgtgacactgccccgggcccgcagagctgtggccgctatctgggtcgccagcgttgtgttctctaccctttttattgcctactatgatcacgtggctgtcctgctctgcctggtggttttctttctggcgatgctcgtgctgatggccgtcctttacgtgcatatgctggctcgggcctgtcagcacgcccagggcatcgctcgcctccataaaagacagcggcctgttcaccaaggcttcgggctgaagggagccgtgacacttaccattctgctcggcatctttttcctgtgctgggggccctttttcctgcacctcacgctgatcgtcctttgtcctgagcatcctacctgcggatgtatttttaaaaatttcaacctgttcctcgcgctgatcatttgcaatgctatcattcaccccctgatctatgcctttcattcccaggaacttcgcagaacactcaaggaggtgctgacctgcagctggtga

SEQ ID NO: 2659 - protein, 317 aa, synthetic construct [sequence omitted]

SEQ ID NO: 2660 - RNA, 954 nt, synthetic construct
  misc_feature 1..954: note = MC1_R__Homo_sapiens__AHC10869
  source 1..954: mol_type = other RNA
atggctgtgcagggatcccagagaagacttctgggctccctcaactccacccccacagccatcccccagctggggctggctgccaaccagacaggagcccggtgcctggaggtgtccatctctgacgggctcttcctcagcctggggctggtgagcttggtggagaacgcgctggtggtggccaccatcgccaagaaccggaacctgcactcacccatgtactgcttcatctgctgcctggccttgtcggacctgctggtgagcgggagcaacgtgctggagacggccgtcatcctcctgctggaggccggtgcactggtggcccgggctgcggtgctgcagcagctggacaatgtcattgacgtgatcacctgcagctccatgctgtccagcctctgcttcctgggcgccatcgccgtggaccgctacatctccatcttctacgcactgcgctaccacagcatcgtgaccctgccgcgggcgcggcgagccgttgcggccatctgggtggccagtgtcgtcttcagcacgctcttcatcgcctactacgaccacgtggccgtcctgctgtgcctcgtggtcttcttcctggctatgctggtgctcatggccgtgctgtacgtccacatgctggcccgggcctgccagcacgcccagggcatcgcccggctccacaagaggcagcacccggtccaccagggctttggccttaaaggcgctgtcaccctcaccatcctgctgggcattttcttcctctgctggggccccttcttcctgcatctcacactcatcgtcctctgccccgagcaccccacgtgcggctgcatcttcaagaacttcaacctctttctcgccctcatcatctgcaatgccatcatcgaccccctcatctacgccttccacagccaggagctccgcaggacgctcaaggaggtgctgacatgctcctggtga

SEQ ID NO: 2661 - RNA, 954 nt, synthetic construct
  misc_feature 1..954: note = derived and/or modified sequence opt1 fromMC1_R__Homo_sapiens__AHC10869
  source 1..954: mol_type = other RNA
atggccgtgcagggcagccagcgccggctgctcgggtccctgaacagcacccccaccgccatcccccagctgggcctcgcggccaaccagacgggggcccgctgcctggaggtctccatcagcgacggcctgttcctctccctggggctggtgagcctcgtggagaacgccctggtcgtggccaccatcgcgaagaaccggaacctgcactcccccatgtactgcttcatctgctgcctcgccctgagcgacctgctcgtgtccggcagcaacgtcctggagaccgccgtgatcctgctcctggaggccggcgcgctggtggcccgcgccgccgtcctccagcagctggacaacgtgatcgacgtgatcacgtgctccagcatgctgtccagcctctgcttcctgggggccatcgcggtcgaccggtacatctccatcttctacgccctgcgctaccacagcatcgtgaccctcccccgggcccgccgggccgtggccgcgatctgggtcgcctccgtggtgttcagcaccctgttcatcgcctactacgaccacgtcgccgtgctgctctgcctggtggtcttcttcctggccatgctcgtgctgatggcggtgctgtacgtccacatgctcgcccgcgcctgccagcacgcccagggcatcgcccggctgcacaagcgccagcaccccgtgcaccaggggttcggcctgaagggggcggtcaccctcaccatcctgctgggcatcttcttcctctgctggggcccgttcttcctgcacctgacgctcatcgtgctgtgccccgagcacccgacctgcgggtgcatcttcaagaacttcaacctgttcctcgccctgatcatctgcaacgccatcatcgaccccctgatctacgccttccactcccaggagctgcggcgcaccctcaaggaggtgctgacctgcagctggtga

SEQ ID NO: 2662 - RNA, 954 nt, synthetic construct
  misc_feature 1..954: note = derived and/or modified sequence opt2 fromMC1_R__Homo_sapiens__AHC10869
  source 1..954: mol_type = other RNA
atggccgtccagggctcccagcgccgcctcctcggctccctcaactccacccccaccgccatcccccagctcggcctcgccgccaaccagaccggcgcccgctgcctcgaggtctccatctccgacggcctcttcctctccctcggcctcgtctccctcgtcgagaacgccctcgtcgtcgccaccatcgccaagaaccgcaacctccactcccccatgtactgcttcatctgctgcctcgccctctccgacctcctcgtctccggctccaacgtcctcgagaccgccgtcatcctcctcctcgaggccggcgccctcgtcgcccgcgccgccgtcctccagcagctcgacaacgtcatcgacgtcatcacctgctcctccatgctctcctccctctgcttcctcggcgccatcgccgtcgaccgctacatctccatcttctacgccctccgctaccactccatcgtcaccctcccccgcgcccgccgcgccgtcgccgccatctgggtcgcctccgtcgtcttctccaccctcttcatcgcctactacgaccacgtcgccgtcctcctctgcctcgtcgtcttcttcctcgccatgctcgtcctcatggccgtcctctacgtccacatgctcgcccgcgcctgccagcacgcccagggcatcgcccgcctccacaagcgccagcaccccgtccaccagggcttcggcctcaagggcgccgtcaccctcaccatcctcctcggcatcttcttcctctgctggggccccttcttcctccacctcaccctcatcgtcctctgccccgagcaccccacctgcggctgcatcttcaagaacttcaacctcttcctcgccctcatcatctgcaacgccatcatcgaccccctcatctacgccttccactcccaggagctccgccgcaccctcaaggaggtcctcacctgctcctggtga

SEQ ID NO: 2663 - RNA, 954 nt, synthetic construct
  misc_feature 1..954: note = derived and/or modified sequence opt3 fromMC1_R__Homo_sapiens__AHC10869
  source 1..954: mol_type = other RNA
atggccgtgcagggcagccaaagaaggctgctcgggtcccttaactctacccccacagctatccctcagctgggattggcagccaatcagactggtgcgcggtgcttagaggtctcaattagtgacggcctgttcctaagcctcgggctggtttcccttgtggaaaacgctctggtagtggccacgatagcaaagaatcgcaacttgcactctccaatgtactgttttatctgctgtctcgccctgtcggatctgctcgtctcaggaagcaatgtgttagagaccgctgttattctgcttttggaagcaggcgccctggtggctcgagccgcggtcctacagcaactcgacaacgtgatcgatgtaattacatgcagttccatgctgtctagcctttgtttcctgggtgcaatcgccgttgaccgttatatatccatcttttacgctttgagatatcattcaattgtgactctcccgagggcccggcgcgcagtcgctgccatctgggtggcgagtgtggtcttcagcaccctgtttattgcctactatgatcacgttgcagtgttactgtgcctcgtagtgttctttcttgctatgctggtcttgatggccgtgctatacgttcatatgctggctagagcctgtcagcacgcacaggggatcgccaggctccataaacggcagcaccccgtgcaccaaggattcggcctgaagggcgctgtcacacttaccatactgttggggatctttttcctctgctggggaccatttttcctgcatttaactctgattgtgctatgtcctgagcaccccacatgcggttgtatttttaaaaatttcaacctcttcctggcgcttatcatctgcaatgcaattatagaccctttgatctatgcctttcattctcaggaactgcgccgaaccctcaaggaggtactgacgtgctcctggtga

SEQ ID NO: 2664 - RNA, 954 nt, synthetic construct
  misc_feature 1..954: note = derived and/or modified sequence opt4 fromMC1_R__Homo_sapiens__AHC10869
  source 1..954: mol_type = other RNA
atggccgtgcagggcagccagagaagactgctgggcagcctgaacagcacccccaccgccatcccccagctgggcctggccgccaaccagaccggcgccagatgcctggaggtgagcatcagcgacggcctgttcctgagcctgggcctggtgagcctggtggagaacgccctggtggtggccaccatcgccaagaacagaaacctgcacagccccatgtactgcttcatctgctgcctggccctgagcgacctgctggtgagcggcagcaacgtgctggagaccgccgtgatcctgctgctggaggccggcgccctggtggccagagccgccgtgctgcagcagctggacaacgtgatcgacgtgatcacctgcagcagcatgctgagcagcctgtgcttcctgggcgccatcgccgtggacagatacatcagcatcttctacgccctgagataccacagcatcgtgaccctgcccagagccagaagagccgtggccgccatctgggtggccagcgtggtgttcagcaccctgttcatcgcctactacgaccacgtggccgtgctgctgtgcctggtggtgttcttcctggccatgctggtgctgatggccgtgctgtacgtgcacatgctggccagagcctgccagcacgcccagggcatcgccagactgcacaagagacagcaccccgtgcaccagggcttcggcctgaagggcgccgtgaccctgaccatcctgctgggcatcttcttcctgtgctggggccccttcttcctgcacctgaccctgatcgtgctgtgccccgagcaccccacctgcggctgcatcttcaagaacttcaacctgttcctggccctgatcatctgcaacgccatcatcgaccccctgatctacgccttccacagccaggagctgagaagaaccctgaaggaggtgctgacctgcagctggtga

SEQ ID NO: 2665 - RNA, 954 nt, synthetic construct
  misc_feature 1..954: note = derived and/or modified sequence opt5 fromMC1_R__Homo_sapiens__AHC10869
  source 1..954: mol_type = other RNA
atggccgtgcagggcagccaaagacggctgctcgggtccctgaactctacccccacagctatccctcagcttggactggccgcgaatcagacgggcgctcgctgcctcgaggtcagcatttccgacgggctgttcctttctctgggactcgttagcctggtggaaaacgccctggtggtcgccaccatcgctaagaatagaaacctccactccccgatgtactgttttatttgctgtctggccctttctgatctgctcgtgagcggctccaatgttctggagacagctgtgatccttctgctcgaagccggggcgctggtcgcccgggctgccgtgctgcagcaactcgacaacgttattgatgtgattacctgcagctctatgctgtccagcctttgtttcctgggagctatcgccgtcgaccgctatatctctatcttttacgcgctcagatatcattccattgtgacactgccccgggcccgcagagctgtggccgctatctgggtcgccagcgttgtgttctctaccctttttattgcctactatgatcacgtggctgtcctgctctgcctggtggttttctttctggcgatgctcgtgctgatggccgtcctttacgtgcatatgctggctcgggcctgtcagcacgcccagggcatcgctcgcctccataaaagacagcaccctgttcaccaaggcttcgggctgaagggagccgtgacacttaccattctgctcggcatctttttcctgtgctgggggccctttttcctgcatctcacgctgatcgtcctttgtcctgagcaccctacctgcggatgtatttttaaaaatttcaacctgttcctcgcgctgatcatttgcaatgctatcattgaccccctgatctatgcctttcattcccaggaacttcggcgcacactcaaggaggtgctgacctgcagctggtga

SEQ ID NO: 2666 - protein, 317 aa, synthetic construct [sequence omitted]

SEQ ID NO: 2667 - RNA, 954 nt, synthetic construct
  misc_feature 1..954: note = MC1_R__Homo_sapiens__AHC11615
  source 1..954: mol_type = other RNA
atggctgtgcagggatcccagagaagacttctgggctccctcaactccacccccacagccatcccccagctggggctggctgccaaccagacaggagcccggtgcctggaggtgtccatctctgacgggctcttcctcagcctggggctggtgagcttggtggagaacgcgctggtggtggccaccatcgccaagaaccggaacctgcactcacccatgtactgcttcatctgctgcctggccttgtcggacctgctggtgagcgggagcaacgtgctggagacggccgtcatcctcctgctggaggccggtgcactggtggcccgggctgcggtgctgcagcagctggacaatgtcattgacgtgatcacctgcagctccatgctgtccagcctctgcttcctgggcgccatcgccgtggaccgctacatctccatcttctacgcactgcgctaccacagcatcgtgaccctgccgcgggcgcggcgagccgttgcggccatctgggtggccagtgtcgtcttcagcacgctcttcatcgcctactacgaccacgtggccgtcctgctgtgcctcgtggtcttcttcctggctatgctggtgctcatggccgtgctgtacgtccacatgctggcccgggcctgccagcacgcccagggcatcgcccggctccacaagaggcagcgcccggtccaccagggctttggccttaaaggcgctgtcaccctcaccatcctgctgggcattttcttcctctgctggggccccttcttcctgcatctcacactcatcgtcctctgccccgagcaccccacgtgcggctgcatcttcaagaacttcaacctctttctcaccctcatcatctgcaatgccatcatcgaccccctcatctacgccttccacagccaggagctccgcaggacgctcaaggaggtgctgacatgctcctggtga

SEQ ID NO: 2668 - RNA, 954 nt, synthetic construct
  misc_feature 1..954: note = derived and/or modified sequence opt1 fromMC1_R__Homo_sapiens__AHC11615
  source 1..954: mol_type = other RNA
atggccgtgcagggcagccagcgccggctgctcgggtccctgaacagcacccccaccgccatcccccagctgggcctcgcggccaaccagacgggggcccgctgcctggaggtctccatcagcgacggcctgttcctctccctggggctggtgagcctcgtggagaacgccctggtcgtggccaccatcgcgaagaaccggaacctgcactcccccatgtactgcttcatctgctgcctcgccctgagcgacctgctcgtgtccggcagcaacgtcctggagaccgccgtgatcctgctcctggaggccggcgcgctggtggcccgcgccgccgtcctccagcagctggacaacgtgatcgacgtgatcacgtgctccagcatgctgtccagcctctgcttcctgggggccatcgcggtcgaccggtacatctccatcttctacgccctgcgctaccacagcatcgtgaccctcccccgggcccgccgggccgtggccgcgatctgggtcgcctccgtggtgttcagcaccctgttcatcgcctactacgaccacgtcgccgtgctgctctgcctggtggtcttcttcctggccatgctcgtgctgatggcggtgctgtacgtccacatgctcgcccgcgcctgccagcacgcccagggcatcgcccggctgcacaagcgccagcggcccgtgcaccaggggttcggcctgaagggggcggtcaccctcaccatcctgctgggcatcttcttcctctgctggggcccgttcttcctgcacctgacgctcatcgtgctgtgccccgagcacccgacctgcgggtgcatcttcaagaacttcaacctgttcctcaccctgatcatctgcaacgccatcatcgaccccctgatctacgccttccactcccaggagctgcgccggaccctcaaggaggtgctgacgtgcagctggtga

SEQ ID NO: 2669 - RNA, 954 nt, synthetic construct
  misc_feature 1..954: note = derived and/or modified sequence opt2 fromMC1_R__Homo_sapiens__AHC11615
  source 1..954: mol_type = other RNA
atggccgtccagggctcccagcgccgcctcctcggctccctcaactccacccccaccgccatcccccagctcggcctcgccgccaaccagaccggcgcccgctgcctcgaggtctccatctccgacggcctcttcctctccctcggcctcgtctccctcgtcgagaacgccctcgtcgtcgccaccatcgccaagaaccgcaacctccactcccccatgtactgcttcatctgctgcctcgccctctccgacctcctcgtctccggctccaacgtcctcgagaccgccgtcatcctcctcctcgaggccggcgccctcgtcgcccgcgccgccgtcctccagcagctcgacaacgtcatcgacgtcatcacctgctcctccatgctctcctccctctgcttcctcggcgccatcgccgtcgaccgctacatctccatcttctacgccctccgctaccactccatcgtcaccctcccccgcgcccgccgcgccgtcgccgccatctgggtcgcctccgtcgtcttctccaccctcttcatcgcctactacgaccacgtcgccgtcctcctctgcctcgtcgtcttcttcctcgccatgctcgtcctcatggccgtcctctacgtccacatgctcgcccgcgcctgccagcacgcccagggcatcgcccgcctccacaagcgccagcgccccgtccaccagggcttcggcctcaagggcgccgtcaccctcaccatcctcctcggcatcttcttcctctgctggggccccttcttcctccacctcaccctcatcgtcctctgccccgagcaccccacctgcggctgcatcttcaagaacttcaacctcttcctcaccctcatcatctgcaacgccatcatcgaccccctcatctacgccttccactcccaggagctccgccgcaccctcaaggaggtcctcacctgctcctggtga

SEQ ID NO: 2670 - RNA, 954 nt, synthetic construct
  misc_feature 1..954: note = derived and/or modified sequence opt3 fromMC1_R__Homo_sapiens__AHC11615
  source 1..954: mol_type = other RNA
atggccgtgcagggcagccaaagaaggctgctcgggtcccttaactctacccccacagctatccctcagctgggattggcagccaatcagactggtgcgcggtgcttagaggtctcaattagtgacggcctgttcctaagcctcgggctggtttcccttgtggaaaacgctctggtagtggccacgatagcaaagaatcgcaacttgcactctccaatgtactgttttatctgctgtctcgccctgtcggatctgctcgtctcaggaagcaatgtgttagagaccgctgttattctgcttttggaagcaggcgccctggtggctcgagccgcggtcctacagcaactcgacaacgtgatcgatgtaattacatgcagttccatgctgtctagcctttgtttcctgggtgcaatcgccgttgaccgttatatatccatcttttacgctttgagatatcattcaattgtgactctcccgagggcccggcgcgcagtcgctgccatctgggtggcgagtgtggtcttcagcaccctgtttattgcctactatgatcacgttgcagtgttactgtgcctcgtagtgttctttcttgctatgctggtcttgatggccgtgctatacgttcatatgctggctagagcctgtcagcacgcacaggggatcgccaggctccataaacggcagcgccccgtgcaccaaggattcggcctgaagggcgctgtcacacttaccatactgttggggatctttttcctctgctggggaccatttttcctgcacttaactctgattgtgctatgtcctgagcatcccacatgcggttgtatttttaaaaatttcaacctcttcctgacccttatcatctgcaatgcgattatagaccctttgatctatgcatttcactctcaggaactgcgaagaacgctcaaggaggtactgacttgctcctggtga

SEQ ID NO: 2671 - RNA, 954 nt, synthetic construct
  misc_feature 1..954: note = derived and/or modified sequence opt4 fromMC1_R__Homo_sapiens__AHC11615
  source 1..954: mol_type = other RNA
atggccgtgcagggcagccagagaagactgctgggcagcctgaacagcacccccaccgccatcccccagctgggcctggccgccaaccagaccggcgccagatgcctggaggtgagcatcagcgacggcctgttcctgagcctgggcctggtgagcctggtggagaacgccctggtggtggccaccatcgccaagaacagaaacctgcacagccccatgtactgcttcatctgctgcctggccctgagcgacctgctggtgagcggcagcaacgtgctggagaccgccgtgatcctgctgctggaggccggcgccctggtggccagagccgccgtgctgcagcagctggacaacgtgatcgacgtgatcacctgcagcagcatgctgagcagcctgtgcttcctgggcgccatcgccgtggacagatacatcagcatcttctacgccctgagataccacagcatcgtgaccctgcccagagccagaagagccgtggccgccatctgggtggccagcgtggtgttcagcaccctgttcatcgcctactacgaccacgtggccgtgctgctgtgcctggtggtgttcttcctggccatgctggtgctgatggccgtgctgtacgtgcacatgctggccagagcctgccagcacgcccagggcatcgccagactgcacaagagacagagacccgtgcaccagggcttcggcctgaagggcgccgtgaccctgaccatcctgctgggcatcttcttcctgtgctggggccccttcttcctgcacctgaccctgatcgtgctgtgccccgagcaccccacctgcggctgcatcttcaagaacttcaacctgttcctgaccctgatcatctgcaacgccatcatcgaccccctgatctacgccttccacagccaggagctgagaagaaccctgaaggaggtgctgacctgcagctggtga

SEQ ID NO: 2672 - RNA, 954 nt, synthetic construct
  misc_feature 1..954: note = derived and/or modified sequence opt5 fromMC1_R__Homo_sapiens__AHC11615
  source 1..954: mol_type = other RNA
atggccgtgcagggcagccaaagacggctgctcgggtccctgaactctacccccacagctatccctcagcttggactggccgcgaatcagacgggcgctcgctgcctcgaggtcagcatttccgacgggctgttcctttctctgggactcgttagcctggtggaaaacgccctggtggtcgccaccatcgctaagaatagaaacctccactccccgatgtactgttttatttgctgtctggccctttctgatctgctcgtgagcggctccaatgttctggagacagctgtgatccttctgctcgaagccggggcgctggtcgcccgggctgccgtgctgcagcaactcgacaacgttattgatgtgattacctgcagctctatgctgtccagcctttgtttcctgggagctatcgccgtcgaccgctatatctctatcttttacgcgctcagatatcattccattgtgacactgccccgggcccgcagagctgtggccgctatctgggtcgccagcgttgtgttctctaccctttttattgcctactatgatcacgtggctgtcctgctctgcctggtggttttctttctggcgatgctcgtgctgatggccgtcctttacgtgcatatgctggctcgggcctgtcagcacgcccagggcatcgctcgcctccataaaagacagcggcctgttcaccaaggcttcgggctgaagggagccgtgacacttaccattctgctcggcatctttttcctgtgctgggggccctttttcctgcacctcacgctgatcgtcctttgtcctgagcatcctacctgcggatgtatttttaaaaatttcaacctgttcctcacactgatcatttgcaatgcgatcattgaccccctgatctatgcttttcactcccaggaacttcgcagaaccctcaaggaggtgctgacatgcagctggtga

SEQ ID NO: 2673 - protein, 317 aa, synthetic construct [sequence omitted]

SEQ ID NO: 2674 - RNA, 954 nt, synthetic construct
  misc_feature 1..954: note = MC1_R__Homo_sapiens__AHC09535
  source 1..954: mol_type = other RNA
atggctgtgcagggatcccagagaagacttctgggctccctcaactccacccccacagccatcccccagctggggctggctgccaaccagacaggagcccggtgcctggaggtgtccatctctgacgggctcttcctcagcctggggctggtgagcttggtggagaacgcgctggtggtggccaccatcgccaagaaccggaacctgcactcacccatgtactgcttcatctgctgcctggccttgtcggacctgctggtgagcgggagcaacgtgctggagacggccgtcatcctcctgctggaggccggtgcactggtggcccgggctgcggtgctgcagcagctggacaatgtcattgacgtgatcacctgcagctccatgctgtccagcctctgcttcctgggcgccatcgccgtggaccactacatctccatcttctacgcactgcgctaccacagcatcgtgaccctgccgcgggcgcggcgagccgttgcggccatctgggtggccagtgtcgtcttcagcacgctcttcatcgcctactacgaccacgtggccgtcctgctgtgcctcgtggtcttcttcctggctatgctggtgctcatggccgtgctgtacgtccacatgctggcccgggcctgccagcacgcccagggcatcgcccggctccacaagaggcagcgcccggtccaccagggctttggccttaaaggcgctgtcaccctcaccatcctgctgggcattttcttcctctgctggggccccttcttcctgcatctcacactcatcgtcctctgccccgagcaccccacgtgcggctgcatcttcaagaacttcaacctctttctcgccctcatcatctgcaatgccatcatcgaccccctcatctacgccttccacagccaggagctccgcaggacgctcaaggaggtgctgacatgctcctggtga

SEQ ID NO: 2675 - RNA, 954 nt, synthetic construct
  misc_feature 1..954: note = derived and/or modified sequence opt1 fromMC1_R__Homo_sapiens__AHC09535
  source 1..954: mol_type = other RNA
atggccgtgcagggcagccagcgccggctgctcgggtccctgaacagcacccccaccgccatcccccagctgggcctcgcggccaaccagacgggggcccgctgcctggaggtctccatcagcgacggcctgttcctctccctggggctggtgagcctcgtggagaacgccctggtcgtggccaccatcgcgaagaaccggaacctgcactcccccatgtactgcttcatctgctgcctcgccctgagcgacctgctcgtgtccggcagcaacgtcctggagaccgccgtgatcctgctcctggaggccggcgcgctggtggcccgcgccgccgtcctccagcagctggacaacgtgatcgacgtgatcacgtgctccagcatgctgtccagcctctgcttcctgggggccatcgcggtcgaccactacatctccatcttctacgccctgcggtaccacagcatcgtgaccctcccccgcgcccggcgcgccgtggccgcgatctgggtcgcctccgtggtgttcagcaccctgttcatcgcctactacgaccacgtcgccgtgctgctctgcctggtggtcttcttcctggccatgctcgtgctgatggcggtgctgtacgtccacatgctcgcccgggcctgccagcacgcccagggcatcgcccgcctgcacaagcggcagcgccccgtgcaccaggggttcggcctgaagggggcggtcaccctcaccatcctgctgggcatcttcttcctctgctggggcccgttcttcctgcacctgacgctcatcgtgctgtgccccgagcacccgacctgcgggtgcatcttcaagaacttcaacctgttcctcgccctgatcatctgcaacgccatcatcgaccccctgatctacgccttccactcccaggagctgcggcgcaccctcaaggaggtgctgacctgcagctggtga

SEQ ID NO: 2676 - RNA, 954 nt, synthetic construct
  misc_feature 1..954: note = derived and/or modified sequence opt2 fromMC1_R__Homo_sapiens__AHC09535
  source 1..954: mol_type = other RNA
atggccgtccagggctcccagcgccgcctcctcggctccctcaactccacccccaccgccatcccccagctcggcctcgccgccaaccagaccggcgcccgctgcctcgaggtctccatctccgacggcctcttcctctccctcggcctcgtctccctcgtcgagaacgccctcgtcgtcgccaccatcgccaagaaccgcaacctccactcccccatgtactgcttcatctgctgcctcgccctctccgacctcctcgtctccggctccaacgtcctcgagaccgccgtcatcctcctcctcgaggccggcgccctcgtcgcccgcgccgccgtcctccagcagctcgacaacgtcatcgacgtcatcacctgctcctccatgctctcctccctctgcttcctcggcgccatcgccgtcgaccactacatctccatcttctacgccctccgctaccactccatcgtcaccctcccccgcgcccgccgcgccgtcgccgccatctgggtcgcctccgtcgtcttctccaccctcttcatcgcctactacgaccacgtcgccgtcctcctctgcctcgtcgtcttcttcctcgccatgctcgtcctcatggccgtcctctacgtccacatgctcgcccgcgcctgccagcacgcccagggcatcgcccgcctccacaagcgccagcgccccgtccaccagggcttcggcctcaagggcgccgtcaccctcaccatcctcctcggcatcttcttcctctgctggggccccttcttcctccacctcaccctcatcgtcctctgccccgagcaccccacctgcggctgcatcttcaagaacttcaacctcttcctcgccctcatcatctgcaacgccatcatcgaccccctcatctacgccttccactcccaggagctccgccgcaccctcaaggaggtcctcacctgctcctggtga

SEQ ID NO: 2677 - RNA, 954 nt, synthetic construct
  misc_feature 1..954: note = derived and/or modified sequence opt3 fromMC1_R__Homo_sapiens__AHC09535
  source 1..954: mol_type = other RNA
atggccgtgcagggcagccaaagaaggctgctcgggtcccttaactctacccccacagctatccctcagctgggattggcagccaatcagactggtgcgcggtgcttagaggtctcaattagtgacggcctgttcctaagcctcgggctggtttcccttgtggaaaacgctctggtagtggccacgatagcaaagaatcgcaacttgcactctccaatgtactgttttatctgctgtctcgccctgtcggatctgctcgtctcaggaagcaatgtgttagagaccgctgttattctgcttttggaagcaggcgccctggtggctcgagccgcggtcctacagcaactcgacaacgtgatcgatgtaattacatgcagttccatgctgtctagcctttgtttcctgggtgcaatcgccgttgaccattatatatccatcttttacgctttgcgttatcactcaattgtgactctcccgagagccaggcgggcagtcgctgccatctgggtggcgagtgtggtcttcagcaccctgtttattgcctactatgatcatgttgcagtgttactgtgcctcgtagtgttctttcttgctatgctggtcttgatggccgtgctatacgttcacatgctggctcgcgcctgtcagcatgcacaggggatcgccagactccacaaaaggcagcggcccgtgcaccaaggattcggcctgaagggcgctgtcacacttaccatactgttggggatctttttcctctgctggggaccatttttcctgcatttaactctgattgtgctatgtcctgagcaccccacatgcggttgtatttttaaaaatttcaacctcttcctggcgcttatcatctgcaatgcaattatagaccctttgatctatgcctttcattctcaggaactgcgccgaaccctcaaggaggtactgacgtgctcctggtga

SEQ ID NO: 2678 - RNA, 954 nt, synthetic construct
  misc_feature 1..954: note = derived and/or modified sequence opt4 fromMC1_R__Homo_sapiens__AHC09535
  source 1..954: mol_type = other RNA
atggccgtgcagggcagccagagaagactgctgggcagcctgaacagcacccccaccgccatcccccagctgggcctggccgccaaccagaccggcgccagatgcctggaggtgagcatcagcgacggcctgttcctgagcctgggcctggtgagcctggtggagaacgccctggtggtggccaccatcgccaagaacagaaacctgcacagccccatgtactgcttcatctgctgcctggccctgagcgacctgctggtgagcggcagcaacgtgctggagaccgccgtgatcctgctgctggaggccggcgccctggtggccagagccgccgtgctgcagcagctggacaacgtgatcgacgtgatcacctgcagcagcatgctgagcagcctgtgcttcctgggcgccatcgccgtggaccactacatcagcatcttctacgccctgagataccacagcatcgtgaccctgcccagagccagaagagccgtggccgccatctgggtggccagcgtggtgttcagcaccctgttcatcgcctactacgaccacgtggccgtgctgctgtgcctggtggtgttcttcctggccatgctggtgctgatggccgtgctgtacgtgcacatgctggccagagcctgccagcacgcccagggcatcgccagactgcacaagagacagagacccgtgcaccagggcttcggcctgaagggcgccgtgaccctgaccatcctgctgggcatcttcttcctgtgctggggccccttcttcctgcacctgaccctgatcgtgctgtgccccgagcaccccacctgcggctgcatcttcaagaacttcaacctgttcctggccctgatcatctgcaacgccatcatcgaccccctgatctacgccttccacagccaggagctgagaagaaccctgaaggaggtgctgacctgcagctggtga

SEQ ID NO: 2679 - RNA, 954 nt, synthetic construct
  misc_feature 1..954: note = derived and/or modified sequence opt5 fromMC1_R__Homo_sapiens__AHC09535
  source 1..954: mol_type = other RNA
atggccgtgcagggcagccaaagacggctgctcgggtccctgaactctacccccacagctatccctcagcttggactggccgcgaatcagacgggcgctcgctgcctcgaggtcagcatttccgacgggctgttcctttctctgggactcgttagcctggtggaaaacgccctggtggtcgccaccatcgctaagaatagaaacctccactccccgatgtactgttttatttgctgtctggccctttctgatctgctcgtgagcggctccaatgttctggagacagctgtgatccttctgctcgaagccggggcgctggtcgcccgggctgccgtgctgcagcaactcgacaacgttattgatgtgattacctgcagctctatgctgtccagcctttgtttcctgggagctatcgccgtcgaccattatatctctatcttttacgcgctccgctatcactccattgtgacactgcccagagcccggcgcgctgtggccgctatctgggtcgccagcgttgtgttctctaccctttttattgcctactatgatcatgtggctgtcctgctctgcctggtggttttctttctggcgatgctcgtgctgatggccgtcctttacgtgcacatgctggctagagcctgtcagcatgcccagggcatcgctcggctccacaaacgccagagacctgttcaccaaggcttcgggctgaagggagccgtgacacttaccattctgctcggcatctttttcctgtgctgggggccctttttcctgcatctcacgctgatcgtcctttgtcctgagcaccctacctgcggatgtatttttaaaaatttcaacctgttcctcgcgctgatcatttgcaatgctatcattgaccccctgatctatgcctttcattcccaggaacttcggcgcacactcaaggaggtgctgacctgcagctggtga

SEQ ID NO: 2680 - protein, 317 aa, synthetic construct [sequence omitted]

SEQ ID NO: 2681 - RNA, 954 nt, synthetic construct
  misc_feature 1..954: note = MC1_R__Homo_sapiens__AHC11840
  source 1..954: mol_type = other RNA
atggctgtgcagggatcccagagaagacttctgggctccctcaactccacccccacagccatcccccagctggggctggctgccaaccagacaggagcccggtgcctggaggtgtccatctctgacgggctcttcctcagcctggggctggtgagcttggtggagaacgcgctggtggtggccaccatcgccaagaaccggaacctgcactcacccatgtactgcttcatctgctgcctggccttgtcggacctgctggtgagcgggagcaacgtgctggagacggccgtcatcctcctgctggaggccggtgcactggtggcccgggctgcggtgctgcagcagctggacaatgtcattgacgtgatcacctgcagctccatgctgtccagcctctgcttcctgggcgccatcgccgtggaccgctacatctccatcttctacgcactgcgctaccacagcatcgtgaccctgccgcgggcgcggcgagccgttgcggccatctgggtggccagtgtcgtcttcagcacgctcttcatcgcctactacgaccacgtggccgtcctgctgtgcctcgtggtcttcttcctggctatgctggtgctcatggccgtgctgtacgtccacatgctggcccgggcctgccagcacgcccagggcatcgcccggctccacaagaggcagcgcccggtccaccagggctttggccttaaaggcgctgtcaccctcaccatcctgctgggcattttcttcctctgctggggccccttcttcctgcatctcacactcatcgtcctctgccccgagcaccccacgtgcggctgcatcttcaagaacttcaacctctttctcgccctcatcatctgcaatgccatcatcgaccccctcatctacgccttccacaaccaggagctccgcaggacgctcaaggaggtgctgacatgctcctggtga

SEQ ID NO: 2682 - RNA, 954 nt, synthetic construct
  misc_feature 1..954: note = derived and/or modified sequence opt1 fromMC1_R__Homo_sapiens__AHC11840
  source 1..954: mol_type = other RNA
atggccgtgcagggcagccagcgccggctgctcgggtccctgaacagcacccccaccgccatcccccagctgggcctcgcggccaaccagacgggggcccgctgcctggaggtctccatcagcgacggcctgttcctctccctggggctggtgagcctcgtggagaacgccctggtcgtggccaccatcgcgaagaaccggaacctgcactcccccatgtactgcttcatctgctgcctcgccctgagcgacctgctcgtgtccggcagcaacgtcctggagaccgccgtgatcctgctcctggaggccggcgcgctggtggcccgcgccgccgtcctccagcagctggacaacgtgatcgacgtgatcacgtgctccagcatgctgtccagcctctgcttcctgggggccatcgcggtcgaccggtacatctccatcttctacgccctgcgctaccacagcatcgtgaccctcccccgggcccgccgggccgtggccgcgatctgggtcgcctccgtggtgttcagcaccctgttcatcgcctactacgaccacgtcgccgtgctgctctgcctggtggtcttcttcctggccatgctcgtgctgatggcggtgctgtacgtccacatgctcgcccgcgcctgccagcacgcccagggcatcgcccggctgcacaagcgccagcggcccgtgcaccaggggttcggcctgaagggggcggtcaccctcaccatcctgctgggcatcttcttcctctgctggggcccgttcttcctgcacctgacgctcatcgtgctgtgccccgagcacccgacctgcgggtgcatcttcaagaacttcaacctgttcctcgccctgatcatctgcaacgccatcatcgaccccctgatctacgccttccacaaccaggagctgcgccggaccctcaaggaggtgctgacctgctcctggtga

SEQ ID NO: 2683 - RNA, 954 nt, synthetic construct
  misc_feature 1..954: note = derived and/or modified sequence opt2 fromMC1_R__Homo_sapiens__AHC11840
  source 1..954: mol_type = other RNA
atggccgtccagggctcccagcgccgcctcctcggctccctcaactccacccccaccgccatcccccagctcggcctcgccgccaaccagaccggcgcccgctgcctcgaggtctccatctccgacggcctcttcctctccctcggcctcgtctccctcgtcgagaacgccctcgtcgtcgccaccatcgccaagaaccgcaacctccactcccccatgtactgcttcatctgctgcctcgccctctccgacctcctcgtctccggctccaacgtcctcgagaccgccgtcatcctcctcctcgaggccggcgccctcgtcgcccgcgccgccgtcctccagcagctcgacaacgtcatcgacgtcatcacctgctcctccatgctctcctccctctgcttcctcggcgccatcgccgtcgaccgctacatctccatcttctacgccctccgctaccactccatcgtcaccctcccccgcgcccgccgcgccgtcgccgccatctgggtcgcctccgtcgtcttctccaccctcttcatcgcctactacgaccacgtcgccgtcctcctctgcctcgtcgtcttcttcctcgccatgctcgtcctcatggccgtcctctacgtccacatgctcgcccgcgcctgccagcacgcccagggcatcgcccgcctccacaagcgccagcgccccgtccaccagggcttcggcctcaagggcgccgtcaccctcaccatcctcctcggcatcttcttcctctgctggggccccttcttcctccacctcaccctcatcgtcctctgccccgagcaccccacctgcggctgcatcttcaagaacttcaacctcttcctcgccctcatcatctgcaacgccatcatcgaccccctcatctacgccttccacaaccaggagctccgccgcaccctcaaggaggtcctcacctgctcctggtga

SEQ ID NO: 2684 - RNA, 954 nt, synthetic construct
  misc_feature 1..954: note = derived and/or modified sequence opt3 fromMC1_R__Homo_sapiens__AHC11840
  source 1..954: mol_type = other RNA
atggccgtgcagggcagccaaagaaggctgctcgggtcccttaactctacccccacagctatccctcagctgggattggcagccaatcagactggtgcgcggtgcttagaggtctcaattagtgacggcctgttcctaagcctcgggctggtttcccttgtggaaaacgctctggtagtggccacgatagcaaagaatcgcaacttgcactctccaatgtactgttttatctgctgtctcgccctgtcggatctgctcgtctcaggaagcaatgtgttagagaccgctgttattctgcttttggaagcaggcgccctggtggctcgagccgcggtcctacagcaactcgacaacgtgatcgatgtaattacatgcagttccatgctgtctagcctttgtttcctgggtgcaatcgccgttgaccgttatatatccatcttttacgctttgagatatcattcaattgtgactctcccgagggcccggcgcgcagtcgctgccatctgggtggcgagtgtggtcttcagcaccctgtttattgcctactatgatcacgttgcagtgttactgtgcctcgtagtgttctttcttgctatgctggtcttgatggccgtgctatacgttcatatgctggctagagcctgtcagcacgcacaggggatcgccaggctccataaacggcagcgccccgtgcaccaaggattcggcctgaagggcgctgtcacacttaccatactgttggggatctttttcctctgctggggaccatttttcctgcacttaactctgattgtgctatgtcctgagcatcccacatgcggttgtatttttaaaaatttcaacctcttcctggcgcttatcatctgcaatgcaattatagaccctttgatctatgcctttcacaaccaggaactgcgaagaaccctcaaggaggtactgacgtgctcttggtga

SEQ ID NO: 2685 - RNA, 954 nt, synthetic construct
  misc_feature 1..954: note = derived and/or modified sequence opt4 fromMC1_R__Homo_sapiens__AHC11840
  source 1..954: mol_type = other RNA
atggccgtgcagggcagccagagaagactgctgggcagcctgaacagcacccccaccgccatcccccagctgggcctggccgccaaccagaccggcgccagatgcctggaggtgagcatcagcgacggcctgttcctgagcctgggcctggtgagcctggtggagaacgccctggtggtggccaccatcgccaagaacagaaacctgcacagccccatgtactgcttcatctgctgcctggccctgagcgacctgctggtgagcggcagcaacgtgctggagaccgccgtgatcctgctgctggaggccggcgccctggtggccagagccgccgtgctgcagcagctggacaacgtgatcgacgtgatcacctgcagcagcatgctgagcagcctgtgcttcctgggcgccatcgccgtggacagatacatcagcatcttctacgccctgagataccacagcatcgtgaccctgcccagagccagaagagccgtggccgccatctgggtggccagcgtggtgttcagcaccctgttcatcgcctactacgaccacgtggccgtgctgctgtgcctggtggtgttcttcctggccatgctggtgctgatggccgtgctgtacgtgcacatgctggccagagcctgccagcacgcccagggcatcgccagactgcacaagagacagagacccgtgcaccagggcttcggcctgaagggcgccgtgaccctgaccatcctgctgggcatcttcttcctgtgctggggccccttcttcctgcacctgaccctgatcgtgctgtgccccgagcaccccacctgcggctgcatcttcaagaacttcaacctgttcctggccctgatcatctgcaacgccatcatcgaccccctgatctacgccttccacaaccaggagctgagaagaaccctgaaggaggtgctgacctgcagctggtga

SEQ ID NO: 2686 - RNA, 954 nt, synthetic construct
  misc_feature 1..954: note = derived and/or modified sequence opt5 fromMC1_R__Homo_sapiens__AHC11840
  source 1..954: mol_type = other RNA
atggccgtgcagggcagccaaagacggctgctcgggtccctgaactctacccccacagctatccctcagcttggactggccgcgaatcagacgggcgctcgctgcctcgaggtcagcatttccgacgggctgttcctttctctgggactcgttagcctggtggaaaacgccctggtggtcgccaccatcgctaagaatagaaacctccactccccgatgtactgttttatttgctgtctggccctttctgatctgctcgtgagcggctccaatgttctggagacagctgtgatccttctgctcgaagccggggcgctggtcgcccgggctgccgtgctgcagcaactcgacaacgttattgatgtgattacctgcagctctatgctgtccagcctttgtttcctgggagctatcgccgtcgaccgctatatctctatcttttacgcgctcagatatcattccattgtgacactgccccgggcccgcagagctgtggccgctatctgggtcgccagcgttgtgttctctaccctttttattgcctactatgatcacgtggctgtcctgctctgcctggtggttttctttctggcgatgctcgtgctgatggccgtcctttacgtgcatatgctggctcgggcctgtcagcacgcccagggcatcgctcgcctccataaaagacagcggcctgttcaccaaggcttcgggctgaagggagccgtgacacttaccattctgctcggcatctttttcctgtgctgggggccctttttcctgcacctcacgctgatcgtcctttgtcctgagcatcctacctgcggatgtatttttaaaaatttcaacctgttcctcgcgctgatcatttgcaatgctatcattgaccccctgatctatgcctttcacaaccaggaacttcgcagaacactcaaggaggtgctgacctgctcctggtga

SEQ ID NO: 2687 - protein, 317 aa, synthetic construct [sequence omitted]

SEQ ID NO: 2688 - RNA, 954 nt, synthetic construct
  misc_feature 1..954: note = MC1_R__Homo_sapiens__AHC09665
  source 1..954: mol_type = other RNA
atggctgtgcagggatcccagagaagacttctgggctccctcaactccacccccacagccatcccccagctggggctggctgccaaccagacaggagcccggtgcctggaggtgtccatctctgacgggctcttcctcagcctggggctggtgagcttggtggagaacgcgctggtggtggccaccatcgccaagaaccggaacctgcactcacccatgtactgcttcatctgctgcctggccttgtcggacctgctggtgagcgggagcaacgtgctggagacggccgtcatcctcctgctggaggccggtgcactggtggcccgggctgcggtgctgcagcagctggacaatgtcattgacatgatcacctgcagctccatgctgtccagcctctgcttcctgggcgccatcgccgtggaccgctacatctccatcttctacgcactgcgctaccacagcatcgtgaccctgccgcgggcgcggcgagccgttgcggccatctgggtggccagtgtcgtcttcagcacgctcttcatcgcctactacgaccacgtggccgtcctgctgtgcctcgtggtcttcttcctggctatgctggtgctcatggccgtgctgtacgtccacatgctggcccgggcctgccagcacgcccagggcatcgcccggctccacaagaggcagcgcccggtccaccagggctttggccttaaaggcgctgtcaccctcaccatcctgctgggcattttcttcctctgctggggccccttcttcctgcatctcacactcatcgtcctctgccccgagcaccccacgtgcggctgcatcttcaagaacttcaacctctttctcgccctcatcatctgcaatgccatcatcgaccccctcatctacgccttccacagccaggagctccgcaggacgctcaaggaggtgctgacatgctcctggtga

SEQ ID NO: 2689 - RNA, 954 nt, synthetic construct
  misc_feature 1..954: note = derived and/or modified sequence opt1 fromMC1_R__Homo_sapiens__AHC09665
  source 1..954: mol_type = other RNA
atggccgtgcagggcagccagcgccggctgctcgggtccctgaacagcacccccaccgccatcccccagctgggcctcgcggccaaccagacgggggcccgctgcctggaggtctccatcagcgacggcctgttcctctccctggggctggtgagcctcgtggagaacgccctggtcgtggccaccatcgcgaagaaccggaacctgcactcccccatgtactgcttcatctgctgcctcgccctgagcgacctgctcgtgtccggcagcaacgtcctggagaccgccgtgatcctgctcctggaggccggcgcgctggtggcccgcgccgccgtcctccagcagctggacaacgtgatcgacatgatcacgtgctccagcatgctgtccagcctctgcttcctgggggccatcgcggtggaccggtacatctccatcttctacgccctgcgctaccacagcatcgtcaccctcccccgggcccgccgggccgtggccgcgatctgggtggcctccgtcgtgttcagcaccctgttcatcgcctactacgaccacgtggccgtcctgctctgcctggtggtgttcttcctggccatgctcgtcctgatggcggtgctgtacgtgcacatgctcgcccgcgcctgccagcacgcccagggcatcgcccggctgcacaagcgccagcggcccgtccaccaggggttcggcctgaagggggcggtgaccctcaccatcctgctgggcatcttcttcctctgctggggcccgttcttcctgcacctgacgctcatcgtcctgtgccccgagcacccgacctgcgggtgcatcttcaagaacttcaacctgttcctcgccctgatcatctgcaacgccatcatcgaccccctgatctacgccttccactcccaggagctgcgccggaccctcaaggaggtgctgacctgcagctggtga

SEQ ID NO: 2690 - RNA, 954 nt, synthetic construct
  misc_feature 1..954: note = derived and/or modified sequence opt2 fromMC1_R__Homo_sapiens__AHC09665
  source 1..954: mol_type = other RNA
atggccgtccagggctcccagcgccgcctcctcggctccctcaactccacccccaccgccatcccccagctcggcctcgccgccaaccagaccggcgcccgctgcctcgaggtctccatctccgacggcctcttcctctccctcggcctcgtctccctcgtcgagaacgccctcgtcgtcgccaccatcgccaagaaccgcaacctccactcccccatgtactgcttcatctgctgcctcgccctctccgacctcctcgtctccggctccaacgtcctcgagaccgccgtcatcctcctcctcgaggccggcgccctcgtcgcccgcgccgccgtcctccagcagctcgacaacgtcatcgacatgatcacctgctcctccatgctctcctccctctgcttcctcggcgccatcgccgtcgaccgctacatctccatcttctacgccctccgctaccactccatcgtcaccctcccccgcgcccgccgcgccgtcgccgccatctgggtcgcctccgtcgtcttctccaccctcttcatcgcctactacgaccacgtcgccgtcctcctctgcctcgtcgtcttcttcctcgccatgctcgtcctcatggccgtcctctacgtccacatgctcgcccgcgcctgccagcacgcccagggcatcgcccgcctccacaagcgccagcgccccgtccaccagggcttcggcctcaagggcgccgtcaccctcaccatcctcctcggcatcttcttcctctgctggggccccttcttcctccacctcaccctcatcgtcctctgccccgagcaccccacctgcggctgcatcttcaagaacttcaacctcttcctcgccctcatcatctgcaacgccatcatcgaccccctcatctacgccttccactcccaggagctccgccgcaccctcaaggaggtcctcacctgctcctggtga

SEQ ID NO: 2691 - RNA, 954 nt, synthetic construct
  misc_feature 1..954: note = derived and/or modified sequence opt3 fromMC1_R__Homo_sapiens__AHC09665
  source 1..954: mol_type = other RNA
atggccgtgcagggcagccaaagaaggctgctcgggtcccttaactctacccccacagctatccctcagctgggattggcagccaatcagactggtgcgcggtgcttagaggtctcaattagtgacggcctgttcctaagcctcgggctggtttcccttgtggaaaacgctctggtagtggccacgatagcaaagaatcgcaacttgcactctccaatgtactgttttatctgctgtctcgccctgtcggatctgctcgtctcaggaagcaatgtgttagagaccgctgttattctgcttttggaagcaggcgccctggtggctcgagccgcggtcctacagcaactcgacaacgtgatcgatatgattacatgcagttccatgctgtctagcctttgtttcctgggtgcaatcgccgtagaccgttatatatccatcttttacgctttgagatatcattcaattgttactctcccgagggcccggcgcgcagtggctgccatctgggtcgcgagtgtggtgttcagcaccctgtttattgcctactatgatcacgtcgcagttttactgtgcctcgtggtattctttcttgctatgctggtgttgatggccgtcctatacgtgcatatgctggctagagcctgtcagcacgcacaggggatcgccaggctccataaacggcagcgccccgttcaccaaggattcggcctgaagggcgctgtgacacttaccatactgttggggatctttttcctctgctggggaccatttttcctgcacttaactctgattgtcctatgtcctgagcatcccacatgcggttgtatttttaaaaatttcaacctcttcctggcgcttatcatctgcaatgcaattatagaccctttgatctatgcctttcactctcaggaactgcgaagaaccctcaaggaggtgctgacgtgctcctggtga

SEQ ID NO: 2692 - RNA, 954 nt, synthetic construct
  misc_feature 1..954: note = derived and/or modified sequence opt4 fromMC1_R__Homo_sapiens__AHC09665
  source 1..954: mol_type = other RNA
atggccgtgcagggcagccagagaagactgctgggcagcctgaacagcacccccaccgccatcccccagctgggcctggccgccaaccagaccggcgccagatgcctggaggtgagcatcagcgacggcctgttcctgagcctgggcctggtgagcctggtggagaacgccctggtggtggccaccatcgccaagaacagaaacctgcacagccccatgtactgcttcatctgctgcctggccctgagcgacctgctggtgagcggcagcaacgtgctggagaccgccgtgatcctgctgctggaggccggcgccctggtggccagagccgccgtgctgcagcagctggacaacgtgatcgacatgatcacctgcagcagcatgctgagcagcctgtgcttcctgggcgccatcgccgtggacagatacatcagcatcttctacgccctgagataccacagcatcgtgaccctgcccagagccagaagagccgtggccgccatctgggtggccagcgtggtgttcagcaccctgttcatcgcctactacgaccacgtggccgtgctgctgtgcctggtggtgttcttcctggccatgctggtgctgatggccgtgctgtacgtgcacatgctggccagagcctgccagcacgcccagggcatcgccagactgcacaagagacagagacccgtgcaccagggcttcggcctgaagggcgccgtgaccctgaccatcctgctgggcatcttcttcctgtgctggggccccttcttcctgcacctgaccctgatcgtgctgtgccccgagcaccccacctgcggctgcatcttcaagaacttcaacctgttcctggccctgatcatctgcaacgccatcatcgaccccctgatctacgccttccacagccaggagctgagaagaaccctgaaggaggtgctgacctgcagctggtga

SEQ ID NO: 2693 - RNA, 954 nt, synthetic construct
  misc_feature 1..954: note = derived and/or modified sequence opt5 fromMC1_R__Homo_sapiens__AHC09665
  source 1..954: mol_type = other RNA
atggccgtgcagggcagccaaagacggctgctcgggtccctgaactctacccccacagctatccctcagcttggactggccgcgaatcagacgggcgctcgctgcctcgaggtcagcatttccgacgggctgttcctttctctgggactcgttagcctggtggaaaacgccctggtggtcgccaccatcgctaagaatagaaacctccactccccgatgtactgttttatttgctgtctggccctttctgatctgctcgtgagcggctccaatgttctggagacagctgtgatccttctgctcgaagccggggcgctggtcgcccgggctgccgtgctgcagcaactcgacaacgttattgatatgattacctgcagctctatgctgtccagcctttgtttcctgggagctatcgccgtggaccgctatatctctatcttttacgcgctcagatatcattccattgtcacactgccccgggcccgcagagctgtggccgctatctgggtggccagcgtcgttttctctaccctttttattgcctactatgatcacgtggctgtgctgctctgcctggtcgtgttctttctggcgatgctcgttctgatggccgtgctttacgtccatatgctggctcgggcctgtcagcacgcccagggcatcgctcgcctccataaaagacagcggcctgtgcaccaaggcttcgggctgaagggagccgttacacttaccattctgctcggcatctttttcctgtgctgggggccctttttcctgcacctcacgctgatcgtgctttgtcctgagcatcctacctgcggatgtatttttaaaaatttcaacctgttcctcgcgctgatcatttgcaatgctatcattgaccccctgatctatgcctttcactcccaggaacttcgcagaacactcaaggaggtcctgacctgcagctggtga

SEQ ID NO: 2694 - protein, 317 aa, synthetic construct [sequence omitted]

SEQ ID NO: 2695 - RNA, 954 nt, synthetic construct
  misc_feature 1..954: note = MC1_R__Homo_sapiens__AHC11324
  source 1..954: mol_type = other RNA
atggctgtgcagggatcccagagaagacttctgggctccctcaactccacccccacagccatcccccagctggggctggctgccaaccagacaggagcccggtgcctggaggtgtccatctctgacgggctcttcctcagcctggggctggtgagcttggtggagaacgcgctggtggtggccaccatcgccaagaaccggaacctgcactcacccatgtactgcttcatctgctgcctggccttgtcggacctgctggtgagcgggagcaacgtgctggagacggccgtcatcctcctgctggaggccggtgcactggtggcccgggctgcggtgctgcagcagctggacaatgtcattgacgtgatcacctgcagctccatgctgtccagcctctgcttcctgggcgccatcgccgtggaccgctacatctccatcttctacgcactgcgctaccacagcatcgtgaccctgccgcgggcgcggcgagccgttgcggccatctgggtggccagtgtcgtcttcagcacgctcttcatcgcctactacgaccacgtggccgtcctgctgtgcctcgtggtcttcttcctggctatgctggtgctcatggccgtgctgtacgtccacatgctggcccgggcctgccagcacgcccagggcatcgcccggctccacaagaggcagcgcccggtccaccagggctttggccttaaaggcgctgtcaccctcaccatcctgctgggcattttcttcctctgctggggccccttcttcctgcatctcacactcatcgtcctctgccccgagcaccccacgtgcggctgcatcttcaagaacttcaacctctttctcgccctcatcatccgcaatgccatcatcgaccccctcatctacgccttccacagccaggagctccgcaggacgctcaaggaggtgctgacatgctcctggtga

SEQ ID NO: 2696 - RNA, 954 nt, synthetic construct
  misc_feature 1..954: note = derived and/or modified sequence opt1 fromMC1_R__Homo_sapiens__AHC11324
  source 1..954: mol_type = other RNA
atggccgtgcagggcagccagcgccggctgctcgggtccctgaacagcacccccaccgccatcccccagctgggcctcgcggccaaccagacgggggcccgctgcctggaggtctccatcagcgacggcctgttcctctccctggggctggtgagcctcgtggagaacgccctggtcgtggccaccatcgcgaagaaccggaacctgcactcccccatgtactgcttcatctgctgcctcgccctgagcgacctgctcgtgtccggcagcaacgtcctggagaccgccgtgatcctgctcctggaggccggcgcgctggtggcccgcgccgccgtcctccagcagctggacaacgtgatcgacgtgatcacgtgctccagcatgctgtccagcctctgcttcctgggggccatcgcggtcgaccggtacatctccatcttctacgccctgcgctaccacagcatcgtgaccctcccccgggcccgccgggccgtggccgcgatctgggtcgcctccgtggtgttcagcaccctgttcatcgcctactacgaccacgtcgccgtgctgctctgcctggtggtcttcttcctggccatgctcgtgctgatggcggtgctgtacgtccacatgctcgcccgcgcctgccagcacgcccagggcatcgcccggctgcacaagcgccagcggcccgtgcaccaggggttcggcctgaagggggcggtcaccctcaccatcctgctgggcatcttcttcctctgctggggcccgttcttcctgcacctgacgctcatcgtgctgtgccccgagcacccgacctgcgggtgcatcttcaagaacttcaacctgttcctcgccctgatcatccgcaacgccatcatcgaccccctgatctacgccttccactcccaggagctgcggcgcaccctcaaggaggtgctgacctgcagctggtga

SEQ ID NO: 2697 - RNA, 954 nt, synthetic construct
  misc_feature 1..954: note = derived and/or modified sequence opt2 fromMC1_R__Homo_sapiens__AHC11324
  source 1..954: mol_type = other RNA
atggccgtccagggctcccagcgccgcctcctcggctccctcaactccacccccaccgccatcccccagctcggcctcgccgccaaccagaccggcgcccgctgcctcgaggtctccatctccgacggcctcttcctctccctcggcctcgtctccctcgtcgagaacgccctcgtcgtcgccaccatcgccaagaaccgcaacctccactcccccatgtactgcttcatctgctgcctcgccctctccgacctcctcgtctccggctccaacgtcctcgagaccgccgtcatcctcctcctcgaggccggcgccctcgtcgcccgcgccgccgtcctccagcagctcgacaacgtcatcgacgtcatcacctgctcctccatgctctcctccctctgcttcctcggcgccatcgccgtcgaccgctacatctccatcttctacgccctccgctaccactccatcgtcaccctcccccgcgcccgccgcgccgtcgccgccatctgggtcgcctccgtcgtcttctccaccctcttcatcgcctactacgaccacgtcgccgtcctcctctgcctcgtcgtcttcttcctcgccatgctcgtcctcatggccgtcctctacgtccacatgctcgcccgcgcctgccagcacgcccagggcatcgcccgcctccacaagcgccagcgccccgtccaccagggcttcggcctcaagggcgccgtcaccctcaccatcctcctcggcatcttcttcctctgctggggccccttcttcctccacctcaccctcatcgtcctctgccccgagcaccccacctgcggctgcatcttcaagaacttcaacctcttcctcgccctcatcatccgcaacgccatcatcgaccccctcatctacgccttccactcccaggagctccgccgcaccctcaaggaggtcctcacctgctcctggtga

SEQ ID NO: 2698 - RNA, 954 nt, synthetic construct
  misc_feature 1..954: note = derived and/or modified sequence opt3 fromMC1_R__Homo_sapiens__AHC11324
  source 1..954: mol_type = other RNA
atggccgtgcagggcagccaaagaaggctgctcgggtcccttaactctacccccacagctatccctcagctgggattggcagccaatcagactggtgcgcggtgcttagaggtctcaattagtgacggcctgttcctaagcctcgggctggtttcccttgtggaaaacgctctggtagtggccacgatagcaaagaatcgcaacttgcactctccaatgtactgttttatctgctgtctcgccctgtcggatctgctcgtctcaggaagcaatgtgttagagaccgctgttattctgcttttggaagcaggcgccctggtggctcgagccgcggtcctacagcaactcgacaacgtgatcgatgtaattacatgcagttccatgctgtctagcctttgtttcctgggtgcaatcgccgttgaccgttatatatccatcttttacgctttgagatatcattcaattgtgactctcccgagggcccggcgcgcagtcgctgccatctgggtggcgagtgtggtcttcagcaccctgtttattgcctactatgatcacgttgcagtgttactgtgcctcgtagtgttctttcttgctatgctggtcttgatggccgtgctatacgttcatatgctggctagagcctgtcagcacgcacaggggatcgccaggctccataaacggcagcgccccgtgcaccaaggattcggcctgaagggcgctgtcacacttaccatactgttggggatctttttcctctgctggggaccatttttcctgcacttaactctgattgtgctatgtcctgagcatcccacatgcggttgtatttttaaaaatttcaacctcttcctggcgcttatcatccgaaatgcaattatagaccctttgatctatgcctttcactctcaggaactgagaaggaccctcaaggaggtactgacgtgctcctggtga

SEQ ID NO: 2699 - RNA, 954 nt, synthetic construct
  misc_feature 1..954: note = derived and/or modified sequence opt4 fromMC1_R__Homo_sapiens__AHC11324
  source 1..954: mol_type = other RNA
atggccgtgcagggcagccagagaagactgctgggcagcctgaacagcacccccaccgccatcccccagctgggcctggccgccaaccagaccggcgccagatgcctggaggtgagcatcagcgacggcctgttcctgagcctgggcctggtgagcctggtggagaacgccctggtggtggccaccatcgccaagaacagaaacctgcacagccccatgtactgcttcatctgctgcctggccctgagcgacctgctggtgagcggcagcaacgtgctggagaccgccgtgatcctgctgctggaggccggcgccctggtggccagagccgccgtgctgcagcagctggacaacgtgatcgacgtgatcacctgcagcagcatgctgagcagcctgtgcttcctgggcgccatcgccgtggacagatacatcagcatcttctacgccctgagataccacagcatcgtgaccctgcccagagccagaagagccgtggccgccatctgggtggccagcgtggtgttcagcaccctgttcatcgcctactacgaccacgtggccgtgctgctgtgcctggtggtgttcttcctggccatgctggtgctgatggccgtgctgtacgtgcacatgctggccagagcctgccagcacgcccagggcatcgccagactgcacaagagacagagacccgtgcaccagggcttcggcctgaagggcgccgtgaccctgaccatcctgctgggcatcttcttcctgtgctggggccccttcttcctgcacctgaccctgatcgtgctgtgccccgagcaccccacctgcggctgcatcttcaagaacttcaacctgttcctggccctgatcatcagaaacgccatcatcgaccccctgatctacgccttccacagccaggagctgagaagaaccctgaaggaggtgctgacctgcagctggtga

SEQ ID NO: 2700 - RNA, 954 nt, synthetic construct
  misc_feature 1..954: note = derived and/or modified sequence opt5 fromMC1_R__Homo_sapiens__AHC11324
  source 1..954: mol_type = other RNA
atggccgtgcagggcagccaaagacggctgctcgggtccctgaactctacccccacagctatccctcagcttggactggccgcgaatcagacgggcgctcgctgcctcgaggtcagcatttccgacgggctgttcctttctctgggactcgttagcctggtggaaaacgccctggtggtcgccaccatcgctaagaatagaaacctccactccccgatgtactgttttatttgctgtctggccctttctgatctgctcgtgagcggctccaatgttctggagacagctgtgatccttctgctcgaagccggggcgctggtcgcccgggctgccgtgctgcagcaactcgacaacgttattgatgtgattacctgcagctctatgctgtccagcctttgtttcctgggagctatcgccgtcgaccgctatatctctatcttttacgcgctcagatatcattccattgtgacactgccccgggcccgcagagctgtggccgctatctgggtcgccagcgttgtgttctctaccctttttattgcctactatgatcacgtggctgtcctgctctgcctggtggttttctttctggcgatgctcgtgctgatggccgtcctttacgtgcatatgctggctcgggcctgtcagcacgcccagggcatcgctcgcctccataaaagacagcggcctgttcaccaaggcttcgggctgaagggagccgtgacacttaccattctgctcggcatctttttcctgtgctgggggccctttttcctgcacctcacgctgatcgtcctttgtcctgagcatcctacctgcggatgtatttttaaaaatttcaacctgttcctcgcgctgatcattcgcaatgctatcattgaccccctgatctatgcctttcactcccaggaacttagacggacactcaaggaggtgctgacctgcagctggtga

SEQ ID NO: 2701 - protein, 317 aa, synthetic construct [sequence omitted]

SEQ ID NO: 2702 - RNA, 954 nt, synthetic construct
  misc_feature 1..954: note = MC1_R__Homo_sapiens__AHC09521
  source 1..954: mol_type = other RNA
atggctgtgcagggatcccagagaagacttctgggctccctcaactccacccccacagccatcccccagctggggctggctgccaaccagacaggagcccggtgcctggaggtgtccatctctgacgggctcttcctcagcctggggctggtgagcttggtggagaacgcgctggtggtggccaccatcgccaagaaccggaacctgcactcacccatgtactgcttcatctgctgcctggccttgtcggacctgctggtgagcgggagcaacgtgctggagacggccgtcatcctcctgctggaggccggtgcactggtggcccgggctgcggtgctgcagcagctggacaatgtcattgacgtgatcacctgcagctccatgctgtccagcctctgcttcctgggcgccatcgccgtggaccgctacatctccatcttctacgcactgcgctaccacagcatcgtgaccctgccgtgggcgcggcgagccgttgcggccatctgggtggccagtgtcgtcttcagcacgctcttcatcgcctactacgaccacgtggccgtcctgctgtgcctcgtggtcttcttcctggctatgctggtgctcatggccgtgctgtacgtccacatgctggcccgggcctgccagcacgcccagggcatcgcccggctccacaagaggcagcgcccggtccaccagggctttggccttaaaggcgctgtcaccctcaccatcctgctgggcattttcttcctctgctggggccccttcttcctgcatctcacactcatcgtcctctgccccgagcaccccacgtgcggctgcatcttcaagaacttcaacctctttctcgccctcatcatctgcaatgccatcatcgaccccctcatctacgccttccacagccaggagctccgcaggacgctcaaggaggtgctgacatgctcctggtga

SEQ ID NO: 2703 - RNA, 954 nt, synthetic construct
  misc_feature 1..954: note = derived and/or modified sequence opt1 fromMC1_R__Homo_sapiens__AHC09521
  source 1..954: mol_type = other RNA
atggccgtgcagggcagccagcgccggctgctcgggtccctgaacagcacccccaccgccatcccccagctgggcctcgcggccaaccagacgggggcccgctgcctggaggtctccatcagcgacggcctgttcctctccctggggctggtgagcctcgtggagaacgccctggtcgtggccaccatcgcgaagaaccggaacctgcactcccccatgtactgcttcatctgctgcctcgccctgagcgacctgctcgtgtccggcagcaacgtcctggagaccgccgtgatcctgctcctggaggccggcgcgctggtggcccgcgccgccgtcctccagcagctggacaacgtgatcgacgtgatcacgtgctccagcatgctgtccagcctctgcttcctgggggccatcgcggtcgaccggtacatctccatcttctacgccctgcgctaccacagcatcgtgaccctcccctgggcccggcgcgccgtggccgcgatctgggtcgcctccgtggtgttcagcaccctgttcatcgcctactacgaccacgtcgccgtgctgctctgcctggtggtcttcttcctggccatgctcgtgctgatggcggtgctgtacgtccacatgctcgcccgggcctgccagcacgcccagggcatcgcccgcctgcacaagcggcagcgccccgtgcaccaggggttcggcctgaagggggcggtcaccctcaccatcctgctgggcatcttcttcctctgctggggcccgttcttcctgcacctgacgctcatcgtgctgtgccccgagcacccgacctgcgggtgcatcttcaagaacttcaacctgttcctcgccctgatcatctgcaacgccatcatcgaccccctgatctacgccttccactcccaggagctgcggcgcaccctcaaggaggtgctgacctgcagctggtga

SEQ ID NO: 2704 - RNA, 954 nt, synthetic construct
  misc_feature 1..954: note = derived and/or modified sequence opt2 fromMC1_R__Homo_sapiens__AHC09521
  source 1..954: mol_type = other RNA
atggccgtccagggctcccagcgccgcctcctcggctccctcaactccacccccaccgccatcccccagctcggcctcgccgccaaccagaccggcgcccgctgcctcgaggtctccatctccgacggcctcttcctctccctcggcctcgtctccctcgtcgagaacgccctcgtcgtcgccaccatcgccaagaaccgcaacctccactcccccatgtactgcttcatctgctgcctcgccctctccgacctcctcgtctccggctccaacgtcctcgagaccgccgtcatcctcctcctcgaggccggcgccctcgtcgcccgcgccgccgtcctccagcagctcgacaacgtcatcgacgtcatcacctgctcctccatgctctcctccctctgcttcctcggcgccatcgccgtcgaccgctacatctccatcttctacgccctccgctaccactccatcgtcaccctcccctgggcccgccgcgccgtcgccgccatctgggtcgcctccgtcgtcttctccaccctcttcatcgcctactacgaccacgtcgccgtcctcctctgcctcgtcgtcttcttcctcgccatgctcgtcctcatggccgtcctctacgtccacatgctcgcccgcgcctgccagcacgcccagggcatcgcccgcctccacaagcgccagcgccccgtccaccagggcttcggcctcaagggcgccgtcaccctcaccatcctcctcggcatcttcttcctctgctggggccccttcttcctccacctcaccctcatcgtcctctgccccgagcaccccacctgcggctgcatcttcaagaacttcaacctcttcctcgccctcatcatctgcaacgccatcatcgaccccctcatctacgccttccactcccaggagctccgccgcaccctcaaggaggtcctcacctgctcctggtga

SEQ ID NO: 2705 - RNA, 954 nt, synthetic construct
  misc_feature 1..954: note = derived and/or modified sequence opt3 fromMC1_R__Homo_sapiens__AHC09521
  source 1..954: mol_type = other RNA
atggccgtgcagggcagccaaagaaggctgctcgggtcccttaactctacccccacagctatccctcagctgggattggcagccaatcagactggtgcgcggtgcttagaggtctcaattagtgacggcctgttcctaagcctcgggctggtttcccttgtggaaaacgctctggtagtggccacgatagcaaagaatcgcaacttgcactctccaatgtactgttttatctgctgtctcgccctgtcggatctgctcgtctcaggaagcaatgtgttagagaccgctgttattctgcttttggaagcaggcgccctggtggctcgagccgcggtcctacagcaactcgacaacgtgatcgatgtaattacatgcagttccatgctgtctagcctttgtttcctgggtgcaatcgccgttgaccgttatatatccatcttttacgctttgagatatcattcaattgtgactctcccgtgggccaggcgggcagtcgctgccatctgggtggcgagtgtggtcttcagcaccctgtttattgcctactatgatcacgttgcagtgttactgtgcctcgtagtgttctttcttgctatgctggtcttgatggccgtgctatacgttcatatgctggctcgcgcctgtcagcacgcacaggggatcgccagactccataaaaggcagcggcccgtgcaccaaggattcggcctgaagggcgctgtcacacttaccatactgttggggatctttttcctctgctggggaccatttttcctgcacttaactctgattgtgctatgtcctgagcatcccacatgcggttgtatttttaaaaatttcaacctcttcctggcgcttatcatctgcaatgcaattatagaccctttgatctatgcctttcactctcaggaactgcgccgaaccctcaaggaggtactgacgtgctcctggtga

SEQ ID NO: 2706 - RNA, 954 nt, synthetic construct
  misc_feature 1..954: note = derived and/or modified sequence opt4 fromMC1_R__Homo_sapiens__AHC09521
  source 1..954: mol_type = other RNA
atggccgtgcagggcagccagagaagactgctgggcagcctgaacagcacccccaccgccatcccccagctgggcctggccgccaaccagaccggcgccagatgcctggaggtgagcatcagcgacggcctgttcctgagcctgggcctggtgagcctggtggagaacgccctggtggtggccaccatcgccaagaacagaaacctgcacagccccatgtactgcttcatctgctgcctggccctgagcgacctgctggtgagcggcagcaacgtgctggagaccgccgtgatcctgctgctggaggccggcgccctggtggccagagccgccgtgctgcagcagctggacaacgtgatcgacgtgatcacctgcagcagcatgctgagcagcctgtgcttcctgggcgccatcgccgtggacagatacatcagcatcttctacgccctgagataccacagcatcgtgaccctgccctgggccagaagagccgtggccgccatctgggtggccagcgtggtgttcagcaccctgttcatcgcctactacgaccacgtggccgtgctgctgtgcctggtggtgttcttcctggccatgctggtgctgatggccgtgctgtacgtgcacatgctggccagagcctgccagcacgcccagggcatcgccagactgcacaagagacagagacccgtgcaccagggcttcggcctgaagggcgccgtgaccctgaccatcctgctgggcatcttcttcctgtgctggggccccttcttcctgcacctgaccctgatcgtgctgtgccccgagcaccccacctgcggctgcatcttcaagaacttcaacctgttcctggccctgatcatctgcaacgccatcatcgaccccctgatctacgccttccacagccaggagctgagaagaaccctgaaggaggtgctgacctgcagctggtga

SEQ ID NO: 2707 - RNA, 954 nt, synthetic construct
  misc_feature 1..954: note = derived and/or modified sequence opt5 fromMC1_R__Homo_sapiens__AHC09521
  source 1..954: mol_type = other RNA
atggccgtgcagggcagccaaagacggctgctcgggtccctgaactctacccccacagctatccctcagcttggactggccgcgaatcagacgggcgctcgctgcctcgaggtcagcatttccgacgggctgttcctttctctgggactcgttagcctggtggaaaacgccctggtggtcgccaccatcgctaagaatagaaacctccactccccgatgtactgttttatttgctgtctggccctttctgatctgctcgtgagcggctccaatgttctggagacagctgtgatccttctgctcgaagccggggcgctggtcgcccgggctgccgtgctgcagcaactcgacaacgttattgatgtgattacctgcagctctatgctgtccagcctttgtttcctgggagctatcgccgtcgaccgctatatctctatcttttacgcgctcagatatcattccattgtgacactgccctgggcccggcgcgctgtggccgctatctgggtcgccagcgttgtgttctctaccctttttattgcctactatgatcacgtggctgtcctgctctgcctggtggttttctttctggcgatgctcgtgctgatggccgtcctttacgtgcatatgctggctagagcctgtcagcacgcccagggcatcgctcggctccataaacgccagagacctgttcaccaaggcttcgggctgaagggagccgtgacacttaccattctgctcggcatctttttcctgtgctgggggccctttttcctgcacctcacgctgatcgtcctttgtcctgagcatcctacctgcggatgtatttttaaaaatttcaacctgttcctcgcgctgatcatttgcaatgctatcattgaccccctgatctatgcctttcactcccaggaacttcggcgcacactcaaggaggtgctgacctgcagctggtga

SEQ ID NO: 2708 - protein, 317 aa, synthetic construct [sequence omitted]

SEQ ID NO: 2709 - RNA, 954 nt, synthetic construct
  misc_feature 1..954: note = MC1_R__Homo_sapiens__AHC11794
  source 1..954: mol_type = other RNA
atggctgtgcagggatcccagagaagacttctgggctccctcaactccacccccacagccatcccccagctggggctggctgccaaccagacaggagcccggtgcctggaggtgtccatctctgacgggctcttcctcagcctggggctggtgagcttggtggagaacgcgctggtggtggccaccatcgccaagaaccggaacctgcactcacccatgtactgcttcatctgctgcctggccttgtcggacctgctggtgagcgggagcaacgtgctggagacggccgtcatcctcctgctggaggccggtgcactggtggcccgggctgcggtgctgcagcagctggacaatgtcattgacgtgatcacctgcagctccatgctgtccagcctctgcttcctgggcgccatcgccgtggaccgctacatctccatcttctacgcactgcgctaccacagcatcgtgaccctgccgcgggcgcggcgagccgttgcggccatctgggtggccagtgtcgtcttcagcacgctcttcatcgcctactacgaccacgtggccgtcctgctgtgcctcgtggtcttcttcctggctatgctggtgctcatggccgtgctgtacgtccacatgctggcccgggcctgccagcacgcccagggcatcgcccggctccacaagaggcagcgcccggtccaccagggctttggccttaaaggcgctgtcaccctcaccatcctgctgggcattttcttcctctgctggggccccttcttcctgcatctcacactcatcgtcctctgccccgagcaccccgagtgcggctgcatcttcaagaacttcaacctctttctcgccctcatcatctgcaatgccatcatcgaccccctcatctacgccttccacagccaggagctccgcaggacgctcaaggaggtgctgacatgctcctggtga

SEQ ID NO: 2710 - RNA, 954 nt, synthetic construct
  misc_feature 1..954: note = derived and/or modified sequence opt1 fromMC1_R__Homo_sapiens__AHC11794
  source 1..954: mol_type = other RNA
atggccgtgcagggcagccagcgccggctgctcgggtccctgaacagcacccccaccgccatcccgcagctgggcctcgcggccaaccagacgggggcccgctgcctggaggtctccatcagcgacggcctgttcctctccctggggctggtgagcctcgtggagaacgccctggtcgtggccaccatcgcgaagaaccggaacctgcactcccccatgtactgcttcatctgctgcctcgccctgagcgacctgctcgtgtccggcagcaacgtcctggagaccgccgtgatcctgctcctggaggccggcgcgctggtggcccgcgccgccgtcctccagcagctggacaacgtgatcgacgtgatcacgtgctccagcatgctgtccagcctctgcttcctgggggccatcgcggtcgaccggtacatctccatcttctacgccctgcgctaccacagcatcgtgaccctcccccgggcccgccgggccgtggccgcgatctgggtcgcctccgtggtgttcagcaccctgttcatcgcctactacgaccacgtcgccgtgctgctctgcctggtggtcttcttcctggccatgctcgtgctgatggcggtgctgtacgtccacatgctcgcccgcgcctgccagcacgcccagggcatcgcccggctgcacaagcgccagcggcccgtgcaccaggggttcggcctgaagggggcggtcaccctcaccatcctgctgggcatcttcttcctctgctggggcccgttcttcctgcacctgacgctcatcgtgctgtgccccgagcaccccgagtgcgggtgcatcttcaagaacttcaacctgttcctcgccctgatcatctgcaacgccatcatcgaccccctgatctacgccttccactcccaggagctgcgccggaccctcaaggaggtgctgacctgcagctggtga

SEQ ID NO: 2711 - RNA, 954 nt, synthetic construct
  misc_feature 1..954: note = derived and/or modified sequence opt2 fromMC1_R__Homo_sapiens__AHC11794
  source 1..954: mol_type = other RNA
atggccgtccagggctcccagcgccgcctcctcggctccctcaactccacccccaccgccatcccccagctcggcctcgccgccaaccagaccggcgcccgctgcctcgaggtctccatctccgacggcctcttcctctccctcggcctcgtctccctcgtcgagaacgccctcgtcgtcgccaccatcgccaagaaccgcaacctccactcccccatgtactgcttcatctgctgcctcgccctctccgacctcctcgtctccggctccaacgtcctcgagaccgccgtcatcctcctcctcgaggccggcgccctcgtcgcccgcgccgccgtcctccagcagctcgacaacgtcatcgacgtcatcacctgctcctccatgctctcctccctctgcttcctcggcgccatcgccgtcgaccgctacatctccatcttctacgccctccgctaccactccatcgtcaccctcccccgcgcccgccgcgccgtcgccgccatctgggtcgcctccgtcgtcttctccaccctcttcatcgcctactacgaccacgtcgccgtcctcctctgcctcgtcgtcttcttcctcgccatgctcgtcctcatggccgtcctctacgtccacatgctcgcccgcgcctgccagcacgcccagggcatcgcccgcctccacaagcgccagcgccccgtccaccagggcttcggcctcaagggcgccgtcaccctcaccatcctcctcggcatcttcttcctctgctggggccccttcttcctccacctcaccctcatcgtcctctgccccgagcaccccgagtgcggctgcatcttcaagaacttcaacctcttcctcgccctcatcatctgcaacgccatcatcgaccccctcatctacgccttccactcccaggagctccgccgcaccctcaaggaggtcctcacctgctcctggtga

SEQ ID NO: 2712 - RNA, 954 nt, synthetic construct
  misc_feature 1..954: note = derived and/or modified sequence opt3 fromMC1_R__Homo_sapiens__AHC11794
  source 1..954: mol_type = other RNA
atggccgtgcagggcagccaaagaaggctgctcgggtcccttaactctacccccacagctatccctcagctgggattggcagccaatcagactggtgcgcggtgcttagaggtctcaattagtgacggcctgttcctaagcctcgggctggtttcccttgtggaaaacgctctggtagtggccacgatagcaaagaatcgcaacttgcactctccaatgtactgttttatctgctgtctcgccctgtcggatctgctcgtctcaggaagcaatgtgttagagaccgctgttattctgcttttggaagcaggcgccctggtggctcgagccgcggtcctacagcaactcgacaacgtgatcgatgtaattacatgcagttccatgctgtctagcctttgtttcctgggtgcaatcgccgttgaccgttatatatccatcttttacgctttgagatatcattcaattgtgactctcccgagggcccggcgcgcagtcgctgccatctgggtggcgagtgtggtcttcagcaccctgtttattgcctactatgatcacgttgcagtgttactgtgcctcgtagtgttctttcttgctatgctggtcttgatggccgtgctatacgttcatatgctggctagagcctgtcagcacgcacaggggatcgccaggctccataaacggcagcgccccgtgcaccaaggattcggcctgaagggcgctgtcacacttaccatactgttggggatctttttcctctgctggggaccatttttcctgcacttaactctgattgtgctatgtcctgagcatcccgaatgcggttgtatttttaaaaatttcaacctcttcctggcgcttatcatctgcaatgcaattatagaccctttgatctatgcctttcactctcaggagctgcgaagaacactcaaggaggtactgacctgctcctggtga

SEQ ID NO: 2713 - RNA, 954 nt, synthetic construct
  misc_feature 1..954: note = derived and/or modified sequence opt4 fromMC1_R__Homo_sapiens__AHC11794
  source 1..954: mol_type = other RNA
atggccgtgcagggcagccagagaagactgctgggcagcctgaacagcacccccaccgccatcccccagctgggcctggccgccaaccagaccggcgccagatgcctggaggtgagcatcagcgacggcctgttcctgagcctgggcctggtgagcctggtggagaacgccctggtggtggccaccatcgccaagaacagaaacctgcacagccccatgtactgcttcatctgctgcctggccctgagcgacctgctggtgagcggcagcaacgtgctggagaccgccgtgatcctgctgctggaggccggcgccctggtggccagagccgccgtgctgcagcagctggacaacgtgatcgacgtgatcacctgcagcagcatgctgagcagcctgtgcttcctgggcgccatcgccgtggacagatacatcagcatcttctacgccctgagataccacagcatcgtgaccctgcccagagccagaagagccgtggccgccatctgggtggccagcgtggtgttcagcaccctgttcatcgcctactacgaccacgtggccgtgctgctgtgcctggtggtgttcttcctggccatgctggtgctgatggccgtgctgtacgtgcacatgctggccagagcctgccagcacgcccagggcatcgccagactgcacaagagacagagacccgtgcaccagggcttcggcctgaagggcgccgtgaccctgaccatcctgctgggcatcttcttcctgtgctggggccccttcttcctgcacctgaccctgatcgtgctgtgccccgagcaccccgagtgcggctgcatcttcaagaacttcaacctgttcctggccctgatcatctgcaacgccatcatcgaccccctgatctacgccttccacagccaggagctgagaagaaccctgaaggaggtgctgacctgcagctggtga

SEQ ID NO: 2714 - RNA, 954 nt, synthetic construct
  misc_feature 1..954: note = derived and/or modified sequence opt5 fromMC1_R__Homo_sapiens__AHC11794
  source 1..954: mol_type = other RNA
atggccgtgcagggcagccaaagacggctgctcgggtccctgaactctacccccacagctatccctcagcttggactggccgcgaatcagacgggcgctcgctgcctcgaggtcagcatttccgacgggctgttcctttctctgggactcgttagcctggtggaaaacgccctggtggtcgccaccatcgctaagaatagaaacctccactccccgatgtactgttttatttgctgtctggccctttctgatctgctcgtgagcggctccaatgttctggagacagctgtgatccttctgctcgaagccggggcgctggtcgcccgggctgccgtgctgcagcaactcgacaacgttattgatgtgattacctgcagctctatgctgtccagcctttgtttcctgggagctatcgccgtcgaccgctatatctctatcttttacgcgctcagatatcattccattgtgacactgccccgggcccgcagagctgtggccgctatctgggtcgccagcgttgtgttctctaccctttttattgcctactatgatcacgtggctgtcctgctctgcctggtggttttctttctggcgatgctcgtgctgatggccgtcctttacgtgcatatgctggctcgggcctgtcagcacgcccagggcatcgctcgcctccataaaagacagcggcctgttcaccaaggcttcgggctgaagggagccgtgacacttaccattctgctcggcatctttttcctgtgctgggggccctttttcctgcacctcacgctgatcgtcctttgtcctgagcatcccgaatgcggatgtatttttaaaaatttcaacctgttcctcgcgctgatcatttgcaatgctatcattgaccctctgatctatgcctttcactcccaggagcttcgcagaaccctcaaggaggtgctgacatgcagctggtga

SEQ ID NO: 2715 - protein, 317 aa, synthetic construct [sequence omitted]

SEQ ID NO: 2716 - RNA, 954 nt, synthetic construct
  misc_feature 1..954: note = MC1_R__Homo_sapiens__AHC10874
  source 1..954: mol_type = other RNA
atggctgtgcagggatcccagagaagacttctgggctccctcaactccacccccacagccatcccccagctggggctggctgccaaccagacaggagcccggtgcctggaggtgtccatctctgacgggctcttcctcagcctggggctggtgagcttggtggagaacgcgctggtggtggccaccatcgccaagaaccggaacctgcactcacccatgtactgcttcatctgctgcctggccttgtcggaactgctggtgagcgggagcaacgtgctggagacggccgtcatcctcctgctggaggccggtgcactggtggcccgggctgcggtgctgcagcagctggacaatgtcattgacgtgatcacctgcagctccatgctgtccagcctctgcttcctgggcgccatcgccgtggaccgctacatctccatcttctacgcactgcgctaccacagcatcgtgaccctgccgcgggcgcggcgagccgttgcggccatctgggtggccagtgtcgtcttcagcacgctcttcatcgcctactacgaccacgtggccgtcctgctgtgcctcgtggtcttcttcctggctatgctggtgctcatggccgtgctgtacgtccacatgctggcccgggcctgccagcacgcccagggcatcgcccggctccacaagaggcagcgcccggtccaccagggctttggccttaaaggcgctgtcaccctcaccatcctgctgggcattttcttcctctgctggggccccttcttcctgcatctcacactcatcgtcctctgccccgagcaccccacgtgcggctgcatcttcaagaacttcaacctctttctcgccctcatcatctgcaatgccatcatcgaccccctcatctacgccttccacagccaggagctccgcaggacgctcaaggaggtgctgacatgctcctggtga

SEQ ID NO: 2717 - RNA, 954 nt, synthetic construct
  misc_feature 1..954: note = derived and/or modified sequence opt1 fromMC1_R__Homo_sapiens__AHC10874
  source 1..954: mol_type = other RNA
atggccgtgcagggcagccagcgccggctgctcgggtccctgaacagcacccccaccgccatcccccagctgggcctcgcggccaaccagacgggggcccgctgcctggaggtctccatcagcgacggcctgttcctctccctggggctggtgagcctcgtggagaacgccctggtcgtggccaccatcgcgaagaaccggaacctgcactcccccatgtactgcttcatctgctgcctcgccctgagcgagctgctcgtgtccggcagcaacgtcctggagaccgccgtgatcctgctcctggaggccggcgcgctggtggcccgcgccgccgtcctccagcagctggacaacgtgatcgacgtgatcacgtgctccagcatgctgtccagcctctgcttcctgggggccatcgcggtcgaccggtacatctccatcttctacgccctgcgctaccacagcatcgtgaccctcccccgggcccgccgggccgtggccgcgatctgggtcgcctccgtggtgttcagcaccctgttcatcgcctactacgaccacgtcgccgtgctgctctgcctggtggtcttcttcctggccatgctcgtgctgatggcggtgctgtacgtccacatgctcgcccgcgcctgccagcacgcccagggcatcgcccggctgcacaagcgccagcggcccgtgcaccaggggttcggcctgaagggggcggtcaccctcaccatcctgctgggcatcttcttcctctgctggggcccgttcttcctgcacctgacgctcatcgtgctgtgccccgagcacccgacctgcgggtgcatcttcaagaacttcaacctgttcctcgccctgatcatctgcaacgccatcatcgaccccctgatctacgccttccactcccaggagctgcgccggaccctcaaggaggtgctgacctgcagctggtga

SEQ ID NO: 2718 - RNA, 954 nt, synthetic construct
  misc_feature 1..954: note = derived and/or modified sequence opt2 fromMC1_R__Homo_sapiens__AHC10874
  source 1..954: mol_type = other RNA
atggccgtccagggctcccagcgccgcctcctcggctccctcaactccacccccaccgccatcccccagctcggcctcgccgccaaccagaccggcgcccgctgcctcgaggtctccatctccgacggcctcttcctctccctcggcctcgtctccctcgtcgagaacgccctcgtcgtcgccaccatcgccaagaaccgcaacctccactcccccatgtactgcttcatctgctgcctcgccctctccgagctcctcgtctccggctccaacgtcctcgagaccgccgtcatcctcctcctcgaggccggcgccctcgtcgcccgcgccgccgtcctccagcagctcgacaacgtcatcgacgtcatcacctgctcctccatgctctcctccctctgcttcctcggcgccatcgccgtcgaccgctacatctccatcttctacgccctccgctaccactccatcgtcaccctcccccgcgcccgccgcgccgtcgccgccatctgggtcgcctccgtcgtcttctccaccctcttcatcgcctactacgaccacgtcgccgtcctcctctgcctcgtcgtcttcttcctcgccatgctcgtcctcatggccgtcctctacgtccacatgctcgcccgcgcctgccagcacgcccagggcatcgcccgcctccacaagcgccagcgccccgtccaccagggcttcggcctcaagggcgccgtcaccctcaccatcctcctcggcatcttcttcctctgctggggccccttcttcctccacctcaccctcatcgtcctctgccccgagcaccccacctgcggctgcatcttcaagaacttcaacctcttcctcgccctcatcatctgcaacgccatcatcgaccccctcatctacgccttccactcccaggagctccgccgcaccctcaaggaggtcctcacctgctcctggtga

SEQ ID NO: 2719 - RNA, 954 nt, synthetic construct
  misc_feature 1..954: note = derived and/or modified sequence opt3 fromMC1_R__Homo_sapiens__AHC10874
  source 1..954: mol_type = other RNA
atggccgtgcagggcagccaaagaaggctgctcgggtcccttaactctacccccacagctatccctcagctgggattggcagccaatcagactggtgcgcggtgcttagaggtctcaattagtgacggcctgttcctaagcctcgggctggtttcccttgtggaaaacgctctggtagtggccacgatagcaaagaatcgcaacttgcactctccaatgtactgttttatctgctgtctcgccctgtcggagctgctcgtctcaggaagcaatgtgttagaaaccgctgttattctgcttttggaggcaggcgccctggtggctcgagccgcggtcctacagcaactcgataacgtgatcgacgtaattacatgcagttccatgctgtctagcctttgtttcctgggtgcaatcgccgttgatcgttatatatccatcttttacgctttgagatatcattcaattgtgactctcccgagggcccggcgcgcagtcgctgccatctgggtggcgagtgtggtcttcagcaccctgtttattgcctactatgaccacgttgcagtgttactgtgcctcgtagtgttctttcttgctatgctggtcttgatggccgtgctatacgttcatatgctggctagagcctgtcagcacgcacaggggatcgccaggctccataaacggcagcgccccgtgcaccaaggattcggcctgaagggcgctgtcacacttaccatactgttggggatctttttcctctgctggggaccatttttcctgcacttaactctgattgtgctatgtcctgaacatcccacatgcggttgtatttttaaaaatttcaacctcttcctggcgcttatcatctgcaatgcaattatagatcctttgatctatgcctttcactctcaggagctgcgaagaaccctcaaggaggtactgacgtgctcctggtga

SEQ ID NO: 2720 - RNA, 954 nt, synthetic construct
  misc_feature 1..954: note = derived and/or modified sequence opt4 fromMC1_R__Homo_sapiens__AHC10874
  source 1..954: mol_type = other RNA
atggccgtgcagggcagccagagaagactgctgggcagcctgaacagcacccccaccgccatcccccagctgggcctggccgccaaccagaccggcgccagatgcctggaggtgagcatcagcgacggcctgttcctgagcctgggcctggtgagcctggtggagaacgccctggtggtggccaccatcgccaagaacagaaacctgcacagccccatgtactgcttcatctgctgcctggccctgagcgagctgctggtgagcggcagcaacgtgctggagaccgccgtgatcctgctgctggaggccggcgccctggtggccagagccgccgtgctgcagcagctggacaacgtgatcgacgtgatcacctgcagcagcatgctgagcagcctgtgcttcctgggcgccatcgccgtggacagatacatcagcatcttctacgccctgagataccacagcatcgtgaccctgcccagagccagaagagccgtggccgccatctgggtggccagcgtggtgttcagcaccctgttcatcgcctactacgaccacgtggccgtgctgctgtgcctggtggtgttcttcctggccatgctggtgctgatggccgtgctgtacgtgcacatgctggccagagcctgccagcacgcccagggcatcgccagactgcacaagagacagagacccgtgcaccagggcttcggcctgaagggcgccgtgaccctgaccatcctgctgggcatcttcttcctgtgctggggccccttcttcctgcacctgaccctgatcgtgctgtgccccgagcaccccacctgcggctgcatcttcaagaacttcaacctgttcctggccctgatcatctgcaacgccatcatcgaccccctgatctacgccttccacagccaggagctgagaagaaccctgaaggaggtgctgacctgcagctggtga

SEQ ID NO: 2721 - RNA, 954 nt, synthetic construct
  misc_feature 1..954: note = derived and/or modified sequence opt5 fromMC1_R__Homo_sapiens__AHC10874
  source 1..954: mol_type = other RNA
atggccgtgcagggcagccaaagacggctgctcgggtccctgaactctacccccacagctatccctcagcttggactggccgcgaatcagacgggcgctcgctgcctcgaggtcagcatttccgacgggctgttcctttctctgggactcgttagcctggtggaaaacgccctggtggtcgccaccatcgctaagaatagaaacctccactccccgatgtactgttttatttgctgtctggccctttctgagctgctcgtgagcggctccaatgttctggaaacagctgtgatccttctgctcgaggccggggcgctggtcgcccgggctgccgtgctgcagcaactcgataacgttattgacgtgattacctgcagctctatgctgtccagcctttgtttcctgggagctatcgccgtcgatcgctatatctctatcttttacgcgctcagatatcattccattgtgacactgccccgggcccgcagagctgtggccgctatctgggtcgccagcgttgtgttctctaccctttttattgcctactatgaccacgtggctgtcctgctctgcctggtggttttctttctggcgatgctcgtgctgatggccgtcctttacgtgcatatgctggctcgggcctgtcagcacgcccagggcatcgctcgcctccataaaagacagcggcctgttcaccaaggcttcgggctgaagggagccgtgacacttaccattctgctcggcatctttttcctgtgctgggggccctttttcctgcacctcacgctgatcgtcctttgtcctgaacatcctacctgcggatgtatttttaaaaatttcaacctgttcctcgcgctgatcatttgcaatgctatcattgatcccctgatctatgcctttcactcccaggagcttcgcagaacactcaaggaggtgctgacctgcagctggtga

SEQ ID NO: 2722 - protein, 317 aa, synthetic construct [sequence omitted]

SEQ ID NO: 2723 - RNA, 954 nt, synthetic construct
  misc_feature 1..954: note = MC1_R__Homo_sapiens__AHC09597
  source 1..954: mol_type = other RNA
atggctgtgcagggatcccagagaagacttctgggctccctcaactccacccccacagccatcccccagctggggctggctgccaaccagacaggagcccggtgcctggaggtgtccatctctgacgggctcttcctcagcctggggctggtgagcttggtggagaacgcgctggtggtggccaccatcgccaagaaccggaacctgcactcacccatgtactgcttcatctgctgcctggccttgtcggacctgctggtgagcgggagcaacgtgctggagacggccgtcatcctcctgctggaggccggtgcactggtggcccgggctgcggtgctgcagcagctggacaatgtcattgacgtgatcacctgcagctccatgctgtccagcctctgcttcctgggcgccatcgccgtggaccgctacatctccatcttctacgcactgtgctaccacagcatcgtgaccctgccgcgggcgcggcgagccgttgcggccatctgggtggccagtgtcgtcttcagcacgctcttcatcgcctactacgaccacgtggccgtcctgctgtgcctcgtggtcttcttcctggctatgctggtgctcatggccgtgctgtacgtccacatgctggcccgggcctgccagcacgcccagggcatcgcccggctccacaagaggcagcgcccggtccaccagggctttggccttaaaggcgctgtcaccctcaccatcctgctgggcattttcttcctctgctggggccccttcttcctgcatctcacactcatcgtcctctgccccgagcaccccacgtgcggctgcatcttcaagaacttcaacctctttctcgccctcatcatctgcaatgccatcatcgaccccctcatctacgccttccacagccaggagctccgcaggacgctcaaggaggtgctgacatgctcctggtga

SEQ ID NO: 2724 - RNA, 954 nt, synthetic construct
  misc_feature 1..954: note = derived and/or modified sequence opt1 fromMC1_R__Homo_sapiens__AHC09597
  source 1..954: mol_type = other RNA
atggccgtgcagggcagccagcgccggctgctcgggtccctgaacagcacccccaccgccatcccccagctgggcctcgcggccaaccagacgggggcccgctgcctggaggtctccatcagcgacggcctgttcctctccctggggctggtgagcctcgtggagaacgccctggtcgtggccaccatcgcgaagaaccggaacctgcactcccccatgtactgcttcatctgctgcctcgccctgagcgacctgctcgtgtccggcagcaacgtcctggagaccgccgtgatcctgctcctggaggccggcgcgctggtggcccgcgccgccgtcctccagcagctggacaacgtgatcgacgtgatcacgtgctccagcatgctgtccagcctctgcttcctgggggccatcgcggtcgaccggtacatctccatcttctacgccctgtgctaccacagcatcgtgaccctcccccgcgcccggcgcgccgtggccgcgatctgggtcgcctccgtggtgttcagcaccctgttcatcgcctactacgaccacgtcgccgtgctgctctgcctggtggtcttcttcctggccatgctcgtgctgatggcggtgctgtacgtccacatgctcgcccgggcctgccagcacgcccagggcatcgcccgcctgcacaagcggcagcgccccgtgcaccaggggttcggcctgaagggggcggtcaccctcaccatcctgctgggcatcttcttcctctgctggggcccgttcttcctgcacctgacgctcatcgtgctgtgccccgagcacccgacctgcgggtgcatcttcaagaacttcaacctgttcctcgccctgatcatctgcaacgccatcatcgaccccctgatctacgccttccactcccaggagctgcggcgcaccctcaaggaggtgctgacctgcagctggtga

SEQ ID NO: 2725 - RNA, 954 nt, synthetic construct
  misc_feature 1..954: note = derived and/or modified sequence opt2 fromMC1_R__Homo_sapiens__AHC09597
  source 1..954: mol_type = other RNA
atggccgtccagggctcccagcgccgcctcctcggctccctcaactccacccccaccgccatcccccagctcggcctcgccgccaaccagaccggcgcccgctgcctcgaggtctccatctccgacggcctcttcctctccctcggcctcgtctccctcgtcgagaacgccctcgtcgtcgccaccatcgccaagaaccgcaacctccactcccccatgtactgcttcatctgctgcctcgccctctccgacctcctcgtctccggctccaacgtcctcgagaccgccgtcatcctcctcctcgaggccggcgccctcgtcgcccgcgccgccgtcctccagcagctcgacaacgtcatcgacgtcatcacctgctcctccatgctctcctccctctgcttcctcggcgccatcgccgtcgaccgctacatctccatcttctacgccctctgctaccactccatcgtcaccctcccccgcgcccgccgcgccgtcgccgccatctgggtcgcctccgtcgtcttctccaccctcttcatcgcctactacgaccacgtcgccgtcctcctctgcctcgtcgtcttcttcctcgccatgctcgtcctcatggccgtcctctacgtccacatgctcgcccgcgcctgccagcacgcccagggcatcgcccgcctccacaagcgccagcgccccgtccaccagggcttcggcctcaagggcgccgtcaccctcaccatcctcctcggcatcttcttcctctgctggggccccttcttcctccacctcaccctcatcgtcctctgccccgagcaccccacctgcggctgcatcttcaagaacttcaacctcttcctcgccctcatcatctgcaacgccatcatcgaccccctcatctacgccttccactcccaggagctccgccgcaccctcaaggaggtcctcacctgctcctggtga

SEQ ID NO: 2726 - RNA, 954 nt, synthetic construct
  misc_feature 1..954: note = derived and/or modified sequence opt3 fromMC1_R__Homo_sapiens__AHC09597
  source 1..954: mol_type = other RNA
atggccgtgcagggcagccaaagaaggctgctcgggtcccttaactctacccccacagctatccctcagctgggattggcagccaatcagactggtgcgcggtgcttagaggtctcaattagtgacggcctgttcctaagcctcgggctggtttcccttgtggaaaacgctctggtagtggccacgatagcaaagaatcgcaacttgcactctccaatgtactgttttatctgctgtctcgccctgtcggatctgctcgtctcaggaagcaatgtgttagagaccgctgttattctgcttttggaagcaggcgccctggtggctcgagccgcggtcctacagcaactcgacaacgtgatcgatgtaattacatgcagttccatgctgtctagcctttgtttcctgggtgcaatcgccgttgaccgttatatatccatcttttacgctttgtgctatcattcaattgtgactctcccgagagccaggcgggcagtcgctgccatctgggtggcgagtgtggtcttcagcaccctgtttattgcctactatgatcacgttgcagtgttactgtgtctcgtagtgttctttcttgctatgctggtcttgatggccgtgctatacgttcatatgctggctcgcgcctgccagcacgcacaggggatcgccagactccataaaaggcagcggcccgtgcaccaaggattcggcctgaagggcgctgtcacacttaccatactgttggggatctttttcctctgttggggaccatttttcctgcacttaactctgattgtgctatgccctgagcatcccacatgtggttgcatttttaaaaatttcaacctcttcctggcgcttatcatctgcaatgcaattatagaccctttgatctatgcctttcactctcaggaactgcgccgaaccctcaaggaggtactgacgtgttcctggtga

SEQ ID NO: 2727 - RNA, 954 nt, synthetic construct
  misc_feature 1..954: note = derived and/or modified sequence opt4 fromMC1_R__Homo_sapiens__AHC09597
  source 1..954: mol_type = other RNA
atggccgtgcagggcagccagagaagactgctgggcagcctgaacagcacccccaccgccatcccccagctgggcctggccgccaaccagaccggcgccagatgcctggaggtgagcatcagcgacggcctgttcctgagcctgggcctggtgagcctggtggagaacgccctggtggtggccaccatcgccaagaacagaaacctgcacagccccatgtactgcttcatctgctgcctggccctgagcgacctgctggtgagcggcagcaacgtgctggagaccgccgtgatcctgctgctggaggccggcgccctggtggccagagccgccgtgctgcagcagctggacaacgtgatcgacgtgatcacctgcagcagcatgctgagcagcctgtgcttcctgggcgccatcgccgtggacagatacatcagcatcttctacgccctgtgctaccacagcatcgtgaccctgcccagagccagaagagccgtggccgccatctgggtggccagcgtggtgttcagcaccctgttcatcgcctactacgaccacgtggccgtgctgctgtgcctggtggtgttcttcctggccatgctggtgctgatggccgtgctgtacgtgcacatgctggccagagcctgccagcacgcccagggcatcgccagactgcacaagagacagagacccgtgcaccagggcttcggcctgaagggcgccgtgaccctgaccatcctgctgggcatcttcttcctgtgctggggccccttcttcctgcacctgaccctgatcgtgctgtgccccgagcaccccacctgcggctgcatcttcaagaacttcaacctgttcctggccctgatcatctgcaacgccatcatcgaccccctgatctacgccttccacagccaggagctgagaagaaccctgaaggaggtgctgacctgcagctggtga

SEQ ID NO: 2728 - RNA, 954 nt, synthetic construct
  misc_feature 1..954: note = derived and/or modified sequence opt5 fromMC1_R__Homo_sapiens__AHC09597
  source 1..954: mol_type = other RNA
atggccgtgcagggcagccaaagacggctgctcgggtccctgaactctacccccacagctatccctcagcttggactggccgcgaatcagacgggcgctcgctgcctcgaggtcagcatttccgacgggctgttcctttctctgggactcgttagcctggtggaaaacgccctggtggtcgccaccatcgctaagaatagaaacctccactccccgatgtactgttttatttgctgtctggccctttctgatctgctcgtgagcggctccaatgttctggagacagctgtgatccttctgctcgaagccggggcgctggtcgcccgggctgccgtgctgcagcaactcgacaacgttattgatgtgattacctgcagctctatgctgtccagcctttgtttcctgggagctatcgccgtcgaccgctatatctctatcttttacgcgctctgctatcattccattgtgacactgcccagagcccggcgcgctgtggccgctatctgggtcgccagcgttgtgttctctaccctttttattgcctactatgatcacgtggctgtcctgctctgtctggtggttttctttctggcgatgctcgtgctgatggccgtcctttacgtgcatatgctggctagagcctgccagcacgcccagggcatcgctcggctccataaacgccagagacctgttcaccaaggcttcgggctgaagggagccgtgacacttaccattctgctcggcatctttttcctgtgttgggggccctttttcctgcacctcacgctgatcgtcctttgccctgagcatcccacctgtggatgcatttttaaaaatttcaacctgttcctcgcgctgatcatttgcaatgctatcattgaccctctgatctatgcctttcactcccaggaacttcggcgcacactcaaggaggtgctgacctgtagctggtga

SEQ ID NO: 2729 - protein, 630 aa, synthetic construct
  REGION 1..630: note = mesothelin__Homo_sapiens__Q13421
MALPTARPLLGSCGTPALGSLLFLLFSLGWVQPSRTLAGETGQEAAPLDGVLANPPNISSLSPRQLLGFPCAEVSGLSTERVRELAVALAQKNVKLSTEQLRCLAHRLSEPPEDLDALPLDLLLFLNPDAFSGPQACTRFFSRITKANVDLLPRGAPERQRLLPAALACWGVRGSLLSEADVRALGGLACDLPGRFVAESAEVLLPRLVSCPGPLDQDQQEAARAALQGGGPPYGPPSTWSVSTMDALRGLLPVLGQPIIRSIPQGIVAAWRQRSSRDPSWRQPERTILRPRFRREVEKTACPSGKKAREIDESLIFYKKWELEACVDAALLATQMDRVNAIPFTYEQLDVLKHKLDELYPQGYPESVIQHLGYLFLKMSPEDIRKWNVTSLETLKALLEVNKGHEMSPQAPRRPLPQVATLIDRFVKGRGQLDKDTLDTLTAFYPGYLCSLSPEELSSVPPSSIWAVRPQDLDTCDPRQLDVLYPKARLAFQNMNGSEYFVKIQSFLGGAPTEDLKALSQQNVSMDLATFMKLRTDAVLPLTVAEVQKLLGPHVEGLKAEERHRPVRDWILRQRQDDLDTLGLGLQGGIPNGYLVLDLSMQEALSGTPCLLGPGPVLTVLALLLASTLA

SEQ ID NO: 2730 - RNA, 1893 nt, synthetic construct
  misc_feature 1..1893: note = mesothelin__Homo_sapiens__EAW85719
  source 1..1893: mol_type = other RNA
atggccttgccaacggctcgacccctgttggggtcctgtgggacccccgccctcggcagcctcctgttcctgctcttcagcctcggatgggtgcagccctcgaggaccctggctggagagacagggcaggaggctgcgcccctggacggagtcctggccaacccacctaacatttccagcctctcccctcgccaactccttggcttcccgtgtgcggaggtgtccggcctgagcacggagcgtgtccgggagctggctgtggccttggcacagaagaatgtcaagctctcaacagagcagctgcgctgtctggctcaccggctctctgagccccccgaggacctggacgccctcccattggacctgctgctattcctcaacccagatgcgttctcggggccccaggcctgcacccgtttcttctcccgcatcacgaaggccaatgtggacctgctcccgaggggggctcccgagcgacagcggctgctgcctgcggctctggcctgctggggtgtgcgggggtctctgctgagcgaggctgatgtgcgggctctgggaggcctggcttgcgacctgcctgggcgctttgtggccgagtcggccgaagtgctgctaccccggctggtgagctgcccgggacccctggaccaggaccagcaggaggcagccagggcggctctgcagggcgggggacccccctacggccccccgtcgacatggtctgtctccacgatggacgctctgcggggcctgctgcccgtgctgggccagcccatcatccgcagcatcccgcagggcatcgtggccgcgtggcggcaacgctcctctcgggacccatcctggcggcagcctgaacggaccatcctccggccgcggttccggcgggaagtggagaagacagcctgtccttcaggcaagaaggcccgcgagatagacgagagcctcatcttctacaagaagtgggagctggaagcctgcgtggatgcggccctgctggccacccagatggaccgcgtgaacgccatccccttcacctacgagcagctggacgtcctaaagcataaactggatgagctctacccacaaggttaccccgagtctgtgatccagcacctgggctacctcttcctcaagatgagccctgaggacattcgcaagtggaatgtgacgtccctggagaccctgaaggctttgcttgaagtcaacaaagggcacgaaatgagtcctcaggctcctcggcggcccctcccacaggtggccaccctgatcgaccgctttgtgaagggaaggggccagctagacaaagacaccctagacaccctgaccgccttctaccctgggtacctgtgctccctcagccccgaggagctgagctccgtgccccccagcagcatctgggcggtcaggccccaggacctggacacgtgtgacccaaggcagctggacgtcctctatcccaaggcccgccttgctttccagaacatgaacgggtccgaatacttcgtgaagatccagtccttcctgggtggggcccccacggaggatttgaaggcgctcagtcagcagaatgtgagcatggacttggccacgttcatgaagctgcggacggatgcggtgctgccgttgactgtggctgaggtgcagaaacttctgggaccccacgtggagggcctgaaggcggaggagcggcaccgcccggtgcgggactggatcctacggcagcggcaggacgacctggacacgctggggctggggctacagggcggcatccccaacggctacctggtcctagacctcagcatgcaagaggccctctcggggacgccctgcctcctaggacctggacctgttctcaccgtcctggcactgctcctagcctccaccctggcctga

SEQ ID NO: 2731 - RNA, 1893 nt, synthetic construct
  misc_feature 1..1893: note = derived and/or modified sequence opt1 frommesothelin__Homo_sapiens__EAW85719
  source 1..1893: mol_type = other RNA
atggccctgcccaccgcccgcccgctcctgggcagctgcgggacccccgcgctgggctccctcctgttcctcctgttcagcctggggtgggtgcagccctcccggacgctggccggcgagaccgggcaggaggccgcgcccctcgacggcgtcctggccaacccgcccaacatcagctccctgagcccccgccagctcctgggcttcccctgcgccgaggtgtccgggctgagcaccgagcgggtgcgcgagctcgccgtcgccctggcccagaagaacgtgaagctgtccaccgagcagctccggtgcctggcgcaccgcctgagcgagccgcccgaggacctcgacgccctgcccctggacctcctgctgttcctcaaccccgacgccttctccggcccgcaggcctgcacgcggttcttcagccgcatcaccaaggccaacgtggacctgctgccccgcggggcgcccgagcggcagcggctcctgcccgccgccctggcctgctggggcgtccgcgggtccctcctgagcgaggccgacgtgcgggcgctgggcggcctcgcctgcgacctgccggggcgcttcgtggccgagtccgccgaggtcctgctcccccggctggtgagctgccccggccccctggaccaggaccagcaggaggccgcgcgcgccgccctccagggcgggggcccgccctacgggccgccctccacctggagcgtgtccaccatggacgccctgcggggcctgctccccgtcctggggcagcccatcatccgcagcatcccccagggcatcgtggccgcgtggcggcagcgcagctcccgggaccccagctggcgccagccggagcgcacgatcctgcggccccgcttccggcgcgaggtggagaagaccgcctgcccctccgggaagaaggcccgggagatcgacgagagcctcatcttctacaagaagtgggagctggaggcctgcgtcgacgcggccctgctggccacccagatggaccgcgtgaacgccatcccgttcacctacgagcagctcgacgtgctgaagcacaagctggacgagctctacccccagggctaccccgagtccgtcatccagcacctgggctacctgttcctcaagatgagccccgaggacatccggaagtggaacgtgacgtccctggagaccctgaaggccctcctggaggtgaacaaggggcacgagatgagcccgcaggcgccccgccggcccctgccccaggtcgccaccctcatcgaccgcttcgtgaagggccgggggcagctggacaaggacaccctggacacgctcaccgccttctacccgggctacctgtgctccctgagccccgaggagctctccagcgtgccgccctccagcatctgggccgtccgcccccaggacctggacacgtgcgacccccggcagctggacgtgctctaccccaaggcccgcctggcgttccagaacatgaacgggtccgagtacttcgtcaagatccagagcttcctgggcggcgcccccaccgaggacctcaaggccctgtcccagcagaacgtgagcatggacctggccaccttcatgaagctccggaccgacgccgtgctgccgctgaccgtcgcggaggtgcagaagctcctggggccccacgtggagggcctgaaggccgaggagcgccaccggcccgtccgcgactggatcctccggcagcgccaggacgacctggacaccctggggctcggcctgcagggcgggatccccaacggctacctggtgctcgacctgtccatgcaggaggccctgagcgggacgccgtgcctcctgggccccgggcccgtgctgaccgtcctcgccctgctgctcgcgagcaccctggcctga

SEQ ID NO: 2732 - RNA, 1893 nt, synthetic construct
  misc_feature 1..1893: note = derived and/or modified sequence opt2 frommesothelin__Homo_sapiens__EAW85719
  source 1..1893: mol_type = other RNA
atggccctccccaccgcccgccccctcctcggctcctgcggcacccccgccctcggctccctcctcttcctcctcttctccctcggctgggtccagccctcccgcaccctcgccggcgagaccggccaggaggccgcccccctcgacggcgtcctcgccaacccccccaacatctcctccctctccccccgccagctcctcggcttcccctgcgccgaggtctccggcctctccaccgagcgcgtccgcgagctcgccgtcgccctcgcccagaagaacgtcaagctctccaccgagcagctccgctgcctcgcccaccgcctctccgagccccccgaggacctcgacgccctccccctcgacctcctcctcttcctcaaccccgacgccttctccggcccccaggcctgcacccgcttcttctcccgcatcaccaaggccaacgtcgacctcctcccccgcggcgcccccgagcgccagcgcctcctccccgccgccctcgcctgctggggcgtccgcggctccctcctctccgaggccgacgtccgcgccctcggcggcctcgcctgcgacctccccggccgcttcgtcgccgagtccgccgaggtcctcctcccccgcctcgtctcctgccccggccccctcgaccaggaccagcaggaggccgcccgcgccgccctccagggcggcggccccccctacggccccccctccacctggtccgtctccaccatggacgccctccgcggcctcctccccgtcctcggccagcccatcatccgctccatcccccagggcatcgtcgccgcctggcgccagcgctcctcccgcgacccctcctggcgccagcccgagcgcaccatcctccgcccccgcttccgccgcgaggtcgagaagaccgcctgcccctccggcaagaaggcccgcgagatcgacgagtccctcatcttctacaagaagtgggagctcgaggcctgcgtcgacgccgccctcctcgccacccagatggaccgcgtcaacgccatccccttcacctacgagcagctcgacgtcctcaagcacaagctcgacgagctctacccccagggctaccccgagtccgtcatccagcacctcggctacctcttcctcaagatgtcccccgaggacatccgcaagtggaacgtcacctccctcgagaccctcaaggccctcctcgaggtcaacaagggccacgagatgtccccccaggccccccgccgccccctcccccaggtcgccaccctcatcgaccgcttcgtcaagggccgcggccagctcgacaaggacaccctcgacaccctcaccgccttctaccccggctacctctgctccctctcccccgaggagctctcctccgtccccccctcctccatctgggccgtccgcccccaggacctcgacacctgcgacccccgccagctcgacgtcctctaccccaaggcccgcctcgccttccagaacatgaacggctccgagtacttcgtcaagatccagtccttcctcggcggcgcccccaccgaggacctcaaggccctctcccagcagaacgtctccatggacctcgccaccttcatgaagctccgcaccgacgccgtcctccccctcaccgtcgccgaggtccagaagctcctcggcccccacgtcgagggcctcaaggccgaggagcgccaccgccccgtccgcgactggatcctccgccagcgccaggacgacctcgacaccctcggcctcggcctccagggcggcatccccaacggctacctcgtcctcgacctctccatgcaggaggccctctccggcaccccctgcctcctcggccccggccccgtcctcaccgtcctcgccctcctcctcgcctccaccctcgcctga

SEQ ID NO: 2733 - RNA, 1893 nt, synthetic construct
  misc_feature 1..1893: note = derived and/or modified sequence opt3 frommesothelin__Homo_sapiens__EAW85719
  source 1..1893: mol_type = other RNA
atggccctgcccaccgctagacctctccttggcagctgcgggacaccagcactgggatccttgttattcctgctattttctctcggttgggtgcagccgtcaaggactctggccggcgagacggggcaagaagcggctccccttgacggagtcctggccaaccctccaaatatcagtagcttgtctccccggcagctcctgggcttcccttgtgcagaggtttccggtctgtcgaccgaacgcgtgcgagagctcgccgtagctttagcacagaagaacgtgaaactgtcaacagaacagcttcgttgcttggcccacagactgagcgagccacccgaggatctagacgctctccctctggatcttctgttgtttctcaatccagacgccttcagtgggccgcaagcgtgtactaggtttttctcccggattaccaaggcaaacgtcgatctgttaccccgcggagcccctgaaagacagaggctgctcccagctgcccttgcatgctggggcgtgcggggctctctgttgagcgaggctgacgttcgcgccctagggggactggcgtgtgatctccccggtcgatttgtggccgaatccgcagaggtcctgcttcctagactggtgtcatgcccaggccccttggaccaggatcagcaagaggctgccagggctgccctccaagggggaggcccgccttacggtcccccaagtacatggagcgtatctaccatggacgcactgcgggggttactgcctgttctaggacagcccataatccgttccattccacagggcatcgtggccgcttggcgccagagatcaagcagggatcccagttggcggcagcctgaacgaactattctccgcccaagattcaggcgggaggtcgaaaagacagcgtgtccgtctggcaagaaagcacgcgagatcgacgaatccctgatattttataagaagtgggagcttgaggcctgcgtggatgctgccttgctggcaacccagatggacagagtgaatgccatccccttcacgtacgaacaactcgacgtcctgaaacataaacttgatgagctgtatcctcaggggtacccagaaagcgttattcagcacttgggatatctctttctgaaaatgtcgcccgaggacatcaggaagtggaacgtgacttctttagaaaccctgaaagctctactcgaggtaaataagggtcatgagatgtcccctcaggccccacgtcggcccctgccgcaagtggcaacacttattgatcgattcgtcaagggcagagggcagttggacaaagatactctggacaccctcacagcgttttaccctggatatctgtgttcattaagtccagaggaactgagctccgtgcccccttctagcatctgggctgttaggccccaggatcttgatacctgcgacccacgccagttggacgtgctctaccctaaggcccggctggcattccaaaacatgaatggctcagaatacttcgtcaaaatacagagttttctaggtggggcccccacggaggatctgaaggctctctcccagcagaacgtgagcatggacctggccactttcatgaaacttagaacagacgcagtattgccactgaccgttgctgaagtgcaaaagttactcggcccgcacgtcgagggactgaaagccgaggaaaggcatcgccctgtgcgagattggattcttcggcagcgtcaggacgatctggacactttgggcctcgggctgcagggaggtatccccaatggctatctagtcctggatctctctatgcaagaggcgctgtcagggacaccatgtcttttgggacccggccctgtgctgaccgttttagccctcctgcttgctagtacgctggcatga

SEQ ID NO: 2734 - RNA, 1893 nt, synthetic construct
  misc_feature 1..1893: note = derived and/or modified sequence opt4 frommesothelin__Homo_sapiens__EAW85719
  source 1..1893: mol_type = other RNA
atggccctgcccaccgccagacccctgctgggcagctgcggcacccccgccctgggcagcctgctgttcctgctgttcagcctgggctgggtgcagcccagcagaaccctggccggcgagaccggccaggaggccgcccccctggacggcgtgctggccaacccccccaacatcagcagcctgagccccagacagctgctgggcttcccctgcgccgaggtgagcggcctgagcaccgagagagtgagagagctggccgtggccctggcccagaagaacgtgaagctgagcaccgagcagctgagatgcctggcccacagactgagcgagccccccgaggacctggacgccctgcccctggacctgctgctgttcctgaaccccgacgccttcagcggcccccaggcctgcaccagattcttcagcagaatcaccaaggccaacgtggacctgctgcccagaggcgcccccgagagacagagactgctgcccgccgccctggcctgctggggcgtgagaggcagcctgctgagcgaggccgacgtgagagccctgggcggcctggcctgcgacctgcccggcagattcgtggccgagagcgccgaggtgctgctgcccagactggtgagctgccccggccccctggaccaggaccagcaggaggccgccagagccgccctgcagggcggcggccccccctacggcccccccagcacctggagcgtgagcaccatggacgccctgagaggcctgctgcccgtgctgggccagcccatcatcagaagcatcccccagggcatcgtggccgcctggagacagagaagcagcagagaccccagctggagacagcccgagagaaccatcctgagacccagattcagaagagaggtggagaagaccgcctgccccagcggcaagaaggccagagagatcgacgagagcctgatcttctacaagaagtgggagctggaggcctgcgtggacgccgccctgctggccacccagatggacagagtgaacgccatccccttcacctacgagcagctggacgtgctgaagcacaagctggacgagctgtacccccagggctaccccgagagcgtgatccagcacctgggctacctgttcctgaagatgagccccgaggacatcagaaagtggaacgtgaccagcctggagaccctgaaggccctgctggaggtgaacaagggccacgagatgagcccccaggcccccagaagacccctgccccaggtggccaccctgatcgacagattcgtgaagggcagaggccagctggacaaggacaccctggacaccctgaccgccttctaccccggctacctgtgcagcctgagccccgaggagctgagcagcgtgccccccagcagcatctgggccgtgagaccccaggacctggacacctgcgaccccagacagctggacgtgctgtaccccaaggccagactggccttccagaacatgaacggcagcgagtacttcgtgaagatccagagcttcctgggcggcgcccccaccgaggacctgaaggccctgagccagcagaacgtgagcatggacctggccaccttcatgaagctgagaaccgacgccgtgctgcccctgaccgtggccgaggtgcagaagctgctgggcccccacgtggagggcctgaaggccgaggagagacacagacccgtgagagactggatcctgagacagagacaggacgacctggacaccctgggcctgggcctgcagggcggcatccccaacggctacctggtgctggacctgagcatgcaggaggccctgagcggcaccccctgcctgctgggccccggccccgtgctgaccgtgctggccctgctgctggccagcaccctggcctga

SEQ ID NO: 2735 - RNA, 1893 nt, synthetic construct
  misc_feature 1..1893: note = derived and/or modified sequence opt5 frommesothelin__Homo_sapiens__EAW85719
  source 1..1893: mol_type = other RNA
atggccctgcccaccgctagacctctcctgggcagctgcgggacaccggcccttggatcccttctcttcctgctgttttctctgggctgggtgcagcccagccggacgctcgcgggggagaccggacaagaagctgcccctctggacggcgtcctggccaatccccctaacatctcctctctcagcccccgccagctgcttgggttcccttgtgctgaggtttccggactgtctacagaaagagtgcgggagctcgccgtggctctggcccagaagaacgtcaaacttagcaccgaacagctgcgctgcctcgcgcacagactgtccgagccgcccgaggatctggacgccctccctctggatcttctgctctttctgaatcccgacgctttcagcggccctcaagcctgtacacggtttttctctcgcattaccaaggctaacgtggatcttctgcccagaggcgccccggaacggcagcgcctcctgcctgcggccctggcttgctggggcgttagaggatccctcctgagcgaggccgacgtgcgggctcttggcgggctggcctgtgatctccccggacgctttgtcgccgaatctgctgaggtgctgcttcctagactggtttcctgccccggccccctcgaccaggatcagcaagaggcggcccgggctgccctgcaagggggaggccctccgtacgggccccctagcacatggtctgtgtccaccatggacgccctgcgcgggctcctgcccgtccttggacagcctatcattagaagcatcccccagggcattgtggctgcctggcggcagagatcctctcgcgatccgagctggcggcagcctgaaagaacgatcctgcgcccccggttcagacgcgaggtggagaaaaccgcgtgtccttccgggaagaaagctcgggagatcgacgaaagcctcatcttttataagaagtgggagctggaggcctgcgtcgatgccgctctgcttgccacacagatggacagagttaatgctattcccttcacctacgaacaactcgacgtgctgaaacataagctggatgagctctatcctcagggataccccgaatctgtgattcagcacctgggctatctttttctgaaaatgtccccggaggacatccgcaagtggaacgtcacaagcctcgaaaccctgaaagccctgcttgaggtgaataaggggcatgagatgtctcctcaggcgccccggagacccctccctcaagttgccacgctgattgatcgcttcgtgaagggacggggccagctggacaaagatacactcgacaccctgacagctttttacccgggctatctttgtagcctgtcccccgaagaactctctagcgtccctccctccagcatctgggccgtgagacctcaggatctggatacctgcgacccccggcagctggacgttctttaccctaaggctcgcctcgccttccaaaacatgaatgggtctgaatacttcgtgaaaattcagtcctttctgggaggcgcgcccaccgaggatctgaaggccctcagccagcagaacgtctctatggacctggctacattcatgaaacttagaacggacgccgtgctgccgctcaccgtcgctgaagtgcaaaagctgctggggcctcacgttgagggacttaaagccgaggaacggcatagacccgtgcgcgattggatcctccggcagagacaggacgatctggacacactgggcctcgggctgcagggcggaatccctaatggctatcttgtcctggatctctccatgcaagaggccctgagcgggaccccctgtctgcttggaccgggccctgtgctgacagttctcgctctgctcctggcgtccacccttgcctga

SEQ ID NO: 2736 - protein, 504 aa, synthetic construct
  REGION 1..504: note = MITF__Homo_sapiens__O75030-8
MEALRVQMFMPCSFESLYLSSAEHPGASKPPISSSSMTSRILLRQQLMREQMQEQERREQQQKLQAAQFMQQRVPVSQTPAINVSVPTTLPSATQVPMEVLKVQTHLENPTKYHIQQAQRQQVKQYLSTTLANKHANQVLSLPCPNQPGDHVMPPVPGSSAPNSPMAMLTLNSNCEKEGFYKFEEQNRAESECPGMNTHSRASCMQMDDVIDDIISLESSYNEEILGLMDPALQMANTLPVSGNLIDLYGNQGLPPPGLTISNSCPANLPNIKRELTESEARALAKERQKKDNHNLIERRRRFNINDRIKELGTLIPKSNDPDMRWNKGTILKASVDYIRKLQREQQRAKELENRQKKLEHANRHLLLRIQELEMQARAHGLSLIPSTGLCSPDLVNRIIKQEPVLENCSQDLLQHHADLTCTTTLDLTDGTITFNNNLGTGTEANQAYSVPTKMGSKLEDILMDDTLSPVGVTDPLLSSVSPGASKTSSRRSSMSMEETEHTC

SEQ ID NO: 2737 - RNA, 1515 nt, synthetic construct
  misc_feature 1..1515: note = MITF__Homo_sapiens__CCDS46865.1
  source 1..1515: mol_type = other RNA
atggaggcgcttagagttcagatgttcatgccatgctcctttgaaagcttgtatctcagttccgccgagcatcctggggcctccaagcctccgataagctcctccagtatgacatcacgcatcttgctacgccagcaactcatgcgtgagcagatgcaggagcaggagcgcagggagcagcagcagaagctgcaggcggcccagttcatgcaacagagagtgcccgtgagtcagacaccagccataaacgtcagtgtgcccaccacccttccctctgccacgcaggtgccgatggaagtccttaaggtgcagacccacctcgaaaaccccaccaagtaccacatacagcaagcccaacggcagcaggtaaagcagtacctttctaccactttagcaaataaacatgccaaccaagtcctgagcttgccatgtccaaaccagcctggcgatcatgtcatgccaccggtgccggggagcagcgcacccaacagccccatggctatgcttacgcttaactccaactgtgaaaaagagggattttataagtttgaagagcaaaacagggcagagagcgagtgcccaggcatgaacacacattcacgagcgtcctgtatgcagatggatgatgtaatcgatgacatcattagcctagaatcaagttataatgaggaaatcttgggcttgatggatcctgctttgcaaatggcaaatacgttgcctgtctcgggaaacttgattgatctttatggaaaccaaggtctgcccccaccaggcctcaccatcagcaactcctgtccagccaaccttcccaacataaaaagggagctcacagagtctgaagcaagagcactggccaaagagaggcagaaaaaggacaatcacaacctgattgaacgaagaagaagatttaacataaatgaccgcattaaagaactaggtactttgattcccaagtcaaatgatccagacatgcgctggaacaagggaaccatcttaaaagcatccgtggactatatccgaaagttgcaacgagaacagcaacgcgcaaaagaacttgaaaaccgacagaagaaactggagcacgccaaccggcatttgttgctcagaatacaggaacttgaaatgcaggctcgagctcatggactttcccttattccatccacgggtctctgctctccagatttggtgaatcggatcatcaagcaagaacccgttcttgagaactgcagccaagacctccttcagcatcatgcagacctaacctgtacaacaactctcgatctcacggatggcaccatcaccttcaacaacaacctcggaactgggactgaggccaaccaagcctatagtgtccccacaaaaatgggatccaaactggaagacatcctgatggacgacaccctttctcccgtcggtgtcactgatccactcctttcctcagtgtcccccggagcttccaaaacaagcagccggaggagcagtatgagcatggaagagacggagcacacttgttag

SEQ ID NO: 2738 - RNA, 1515 nt, synthetic construct
  misc_feature 1..1515: note = derived and/or modified sequence opt1 fromMITF__Homo_sapiens__CCDS46865.1
  source 1..1515: mol_type = other RNA
atggaggccctgcgcgtgcagatgttcatgccctgcagcttcgagtccctctacctgagctccgccgagcacccgggcgcgagcaagccgcccatctccagctccagcatgacctcccggatcctgctccgccagcagctgatgcgggagcagatgcaggagcaggagcgccgggagcagcagcagaagctgcaggccgcccagttcatgcagcagcgcgtccccgtgagccagacccccgccatcaacgtgtccgtccccaccaccctccccagcgccacccaggtgcccatggaggtgctgaaggtccagacccacctggagaacccgacgaagtaccacatccagcaggcgcagcggcagcaggtcaagcagtacctctccaccaccctggccaacaagcacgccaaccaggtgctgagcctcccctgccccaaccagcccggggaccacgtgatgccgcccgtgcccggctccagcgcccccaactccccgatggcgatgctgaccctgaacagcaactgcgagaaggaggggttctacaagttcgaggagcagaaccgcgccgagtccgagtgccccggcatgaacacgcacagccgggccagctgcatgcagatggacgacgtgatcgacgacatcatctccctcgagagctcctacaacgaggagatcctggggctgatggaccccgccctccagatggccaacaccctgcccgtcagcggcaacctgatcgacctctacggcaaccaggggctgccgccgcccggcctgaccatctccaacagctgccccgcgaacctccccaacatcaagcgcgagctgaccgagtccgaggcccgggccctggccaaggagcgccagaagaaggacaaccacaacctcatcgagcggcgccggcgcttcaacatcaacgaccggatcaaggagctggggacgctgatccccaagagcaacgaccccgacatgcgctggaacaagggcaccatcctcaaggcctccgtggactacatccggaagctgcagcgcgagcagcagcgggcgaaggagctggagaaccgccagaagaagctcgagcacgccaaccgccacctcctgctccggatccaggagctggagatgcaggcccgcgcccacgggctgagcctcatcccctccaccggcctgtgcagcccggacctggtgaaccggatcatcaagcaggagcccgtcctcgagaactgctcccaggacctgctgcagcaccacgccgacctgacctgcacgaccaccctggacctgaccgacggcacgatcaccttcaacaacaacctcgggaccggcaccgaggcgaaccaggcctacagcgtgcccacgaagatggggtccaagctggaggacatcctgatggacgacaccctgagcccggtgggcgtcaccgaccccctcctgtccagcgtgtcccccggcgccagcaagaccagctcccgccggagctccatgagcatggaggagacggagcacacgtgctga

SEQ ID NO: 2739 - RNA, 1515 nt, synthetic construct
  misc_feature 1..1515: note = derived and/or modified sequence opt2 fromMITF__Homo_sapiens__CCDS46865.1
  source 1..1515: mol_type = other RNA
atggaggccctccgcgtccagatgttcatgccctgctccttcgagtccctctacctctcctccgccgagcaccccggcgcctccaagccccccatctcctcctcctccatgacctcccgcatcctcctccgccagcagctcatgcgcgagcagatgcaggagcaggagcgccgcgagcagcagcagaagctccaggccgcccagttcatgcagcagcgcgtccccgtctcccagacccccgccatcaacgtctccgtccccaccaccctcccctccgccacccaggtccccatggaggtcctcaaggtccagacccacctcgagaaccccaccaagtaccacatccagcaggcccagcgccagcaggtcaagcagtacctctccaccaccctcgccaacaagcacgccaaccaggtcctctccctcccctgccccaaccagcccggcgaccacgtcatgccccccgtccccggctcctccgcccccaactcccccatggccatgctcaccctcaactccaactgcgagaaggagggcttctacaagttcgaggagcagaaccgcgccgagtccgagtgccccggcatgaacacccactcccgcgcctcctgcatgcagatggacgacgtcatcgacgacatcatctccctcgagtcctcctacaacgaggagatcctcggcctcatggaccccgccctccagatggccaacaccctccccgtctccggcaacctcatcgacctctacggcaaccagggcctccccccccccggcctcaccatctccaactcctgccccgccaacctccccaacatcaagcgcgagctcaccgagtccgaggcccgcgccctcgccaaggagcgccagaagaaggacaaccacaacctcatcgagcgccgccgccgcttcaacatcaacgaccgcatcaaggagctcggcaccctcatccccaagtccaacgaccccgacatgcgctggaacaagggcaccatcctcaaggcctccgtcgactacatccgcaagctccagcgcgagcagcagcgcgccaaggagctcgagaaccgccagaagaagctcgagcacgccaaccgccacctcctcctccgcatccaggagctcgagatgcaggcccgcgcccacggcctctccctcatcccctccaccggcctctgctcccccgacctcgtcaaccgcatcatcaagcaggagcccgtcctcgagaactgctcccaggacctcctccagcaccacgccgacctcacctgcaccaccaccctcgacctcaccgacggcaccatcaccttcaacaacaacctcggcaccggcaccgaggccaaccaggcctactccgtccccaccaagatgggctccaagctcgaggacatcctcatggacgacaccctctcccccgtcggcgtcaccgaccccctcctctcctccgtctcccccggcgcctccaagacctcctcccgccgctcctccatgtccatggaggagaccgagcacacctgctga

SEQ ID NO: 2740 - RNA, 1515 nt, synthetic construct
  misc_feature 1..1515: note = derived and/or modified sequence opt3 fromMITF__Homo_sapiens__CCDS46865.1
  source 1..1515: mol_type = other RNA
atggaggccctgagagtgcagatgttcatgccctgcagctttgaatccctctacctttcttcagctgagcaccctggcgcaagtaagccaccgatcagctcctcttcgatgacctcaaggattctgttgcggcaacagttaatgcgcgaacagatgcaggagcaagaacgacgtgagcagcagcagaaactgcaagccgcgcagttcatgcagcagagagtccccgttagccaaactcctgctataaacgtgagtgtaccaacaacgctaccctccgccacccaggtgcctatggaggtcctcaaggtgcagacacatctggaaaatccaactaaatatcacatccaacaggcacagaggcagcaagttaagcagtacctttctaccacactggccaacaaacatgctaatcaggtgttgagcctcccctgtcctaaccagccaggggaccacgtcatgccgcccgtgcctggatcctcagcaccaaatagtcccatggccatgctgaccctgaacagcaattgcgagaaggaaggtttttataagttcgaggagcaaaaccgggctgaatctgagtgtcctggcatgaatactcattcccgcgcctcatgcatgcagatggatgacgtaattgatgacatcattagcctcgaaagttcttacaacgaggaaatcttagggctgatggatccagcgcttcagatggcaaatacattgcccgtttccggaaacctgatagacctatatggcaatcagggtctcccgcctcccgggctgaccatcagcaactcgtgtccagccaatcttcctaacattaaaagagagctgacggagtctgaagctagggccttggcaaaggagcggcagaaaaaggataaccacaatctcatcgaacgccgaagaaggtttaacattaatgaccggatcaaagagctgggaactttaatacccaagtccaacgatccagacatgcgttggaataagggcaccattctgaaggcttcagtggattacatccgcaagctccaaagagaacagcagagggccaaagagcttgagaaccggcaaaagaaactggaacacgcgaatcgacatttgctactgcgcattcaggagctcgaaatgcaggccagagcacacggcctgagtcttatccccagcacagggctgtgctcccctgacttggtcaacaggatcattaagcaagagccagtgctcgaaaattgttctcaggatctgttacagcatcacgctgacctgacttgcaccacaaccctagacctcacggatggaactataacattcaacaataacctgggtaccggcactgaggccaatcaggcttatagcgtgccgacaaaaatggggtcaaaacttgaggacatcttgatggatgacaccctgagtcccgtcggagttacggatcctctcctgtccagcgtgtctccaggcgcctcaaagaccagtagccggcgctcctctatgtcgatggaagagacagaacacacttgttga

SEQ ID NO: 2741 - RNA, 1515 nt, synthetic construct
  misc_feature 1..1515: note = derived and/or modified sequence opt4 fromMITF__Homo_sapiens__CCDS46865.1
  source 1..1515: mol_type = other RNA
atggaggccctgagagtgcagatgttcatgccctgcagcttcgagagcctgtacctgagcagcgccgagcaccccggcgccagcaagccccccatcagcagcagcagcatgaccagcagaatcctgctgagacagcagctgatgagagagcagatgcaggagcaggagagaagagagcagcagcagaagctgcaggccgcccagttcatgcagcagagagtgcccgtgagccagacccccgccatcaacgtgagcgtgcccaccaccctgcccagcgccacccaggtgcccatggaggtgctgaaggtgcagacccacctggagaaccccaccaagtaccacatccagcaggcccagagacagcaggtgaagcagtacctgagcaccaccctggccaacaagcacgccaaccaggtgctgagcctgccctgccccaaccagcccggcgaccacgtgatgccccccgtgcccggcagcagcgcccccaacagccccatggccatgctgaccctgaacagcaactgcgagaaggagggcttctacaagttcgaggagcagaacagagccgagagcgagtgccccggcatgaacacccacagcagagccagctgcatgcagatggacgacgtgatcgacgacatcatcagcctggagagcagctacaacgaggagatcctgggcctgatggaccccgccctgcagatggccaacaccctgcccgtgagcggcaacctgatcgacctgtacggcaaccagggcctgcccccccccggcctgaccatcagcaacagctgccccgccaacctgcccaacatcaagagagagctgaccgagagcgaggccagagccctggccaaggagagacagaagaaggacaaccacaacctgatcgagagaagaagaagattcaacatcaacgacagaatcaaggagctgggcaccctgatccccaagagcaacgaccccgacatgagatggaacaagggcaccatcctgaaggccagcgtggactacatcagaaagctgcagagagagcagcagagagccaaggagctggagaacagacagaagaagctggagcacgccaacagacacctgctgctgagaatccaggagctggagatgcaggccagagcccacggcctgagcctgatccccagcaccggcctgtgcagccccgacctggtgaacagaatcatcaagcaggagcccgtgctggagaactgcagccaggacctgctgcagcaccacgccgacctgacctgcaccaccaccctggacctgaccgacggcaccatcaccttcaacaacaacctgggcaccggcaccgaggccaaccaggcctacagcgtgcccaccaagatgggcagcaagctggaggacatcctgatggacgacaccctgagccccgtgggcgtgaccgaccccctgctgagcagcgtgagccccggcgccagcaagaccagcagcagaagaagcagcatgagcatggaggagaccgagcacacctgctga

SEQ ID NO: 2742 - RNA, 1515 nt, synthetic construct
  misc_feature 1..1515: note = derived and/or modified sequence opt5 fromMITF__Homo_sapiens__CCDS46865.1
  source 1..1515: mol_type = other RNA
atggaggccctgagagtgcagatgttcatgccctgcagctttgaatccctctacctgtctagcgctgagcaccctggcgcctccaagccgcccatctctagctcctctatgaccagccggattcttctgcgccaacagctcatgagagaacagatgcaggagcaagaacggcgcgagcagcagcagaaactgcaagcggctcagttcatgcagcagagagtccctgtttcccaaacacccgccatcaacgtgagcgtgcctacgacccttccctctgccacacaggtccctatggaggtgctgaaggttcagacccatctcgaaaatccgacaaaatatcacattcaacaggctcagcggcagcaagtgaagcagtacctgtccaccacactggccaacaaacatgctaatcaggtcctcagcctgccctgtcctaaccagcccggggaccacgtgatgcctcccgttccgggatcttccgcccctaatagccccatggcgatgcttaccctgaactctaattgcgagaaggaaggcttttataagttcgaggagcaaaaccgcgccgaatccgagtgtcctgggatgaatacgcatagcagagcttcctgcatgcagatggatgacgtgatcgatgacattatctctctcgaaagctcctacaacgaggaaatcctgggacttatggatcccgccctgcagatggctaataccctccccgtcagcggcaacctgattgacctgtatgggaatcagggactccctccgcccggcctgacaatctctaactcctgtcctgccaatcttcccaacattaaacgggagctgaccgagagcgaagcgcgcgccctcgctaaggagagacagaaaaaggataaccacaatctgatcgaacggcgcagacggtttaacattaatgaccgcatcaaagagcttggcacactgattcctaagtctaacgatcccgacatgagatggaataaggggaccatcctcaaagccagcgtggattacatccggaagctgcaaagagaacagcagcgcgctaaagagctggagaaccggcaaaagaaactcgaacacgccaatagacatctgcttctgcgcattcaggagctcgaaatgcaggcccgggctcacggactgtcccttatcccgtctacgggcctgtgcagccctgacctcgtgaacagaattatcaagcaagagcccgtcctggaaaattgttcccaggatctgctccagcatcacgcggacctgacatgcaccacaacccttgacctgaccgatgggacaattacgttcaacaataacctcggaaccggcacagaggccaatcaggcttatagcgttcctaccaaaatggggtctaagctggaggacatcctgatggatgacacactttcccccgtgggagtgaccgatcctctcctgagctctgtctcccccggcgccagcaagacgtcctctcgccggagctccatgtctatggaagagacagaacacacctgttga

SEQ ID NO: 2743 - protein, 419 aa, synthetic construct
  REGION 1..419: note = MITF__Homo_sapiens__O75030-9
MLEMLEYNHYQVQTHLENPTKYHIQQAQRQQVKQYLSTTLANKHANQVLSLPCPNQPGDHVMPPVPGSSAPNSPMAMLTLNSNCEKEGFYKFEEQNRAESECPGMNTHSRASCMQMDDVIDDIISLESSYNEEILGLMDPALQMANTLPVSGNLIDLYGNQGLPPPGLTISNSCPANLPNIKRELTACIFPTESEARALAKERQKKDNHNLIERRRRFNINDRIKELGTLIPKSNDPDMRWNKGTILKASVDYIRKLQREQQRAKELENRQKKLEHANRHLLLRIQELEMQARAHGLSLIPSTGLCSPDLVNRIIKQEPVLENCSQDLLQHHADLTCTTTLDLTDGTITFNNNLGTGTEANQAYSVPTKMGSKLEDILMDDTLSPVGVTDPLLSSVSPGASKTSSRRSSMSMEETEHTC

SEQ ID NO: 2744 - RNA, 1260 nt, synthetic construct
  misc_feature 1..1260: note = MITF__Homo_sapiens__CCDS2913.1
  source 1..1260: mol_type = other RNA
atgctggaaatgctagaatataatcactatcaggtgcagacccacctcgaaaaccccaccaagtaccacatacagcaagcccaacggcagcaggtaaagcagtacctttctaccactttagcaaataaacatgccaaccaagtcctgagcttgccatgtccaaaccagcctggcgatcatgtcatgccaccggtgccggggagcagcgcacccaacagccccatggctatgcttacgcttaactccaactgtgaaaaagagggattttataagtttgaagagcaaaacagggcagagagcgagtgcccaggcatgaacacacattcacgagcgtcctgtatgcagatggatgatgtaatcgatgacatcattagcctagaatcaagttataatgaggaaatcttgggcttgatggatcctgctttgcaaatggcaaatacgttgcctgtctcgggaaacttgattgatctttatggaaaccaaggtctgcccccaccaggcctcaccatcagcaactcctgtccagccaaccttcccaacataaaaagggagctcacagcgtgtatttttcccacagagtctgaagcaagagcactggccaaagagaggcagaaaaaggacaatcacaacctgattgaacgaagaagaagatttaacataaatgaccgcattaaagaactaggtactttgattcccaagtcaaatgatccagacatgcgctggaacaagggaaccatcttaaaagcatccgtggactatatccgaaagttgcaacgagaacagcaacgcgcaaaagaacttgaaaaccgacagaagaaactggagcacgccaaccggcatttgttgctcagaatacaggaacttgaaatgcaggctcgagctcatggactttcccttattccatccacgggtctctgctctccagatttggtgaatcggatcatcaagcaagaacccgttcttgagaactgcagccaagacctccttcagcatcatgcagacctaacctgtacaacaactctcgatctcacggatggcaccatcaccttcaacaacaacctcggaactgggactgaggccaaccaagcctatagtgtccccacaaaaatgggatccaaactggaagacatcctgatggacgacaccctttctcccgtcggtgtcactgatccactcctttcctcagtgtcccccggagcttccaaaacaagcagccggaggagcagtatgagcatggaagagacggagcacacttgttag

SEQ ID NO: 2745 - RNA, 1260 nt, synthetic construct
  misc_feature 1..1260: note = derived and/or modified sequence opt1 fromMITF__Homo_sapiens__CCDS2913.1
  source 1..1260: mol_type = other RNA
atgctggagatgctcgagtacaaccactaccaggtgcagacccacctggagaaccccaccaagtaccacatccagcaggcccagcgccagcaggtcaagcagtacctgagcaccaccctcgccaacaagcacgcgaaccaggtgctgtccctgccgtgccccaaccagcccggcgaccacgtgatgcccccggtccccgggagctccgcccccaacagccccatggccatgctcaccctgaactccaactgcgagaaggagggcttctacaagttcgaggagcagaaccgggccgagagcgagtgcccggggatgaacacccactcccgcgccagctgcatgcagatggacgacgtgatcgacgacatcatctccctggagagctcctacaacgaggagatcctcggcctgatggaccccgcgctgcagatggccaacacgctccccgtgagcgggaacctgatcgacctgtacggcaaccagggcctgcccccgcccgggctcaccatctccaacagctgccccgccaacctgcccaacatcaagcgggagctcaccgcctgcatcttcccgaccgagtccgaggcgcgcgccctggccaaggagcggcagaagaaggacaaccacaacctgatcgagcgccggcgccggttcaacatcaacgaccgcatcaaggagctcggcacgctgatccccaagagcaacgaccccgacatgcggtggaacaaggggaccatcctgaaggcctccgtcgactacatccgcaagctccagcgggagcagcagcgcgccaaggagctggagaaccggcagaagaagctggagcacgcgaaccgccacctcctgctgcggatccaggagctcgagatgcaggcccgcgcccacggcctgagcctgatcccctccaccgggctctgcagcccggacctggtgaaccggatcatcaagcaggagcccgtgctggagaactgcagccaggacctcctgcagcaccacgccgacctgacctgcacgaccaccctcgacctgaccgacggcacgatcaccttcaacaacaacctgggcaccgggaccgaggccaaccaggcgtactccgtccccacgaagatgggcagcaagctcgaggacatcctgatggacgacaccctgtcccccgtgggggtgaccgacccgctcctgagctccgtcagccccggcgcctccaagaccagctcccgccggagctccatgagcatggaggagacggagcacacgtgctga

SEQ ID NO: 2746 - RNA, 1260 nt, synthetic construct
  misc_feature 1..1260: note = derived and/or modified sequence opt2 fromMITF__Homo_sapiens__CCDS2913.1
  source 1..1260: mol_type = other RNA
atgctcgagatgctcgagtacaaccactaccaggtccagacccacctcgagaaccccaccaagtaccacatccagcaggcccagcgccagcaggtcaagcagtacctctccaccaccctcgccaacaagcacgccaaccaggtcctctccctcccctgccccaaccagcccggcgaccacgtcatgccccccgtccccggctcctccgcccccaactcccccatggccatgctcaccctcaactccaactgcgagaaggagggcttctacaagttcgaggagcagaaccgcgccgagtccgagtgccccggcatgaacacccactcccgcgcctcctgcatgcagatggacgacgtcatcgacgacatcatctccctcgagtcctcctacaacgaggagatcctcggcctcatggaccccgccctccagatggccaacaccctccccgtctccggcaacctcatcgacctctacggcaaccagggcctccccccccccggcctcaccatctccaactcctgccccgccaacctccccaacatcaagcgcgagctcaccgcctgcatcttccccaccgagtccgaggcccgcgccctcgccaaggagcgccagaagaaggacaaccacaacctcatcgagcgccgccgccgcttcaacatcaacgaccgcatcaaggagctcggcaccctcatccccaagtccaacgaccccgacatgcgctggaacaagggcaccatcctcaaggcctccgtcgactacatccgcaagctccagcgcgagcagcagcgcgccaaggagctcgagaaccgccagaagaagctcgagcacgccaaccgccacctcctcctccgcatccaggagctcgagatgcaggcccgcgcccacggcctctccctcatcccctccaccggcctctgctcccccgacctcgtcaaccgcatcatcaagcaggagcccgtcctcgagaactgctcccaggacctcctccagcaccacgccgacctcacctgcaccaccaccctcgacctcaccgacggcaccatcaccttcaacaacaacctcggcaccggcaccgaggccaaccaggcctactccgtccccaccaagatgggctccaagctcgaggacatcctcatggacgacaccctctcccccgtcggcgtcaccgaccccctcctctcctccgtctcccccggcgcctccaagacctcctcccgccgctcctccatgtccatggaggagaccgagcacacctgctga

SEQ ID NO: 2747 - RNA, 1260 nt, synthetic construct
  misc_feature 1..1260: note = derived and/or modified sequence opt3 fromMITF__Homo_sapiens__CCDS2913.1
  source 1..1260: mol_type = other RNA
atgctggagatgctcgaatacaaccactatcaggtgcaaacccatcttgagaatcccacaaagtaccacatccagcaggcccagagacaacaggtcaaacagtatctgagcactacgttggctaacaagcatgcaaatcaggttttatccctgccttgcccaaaccaaccgggcgaccacgtgatgccccctgtaccagggtcttcagcccccaatagtcctatggcgatgctaaccctcaacagcaattgtgaaaaagagggattctacaagtttgaggaacagaacagggctgagtccgaatgcccaggtatgaatacacattctcgggcctcgtgtatgcagatggatgacgtgattgatgacataatctcactggagagcagttataacgaagagattcttggcctgatggatcccgcattgcagatggccaatactctccctgtctccgggaacctgatcgacctgtacggaaatcaaggcctcccaccgcccggtttaaccatttctaacagctgccctgctaatctgccaaacatcaaacgcgagcttacagcatgtatattccccaccgaatccgaggcccgagctttggccaaggaacgtcagaagaaagataaccacaatctgatcgagagaaggcggcgctttaacattaatgacagaatcaaggaactagggactctcattcctaaatcaaacgatccagacatgaggtggaataagggaacaatcctgaaagcgagtgtggattatatacggaaacttcagcgcgagcaacagcgagcaaaggagctggaaaacagacagaagaagttggagcacgccaataggcatctcctgttacggattcaggaactggagatgcaagctcgtgcccacggcctcagccttatcccctctaccggcctgtgctccccggacttggttaaccgcattatcaaacaggaacctgtgctagagaattgttcacaggatctgctccagcatcacgcagacctgacgtgcactaccacacttgacctgactgatgggaccatcacattcaacaataacttgggaaccggtacggaggctaatcaagcctacagcgtccccactaagatgggcagtaaactcgaagacattctgatggatgacacattatctccagtgggggtaaccgatcctctgctatccagcgtttcgcccggagcgtctaagacttcctcaagaaggagtagcatgtccatggaggaaacagagcacacctgttga

SEQ ID NO: 2748 - RNA, 1260 nt, synthetic construct
  misc_feature 1..1260: note = derived and/or modified sequence opt4 fromMITF__Homo_sapiens__CCDS2913.1
  source 1..1260: mol_type = other RNA
atgctggagatgctggagtacaaccactaccaggtgcagacccacctggagaaccccaccaagtaccacatccagcaggcccagagacagcaggtgaagcagtacctgagcaccaccctggccaacaagcacgccaaccaggtgctgagcctgccctgccccaaccagcccggcgaccacgtgatgccccccgtgcccggcagcagcgcccccaacagccccatggccatgctgaccctgaacagcaactgcgagaaggagggcttctacaagttcgaggagcagaacagagccgagagcgagtgccccggcatgaacacccacagcagagccagctgcatgcagatggacgacgtgatcgacgacatcatcagcctggagagcagctacaacgaggagatcctgggcctgatggaccccgccctgcagatggccaacaccctgcccgtgagcggcaacctgatcgacctgtacggcaaccagggcctgcccccccccggcctgaccatcagcaacagctgccccgccaacctgcccaacatcaagagagagctgaccgcctgcatcttccccaccgagagcgaggccagagccctggccaaggagagacagaagaaggacaaccacaacctgatcgagagaagaagaagattcaacatcaacgacagaatcaaggagctgggcaccctgatccccaagagcaacgaccccgacatgagatggaacaagggcaccatcctgaaggccagcgtggactacatcagaaagctgcagagagagcagcagagagccaaggagctggagaacagacagaagaagctggagcacgccaacagacacctgctgctgagaatccaggagctggagatgcaggccagagcccacggcctgagcctgatccccagcaccggcctgtgcagccccgacctggtgaacagaatcatcaagcaggagcccgtgctggagaactgcagccaggacctgctgcagcaccacgccgacctgacctgcaccaccaccctggacctgaccgacggcaccatcaccttcaacaacaacctgggcaccggcaccgaggccaaccaggcctacagcgtgcccaccaagatgggcagcaagctggaggacatcctgatggacgacaccctgagccccgtgggcgtgaccgaccccctgctgagcagcgtgagccccggcgccagcaagaccagcagcagaagaagcagcatgagcatggaggagaccgagcacacctgctga

SEQ ID NO: 2749 - RNA, 1260 nt, synthetic construct
  misc_feature 1..1260: note = derived and/or modified sequence opt5 fromMITF__Homo_sapiens__CCDS2913.1
  source 1..1260: mol_type = other RNA
atgctggagatgctcgaatacaaccactatcaagtgcaaacccatctggagaatcccacaaagtaccacatccagcaggcccagagacaacaggtcaaacagtatcttagcacgaccctggctaacaagcatgccaatcaggttctctccctgccttgcccgaaccaacccggcgaccacgtgatgcctcccgtgcctgggtctagcgcgcccaattcccctatggctatgcttacactgaactctaattgtgaaaaagagggattctacaagtttgaggaacagaaccgggccgagagcgaatgcccgggcatgaatacccattcccgcgcctcttgtatgcagatggatgacgtcattgatgacatcattagcctcgagtccagctataacgaagagatcctggggctgatggatcccgctctccagatggccaatacactgcctgtgtctggaaaccttattgacctgtacggcaatcaagggcttccccctcccggactgaccatctccaacagctgcccggctaatcttcctaacatcaaaagagagctgacagcctgtattttccccaccgaatctgaggcgcgggccctcgctaaggaacgccagaagaaagataaccacaatctgatcgagagacggcgcagatttaacattaatgaccggatcaaggaactgggcacgctcattcctaaatccaacgatcccgacatgcgctggaataagggcaccatcctgaaagccagcgttgattatattagaaagctccagcgggagcaacagcgcgctaaggagctggaaaacagacagaaaaagctcgagcacgccaatcggcatctgcttctgcgcatccaggaactcgagatgcaagcgagagcccacgggctgtctctgatcccctccacaggactctgcagccctgacctggtgaaccggattatcaaacaggaaccggtccttgagaattgttcccaggatctgctccagcatcacgctgacctgacctgcacaaccacgcttgacctgacagatggcaccattacattcaacaataacctcgggaccggaaccgaggccaatcaggcttactctgtgcccacaaagatgggcagcaaactggaagacatcctgatggatgacacgctctcccctgttggggtgaccgatcccctgcttagctctgtctcccctggagccagcaagacatctagcagacgctcctctatgagcatggaggaaaccgagcacacatgttga

SEQ ID NO: 2750 - protein, 526 aa, synthetic construct
  REGION 1..526: note = MITF__Homo_sapiens__O75030
MQSESGIVPDFEVGEEFHEEPKTYYELKSQPLKSSSSAEHPGASKPPISSSSMTSRILLRQQLMREQMQEQERREQQQKLQAAQFMQQRVPVSQTPAINVSVPTTLPSATQVPMEVLKVQTHLENPTKYHIQQAQRQQVKQYLSTTLANKHANQVLSLPCPNQPGDHVMPPVPGSSAPNSPMAMLTLNSNCEKEGFYKFEEQNRAESECPGMNTHSRASCMQMDDVIDDIISLESSYNEEILGLMDPALQMANTLPVSGNLIDLYGNQGLPPPGLTISNSCPANLPNIKRELTACIFPTESEARALAKERQKKDNHNLIERRRRFNINDRIKELGTLIPKSNDPDMRWNKGTILKASVDYIRKLQREQQRAKELENRQKKLEHANRHLLLRIQELEMQARAHGLSLIPSTGLCSPDLVNRIIKQEPVLENCSQDLLQHHADLTCTTTLDLTDGTITFNNNLGTGTEANQAYSVPTKMGSKLEDILMDDTLSPVGVTDPLLSSVSPGASKTSSRRSSMSMEETEHTC

SEQ ID NO: 2751 - RNA, 1581 nt, synthetic construct
  misc_feature 1..1581: note = MITF__Homo_sapiens__XM_005264754
  source 1..1581: mol_type = other RNA
atgcagtccgaatcggggatcgtgccggatttcgaagtcggggaggagtttcatgaagagcccaaaacctattacgaactcaaaagtcaaccgctgaagagcagcagttccgccgagcatcctggggcctccaagcctccgataagctcctccagtatgacatcacgcatcttgctacgccagcaactcatgcgtgagcagatgcaggagcaggagcgcagggagcagcagcagaagctgcaggcggcccagttcatgcaacagagagtgcccgtgagtcagacaccagccataaacgtcagtgtgcccaccacccttccctctgccacgcaggtgccgatggaagtccttaaggtgcagacccacctcgaaaaccccaccaagtaccacatacagcaagcccaacggcagcaggtaaagcagtacctttctaccactttagcaaataaacatgccaaccaagtcctgagcttgccatgtccaaaccagcctggcgatcatgtcatgccaccggtgccggggagcagcgcacccaacagccccatggctatgcttacgcttaactccaactgtgaaaaagagggattttataagtttgaagagcaaaacagggcagagagcgagtgcccaggcatgaacacacattcacgagcgtcctgtatgcagatggatgatgtaatcgatgacatcattagcctagaatcaagttataatgaggaaatcttgggcttgatggatcctgctttgcaaatggcaaatacgttgcctgtctcgggaaacttgattgatctttatggaaaccaaggtctgcccccaccaggcctcaccatcagcaactcctgtccagccaaccttcccaacataaaaagggagctcacagcgtgtatttttcccacagagtctgaagcaagagcactggccaaagagaggcagaaaaaggacaatcacaacctgattgaacgaagaagaagatttaacataaatgaccgcattaaagaactaggtactttgattcccaagtcaaatgatccagacatgcgctggaacaagggaaccatcttaaaagcatccgtggactatatccgaaagttgcaacgagaacagcaacgcgcaaaagaacttgaaaaccgacagaagaaactggagcacgccaaccggcatttgttgctcagaatacaggaacttgaaatgcaggctcgagctcatggactttcccttattccatccacgggtctctgctctccagatttggtgaatcggatcatcaagcaagaacccgttcttgagaactgcagccaagacctccttcagcatcatgcagacctaacctgtacaacaactctcgatctcacggatggcaccatcaccttcaacaacaacctcggaactgggactgaggccaaccaagcctatagtgtccccacaaaaatgggatccaaactggaagacatcctgatggacgacaccctttctcccgtcggtgtcactgatccactcctttcctcagtgtcccccggagcttccaaaacaagcagccggaggagcagtatgagcatggaagagacggagcacacttgttag

SEQ ID NO: 2752 - RNA, 1581 nt, synthetic construct
  misc_feature 1..1581: note = derived and/or modified sequence opt1 fromMITF__Homo_sapiens__XM_005264754
  source 1..1581: mol_type = other RNA
atgcagagcgagtccggcatcgtgcccgacttcgaggtcggggaggagttccacgaggagccgaagacctactacgagctcaagagccagcccctcaagtccagctccagcgccgagcaccccggcgcctccaagcccccgatcagctccagctccatgaccagccgcatcctgctgcggcagcagctcatgcgcgagcagatgcaggagcaggagcggcgcgagcagcagcagaagctgcaggcggcccagttcatgcagcagcgggtgcccgtgtcccagacccccgccatcaacgtcagcgtgcccaccaccctgccgtccgccacccaggtgcccatggaggtcctcaaggtgcagacgcacctggagaaccccaccaagtaccacatccagcaggcccagcgccagcaggtcaagcagtacctgagcaccaccctcgcgaacaagcacgccaaccaggtgctgtccctgccctgcccgaaccagcccggggaccacgtgatgccgcccgtgcccggcagctccgcccccaacagccccatggccatgctcacgctgaacagcaactgcgagaaggaggggttctacaagttcgaggagcagaaccgggcggagtccgagtgccccggcatgaacacccacagccgcgcctcctgcatgcagatggacgacgtcatcgacgacatcatcagcctggagtccagctacaacgaggagatcctcggcctgatggacccggccctgcagatggccaacaccctccccgtgtccgggaacctgatcgacctgtacggcaaccaggggctgcccccgcccggcctgaccatcagcaactcctgccccgccaacctgcccaacatcaagcgggagctcacggcgtgcatcttccccaccgagagcgaggcccgcgccctggccaaggagcggcagaagaaggacaaccacaacctgatcgagcgccggcgccggttcaacatcaacgaccgcatcaaggagctcgggaccctgatcccgaagtccaacgaccccgacatgcggtggaacaagggcaccatcctgaaggccagcgtggactacatccgcaagctccagcgggagcagcagcgcgcgaaggagctggagaaccggcagaagaagctggagcacgccaaccgccacctcctgctgcgcatccaggagctcgagatgcaggcccgggcccacggcctgtccctgatccccagcacggggctctgctccccggacctggtcaaccgcatcatcaagcaggagcccgtgctggagaactgcagccaggacctcctgcagcaccacgccgacctgacctgcaccaccacgctcgacctgaccgacggcaccatcaccttcaacaacaacctggggacgggcaccgaggcgaaccaggcctactccgtgcccaccaagatgggcagcaagctcgaggacatcctgatggacgacaccctgtcccccgtcggggtgacggacccgctgctcagcagcgtgtcccccggcgccagcaagacctccagccggcgctccagcatgtccatggaggagaccgagcacacgtgctga

SEQ ID NO: 2753 - RNA, 1581 nt, synthetic construct
  misc_feature 1..1581: note = derived and/or modified sequence opt2 fromMITF__Homo_sapiens__XM_005264754
  source 1..1581: mol_type = other RNA
atgcagtccgagtccggcatcgtccccgacttcgaggtcggcgaggagttccacgaggagcccaagacctactacgagctcaagtcccagcccctcaagtcctcctcctccgccgagcaccccggcgcctccaagccccccatctcctcctcctccatgacctcccgcatcctcctccgccagcagctcatgcgcgagcagatgcaggagcaggagcgccgcgagcagcagcagaagctccaggccgcccagttcatgcagcagcgcgtccccgtctcccagacccccgccatcaacgtctccgtccccaccaccctcccctccgccacccaggtccccatggaggtcctcaaggtccagacccacctcgagaaccccaccaagtaccacatccagcaggcccagcgccagcaggtcaagcagtacctctccaccaccctcgccaacaagcacgccaaccaggtcctctccctcccctgccccaaccagcccggcgaccacgtcatgccccccgtccccggctcctccgcccccaactcccccatggccatgctcaccctcaactccaactgcgagaaggagggcttctacaagttcgaggagcagaaccgcgccgagtccgagtgccccggcatgaacacccactcccgcgcctcctgcatgcagatggacgacgtcatcgacgacatcatctccctcgagtcctcctacaacgaggagatcctcggcctcatggaccccgccctccagatggccaacaccctccccgtctccggcaacctcatcgacctctacggcaaccagggcctccccccccccggcctcaccatctccaactcctgccccgccaacctccccaacatcaagcgcgagctcaccgcctgcatcttccccaccgagtccgaggcccgcgccctcgccaaggagcgccagaagaaggacaaccacaacctcatcgagcgccgccgccgcttcaacatcaacgaccgcatcaaggagctcggcaccctcatccccaagtccaacgaccccgacatgcgctggaacaagggcaccatcctcaaggcctccgtcgactacatccgcaagctccagcgcgagcagcagcgcgccaaggagctcgagaaccgccagaagaagctcgagcacgccaaccgccacctcctcctccgcatccaggagctcgagatgcaggcccgcgcccacggcctctccctcatcccctccaccggcctctgctcccccgacctcgtcaaccgcatcatcaagcaggagcccgtcctcgagaactgctcccaggacctcctccagcaccacgccgacctcacctgcaccaccaccctcgacctcaccgacggcaccatcaccttcaacaacaacctcggcaccggcaccgaggccaaccaggcctactccgtccccaccaagatgggctccaagctcgaggacatcctcatggacgacaccctctcccccgtcggcgtcaccgaccccctcctctcctccgtctcccccggcgcctccaagacctcctcccgccgctcctccatgtccatggaggagaccgagcacacctgctga

SEQ ID NO: 2754 - RNA, 1581 nt, synthetic construct
  misc_feature 1..1581: note = derived and/or modified sequence opt3 fromMITF__Homo_sapiens__XM_005264754
  source 1..1581: mol_type = other RNA
atgcaaagcgagtccggcatcgtgcccgacttcgaagtcggggaggaatttcacgaggaacctaagacctactatgagctgaaatctcaaccactcaagtcaagtagctccgccgagcatccgggagcttctaaaccccctatttcgtcaagcagtatgacatccagaatacttctgaggcagcagttgatgcgggaacagatgcaagagcaggaacgccgagagcagcagcaaaagttacaggcagcccagttcatgcagcaacgtgttccagtgtctcagactcccgcgatcaacgtaagcgtgcctacgaccctgccatccgctacacaggtccccatggaggtgctaaaagttcaaactcacctcgaaaatcctaccaagtaccatattcagcaggcccagagacaacaggtgaagcagtatctgtcaacaacccttgcaaacaaacacgccaatcaggtcctgagtttgccatgcccgaaccaacccggtgatcatgtgatgcctccagtacccggcagctctgctcctaattccccaatggcaatgctcactctgaactcaaattgtgagaaggaagggttttacaaattcgaggaacagaacagggccgagagcgagtgccccggaatgaatacacacagtcgggcttcttgtatgcagatggacgatgttatcgacgatattatctccctggaaagctcgtataacgaggaaatactcggcttaatggacccggccctgcagatggcgaatacccttcctgtgtctggtaacttgatcgatctgtacgggaatcaaggactacccccacctggcctcacgatttccaactcatgccccgcaaatctgccaaacatcaagcgcgagcttactgcctgtatttttcccaccgaaagtgaggctagagccctggcaaaagagaggcagaagaaggacaaccacaatttgatcgaacggcgccgaagattcaacataaatgataggattaaagagctcggcacactgatccctaagagcaacgacccagatatgcggtggaataaagggactattttaaaggcttccgtcgactatatccgtaaactgcagcgcgaacagcaaagagccaaggagctcgaaaacaggcagaaaaagctggagcatgcgaatcggcaccttttgctacgaatccaggagctggaaatgcaagcccgcgcacatggactctctctgattccgagcaccggtctttgctcacccgatctggtgaacagaataatcaagcaggagcctgtgttggaaaattgtagtcaggacctcctgcagcaccacgctgacttaacatgcaccacgactctggatctaacagacggcaccattacttttaacaataacctcgggacaggaaccgaggccaatcaggcttactccgtcccaacgaaaatgggcagcaagctggaggatatccttatggacgataccttgtctcccgttggtgtgacagaccctctgctctcaagtgtaagcccaggggcctccaaaacttcttcgaggcggagctccatgtcaatggaagagaccgaacatacatgttga

SEQ ID NO: 2755 - RNA, 1581 nt, synthetic construct
  misc_feature 1..1581: note = derived and/or modified sequence opt4 fromMITF__Homo_sapiens__XM_005264754
  source 1..1581: mol_type = other RNA
atgcagagcgagagcggcatcgtgcccgacttcgaggtgggcgaggagttccacgaggagcccaagacctactacgagctgaagagccagcccctgaagagcagcagcagcgccgagcaccccggcgccagcaagccccccatcagcagcagcagcatgaccagcagaatcctgctgagacagcagctgatgagagagcagatgcaggagcaggagagaagagagcagcagcagaagctgcaggccgcccagttcatgcagcagagagtgcccgtgagccagacccccgccatcaacgtgagcgtgcccaccaccctgcccagcgccacccaggtgcccatggaggtgctgaaggtgcagacccacctggagaaccccaccaagtaccacatccagcaggcccagagacagcaggtgaagcagtacctgagcaccaccctggccaacaagcacgccaaccaggtgctgagcctgccctgccccaaccagcccggcgaccacgtgatgccccccgtgcccggcagcagcgcccccaacagccccatggccatgctgaccctgaacagcaactgcgagaaggagggcttctacaagttcgaggagcagaacagagccgagagcgagtgccccggcatgaacacccacagcagagccagctgcatgcagatggacgacgtgatcgacgacatcatcagcctggagagcagctacaacgaggagatcctgggcctgatggaccccgccctgcagatggccaacaccctgcccgtgagcggcaacctgatcgacctgtacggcaaccagggcctgcccccccccggcctgaccatcagcaacagctgccccgccaacctgcccaacatcaagagagagctgaccgcctgcatcttccccaccgagagcgaggccagagccctggccaaggagagacagaagaaggacaaccacaacctgatcgagagaagaagaagattcaacatcaacgacagaatcaaggagctgggcaccctgatccccaagagcaacgaccccgacatgagatggaacaagggcaccatcctgaaggccagcgtggactacatcagaaagctgcagagagagcagcagagagccaaggagctggagaacagacagaagaagctggagcacgccaacagacacctgctgctgagaatccaggagctggagatgcaggccagagcccacggcctgagcctgatccccagcaccggcctgtgcagccccgacctggtgaacagaatcatcaagcaggagcccgtgctggagaactgcagccaggacctgctgcagcaccacgccgacctgacctgcaccaccaccctggacctgaccgacggcaccatcaccttcaacaacaacctgggcaccggcaccgaggccaaccaggcctacagcgtgcccaccaagatgggcagcaagctggaggacatcctgatggacgacaccctgagccccgtgggcgtgaccgaccccctgctgagcagcgtgagccccggcgccagcaagaccagcagcagaagaagcagcatgagcatggaggagaccgagcacacctgctga

SEQ ID NO: 2756 - RNA, 1581 nt, synthetic construct
  misc_feature 1..1581: note = derived and/or modified sequence opt5 fromMITF__Homo_sapiens__XM_005264754
  source 1..1581: mol_type = other RNA
atgcaaagcgagtccggcatcgtgcccgacttcgaagtcggggaggaatttcacgaggaacctaagacctactatgagctgaaatctcaaccgctcaagagctcctctagcgccgagcatcccggagcttccaaacctcccatttctagctccagcatgacatctagaatcctgcttcggcagcagctgatgcgcgaacagatgcaagagcaggaaagacgggagcagcagcaaaagctccaggccgcgcagttcatgcagcaacgcgttcctgtgtcccagacgcccgctattaacgtgagcgtccctaccacactgccgtctgccacccaggtgcccatggaggttcttaaagtgcaaacacacctggaaaatcctaccaagtaccatatccagcaggcccagagacaacaggtcaagcagtatctctccacaaccctggctaacaaacacgccaatcaggtgctgagcctcccctgccctaaccaacccggcgatcatgttatgccgcctgtgcccgggtcttccgctcctaatagccccatggccatgctgacgcttaactccaattgtgagaaggaaggattttacaaattcgaggaacagaaccgggcggagtctgagtgccccggcatgaatacccacagccgcgcctcctgtatgcagatggacgatgtcattgacgatatcatcagcctggaatcttcctataacgaggaaattctcgggctgatggaccctgcccttcagatggctaatacactgccggtgagcggaaacctcatcgatctgtacggcaatcaaggcctgccccctcccgggctcaccatttctaacagctgccctgctaatctgcccaacatcaagagagagcttacagcctgtatttttccgaccgaatccgaggcgcgggccctggctaaagagcgccagaagaaggacaaccacaatctcatcgaaagacggcgcagattcaacattaatgatcggatcaaagagctgggaacgcttatccctaagtctaacgaccccgatatgcgctggaataaaggcacaattctgaaggccagcgtggactatatcagaaaactccagcgggaacagcaaagagctaaggagctggaaaaccgccagaaaaagctggagcatgccaatcggcacctcctgcttcgcattcaggagctggaaatgcaagccagagctcatgggctctccctgatccctagcaccggactttgctctcccgatctggtcaaccggattatcaagcaggagcctgttctcgaaaattgttcccaggacctgctgcagcaccacgcggacctcacatgcaccaccacactggatcttacggacggcaccatcacatttaacaataacctggggaccggaacagaggccaatcaggcttacagcgtgcccaccaaaatgggctctaagctcgaggatattctgatggacgatacgctgtccccggtgggcgtcacagaccctcttctcagctccgtgtctcccggggccagcaaaacctcctctagacgcagctccatgagcatggaagagaccgaacatacatgttga

SEQ ID NO: 2757 - protein, 354 aa, synthetic construct [sequence omitted]

SEQ ID NO: 2758 - RNA, 1065 nt, synthetic construct
  misc_feature 1..1065: note = MMP1_1__Homo_sapiens__BAG52140
  source 1..1065: mol_type = other RNA
atggctccggccgcctggctccgcagcgcggccgcgcgcgccctcctgcccccgatgctgctgctgctgctccagccgccgccgctgctggcccgggctctgccgccggacgtccaccacctccatgccgagaggagggggccacagccctggcatgcagccctgcccagtagcccggcacctgcccctgccacgcaggaagccccccggcctgccagcagcctcaggcctccccgctgtggcgtgcccgacccatctgatgggctgagtgcccgcaaccgacagaagaggatccttcggttcccatggcagttggtgcaggagcaggtgcggcagacgatggcagaggccctaaaggtatggagcgatgtgacgccactcacctttactgaggtgcacgagggccgtgctgacatcatgatcgacttcgccaggtactggcatggggacgacctgccgtttgatgggcctgggggcatcctggcccatgccttcttccccaagactcaccgagaaggggatgtccacttcgactatgatgagacctggactatcggggatgaccagggcacagacctgctgcaggtggcagcccatgaatttggccacgtgctggggctgcagcacacaacagcagccaaggccctgatgtccgccttctacacctttcgctacccactgagtctcagcccagatgactgcaggggcgttcaacacctatatggccagccctggcccactgtcacctccaggaccccagccctgggcccccaggctgggatagacaccaatgagattgcaccgctggagccagacgccccgccagatgcctgtgaggcctcctttgacgcggtctccaccatccgaggcgagctctttttcttcaaagcgggctttgtgtggcgcctccgtgggggccagctgcagcccggctacccagcattggcctctcgccactggcagggactgcccagccctgtggacgctgccttcgaggatgcccagggccacatttggttcttccaagggactactggcgtttccaccccagcacccggcgtgtag

SEQ ID NO: 2759 - RNA, 1065 nt, synthetic construct
  misc_feature 1..1065: note = derived and/or modified sequence opt1 fromMMP1_1__Homo_sapiens__BAG52140
  source 1..1065: mol_type = other RNA
atggcccccgccgcgtggctgcgcagcgccgccgcccgggccctcctgccgcccatgctgctcctgctgctccagccccccccgctgctggcgcgcgccctcccccccgacgtgcaccacctgcacgccgagcggcgcggcccccagccgtggcacgccgcgctgccctccagccccgcccccgccccggccacccaggaggccccccggcccgcgtccagcctccgccccccgcggtgcggggtccccgacccctccgacggcctgagcgcccgcaaccggcagaagcgcatcctgcggttcccctggcagctcgtgcaggagcaggtgcgccagaccatggccgaggccctgaaggtctggtccgacgtgacgccgctgaccttcaccgaggtgcacgaggggcgggccgacatcatgatcgacttcgcgcgctactggcacggcgacgacctccccttcgacgggcccggcggcatcctggcccacgccttcttccccaagacccaccgggagggggacgtccacttcgactacgacgagacgtggaccatcggcgacgaccaggggaccgacctgctccaggtggccgcccacgagttcggccacgtgctggggctgcagcacaccacggcggccaaggccctcatgagcgccttctacaccttccgctacccgctgtccctgagccccgacgactgccggggcgtccagcacctctacggccagccctggcccaccgtgacctcccgcacgccggccctggggccccaggcgggcatcgacaccaacgagatcgcccccctggagccggacgccccccccgacgcctgcgaggcgagcttcgacgccgtgtccaccatccggggggagctcttcttcttcaaggccggcttcgtctggcgcctgcggggcgggcagctgcagcccggctacccggccctcgccagccgccactggcaggggctgccctcccccgtggacgcggccttcgaggacgcccagggccacatctggttcttccaggggaccacgggcgtgagcacccccgccccgggcgtctga

SEQ ID NO: 2760 - RNA, 1065 nt, synthetic construct
  misc_feature 1..1065: note = derived and/or modified sequence opt2 fromMMP1_1__Homo_sapiens__BAG52140
  source 1..1065: mol_type = other RNA
atggcccccgccgcctggctccgctccgccgccgcccgcgccctcctcccccccatgctcctcctcctcctccagcccccccccctcctcgcccgcgccctcccccccgacgtccaccacctccacgccgagcgccgcggcccccagccctggcacgccgccctcccctcctcccccgcccccgcccccgccacccaggaggccccccgccccgcctcctccctccgccccccccgctgcggcgtccccgacccctccgacggcctctccgcccgcaaccgccagaagcgcatcctccgcttcccctggcagctcgtccaggagcaggtccgccagaccatggccgaggccctcaaggtctggtccgacgtcacccccctcaccttcaccgaggtccacgagggccgcgccgacatcatgatcgacttcgcccgctactggcacggcgacgacctccccttcgacggccccggcggcatcctcgcccacgccttcttccccaagacccaccgcgagggcgacgtccacttcgactacgacgagacctggaccatcggcgacgaccagggcaccgacctcctccaggtcgccgcccacgagttcggccacgtcctcggcctccagcacaccaccgccgccaaggccctcatgtccgccttctacaccttccgctaccccctctccctctcccccgacgactgccgcggcgtccagcacctctacggccagccctggcccaccgtcacctcccgcacccccgccctcggcccccaggccggcatcgacaccaacgagatcgcccccctcgagcccgacgccccccccgacgcctgcgaggcctccttcgacgccgtctccaccatccgcggcgagctcttcttcttcaaggccggcttcgtctggcgcctccgcggcggccagctccagcccggctaccccgccctcgcctcccgccactggcagggcctcccctcccccgtcgacgccgccttcgaggacgcccagggccacatctggttcttccagggcaccaccggcgtctccacccccgcccccggcgtctga

SEQ ID NO: 2761 - RNA, 1065 nt, synthetic construct
  misc_feature 1..1065: note = derived and/or modified sequence opt3 fromMMP1_1__Homo_sapiens__BAG52140
  source 1..1065: mol_type = other RNA
atggcccccgctgcatggctgagaagcgccgcggctagggccctccttcctccaatgctgttgttactgctacagccgccccctctcctggcacgggcccttccacccgacgtgcaccatctgcacgctgagcgccgaggccctcaaccatggcatgcagccttgccctcctctcctgctccagccccggcgacccaggaagcaccccgtcctgcctcaagtctcagaccacccaggtgcggggtccctgatccaagcgacggactgtccgctcggaaccgccagaagagaatcctgaggttcccctggcagctcgttcaagaacaggtgcggcagacaatggccgaggcattaaaagtatggtctgatgtgactccgctgacgtttaccgaggtccacgaaggtcgcgctgacattatgatagatttcgcccgatactggcatggcgacgatcttccttttgacgggcccggaggcatcttggcgcacgccttctttccaaagacacacagagagggtgatgtgcatttcgactatgatgagacttggaccattggggacgatcagggaacagacctgctacaagttgcagctcacgaatttggccatgtgctcggcctgcagcacaccactgccgctaaagcccttatgtcggcattctacacatttaggtatcctctgtcattgagccccgacgattgtcgtggggtccagcacctctacggacagccatggcccaccgtgacgagtcggactcctgccctgggtccacaagctggcatcgacaccaatgagattgcgccgttagaacccgatgcacctccagacgcctgcgaggcttccttcgatgccgtatctacaatccgcggggagctgtttttctttaaggcaggattcgtttggagactcaggggcggtcagcttcagcccgggtatcctgccctggctagccggcattggcaaggattgccatcccccgtggacgccgcattcgaagatgcgcagggccacatatggtttttccagggcactaccggggtctcaacaccggctcctggagtgtga

SEQ ID NO: 2762 - RNA, 1065 nt, synthetic construct
  misc_feature 1..1065: note = derived and/or modified sequence opt4 fromMMP1_1__Homo_sapiens__BAG52140
  source 1..1065: mol_type = other RNA
atggcccccgccgcctggctgagaagcgccgccgccagagccctgctgccccccatgctgctgctgctgctgcagcccccccccctgctggccagagccctgccccccgacgtgcaccacctgcacgccgagagaagaggcccccagccctggcacgccgccctgcccagcagccccgcccccgcccccgccacccaggaggcccccagacccgccagcagcctgagaccccccagatgcggcgtgcccgaccccagcgacggcctgagcgccagaaacagacagaagagaatcctgagattcccctggcagctggtgcaggagcaggtgagacagaccatggccgaggccctgaaggtgtggagcgacgtgacccccctgaccttcaccgaggtgcacgagggcagagccgacatcatgatcgacttcgccagatactggcacggcgacgacctgcccttcgacggccccggcggcatcctggcccacgccttcttccccaagacccacagagagggcgacgtgcacttcgactacgacgagacctggaccatcggcgacgaccagggcaccgacctgctgcaggtggccgcccacgagttcggccacgtgctgggcctgcagcacaccaccgccgccaaggccctgatgagcgccttctacaccttcagataccccctgagcctgagccccgacgactgcagaggcgtgcagcacctgtacggccagccctggcccaccgtgaccagcagaacccccgccctgggcccccaggccggcatcgacaccaacgagatcgcccccctggagcccgacgccccccccgacgcctgcgaggccagcttcgacgccgtgagcaccatcagaggcgagctgttcttcttcaaggccggcttcgtgtggagactgagaggcggccagctgcagcccggctaccccgccctggccagcagacactggcagggcctgcccagccccgtggacgccgccttcgaggacgcccagggccacatctggttcttccagggcaccaccggcgtgagcacccccgcccccggcgtgtga

SEQ ID NO: 2763 - RNA, 1065 nt, synthetic construct
  misc_feature 1..1065: note = derived and/or modified sequence opt5 fromMMP1_1__Homo_sapiens__BAG52140
  source 1..1065: mol_type = other RNA
atggcccccgctgcctggctgagaagcgcggctgcccgggccctcctgcctccgatgcttctgctcctgcttcagccccctcccctgctcgctcgcgccctgcctcccgacgtgcaccatctgcacgctgagagacggggccctcaaccgtggcatgccgcgctcccctcctctcctgcccccgctcctgccacacaggaagctccccgcccggccagctccctgagacctccccggtgcggggtccctgatccctctgacggacttagcgcgcgcaacagacagaagcggatcctgcgcttcccctggcagctcgttcaagaacaggtgagacagacaatggccgaggctctgaaagtgtggtccgatgtcacgcctcttacctttacagaggtgcacgaaggccgggccgacattatgatcgatttcgctcgctactggcatggggacgatctgccgtttgacggacccggcgggattctcgcccacgccttctttcctaagacccacagagagggagatgttcatttcgactatgatgagacatggaccatcggcgacgatcagggcacagacctgctgcaagtggctgcgcacgaatttgggcatgtcctcggactgcagcacaccacggccgctaaagcccttatgtctgccttctacacctttcggtatcccctgagcctctcccctgacgattgtcgcggcgtgcagcacctgtacgggcagccctggccgacagttaccagcagaacccctgctcttggaccccaagccggcattgacacaaatgagatcgcgcctctggaacccgatgctcctcccgacgcctgcgaggcctctttcgatgctgtgtccacgatcagaggggagctctttttctttaaggccggattcgtctggcggctgcgcggcggccagctgcagccggggtatcctgctctcgccagccggcattggcaaggactgccctctcccgtggacgcggccttcgaagatgctcagggccacatttggtttttccaggggacaaccggagtgtccacccctgccccgggcgtctga

SEQ ID NO: 2764 - protein, 267 aa, synthetic construct
  REGION 1..267: note = MMP7__Homo_sapiens__P09237
MRLTVLCAVCLLPGSLALPLPQEAGGMSELQWEQAQDYLKRFYLYDSETKNANSLEAKLKEMQKFFGLPITGMLNSRVIEIMQKPRCGVPDVAEYSLFPNSPKWTSKVVTYRIVSYTRDLPHITVDRLVSKALNMWGKEIPLHFRKVVWGTADIMIGFARGAHGDSYPFDGPGNTLAHAFAPGTGLGGDAHFDEDERWTDGSSLGINFLYAATHELGHSLGMGHSSDPNAVMYPTYGNGDPQNFKLSQDDIKGIQKLYGKRSNSRKK

SEQ ID NO: 2765 - RNA, 804 nt, synthetic construct
  misc_feature 1..804: note = MMP7__Homo_sapiens__AAV40839
  source 1..804: mol_type = other RNA
atgcgactcaccgtgctgtgtgctgtgtgcctgctgcctggcagcctggccctgccgctgcctcaggaggcgggaggcatgagtgagctacagtgggaacaggctcaggactatctcaagagattttatctctatgactcagaaacaaaaaatgccaacagtttagaagccaaactcaaggagatgcaaaaattctttggcctacctataactggaatgttaaactcccgcgtcatagaaataatgcagaagcccagatgtggagtgccagatgttgcagaatactcactatttccaaatagcccaaaatggacttccaaagtggtcacctacaggatcgtatcatatactcgagacttaccgcatattacagtggatcgattagtgtcaaaggctttaaacatgtggggcaaagagatccccctgcatttcaggaaagttgtatggggaactgctgacatcatgattggctttgcgcgaggagctcatggggactcctacccatttgatgggccaggaaacacgctggctcatgcctttgcgcctgggacaggtctcggaggagatgctcacttcgatgaggatgaacgctggacggatggtagcagtctagggattaacttcctgtatgctgcaactcatgaacttggccattctttgggtatgggacattcctctgatcctaatgcagtgatgtatccaacctatggaaatggagatccccaaaattttaaactttcccaggatgatattaaaggcattcagaaactatatggaaagagaagtaattcaagaaagaaatag

SEQ ID NO: 2766 - RNA, 804 nt, synthetic construct
  misc_feature 1..804: note = derived and/or modified sequence opt1 fromMMP7__Homo_sapiens__AAV40839
  source 1..804: mol_type = other RNA
atgcgcctgaccgtgctctgcgccgtctgcctgctgcccggcagcctcgccctgccgctgccccaggaggccgggggcatgtccgagctccagtgggagcaggcgcaggactacctgaagcggttctacctgtacgacagcgagaccaagaacgccaactccctcgaggccaagctgaaggagatgcagaagttcttcgggctgcccatcacgggcatgctcaacagccgcgtgatcgagatcatgcagaagccccggtgcggggtgccggacgtcgccgagtactccctgttccccaacagccccaagtggacctccaaggtggtgacctaccgcatcgtcagctacacccgggacctgccccacatcacggtggaccgcctcgtgtccaaggcgctgaacatgtggggcaaggagatcccgctgcacttccggaaggtcgtgtggggcaccgccgacatcatgatcgggttcgcccgcggcgcccacggggacagctaccccttcgacggccccgggaacaccctcgcgcacgccttcgcccccggcaccggcctcgggggcgacgcccacttcgacgaggacgagcggtggacggacgggtccagcctgggcatcaacttcctgtacgccgcgacccacgagctgggccactccctggggatgggccacagctccgacccgaacgccgtgatgtaccccacctacgggaacggcgacccccagaacttcaagctcagccaggacgacatcaaggggatccagaagctgtacggcaagcgctccaacagccggaagaagtga

SEQ ID NO: 2767 - RNA, 804 nt, synthetic construct
  misc_feature 1..804: note = derived and/or modified sequence opt2 fromMMP7__Homo_sapiens__AAV40839
  source 1..804: mol_type = other RNA
atgcgcctcaccgtcctctgcgccgtctgcctcctccccggctccctcgccctccccctcccccaggaggccggcggcatgtccgagctccagtgggagcaggcccaggactacctcaagcgcttctacctctacgactccgagaccaagaacgccaactccctcgaggccaagctcaaggagatgcagaagttcttcggcctccccatcaccggcatgctcaactcccgcgtcatcgagatcatgcagaagccccgctgcggcgtccccgacgtcgccgagtactccctcttccccaactcccccaagtggacctccaaggtcgtcacctaccgcatcgtctcctacacccgcgacctcccccacatcaccgtcgaccgcctcgtctccaaggccctcaacatgtggggcaaggagatccccctccacttccgcaaggtcgtctggggcaccgccgacatcatgatcggcttcgcccgcggcgcccacggcgactcctaccccttcgacggccccggcaacaccctcgcccacgccttcgcccccggcaccggcctcggcggcgacgcccacttcgacgaggacgagcgctggaccgacggctcctccctcggcatcaacttcctctacgccgccacccacgagctcggccactccctcggcatgggccactcctccgaccccaacgccgtcatgtaccccacctacggcaacggcgacccccagaacttcaagctctcccaggacgacatcaagggcatccagaagctctacggcaagcgctccaactcccgcaagaagtga

SEQ ID NO: 2768 - RNA, 804 nt, synthetic construct
  misc_feature 1..804: note = derived and/or modified sequence opt3 fromMMP7__Homo_sapiens__AAV40839
  source 1..804: mol_type = other RNA
atgagactgaccgtgctctgcgccgtctgtcttctgcccggcagcttggctttacctctgccacaggaggcagggggaatgtccgaactacaatgggagcaggcccaggactacctcaagaggttctatctgtacgattctgaaacaaagaacgctaattcacttgaggcgaagctgaaagaaatgcagaagtttttcggtttgccgatcactggcatgctcaacagtcgggttattgagataatgcaaaaaccccgctgcggggtgcctgacgtagccgagtatagcctgtttccaaattcccccaagtggacgtctaaggtggtcacctaccgaatcgtgtcgtatacacgtgatctgcctcacattactgttgacagactcgtgtcaaaagcattaaacatgtggggaaaggaaatcccactgcatttcaggaaagtcgtgtggggcaccgccgatattatgatcggttttgctcgcggggcacacggagacagctaccccttcgatggccctggcaatacacttgcccatgcttttgccccagggaccggattgggtggcgacgcgcacttcgatgaggacgaacggtggactgatgggagttccctgggaataaactttctatatgcagccacacatgagctcggccactctctgggtatggggcacagctccgacccgaatgctgtaatgtaccccacctacggaaacggcgatcctcagaatttcaaactttcacaggacgacatcaaaggcattcagaagctgtatgggaagagaagtaacagcaggaaaaagtga

SEQ ID NO: 2769 - RNA, 804 nt, synthetic construct
  misc_feature 1..804: note = derived and/or modified sequence opt4 fromMMP7__Homo_sapiens__AAV40839
  source 1..804: mol_type = other RNA
atgagactgaccgtgctgtgcgccgtgtgcctgctgcccggcagcctggccctgcccctgccccaggaggccggcggcatgagcgagctgcagtgggagcaggcccaggactacctgaagagattctacctgtacgacagcgagaccaagaacgccaacagcctggaggccaagctgaaggagatgcagaagttcttcggcctgcccatcaccggcatgctgaacagcagagtgatcgagatcatgcagaagcccagatgcggcgtgcccgacgtggccgagtacagcctgttccccaacagccccaagtggaccagcaaggtggtgacctacagaatcgtgagctacaccagagacctgccccacatcaccgtggacagactggtgagcaaggccctgaacatgtggggcaaggagatccccctgcacttcagaaaggtggtgtggggcaccgccgacatcatgatcggcttcgccagaggcgcccacggcgacagctaccccttcgacggccccggcaacaccctggcccacgccttcgcccccggcaccggcctgggcggcgacgcccacttcgacgaggacgagagatggaccgacggcagcagcctgggcatcaacttcctgtacgccgccacccacgagctgggccacagcctgggcatgggccacagcagcgaccccaacgccgtgatgtaccccacctacggcaacggcgacccccagaacttcaagctgagccaggacgacatcaagggcatccagaagctgtacggcaagagaagcaacagcagaaagaagtga

SEQ ID NO: 2770 - RNA, 804 nt, synthetic construct
  misc_feature 1..804: note = derived and/or modified sequence opt5 fromMMP7__Homo_sapiens__AAV40839
  source 1..804: mol_type = other RNA
atgagactgaccgtgctctgcgccgtctgtctgcttcccggcagcctggctctccctctgccgcaggaggccgggggaatgtccgaacttcaatgggagcaggcgcaggactacctgaagcggttctatctctacgattctgaaacaaagaacgctaatagcctggaggccaagctgaaagaaatgcagaagtttttcggcctccccatcacggggatgctgaactcccgcgttattgagatcatgcaaaaacctagatgcggagtgcccgacgtggccgagtattctctttttcctaatagccccaagtggacctccaaggtcgtgacataccggattgtttcttatacccgcgatctgcctcacatcacagtggacagactcgtcagcaaagctctgaacatgtggggcaaggaaattccgcttcatttccggaaagtggtttgggggaccgccgatatcatgatcggatttgctcgcggcgcccacggcgactcctaccccttcgatgggcctggaaatacactggcgcatgcctttgctcccggcaccgggctcggaggcgacgcccacttcgatgaggacgaaagatggacggatgggagctctctgggaattaactttctgtatgctgccacccatgagctcggccactccctgggcatggggcacagctctgaccctaatgcggtgatgtaccccacatacggaaacggcgatccgcagaatttcaaactttcccaggacgacatcaaagggattcagaagctgtatggaaagcggagcaactctcgcaaaaagtga

SEQ ID NO: 2771 - protein, 1255 aa, synthetic construct
  REGION 1..1255: note = MUC-1__Homo_sapiens__AAA60019
MTPGTQSPFFLLLLLTVLTVVTGSGHASSTPGGEKETSATQRSSVPSSTEKNAVSMTSSVLSSHSPGSGSSTTQGQDVTLAPATEPASGSAATWGQDVTSVPVTRPALGSTTPPAHDVTSAPDNKPAPGSTAPPAHGVTSAPDTRPAPGSTAPPAHGVTSAPDTRPAPGSTAPPAHGVTSAPDTRPAPGSTAPPAHGVTSAPDTRPAPGSTAPPAHGVTSAPDTRPAPGSTAPPAHGVTSAPDTRPAPGSTAPPAHGVTSAPDTRPAPGSTAPPAHGVTSAPDTRPAPGSTAPPAHGVTSAPDTRPAPGSTAPPAHGVTSAPDTRPAPGSTAPPAHGVTSAPDTRPAPGSTAPPAHGVTSAPDTRPAPGSTAPPAHGVTSAPDTRPAPGSTAPPAHGVTSAPDTRPAPGSTAPPAHGVTSAPDTRPAPGSTAPPAHGVTSAPDTRPAPGSTAPPAHGVTSAPDTRPAPGSTAPPAHGVTSAPDTRPAPGSTAPPAHGVTSAPDTRPAPGSTAPPAHGVTSAPDTRPAPGSTAPPAHGVTSAPDTRPAPGSTAPPAHGVTSAPDTRPAPGSTAPPAHGVTSAPDTRPAPGSTAPPAHGVTSAPDTRPAPGSTAPPAHGVTSAPDTRPAPGSTAPPAHGVTSAPDTRPAPGSTAPPAHGVTSAPDTRPAPGSTAPPAHGVTSAPDTRPAPGSTAPPAHGVTSAPDTRPAPGSTAPPAHGVTSAPDTRPAPGSTAPPAHGVTSAPDTRPAPGSTAPPAHGVTSAPDTRPAPGSTAPPAHGVTSAPDTRPAPGSTAPPAHGVTSAPDTRPAPGSTAPPAHGVTSAPDTRPAPGSTAPPAHGVTSAPDTRPAPGSTAPPAHGVTSAPDTRPAPGSTAPPAHGVTSAPDTRPAPGSTAPPAHGVTSAPDTRPAPGSTAPPAHGVTSAPDTRPAPGSTAPPAHGVTSAPDNRPALGSTAPPVHNVTSASGSASGSASTLVHNGTSARATTTPASKSTPFSIPSHHSDTPTTLASHSTKTDASSTHHSSVPPLTSSNHSTSPQLSTGVSFFFLSFHISNLQFNSSLEDPSTDYYQELQRDISEMFLQIYKQGGFLGLSNIKFRPGSVVVQLTLAFREGTINVHDVETQFNQYKTEAASRYNLTISDVSVSDVPFPFSAQSGAGVPGWGIALLVLVCVLVALAIVYLIALAVCQCRRKNYGQLDIFPARDTYHPMSEYPTYHTHGRYVPPSSTDRSPYEKVSAGNGGSSLSYTNPAVAAASANL

SEQ ID NO: 2772 - RNA, 3768 nt, synthetic construct
  misc_feature 1..3768: note = MUC-1__Homo_sapiens__J05582.1
  source 1..3768: mol_type = other RNA
atgacaccgggcacccagtctcctttcttcctgctgctgctcctcacagtgcttacagttgttacaggttctggtcatgcaagctctaccccaggtggagaaaaggagacttcggctacccagagaagttcagtgcccagctctactgagaagaatgctgtgagtatgaccagcagcgtactctccagccacagccccggttcaggctcctccaccactcagggacaggatgtcactctggccccggccacggaaccagcttcaggttcagctgccacctggggacaggatgtcacctcggtcccagtcaccaggccagccctgggctccaccaccccgccagcccacgatgtcacctcagccccggacaacaagccagccccgggctccaccgcccccccagcccacggtgtcacctcggccccggacaccaggccggccccgggctccaccgcccccccagcccacggtgtcacctcggccccggacaccaggccggccccgggctccaccgcccccccagcccacggtgtcacctcggccccggacaccaggccggccccgggctccaccgcccccccagcccacggtgtcacctcggccccggacaccaggccggccccgggctccaccgcccccccagcccacggtgtcacctcggccccggacaccaggccggccccgggctccaccgcccccccagcccacggtgtcacctcggccccggacaccaggccggccccgggctccaccgcccccccagcccacggtgtcacctcggccccggacaccaggccggccccgggctccaccgcccccccagcccacggtgtcacctcggccccggacaccaggccggccccgggctccaccgcccccccagcccacggtgtcacctcggccccggacaccaggccggccccgggctccaccgcccccccagcccacggtgtcacctcggccccggacaccaggccggccccgggctccaccgcccccccagcccacggtgtcacctcggccccggacaccaggccggccccgggctccaccgcccccccagcccacggtgtcacctcggccccggacaccaggccggccccgggctccaccgcccccccagcccacggtgtcacctcggccccggacaccaggccggccccgggctccaccgcccccccagcccacggtgtcacctcggccccggacaccaggccggccccgggctccaccgcccccccagcccacggtgtcacctcggccccggacaccaggccggccccgggctccaccgcccccccagcccacggtgtcacctcggccccggacaccaggccggccccgggctccaccgcccccccagcccacggtgtcacctcggccccggacaccaggccggccccgggctccaccgcccccccagcccacggtgtcacctcggccccggacaccaggccggccccgggctccaccgcccccccagcccacggtgtcacctcggccccggacaccaggccggccccgggctccaccgcccccccagcccacggtgtcacctcggccccggacaccaggccggccccgggctccaccgcccccccagcccacggtgtcacctcggccccggacaccaggccggccccgggctccaccgcccccccagcccacggtgtcacctcggccccggacaccaggccggccccgggctccaccgcccccccagcccacggtgtcacctcggccccggacaccaggccggccccgggctccaccgcccccccagcccacggtgtcacctcggccccggacaccaggccggccccgggctccaccgcccccccagcccacggtgtcacctcggccccggacaccaggccggccccgggctccaccgcccccccagcccacggtgtcacctcggccccggacaccaggccggccccgggctccaccgcccccccagcccacggtgtcacctcggccccggacaccaggccggccccgggctccaccgcccccccagcccacggtgtcacctcggccccggacaccaggccggccccgggctccaccgcccccccagcccacggtgtcacctcggccccggacaccaggccggccccgggctccaccgcccccccagcccacggtgtcacctcggccccggacaccaggccggccccgggctccaccgcccccccagcccacggtgtcacctcggccccggacaccaggccggccccgggctccaccgcccccccagcccacggtgtcacctcggccccggacaccaggccggccccgggctccaccgcccccccagcccacggtgtcacctcggccccggacaccaggccggccccgggctccaccgcccccccagcccacggtgtcacctcggccccggacaccaggccggccccgggctccaccgcccccccagcccacggtgtcacctcggccccggacaccaggccggccccgggctccaccgcccccccagcccacggtgtcacctcggccccggacaccaggccggccccgggctccaccgcccccccagcccacggtgtcacctcggccccggacaccaggccggccccgggctccaccgcccccccagcccacggtgtcacctcggccccggacaccaggccggccccgggctccaccgcccccccagcccacggtgtcacctcggccccggacaccaggccggccccgggctccaccgcccccccagcccacggtgtcacctcggccccggacaccaggccggccccgggctccaccgcccccccagcccatggtgtcacctcggccccggacaacaggcccgccttgggctccaccgcccctccagtccacaatgtcacctcggcctcaggctctgcatcaggctcagcttctactctggtgcacaacggcacctctgccagggctaccacaaccccagccagcaagagcactccattctcaattcccagccaccactctgatactcctaccacccttgccagccatagcaccaagactgatgccagtagcactcaccatagctcggtacctcctctcacctcctccaatcacagcacttctccccagttgtctactggggtctctttctttttcctgtcttttcacatttcaaacctccagtttaattcctctctggaagatcccagcaccgactactaccaagagctgcagagagacatttctgaaatgtttttgcagatttataaacaagggggttttctgggcctctccaatattaagttcaggccaggatctgtggtggtacaattgactctggccttccgagaaggtaccatcaatgtccacgacgtggagacacagttcaatcagtataaaacggaagcagcctctcgatataacctgacgatctcagacgtcagcgtgagtgatgtgccatttcctttctctgcccagtctggggctggggtgccaggctggggcatcgcgctgctggtgctggtctgtgttctggttgcgctggccattgtctatctcattgccttggctgtctgtcagtgccgccgaaagaactacgggcagctggacatctttccagcccgggatacctaccatcctatgagcgagtaccccacctaccacacccatgggcgctatgtgccccctagcagtaccgatcgtagcccctatgagaaggtttctgcaggtaacggtggcagcagcctctcttacacaaacccagcagtggcagccgcttctgccaacttgtag

SEQ ID NO: 2773 - RNA, 3768 nt, synthetic construct
  misc_feature 1..3768: note = derived and/or modified sequence opt1 fromMUC-1__Homo_sapiens__J05582.1
  source 1..3768: mol_type = other RNA
atgacccccggcacccagagcccgttcttcctgctcctgctgctcacggtgctgaccgtcgtgaccgggtccggccacgccagctccacccccgggggcgagaaggagacgagcgccacccagcgctccagcgtgccctccagcaccgagaagaacgcggtctccatgaccagctccgtgctgagctcccacagccccgggtccggcagctccacgacccagggccaggacgtgaccctcgccccggccaccgagcccgccagcgggtccgccgcgacgtggggccaggacgtcaccagcgtgcccgtgacccggcccgccctggggagcaccacgccgcccgcccacgacgtcacctccgcccccgacaacaagcccgcgccgggcagcaccgccccgcccgcccacggggtgacctccgcccccgacacgcgccccgcccccggcagcaccgcgccgcccgcccacggcgtgacctccgcccccgacacccggcccgcccccgggagcacggcgcccccggcccacggcgtcacctccgcccccgacacccgccccgcccccgggagcaccgccccgcccgcccacggcgtgacgtccgcgcccgacacccggccggcccccggcagcaccgccccgcccgcccacggggtgacctccgcccccgacacgcgccccgcgcccggcagcaccgcgcccccggcccacggggtcacctccgcccccgacacccggcccgcccccggcagcacggccccgcccgcccacggggtgacctccgcccccgacacccgccccgccccgggcagcaccgcgccgcccgcccacggcgtgacctccgcccccgacacgcggcccgcccccgggagcaccgccccgcccgcgcacggcgtcacctccgcccccgacacccgccccgcccccgggagcacggccccgcccgcccacggcgtgaccagcgcgcccgacacccggcccgccccggggtccaccgccccgcccgcccacggcgtgacgagcgcgcccgacacccgccccgcccccggctccaccgccccgcccgcccacggggtcaccagcgcccccgacacgcggcccgcgcccggctccaccgcgcccccggcccacggggtgaccagcgcccccgacacccgccccgcccccggctccacggccccgcccgcccacggggtgaccagcgcccccgacacccggcccgccccgggctccaccgccccgcccgcgcacggcgtcacgagcgcccccgacacccgccccgcccccgggtccaccgcgcccccggcccacggcgtgaccagcgcccccgacacgcggcccgcccccgggtccaccgccccgcccgcccacggcgtcaccagcgcgcccgacacccgccccgccccgggctccacggccccgcccgcccacggggtgaccagcgcccccgacacccggcccgcgcccggctccaccgccccgcccgcccacggggtgacgagcgcccccgacacccgccccgcccccggcagcaccgcgcccccggcccacggggtcacctccgcccccgacacgcggcccgcccccggcagcaccgccccgcccgcgcacggcgtgacctccgcccccgacacccgccccgccccggggagcaccgccccgcccgcgcacggcgtgacgtccgcccccgacacccgccccgcccccgggagcaccgcgcccccggcccacggcgtcacctccgcccccgacacgcggcccgcccccgggagcaccgccccgcccgcccacggcgtgacctccgcccccgacacccgccccgcgccgggcagcacggccccgcccgcccacggggtgacctccgcccccgacacccggcccgcccccggcagcaccgcgccgcccgcccacggggtcacgtccgcccccgacacccgccccgcccccggcagcaccgcgcccccggcccacggggtgacctccgcccccgacacgcggcccgccccgggcagcaccgccccgcccgcgcacggcgtgacctccgcccccgacacccgccccgcccccgggagcacggccccgcccgcccacggcgtcacctccgcgcccgacacccggcccgcccccgggagcaccgcgcccccggcccacggcgtgacgagcgcccccgacacccgccccgcccccgggtccaccgccccgcccgcccacggcgtgaccagcgcccccgacacgcggcccgcgccgggctccaccgccccgcccgcccacggggtcaccagcgcccccgacacccgccccgcccccggctccacggcgccgcccgcccacggggtgaccagcgcccccgacacccggcccgcccccggctccaccgccccgcccgcgcacggcgtgacgagcgcccccgacacccgccccgccccggggtccaccgccccgcccgcccacggcgtcaccagcgcgcccgacacccggcccgcccccgggtccacggccccgcccgcccacggcgtgaccagcgcccccgacacccgccccgcgcccgggtccaccgcgcccccggcccacggcgtgacgagcgcccccgacacccggcccgcccccggctccaccgccccgcccgcccacggggtcaccagcgcccccgacacgcgccccgccccgggctccaccgcgccgcccgcccacggggtgaccagcgcccccgacacccggcccgcccccggctccacggcgcccccggcccacggggtgaccagcgcccccgacacccgccccgcccccggcagcaccgccccgcccgcccacggcgtcacgtccgcgcccgacaaccggcccgccctggggagcaccgccccgcccgtgcacaacgtgacctccgccagcggctccgcgagcgggtccgccagcaccctcgtccacaacggcacgtccgcccgcgccaccaccacccccgccagcaagtccacgcccttcagcatcccgtcccaccacagcgacacccccaccaccctggcgtcccacagcacgaagaccgacgcctccagcacccaccactccagcgtgccgcccctgaccagctccaaccacagcacgagcccccagctctccaccggggtgtccttcttcttcctgagcttccacatctccaacctgcagttcaacagctccctcgaggaccccagcaccgactactaccaggagctgcagcgcgacatctccgagatgttcctgcagatctacaagcagggcggcttcctcgggctgagcaacatcaagttccggcccggctccgtcgtggtgcagctgaccctcgccttccgcgaggggacgatcaacgtccacgacgtggagacccagttcaaccagtacaagaccgaggccgccagccggtacaacctgaccatctccgacgtgagcgtctccgacgtgcccttcccgttcagcgcgcagtccggcgccggcgtgcccgggtggggcatcgccctgctcgtcctggtgtgcgtgctggtcgccctcgccatcgtgtacctgatcgcgctggccgtgtgccagtgccgccggaagaactacgggcagctcgacatcttccccgcccgcgacacgtaccaccccatgagcgagtacccgacctaccacacccacggccggtacgtcccgcccagctccaccgaccgcagcccctacgagaaggtgtccgccgggaacggcggcagctccctgagctacaccaaccccgcggtggccgccgcctccgccaacctgtga

SEQ ID NO: 2774 - RNA, 3768 nt, synthetic construct
  misc_feature 1..3768: note = derived and/or modified sequence opt2 fromMUC-1__Homo_sapiens__J05582.1
  source 1..3768: mol_type = other RNA
atgacccccggcacccagtcccccttcttcctcctcctcctcctcaccgtcctcaccgtcgtcaccggctccggccacgcctcctccacccccggcggcgagaaggagacctccgccacccagcgctcctccgtcccctcctccaccgagaagaacgccgtctccatgacctcctccgtcctctcctcccactcccccggctccggctcctccaccacccagggccaggacgtcaccctcgcccccgccaccgagcccgcctccggctccgccgccacctggggccaggacgtcacctccgtccccgtcacccgccccgccctcggctccaccaccccccccgcccacgacgtcacctccgcccccgacaacaagcccgcccccggctccaccgccccccccgcccacggcgtcacctccgcccccgacacccgccccgcccccggctccaccgccccccccgcccacggcgtcacctccgcccccgacacccgccccgcccccggctccaccgccccccccgcccacggcgtcacctccgcccccgacacccgccccgcccccggctccaccgccccccccgcccacggcgtcacctccgcccccgacacccgccccgcccccggctccaccgccccccccgcccacggcgtcacctccgcccccgacacccgccccgcccccggctccaccgccccccccgcccacggcgtcacctccgcccccgacacccgccccgcccccggctccaccgccccccccgcccacggcgtcacctccgcccccgacacccgccccgcccccggctccaccgccccccccgcccacggcgtcacctccgcccccgacacccgccccgcccccggctccaccgccccccccgcccacggcgtcacctccgcccccgacacccgccccgcccccggctccaccgccccccccgcccacggcgtcacctccgcccccgacacccgccccgcccccggctccaccgccccccccgcccacggcgtcacctccgcccccgacacccgccccgcccccggctccaccgccccccccgcccacggcgtcacctccgcccccgacacccgccccgcccccggctccaccgccccccccgcccacggcgtcacctccgcccccgacacccgccccgcccccggctccaccgccccccccgcccacggcgtcacctccgcccccgacacccgccccgcccccggctccaccgccccccccgcccacggcgtcacctccgcccccgacacccgccccgcccccggctccaccgccccccccgcccacggcgtcacctccgcccccgacacccgccccgcccccggctccaccgccccccccgcccacggcgtcacctccgcccccgacacccgccccgcccccggctccaccgccccccccgcccacggcgtcacctccgcccccgacacccgccccgcccccggctccaccgccccccccgcccacggcgtcacctccgcccccgacacccgccccgcccccggctccaccgccccccccgcccacggcgtcacctccgcccccgacacccgccccgcccccggctccaccgccccccccgcccacggcgtcacctccgcccccgacacccgccccgcccccggctccaccgccccccccgcccacggcgtcacctccgcccccgacacccgccccgcccccggctccaccgccccccccgcccacggcgtcacctccgcccccgacacccgccccgcccccggctccaccgccccccccgcccacggcgtcacctccgcccccgacacccgccccgcccccggctccaccgccccccccgcccacggcgtcacctccgcccccgacacccgccccgcccccggctccaccgccccccccgcccacggcgtcacctccgcccccgacacccgccccgcccccggctccaccgccccccccgcccacggcgtcacctccgcccccgacacccgccccgcccccggctccaccgccccccccgcccacggcgtcacctccgcccccgacacccgccccgcccccggctccaccgccccccccgcccacggcgtcacctccgcccccgacacccgccccgcccccggctccaccgccccccccgcccacggcgtcacctccgcccccgacacccgccccgcccccggctccaccgccccccccgcccacggcgtcacctccgcccccgacacccgccccgcccccggctccaccgccccccccgcccacggcgtcacctccgcccccgacacccgccccgcccccggctccaccgccccccccgcccacggcgtcacctccgcccccgacacccgccccgcccccggctccaccgccccccccgcccacggcgtcacctccgcccccgacacccgccccgcccccggctccaccgccccccccgcccacggcgtcacctccgcccccgacacccgccccgcccccggctccaccgccccccccgcccacggcgtcacctccgcccccgacacccgccccgcccccggctccaccgccccccccgcccacggcgtcacctccgcccccgacacccgccccgcccccggctccaccgccccccccgcccacggcgtcacctccgcccccgacacccgccccgcccccggctccaccgccccccccgcccacggcgtcacctccgcccccgacacccgccccgcccccggctccaccgccccccccgcccacggcgtcacctccgcccccgacacccgccccgcccccggctccaccgccccccccgcccacggcgtcacctccgcccccgacaaccgccccgccctcggctccaccgccccccccgtccacaacgtcacctccgcctccggctccgcctccggctccgcctccaccctcgtccacaacggcacctccgcccgcgccaccaccacccccgcctccaagtccacccccttctccatcccctcccaccactccgacacccccaccaccctcgcctcccactccaccaagaccgacgcctcctccacccaccactcctccgtcccccccctcacctcctccaaccactccacctccccccagctctccaccggcgtctccttcttcttcctctccttccacatctccaacctccagttcaactcctccctcgaggacccctccaccgactactaccaggagctccagcgcgacatctccgagatgttcctccagatctacaagcagggcggcttcctcggcctctccaacatcaagttccgccccggctccgtcgtcgtccagctcaccctcgccttccgcgagggcaccatcaacgtccacgacgtcgagacccagttcaaccagtacaagaccgaggccgcctcccgctacaacctcaccatctccgacgtctccgtctccgacgtccccttccccttctccgcccagtccggcgccggcgtccccggctggggcatcgccctcctcgtcctcgtctgcgtcctcgtcgccctcgccatcgtctacctcatcgccctcgccgtctgccagtgccgccgcaagaactacggccagctcgacatcttccccgcccgcgacacctaccaccccatgtccgagtaccccacctaccacacccacggccgctacgtccccccctcctccaccgaccgctccccctacgagaaggtctccgccggcaacggcggctcctccctctcctacaccaaccccgccgtcgccgccgcctccgccaacctctga

SEQ ID NO: 2775 - RNA, 3768 nt, synthetic construct
  misc_feature 1..3768: note = derived and/or modified sequence opt3 fromMUC-1__Homo_sapiens__J05582.1
  source 1..3768: mol_type = other RNA
atgacccccggcacacagagccctttctttctgctccttctgttgactgtgttaacggtcgttaccgggtccggacacgcctcttcaacaccaggtggcgagaaggaaaccagtgctactcaaagaagctccgtgccgtcttcgacagagaaaaacgcagtatcaatgaccagcagtgtgctgtcctctcatagccccgggtccggatcaagtactacacagggccaggacgtcaccctagcccctgcgacggaaccagctagcggttctgccgcaacttgggggcaggatgtgacctccgttcccgtgacaaggcctgccctcggatcaactaccccacccgctcacgacgtcacaagcgcacctgataataagccagccccgggcagtaccgctccccctgcccatggcgtgacgtctgcgccagacactcggcccgcacctgggtccacagccccacccgctcacggagtaaccagcgccccggatactcgccctgcacccggttcgacagctccaccagcccatggcgttacctctgcgcccgacacgcgaccagcccccgggtccaccgcacctccagctcacggagtgacatcagccccggatactcgtcccgctcctggcagtaccgccccacccgcacacggtgtcacaagcgcccctgacactagaccagctcccgggtccaccgcgccgcctgcacatggagtgacatctgccccagataccaggcccgctcctggcagcactgccccaccagcacacggcgtgacgtcagcccctgacacacggcccgctccagggagtaccgccccgcctgcacatggagtcacttccgcgcccgatacccgcccagctcccggtagcacagcccctccagcacacggcgttacctctgcccccgacactagacctgctccggggtcaacagccccacccgcacacggagtgacgagtgctcctgataccaggccagcccccggcagcactgcgcctccggcccatggtgtaacatccgctcccgacacccggccagcacctgggtctacagctcccccagcccacggcgtgacttcggcccctgacacccgccccgcaccaggaagcacggcgccgcctgcccatggcgtcacctccgctcccgatacacgaccagcccccgggtcaactgcacctccagctcacggagtgaccagtgcccccgacacaagacctgcaccgggttctactgccccacccgctcatggcgttaccagcgcgcctgatacgaggcccgccccagggtccacagcacctcccgctcacggagtgacctcagccccagacactcggcctgccccgggcagcacagctcccccagcacacggtgtcacctctgcccctgatactcgtcccgcgccagggtccaccgctcctcccgcccatggcgtgacaagtgcaccggacacgcgcccagcccctggaagcaccgctcccccagcacacggcgtaacttctgcccccgatacaagacctgcgccggggtccaccgctcccccagcccatggagttacatcagcacctgacactaggcccgcccctggtagtaccgctccacccgcccacggcgtgacgagcgcacctgatacacggccagctcccgggtcgaccgccccgcctgcgcacggagtcacttccgccccagacacccgacccgcacctggctctacagctccacccgcccatggtgtgactagcgctccggatacccgccctgcacccgggtcaacagcccctcctgcccacggcgtcacgagtgctcccgacaccagaccagcgcccggatccactgcacctccagcccatggcgtgacatctgctccggacaccaggcccgcccctgggagcactgcaccacccgcccacggagttacatccgctcctgatacccggccagcgcccggctcaacggcccctccggcacatggtgtgactagcgctccagacacccgccccgcccctgggagtacagcacccccagcccacggagtaacctctgctcctgatactagacccgccccaggctccacagcgccgcctgcacacggtgtcaccagcgcccccgacacaaggccagctcccggctcgactgcccctccagctcatggggtgacctcagcacccgatacgcgtcctgccccgggatctacagctccacccgcccacggcgttaccagtgcacctgacactcggccagcgcccgggtccaccgcccctcccgctcatggagtgacaagcgccccagatactcgaccggcacctggctctaccgctcccccagcccacggtgtcacgagcgcacctgacacaagacccgccccagggtccaccgctcctcccgcgcatggagtgacttcagccccggatacaaggccagcacctggcagtaccgctcccccagcccacggtgtaactagcgcccccgacacacgccctgcaccgggctctaccgctccacccgcccacggggtgacgtccgcgcctgatactcggcccgctccaggatcaaccgcccctcccgcacatggcgttacaagtgccccagacaccagacctgctccggggagcacagcacccccagcccacggagtcacttccgcgcctgataccaggcccgctccaggctctacggcccctcccgcacatggtgtgacatcggccccggacactcgcccagctcctgggagcaccgcacccccagcccacggagtgacatcagctcccgacacccgacctgcccccggctccactgcgccccctgcccacggtgtcaccagtgcaccggataaccggcccgctctgggctctacagccccacctgttcataatgtgacgagcgcatccgggtcagcttctggaagcgccagtactcttgtgcacaacggcacctccgcccgtgcgacaaccactcccgctagcaaatctacaccattctcaatcccttcccatcacagtgacacccccacgactctggcaagccattcgacaaagaccgatgcctcttccacccaccacagctcagtaccgcctttgacaagttctaatcattccactagcccacaactctcaaccggggtcagctttttctttctgagtttccacatttccaacctgcagtttaattctagcctcgaggacccctccacagattactatcaggaattacagagagacatatcagagatgttcctgcaaatctacaaacagggaggctttcttggtttgtctaacattaagttcaggcctgggagtgtggttgtgcagctgactctagcttttcgcgagggaacgatcaatgtccatgatgtggaaacccagttcaaccaatataagacagaggccgcatcgcggtacaatctcactattagcgacgtttccgtgtctgatgtaccatttcccttctcagcccagagcggcgctggcgtccctgggtggggaatcgcgctgcttgtgctggtgtgcgtcttggttgccctcgcaatagtgtatctgatcgctttagccgtatgtcagtgcagaaggaaaaactacggtcaactggacattttcccagcacgagatacctatcaccccatgtccgaatacccgacataccacacccatggccgctatgtgcctcccagttctactgaccggagcccatacgagaaggtctcagccgggaatggaggctccagtctcagctatacgaaccccgctgtggccgcggcatctgccaatctttga

SEQ ID NO: 2776 - RNA, 3768 nt, synthetic construct
  misc_feature 1..3768: note = derived and/or modified sequence opt4 fromMUC-1__Homo_sapiens__J05582.1
  source 1..3768: mol_type = other RNA
atgacccccggcacccagagccccttcttcctgctgctgctgctgaccgtgctgaccgtggtgaccggcagcggccacgccagcagcacccccggcggcgagaaggagaccagcgccacccagagaagcagcgtgcccagcagcaccgagaagaacgccgtgagcatgaccagcagcgtgctgagcagccacagccccggcagcggcagcagcaccacccagggccaggacgtgaccctggcccccgccaccgagcccgccagcggcagcgccgccacctggggccaggacgtgaccagcgtgcccgtgaccagacccgccctgggcagcaccaccccccccgcccacgacgtgaccagcgcccccgacaacaagcccgcccccggcagcaccgccccccccgcccacggcgtgaccagcgcccccgacaccagacccgcccccggcagcaccgccccccccgcccacggcgtgaccagcgcccccgacaccagacccgcccccggcagcaccgccccccccgcccacggcgtgaccagcgcccccgacaccagacccgcccccggcagcaccgccccccccgcccacggcgtgaccagcgcccccgacaccagacccgcccccggcagcaccgccccccccgcccacggcgtgaccagcgcccccgacaccagacccgcccccggcagcaccgccccccccgcccacggcgtgaccagcgcccccgacaccagacccgcccccggcagcaccgccccccccgcccacggcgtgaccagcgcccccgacaccagacccgcccccggcagcaccgccccccccgcccacggcgtgaccagcgcccccgacaccagacccgcccccggcagcaccgccccccccgcccacggcgtgaccagcgcccccgacaccagacccgcccccggcagcaccgccccccccgcccacggcgtgaccagcgcccccgacaccagacccgcccccggcagcaccgccccccccgcccacggcgtgaccagcgcccccgacaccagacccgcccccggcagcaccgccccccccgcccacggcgtgaccagcgcccccgacaccagacccgcccccggcagcaccgccccccccgcccacggcgtgaccagcgcccccgacaccagacccgcccccggcagcaccgccccccccgcccacggcgtgaccagcgcccccgacaccagacccgcccccggcagcaccgccccccccgcccacggcgtgaccagcgcccccgacaccagacccgcccccggcagcaccgccccccccgcccacggcgtgaccagcgcccccgacaccagacccgcccccggcagcaccgccccccccgcccacggcgtgaccagcgcccccgacaccagacccgcccccggcagcaccgccccccccgcccacggcgtgaccagcgcccccgacaccagacccgcccccggcagcaccgccccccccgcccacggcgtgaccagcgcccccgacaccagacccgcccccggcagcaccgccccccccgcccacggcgtgaccagcgcccccgacaccagacccgcccccggcagcaccgccccccccgcccacggcgtgaccagcgcccccgacaccagacccgcccccggcagcaccgccccccccgcccacggcgtgaccagcgcccccgacaccagacccgcccccggcagcaccgccccccccgcccacggcgtgaccagcgcccccgacaccagacccgcccccggcagcaccgccccccccgcccacggcgtgaccagcgcccccgacaccagacccgcccccggcagcaccgccccccccgcccacggcgtgaccagcgcccccgacaccagacccgcccccggcagcaccgccccccccgcccacggcgtgaccagcgcccccgacaccagacccgcccccggcagcaccgccccccccgcccacggcgtgaccagcgcccccgacaccagacccgcccccggcagcaccgccccccccgcccacggcgtgaccagcgcccccgacaccagacccgcccccggcagcaccgccccccccgcccacggcgtgaccagcgcccccgacaccagacccgcccccggcagcaccgccccccccgcccacggcgtgaccagcgcccccgacaccagacccgcccccggcagcaccgccccccccgcccacggcgtgaccagcgcccccgacaccagacccgcccccggcagcaccgccccccccgcccacggcgtgaccagcgcccccgacaccagacccgcccccggcagcaccgccccccccgcccacggcgtgaccagcgcccccgacaccagacccgcccccggcagcaccgccccccccgcccacggcgtgaccagcgcccccgacaccagacccgcccccggcagcaccgccccccccgcccacggcgtgaccagcgcccccgacaccagacccgcccccggcagcaccgccccccccgcccacggcgtgaccagcgcccccgacaccagacccgcccccggcagcaccgccccccccgcccacggcgtgaccagcgcccccgacaccagacccgcccccggcagcaccgccccccccgcccacggcgtgaccagcgcccccgacaccagacccgcccccggcagcaccgccccccccgcccacggcgtgaccagcgcccccgacaccagacccgcccccggcagcaccgccccccccgcccacggcgtgaccagcgcccccgacaccagacccgcccccggcagcaccgccccccccgcccacggcgtgaccagcgcccccgacaacagacccgccctgggcagcaccgccccccccgtgcacaacgtgaccagcgccagcggcagcgccagcggcagcgccagcaccctggtgcacaacggcaccagcgccagagccaccaccacccccgccagcaagagcacccccttcagcatccccagccaccacagcgacacccccaccaccctggccagccacagcaccaagaccgacgccagcagcacccaccacagcagcgtgccccccctgaccagcagcaaccacagcaccagcccccagctgagcaccggcgtgagcttcttcttcctgagcttccacatcagcaacctgcagttcaacagcagcctggaggaccccagcaccgactactaccaggagctgcagagagacatcagcgagatgttcctgcagatctacaagcagggcggcttcctgggcctgagcaacatcaagttcagacccggcagcgtggtggtgcagctgaccctggccttcagagagggcaccatcaacgtgcacgacgtggagacccagttcaaccagtacaagaccgaggccgccagcagatacaacctgaccatcagcgacgtgagcgtgagcgacgtgcccttccccttcagcgcccagagcggcgccggcgtgcccggctggggcatcgccctgctggtgctggtgtgcgtgctggtggccctggccatcgtgtacctgatcgccctggccgtgtgccagtgcagaagaaagaactacggccagctggacatcttccccgccagagacacctaccaccccatgagcgagtaccccacctaccacacccacggcagatacgtgccccccagcagcaccgacagaagcccctacgagaaggtgagcgccggcaacggcggcagcagcctgagctacaccaaccccgccgtggccgccgccagcgccaacctgtga

SEQ ID NO: 2777 - RNA, 3768 nt, synthetic construct
  misc_feature 1..3768: note = derived and/or modified sequence opt5 fromMUC-1__Homo_sapiens__J05582.1
  source 1..3768: mol_type = other RNA
atgacccccggcacacagagccctttctttctgctcctgcttctgacggtgctcaccgtcgttacagggtccggacacgcctctagcaccccgggcggggagaaggaaacatccgctacccaaagatctagcgtgccctcctctacagagaaaaacgccgtgagcatgacctccagcgtcctgtcttcccatagccctggatctggctccagcacgacccaggggcaggacgtgacacttgcgcccgctaccgaacctgcctctggatccgccgctacatggggccaggatgttaccagcgtgcccgtcacgcggcctgccctgggctccacaaccccgcccgctcacgacgtgacatctgcccctgataataagcccgcgcctgggagcaccgctcccccggcccatggagttacctccgcccctgacacacgccccgctcctggcagcacggcccctcccgcgcacggggtgacctctgcccccgatacaagaccggctcccggatccaccgcccctcccgctcatggcgtcacaagcgcccctgacacccggcccgccccggggtctacggctcctcccgcgcacggagtgacaagcgcccctgatacccgccccgctcctggctccaccgctcccccggcccacggcgtgacatctgcccctgacaccagacccgcccccgggagcacagcgcctccggctcatggagtcacgtccgcccccgatacccggcctgcccccggcagcacagctcctcccgcccacggggttacctctgctcctgacacacgccccgccccgggatccaccgcgcctcccgcccatggcgtgacgagcgctcctgataccagacccgccccggggtctacagctcctcccgcccacggagtgacctccgcgcctgacacacggcccgcccccggcagcaccgctcctccggcccacggcgtcacgtccgctcccgatacacgccctgcccccgggtctaccgcccctcccgctcatggagtgacaagcgcgcctgacaccagaccggcccccggctccaccgctcctcccgcccacggggttacatctgcccctgacacgcggcccgctccgggaagcaccgcccctcccgcgcatggcgtgacatccgctcccgatacccgccctgcccccgggagcacagcccctccggctcacggcgtcacctctgcccccgacacgagacctgcgcccggatccacagctcctcccgcccatggcgtgaccagcgccccggatacccggcctgctcccgggtctacagcccctcccgctcacggagttacctccgcccctgacacacgccccgcgccgggcagcacggcccctcccgctcacggggtgacctctgcccccgatacaagacctgctccgggaagcaccgctccccctgcccatggcgtcacatccgcccccgacacccggcctgcgcccgggagcacggcccctccggctcacggcgtgacctctgcccccgatacaagacctgcccccggatccaccgctcctcccgcccatggcgtcacaagcgcgccggacacccgccctgctcccgggtccacagctccccctgcccacggagtgacctctgcccccgatacgcggcctgccccgggcagcacagcgccccctgctcacggggttacctccgcccccgacaccagacctgcccccggatctacagctccgcctgcccatggcgtgaccagcgctcccgatacgcgccctgcccccgggtccacagcgcctcccgcccacggcgtcacctctgctccggacacacggcctgcccccggaagcaccgctccccctgcccatggcgtgacatccgccccggacaccagacccgctcctgggagcacggcgccccctgcccacggagttacctctgctcccgatacacgccctgcccccggctccaccgccccgcctgctcatggggtgacaagcgcccccgacacccggcctgcgcccggatctacggctccgcctgcccacggcgtcacatccgcccccgataccagacccgctcctgggagcacagcgccccctgcccacggcgtgacctctgccccggacacccgccccgctcctggatccacagctccccctgcccatggcgtgacgagcgcccccgatacccggcctgctccggggtccacagcgccccctgcccacggagttaccagcgcccccgacacaagacctgctcccggctctaccgccccgcctgctcatggggtcacgagcgcccccgatacacgccccgcccctggatccaccgctccccctgcgcacggcgtgacctctgccccggacacacggcccgctcctggcagcaccgctccccctgcccatggggtgacatccgcccccgatacgagaccggcccctggatctaccgcgccccctgcccacggcgtcacaagcgctcccgacacccggccggcccctgggtccacagctcctcccgcccacggagtgacctctgcgcccgatacgcgccccgcccctggcagcaccgctccgcccgcccatggggttacatccgctcctgacaccagacccgcccctggaagcacagctccccctgcccacggcgtgacctctgcgccggatacacggcccgcccctggctccacggctccccctgcccatggggtcaccagcgctcccgacacaagaccggcccctggatctaccgcccctcccgcgcacggcgtgacctccgctcccgacacacgccccgcccctgggagcacggctccgcccgcccacggagttacctccgcccctgataaccggcccgctctcggctctacagcccctcccgtgcataatgtcaccagcgcgtccgggagcgcctctggatccgctagcacactggtgcacaacggcacctctgccagagctacgacaaccccggccagcaaatccacccctttctctatccccagccatcactccgacacacctaccacactggcgtctcatagcaccaagacggatgcctccagcacacaccactcttccgttccccctctcaccagctccaatcattctacaagcccccaactgtccaccggcgtgagctttttctttctttctttccacatttccaacctgcagtttaatagctctctcgaggacccgtccacggattactatcaggaactgcagcgcgacatcagcgagatgttccttcaaatttacaaacaagggggatttctgggcctctctaacatcaagttcagacccgggtccgtcgtggtgcagctgaccctggcttttcgggagggaacaattaatgtccatgatgttgaaacccagttcaaccagtataagacagaggccgctagccgctacaatctcaccatctctgacgtgagcgtgtccgatgtcccttttcccttctctgcccagagcggcgctggggtgcctggatggggcatcgccctgcttgttctggtgtgcgtcctcgtggcgctggccattgtttatcttatcgctctggccgtgtgtcagtgcagacggaaaaactacggccaactcgacattttcccggctcgcgatacatatcaccccatgtccgaataccctacctaccacacgcatgggagatatgtgccccctagctccacagaccggtctccctacgagaaggtcagcgccggaaatggcgggtcctctctgagctataccaaccctgccgttgcggctgcctccgccaatctgtga

SEQ ID NO: 2778 - protein, 711 aa, synthetic construct
  REGION 1..711: note = MUM-1/m__Homo_sapiens__NP_116242
MMADAKYVLCRWEKRLWPAKVLARTATSTKNKRRKEYFLAVQILSLEEKIKVKSTEVEILEKSQIEAIASSLASQNEVPAAPLEELAYRRSLRVALDVLSEGSIWSQESSAGTGRADRSLRGKPMEHVSSPCDSNSSSLPRGDVLGSSRPHRRRPCVQQSLSSSFTCEKDPECKVDHKKGLRKSENPRGPLVLPAGGGAQDESGSRIHHKNWTLASKRGGNSAQKASLCLNGSSLSEDDTERDMGSKGGSWAAPSLPSGVREDDPCANAEGHDPGLPLGSLTAPPAPEPSACSEPGECPAKKRPRLDGSQRPPAVQLEPMAAGAAPSPGPGPGPRESVTPRSTARLGPPPSHASADATRCLPCPDSQKLEKECQSSEESMGSNSMRSILEEDEEDEEPPRVLLYHEPRSFEVGMLVWHKHKKYPFWPAVVKSVRQRDKKASVLYIEGHMNPKMKGFTVSLKSLKHFDCKEKQTLLNQAREDFNQDIGWCVSLITDYRVRLGCGSFAGSFLEYYAADISYPVRKSIQQDVLGTKLPQLSKGSPEEPVVGCPLGQRQPCRKMLPDRSRAARDRANQKLVEYIVKAKGAESHLRAILKSRKPSRWLQTFLSSSQYVTCVETYLEDEGQLDLVVKYLQGVYQEVGAKVLQRTNGDRIRFILDVLLPEAIICAISAVDEVDYKTAEEKYIKGPSLSYREKEIFDNQLLEERNRRRR

SEQ ID NO: 2779 - RNA, 2136 nt, synthetic construct
  misc_feature 1..2136: note = MUM-1/m__Homo_sapiens__NM_032853
  source 1..2136: mol_type = other RNA
atgatggcggatgccaagtatgtcctctgccgatgggaaaagcgattatggcctgcgaaggttttggcccgaaccgcgacttcaacaaaaaataagagaagaaaggaatattttctagctgtgcaaatcctctctctagaggaaaaaattaaggtgaaaagcactgaagttgagatcctagagaagtctcaaattgaagccattgcttcctcgttagcctcacagaatgaggttcctgcggcacccctggaagaactggcctacagacggtcgcttcgcgtggctctggacgttctgagcgagggctcgatttggagtcaagaaagctctgcagggacaggtagagctgaccggtctctgcgagggaagcccatggagcatgtctcctcgccctgtgattcgaactcctcatctcttccccgcggagacgtgttgggcagttccagacctcacaggaggaggccatgtgtgcaacaaagcctgtcaagttcgttcacttgtgaaaaggaccccgagtgcaaagtggaccacaagaaggggctcaggaaaagtgaaaacccaagaggcccgttggtcctcccagctggaggtggtgcccaagatgagagtgggtccagaatccaccacaaaaattggactcttgcaagtaagaggggaggaaactcagcgcagaaggctagcttgtgcctgaatggatcttccctttcagaggacgacacggagagagacatggggagcaaaggaggcagctgggcagccccgtccttgccctccggggtcagggaggacgatccctgtgccaacgctgagggacacgaccccggtctgccgttgggcagcctcactgcgcccccagcccctgagccctcggcctgctcagagcctggagaatgccctgcgaaaaagaggccgcgcctggatggcagccaaaggccgcctgccgtgcagctggagcccatggcagcaggggccgcaccatcccccgggccggggccagggcccagagagtctgtgaccccgcgcagcaccgccaggctgggcccgcctccctcccacgcctctgcggatgcaaccagatgtcttccttgcccggattcccagaagctggagaaagagtgccagtcttccgaagagtccatggggtctaattccatgcgttctatcctggaggaagacgaggaagacgaggagccaccaagagtccttttataccacgaaccacgttcgtttgaagtaggaatgctagtctggcataaacataaaaaataccccttctggccagcagtggtcaaaagcgtcaggcagagagataagaaagcaagtgtgctatacatcgaaggacacatgaacccgaaaatgaaaggtttcacagtgtctcttaaaagtttaaagcactttgattgtaaagagaaacagacgcttctgaatcaagccagggaggacttcaaccaggacatcggctggtgtgtctccctcatcaccgactacagggtccggttaggctgcgggtcttttgctggctctttcctggaatattacgcggctgatataagctatcctgtccgaaaatccatccagcaggacgtcttggggaccaagcttcctcaactgagcaaggggagccccgaggagcccgtggtggggtgccccctggggcagaggcagccctgccggaaaatgctccccgaccgctcgcgggccgcccgggaccgggccaaccagaagctggtggagtacattgtgaaggccaagggcgcggagagccacctgcgggccatcctaaagagcaggaagccatctcgctggctgcagaccttcctgagctccagccagtacgtgacctgtgtggagacctacctggaggatgaggggcagctggacctggtggtgaagtacctgcagggcgtctaccaggaggtgggggccaaggtgctccagcgcaccaacggcgaccggatccggttcattctggacgtgcttctgcccgaggccatcatctgtgcgatctctgcggtggacgaggtggactacaagacggctgaggagaagtacatcaaggggccttcgctgagctaccgggaaaaagaaatatttgacaaccagctccttgaagagcggaaccggcgccgtcggtga

SEQ ID NO: 2780 - RNA, 2136 nt, synthetic construct
  misc_feature 1..2136: note = derived and/or modified sequence opt1 fromMUM-1/m__Homo_sapiens__NM_032853
  source 1..2136: mol_type = other RNA
atgatggccgacgccaagtacgtgctgtgccgctgggagaagcggctctggcccgcgaaggtcctggcccgcaccgccaccagcacgaagaacaagcggcgcaaggagtacttcctggccgtgcagatcctctccctggaggagaagatcaaggtcaagagcaccgaggtggagatcctggagaagtcccagatcgaggccatcgcgagctccctcgccagccagaacgaggtgccggccgcgcccctggaggagctggcctaccggcgctccctccgggtggccctggacgtcctgagcgagggctccatctggagccaggagtccagcgccgggaccggccgcgccgaccggtccctccgcgggaagcccatggagcacgtgagctccccctgcgacagcaactccagctccctgccgcggggcgacgtgctggggagcagccgcccccaccggcgccggccctgcgtccagcagtccctcagctccagcttcacgtgcgagaaggaccccgagtgcaaggtggaccacaagaagggcctgcgcaagtccgagaacccgcggggccccctggtgctccccgccgggggcggggcgcaggacgagagcggctcccgcatccaccacaagaactggaccctggccagcaagcggggcggcaactccgcccagaaggccagcctgtgcctcaacggctccagcctgtccgaggacgacaccgagcgcgacatggggagcaagggcgggtcctgggccgcgcccagcctgccgtccggcgtccgggaggacgacccctgcgccaacgccgagggccacgaccccgggctccccctgggcagcctgaccgccccgcccgcccccgagccctccgcgtgcagcgagccgggggagtgccccgccaagaagcgcccccgcctcgacggcagccagcggcccccggccgtgcagctggagcccatggccgccggggcggccccctcccccggcccgggccccgggccccgcgagagcgtgaccccgcggtccacggcccgcctggggcccccgcccagccacgcctccgcggacgccacccggtgcctcccctgccccgacagccagaagctggagaaggagtgccagtccagcgaggagtccatggggagcaactccatgcgcagcatcctggaggaggacgaggaggacgaggagccgccccgggtcctcctgtaccacgagccccgctccttcgaggtgggcatgctggtgtggcacaagcacaagaagtaccccttctggcccgccgtcgtcaagagcgtgcggcagcgcgacaagaaggcctccgtgctctacatcgaggggcacatgaaccccaagatgaagggcttcaccgtgagcctgaagtccctgaagcacttcgactgcaaggagaagcagaccctcctgaaccaggcccgggaggacttcaaccaggacatcggctggtgcgtgagcctgatcacggactaccgcgtccggctcgggtgcggcagcttcgcggggtccttcctggagtactacgccgccgacatcagctacccggtgcgcaagtccatccagcaggacgtcctgggcaccaagctcccccagctgagcaaggggtcccccgaggagcccgtggtgggctgcccgctgggccagcggcagccctgccgcaagatgctccccgaccggagccgcgccgcccgggaccgcgcgaaccagaagctggtcgagtacatcgtgaaggccaagggggccgagtcccacctccgcgccatcctcaagagccggaagccctcccgctggctgcagaccttcctgagctccagccagtacgtgacctgcgtcgagacgtacctggaggacgagggccagctggacctggtggtgaagtacctgcagggggtctaccaggaggtgggcgccaaggtgctccagcggaccaacggcgaccgcatccggttcatcctggacgtcctgctcccggaggcgatcatctgcgccatctccgccgtggacgaggtggactacaagaccgccgaggagaagtacatcaaggggcccagcctgtcctaccgcgagaaggagatcttcgacaaccagctgctcgaggagcggaaccgccggcgccggtga

SEQ ID NO: 2781 - RNA, 2136 nt, synthetic construct
  misc_feature 1..2136: note = derived and/or modified sequence opt2 fromMUM-1/m__Homo_sapiens__NM_032853
  source 1..2136: mol_type = other RNA
atgatggccgacgccaagtacgtcctctgccgctgggagaagcgcctctggcccgccaaggtcctcgcccgcaccgccacctccaccaagaacaagcgccgcaaggagtacttcctcgccgtccagatcctctccctcgaggagaagatcaaggtcaagtccaccgaggtcgagatcctcgagaagtcccagatcgaggccatcgcctcctccctcgcctcccagaacgaggtccccgccgcccccctcgaggagctcgcctaccgccgctccctccgcgtcgccctcgacgtcctctccgagggctccatctggtcccaggagtcctccgccggcaccggccgcgccgaccgctccctccgcggcaagcccatggagcacgtctcctccccctgcgactccaactcctcctccctcccccgcggcgacgtcctcggctcctcccgcccccaccgccgccgcccctgcgtccagcagtccctctcctcctccttcacctgcgagaaggaccccgagtgcaaggtcgaccacaagaagggcctccgcaagtccgagaacccccgcggccccctcgtcctccccgccggcggcggcgcccaggacgagtccggctcccgcatccaccacaagaactggaccctcgcctccaagcgcggcggcaactccgcccagaaggcctccctctgcctcaacggctcctccctctccgaggacgacaccgagcgcgacatgggctccaagggcggctcctgggccgccccctccctcccctccggcgtccgcgaggacgacccctgcgccaacgccgagggccacgaccccggcctccccctcggctccctcaccgccccccccgcccccgagccctccgcctgctccgagcccggcgagtgccccgccaagaagcgcccccgcctcgacggctcccagcgcccccccgccgtccagctcgagcccatggccgccggcgccgccccctcccccggccccggccccggcccccgcgagtccgtcaccccccgctccaccgcccgcctcggcccccccccctcccacgcctccgccgacgccacccgctgcctcccctgccccgactcccagaagctcgagaaggagtgccagtcctccgaggagtccatgggctccaactccatgcgctccatcctcgaggaggacgaggaggacgaggagcccccccgcgtcctcctctaccacgagccccgctccttcgaggtcggcatgctcgtctggcacaagcacaagaagtaccccttctggcccgccgtcgtcaagtccgtccgccagcgcgacaagaaggcctccgtcctctacatcgagggccacatgaaccccaagatgaagggcttcaccgtctccctcaagtccctcaagcacttcgactgcaaggagaagcagaccctcctcaaccaggcccgcgaggacttcaaccaggacatcggctggtgcgtctccctcatcaccgactaccgcgtccgcctcggctgcggctccttcgccggctccttcctcgagtactacgccgccgacatctcctaccccgtccgcaagtccatccagcaggacgtcctcggcaccaagctcccccagctctccaagggctcccccgaggagcccgtcgtcggctgccccctcggccagcgccagccctgccgcaagatgctccccgaccgctcccgcgccgcccgcgaccgcgccaaccagaagctcgtcgagtacatcgtcaaggccaagggcgccgagtcccacctccgcgccatcctcaagtcccgcaagccctcccgctggctccagaccttcctctcctcctcccagtacgtcacctgcgtcgagacctacctcgaggacgagggccagctcgacctcgtcgtcaagtacctccagggcgtctaccaggaggtcggcgccaaggtcctccagcgcaccaacggcgaccgcatccgcttcatcctcgacgtcctcctccccgaggccatcatctgcgccatctccgccgtcgacgaggtcgactacaagaccgccgaggagaagtacatcaagggcccctccctctcctaccgcgagaaggagatcttcgacaaccagctcctcgaggagcgcaaccgccgccgccgctga

SEQ ID NO: 2782 - RNA, 2136 nt, synthetic construct
  misc_feature 1..2136: note = derived and/or modified sequence opt3 fromMUM-1/m__Homo_sapiens__NM_032853
  source 1..2136: mol_type = other RNA
atgatggccgacgctaagtacgtgctgtgcagatgggagaaaaggctctggcccgcaaaggtccttgcccggaccgcgacaagcactaaaaacaagcgccgaaaagaatatttcctggctgttcagatcttgtccttagaggaaaagattaaggtgaaatctacggaggtagaaatactggagaagtcacaaatcgaggccattgcaagtagcctagcctcccagaatgaagtgcctgctgcaccactcgaggaactggcctaccgtagatctcttagggtcgctctggatgtgttgtcggagggctcaatctggagccaggagagttccgccgggaccggacgggcggaccgctctctcagaggtaaaccgatggaacacgttagctccccctgtgattcaaacagtagctctctgcctaggggcgacgtgctggggtcctcacggccacatcgccgaagaccctgcgtccagcaaagcctcagttcttcctttacatgtgagaaggatcctgaatgcaaagtggaccacaagaagggattaaggaaaagcgagaatccacggggccccctggtacttcctgccggtgggggagcacaggatgaatcgggctctcgtattcatcacaagaactggactttggcttccaaacgcggcgggaatagcgcccagaaggcaagtctgtgtctaaacggaagctccctctctgaggacgataccgagagagacatgggtagcaaaggcgggtcatgggctgccccaagtctgccgtccggagttagggaagatgacccctgcgcgaatgccgagggccatgatcctggtcttccactggggagcttgacagcaccccctgctccagaaccctctgcctgttcagagccgggagaatgccctgctaagaaacggccccgactcgacggcagtcagcgccctccagccgtgcaactggagcccatggcagccggcgctgcgccaagccccgggcctggaccaggtccgagagagtccgtcacccccaggtctactgcacggttaggccctccaccctcgcacgccagcgctgacgccacacgctgtctgccttgcccagattcccagaagctcgaaaaggagtgtcagtcaagtgaagagtctatggggagcaactccatgagatcaatccttgaagaggacgaggaagatgaggaacccccgagggtgctgttgtatcacgagcctcgtagcttcgaggtgggaatgctagtctggcataaacacaagaaatacccattttggcccgcagttgtgaagtctgtacggcagcgagacaaaaaggcctccgtgctgtatatagaaggccatatgaatcctaagatgaaaggtttcaccgtcagtctcaagagcctgaaacactttgattgcaaggagaaacaaacgcttctgaaccaggctagagaagacttcaatcaggatatcgggtggtgcgtgtctttgattactgactacagggttcgcctcggctgtggatcctttgccggctcattcctggagtattacgcagcggatatcagttaccccgtgcggaagtcaattcaacaggacgtcttagggaccaagctgccacagctatcgaaaggatcccctgaagaacccgtggtaggttgcccactcggccagagacaaccgtgtaggaagatgctgcctgatcgctctcgagctgcccgggaccgtgcaaaccagaaacttgttgagtatatcgtgaaggccaaaggggctgaaagccacttgagagccatactgaagtcaaggaagcccagtcgctggctccagacatttctgtcctctagccagtacgtcacttgcgtggagacctatcttgaagacgagggacaactggatttggtcgtgaaatacctccagggcgtttatcaggaagtgggtgcaaaggtactgcagcggacaaatggggacagaattaggttcatcttagatgtcctgctaccagaggctattatctgtgccatctccgcggtggacgaggttgattacaaaaccgccgaagagaagtatattaaaggcccctcactcagctaccgagaaaaggagatatttgacaaccaactgcttgaggagcgcaatcggagaaggcgttga

SEQ ID NO: 2783 - RNA, 2136 nt, synthetic construct
  misc_feature 1..2136: note = derived and/or modified sequence opt4 fromMUM-1/m__Homo_sapiens__NM_032853
  source 1..2136: mol_type = other RNA
atgatggccgacgccaagtacgtgctgtgcagatgggagaagagactgtggcccgccaaggtgctggccagaaccgccaccagcaccaagaacaagagaagaaaggagtacttcctggccgtgcagatcctgagcctggaggagaagatcaaggtgaagagcaccgaggtggagatcctggagaagagccagatcgaggccatcgccagcagcctggccagccagaacgaggtgcccgccgcccccctggaggagctggcctacagaagaagcctgagagtggccctggacgtgctgagcgagggcagcatctggagccaggagagcagcgccggcaccggcagagccgacagaagcctgagaggcaagcccatggagcacgtgagcagcccctgcgacagcaacagcagcagcctgcccagaggcgacgtgctgggcagcagcagaccccacagaagaagaccctgcgtgcagcagagcctgagcagcagcttcacctgcgagaaggaccccgagtgcaaggtggaccacaagaagggcctgagaaagagcgagaaccccagaggccccctggtgctgcccgccggcggcggcgcccaggacgagagcggcagcagaatccaccacaagaactggaccctggccagcaagagaggcggcaacagcgcccagaaggccagcctgtgcctgaacggcagcagcctgagcgaggacgacaccgagagagacatgggcagcaagggcggcagctgggccgcccccagcctgcccagcggcgtgagagaggacgacccctgcgccaacgccgagggccacgaccccggcctgcccctgggcagcctgaccgccccccccgcccccgagcccagcgcctgcagcgagcccggcgagtgccccgccaagaagagacccagactggacggcagccagagaccccccgccgtgcagctggagcccatggccgccggcgccgcccccagccccggccccggccccggccccagagagagcgtgacccccagaagcaccgccagactgggccccccccccagccacgccagcgccgacgccaccagatgcctgccctgccccgacagccagaagctggagaaggagtgccagagcagcgaggagagcatgggcagcaacagcatgagaagcatcctggaggaggacgaggaggacgaggagccccccagagtgctgctgtaccacgagcccagaagcttcgaggtgggcatgctggtgtggcacaagcacaagaagtaccccttctggcccgccgtggtgaagagcgtgagacagagagacaagaaggccagcgtgctgtacatcgagggccacatgaaccccaagatgaagggcttcaccgtgagcctgaagagcctgaagcacttcgactgcaaggagaagcagaccctgctgaaccaggccagagaggacttcaaccaggacatcggctggtgcgtgagcctgatcaccgactacagagtgagactgggctgcggcagcttcgccggcagcttcctggagtactacgccgccgacatcagctaccccgtgagaaagagcatccagcaggacgtgctgggcaccaagctgccccagctgagcaagggcagccccgaggagcccgtggtgggctgccccctgggccagagacagccctgcagaaagatgctgcccgacagaagcagagccgccagagacagagccaaccagaagctggtggagtacatcgtgaaggccaagggcgccgagagccacctgagagccatcctgaagagcagaaagcccagcagatggctgcagaccttcctgagcagcagccagtacgtgacctgcgtggagacctacctggaggacgagggccagctggacctggtggtgaagtacctgcagggcgtgtaccaggaggtgggcgccaaggtgctgcagagaaccaacggcgacagaatcagattcatcctggacgtgctgctgcccgaggccatcatctgcgccatcagcgccgtggacgaggtggactacaagaccgccgaggagaagtacatcaagggccccagcctgagctacagagagaaggagatcttcgacaaccagctgctggaggagagaaacagaagaagaagatga

SEQ ID NO: 2784 - RNA, 2136 nt, synthetic construct
  misc_feature 1..2136: note = derived and/or modified sequence opt5 fromMUM-1/m__Homo_sapiens__NM_032853
  source 1..2136: mol_type = other RNA
atgatggccgacgctaagtacgtgctgtgcagatgggagaaacggctctggcccgccaaggtcctggcgcgcaccgctacaagcacgaaaaacaagagacggaaagaatatttccttgccgttcagatcctgtccctcgaggaaaagattaaggtgaaatctaccgaggtggaaatcctggaaaagagccaaattgaggccatcgcttcctctcttgccagccagaatgaagtccctgctgccccgctggaggaactcgcgtaccgcagatccctgcgggtggccctggatgttctctctgagggcagcatttggtcccaggagagctctgctgggacaggacgcgccgacagatccctgcggggcaaacccatggaacacgtgagctctccttgtgattccaactctagctcccttccccgcggggacgtcctgggaagctccagacctcaccggcgcagaccctgcgtgcagcaatctctcagctccagctttacctgtgagaaggatcctgaatgcaaagttgaccacaagaagggcctgcggaaatctgagaatccgcgcgggccccttgtgctgcctgctggaggcggcgcccaggatgaatccgggagcagaatccatcacaagaactggacactcgcgtctaaacggggaggcaatagcgcccagaaggcttccctgtgtctgaacgggtctagcctctccgaggacgataccgagagagacatgggaagcaaaggcgggtcttgggccgctccctccctgcctagcggagtccgcgaagatgacccctgcgccaatgccgagggccatgatccgggccttcctctggggtctctcacagctccccctgcgcccgaaccctccgcctgtagcgagcctggagaatgcccggctaagaaacggcccagactggacggctcccagcgccctcccgccgtgcaacttgagcctatggccgctggggccgcgccctctccgggacctggccccgggcctcgggagagcgtgacccccagatccacggctcgcctgggacctcccccgtctcacgccagcgccgacgctacccggtgtctcccttgccccgattcccagaagctggaaaaggagtgtcagagctctgaagagtccatgggcagcaactctatgagatccatcctggaagaggacgaggaagatgaggaaccccctcgcgtcctcctgtatcacgagccgcggagcttcgaggttggcatgcttgtgtggcataaacacaagaaataccccttttggcctgccgtggtcaagtctgtgagacagcgcgacaaaaaggctagcgttctgtatattgaagggcatatgaatcccaagatgaaaggattcacagtgtccctcaagagcctgaaacactttgattgcaaggagaaacaaacccttctgaaccaggcccgggaagacttcaatcaggatatcggctggtgcgtctctctcattacagactacagagtgcggctggggtgtggatcctttgcgggcagcttcctggagtattacgccgctgatatctcctaccctgttcgcaagtctattcaacaggacgtgctcgggaccaagctgccccagcttagcaaaggctcccctgaggagcccgtcgtgggatgcccgctgggccagagacaaccttgtcggaagatgctccccgatagatctcgcgccgctcgggacagagccaaccagaaactggtcgagtatatcgtgaaggcgaaaggggccgaaagccatctgcgcgctattcttaagtccagaaagccttctcggtggctccagacgtttctgagctccagccagtacgttacatgcgtggagacctatctggaagacgagggacaactcgatctggtcgtgaaataccttcagggcgtttatcaggaagtgggggccaaggtcctgcagcgcacaaatggagacagaatccggttcatcctcgatgtgctgctgcccgaggctattatctgtgccatttctgccgtggacgaggttgattacaaaaccgctgaagagaagtatatcaaaggcccgtcccttagctaccgcgaaaaggagatttttgacaaccaactcctggaagagagaaatcggcgcagacggtga

SEQ ID NO: 2785 - protein, 145 aa, synthetic construct
  REGION 1..145: note = MUM-2/m__Homo_sapiens__Q9Y5R8
MTVHNLYLFDRNGVCLHYSEWHRKKQAGIPKEEEYKLMYGMLFSIRSFVSKMSPLDMKDGFLAFQTSRYKLHYYETPTGIKVVMNTDLGVGPIRDVLHHIYSALYVELVVKNPLCPLGQTVQSELFRSRLDSYVRSLPFFSARAG

SEQ ID NO: 2786 - RNA, 438 nt, synthetic construct
  misc_feature 1..438: note = MUM-2/m__Homo_sapiens__AAD44697
  source 1..438: mol_type = other RNA
atgactgtccacaacctgtacctgtttgaccggaatggagtgtgtctgcactacagcgaatggcaccgcaagaagcaagcagggattcccaaggaggaggagtataagctgatgtacgggatgctcttctctatccgctcgtttgtcagcaagatgtccccgctagacatgaaggatggcttcctggccttccaaactagccgttacaaactccattactacgagacgcccactgggatcaaagttgtcatgaatactgacttgggcgtgggacccatccgagatgtgctgcaccacatctacagtgcgctgtatgtggagctggtggtgaagaatcccctgtgcccgctgggccaaactgtgcaaagtgagctctttcgctcccgactggactcctatgttcgctctctgcccttcttctccgcccgggctggctga

SEQ ID NO: 2787 - RNA, 438 nt, synthetic construct
  misc_feature 1..438: note = derived and/or modified sequence opt1 fromMUM-2/m__Homo_sapiens__AAD44697
  source 1..438: mol_type = other RNA
atgaccgtgcacaacctgtacctcttcgaccgcaacggcgtctgcctgcactacagcgagtggcaccggaagaagcaggccgggatccccaaggaggaggagtacaagctgatgtacggcatgctgttctccatccgcagcttcgtgtccaagatgagcccgctcgacatgaaggacgggttcctggccttccagacctcccggtacaagctccactactacgagacgcccaccggcatcaaggtggtcatgaacaccgacctgggggtgggccccatccgcgacgtgctgcaccacatctacagcgcgctctacgtcgagctggtggtgaagaaccccctgtgcccgctcggccagaccgtccagtccgagctgttccggagccgcctggactcctacgtgcggagcctccccttcttctccgcccgcgccgggtga

SEQ ID NO: 2788 - RNA, 438 nt, synthetic construct
  misc_feature 1..438: note = derived and/or modified sequence opt2 fromMUM-2/m__Homo_sapiens__AAD44697
  source 1..438: mol_type = other RNA
atgaccgtccacaacctctacctcttcgaccgcaacggcgtctgcctccactactccgagtggcaccgcaagaagcaggccggcatccccaaggaggaggagtacaagctcatgtacggcatgctcttctccatccgctccttcgtctccaagatgtcccccctcgacatgaaggacggcttcctcgccttccagacctcccgctacaagctccactactacgagacccccaccggcatcaaggtcgtcatgaacaccgacctcggcgtcggccccatccgcgacgtcctccaccacatctactccgccctctacgtcgagctcgtcgtcaagaaccccctctgccccctcggccagaccgtccagtccgagctcttccgctcccgcctcgactcctacgtccgctccctccccttcttctccgcccgcgccggctga

SEQ ID NO: 2789 - RNA, 438 nt, synthetic construct
  misc_feature 1..438: note = derived and/or modified sequence opt3 fromMUM-2/m__Homo_sapiens__AAD44697
  source 1..438: mol_type = other RNA
atgaccgtgcacaacctgtacctcttcgacagaaatggcgtctgccttcattatagcgagtggcacaggaagaaacaggccgggatccccaaggaagaggaatacaaactgatgtatggaatgttgttttccattcggtctttcgtttcaaagatgagtcctttagatatgaaagacggttttctggctttccaaacaagccgctacaagctacattattacgagactccaacgggcataaaggtggtaatgaacaccgatctcggggtgggaccgatccgagacgtcctgcaccatatttattccgcactttacgtggaactggttgtgaaaaatcccttgtgtcctctcggccagacagtccagtctgagctgtttcgttcgagactggattcatacgtgaggagcctcccattctttagtgcccgggcgggttga

SEQ ID NO: 2790 - RNA, 438 nt, synthetic construct
  misc_feature 1..438: note = derived and/or modified sequence opt4 fromMUM-2/m__Homo_sapiens__AAD44697
  source 1..438: mol_type = other RNA
atgaccgtgcacaacctgtacctgttcgacagaaacggcgtgtgcctgcactacagcgagtggcacagaaagaagcaggccggcatccccaaggaggaggagtacaagctgatgtacggcatgctgttcagcatcagaagcttcgtgagcaagatgagccccctggacatgaaggacggcttcctggccttccagaccagcagatacaagctgcactactacgagacccccaccggcatcaaggtggtgatgaacaccgacctgggcgtgggccccatcagagacgtgctgcaccacatctacagcgccctgtacgtggagctggtggtgaagaaccccctgtgccccctgggccagaccgtgcagagcgagctgttcagaagcagactggacagctacgtgagaagcctgcccttcttcagcgccagagccggctga

SEQ ID NO: 2791 - RNA, 438 nt, synthetic construct
  misc_feature 1..438: note = derived and/or modified sequence opt5 fromMUM-2/m__Homo_sapiens__AAD44697
  source 1..438: mol_type = other RNA
atgaccgtgcacaacctgtacctcttcgacagaaatggcgtctgcctgcattatagcgagtggcaccggaagaaacaggccgggatccccaaggaagaggaatacaaacttatgtatggaatgctgttttccattcgctctttcgttagcaagatgtcccctctcgatatgaaagacggctttctggctttccaaacatctagatacaaacttcattattacgagacgccgaccgggatcaaggtggtgatgaacacagatctgggagtcggccccattcgggacgtgctccaccatatctatagcgccctgtacgttgaactggtggtcaagaatcctctctgtcccctggggcagaccgtgcagtccgagctttttcgctctagactggatagctacgttcggtccctccctttctttagcgcgcgcgctggatga

SEQ ID NO: 2792 - protein, 1043 aa, synthetic construct
  REGION 1..1043: note = MYO1A__Homo_sapiens__Q9UBC5
MPLLEGSVGVEDLVLLEPLVEESLLKNLQLRYENKEIYTYIGNVVISVNPYQQLPIYGPEFIAKYQDYTFYELKPHIYALANVAYQSLRDRDRDQCILITGESGSGKTEASKLVMSYVAAVCGKGEQVNSVKEQLLQSNPVLEAFGNAKTIRNNNSSRFGKYMDIEFDFKGSPLGGVITNYLLEKSRLVKQLKGERNFHIFYQLLAGADEQLLKALKLERDTTGYAYLNHEVSRVDGMDDASSFRAVQSAMAVIGFSEEEIRQVLEVTSMVLKLGNVLVADEFQASGIPASGIRDGRGVREIGEMVGLNSEEVERALCSRTMETAKEKVVTALNVMQAQYARDALAKNIYSRLFDWIVNRINESIKVGIGEKKKVMGVLDIYGFEILEDNSFEQFVINYCNEKLQQVFIEMTLKEEQEEYKREGIPWTKVDYFDNGIICKLIEHNQRGILAMLDEECLRPGVVSDSTFLAKLNQLFSKHGHYESKVTQNAQRQYDHTMGLSCFRICHYAGKVTYNVTSFIDKNNDLLFRDLLQAMWKAQHPLLRSLFPEGNPKQASLKRPPTAGAQFKSSVAILMKNLYSKSPNYIRCIKPNEHQQRGQFSSDLVATQARYLGLLENVRVRRAGYAHRQGYGPFLERYRLLSRSTWPHWNGGDREGVEKVLGELSMSSGELAFGKTKIFIRSPKTLFYLEEQRRLRLQQLATLIQKIYRGWRCRTHYQLMRKSQILISSWFRGNMQKKCYGKIKASVLLIQAFVRGWKARKNYRKYFRSEAALTLADFIYKSMVQKFLLGLKNNLPSTNVLDKTWPAAPYKCLSTANQELQQLFYQWKCKRFRDQLSPKQVEILREKLCASELFKGKKASYPQSVPIPFCGDYIGLQGNPKLQKLKGGEEGPVLMAEAVKKVNRGNGKTSSRILLLTKGHVILTDTKKSQAKIVIGLDNVAGVSVTSLKDGLFSLHLSEMSSVGSKGDFLLVSEHVIELLTKMYRAVLDATQRQLTVTVTEKFSVRFKENSVAVKVVQGPAGGDNSKLRYKKKGSHCLEVTVQ

SEQ ID NO: 2793 - RNA, 3132 nt, synthetic construct
  misc_feature 1..3132: note = MYO1A__Homo_sapiens__AAC78645
  source 1..3132: mol_type = other RNA
atgcctctcctggaaggttctgtgggggtggaggatcttgtcctcctggaacccttggtggaggagtcactgctcaagaatcttcagcttcgctatgaaaacaaggagatttatacctacattgggaatgtggtgatctcagtgaatccctatcaacagcttcccatctatgggccagagttcattgccaaatatcaagactatactttctatgagctgaagccccatatctacgcattggcaaatgtggcgtaccagtcactgagggacagggaccgagaccagtgtatcctcatcacaggcgagagtggatcagggaagactgaggccagcaagctggtgatgtcttatgtggctgccgtctgtgggaaaggagagcaggtgaactctgtgaaggagcagctgctacagtctaacccagtgctggaggcttttggcaatgccaagaccattcgcaacaacaattcctcccgatttggaaaatacatggatattgaatttgacttcaagggatcccccctcggtggtgtcatcacaaactatctgcttgagaaatcccgattagtgaagcagctcaaaggagaaaggaacttccacatcttctatcagctgctggctggagcagatgaacagctgctgaaggccctgaagcttgagcgggatacaactggctatgcctatctgaatcatgaagtatccagagtggatggcatggacgacgcctccagcttcagggctgtacagagtgcaatggcagtgattgggttctcggaggaggagattcgacaagtgctagaggtgacatccatggtgctaaagctggggaacgtgttggtggctgatgagttccaggccagtgggataccagcaagtggcatccgtgatgggagaggtgttcgggagattggggagatggtgggcttgaattcagaagaagtagagagagctttgtgctcgaggaccatggaaacagccaaggaaaaggtggtcactgcactgaatgttatgcaggctcagtatgctcgggacgccctggctaagaacatctacagccgcctctttgactggatagtgaatcgaatcaatgagagcatcaaggtgggcatcggggaaaagaagaaggtaatgggagtccttgatatctacggttttgagatattagaggataatagctttgagcaatttgtgatcaactactgcaatgagaagctgcagcaggtgttcatagagatgaccctgaaagaagagcaagaggaatataagagagaaggcataccgtggacaaaggtggactactttgataatggcatcatttgtaagctcattgagcataatcagcgaggtatcctggccatgttggatgaggagtgcctgcggcctggggtggtcagtgactccactttcctagcaaagctgaaccagctcttctccaagcatggccactacgagagcaaagtcacccagaatgcccagcgtcagtatgaccacaccatgggcctcagctgcttccgcatctgccactatgcgggcaaggtgacatacaacgtgaccagctttattgacaagaataatgacctactcttccgagacctgttgcaggccatgtggaaggcccagcaccccctccttcggtccttgtttcctgagggcaatcctaagcaggcatctctcaaacgccccccgactgctggggcccagttcaagagttctgtggccatcctcatgaagaatctgtattccaagagccccaactacatcaggtgcataaagcccaatgagcatcagcagcgaggtcagttctcttcagacctggtggcaacccaggctcggtacctgggactgctggagaacgtacgggtgcgacgggcaggctatgcccaccgccagggttatgggcccttcctggaaaggtaccgattgctgagccggagcacctggcctcactggaatgggggagaccgggaaggtgttgagaaggtcctgggggagctgagcatgtcctcgggggagctggcctttggcaagacaaagatcttcattagaagccccaagactcttttctacctcgaagaacagaggcgcctgagactccagcagctggccacactcatacagaagatttaccgaggctggcgctgccgcacccactaccaactgatgcgaaagagtcagatcctcatctcctcttggtttcggggaaacatgcaaaagaaatgctatgggaagataaaggcatccgtgttattgatccaggcttttgtgagagggtggaaggcccgaaagaattatcgcaaatatttccggtcagaggctgccctcaccttggcagatttcatctacaagagcatggtacagaaattcctactggggctgaagaacaatttgccatccacaaacgtcttagacaagacatggccagccgccccctacaagtgcctcagcacagcaaatcaggagctgcagcagctcttctaccagtggaagtgcaagaggttccgggatcagctgtccccgaagcaggtagagatcctgagggaaaagctctgtgccagtgaactgttcaagggcaagaaggcttcatatccccagagtgtccccattccattctgtggtgactacattgggctgcaagggaaccccaagctgcagaagctgaaaggcggggaggaggggcctgttctgatggcagaggccgtgaagaaggtcaatcgtggcaatggcaagacttcttctcggattctcctcctgaccaagggccatgtgattctcacagacaccaagaagtcccaggccaaaattgtcattgggctagacaatgtggctggggtgtcagtcaccagcctcaaggatgggctctttagcttgcatctgagtgagatgtcatcggtgggctccaagggggacttcctgctggtcagcgagcatgtgattgaactgctgaccaaaatgtaccgggctgtgctggatgccacgcagaggcagcttacagtcaccgtgactgagaagttctcagtgaggttcaaggagaacagtgtggctgtcaaggtcgtccagggccctgcaggtggtgacaacagcaagctacgctacaaaaaaaaggggagtcattgcttggaggtgactgtgcagtga

SEQ ID NO: 2794 - RNA, 3132 nt, synthetic construct
  misc_feature 1..3132: note = derived and/or modified sequence opt1 fromMYO1A__Homo_sapiens__AAC78645
  source 1..3132: mol_type = other RNA
atgcccctgctcgagggcagcgtgggggtcgaggacctggtgctgctcgagccgctggtggaggagtccctgctcaagaacctgcagctgcgctacgagaacaaggagatctacacctacatcggcaacgtcgtgatcagcgtgaacccctaccagcagctccccatctacgggcccgagttcatcgccaagtaccaggactacaccttctacgagctgaagccgcacatctacgccctggcgaacgtcgcctaccagtccctccgggaccgcgaccgggaccagtgcatcctgatcacgggcgagagcgggtccggcaagaccgaggccagcaagctggtgatgtcctacgtggccgccgtctgcggcaagggggagcaggtcaacagcgtgaaggagcagctcctgcagtccaaccccgtgctggaggcgttcggcaacgccaagaccatccgcaacaacaacagctcccggttcgggaagtacatggacatcgagttcgacttcaagggcagccccctcgggggcgtgatcaccaactacctgctggagaagtcccgcctcgtgaagcagctgaagggcgagcggaacttccacatcttctaccagctgctcgccggggccgacgagcagctgctgaaggcgctcaagctggagcgcgacacgaccggctacgcctacctgaaccacgaggtcagccgggtggacgggatggacgacgcctccagcttccgcgccgtgcagtccgccatggcggtcatcggcttcagcgaggaggagatccgccaggtgctcgaggtgacctccatggtcctgaagctgggcaacgtgctcgtggccgacgagttccaggccagcgggatccccgccagcggcatccgggacgggcggggcgtccgcgagatcggggagatggtgggcctgaactccgaggaggtcgagcgggccctgtgcagccgcaccatggagacggcgaaggagaaggtggtgaccgccctcaacgtcatgcaggcccagtacgcccgggacgccctggcgaagaacatctactcccgcctgttcgactggatcgtgaaccggatcaacgagagcatcaaggtgggcatcggggagaagaagaaggtcatgggcgtgctcgacatctacgggttcgagatcctggaggacaactccttcgagcagttcgtgatcaactactgcaacgagaagctgcagcaggtcttcatcgagatgaccctcaaggaggagcaggaggagtacaagcgcgagggcatcccgtggaccaaggtggactacttcgacaacgggatcatctgcaagctgatcgagcacaaccagcggggcatcctggccatgctcgacgaggagtgcctgcgccccggcgtggtcagcgactccacgttcctggccaagctcaaccagctgttcagcaagcacgggcactacgagtccaaggtgacccagaacgcccagcgccagtacgaccacaccatgggcctgagctgcttccggatctgccactacgccgggaaggtgacctacaacgtcacgtccttcatcgacaagaacaacgacctcctcttccgcgacctgctgcaggcgatgtggaaggcccagcaccccctcctgcggagcctgttccccgagggcaacccgaagcaggcctccctcaagcgcccgcccaccgccggggcgcagttcaagagctccgtggccatcctgatgaagaacctgtacagcaagtcccccaactacatccggtgcatcaagcccaacgagcaccagcagcgcggccagttcagctccgacctcgtggccacccaggcccggtacctgggcctgctcgagaacgtccgcgtgcggcgcgccgggtacgcgcaccggcagggctacgggcccttcctggagcgctaccggctgctcagccgcagcacctggccccactggaacggcggcgaccgggagggggtggagaaggtcctgggcgagctgtccatgagctccggggagctcgccttcggcaagacgaagatcttcatccgcagccccaagaccctgttctacctggaggagcagcggcgcctccggctgcagcagctggccaccctcatccagaagatctaccgcgggtggcgctgccggacccactaccagctgatgcgcaagtcccagatcctgatcagctcctggttccggggcaacatgcagaagaagtgctacggcaagatcaaggccagcgtgctcctgatccaggccttcgtgcgcgggtggaaggcgcggaagaactaccgcaagtacttccggtccgaggccgccctgacgctcgccgacttcatctacaagagcatggtccagaagttcctgctgggcctcaagaacaacctgccgtccaccaacgtgctggacaagacctggcccgccgcgccctacaagtgcctcagcaccgccaaccaggagctgcagcagctgttctaccagtggaagtgcaagcgcttccgggaccagctctcccccaagcaggtcgagatcctgcgcgagaagctgtgcgccagcgagctgttcaaggggaagaaggcctcctacccgcagagcgtgcccatccccttctgcggcgactacatcgggctgcagggcaaccccaagctgcagaagctcaagggcggggaggagggcccggtgctgatggcggaggccgtgaagaaggtcaaccgggggaacggcaagacgtccagccgcatcctgctcctgaccaaggggcacgtgatcctgaccgacaccaagaagtcccaggccaagatcgtgatcggcctcgacaacgtcgccggcgtgagcgtgacgagcctgaaggacgggctgttctccctccacctgagcgagatgtccagcgtcggctccaagggggacttcctgctcgtgagcgagcacgtgatcgagctgctgaccaagatgtaccgggccgtcctcgacgcgacccagcgccagctgaccgtgacggtgaccgagaagttctccgtccggttcaaggagaacagcgtggccgtgaaggtcgtgcagggccccgccgggggcgacaactccaagctgcgctacaagaagaagggcagccactgcctcgaggtgaccgtccagtga

SEQ ID NO: 2795 - RNA, 3132 nt, synthetic construct
  misc_feature 1..3132: note = derived and/or modified sequence opt2 fromMYO1A__Homo_sapiens__AAC78645
  source 1..3132: mol_type = other RNA
atgcccctcctcgagggctccgtcggcgtcgaggacctcgtcctcctcgagcccctcgtcgaggagtccctcctcaagaacctccagctccgctacgagaacaaggagatctacacctacatcggcaacgtcgtcatctccgtcaacccctaccagcagctccccatctacggccccgagttcatcgccaagtaccaggactacaccttctacgagctcaagccccacatctacgccctcgccaacgtcgcctaccagtccctccgcgaccgcgaccgcgaccagtgcatcctcatcaccggcgagtccggctccggcaagaccgaggcctccaagctcgtcatgtcctacgtcgccgccgtctgcggcaagggcgagcaggtcaactccgtcaaggagcagctcctccagtccaaccccgtcctcgaggccttcggcaacgccaagaccatccgcaacaacaactcctcccgcttcggcaagtacatggacatcgagttcgacttcaagggctcccccctcggcggcgtcatcaccaactacctcctcgagaagtcccgcctcgtcaagcagctcaagggcgagcgcaacttccacatcttctaccagctcctcgccggcgccgacgagcagctcctcaaggccctcaagctcgagcgcgacaccaccggctacgcctacctcaaccacgaggtctcccgcgtcgacggcatggacgacgcctcctccttccgcgccgtccagtccgccatggccgtcatcggcttctccgaggaggagatccgccaggtcctcgaggtcacctccatggtcctcaagctcggcaacgtcctcgtcgccgacgagttccaggcctccggcatccccgcctccggcatccgcgacggccgcggcgtccgcgagatcggcgagatggtcggcctcaactccgaggaggtcgagcgcgccctctgctcccgcaccatggagaccgccaaggagaaggtcgtcaccgccctcaacgtcatgcaggcccagtacgcccgcgacgccctcgccaagaacatctactcccgcctcttcgactggatcgtcaaccgcatcaacgagtccatcaaggtcggcatcggcgagaagaagaaggtcatgggcgtcctcgacatctacggcttcgagatcctcgaggacaactccttcgagcagttcgtcatcaactactgcaacgagaagctccagcaggtcttcatcgagatgaccctcaaggaggagcaggaggagtacaagcgcgagggcatcccctggaccaaggtcgactacttcgacaacggcatcatctgcaagctcatcgagcacaaccagcgcggcatcctcgccatgctcgacgaggagtgcctccgccccggcgtcgtctccgactccaccttcctcgccaagctcaaccagctcttctccaagcacggccactacgagtccaaggtcacccagaacgcccagcgccagtacgaccacaccatgggcctctcctgcttccgcatctgccactacgccggcaaggtcacctacaacgtcacctccttcatcgacaagaacaacgacctcctcttccgcgacctcctccaggccatgtggaaggcccagcaccccctcctccgctccctcttccccgagggcaaccccaagcaggcctccctcaagcgcccccccaccgccggcgcccagttcaagtcctccgtcgccatcctcatgaagaacctctactccaagtcccccaactacatccgctgcatcaagcccaacgagcaccagcagcgcggccagttctcctccgacctcgtcgccacccaggcccgctacctcggcctcctcgagaacgtccgcgtccgccgcgccggctacgcccaccgccagggctacggccccttcctcgagcgctaccgcctcctctcccgctccacctggccccactggaacggcggcgaccgcgagggcgtcgagaaggtcctcggcgagctctccatgtcctccggcgagctcgccttcggcaagaccaagatcttcatccgctcccccaagaccctcttctacctcgaggagcagcgccgcctccgcctccagcagctcgccaccctcatccagaagatctaccgcggctggcgctgccgcacccactaccagctcatgcgcaagtcccagatcctcatctcctcctggttccgcggcaacatgcagaagaagtgctacggcaagatcaaggcctccgtcctcctcatccaggccttcgtccgcggctggaaggcccgcaagaactaccgcaagtacttccgctccgaggccgccctcaccctcgccgacttcatctacaagtccatggtccagaagttcctcctcggcctcaagaacaacctcccctccaccaacgtcctcgacaagacctggcccgccgccccctacaagtgcctctccaccgccaaccaggagctccagcagctcttctaccagtggaagtgcaagcgcttccgcgaccagctctcccccaagcaggtcgagatcctccgcgagaagctctgcgcctccgagctcttcaagggcaagaaggcctcctacccccagtccgtccccatccccttctgcggcgactacatcggcctccagggcaaccccaagctccagaagctcaagggcggcgaggagggccccgtcctcatggccgaggccgtcaagaaggtcaaccgcggcaacggcaagacctcctcccgcatcctcctcctcaccaagggccacgtcatcctcaccgacaccaagaagtcccaggccaagatcgtcatcggcctcgacaacgtcgccggcgtctccgtcacctccctcaaggacggcctcttctccctccacctctccgagatgtcctccgtcggctccaagggcgacttcctcctcgtctccgagcacgtcatcgagctcctcaccaagatgtaccgcgccgtcctcgacgccacccagcgccagctcaccgtcaccgtcaccgagaagttctccgtccgcttcaaggagaactccgtcgccgtcaaggtcgtccagggccccgccggcggcgacaactccaagctccgctacaagaagaagggctcccactgcctcgaggtcaccgtccagtga

SEQ ID NO: 2796 - RNA, 3132 nt, synthetic construct
  misc_feature 1..3132: note = derived and/or modified sequence opt3 fromMYO1A__Homo_sapiens__AAC78645
  source 1..3132: mol_type = other RNA
atgcccctgctcgagggcagcgtgggggtcgaagaccttgttctgttggagcctttagtggaagagtccctgctaaagaacctccagctgagatacgaaaataaagagatctatacctacattggaaacgtagtgatatctgtcaatccatatcaacagcttccgatctacggtcccgagttcattgccaagtatcaggattacacattttatgaactgaaacctcacatctacgctttggcaaacgtggcctaccagtcactcagggaccgggatcgcgaccaatgcattctgatcactggcgagagtgggagcggaaagacggaagcgtccaaactggttatgtcttatgtggctgccgtctgtggcaagggtgagcaggtaaattcggtgaaggagcagctcttacagtcaaacccagttctggaagcattcgggaatgccaaaaccatacgaaacaataacagcagtcgttttggaaagtacatggatatcgagttcgactttaaaggcagtccccttggcggggtgattacaaattatttgctggaaaagtctaggctagtcaaacaactcaagggagagagaaacttccatatcttttaccagctgcttgctggtgcagatgaacagctgttgaaggccctcaaactggagcgggacactaccggctatgcttacttaaatcacgaggtgagccgcgtggatgggatggacgatgcctcctcattcagagcggtccagagtgcaatggccgttattggatttagcgaagaggaaatcaggcaagtgctggaggtaacatctatggtgctcaaacttggcaacgtcctggtggctgacgagttccaggcctccggtatacctgcatcagggattcgggatggacgcggcgttcgagaaatcggcgagatggtggggttgaatagcgaagaggtcgaaagagctctatgcagtaggaccatggagactgccaaggaaaaggtggtaacagcgctgaacgttatgcaggcccaatatgcacgggacgctctcgccaaaaacatttactctcgtctgtttgactggatcgtgaatcgcatcaacgagtccattaaggtcggaataggtgagaaaaagaaggtgatgggcgtccttgatatctacgggttcgaaattctggaggacaatagctttgaacagttcgtgatcaactattgtaatgagaaattgcagcaggttttcatagagatgaccctcaaggaggaacaagaagagtacaaaagagaaggcattccatggacgaaggtggattattttgacaacggaatcatctgcaaactgattgagcataatcagaggggtatcttagctatgctggatgaggaatgtctacggcccggggtagtctcggactctactttcctcgccaagctgaaccagctgttttccaagcacggccattacgagtcaaaagtgacccagaatgcacaacgacagtatgatcacacaatgggattgagttgcttccgcatttgtcactacgccggcaaggttacttataacgtgaccagctttatagacaaaaataacgatcttctcttcagagacctgcttcaggctatgtggaaggcgcagcatcctctgttgaggtccctctttccagaagggaatccgaaacaagcatctctgaagcggccccctacagccggagctcagttcaagagctcagtcgccatcttaatgaaaaacctgtacagtaagtccccaaattacattcgctgcatcaaacccaacgagcaccagcagagaggtcaatttagctctgatctagtggcaacccaggccaggtatctcggcctgcttgaaaacgtacgtgtgcggcgagctgggtacgcccatagacagggatatggccctttcttggagaggtaccgcctgctctcacggagtacgtggccacactggaatggtggggacagagagggcgttgaaaaggtcctgggagagttaagcatgtcctctggcgaactggcatttgggaaaactaagatcttcattaggtcgcccaagacattgttttatcttgaggaacaacgccgactccggctgcagcagctagcgaccctgatacagaaaatctaccgtggatggagatgtaggactcactatcaactcatgcgcaagagccagattctgatctcctcatggttccggggtaacatgcagaaaaagtgctacggcaaaattaaggctagtgtgcttttgatccaggccttcgtgagagggtggaaagcaaggaagaattaccgaaagtattttcgctctgaggccgctctgacattagccgacttcatatacaaaagcatggtccaaaagtttctcctgggacttaaaaacaatctgccgtccaccaacgttttggataagacgtggcctgcagctccctataaatgtctctcaaccgccaatcaggagctgcagcagctattctaccaatggaagtgcaagcggtttagagaccagctgagcccaaaacaggtggaaatcctcagggagaagctgtgcgcgtctgaacttttcaaaggcaagaaagcctcctatcctcaaagtgtgcccattccattttgtggtgattacatcgggttgcagggcaaccccaagctgcagaagttaaaaggaggcgaggaggggcctgtactcatggctgaagcagtcaagaaagtgaatcgtggaaacggcaagacaagctctcgcattctgcttctgactaaaggtcatgttatcctaaccgacacaaagaagtcccaggccaaaatagtgattgggctcgataatgtcgctggagtgtcagttacttccctgaaggacggcttgttcagcctgcacttatcggagatgtcctctgtgggtagcaaaggcgattttctcctggtatcagaacatgtcatcgagcttctgaccaagatgtatcgggccgtgttggacgcaacacaaagacagctcaccgtgactgtcacggaaaaattcagtgttaggtttaaggagaactccgtggcggtaaaagtggtccaggggccagccggaggcgataattctaagctgcgatacaagaaaaaggggagccactgcctagaggtgacagttcagtga

SEQ ID NO: 2797 - RNA, 3132 nt, synthetic construct
  misc_feature 1..3132: note = derived and/or modified sequence opt4 fromMYO1A__Homo_sapiens__AAC78645
  source 1..3132: mol_type = other RNA
atgcccctgctggagggcagcgtgggcgtggaggacctggtgctgctggagcccctggtggaggagagcctgctgaagaacctgcagctgagatacgagaacaaggagatctacacctacatcggcaacgtggtgatcagcgtgaacccctaccagcagctgcccatctacggccccgagttcatcgccaagtaccaggactacaccttctacgagctgaagccccacatctacgccctggccaacgtggcctaccagagcctgagagacagagacagagaccagtgcatcctgatcaccggcgagagcggcagcggcaagaccgaggccagcaagctggtgatgagctacgtggccgccgtgtgcggcaagggcgagcaggtgaacagcgtgaaggagcagctgctgcagagcaaccccgtgctggaggccttcggcaacgccaagaccatcagaaacaacaacagcagcagattcggcaagtacatggacatcgagttcgacttcaagggcagccccctgggcggcgtgatcaccaactacctgctggagaagagcagactggtgaagcagctgaagggcgagagaaacttccacatcttctaccagctgctggccggcgccgacgagcagctgctgaaggccctgaagctggagagagacaccaccggctacgcctacctgaaccacgaggtgagcagagtggacggcatggacgacgccagcagcttcagagccgtgcagagcgccatggccgtgatcggcttcagcgaggaggagatcagacaggtgctggaggtgaccagcatggtgctgaagctgggcaacgtgctggtggccgacgagttccaggccagcggcatccccgccagcggcatcagagacggcagaggcgtgagagagatcggcgagatggtgggcctgaacagcgaggaggtggagagagccctgtgcagcagaaccatggagaccgccaaggagaaggtggtgaccgccctgaacgtgatgcaggcccagtacgccagagacgccctggccaagaacatctacagcagactgttcgactggatcgtgaacagaatcaacgagagcatcaaggtgggcatcggcgagaagaagaaggtgatgggcgtgctggacatctacggcttcgagatcctggaggacaacagcttcgagcagttcgtgatcaactactgcaacgagaagctgcagcaggtgttcatcgagatgaccctgaaggaggagcaggaggagtacaagagagagggcatcccctggaccaaggtggactacttcgacaacggcatcatctgcaagctgatcgagcacaaccagagaggcatcctggccatgctggacgaggagtgcctgagacccggcgtggtgagcgacagcaccttcctggccaagctgaaccagctgttcagcaagcacggccactacgagagcaaggtgacccagaacgcccagagacagtacgaccacaccatgggcctgagctgcttcagaatctgccactacgccggcaaggtgacctacaacgtgaccagcttcatcgacaagaacaacgacctgctgttcagagacctgctgcaggccatgtggaaggcccagcaccccctgctgagaagcctgttccccgagggcaaccccaagcaggccagcctgaagagaccccccaccgccggcgcccagttcaagagcagcgtggccatcctgatgaagaacctgtacagcaagagccccaactacatcagatgcatcaagcccaacgagcaccagcagagaggccagttcagcagcgacctggtggccacccaggccagatacctgggcctgctggagaacgtgagagtgagaagagccggctacgcccacagacagggctacggccccttcctggagagatacagactgctgagcagaagcacctggccccactggaacggcggcgacagagagggcgtggagaaggtgctgggcgagctgagcatgagcagcggcgagctggccttcggcaagaccaagatcttcatcagaagccccaagaccctgttctacctggaggagcagagaagactgagactgcagcagctggccaccctgatccagaagatctacagaggctggagatgcagaacccactaccagctgatgagaaagagccagatcctgatcagcagctggttcagaggcaacatgcagaagaagtgctacggcaagatcaaggccagcgtgctgctgatccaggccttcgtgagaggctggaaggccagaaagaactacagaaagtacttcagaagcgaggccgccctgaccctggccgacttcatctacaagagcatggtgcagaagttcctgctgggcctgaagaacaacctgcccagcaccaacgtgctggacaagacctggcccgccgccccctacaagtgcctgagcaccgccaaccaggagctgcagcagctgttctaccagtggaagtgcaagagattcagagaccagctgagccccaagcaggtggagatcctgagagagaagctgtgcgccagcgagctgttcaagggcaagaaggccagctacccccagagcgtgcccatccccttctgcggcgactacatcggcctgcagggcaaccccaagctgcagaagctgaagggcggcgaggagggccccgtgctgatggccgaggccgtgaagaaggtgaacagaggcaacggcaagaccagcagcagaatcctgctgctgaccaagggccacgtgatcctgaccgacaccaagaagagccaggccaagatcgtgatcggcctggacaacgtggccggcgtgagcgtgaccagcctgaaggacggcctgttcagcctgcacctgagcgagatgagcagcgtgggcagcaagggcgacttcctgctggtgagcgagcacgtgatcgagctgctgaccaagatgtacagagccgtgctggacgccacccagagacagctgaccgtgaccgtgaccgagaagttcagcgtgagattcaaggagaacagcgtggccgtgaaggtggtgcagggccccgccggcggcgacaacagcaagctgagatacaagaagaagggcagccactgcctggaggtgaccgtgcagtga

SEQ ID NO: 2798 - RNA, 3132 nt, synthetic construct
  misc_feature 1..3132: note = derived and/or modified sequence opt5 fromMYO1A__Homo_sapiens__AAC78645
  source 1..3132: mol_type = other RNA
atgcccctgctcgagggcagcgtgggggtcgaagacctggttcttctggagcctctcgtggaagagtccctgcttaagaacctgcagctcagatacgaaaataaagagatctatacctacattggaaacgtggtcatctctgtgaatccgtatcaacagctgcccatttacggccctgagttcatcgccaagtatcaggattacacattttatgaactgaaaccccacatttacgctctcgccaacgttgcgtaccagagcctgcgggaccgcgatagagaccaatgcatccttatcacgggggagtccggatctggcaagaccgaagctagcaaactggtgatgtcctatgtcgccgccgtgtgtgggaagggagagcaggttaattctgtgaaggagcagctcctgcagagcaaccctgtccttgaagcgttcggcaatgccaaaacaattcggaacaataactccagccgctttggcaagtacatggatatcgagttcgactttaaagggtctcccctgggaggcgtgattaccaattatctcctggaaaagtccagactggtgaaacaactcaagggggagcggaacttccatatcttttaccagctgcttgctggagccgatgaacagctgctcaaggcgctgaaacttgagcgcgacacaaccggctatgcctacctgaatcacgaggtcagcagagttgatgggatggacgatgcttcttccttccgggccgtgcagagcgctatggccgtgattggattttctgaagaggaaatccgccaagtcctcgaggtgacatccatggttctgaagctgggcaacgtgctcgtcgcggacgagttccaggccagcggcattcctgcttccgggatcagagatggacggggcgtgcgcgagatcggggagatggttggacttaattctgaagaggtggaaagagccctgtgcagccggaccatggagacggctaaagaaaaggtcgtgaccgccctgaacgtcatgcaggcccaatatgctcgcgacgcgctcgccaaaaacatttactccagactgtttgactggatcgtgaatcggattaacgagagcatcaaggttggcattggggagaaaaagaaggtgatgggagtccttgatatctacggcttcgaaatcctggaggacaattcttttgaacagttcgtgattaactattgtaatgagaaactccagcaggttttcatcgagatgacactgaaggaagaacaagaagagtacaaaagagaaggcattccgtggaccaaggtggattattttgacaacgggatcatttgcaaactgatcgagcataatcagcgcggaatcctcgctatgctggatgaggaatgtcttcggcccggcgtcgtgtccgacagcacattcctggccaagctcaaccagctgttttctaagcacgggcattacgagagcaaagtgacccagaatgcccaaagacagtatgatcacacgatgggactgtcctgcttccgcatttgtcactacgctggcaaggttacatataacgtcacctcttttatcgacaaaaataacgatcttctcttccgggacctgctgcaggccatgtggaaggcgcagcatcctctcctgagaagcctttttcccgaagggaatcctaaacaggcttccctgaagcggcccccgacagccggcgcccaattcaagagctctgtggctattctcatgaaaaacctgtactccaagagccctaattacatccggtgcattaaacccaacgagcaccagcagagaggacaattttcttccgatctggtggccacccaggctcgctatcttggcctcctggaaaacgtccgggtgagacgcgccgggtacgcgcatcggcagggatatggccctttcctggagagataccggctcctgagccgctccacctggccccactggaatgggggagacagagagggcgttgaaaaggtgcttggggagctgtctatgagctccggcgaactcgcctttggaaaaacaaagatcttcattcggtctcccaagacgctgttttatctggaggaacaaagacgccttcggctccagcagctggctaccctgatccagaaaatctacagaggctggcgctgtagaacacactatcaactcatgcgcaagagccagattctgatctccagctggttccgcgggaacatgcagaaaaagtgctacggaaaaattaaggcctctgtccttctgatccaggctttcgtgagaggctggaaagcccggaagaattaccgcaagtattttagatccgaggcggccctcaccctggctgacttcatttacaaaagcatggttcaaaagtttctgcttgggctcaaaaacaatctgccttctacaaacgtgctggataagacctggccggccgctccctataaatgtctctccacggccaatcaggagctgcagcagcttttctaccaatggaagtgcaagcggtttcgcgaccagctgagccctaaacaggtcgaaatcctcagagagaagctgtgcgcctctgaactgttcaaaggaaagaaagctagctatccccaatccgtgcctatccccttttgtggcgattacattgggcttcagggcaacccgaagctgcagaagctcaaaggaggcgaggaggggcctgttctgatggcggaagccgtgaagaaagtcaatcggggaaacggcaagacaagctctcgcatcctcctgcttaccaaagggcatgtgattctgaccgacacaaagaagtcccaggctaaaatcgtgattggactcgataatgtcgccggcgttagcgtgacctccctgaaggacgggctgttctctcttcacctgagcgagatgtcctctgtgggcagcaaaggagattttctcctggtctccgaacatgtgatcgagctcctgacaaagatgtatagagccgttcttgacgctacgcaacggcagctgaccgtgacagtcaccgaaaaattctctgtgagatttaaggagaacagcgttgccgtgaaagtcgtgcagggccccgctgggggagataattccaagctccgctacaagaaaaagggcagccactgcctggaggttacagtgcagtga

SEQ ID NO: 2799 - protein, 1136 aa, synthetic construct
  REGION 1..1136: note = MYO1B__Homo_sapiens__O43795
MAKMEVKTSLLDNMIGVGDMVLLEPLNEETFINNLKKRFDHSEIYTYIGSVVISVNPYRSLPIYSPEKVEEYRNRNFYELSPHIFALSDEAYRSLRDQDKDQCILITGESGAGKTEASKLVMSYVAAVCGKGAEVNQVKEQLLQSNPVLEAFGNAKTVRNDNSSRFGKYMDIEFDFKGDPLGGVISNYLLEKSRVVKQPRGERNFHVFYQLLSGASEELLNKLKLERDFSRYNYLSLDSAKVNGVDDAANFRTVRNAMQIVGFMDHEAESVLAVVAAVLKLGNIEFKPESRVNGLDESKIKDKNELKEICELTGIDQSVLERAFSFRTVEAKQEKVSTTLNVAQAYYARDALAKNLYSRLFSWLVNRINESIKAQTKVRKKVMGVLDIYGFEIFEDNSFEQFIINYCNEKLQQIFIELTLKEEQEEYIREDIEWTHIDYFNNAIICDLIENNTNGILAMLDEECLRPGTVTDETFLEKLNQVCATHQHFESRMSKCSRFLNDTSLPHSCFRIQHYAGKVLYQVEGFVDKNNDLLYRDLSQAMWKASHALIKSLFPEGNPAKINLKRPPTAGSQFKASVATLMKNLQTKNPNYIRCIKPNDKKAAHIFNEALVCHQIRYLGLLENVRVRRAGYAFRQAYEPCLERYKMLCKQTWPHWKGPARSGVEVLFNELEIPVEEYSFGRSKIFIRNPRTLFKLEDLRKQRLEDLATLIQKIYRGWKCRTHFLLMKKSQIVIAAWYRRYAQQKRYQQTKSSALVIQSYIRGWKARKILRELKHQKRCKEAVTTIAAYWHGTQARRELRRLKEEARNKHAIAVIWAYWLGSKARRELKRLKEEARRKHAVAVIWAYWLGLKVRREYRKFFRANAGKKIYEFTLQRIVQKYFLEMKNKMPSLSPIDKNWPSRPYLFLDSTHKELKRIFHLWRCKKYRDQFTDQQKLIYEEKLEASELFKDKKALYPSSVGQPFQGAYLEINKNPKYKKLKDAIEEKIIIAEVVNKINRANGKSTSRIFLLTNNNLLLADQKSGQIKSEVPLVDVTKVSMSSQNDGFFAVHLKEGSEAASKGDFLFSSDHLIEMATKLYRTTLSQTKQKLNIEISDEFLVQFRQDKVCVKFIQGNQKNGSVPTCKRKNNRLLEVAVP

SEQ ID NO: 2800 - RNA, 3411 nt, synthetic construct
  misc_feature 1..3411: note = MYO1B__Homo_sapiens__AAH53558
  source 1..3411: mol_type = other RNA
atggccaaaatggaggtgaaaacctcacttctggacaatatgattggagttggggatatggttcttttagaacctctcaatgaggagaccttcatcaacaacctcaagaagcgctttgaccacagtgaaatatacacttacattggaagtgtggttatatctgttaacccatatcggtctttacccatttattcaccagagaaagtggaagaatacaggaacagaaatttttatgaactgagccctcacatctttgccctttcggatgaagcatacagatccctacgagatcaagataaggaccaatgtattctcattactggggaaagtggagcaggaaaaacagaggccagtaagcttgtcatgtcctatgtggcagctgtttgtggaaaaggagcagaagttaatcaagttaaagaacagcttttacagtccaacccggtcctggaagcttttggaaatgccaaaactgtaaggaatgacaactcctctagatttggcaaatatatggatattgaatttgactttaaaggcgatccactaggaggagtaataagtaactatcttttagagaaatctcgggttgttaaacagccaagaggtgaaagaaacttccatgtgttctatcagctgctctctggtgcctctgaagagctcctcaataaacttaagcttgagagggatttcagcaggtataactacctgagtctggattcggccaaagtgaatggagtggatgatgcagcaaattttagaaccgtgcggaatgccatgcagattgtgggctttatggatcatgaagctgagtctgtcttggcggtggtggcagcagtgttgaaactggggaacattgagttcaagcccgaatctcgagtgaatggtctagatgaaagcaaaatcaaagataaaaatgagttaaaagaaatttgtgaattgaccggcattgatcaatcagttctagaacgagcattcagtttccgaacagttgaggccaaacaggagaaagtttcaactacactgaatgtggctcaggcttattatgcccgtgatgctctggctaaaaacctctacagcaggttgttttcatggttggtaaatcgaatcaatgaaagcattaaggcacaaacaaaagtgagaaagaaggtcatgggtgttctggacatttatggctttgagattttcgaggacaacagctttgagcagttcattattaattattgtaacgaaaagctgcaacaaatcttcattgaacttactcttaaagaagagcaggaggagtatatacgggaggatatagaatggactcacattgactacttcaataatgctatcatttgtgacctaatagaaaataacacaaatggaatcctggccatgctggatgaagagtgcctcagacctggcacagtcactgatgagaccttcttagaaaagctgaaccaagtatgtgccacccaccagcattttgaaagcaggatgagcaagtgctctcggttcctcaatgacacgtctctgcctcacagctgcttcaggatccagcattatgctggaaaggtgctgtaccaggtggaaggattcgttgacaaaaacaatgaccttctctatcgagacctgtcccaagccatgtggaaggccagccatgccctcatcaagtctttgttccccgaagggaatcccgccaagatcaacctgaaaaggcctcctacagcaggctcacagttcaaggcatccgtggccactctgatgaaaaacctacagaccaagaacccaaactatattaggtgtatcaaaccgaatgataaaaaagcagcacacatcttcaacgaggctctagtgtgtcatcagatcaggtacctggggcttttggagaacgtccgagtgcggagggcaggctacgccttcaggcaggcctatgaaccttgcctagaaagatacaaaatgctttgtaaacaaacatggcctcattggaaaggaccagccaggtctggtgtggaggtcctatttaatgaattagaaattcccgtggaagaatactcctttggtagatcaaagatattcatccgaaacccaagaacattattcaaattagaagacctgaggaagcaacgcctggaggacttggccactctcattcagaagatatatcgggggtggaaatgccgcacacacttcctgctaatgaaaaaaagccaaattgtgattgccgcctggtacaggagatatgcgcaacaaaagaggtaccagcagacaaagagttccgccttagtaattcagtcttatatccggggttggaaggctcgaaaaattctgcgggaactgaagcatcaaaagcgctgtaaggaagcagtcacgaccattgctgcatattggcatgggacccaggcacgaagggaactgagacggctgaaggaggaggctaggaataaacatgctattgcagttatttgggcttactggcttggatctaaggctcgaagggaattgaaacgcttgaaggaggaggctaggcgtaagcatgcagttgctgtcatttgggcttactggcttggactgaaggtacgtagagaatacaggaaattcttcagagccaatgctggaaagaaaatctatgagtttacgcttcagagaattgtgcaaaaatacttcttggaaatgaaaaataagatgccttccttatctccaatagacaagaattggccctcaagaccttacttattcttggattctactcacaaggagctaaaaaggattttccacttgtggaggtgtaaaaaatacagggaccaattcacagaccagcagaaacttatttatgaagagaaactagaagccagtgaactcttcaaagacaagaaggctttatacccatctagtgttgggcaaccattccaaggggcttacctggaaatcaacaagaaccccaagtataagaaactcaaagatgccattgaagaaaagatcatcattgctgaagtcgtgaacaaaattaaccgtgctaatgggaagagtacatctcggattttcctcttaacaaacaataatctccttcttgctgaccaaaagtctggacaaatcaagtcagaggttccactggtggatgtgaccaaggtatcaatgagctcacaaaatgatggcttcttcgccgtccacctcaaagagggctcagaagcagctagtaaaggagactttctcttcagcagtgatcacctgattgaaatggccaccaagctctatcgcacaactctcagccaaaccaaacagaagctcaatattgagatttccgatgagttcctggtacagttcagacaggacaaagtatgtgtgaagtttattcagggaaaccagaaaaatgggagtgtcccaacatgtaaacgaaaaaacaaccgtctccttgaagttgctgtcccttaa

SEQ ID NO: 2801 - RNA, 3411 nt, synthetic construct
  misc_feature 1..3411: note = derived and/or modified sequence opt1 fromMYO1B__Homo_sapiens__AAH53558
  source 1..3411: mol_type = other RNA
atggccaagatggaggtgaagaccagcctgctcgacaacatgatcggcgtcggggacatggtgctgctggagcccctcaacgaggagaccttcatcaacaacctgaagaagcgcttcgaccactccgagatctacacgtacatcggcagcgtggtcatctccgtgaacccctaccggagcctgcccatctactcccccgagaaggtggaggagtaccgcaaccggaacttctacgagctcagcccccacatcttcgccctgtccgacgaggcgtaccgcagcctgcgggaccaggacaaggaccagtgcatcctcatcaccggggagtccggcgccgggaagaccgaggccagcaagctggtcatgtcctacgtggccgccgtgtgcggcaagggcgcggaggtcaaccaggtgaaggagcagctgctccagagcaacccggtgctggaggccttcgggaacgccaagaccgtccgcaacgacaactccagccggttcggcaagtacatggacatcgagttcgacttcaagggggaccccctgggcggggtgatctccaactacctcctggagaagtcccgcgtggtcaagcagccccggggcgagcgcaacttccacgtgttctaccagctgctcagcggcgccagcgaggagctgctgaacaagctcaagctggagcgggacttctcccgctacaactacctgagcctcgacagcgcgaaggtgaacggggtcgacgacgccgccaacttccggacggtgcgcaacgccatgcagatcgtgggcttcatggaccacgaggccgagtccgtcctggcggtggtggccgccgtcctgaagctcgggaacatcgagttcaagcccgagagccgggtgaacggcctggacgagtccaagatcaaggacaagaacgagctgaaggagatctgcgagctcaccggcatcgaccagagcgtcctggagcgcgccttctccttccggaccgtggaggccaagcaggagaaggtgagcaccacgctgaacgtcgcgcaggcctactacgcccgcgacgccctcgccaagaacctgtactcccggctgttcagctggctcgtgaaccgcatcaacgagtccatcaaggcgcagaccaaggtgcggaagaaggtcatgggggtgctggacatctacggcttcgagatcttcgaggacaacagcttcgagcagttcatcatcaactactgcaacgagaagctgcagcagatcttcatcgagctcaccctgaaggaggagcaggaggagtacatccgcgaggacatcgagtggacccacatcgactacttcaacaacgccatcatctgcgacctgatcgagaacaacacgaacgggatcctcgccatgctggacgaggagtgcctgcgcccgggcaccgtgaccgacgagaccttcctcgagaagctgaaccaggtctgcgccacgcaccagcacttcgagtcccggatgagcaagtgctcccgcttcctgaacgacaccagcctcccccactcctgcttccggatccagcactacgccgggaaggtgctgtaccaggtggagggcttcgtcgacaagaacaacgacctgctgtaccgcgacctcagccaggcgatgtggaaggcctcccacgccctgatcaagagcctgttccccgagggcaaccccgccaagatcaacctcaagcggccgcccaccgcggggtcccagttcaaggccagcgtggccaccctgatgaagaacctgcagacgaagaaccccaactacatccgctgcatcaagcccaacgacaagaaggccgcccacatcttcaacgaggcgctcgtgtgccaccagatccggtacctgggcctgctcgagaacgtccgcgtgcggcgcgccgggtacgccttccggcaggcctacgagccgtgcctggagcgctacaagatgctgtgcaagcagacctggccccactggaagggccccgcccggagcggggtggaggtcctcttcaacgagctggagatccccgtggaggagtactccttcggccgcagcaagatcttcatccggaacccgcgcaccctgttcaagctcgaggacctgcggaagcagcgcctggaggacctcgcgaccctgatccagaagatctaccggggctggaagtgccgcacgcacttcctgctcatgaagaagtcccagatcgtgatcgccgcctggtaccgccggtacgcccagcagaagcgctaccagcagaccaagagctccgccctggtcatccagagctacatccgggggtggaaggcgcgcaagatcctgcgggagctcaagcaccagaagcgctgcaaggaggccgtgaccaccatcgccgcctactggcacggcacgcaggcgcggcgcgagctgcggcgcctgaaggaggaggcccggaacaagcacgccatcgccgtgatctgggcctactggctcgggtccaaggcgcgccgggagctgaagcgcctgaaggaggaggcccggcgcaagcacgccgtcgccgtgatctgggcctactggctcggcctgaaggtgcggcgcgagtaccggaagttcttccgcgcgaacgccgggaagaagatctacgagttcaccctgcagcggatcgtccagaagtacttcctcgagatgaagaacaagatgcccagcctgtcccccatcgacaagaactggcccagccgcccgtacctgttcctcgactccacccacaaggagctgaagcgcatcttccacctgtggcggtgcaagaagtaccgcgaccagttcaccgaccagcagaagctcatctacgaggagaagctggaggccagcgagctgttcaaggacaagaaggccctctacccctccagcgtgggccagcccttccagggcgcctacctggagatcaacaagaaccccaagtacaagaagctgaaggacgcgatcgaggagaagatcatcatcgccgaggtggtcaacaagatcaaccgggccaacgggaagtccacgagccgcatcttcctcctgaccaacaacaacctgctcctggccgaccagaagtccggccagatcaagagcgaggtgccgctggtggacgtcaccaaggtgagcatgtccagccagaacgacgggttcttcgcggtgcacctcaaggagggctccgaggccgccagcaagggcgacttcctgttctccagcgaccacctgatcgagatggccaccaagctctaccggacgaccctgtcccagaccaagcagaagctgaacatcgagatcagcgacgagttcctcgtccagttccgccaggacaaggtgtgcgtgaagttcatccaggggaaccagaagaacggctccgtcccgacctgcaagcggaagaacaaccgcctgctggaggtggccgtgccctga

SEQ ID NO: 2802 - RNA, 3411 nt, synthetic construct
  misc_feature 1..3411: note = derived and/or modified sequence opt2 fromMYO1B__Homo_sapiens__AAH53558
  source 1..3411: mol_type = other RNA
atggccaagatggaggtcaagacctccctcctcgacaacatgatcggcgtcggcgacatggtcctcctcgagcccctcaacgaggagaccttcatcaacaacctcaagaagcgcttcgaccactccgagatctacacctacatcggctccgtcgtcatctccgtcaacccctaccgctccctccccatctactcccccgagaaggtcgaggagtaccgcaaccgcaacttctacgagctctccccccacatcttcgccctctccgacgaggcctaccgctccctccgcgaccaggacaaggaccagtgcatcctcatcaccggcgagtccggcgccggcaagaccgaggcctccaagctcgtcatgtcctacgtcgccgccgtctgcggcaagggcgccgaggtcaaccaggtcaaggagcagctcctccagtccaaccccgtcctcgaggccttcggcaacgccaagaccgtccgcaacgacaactcctcccgcttcggcaagtacatggacatcgagttcgacttcaagggcgaccccctcggcggcgtcatctccaactacctcctcgagaagtcccgcgtcgtcaagcagccccgcggcgagcgcaacttccacgtcttctaccagctcctctccggcgcctccgaggagctcctcaacaagctcaagctcgagcgcgacttctcccgctacaactacctctccctcgactccgccaaggtcaacggcgtcgacgacgccgccaacttccgcaccgtccgcaacgccatgcagatcgtcggcttcatggaccacgaggccgagtccgtcctcgccgtcgtcgccgccgtcctcaagctcggcaacatcgagttcaagcccgagtcccgcgtcaacggcctcgacgagtccaagatcaaggacaagaacgagctcaaggagatctgcgagctcaccggcatcgaccagtccgtcctcgagcgcgccttctccttccgcaccgtcgaggccaagcaggagaaggtctccaccaccctcaacgtcgcccaggcctactacgcccgcgacgccctcgccaagaacctctactcccgcctcttctcctggctcgtcaaccgcatcaacgagtccatcaaggcccagaccaaggtccgcaagaaggtcatgggcgtcctcgacatctacggcttcgagatcttcgaggacaactccttcgagcagttcatcatcaactactgcaacgagaagctccagcagatcttcatcgagctcaccctcaaggaggagcaggaggagtacatccgcgaggacatcgagtggacccacatcgactacttcaacaacgccatcatctgcgacctcatcgagaacaacaccaacggcatcctcgccatgctcgacgaggagtgcctccgccccggcaccgtcaccgacgagaccttcctcgagaagctcaaccaggtctgcgccacccaccagcacttcgagtcccgcatgtccaagtgctcccgcttcctcaacgacacctccctcccccactcctgcttccgcatccagcactacgccggcaaggtcctctaccaggtcgagggcttcgtcgacaagaacaacgacctcctctaccgcgacctctcccaggccatgtggaaggcctcccacgccctcatcaagtccctcttccccgagggcaaccccgccaagatcaacctcaagcgcccccccaccgccggctcccagttcaaggcctccgtcgccaccctcatgaagaacctccagaccaagaaccccaactacatccgctgcatcaagcccaacgacaagaaggccgcccacatcttcaacgaggccctcgtctgccaccagatccgctacctcggcctcctcgagaacgtccgcgtccgccgcgccggctacgccttccgccaggcctacgagccctgcctcgagcgctacaagatgctctgcaagcagacctggccccactggaagggccccgcccgctccggcgtcgaggtcctcttcaacgagctcgagatccccgtcgaggagtactccttcggccgctccaagatcttcatccgcaacccccgcaccctcttcaagctcgaggacctccgcaagcagcgcctcgaggacctcgccaccctcatccagaagatctaccgcggctggaagtgccgcacccacttcctcctcatgaagaagtcccagatcgtcatcgccgcctggtaccgccgctacgcccagcagaagcgctaccagcagaccaagtcctccgccctcgtcatccagtcctacatccgcggctggaaggcccgcaagatcctccgcgagctcaagcaccagaagcgctgcaaggaggccgtcaccaccatcgccgcctactggcacggcacccaggcccgccgcgagctccgccgcctcaaggaggaggcccgcaacaagcacgccatcgccgtcatctgggcctactggctcggctccaaggcccgccgcgagctcaagcgcctcaaggaggaggcccgccgcaagcacgccgtcgccgtcatctgggcctactggctcggcctcaaggtccgccgcgagtaccgcaagttcttccgcgccaacgccggcaagaagatctacgagttcaccctccagcgcatcgtccagaagtacttcctcgagatgaagaacaagatgccctccctctcccccatcgacaagaactggccctcccgcccctacctcttcctcgactccacccacaaggagctcaagcgcatcttccacctctggcgctgcaagaagtaccgcgaccagttcaccgaccagcagaagctcatctacgaggagaagctcgaggcctccgagctcttcaaggacaagaaggccctctacccctcctccgtcggccagcccttccagggcgcctacctcgagatcaacaagaaccccaagtacaagaagctcaaggacgccatcgaggagaagatcatcatcgccgaggtcgtcaacaagatcaaccgcgccaacggcaagtccacctcccgcatcttcctcctcaccaacaacaacctcctcctcgccgaccagaagtccggccagatcaagtccgaggtccccctcgtcgacgtcaccaaggtctccatgtcctcccagaacgacggcttcttcgccgtccacctcaaggagggctccgaggccgcctccaagggcgacttcctcttctcctccgaccacctcatcgagatggccaccaagctctaccgcaccaccctctcccagaccaagcagaagctcaacatcgagatctccgacgagttcctcgtccagttccgccaggacaaggtctgcgtcaagttcatccagggcaaccagaagaacggctccgtccccacctgcaagcgcaagaacaaccgcctcctcgaggtcgccgtcccctga

SEQ ID NO: 2803 - RNA, 3411 nt, synthetic construct
  misc_feature 1..3411: note = derived and/or modified sequence opt3 fromMYO1B__Homo_sapiens__AAH53558
  source 1..3411: mol_type = other RNA
atggccaagatggaggtgaaaaccagcctgctcgacaacatgatcggcgtcggggatatggttcttctggaacccttgaatgaggaaacattcattaacaatttaaagaaaagatttgaccactccgagatatacacttatatcggatctgtggtaatttcagtgaacccttacaggagtctgccaatctatagcccggaaaaggtcgaggagtaccggaatcgcaacttctatgaactaagtccccatatttttgctctctctgatgaggcataccgatcgctgcgtgaccaggataaagaccaatgcatccttataacgggtgaatcaggcgccgggaagaccgaggcgagcaagctggtgatgagttatgttgctgccgtgtgtggaaaaggcgcagaggtcaatcaggtgaaggaacagttgctccagtccaaccctgtactggaggccttcggtaatgctaaaacagttagaaacgataattctagcaggtttgggaagtacatggacatcgagttcgattttaaaggagacccactgggcggcgtgatttccaactacctcttagaaaagtcacgggtcgtgaagcaaccccgcggggaaagaaatttccacgtgttttatcagctgcttagtggagcaagcgaggagttgctgaacaaactaaagctcgaaagggatttctctcggtacaattatctgtcccttgactcagccaaagtcaacggtgttgatgacgctgccaactttcgcactgtgcgaaatgcgatgcagatcgtaggcttcatggaccatgaggcagaaagcgtgctggccgtcgtggctgccgttttgaagctcgggaacattgagtttaaacctgaaagtagagtgaatggactggatgagtctaagatcaaagacaagaacgagttaaaggaaatatgcgagctgaccggcattgatcagtccgtcctcgaaagggcattcagcttccggacagtggaggctaaacaagaaaaggtatcgaccactcttaatgttgcccaggcgtactatgcccgtgacgcactggctaaaaacttgtactctcgcctattttcctggctggtgaatagaatcaacgagtcaattaaggcccagacaaaagtcaggaagaaggtgatgggtgtcctcgatatctatgggttcgagatctttgaagacaatagtttcgagcagtttattataaactactgtaatgaaaaactgcaacagatcttcattgagcttaccctgaaggaggaacaggaggaatacatccgggaggatatagaatggacgcacattgactattttaacaatgctatcatctgcgatttgattgagaacaatactaacggaatcctcgccatgctggacgaggaatgtttacgaccaggcaccgtgacagatgagactttcctggaaaaactaaaccaagtttgcgcaacccatcagcactttgagagccgcatgtccaagtgttctagattcctcaatgacacaagcctgccccactcatgctttaggattcagcattacgccggcaaagtgctttatcaggtagaagggttcgtcgacaagaacaatgatttgctgtaccgggacctcagtcaagctatgtggaaggcgtcccacgcactgataaaaagcctttttcctgagggaaacccagccaagatcaatctgaaacgcccgcccaccgctggttctcagttcaaggcctcagtggcaacgttgatgaaaaacctccagactaagaatcctaactatattagatgtatcaagccaaatgataaaaaggccgctcatatcttcaacgaggccctggtttgccaccagattaggtacttaggcctgctagaaaatgtgcgtgtccggcgagcagggtatgcgtttagacaggcttacgagccctgtctcgaaaggtacaaaatgctgtgcaagcaaacatggcctcactggaaaggaccagcccgcagtggcgtggaggtacttttcaacgaattggagatacccgtggaggaatatagctttggtcggtccaagatcttcattagaaatccgaggaccctgtttaaactcgaggacctgcgcaagcagcgattagaagatctggcaactcttatccagaagatttaccgggggtggaaatgccgtacacatttcttgctcatgaagaaatctcaaatcgttatagccgcttggtatagaaggtacgcccagcagaagcgctatcagcaaaccaaatcgagcgcactggtcatccagtcctacattcggggctggaaggctagaaagatcctaagggagctgaaacaccagaagcgatgtaaagaggccgtgacgaccattgcggcctattggcatggaacacaagctcgccgggaactcagaaggctgaaggaggaagcacgtaacaaacacgccatcgctgtgatatgggcctactggcttggctcaaaggcacgccgggagttgaagagactgaaagaagaggcgaggcgaaagcatgccgtcgctgttatttgggcctactggttagggctcaaagtgcggcgcgagtatagaaagtttttcagggcaaatgctggtaaaaagatctacgaatttactctgcagcggattgtgcagaagtatttccttgagatgaaaaacaagatgcctagtctgtctcccatcgacaaaaactggccaagccgaccttacttgtttctcgattccacccacaaggaactgaaaagaatattccacctatggcgctgcaagaaatatagggaccagtttacagatcaacagaagctgatctacgaggaaaagctcgaggcctcagagctgttcaaagacaagaaagcactttatcccagctctgtaggacagccattccagggcgcctacttggaaattaataagaaccccaaatacaagaagctgaaagatgctatcgaggaaaagattatcatagcggaggtcgtgaataaaattaaccgtgccaatgggaagtccacttcccggatctttttactcaccaacaataacctgcttctggcagaccagaaaagcggacaaatcaagtctgaagttcctctagtggatgtcacaaaggtgtccatgtcaagtcagaatgacggcttctttgctgttcatctcaaagagggtagcgaggccgcctcgaagggggacttcctgttttcctctgatcacttgattgaaatggctaccaaactgtatagaactacgttaagccagacaaagcaaaaactcaacatcgagatttcagacgagttcctggtgcagtttaggcaggataaggtatgtgtcaagttcatacaaggcaatcagaaaaacggaagtgtgccaacctgcaagcgcaaaaataaccgacttctggaagtggcagtcccgtga

SEQ ID NO: 2804 - RNA, 3411 nt, synthetic construct
  misc_feature 1..3411: note = derived and/or modified sequence opt4 fromMYO1B__Homo_sapiens__AAH53558
  source 1..3411: mol_type = other RNA
atggccaagatggaggtgaagaccagcctgctggacaacatgatcggcgtgggcgacatggtgctgctggagcccctgaacgaggagaccttcatcaacaacctgaagaagagattcgaccacagcgagatctacacctacatcggcagcgtggtgatcagcgtgaacccctacagaagcctgcccatctacagccccgagaaggtggaggagtacagaaacagaaacttctacgagctgagcccccacatcttcgccctgagcgacgaggcctacagaagcctgagagaccaggacaaggaccagtgcatcctgatcaccggcgagagcggcgccggcaagaccgaggccagcaagctggtgatgagctacgtggccgccgtgtgcggcaagggcgccgaggtgaaccaggtgaaggagcagctgctgcagagcaaccccgtgctggaggccttcggcaacgccaagaccgtgagaaacgacaacagcagcagattcggcaagtacatggacatcgagttcgacttcaagggcgaccccctgggcggcgtgatcagcaactacctgctggagaagagcagagtggtgaagcagcccagaggcgagagaaacttccacgtgttctaccagctgctgagcggcgccagcgaggagctgctgaacaagctgaagctggagagagacttcagcagatacaactacctgagcctggacagcgccaaggtgaacggcgtggacgacgccgccaacttcagaaccgtgagaaacgccatgcagatcgtgggcttcatggaccacgaggccgagagcgtgctggccgtggtggccgccgtgctgaagctgggcaacatcgagttcaagcccgagagcagagtgaacggcctggacgagagcaagatcaaggacaagaacgagctgaaggagatctgcgagctgaccggcatcgaccagagcgtgctggagagagccttcagcttcagaaccgtggaggccaagcaggagaaggtgagcaccaccctgaacgtggcccaggcctactacgccagagacgccctggccaagaacctgtacagcagactgttcagctggctggtgaacagaatcaacgagagcatcaaggcccagaccaaggtgagaaagaaggtgatgggcgtgctggacatctacggcttcgagatcttcgaggacaacagcttcgagcagttcatcatcaactactgcaacgagaagctgcagcagatcttcatcgagctgaccctgaaggaggagcaggaggagtacatcagagaggacatcgagtggacccacatcgactacttcaacaacgccatcatctgcgacctgatcgagaacaacaccaacggcatcctggccatgctggacgaggagtgcctgagacccggcaccgtgaccgacgagaccttcctggagaagctgaaccaggtgtgcgccacccaccagcacttcgagagcagaatgagcaagtgcagcagattcctgaacgacaccagcctgccccacagctgcttcagaatccagcactacgccggcaaggtgctgtaccaggtggagggcttcgtggacaagaacaacgacctgctgtacagagacctgagccaggccatgtggaaggccagccacgccctgatcaagagcctgttccccgagggcaaccccgccaagatcaacctgaagagaccccccaccgccggcagccagttcaaggccagcgtggccaccctgatgaagaacctgcagaccaagaaccccaactacatcagatgcatcaagcccaacgacaagaaggccgcccacatcttcaacgaggccctggtgtgccaccagatcagatacctgggcctgctggagaacgtgagagtgagaagagccggctacgccttcagacaggcctacgagccctgcctggagagatacaagatgctgtgcaagcagacctggccccactggaagggccccgccagaagcggcgtggaggtgctgttcaacgagctggagatccccgtggaggagtacagcttcggcagaagcaagatcttcatcagaaaccccagaaccctgttcaagctggaggacctgagaaagcagagactggaggacctggccaccctgatccagaagatctacagaggctggaagtgcagaacccacttcctgctgatgaagaagagccagatcgtgatcgccgcctggtacagaagatacgcccagcagaagagataccagcagaccaagagcagcgccctggtgatccagagctacatcagaggctggaaggccagaaagatcctgagagagctgaagcaccagaagagatgcaaggaggccgtgaccaccatcgccgcctactggcacggcacccaggccagaagagagctgagaagactgaaggaggaggccagaaacaagcacgccatcgccgtgatctgggcctactggctgggcagcaaggccagaagagagctgaagagactgaaggaggaggccagaagaaagcacgccgtggccgtgatctgggcctactggctgggcctgaaggtgagaagagagtacagaaagttcttcagagccaacgccggcaagaagatctacgagttcaccctgcagagaatcgtgcagaagtacttcctggagatgaagaacaagatgcccagcctgagccccatcgacaagaactggcccagcagaccctacctgttcctggacagcacccacaaggagctgaagagaatcttccacctgtggagatgcaagaagtacagagaccagttcaccgaccagcagaagctgatctacgaggagaagctggaggccagcgagctgttcaaggacaagaaggccctgtaccccagcagcgtgggccagcccttccagggcgcctacctggagatcaacaagaaccccaagtacaagaagctgaaggacgccatcgaggagaagatcatcatcgccgaggtggtgaacaagatcaacagagccaacggcaagagcaccagcagaatcttcctgctgaccaacaacaacctgctgctggccgaccagaagagcggccagatcaagagcgaggtgcccctggtggacgtgaccaaggtgagcatgagcagccagaacgacggcttcttcgccgtgcacctgaaggagggcagcgaggccgccagcaagggcgacttcctgttcagcagcgaccacctgatcgagatggccaccaagctgtacagaaccaccctgagccagaccaagcagaagctgaacatcgagatcagcgacgagttcctggtgcagttcagacaggacaaggtgtgcgtgaagttcatccagggcaaccagaagaacggcagcgtgcccacctgcaagagaaagaacaacagactgctggaggtggccgtgccctga

SEQ ID NO: 2805 - RNA, 3411 nt, synthetic construct
  misc_feature 1..3411: note = derived and/or modified sequence opt5 fromMYO1B__Homo_sapiens__AAH53558
  source 1..3411: mol_type = other RNA
atggccaagatggaggtgaaaaccagcctgctcgacaacatgatcggcgtcggggatatggttctgcttgaacccctgaatgaggaaacattcattaacaatctcaagaaaagatttgaccactccgagatctacacgtatattggatctgtggtgatcagcgtcaacccttaccggtccctgccgatttattctcccgaaaaggtggaggagtaccgcaatagaaacttctatgaacttagccctcatatctttgctctgtccgatgaggcctaccggtctctccgcgaccaggataaagaccaatgcatcctgattaccggcgaaagcggggcgggaaagacagaggcttccaagctggttatgagctatgtggccgccgtctgtggcaaaggggctgaggtgaatcaggttaaggaacagctcctgcagtctaaccccgtgcttgaggccttcggaaatgctaaaaccgtcagaaacgataattccagccggtttggcaagtacatggacatcgaatttgattttaaaggcgaccctcttgggggagtgatttctaactacctcctggagaagtcccgcgtggtcaagcaacccagaggcgaacggaatttccacgttttctatcagcttctgagcggggcctctgaggagctcctgaacaaactgaagctcgaacgcgatttctccagatacaattatctgagccttgactccgcgaaagtgaacggagtggatgacgccgctaactttcggacagtccgcaatgccatgcagatcgtgggcttcatggaccatgaggctgaatctgttctggccgtggtcgcggccgtgctcaagctggggaacattgagtttaaacctgaaagcagagttaatggacttgatgagtccaagatcaaagacaagaacgagctgaaggaaatttgcgagctcaccggcatcgatcagagcgtgctggaacgggctttctctttccgcacagtcgaggccaaacaagaaaaggtgtccaccacgctgaatgtcgctcaggcctactatgccagagacgctctcgcgaaaaacctgtacagccggctgttttcttggctggtgaatagaatcaacgagagcattaaggcccagaccaaagttcgcaagaaggtgatgggcgtcctcgatatctatgggttcgagatttttgaagacaattccttcgagcagtttatcattaactactgtaatgaaaaactgcaacagatcttcatcgagcttacactgaaggaggaacaggaggaatacattcgggaggatatcgaatggacccacattgactattttaacaatgctatcatttgcgatctcatcgagaacaatacaaacggaatcctggccatgctggacgaggaatgtctcagaccgggcaccgtgacggatgagacattcctggaaaaacttaaccaagtttgcgccacccatcagcactttgagtctcgcatgagcaagtgttcccggttcctgaatgacacaagcctcccccactcttgctttcgcattcagcattacgctgggaaagtgctgtatcaggtcgaaggattcgtggacaagaacaatgatctgctttacagagacctctcccaagccatgtggaaggcgagccacgctctgatcaaatctctgtttcctgagggcaaccccgccaagattaatctcaaacggcctcccaccgccgggtcccagttcaaggctagcgtggccaccctgatgaaaaaccttcagacaaagaatccgaactatatcagatgtattaagcctaatgataaaaaggctgcccatatcttcaacgaggcgctggtttgccaccagattcgctacctcggactgctggaaaatgtccgggtgagacgcgccggctatgcttttcggcaagcctacgagccctgtcttgaaagatacaaaatgctctgcaagcagacgtggcctcactggaaaggccccgctcggtccggggtggaggtcctgttcaacgaactggagatccccgtggaggaatattcttttggacgcagcaagatcttcattagaaatcctcggaccctctttaaactggaggaccttagaaagcagcgcctggaagatctcgccacactgatccagaagatttaccggggctggaaatgcagaacccatttcctgcttatgaagaaatcccaaatcgttattgcggcctggtatcgcagatacgctcagcagaagcggtatcagcaaacaaaatctagcgccctcgtgatccagtcctacatccgcgggtggaaggctagaaagattctgcgggagctgaaacaccagaagcgctgtaaagaggccgtcaccacgatcgccgcttattggcatggaacacaagcgagacgggaactccgcagactgaaggaggaagcccggaacaaacacgctattgccgtgatctgggcctactggcttggcagcaaggctcgcagagagctgaagcggctcaaagaagaggccagacgcaagcatgcggttgctgtgatttgggcctactggctggggctgaaagtccggagagagtatcgcaagtttttccgggccaatgctggcaaaaagatctacgaatttacccttcagagaatcgtgcagaagtatttcctcgagatgaaaaacaagatgccgtctctgtcccccattgacaaaaactggcctagccgcccctacctgtttctcgattctacccacaaggaactgaaacggatcttccacctttggagatgcaagaaatatcgcgaccagtttacagatcaacagaagctgatttacgaggaaaagctcgaggcctccgagctgttcaaagacaagaaagcgctgtatcctagctctgttggacagcccttccagggcgcttaccttgaaatcaataagaacccgaaatacaagaagctgaaagatgccattgaggaaaagatcatcattgccgaggtggtcaataaaatcaaccgggctaatggaaagagcacctccagaatttttctcctgacaaacaataacctcctgcttgccgaccagaaaagcgggcaaatcaagtctgaagtgcctctggtggatgtcacgaaggtttccatgagctcccagaatgacggcttctttgctgtgcatctcaaagaggggtctgaggccgcgagcaagggagacttcctgttttcctctgatcacctgattgaaatggccaccaaactttatcggacaaccctgagccagacaaagcaaaaactcaacatcgagatttccgacgagttcctggtgcagtttcgccaggataaggtctgtgtgaagttcatccaaggcaatcagaaaaacgggtctgttcctacctgcaagcggaaaaataacagactcctggaagtggctgtcccctga

SEQ ID NO: 2806 - protein, 1063 aa, synthetic construct
  REGION 1..1063: note = MYO1C__Homo_sapiens__O00159
MALQVELVPTGEIIRVVHPHRPCKLALGSDGVRVTMESALTARDRVGVQDFVLLENFTSEAAFIENLRRRFRENLIYTYIGPVLVSVNPYRDLQIYSRQHMERYRGVSFYEVPPHLFAVADTVYRALRTERRDQAVMISGESGAGKTEATKRLLQFYAETCPAPERGGAVRDRLLQSNPVLEAFGNAKTLRNDNSSRFGKYMDVQFDFKGAPVGGHILSYLLEKSRVVHQNHGERNFHIFYQLLEGGEEETLRRLGLERNPQSYLYLVKGQCAKVSSINDKSDWKVVRKALTVIDFTEDEVEDLLSIVASVLHLGNIHFAANEESNAQVTTENQLKYLTRLLSVEGSTLREALTHRKIIAKGEELLSPLNLEQAAYARDALAKAVYSRTFTWLVGKINRSLASKDVESPSWRSTTVLGLLDIYGFEVFQHNSFEQFCINYCNEKLQQLFIELTLKSEQEEYEAEGIAWEPVQYFNNKIICDLVEEKFKGIISILDEECLRPGEATDLTFLEKLEDTVKHHPHFLTHKLADQRTRKSLGRGEFRLLHYAGEVTYSVTGFLDKNNDLLFRNLKETMCSSKNPIMSQCFDRSELSDKKRPETVATQFKMSLLQLVEILQSKEPAYVRCIKPNDAKQPGRFDEVLIRHQVKYLGLLENLRVRRAGFAYRRKYEAFLQRYKSLCPETWPTWAGRPQDGVAVLVRHLGYKPEEYKMGRTKIFIRFPKTLFATEDALEVRRQSLATKIQAAWRGFHWRQKFLRVKRSAICIQSWWRGTLGRRKAAKRKWAAQTIRRLIRGFVLRHAPRCPENAFFLDHVRTSFLLNLRRQLPQNVLDTSWPTPPPALREASELLRELCIKNMVWKYCRSISPEWKQQLQQKAVASEIFKGKKDNYPQSVPRLFISTRLGTDEISPRVLQALGSEPIQYAVPVVKYDRKGYKPRSRQLLLTPNAVVIVEDAKVKQRIDYANLTGISVSSLSDSLFVLHVQRADNKQKGDVVLQSDHVIETLTKTALSANRVNSININQGSITFAGGPGRDGTIDFTPGSELLITKAKNGHLAVVAPRLNSR

SEQ ID NO: 2807 - RNA, 3192 nt, synthetic construct
  misc_feature 1..3192: note = MYO1C__Homo_sapiens__CCDS42226.1
  source 1..3192: mol_type = other RNA
atggcgctgcaagtggagctggtacccaccggggagatcatccgcgtggttcatccccacaggccctgcaagcttgccctgggcagtgacggggttcgggtgaccatggagagtgcgctcaccgcccgtgaccgggtgggggtgcaggatttcgtgctgctggagaacttcaccagcgaggccgccttcatcgagaacctgcggcggcgatttcgggagaatctcatctacacctacattggccccgtcctggtctctgtcaatccctaccgggacctgcagatctacagccggcagcatatggagcgttaccgtggcgtcagcttctatgaagtgccccctcacctgtttgccgtggcggacactgtgtaccgagcactgcgcacggagcgtcgggaccaggctgtgatgatctctggggagagcggggcaggcaagaccgaggccaccaagaggctgctgcagttctatgcagagacctgcccagcccccgagcgcggaggtgccgtgcgggaccggctgctacagagcaacccggtgctggaggcctttggaaatgccaagaccctccggaacgataactccagcaggttcgggaagtacatggatgtgcagtttgacttcaagggtgcccccgtgggtggccacatcctcagttacctcctggaaaagtcacgagtggtgcaccagaatcatggggagcggaacttccacatcttctaccagctgctggaggggggcgaggaggagactcttcgcaggctgggcttggaacggaacccccagagctacctgtacctggtgaagggccagtgtgccaaagtctcctccatcaacgacaagagtgactggaaggtcgtcaggaaggctctgacagtcattgatttcaccgaggatgaagtggaggacctgctgagcatcgtggccagcgtccttcatttgggcaacatccactttgctgccaacgaggagagcaatgcccaggtcaccaccgagaaccagctcaagtatctgaccaggctcctcagcgtggaaggctcgacgctgcgagaagccctgacacacaggaagatcatcgccaagggggaggagctcctgagcccgctgaacctggagcaggccgcgtacgcacgagacgccctcgccaaggctgtgtacagccgcacttttacctggctcgtcgggaagatcaacaggtcgctggcctccaaggacgtggagagccccagctggcggagcaccacggttctcgggctcctggatatttatggctttgaagtgtttcagcataacagctttgagcagttctgcatcaattactgcaacgagaagctgcagcagctcttcatcgagctcacgctcaagtcggagcaggaggagtacgaggcagagggcatcgcgtgggagcccgtccagtatttcaacaacaaaatcatctgtgatctggtggaggagaagtttaagggcatcatctcgattttggatgaggagtgtctgcgccccggggaggccacagacctgaccttcctggagaagctggaggatactgtcaagcaccatccacacttcctgacgcacaagctggctgaccagcggaccaggaaatctctgggccgaggggaattccgccttctgcactatgcgggggaggtgacctacagcgtgaccgggtttctggacaaaaacaatgaccttctcttccggaaccttaaggagaccatgtgtagctcaaagaatcccattatgagccagtgctttgaccggagcgagctcagtgacaagaagcggccagagacggtcgccacccagttcaagatgagcctcctgcagctggtggagatcctgcagtctaaggagcccgcctacgtccgctgcatcaaacccaatgatgccaaacagcccggccgctttgacgaggtgctgatccgccaccaggtgaagtacctggggctgttggaaaacctgcgcgtgcgcagagccggctttgcctatcgccgcaaatacgaagctttcctgcaaaggtacaagtcactgtgcccagagacgtggcccacgtgggcaggacggccgcaggatggggtggctgtgctggtccgacacctgggctacaagccagaagagtacaagatgggcaggaccaagatcttcatccgcttccccaagaccctgtttgccacagaggatgccctggaggtccggcggcagagcctggccacaaagatccaagctgcctggaggggctttcactggcggcagaaattcctccgggtgaagagatcagccatctgcatccagtcgtggtggcgtggaacactgggccggaggaaggcagccaagaggaagtgggcggcacagaccatccggcggctcatccgaggcttcgtcctgcgccacgccccccgctgccccgagaacgccttcttcctggaccatgtgcgcacctcttttttgctaaacctgaggcggcagctgccccagaatgtcctggacacctcgtggcccacgcccccacctgccctgcgtgaggcctcagagcttctgcgggagttgtgcataaagaacatggtgtggaaatactgccggagtatcagccctgagtggaagcagcagctgcagcagaaggccgtggctagtgagatcttcaagggcaagaaggataattaccctcagagtgtacccaggctcttcatcagcactcggcttggtacagatgagatcagcccccgagtgctgcaggccttgggctctgagcccattcagtatgcggtgcctgttgtgaaatacgaccgcaagggctacaagcctcgctcccggcagctgctgctcacgcccaacgccgtcgtcatcgtggaggacgccaaagtcaagcagaggattgattacgccaacctgaccggaatctctgtcagcagcctgagcgacagtctttttgtgcttcatgtacagcgtgcggacaataagcaaaagggagatgtggtgctgcagagtgaccacgtgattgagacgctgaccaagacagccctcagtgccaaccgcgtgaacagcatcaacatcaaccagggcagcatcacgtttgcagggggccccggcagggatggcaccattgacttcacacccggctcggagctgctcatcaccaaggccaagaacgggcacctggctgtggtcgccccacggctgaattctcggtga

SEQ ID NO: 2808 - RNA, 3192 nt, synthetic construct
  misc_feature 1..3192: note = derived and/or modified sequence opt1 fromMYO1C__Homo_sapiens__CCDS42226.1
  source 1..3192: mol_type = other RNA
atggccctccaggtggagctcgtccccaccggcgagatcatccgcgtggtgcacccgcaccggccctgcaagctggccctggggagcgacggcgtccgcgtgaccatggagtccgcgctcacggcccgggaccgcgtgggggtccaggacttcgtgctgctggagaacttcaccagcgaggccgccttcatcgagaacctccggcgccggttccgcgagaacctgatctacacctacatcggccccgtgctggtctccgtgaacccctaccgggacctccagatctacagccgccagcacatggagcggtaccgcggggtgtccttctacgaggtcccgccccacctgttcgccgtggcggacaccgtgtaccgggccctgcgcacggagcggcgcgaccaggccgtcatgatcagcggcgagtccggcgccgggaagaccgaggcgaccaagcggctcctgcagttctacgccgagacctgccccgcccccgagcgcggcggggccgtgcgggaccgcctgctccagagcaacccggtgctggaggccttcggcaacgcgaagacgctgcggaacgacaactccagccgcttcgggaagtacatggacgtccagttcgacttcaagggcgcccccgtgggcgggcacatcctctcctacctgctggagaagtcccgcgtggtccaccagaaccacggcgagcggaacttccacatcttctaccagctcctggagggcggggaggaggagaccctgcgccggctcggcctggagcgcaacccccagtcctacctgtacctcgtgaaggggcagtgcgccaaggtgagctccatcaacgacaagagcgactggaaggtcgtgcggaaggccctgaccgtcatcgacttcaccgaggacgaggtggaggacctgctctccatcgtggccagcgtcctgcacctgggcaacatccacttcgcggccaacgaggagtccaacgcccaggtgacgaccgagaaccagctcaagtacctgacccgcctgctcagcgtggaggggagcaccctgcgggaggccctgacgcaccgcaagatcatcgccaagggcgaggagctcctgagccccctgaacctcgagcaggcggcctacgcccgggacgccctggccaaggcggtctacagccgcaccttcacctggctggtggggaagatcaaccggtccctcgccagcaaggacgtggagtccccgagctggcgctccaccacggtcctgggcctgctcgacatctacggcttcgaggtgttccagcacaacagcttcgagcagttctgcatcaactactgcaacgagaagctgcagcagctgttcatcgagctgaccctcaagtccgagcaggaggagtacgaggccgaggggatcgcctgggagcccgtgcagtacttcaacaacaagatcatctgcgacctggtcgaggagaagttcaagggcatcatcagcatcctggacgaggagtgcctccggcccggggaggcgaccgacctgaccttcctggagaagctcgaggacacggtgaagcaccacccccacttcctgacccacaagctggccgaccagcgcacccggaagtccctcggccgcggggagttccggctgctgcactacgccggcgaggtgacctacagcgtcacgggcttcctcgacaagaacaacgacctgctgttccgcaacctcaaggagaccatgtgctccagcaagaacccgatcatgtcccagtgcttcgaccggagcgagctgtccgacaagaagcgccccgagaccgtggccacccagttcaagatgagcctgctccagctggtggagatcctgcagtccaaggagcccgcctacgtccgctgcatcaagcccaacgacgcgaagcagccggggcggttcgacgaggtgctcatccgccaccaggtgaagtacctgggcctgctcgagaacctgcgggtccgccgggccgggttcgcctaccgccggaagtacgaggccttcctgcagcgctacaagagcctctgccccgagacgtggcccacctgggccggccggccccaggacggggtggcggtgctggtccgccacctgggctacaagccggaggagtacaagatgggccggaccaagatcttcatccgcttccccaagaccctcttcgccacggaggacgccctggaggtgcggcgccagagcctggccaccaagatccaggccgcgtggcgggggttccactggcgccagaagttcctccgggtgaagcgctccgccatctgcatccagagctggtggcggggcaccctggggcgccggaaggccgccaagcgcaagtgggcggcccagaccatccgccggctgatccgcggcttcgtcctccggcacgcgccccgctgccccgagaacgccttcttcctggaccacgtgcggacctccttcctgctcaacctgcgccggcagctgccgcagaacgtgctcgacacgagctggcccacgcccccgcccgccctgcgcgaggcctccgagctgctccgggagctgtgcatcaagaacatggtctggaagtactgccgcagcatctcccccgagtggaagcagcagctgcagcagaaggccgtggccagcgagatcttcaagggcaagaaggacaactacccccagtccgtgccgcggctgttcatcagcacccgcctggggaccgacgagatcagcccccgggtcctgcaggccctcggctccgagcccatccagtacgccgtgcccgtggtcaagtacgaccgcaaggggtacaagccgcggtcccgccagctgctgctcacccccaacgcggtggtgatcgtcgaggacgccaaggtgaagcagcggatcgactacgccaacctgaccggcatcagcgtgtccagcctgtccgacagcctcttcgtcctgcacgtgcagcgcgccgacaacaagcagaagggggacgtggtcctgcagagcgaccacgtgatcgagaccctcaccaagacggccctgtccgcgaaccgggtgaacagcatcaacatcaaccagggctccatcaccttcgccggcgggcccggccgcgacgggaccatcgacttcacccccggcagcgagctgctcatcacgaaggccaagaacgggcacctggccgtcgtggcgccgcgcctgaactcccggtga

SEQ ID NO: 2809 - RNA, 3192 nt, synthetic construct
  misc_feature 1..3192: note = derived and/or modified sequence opt2 fromMYO1C__Homo_sapiens__CCDS42226.1
  source 1..3192: mol_type = other RNA
atggccctccaggtcgagctcgtccccaccggcgagatcatccgcgtcgtccacccccaccgcccctgcaagctcgccctcggctccgacggcgtccgcgtcaccatggagtccgccctcaccgcccgcgaccgcgtcggcgtccaggacttcgtcctcctcgagaacttcacctccgaggccgccttcatcgagaacctccgccgccgcttccgcgagaacctcatctacacctacatcggccccgtcctcgtctccgtcaacccctaccgcgacctccagatctactcccgccagcacatggagcgctaccgcggcgtctccttctacgaggtccccccccacctcttcgccgtcgccgacaccgtctaccgcgccctccgcaccgagcgccgcgaccaggccgtcatgatctccggcgagtccggcgccggcaagaccgaggccaccaagcgcctcctccagttctacgccgagacctgccccgcccccgagcgcggcggcgccgtccgcgaccgcctcctccagtccaaccccgtcctcgaggccttcggcaacgccaagaccctccgcaacgacaactcctcccgcttcggcaagtacatggacgtccagttcgacttcaagggcgcccccgtcggcggccacatcctctcctacctcctcgagaagtcccgcgtcgtccaccagaaccacggcgagcgcaacttccacatcttctaccagctcctcgagggcggcgaggaggagaccctccgccgcctcggcctcgagcgcaacccccagtcctacctctacctcgtcaagggccagtgcgccaaggtctcctccatcaacgacaagtccgactggaaggtcgtccgcaaggccctcaccgtcatcgacttcaccgaggacgaggtcgaggacctcctctccatcgtcgcctccgtcctccacctcggcaacatccacttcgccgccaacgaggagtccaacgcccaggtcaccaccgagaaccagctcaagtacctcacccgcctcctctccgtcgagggctccaccctccgcgaggccctcacccaccgcaagatcatcgccaagggcgaggagctcctctcccccctcaacctcgagcaggccgcctacgcccgcgacgccctcgccaaggccgtctactcccgcaccttcacctggctcgtcggcaagatcaaccgctccctcgcctccaaggacgtcgagtccccctcctggcgctccaccaccgtcctcggcctcctcgacatctacggcttcgaggtcttccagcacaactccttcgagcagttctgcatcaactactgcaacgagaagctccagcagctcttcatcgagctcaccctcaagtccgagcaggaggagtacgaggccgagggcatcgcctgggagcccgtccagtacttcaacaacaagatcatctgcgacctcgtcgaggagaagttcaagggcatcatctccatcctcgacgaggagtgcctccgccccggcgaggccaccgacctcaccttcctcgagaagctcgaggacaccgtcaagcaccacccccacttcctcacccacaagctcgccgaccagcgcacccgcaagtccctcggccgcggcgagttccgcctcctccactacgccggcgaggtcacctactccgtcaccggcttcctcgacaagaacaacgacctcctcttccgcaacctcaaggagaccatgtgctcctccaagaaccccatcatgtcccagtgcttcgaccgctccgagctctccgacaagaagcgccccgagaccgtcgccacccagttcaagatgtccctcctccagctcgtcgagatcctccagtccaaggagcccgcctacgtccgctgcatcaagcccaacgacgccaagcagcccggccgcttcgacgaggtcctcatccgccaccaggtcaagtacctcggcctcctcgagaacctccgcgtccgccgcgccggcttcgcctaccgccgcaagtacgaggccttcctccagcgctacaagtccctctgccccgagacctggcccacctgggccggccgcccccaggacggcgtcgccgtcctcgtccgccacctcggctacaagcccgaggagtacaagatgggccgcaccaagatcttcatccgcttccccaagaccctcttcgccaccgaggacgccctcgaggtccgccgccagtccctcgccaccaagatccaggccgcctggcgcggcttccactggcgccagaagttcctccgcgtcaagcgctccgccatctgcatccagtcctggtggcgcggcaccctcggccgccgcaaggccgccaagcgcaagtgggccgcccagaccatccgccgcctcatccgcggcttcgtcctccgccacgccccccgctgccccgagaacgccttcttcctcgaccacgtccgcacctccttcctcctcaacctccgccgccagctcccccagaacgtcctcgacacctcctggcccacccccccccccgccctccgcgaggcctccgagctcctccgcgagctctgcatcaagaacatggtctggaagtactgccgctccatctcccccgagtggaagcagcagctccagcagaaggccgtcgcctccgagatcttcaagggcaagaaggacaactacccccagtccgtcccccgcctcttcatctccacccgcctcggcaccgacgagatctccccccgcgtcctccaggccctcggctccgagcccatccagtacgccgtccccgtcgtcaagtacgaccgcaagggctacaagccccgctcccgccagctcctcctcacccccaacgccgtcgtcatcgtcgaggacgccaaggtcaagcagcgcatcgactacgccaacctcaccggcatctccgtctcctccctctccgactccctcttcgtcctccacgtccagcgcgccgacaacaagcagaagggcgacgtcgtcctccagtccgaccacgtcatcgagaccctcaccaagaccgccctctccgccaaccgcgtcaactccatcaacatcaaccagggctccatcaccttcgccggcggccccggccgcgacggcaccatcgacttcacccccggctccgagctcctcatcaccaaggccaagaacggccacctcgccgtcgtcgccccccgcctcaactcccgctga

SEQ ID NO: 2810 - RNA, 3192 nt, synthetic construct
  misc_feature 1..3192: note = derived and/or modified sequence opt3 fromMYO1C__Homo_sapiens__CCDS42226.1
  source 1..3192: mol_type = other RNA
atggcccttcaggtggagctcgtccccaccggcgaaatcattagagttgtgcaccctcataggccatgcaagctggctctggggagcgacggagtacgggtgacaatggagtccgcattgactgcccgcgatcgagtcggtgtgcaagacttcgttttactggaaaactttacgtctgaggcggctttcatagaaaatctacgtagaaggtttcgggagaacctcatctacacctatattggcccggtgctggtctcagtgaatccctaccgcgatcttcagatctatagtagacagcacatggagaggtaccgcggggttagcttctatgaagtacctccacatctgtttgccgtggcagacacagtctaccgggccttgcgaactgagagaagggatcaggctgtgatgatttccggagaatctggcgcaggtaaaaccgaggccacaaagcggctcctgcaattctatgctgagacctgtcccgcccctgaacgtgggggagcggtgcgcgacagactgctccagtcgaacccagtcttagaggcatttggcaatgccaaaactctgaggaacgataattcaagccggttcggcaagtacatggacgttcagtttgatttcaaaggggctcccgtgggaggtcacatccttagttacttgctggaaaagtcccgagtagtgcatcagaaccacggcgagcgcaattttcacatattctatcaactactcgaagggggagaggaggaaacactgagaaggcttggcctggagcggaaccctcagtcttacttgtatctcgtcaagggtcagtgcgccaaagtgagctccatcaatgacaagtcagattggaaagttgtgcgcaaggcactgaccgtcattgactttacggaagatgaggtggaagacttactgagtatcgtagctagcgttctccatcttgggaacattcacttcgccgcgaatgaggagtctaacgcccaggtgactaccgaaaatcaactgaaatacttgacaagactactgtccgtcgagggatcaactctcagggaagcactgacccatcgtaagatcatagctaagggcgaggaacttctgagcccattgaacctcgagcaggccgcttatgcccgggacgcactggccaaagctgtgtacagtcgaacattcacctggttagtcggcaagattaacagatctctggcgtccaaagatgtggagagcccgtcgtggaggtctacgactgttctagggctcctggacatctatggatttgaagtgttccagcacaattcctttgagcaattctgtattaactactgcaatgaaaaacttcagcagttgtttatcgagctgacactcaagtcagagcaggaagagtacgaagcagagggtatcgcctgggaacccgtacaatatttcaacaataagattatatgtgatctggtcgaggagaaatttaagggcatcattagtatccttgacgaagagtgcctgcgccctggggaagctaccgatttgactttcctcgagaagctggaagacacagtgaaacaccatccacactttttaacccataagctggccgatcagcggacgagaaaaagcctaggaaggggcgagttccgcctcctgcactacgctggtgaggttacctattccgtgacagggtttcttgacaagaacaatgatttgctgttccgaaacctcaaagaaactatgtgttctagcaagaatcccataatgtcacagtgctttgaccggagtgagctgtccgataagaaacgtcctgaaaccgtcgccacacagttcaagatgagcttactgcaacttgtggagattttgcagtctaaagaaccagcttacgtaagatgtatcaagcccaacgacgccaaacagccgggcaggttcgacgaggtgctcatccgccatcaggttaagtatctgggactactggagaatctccgggtcagaagggcaggctttgcgtaccgacgcaagtatgaggctttcctgcaacggtacaaatcactttgccctgaaacttggcccacctgggccgggagaccacaggatggagtggcagtgttggtcaggcacctgggttacaagcctgaagagtataaaatgggccgtacaaagatttttatccgcttccccaaaaccttatttgccactgaggacgctctcgaagttcggagacagagtctggccacgaagattcaggcagcttggagggggttccactggcgacaaaagtttcttcgggtgaaacgcagcgccatatgtatccagtcctggtggagaggaacactgggcaggcggaaggcggccaaacgaaagtgggctgcacagaccattagacgcttgatcaggggtttcgtgctccgtcatgccccacggtgccccgagaacgcatttttcctggatcacgtaagaacttcttttctactgaatctcaggcgccaactgcctcagaacgtccttgacacctcgtggccaacaccgccccctgccttgcgagaagcaagcgagctgttaagagaactctgcatcaaaaatatggtgtggaagtactgtcggtccatttcaccagagtggaaacagcagctgcaacagaaggcggttgccagtgagatattcaaggggaaaaaggataactatccccagtctgtgcctaggctttttatcagcacccgcctgggcactgacgaaatttccccacgtgtcctacaggctctcggatcagagcccatccaatacgccgtgccggttgtgaaatatgatagaaagggctacaaacctcggagcaggcagctgttgctgacaccaaacgcagtagtcattgtggaagacgctaaggtgaagcagcgcatcgattatgccaatttaacggggatatctgtctccagtctcagcgactctctgttcgttcttcatgtgcagcgagcagataacaaacaaaagggagacgtagtgctgcagtccgatcacgtcatcgagaccttgactaaaacagccctctcagctaatagagtgaacagtattaatatcaaccagggtagcattaccttcgcgggcgggcccggacgggacggcacaatcgactttactcctggttcggaactgctaataaccaaggccaaaaatgggcacctggcagttgtggctcccaggcttaactcccgctga

SEQ ID NO: 2811 - RNA, 3192 nt, synthetic construct
  misc_feature 1..3192: note = derived and/or modified sequence opt4 fromMYO1C__Homo_sapiens__CCDS42226.1
  source 1..3192: mol_type = other RNA
atggccctgcaggtggagctggtgcccaccggcgagatcatcagagtggtgcacccccacagaccctgcaagctggccctgggcagcgacggcgtgagagtgaccatggagagcgccctgaccgccagagacagagtgggcgtgcaggacttcgtgctgctggagaacttcaccagcgaggccgccttcatcgagaacctgagaagaagattcagagagaacctgatctacacctacatcggccccgtgctggtgagcgtgaacccctacagagacctgcagatctacagcagacagcacatggagagatacagaggcgtgagcttctacgaggtgcccccccacctgttcgccgtggccgacaccgtgtacagagccctgagaaccgagagaagagaccaggccgtgatgatcagcggcgagagcggcgccggcaagaccgaggccaccaagagactgctgcagttctacgccgagacctgccccgcccccgagagaggcggcgccgtgagagacagactgctgcagagcaaccccgtgctggaggccttcggcaacgccaagaccctgagaaacgacaacagcagcagattcggcaagtacatggacgtgcagttcgacttcaagggcgcccccgtgggcggccacatcctgagctacctgctggagaagagcagagtggtgcaccagaaccacggcgagagaaacttccacatcttctaccagctgctggagggcggcgaggaggagaccctgagaagactgggcctggagagaaacccccagagctacctgtacctggtgaagggccagtgcgccaaggtgagcagcatcaacgacaagagcgactggaaggtggtgagaaaggccctgaccgtgatcgacttcaccgaggacgaggtggaggacctgctgagcatcgtggccagcgtgctgcacctgggcaacatccacttcgccgccaacgaggagagcaacgcccaggtgaccaccgagaaccagctgaagtacctgaccagactgctgagcgtggagggcagcaccctgagagaggccctgacccacagaaagatcatcgccaagggcgaggagctgctgagccccctgaacctggagcaggccgcctacgccagagacgccctggccaaggccgtgtacagcagaaccttcacctggctggtgggcaagatcaacagaagcctggccagcaaggacgtggagagccccagctggagaagcaccaccgtgctgggcctgctggacatctacggcttcgaggtgttccagcacaacagcttcgagcagttctgcatcaactactgcaacgagaagctgcagcagctgttcatcgagctgaccctgaagagcgagcaggaggagtacgaggccgagggcatcgcctgggagcccgtgcagtacttcaacaacaagatcatctgcgacctggtggaggagaagttcaagggcatcatcagcatcctggacgaggagtgcctgagacccggcgaggccaccgacctgaccttcctggagaagctggaggacaccgtgaagcaccacccccacttcctgacccacaagctggccgaccagagaaccagaaagagcctgggcagaggcgagttcagactgctgcactacgccggcgaggtgacctacagcgtgaccggcttcctggacaagaacaacgacctgctgttcagaaacctgaaggagaccatgtgcagcagcaagaaccccatcatgagccagtgcttcgacagaagcgagctgagcgacaagaagagacccgagaccgtggccacccagttcaagatgagcctgctgcagctggtggagatcctgcagagcaaggagcccgcctacgtgagatgcatcaagcccaacgacgccaagcagcccggcagattcgacgaggtgctgatcagacaccaggtgaagtacctgggcctgctggagaacctgagagtgagaagagccggcttcgcctacagaagaaagtacgaggccttcctgcagagatacaagagcctgtgccccgagacctggcccacctgggccggcagaccccaggacggcgtggccgtgctggtgagacacctgggctacaagcccgaggagtacaagatgggcagaaccaagatcttcatcagattccccaagaccctgttcgccaccgaggacgccctggaggtgagaagacagagcctggccaccaagatccaggccgcctggagaggcttccactggagacagaagttcctgagagtgaagagaagcgccatctgcatccagagctggtggagaggcaccctgggcagaagaaaggccgccaagagaaagtgggccgcccagaccatcagaagactgatcagaggcttcgtgctgagacacgcccccagatgccccgagaacgccttcttcctggaccacgtgagaaccagcttcctgctgaacctgagaagacagctgccccagaacgtgctggacaccagctggcccacccccccccccgccctgagagaggccagcgagctgctgagagagctgtgcatcaagaacatggtgtggaagtactgcagaagcatcagccccgagtggaagcagcagctgcagcagaaggccgtggccagcgagatcttcaagggcaagaaggacaactacccccagagcgtgcccagactgttcatcagcaccagactgggcaccgacgagatcagccccagagtgctgcaggccctgggcagcgagcccatccagtacgccgtgcccgtggtgaagtacgacagaaagggctacaagcccagaagcagacagctgctgctgacccccaacgccgtggtgatcgtggaggacgccaaggtgaagcagagaatcgactacgccaacctgaccggcatcagcgtgagcagcctgagcgacagcctgttcgtgctgcacgtgcagagagccgacaacaagcagaagggcgacgtggtgctgcagagcgaccacgtgatcgagaccctgaccaagaccgccctgagcgccaacagagtgaacagcatcaacatcaaccagggcagcatcaccttcgccggcggccccggcagagacggcaccatcgacttcacccccggcagcgagctgctgatcaccaaggccaagaacggccacctggccgtggtggcccccagactgaacagcagatga

SEQ ID NO: 2812 - RNA, 3192 nt, synthetic construct
  misc_feature 1..3192: note = derived and/or modified sequence opt5 fromMYO1C__Homo_sapiens__CCDS42226.1
  source 1..3192: mol_type = other RNA
atggccctccaggtggagctcgtccccaccggcgaaatcattagagttgtgcaccctcatcggccgtgcaagctggctcttgggagcgacggagtgcgcgtcacaatggagtccgccctgacggcgagagatcgggtgggcgttcaagacttcgtgctcctggaaaactttacctctgaggctgccttcatcgaaaatcttcgcagacggtttcgcgagaacctgatttacacatatatcgggcccgtcctcgtgagcgttaatccttacagagatctgcagatttattcccggcagcacatggagcgctacagaggagtgtctttctatgaagtgccccctcatctgtttgccgtcgctgacaccgtgtaccgggccctccgcacagagagacgggatcaggctgtcatgatcagcggcgaatccggggccggaaaaaccgaggcgacaaagcgcctgcttcaattctatgccgagacctgtcccgctcctgaaagaggcggcgccgttcgggacagactgctccagtctaacccggtgctggaggcttttgggaatgccaaaacgcttcgcaacgataatagctcccggttcggaaagtacatggacgtgcagtttgatttcaaaggcgcgcccgtcgggggacacatcctgagctacctcctggaaaagtctagagtggttcatcagaaccacggcgagcgcaattttcacattttctatcaactgctcgaagggggagaggaggaaaccctgcggagacttggcctggagcgcaaccctcagtcctacctctatctggtgaagggccagtgcgccaaagtcagctctatcaatgacaagtccgattggaaagtggttcggaaggctcttacagtgattgactttaccgaagatgaggtcgaagacctgctcagcatcgtggcctctgtcctgcatctggggaacattcacttcgctgccaatgaggagtccaacgcccaggtgacaaccgaaaatcaactcaaatacctgacgagacttctgagcgttgagggatccacactccgcgaagctctgacccatcggaagatcattgcgaagggcgaggaacttctgtctcccctcaacctggagcaggccgcttatgccagagacgccctggctaaagccgtgtacagccgcacattcacctggctcgtcgggaagatcaaccggtccctggcgagcaaagatgtggagtctccttcctggagaagcaccacagttcttggactgctcgacatctatggctttgaagtgttccagcacaattcttttgagcaattctgtattaactactgcaatgaaaagctgcagcagctgtttatcgagcttacgctcaaaagcgagcaggaagagtacgaagctgaggggattgcctgggaacccgtccaatatttcaacaataagatcatttgtgatctggtggaggagaaatttaagggaatcatctccattctggacgaagagtgcctccggccgggcgaagccaccgatctgacattccttgagaagctggaagacaccgtgaaacaccatcctcactttctcacacataagctggctgatcagcgcaccagaaaatctctgggccggggagagttcagacttctccactacgccggagaggttacgtatagcgtcacaggctttctggacaagaacaatgatctgctgttccgcaacctgaaagaaaccatgtgttccagcaagaatcccatcatgtctcagtgctttgaccggtccgagcttagcgataagaaaagacctgaaaccgtggctacacagttcaagatgtctctgctccaactggtggagattctgcagtccaaagaacccgcctacgtccgctgtatcaagcccaacgacgcgaaacagcctgggagattcgacgaggtgcttattcggcatcaggttaagtatctcggactgctggagaatctccgcgtgagacgggccggctttgcttaccgcagaaagtatgaagccttcctgcaacggtacaaaagcctttgcccggagacctggcccacatgggctgggcgccctcaggatggcgtcgccgtgctggttagacacctcggatacaagcccgaagagtataaaatgggccggacgaagatctttatccgcttccctaaaaccctgtttgcgacagaggacgccctggaagtgagacggcagtcccttgctaccaagattcaggccgcttggagagggttccactggcgccaaaagtttctccgggtcaaaagatctgccatctgtattcagagctggtggcgcggaacactgggccggagaaaggccgctaaacgcaagtgggcggcccagaccatccggagactgattcgcgggttcgtgctccggcatgctcccagatgcccggagaacgcctttttcctggatcacgttcggacgtcctttcttctgaatctccgcagacaactgcctcagaacgtgctggacacctcttggcccacacctccccctgcccttcgggaagctagcgagctgctccgcgaactgtgcatcaaaaatatggtctggaagtactgtagatccattagccccgagtggaaacagcagctccaacagaaggccgtggcgtctgagatcttcaaggggaaaaaggataactatccgcagtccgtgcctcggctgtttatcagcaccagacttggcacagacgaaatttctccccgcgtcctgcaggctctcgggtccgagcccatccaatacgccgttcctgtggtgaaatatgatcggaagggctacaaaccgagaagccgccagctgctgcttacccccaacgccgtcgtgattgttgaagacgctaaggtgaagcagcggatcgattatgccaatctgacgggaatttctgtcagctccctcagcgactctctgttcgtgctccatgttcagagagcggataacaaacaaaagggcgacgtggtcctgcagtccgatcacgtgatcgagacacttaccaaaacagctctgagcgccaatcgcgttaactccatcaatattaaccaggggtctatcaccttcgccggaggccctgggcgggacggaaccattgactttacacccggcagcgaactcctgatcacgaaggctaaaaatgggcacctggccgtggtcgctcctagacttaactcccgctga

SEQ ID NO: 2813 - protein, 1006 aa, synthetic construct
  REGION 1..1006: note = MYO1D__Homo_sapiens__O94832
MAEQESLEFGKADFVLMDTVSMPEFMANLRLRFEKGRIYTFIGEVVVSVNPYKLLNIYGRDTIEQYKGRELYERPPHLFAIADAAYKAMKRRSKDTCIVISGESGAGKTEASKYIMQYIAAITNPSQRAEVERVKNMLLKSNCVLEAFGNAKTNRNDNSSRFGKYMDINFDFKGDPIGGHINNYLLEKSRVIVQQPGERSFHSFYQLLQGGSEQMLRSLHLQKSLSSYNYIHVGAQLKSSINDAAEFRVVADAMKVIGFKPEEIQTVYKILAAILHLGNLKFVVDGDTPLIENGKVVSIIAELLSTKTDMVEKALLYRTVATGRDIIDKQHTEQEASYGRDAFAKAIYERLFCWIVTRINDIIEVKNYDTTIHGKNTVIGVLDIYGFEIFDNNSFEQFCINYCNEKLQQLFIQLVLKQEQEEYQREGIPWKHIDYFNNQIIVDLVEQQHKGIIAILDDACMNVGKVTDEMFLEALNSKLGKHAHFSSRKLCASDKILEFDRDFRIRHYAGDVVYSVIGFIDKNKDTLFQDFKRLMYNSSNPVLKNMWPEGKLSITEVTKRPLTAATLFKNSMIALVDNLASKEPYYVRCIKPNDKKSPQIFDDERCRHQVEYLGLLENVRVRRAGFAFRQTYEKFLHRYKMISEFTWPNHDLPSDKEAVKKLIERCGFQDDVAYGKTKIFIRTPRTLFTLEELRAQMLIRIVLFLQKVWRGTLARMRYKRTKAALTIIRYYRRYKVKSYIHEVARRFHGVKTMRDYGKHVKWPSPPKVLRRFEEALQTIFNRWRASQLIKSIPASDLPQVRAKVAAVEMLKGQRADLGLQRAWEGNYLASKPDTPQTSGTFVPVANELKRKDKYMNVLFSCHVRKVNRFSKVEDRAIFVTDRHLYKMDPTKQYKVMKTIPLYNLTGLSVSNGKDQLVVFHTKDNKDLIVCLFSKQPTHESRIGELVGVLVNHFKSEKRHLQVNVTNPVQCSLHGKKCTVSVETRLNQPQPDFTKNRSGFILSVPGN

SEQ ID NO: 2814 - RNA, 3021 nt, synthetic construct
  misc_feature 1..3021: note = MYO1D__Homo_sapiens__AAI46764
  source 1..3021: mol_type = other RNA
atggcggagcaggagagcctggaattcggcaaggcagacttcgtgctgatggacaccgtctccatgcccgagttcatggccaacctcaggctcagatttgaaaaagggcgcatctatacgttcattggagaagtcgtcgtttctgtgaacccttacaagttgttgaacatctatggaagagacacaattgagcagtataaaggccgtgagctgtatgagagaccgcctcacctttttgctattgcggatgctgcttacaaggctatgaagaggcgatcaaaagacacttgtattgtgatatcaggggaaagtggagctggtaaaacggaagccagtaagtacattatgcagtatattgcggccatcaccaaccccagtcagagagcagaggttgaaagagtgaagaatatgttgcttaagtccaactgtgttttggaagcttttggaaatgccaaaaccaaccgtaatgacaactcaagcaggtttggaaaatacatggatatcaactttgacttcaagggtgaccctattggtgggcatatcaataactacttactagaaaagtctcgagtgattgtgcaacagccaggagaaagaagctttcattctttctatcagctactccaaggaggttcagaacaaatgctacgctctctacatctccagaaatccctttcatcctacaactatattcatgtgggagctcaattaaagtcttctatcaatgatgctgccgaattcagagttgttgctgatgccatgaaagtcattggcttcaaacctgaggagatccaaacagtgtataagattttggctgctattctgcacttgggaaatttaaaatttgtagtagatggtgacacgcctcttattgagaatggcaaagtagtatctatcatagcagaattgctctctactaagacagatatggttgagaaagcccttctttaccggactgtggccacaggccgtgacatcattgacaagcagcacacagaacaagaggccagctacggcagagacgcctttgccaaggcaatatatgagcgccttttttgttggatcgttactcgcatcaatgatattattgaggtcaagaactatgacaccacaatccatgggaaaaacactgttattggtgtcttggatatctatggctttgaaatcttcgacaacaacagttttgaacaattctgtatcaattactgcaatgagaaactgcagcagctatttattcagctggttctgaagcaagaacaagaggaataccagcgggaagggatcccctggaaacatattgactacttcaacaatcagatcattgttgacctcgtggagcaacagcacaaagggatcattgcaatccttgatgatgcttgcatgaatgtcggcaaagtcaccgatgaaatgtttcttgaagcacttaacagtaaattgggcaaacacgcccatttttccagccgaaagctctgtgcctcagacaaaattctggagtttgatcgagattttcgaattcgacattatgcaggcgatgtagtctattctgtcattggttttattgacaaaaataaagatactttatttcaagatttcaagcgccttatgtataacagttcaaatcctgtgctcaagaatatgtggcctgaaggcaaactgagcattacagaggtgaccaagcgacctctgactgctgctaccttgtttaagaattctatgattgctctagtagacaaccttgcatcaaaggaaccatattacgttcgttgcatcaaacccaatgacaagaaatctccacagatatttgatgatgaacgctgccggcaccaagtagaatatcttggactactggaaaatgtgagagtgcgtcgggcaggatttgccttccgccagacatacgagaagtttcttcacaggtataagatgatctctgaattcacctggcccaaccatgaccttccttcagacaaagaggctgtcaagaaactaattgaacggtgtggttttcaggatgatgtagcttatgggaagaccaaaattttcattcgaacaccccgaacattgtttaccttggaagaactccgtgcccagatgctcataaggattgtcctctttctacaaaaggtgtggcggggcaccctggcccgcatgcggtacaaaagaaccaaggcagctctgacaataatcaggtactaccggcgctacaaagtgaagtcgtacatccacgaggtggccagacgcttccatggcgtcaagaccatgcgagactacgggaagcacgtgaagtggccaagccctcctaaagttcttcgccgttttgaggaggccctgcagacgattttcaatagatggagagcatcccagctcatcaagagcattccggcctcagacctgccccaggtcagggcaaaggttgcagccgtggaaatgttgaagggtcaaagggctgacctcgggctccagagggcctgggagggcaactatcttgcttcaaagccagatacacctcagacctcaggcacttttgtccctgttgctaatgaattgaaacggaaggacaaatacatgaatgtcctcttttcctgtcacgtccgtaaggtaaatcgatttagtaaggtggaagacagagcaatttttgtcactgaccgtcacctgtataaaatggatcccactaaacagtacaaggtgatgaagactatccctctatacaatttgactggtctgagtgtctccaatggaaaggaccaacttgtagtgttccatacgaaagacaacaaagacctcattgtctgcctcttcagcaaacagccaacccatgagagtcgaattggagaacttgttggagtgctggtgaatcatttcaagagtgagaagcgccaccttcaagtgaacgtcaccaacccagtacagtgcagcctgcacgggaagaagtgcaccgtctccgtggagacgcggctcaaccagccccagcccgacttcaccaagaatcgctcgggcttcatcctcagcgtgcccgggaactga

SEQ ID NO: 2815 - RNA, 3021 nt, synthetic construct
  misc_feature 1..3021: note = derived and/or modified sequence opt1 fromMYO1D__Homo_sapiens__AAI46764
  source 1..3021: mol_type = other RNA
atggccgagcaggagagcctggagttcggcaaggccgacttcgtgctcatggacaccgtctccatgcccgagttcatggcgaacctgcgcctgcggttcgagaaggggcgcatctacaccttcatcggcgaggtggtggtcagcgtgaacccgtacaagctcctgaacatctacgggcgggacacgatcgagcagtacaagggccgcgagctgtacgagcggccgccccacctcttcgccatcgccgacgccgcctacaaggcgatgaagcgccggtccaaggacacgtgcatcgtgatcagcggggagtccggcgccggcaagaccgaggccagcaagtacatcatgcagtacatcgccgcgatcaccaacccctcccagcgcgccgaggtcgagcgggtgaagaacatgctgctcaagagcaactgcgtgctggaggccttcgggaacgccaagaccaaccgcaacgacaactccagccggttcggcaagtacatggacatcaacttcgacttcaagggggaccccatcggcgggcacatcaacaactacctgctggagaagtcccgcgtcatcgtgcagcagcccggcgagcggagcttccactccttctaccagctcctgcagggcgggagcgagcagatgctgcgctccctccacctccagaagtccctgagcagctacaactacatccacgtgggcgcccagctgaagtccagcatcaacgacgcggccgagttccgggtcgtggccgacgccatgaaggtgatcgggttcaagcccgaggagatccagaccgtctacaagatcctggccgcgatcctgcacctcggcaacctgaagttcgtggtggacggcgacacgcccctgatcgagaacgggaaggtcgtgagcatcatcgccgagctcctgtccaccaagaccgacatggtggagaaggccctgctctaccgcaccgtcgccaccggccgggacatcatcgacaagcagcacaccgagcaggaggccagctacgggcgcgacgcgttcgccaaggccatctacgagcggctgttctgctggatcgtgacgcgcatcaacgacatcatcgaggtgaagaactacgacaccaccatccacggcaagaacaccgtcatcggggtgctggacatctacggcttcgagatcttcgacaacaactccttcgagcagttctgcatcaactactgcaacgagaagctccagcagctgttcatccagctggtcctcaagcaggagcaggaggagtaccagcgggagggcatcccgtggaagcacatcgactacttcaacaaccagatcatcgtggacctggtggagcagcagcacaaggggatcatcgccatcctggacgacgcctgcatgaacgtcggcaaggtgacggacgagatgttcctcgaggcgctgaacagcaagctggggaagcacgcccacttctccagccgcaagctctgcgcctccgacaagatcctggagttcgaccgcgacttccggatccgccactacgccggcgacgtggtctacagcgtgatcgggttcatcgacaagaacaaggacaccctgttccaggacttcaagcggctcatgtacaactccagcaaccccgtgctgaagaacatgtggcccgagggcaagctgtccatcaccgaggtcaccaagcgccccctcacggcggccaccctgttcaagaacagcatgatcgccctggtggacaacctcgcctccaaggagccgtactacgtgcggtgcatcaagcccaacgacaagaagtccccgcagatcttcgacgacgagcgctgccggcaccaggtcgagtacctgggcctgctggagaacgtgcgcgtgcggcgcgccgggttcgcgttccggcagacctacgagaagttcctccaccgctacaagatgatcagcgagttcacctggcccaaccacgacctgcccagcgacaaggaggccgtcaagaagctgatcgagcggtgcggcttccaggacgacgtggcctacgggaagacgaagatcttcatccgcacgccccggaccctcttcaccctggaggagctgcgcgcccagatgctcatccggatcgtgctgttcctgcagaaggtctggcgcggcaccctcgcccggatgcgctacaagcgcaccaaggcggccctgaccatcatccggtactaccgccggtacaaggtgaagtcctacatccacgaggtggcccgccggttccacggggtcaagaccatgcgcgactacggcaagcacgtgaagtggcccagcccgcccaaggtgctgcggcgcttcgaggaggccctccagacgatcttcaaccggtggcgcgcctcccagctgatcaagagcatccccgcgagcgacctgccccaggtccgggccaaggtggccgccgtggagatgctcaagggccagcgcgcggacctggggctgcagcgggcctgggagggcaactacctcgcctccaagcccgacaccccgcagaccagcgggaccttcgtccccgtggccaacgagctgaagcgcaaggacaagtacatgaacgtgctgttctcctgccacgtccggaaggtgaaccgcttcagcaaggtggaggaccgggccatcttcgtcacggaccgccacctctacaagatggaccccaccaagcagtacaaggtgatgaagaccatccccctgtacaacctgaccggcctctccgtgagcaacggcaaggaccagctggtcgtgttccacaccaaggacaacaaggacctgatcgtgtgcctcttctccaagcagccgacgcacgagagccggatcggggagctggtcggcgtgctggtgaaccacttcaagtccgagaagcgccacctccaggtcaacgtgaccaaccccgtgcagtgcagcctgcacgggaagaagtgcaccgtctccgtggagacccggctgaaccagccccagccggacttcacgaagaaccgcagcggcttcatcctctccgtgcccgggaactga

SEQ ID NO: 2816 - RNA, 3021 nt, synthetic construct
  misc_feature 1..3021: note = derived and/or modified sequence opt2 fromMYO1D__Homo_sapiens__AAI46764
  source 1..3021: mol_type = other RNA
atggccgagcaggagtccctcgagttcggcaaggccgacttcgtcctcatggacaccgtctccatgcccgagttcatggccaacctccgcctccgcttcgagaagggccgcatctacaccttcatcggcgaggtcgtcgtctccgtcaacccctacaagctcctcaacatctacggccgcgacaccatcgagcagtacaagggccgcgagctctacgagcgccccccccacctcttcgccatcgccgacgccgcctacaaggccatgaagcgccgctccaaggacacctgcatcgtcatctccggcgagtccggcgccggcaagaccgaggcctccaagtacatcatgcagtacatcgccgccatcaccaacccctcccagcgcgccgaggtcgagcgcgtcaagaacatgctcctcaagtccaactgcgtcctcgaggccttcggcaacgccaagaccaaccgcaacgacaactcctcccgcttcggcaagtacatggacatcaacttcgacttcaagggcgaccccatcggcggccacatcaacaactacctcctcgagaagtcccgcgtcatcgtccagcagcccggcgagcgctccttccactccttctaccagctcctccagggcggctccgagcagatgctccgctccctccacctccagaagtccctctcctcctacaactacatccacgtcggcgcccagctcaagtcctccatcaacgacgccgccgagttccgcgtcgtcgccgacgccatgaaggtcatcggcttcaagcccgaggagatccagaccgtctacaagatcctcgccgccatcctccacctcggcaacctcaagttcgtcgtcgacggcgacacccccctcatcgagaacggcaaggtcgtctccatcatcgccgagctcctctccaccaagaccgacatggtcgagaaggccctcctctaccgcaccgtcgccaccggccgcgacatcatcgacaagcagcacaccgagcaggaggcctcctacggccgcgacgccttcgccaaggccatctacgagcgcctcttctgctggatcgtcacccgcatcaacgacatcatcgaggtcaagaactacgacaccaccatccacggcaagaacaccgtcatcggcgtcctcgacatctacggcttcgagatcttcgacaacaactccttcgagcagttctgcatcaactactgcaacgagaagctccagcagctcttcatccagctcgtcctcaagcaggagcaggaggagtaccagcgcgagggcatcccctggaagcacatcgactacttcaacaaccagatcatcgtcgacctcgtcgagcagcagcacaagggcatcatcgccatcctcgacgacgcctgcatgaacgtcggcaaggtcaccgacgagatgttcctcgaggccctcaactccaagctcggcaagcacgcccacttctcctcccgcaagctctgcgcctccgacaagatcctcgagttcgaccgcgacttccgcatccgccactacgccggcgacgtcgtctactccgtcatcggcttcatcgacaagaacaaggacaccctcttccaggacttcaagcgcctcatgtacaactcctccaaccccgtcctcaagaacatgtggcccgagggcaagctctccatcaccgaggtcaccaagcgccccctcaccgccgccaccctcttcaagaactccatgatcgccctcgtcgacaacctcgcctccaaggagccctactacgtccgctgcatcaagcccaacgacaagaagtccccccagatcttcgacgacgagcgctgccgccaccaggtcgagtacctcggcctcctcgagaacgtccgcgtccgccgcgccggcttcgccttccgccagacctacgagaagttcctccaccgctacaagatgatctccgagttcacctggcccaaccacgacctcccctccgacaaggaggccgtcaagaagctcatcgagcgctgcggcttccaggacgacgtcgcctacggcaagaccaagatcttcatccgcaccccccgcaccctcttcaccctcgaggagctccgcgcccagatgctcatccgcatcgtcctcttcctccagaaggtctggcgcggcaccctcgcccgcatgcgctacaagcgcaccaaggccgccctcaccatcatccgctactaccgccgctacaaggtcaagtcctacatccacgaggtcgcccgccgcttccacggcgtcaagaccatgcgcgactacggcaagcacgtcaagtggccctccccccccaaggtcctccgccgcttcgaggaggccctccagaccatcttcaaccgctggcgcgcctcccagctcatcaagtccatccccgcctccgacctcccccaggtccgcgccaaggtcgccgccgtcgagatgctcaagggccagcgcgccgacctcggcctccagcgcgcctgggagggcaactacctcgcctccaagcccgacaccccccagacctccggcaccttcgtccccgtcgccaacgagctcaagcgcaaggacaagtacatgaacgtcctcttctcctgccacgtccgcaaggtcaaccgcttctccaaggtcgaggaccgcgccatcttcgtcaccgaccgccacctctacaagatggaccccaccaagcagtacaaggtcatgaagaccatccccctctacaacctcaccggcctctccgtctccaacggcaaggaccagctcgtcgtcttccacaccaaggacaacaaggacctcatcgtctgcctcttctccaagcagcccacccacgagtcccgcatcggcgagctcgtcggcgtcctcgtcaaccacttcaagtccgagaagcgccacctccaggtcaacgtcaccaaccccgtccagtgctccctccacggcaagaagtgcaccgtctccgtcgagacccgcctcaaccagccccagcccgacttcaccaagaaccgctccggcttcatcctctccgtccccggcaactga

SEQ ID NO: 2817 - RNA, 3021 nt, synthetic construct
  misc_feature 1..3021: note = derived and/or modified sequence opt3 fromMYO1D__Homo_sapiens__AAI46764
  source 1..3021: mol_type = other RNA
atggccgagcaggaaagcctggagttcggcaaggctgactttgtgctcatggataccgtctccatgcccgagttcatggcaaaccttagactgaggtttgagaaagggcggatctacacattcattggagaagttgtggtatctgtgaatccttataagttgttaaacatatacggtcgcgacactatcgagcaatataaaggccgagagctgtacgaacgtccaccgcacctatttgccattgcggatgctgcctataaggcaatgaaaagaaggtcaaaggacacgtgcatcgtcattagtggggagagcggagccggcaagaccgaggcttccaaatacatcatgcagtatatagcagccatcacaaatccctctcagcgggctgaagtggagcgcgttaagaacatgctcctgaaatcgaattgtgtgcttgaagccttcggtaacgcgaagactaatagaaacgataattcaagcaggtttgggaaatacatggacattaacttcgattttaagggagaccctatcggcggccatattaataactacctgttggagaagagtcgggtcatcgtgcagcaaccaggggaacgctccttccactctttttatcagctcctgcagggaggtagcgagcagatgctgcgatccctccatttacaaaaatcactgagtagctacaattatatacacgtaggcgcacagcttaagtcttccattaacgatgccgctgagttcagagttgtggccgacgcaatgaaagtcatcgggtttaagcccgaagagattcagaccgtgtacaaaatcttggctgccatcctgcatctaggaaatctcaagttcgtggtcgatggcgacacacctctgattgaaaacggtaaagttgtgtcaataatcgcggagcttctgagcaccaagactgatatggtagaaaaggccttgctctataggacagtggcaaccgggcgggacattatcgacaaacagcacacggagcaagaagctagttacggacgtgatgccttcgctaaggccatatatgagcgcctgttttgctggattgtcactagaatcaacgacatcattgaggtgaaaaattacgataccacaatccacggcaagaacactgttattggcgtgttagacatatacgggttcgaaatctttgataataactctttcgagcagttttgtattaattattgcaacgaaaaactgcagcaactcttcatccagcttgtcctgaagcaggagcaggaagagtaccaaagggagggaatcccatggaagcatattgactattttaataaccagataatcgtggatttggtagaacagcagcacaaaggtattatcgcaattctagacgatgcctgtatgaatgttggcaaggtgaccgacgagatgttcctggaagctctcaactccaaactggggaagcatgcgcactttagctcgcggaaactttgcgcatctgataagatcctggagttcgaccgagactttcgcataagacactacgccggagatgtcgtgtattccgtcatcggcttcattgacaagaataaagatacattgtttcaagacttcaagaggctcatgtacaactcaagtaatcccgtgctgaaaaacatgtggcctgagggtaagttaagcatcaccgaagttacgaaacggccactgactgctgccacactattcaaaaattccatgattgcactcgtggataacctggcctctaaggagccgtattacgtacgctgtatcaagcccaacgacaagaaaagccctcagatatttgatgacgaaagatgcaggcatcaggtcgagtaccttgggttgctggaaaatgtgcgtgttcggcgagctggcttcgcctttagacagacctatgagaagttcctccacaggtacaaaatgatttcagagtttacttggccaaaccatgatctgcccagtgacaaggaagcagtgaaaaagctgatcgagcgctgtggattccaagatgacgtcgcgtatggcaagacaaaaatttttatccggacccctagaacgcttttcaccttggaagaactcagggctcagatgctgatacgcatcgtgttatttctgcagaaggtatggcgagggacactagcccggatgcgttacaaaagaactaaggcagccctcaccattatcaggtattaccgccggtataaagtgaagtcctacattcacgaagttgctagaaggttccatggagtcaagacaatgcgagattacggtaaacacgtgaagtggccatcacccccgaaagtgctgcgccggtttgaggaggcccttcagactatcttcaatagatggagggcatctcaattgataaagtcaattcctgctagtgacctgccccaggtccgtgccaaagttgcggccgtggaaatgctcaagggccagcgcgctgacctggggttacaacgggcatgggagggaaactatctggccagcaagccagatacccctcagacatccggcacctttgtgcccgtagctaatgaacttaaaagaaaggacaaatacatgaacgtcttgttctcttgccacgtgaggaaggttaatcgattctcgaaagtggaggatcgggccatctttgtcactgaccgccatctctataagatggatccaacgaagcagtacaaagtgatgaagacaatccccctgtataacctaaccggtctgagcgtttccaatgggaaagaccagctcgtggtattccacactaaggataacaaagacctgattgtctgtctttttagcaagcaacctacccatgaaagtagaatcggcgagttggtgggagtgctggtcaatcacttcaaatctgagaagaggcacttacaggttaacgtgacaaatccagtacagtgcagcctccatggcaagaaatgcaccgtgtccgtcgaaactcggctgaaccagccgcaacccgattttacaaagaatcgatcagggttcattcttagcgtgcctggaaactga

SEQ ID NO: 2818 - RNA, 3021 nt, synthetic construct
  misc_feature 1..3021: note = derived and/or modified sequence opt4 fromMYO1D__Homo_sapiens__AAI46764
  source 1..3021: mol_type = other RNA
atggccgagcaggagagcctggagttcggcaaggccgacttcgtgctgatggacaccgtgagcatgcccgagttcatggccaacctgagactgagattcgagaagggcagaatctacaccttcatcggcgaggtggtggtgagcgtgaacccctacaagctgctgaacatctacggcagagacaccatcgagcagtacaagggcagagagctgtacgagagacccccccacctgttcgccatcgccgacgccgcctacaaggccatgaagagaagaagcaaggacacctgcatcgtgatcagcggcgagagcggcgccggcaagaccgaggccagcaagtacatcatgcagtacatcgccgccatcaccaaccccagccagagagccgaggtggagagagtgaagaacatgctgctgaagagcaactgcgtgctggaggccttcggcaacgccaagaccaacagaaacgacaacagcagcagattcggcaagtacatggacatcaacttcgacttcaagggcgaccccatcggcggccacatcaacaactacctgctggagaagagcagagtgatcgtgcagcagcccggcgagagaagcttccacagcttctaccagctgctgcagggcggcagcgagcagatgctgagaagcctgcacctgcagaagagcctgagcagctacaactacatccacgtgggcgcccagctgaagagcagcatcaacgacgccgccgagttcagagtggtggccgacgccatgaaggtgatcggcttcaagcccgaggagatccagaccgtgtacaagatcctggccgccatcctgcacctgggcaacctgaagttcgtggtggacggcgacacccccctgatcgagaacggcaaggtggtgagcatcatcgccgagctgctgagcaccaagaccgacatggtggagaaggccctgctgtacagaaccgtggccaccggcagagacatcatcgacaagcagcacaccgagcaggaggccagctacggcagagacgccttcgccaaggccatctacgagagactgttctgctggatcgtgaccagaatcaacgacatcatcgaggtgaagaactacgacaccaccatccacggcaagaacaccgtgatcggcgtgctggacatctacggcttcgagatcttcgacaacaacagcttcgagcagttctgcatcaactactgcaacgagaagctgcagcagctgttcatccagctggtgctgaagcaggagcaggaggagtaccagagagagggcatcccctggaagcacatcgactacttcaacaaccagatcatcgtggacctggtggagcagcagcacaagggcatcatcgccatcctggacgacgcctgcatgaacgtgggcaaggtgaccgacgagatgttcctggaggccctgaacagcaagctgggcaagcacgcccacttcagcagcagaaagctgtgcgccagcgacaagatcctggagttcgacagagacttcagaatcagacactacgccggcgacgtggtgtacagcgtgatcggcttcatcgacaagaacaaggacaccctgttccaggacttcaagagactgatgtacaacagcagcaaccccgtgctgaagaacatgtggcccgagggcaagctgagcatcaccgaggtgaccaagagacccctgaccgccgccaccctgttcaagaacagcatgatcgccctggtggacaacctggccagcaaggagccctactacgtgagatgcatcaagcccaacgacaagaagagcccccagatcttcgacgacgagagatgcagacaccaggtggagtacctgggcctgctggagaacgtgagagtgagaagagccggcttcgccttcagacagacctacgagaagttcctgcacagatacaagatgatcagcgagttcacctggcccaaccacgacctgcccagcgacaaggaggccgtgaagaagctgatcgagagatgcggcttccaggacgacgtggcctacggcaagaccaagatcttcatcagaacccccagaaccctgttcaccctggaggagctgagagcccagatgctgatcagaatcgtgctgttcctgcagaaggtgtggagaggcaccctggccagaatgagatacaagagaaccaaggccgccctgaccatcatcagatactacagaagatacaaggtgaagagctacatccacgaggtggccagaagattccacggcgtgaagaccatgagagactacggcaagcacgtgaagtggcccagcccccccaaggtgctgagaagattcgaggaggccctgcagaccatcttcaacagatggagagccagccagctgatcaagagcatccccgccagcgacctgccccaggtgagagccaaggtggccgccgtggagatgctgaagggccagagagccgacctgggcctgcagagagcctgggagggcaactacctggccagcaagcccgacaccccccagaccagcggcaccttcgtgcccgtggccaacgagctgaagagaaaggacaagtacatgaacgtgctgttcagctgccacgtgagaaaggtgaacagattcagcaaggtggaggacagagccatcttcgtgaccgacagacacctgtacaagatggaccccaccaagcagtacaaggtgatgaagaccatccccctgtacaacctgaccggcctgagcgtgagcaacggcaaggaccagctggtggtgttccacaccaaggacaacaaggacctgatcgtgtgcctgttcagcaagcagcccacccacgagagcagaatcggcgagctggtgggcgtgctggtgaaccacttcaagagcgagaagagacacctgcaggtgaacgtgaccaaccccgtgcagtgcagcctgcacggcaagaagtgcaccgtgagcgtggagaccagactgaaccagccccagcccgacttcaccaagaacagaagcggcttcatcctgagcgtgcccggcaactga

SEQ ID NO: 2819 - RNA, 3021 nt, synthetic construct
  misc_feature 1..3021: note = derived and/or modified sequence opt5 fromMYO1D__Homo_sapiens__AAI46764
  source 1..3021: mol_type = other RNA
atggccgagcaggaaagcctggagttcggcaaggctgactttgtgctcatggataccgtctccatgcccgagttcatggccaacctgagacttcggtttgagaaagggcgcatctacacattcattggagaagttgtggtgtctgtcaatccttataagctgctcaacatctacggcagagacacgattgagcaatataaagggcgggagctgtacgaacgcccgccccacctttttgcgatcgctgatgccgcctataaggctatgaaaagacggagcaaggatacctgcattgtgatctccggagagtctggcgccgggaagacagaagctagcaaatacatcatgcagtatattgccgcgatcaccaatccttcccagcgcgccgaggttgagagagtgaagaacatgctgctcaaatctaattgtgtcctggaggctttcggaaacgccaagacaaatcggaacgacaatagctcccgctttggcaaatacatggacattaacttcgattttaagggcgaccccatcgggggacatattaataactacctgctcgaaaagagcagagtgatcgttcagcaacctggcgaacggtctttccactccttttatcagctgcttcaagggggaagcgagcagatgctgcgctctctccatctgcagaaatcccttagctcttacaattatattcacgtgggcgctcagctgaagtccagcatcaacgatgccgcggagttcagagtcgtggccgacgctatgaaagtgatcgggtttaagcccgaagagattcagaccgtctacaaaatcctcgccgctattctgcatctgggaaatctcaagttcgttgtggatggcgacacacctctgatcgaaaacggcaaagtggtctccattatcgccgagcttctgtctaccaagacggatatggtggaaaaggccctcctgtatcggaccgttgctacagggcgcgacatcattgacaaacagcacaccgagcaagaagcgagctacggaagagatgccttcgctaaggccatctatgagcggctgttttgctggattgtgacaagaatcaacgacattatcgaggtcaaaaattacgataccacgatccacggcaagaacacagtgattggggttctggacatctacggattcgaaatttttgataataactccttcgagcagttttgtatcaattattgcaacgaaaaactccagcaactgttcattcagctggtgctcaagcaggagcaggaagagtaccaacgcgagggcatcccgtggaagcatattgactattttaataaccagatcatcgtcgatctggtggaacagcagcacaaagggattatcgccattcttgacgatgcttgtatgaatgtcggaaaggtgaccgacgagatgttcctggaagccctcaacagcaaactgggcaagcatgcgcacttttcttcccggaaactttgcgctagcgataagatcctggagttcgacagagactttcgcattcggcactacgccggcgatgttgtgtattctgtcatcgggttcatcgacaagaataaagatacactctttcaagacttcaagagactgatgtacaacagctccaatcccgtgctgaaaaacatgtggcctgagggaaagctctctattaccgaagttaccaaacgccccctgacagccgctacgcttttcaagaatagcatgatcgccctggtggataacctcgcttccaaggagccttattacgtccggtgtattaaacccaacgacaagaaaagcccgcagatctttgatgacgaaagatgccgccatcaggtggagtacctgggcctgcttgaaaatgtgcgggttagacgcgccgggttcgcgtttcggcagacctatgagaagttcctccacagatacaaaatgatttctgagtttacatggcctaaccatgatctgccctccgacaaggaagccgtcaaaaagctgatcgagcggtgtggattccaagatgacgtggcttatggcaagaccaaaatctttattcgcacacctagaaccctcttcacgctggaagaacttcgggcccagatgctgatcagaattgtgctctttctgcagaaggtctggcgcgggacactggctcggatgagatacaaacgcaccaaggccgcgcttaccatcattagatattaccggcgctataaagttaagagctacatccacgaagtggccagacggttccatggcgtgaagacaatgcgcgattacggaaaacacgtcaagtggccctctccccctaaagtgctcagacggtttgaggaggctctgcagaccatcttcaatcgctggagagcctcccaactgattaagagcatcccggcttccgacctcccccaggttcgggccaaagtggccgctgtcgaaatgctgaagggccagcgcgcggaccttgggctgcaaagagcctgggagggaaactatctcgcttctaagcctgatacaccccagacgagcggcacctttgtgcctgttgccaatgaactgaaacggaaggacaaatacatgaacgtgctgttctcctgccacgtcagaaaggtgaatcgcttctctaaagtggaggatcgggccatttttgtcacagacagacatctttataagatggatcccaccaagcagtacaaagttatgaagacaatcccgctctataacctgaccgggctgagcgtgtccaatggaaaagaccagctcgtggtcttccacacgaaggataacaaagacctgattgtgtgtctttttagcaagcaacctacccatgaatctcgcatcggcgagctggttggggtgctcgtcaatcacttcaaatccgagaagcggcaccttcaggtgaacgttacaaatcccgtgcagtgcagcctgcatggcaagaaatgcaccgtctctgtggaaacaagacttaaccagcctcaacccgattttaccaagaatcgctccggattcattctcagcgttcctggcaactga

SEQ ID NO: 2820 - protein, 1108 aa, synthetic construct
  REGION 1..1108: note = MYO1E__Homo_sapiens__Q12965
MGSKGVYQYHWQSHNVKHSGVDDMVLLSKITENSIVENLKKRYMDDYIFTYIGSVLISVNPFKQMPYFGEKEIEMYQGAAQYENPPHIYALADNMYRNMIIDRENQCVIISGESGAGKTVAAKYIMSYISRVSGGGTKVQHVKDIILQSNPLLEAFGNAKTVRNNNSSRFGKYFEIQFSPGGEPDGGKISNFLLEKSRVVMRNPGERSFHIFYQLIEGASAEQKHSLGITSMDYYYYLSLSGSYKVDDIDDRREFQETLHAMNVIGIFAEEQTLVLQIVAGILHLGNISFKEVGNYAAVESEEFLAFPAYLLGINQDRLKEKLTSRQMDSKWGGKSESIHVTLNVEQACYTRDALAKALHARVFDFLVDSINKAMEKDHEEYNIGVLDIYGFEIFQKNGFEQFCINFVNEKLQQIFIELTLKAEQEEYVQEGIRWTPIEYFNNKIVCDLIENKVNPPGIMSILDDVCATMHAVGEGADQTLLQKLQMQIGSHEHFNSWNQGFIIHHYAGKVSYDMDGFCERNRDVLFMDLIELMQSSELPFIKSLFPENLQADKKGRPTTAGSKIKKQANDLVSTLMKCTPHYIRCIKPNETKKPRDWEESRVKHQVEYLGLKENIRVRRAGYAYRRIFQKFLQRYAILTKATWPSWQGEEKQGVLHLLQSVNMDSDQFQLGRSKVFIKAPESLFLLEEMRERKYDGYARVIQKSWRKFVARKKYVQMREEASDLLLNKKERRRNSINRNFIGDYIGMEEHPELQQFVGKREKIDFADTVTKYDRRFKGVKRDLLLTPKCLYLIGREKVKQGPDKGLVKEVLKRKIEIERILSVSLSTMQDDIFILHEQEYDSLLESVFKTEFLSLLAKRYEEKTQKQLPLKFSNTLELKLKKENWGPWSAGGSRQVQFHQGFGDLAVLKPSNKVLQVSIGPGLPKNSRPTRRNTTQNTGYSSGTQNANYPVRAAPPPPGYHQNGVIRNQYVPYPHAPGSQRSNQKSLYTSMARPPLPRQQSTSSDRVSQTPESLDFLKVPDQGAAGVRRQTTSRPPPAGGRPKPQPKPKPQVPQCKALYAYDAQDTDELSFNANDIIDIIKEDPSGWWTGRLRGKQGLFPNNYVTKI

SEQ ID NO: 2821 - RNA, 3327 nt, synthetic construct
  misc_feature 1..3327: note = MYO1E__Homo_sapiens__CCDS32254.1
  source 1..3327: mol_type = other RNA
atgggaagcaaaggtgtctaccagtaccactggcaaagccacaatgtcaagcacagtggtgtggacgacatggtgctactgtccaagatcacagagaactccatcgtggagaatctgaagaagagatacatggatgactacatttttacatatataggatctgtattaatctcagtcaaccctttcaagcagatgccatattttggggaaaaggaaattgaaatgtaccaaggagcggcacagtatgaaaacccaccacatatctatgcccttgcagataatatgtacagaaacatgatcattgacagagagaaccagtgcgtcattatcagtggtgaaagtggtgctggaaaaacagtggctgccaaatatatcatgagctacatctccagagtgtctggaggagggaccaaagtccagcacgtgaaggacattatcctgcagtccaacccgctgctggaggccttcgggaacgccaagaccgtccggaacaacaactccagccgatttggaaaatactttgaaatccagttcagtccaggtggggaaccagatggtggaaagatctccaacttccttctggaaaaatctagggtggtgatgaggaacccaggagagcggagttttcacatattttaccagctcatcgagggcgcctctgcagagcagaaacacagccttggcatcaccagcatggactattattactacctgagcctctcgggctcatacaaggttgatgacattgacgacaggcgggagtttcaggaaactctgcacgccatgaatgtgattgggatctttgcagaagagcaaacgctggtgttgcagatagtggcgggtattctccacctgggaaacatcagcttcaaagaagttggcaactacgcggctgtggagagtgaagagtttttagcttttcctgcatatctgctagggataaaccaggaccggttgaaagaaaagctaacaagccggcagatggatagcaagtggggaggcaaatccgaatccatccacgtgaccctcaacgtagagcaggcctgttacacccgggatgcgctcgccaaggccctgcacgcccgggtctttgatttcttggtagattccatcaataaagccatggagaaagaccatgaagaatacaacattggcgtcctagacatctatggctttgaaatattccagaaaaatggctttgaacagttttgtatcaattttgttaatgaaaaactgcagcagatttttattgaactgacattaaaggcagaacaggaagaatatgttcaagagggaataagatggacacccattgagtactttaataataaaatcgtatgtgacctcatagagaacaaagtgaaccctcctggcatcatgagcatcctggatgacgtgtgcgccacgatgcatgcggtgggtgagggggcagatcagacgctgctccagaaacttcagatgcagattgggagtcatgagcacttcaacagttggaaccaaggcttcatcattcatcattatgctgggaaggtatcctatgacatggatggcttttgtgaaaggaaccgggatgtgctttttatggatctcatcgagcttatgcagagcagcgagctgcctttcataaagtctttatttccggaaaatctgcaggctgacaagaaagggcgcccaactactgccggaagcaaaataaagaaacaagccaatgaccttgtgagcaccctgatgaaatgtacgccccactacattcgctgcatcaagccaaacgaaaccaagaagcccagagactgggaggaaagcagggtaaagcatcaagtcgaatatttgggtctgaaagagaacattcgagtgagaagagctggctatgcctatcggcgcatcttccaaaaattcctacagaggtatgccattctgaccaaagccacctggccttcttggcagggagaggagaagcaaggcgtcctgcacctgctgcagtcggtcaacatggacagcgaccagttccagctggggaggagtaaagtgttcatcaaagcccccgagtctctatttcttttagaagagatgagagagagaaagtatgatgggtatgctcgagtgatacagaaatcatggaggaaattcgtggcccggaagaaatacgttcaaatgagagaagaagcctcagacctcttattgaacaagaaggagagaaggagaaacagtattaacaggaactttataggggattatattgggatggaagagcacccagaactccagcagttcgtgggcaagagggagaagattgatttcgcagacacagtcaccaagtatgacaggaggttcaagggtgtaaagcgagacctgctccttaccccaaagtgcttgtacttaatcggacgagaaaaagtcaaacagggcccagacaagggcctggtgaaagaagtcctgaagcggaaaatcgagatagaacggatcttgtctgtgtccctcagtactatgcaggatgacatttttattctccatgagcaagagtatgacagtttgcttgaatctgtcttcaaaactgaattcctaagcctcttagcaaagcgttacgaggagaagacccagaagcaactacctctgaaattcagcaatacgcttgaactgaagttgaaaaaggaaaactggggcccctggagtgcagggggctcccggcaagtgcagttccaccaagggtttggggacctggctgtcctcaagcccagtaacaaagtgctgcaggtcagcatcggacctggactgcccaagaactcccgtcctaccagaaggaacactacccaaaatacaggttattccagtgggactcaaaatgccaactacccagtgagagctgcccctcctcccccaggataccatcagaacggagtcatcagaaaccagtatgtgccatatccccatgctcctggaagccagaggtccaatcagaaaagcctgtacacctccatggcccgcccgcccttgcctcggcagcagtctaccagttcagaccgagtgtcacagacgccagagagcctggatttcctcaaggtcccggaccagggagctgcaggggtcaggagacaaacaaccagtcggcctcccccagcagggggcagacccaagccccagcccaagcccaagcctcaggtgccacagtgcaaggctttgtatgcctatgacgctcaggacacagacgaactcagctttaatgccaatgacattattgatattatcaaagaagatccttctggctggtggacgggtcgactacgaggcaagcagggcctgttccccaacaactatgtgaccaagatctga

SEQ ID NO: 2822 - RNA, 3327 nt, synthetic construct
  misc_feature 1..3327: note = derived and/or modified sequence opt1 fromMYO1E__Homo_sapiens__CCDS32254.1
  source 1..3327: mol_type = other RNA
atgggcagcaagggggtgtaccagtaccactggcagtcccacaacgtcaagcacagcggcgtggacgacatggtgctgctctccaagatcaccgagaacagcatcgtcgagaacctgaagaagcgctacatggacgactacatcttcacctacatcgggtccgtgctgatcagcgtgaaccccttcaagcagatgccgtacttcggcgagaaggagatcgagatgtaccagggggccgcccagtacgagaaccccccccacatctacgcgctcgccgacaacatgtaccggaacatgatcatcgaccgcgagaaccagtgcgtcatcatctccggcgagagcggcgccgggaagacggtggccgccaagtacatcatgtcctacatcagccgggtgtccggcgggggcaccaaggtccagcacgtgaaggacatcatcctgcagagcaaccccctgctcgaggcgttcgggaacgccaagaccgtgcgcaacaacaactccagccggttcggcaagtacttcgagatccagttctccccgggcggggagcccgacggcgggaagatcagcaacttcctgctggagaagtcccgcgtcgtgatgcggaaccccggcgagcgcagcttccacatcttctaccagctcatcgagggcgcctccgccgagcagaagcacagcctggggatcaccagcatggactactactactacctgtccctcagcggctcctacaaggtggacgacatcgacgaccggcgcgagttccaggagacgctgcacgcgatgaacgtcatcgggatcttcgccgaggagcagaccctggtgctccagatcgtggccggcatcctgcacctggggaacatcagcttcaaggaggtcggcaactacgccgccgtggagtccgaggagttcctcgcgttccccgcctacctgctgggcatcaaccaggaccggctcaaggagaagctgaccagccgccagatggactccaagtgggggggcaagagcgagtccatccacgtgaccctgaacgtcgagcaggcctgctacacgcgggacgccctcgccaaggcgctgcacgcccgcgtgttcgacttcctggtggacagcatcaacaaggccatggagaaggaccacgaggagtacaacatcggggtcctcgacatctacggcttcgagatcttccagaagaacgggttcgagcagttctgcatcaacttcgtgaacgagaagctgcagcagatcttcatcgagctgaccctcaaggccgagcaggaggagtacgtccaggagggcatccggtggaccccgatcgagtacttcaacaacaagatcgtgtgcgacctgatcgagaacaaggtgaacccccccggcatcatgtccatcctggacgacgtctgcgccaccatgcacgcggtgggggagggcgccgaccagacgctcctgcagaagctgcagatgcagatcgggagccacgagcacttcaactcctggaaccagggcttcatcatccaccactacgccgggaaggtgagctacgacatggacggcttctgcgagcgcaaccgggacgtcctcttcatggacctgatcgagctgatgcagtccagcgagctccccttcatcaagtccctgttcccggagaacctgcaggccgacaagaagggccgccccaccaccgccgggagcaagatcaagaagcaggcgaacgacctcgtgtccaccctgatgaagtgcacgccccactacatccggtgcatcaagcccaacgagaccaagaagccgcgcgactgggaggagagccgggtgaagcaccaggtcgagtacctgggcctcaaggagaacatccgcgtgcgccgggccgggtacgcctaccgccggatcttccagaagttcctgcagcgctacgccatcctgaccaaggcgacctggcccagctggcagggcgaggagaagcagggcgtgctccacctgctgcagtccgtcaacatggacagcgaccagttccagctggggcggtccaaggtgttcatcaaggcccccgagagcctcttcctgctggaggagatgcgcgagcggaagtacgacggctacgcccgcgtgatccagaagtcctggcggaagttcgtcgcccgcaagaagtacgtgcagatgcgggaggaggccagcgacctcctgctgaacaagaaggagcgccggcgcaactccatcaaccggaacttcatcggggactacatcggcatggaggagcaccccgagctccagcagttcgtggggaagcgcgagaagatcgacttcgcggacacggtcaccaagtacgaccggcgcttcaagggcgtgaagcgggacctgctgctcaccccgaagtgcctgtacctgatcggccgcgagaaggtgaagcaggggcccgacaagggcctcgtcaaggaggtgctgaagcgcaagatcgagatcgagcggatcctgagcgtgtccctcagcaccatgcaggacgacatcttcatcctgcacgagcaggagtacgactccctgctcgagagcgtcttcaagacggagttcctgtccctgctcgccaagcgctacgaggagaagacccagaagcagctgcccctgaagttcagcaacaccctcgagctgaagctgaagaaggagaactgggggccctggtccgccggcgggagccggcaggtgcagttccaccagggcttcggcgacctcgccgtgctgaagccgtccaacaaggtcctgcaggtgagcatcgggcccggcctccccaagaacagccgccccacccggcgcaacacgacccagaacaccgggtactccagcggcacccagaacgccaactacccggtgcgggcggccccccccccgcccgggtaccaccagaacggcgtcatccgcaaccagtacgtgccctacccccacgccccgggctcccagcggagcaaccagaagtccctgtacacgagcatggcccgcccccccctgccccggcagcagtccaccagctccgaccgcgtgagccagaccccggagtccctcgacttcctgaaggtccccgaccagggggccgcgggcgtgcggcgccagaccacgagccggccccccccggccgggggccgccccaagccccagcccaagccgaagccccaggtgccccagtgcaaggccctgtacgcctacgacgcgcaggacaccgacgagctctccttcaacgccaacgacatcatcgacatcatcaaggaggaccccagcgggtggtggaccggccggctgcgcggcaagcaggggctgttcccgaacaactacgtcaccaagatctga

SEQ ID NO: 2823 - RNA, 3327 nt, synthetic construct
  misc_feature 1..3327: note = derived and/or modified sequence opt2 fromMYO1E__Homo_sapiens__CCDS32254.1
  source 1..3327: mol_type = other RNA
atgggctccaagggcgtctaccagtaccactggcagtcccacaacgtcaagcactccggcgtcgacgacatggtcctcctctccaagatcaccgagaactccatcgtcgagaacctcaagaagcgctacatggacgactacatcttcacctacatcggctccgtcctcatctccgtcaaccccttcaagcagatgccctacttcggcgagaaggagatcgagatgtaccagggcgccgcccagtacgagaaccccccccacatctacgccctcgccgacaacatgtaccgcaacatgatcatcgaccgcgagaaccagtgcgtcatcatctccggcgagtccggcgccggcaagaccgtcgccgccaagtacatcatgtcctacatctcccgcgtctccggcggcggcaccaaggtccagcacgtcaaggacatcatcctccagtccaaccccctcctcgaggccttcggcaacgccaagaccgtccgcaacaacaactcctcccgcttcggcaagtacttcgagatccagttctcccccggcggcgagcccgacggcggcaagatctccaacttcctcctcgagaagtcccgcgtcgtcatgcgcaaccccggcgagcgctccttccacatcttctaccagctcatcgagggcgcctccgccgagcagaagcactccctcggcatcacctccatggactactactactacctctccctctccggctcctacaaggtcgacgacatcgacgaccgccgcgagttccaggagaccctccacgccatgaacgtcatcggcatcttcgccgaggagcagaccctcgtcctccagatcgtcgccggcatcctccacctcggcaacatctccttcaaggaggtcggcaactacgccgccgtcgagtccgaggagttcctcgccttccccgcctacctcctcggcatcaaccaggaccgcctcaaggagaagctcacctcccgccagatggactccaagtggggcggcaagtccgagtccatccacgtcaccctcaacgtcgagcaggcctgctacacccgcgacgccctcgccaaggccctccacgcccgcgtcttcgacttcctcgtcgactccatcaacaaggccatggagaaggaccacgaggagtacaacatcggcgtcctcgacatctacggcttcgagatcttccagaagaacggcttcgagcagttctgcatcaacttcgtcaacgagaagctccagcagatcttcatcgagctcaccctcaaggccgagcaggaggagtacgtccaggagggcatccgctggacccccatcgagtacttcaacaacaagatcgtctgcgacctcatcgagaacaaggtcaacccccccggcatcatgtccatcctcgacgacgtctgcgccaccatgcacgccgtcggcgagggcgccgaccagaccctcctccagaagctccagatgcagatcggctcccacgagcacttcaactcctggaaccagggcttcatcatccaccactacgccggcaaggtctcctacgacatggacggcttctgcgagcgcaaccgcgacgtcctcttcatggacctcatcgagctcatgcagtcctccgagctccccttcatcaagtccctcttccccgagaacctccaggccgacaagaagggccgccccaccaccgccggctccaagatcaagaagcaggccaacgacctcgtctccaccctcatgaagtgcaccccccactacatccgctgcatcaagcccaacgagaccaagaagccccgcgactgggaggagtcccgcgtcaagcaccaggtcgagtacctcggcctcaaggagaacatccgcgtccgccgcgccggctacgcctaccgccgcatcttccagaagttcctccagcgctacgccatcctcaccaaggccacctggccctcctggcagggcgaggagaagcagggcgtcctccacctcctccagtccgtcaacatggactccgaccagttccagctcggccgctccaaggtcttcatcaaggcccccgagtccctcttcctcctcgaggagatgcgcgagcgcaagtacgacggctacgcccgcgtcatccagaagtcctggcgcaagttcgtcgcccgcaagaagtacgtccagatgcgcgaggaggcctccgacctcctcctcaacaagaaggagcgccgccgcaactccatcaaccgcaacttcatcggcgactacatcggcatggaggagcaccccgagctccagcagttcgtcggcaagcgcgagaagatcgacttcgccgacaccgtcaccaagtacgaccgccgcttcaagggcgtcaagcgcgacctcctcctcacccccaagtgcctctacctcatcggccgcgagaaggtcaagcagggccccgacaagggcctcgtcaaggaggtcctcaagcgcaagatcgagatcgagcgcatcctctccgtctccctctccaccatgcaggacgacatcttcatcctccacgagcaggagtacgactccctcctcgagtccgtcttcaagaccgagttcctctccctcctcgccaagcgctacgaggagaagacccagaagcagctccccctcaagttctccaacaccctcgagctcaagctcaagaaggagaactggggcccctggtccgccggcggctcccgccaggtccagttccaccagggcttcggcgacctcgccgtcctcaagccctccaacaaggtcctccaggtctccatcggccccggcctccccaagaactcccgccccacccgccgcaacaccacccagaacaccggctactcctccggcacccagaacgccaactaccccgtccgcgccgccccccccccccccggctaccaccagaacggcgtcatccgcaaccagtacgtcccctacccccacgcccccggctcccagcgctccaaccagaagtccctctacacctccatggcccgcccccccctcccccgccagcagtccacctcctccgaccgcgtctcccagacccccgagtccctcgacttcctcaaggtccccgaccagggcgccgccggcgtccgccgccagaccacctcccgccccccccccgccggcggccgccccaagccccagcccaagcccaagccccaggtcccccagtgcaaggccctctacgcctacgacgcccaggacaccgacgagctctccttcaacgccaacgacatcatcgacatcatcaaggaggacccctccggctggtggaccggccgcctccgcggcaagcagggcctcttccccaacaactacgtcaccaagatctga

SEQ ID NO: 2824 - RNA, 3327 nt, synthetic construct
  misc_feature 1..3327: note = derived and/or modified sequence opt3 fromMYO1E__Homo_sapiens__CCDS32254.1
  source 1..3327: mol_type = other RNA
atgggcagcaagggggtgtaccagtatcactggcaatcccataacgtcaaacactctggagttgacgatatggtgctgctctcaaagatcaccgagaatagtattgtagaaaaccttaaaaagagatacatggacgattatatattcacatacatcggtagcgtgctgatttccgtcaatccctttaaacagatgccttatttcggcgagaaggaaatcgagatgtaccagggggccgctcagtatgaaaacccaccgcatatttacgcattggccgacaatatgtacaggaacatgatcatagatcgggagaatcaatgcgtgatcatttctggagagtcgggcgcgggtaagactgttgctgccaaatatatcatgtcatacattagccgcgtgagtgggggaggcacgaaggtccagcacgtgaaagacatcatattacagtccaaccccctgctagaagcatttggcaatgccaagaccgtacgaaacaataactctagccgtttcgggaaatattttgagattcagttctcccctggaggtgaaccagatggcgggaagatctcaaattttctcctggagaagagtagagttgtgatgaggaaccccggagagcggagcttccatattttctaccaacttatcgaaggcgcttctgcagagcagaaacactccctgggtatcacatcaatggactattactattacttgagcctcagtgggtcttacaaggtcgatgacattgatgaccgcagagaatttcaggagactctgcacgccatgaatgtgataggaatctttgctgaggaacagaccctggtgctccaaattgtcgccggcatcttacatctgggcaacatatccttcaaagaggttgggaactatgcggcagtggaaagcgaggaatttcttgccttccctgcttacttgctgggaattaatcaggataggctaaaggagaaactcacatcgcggcagatggactctaagtggggtggcaaatccgaatcaatccacgtaaccctgaacgtggagcaagcctgttatactcgcgacgcacttgctaaggccctgcatgcgcgagtcttcgattttctcgtggacagtatcaataaggccatggagaaagatcacgaagagtacaacattggggttctcgacatctatggattcgaaatttttcagaagaatggcttcgagcagttttgcataaacttcgtgaatgaaaaactgcagcaaatctttattgagttaacactgaaggcagagcaggaagagtacgtccaggaaggtatcagatggaccccaatcgagtatttcaacaataaaattgtgtgtgatctcatagagaacaaggtaaatccccctgggatcatgagcattcttgacgatgtttgcgctacgatgcacgccgtgggcgaaggagctgaccagactctgttgcaaaagctacagatgcagatcggctcccatgagcactttaactcttggaatcaggggttcattatccatcactacgccggaaaagtcagctacgatatggacggtttttgtgaaaggaaccgggatgtgctgttcatggacctcatagagctgatgcaatcaagtgaacttccatttatcaagtccctgttcccggagaatttgcaggcagacaaaaagggccgtcccaccacagccgggagcaaaattaagaagcaggctaacgatctcgtctctactctgatgaaatgcacccctcattatatccgctgtattaagccaaacgagaccaaaaagcccagagactgggaagagtcaagggtgaaacaccaggttgaatacttaggactgaaggagaatatccgggtgcgacgcgcgggctatgcatacagaaggatattccaaaagtttctacagcggtatgccattctcacaaaagctacgtggcctagttggcagggtgaagagaagcaaggggtactgcaccttttgcagagcgtcaacatggattccgaccagttccagctgggccgctctaaagtgtttatcaaggccccagagtcgttgttcctgcttgaagagatgagagaaaggaaatacgatggatatgcacgtgttattcaaaagagctggcggaaatttgtggcccgaaagaagtacgtccagatgagagaggaggcttccgacctgttgctcaataaaaaggaaaggcgccggaactcaatcaatagaaacttcataggcgattacatcgggatggaggaacatcccgagctgcagcagtttgtgggaaaaagggaaaagattgacttcgccgatactgtaacaaaatatgaccgccgatttaagggtgtgaagcgggatttactgctaaccccgaaatgcctctacctgatcggccgtgagaaggttaaacaagggcctgacaagggacttgtcaaagaggtgttgaagagaaagattgaaatcgagaggatactgagtgtgtctctcagcactatgcaggatgacattttcatcctgcacgaacaggagtatgactccttactggaatcagtctttaaaacagagttccttagcttgctcgcaaagcgctacgaggagaaaacccagaagcaactgcccctaaaattttctaatacgctggaactcaagctgaagaaagaaaactggggcccatggtccgcgggtgggagtcggcaggttcagttccatcaaggcttcggagatcttgctgtgttgaagcctagcaataaagtgctgcaggtatctatcggccccgggttaccaaagaactccagacccaccaggcgaaatacaactcagaacaccggatattcaagtggcacacagaatgccaactaccctgtccgcgcagccccaccgccccctggttatcaccaaaatggggtgattcggaaccagtacgttccatacccccacgctcctggaagccagagatcgaaccagaaatccctctatacttctatggccaggccacccctgccgcgtcaacagagcacctcaagtgaccgcgtgtcccagacacctgagtctcttgattttctgaaggtcccagaccagggcgcagctggtgtgcggagacaaaccactagcaggccccctcccgccggcgggcgaccaaaacctcagcccaagccaaagccgcaggttcctcagtgtaaagcgttgtacgcctatgatgctcaagacacggatgaactctccttcaatgcaaacgacatcattgatataatcaaggaggacccctcaggatggtggacaggccggctgcgcgggaaacagggactatttccaaataactacgtgaccaagatttga

SEQ ID NO: 2825 - RNA, 3327 nt, synthetic construct
  misc_feature 1..3327: note = derived and/or modified sequence opt4 fromMYO1E__Homo_sapiens__CCDS32254.1
  source 1..3327: mol_type = other RNA
atgggcagcaagggcgtgtaccagtaccactggcagagccacaacgtgaagcacagcggcgtggacgacatggtgctgctgagcaagatcaccgagaacagcatcgtggagaacctgaagaagagatacatggacgactacatcttcacctacatcggcagcgtgctgatcagcgtgaaccccttcaagcagatgccctacttcggcgagaaggagatcgagatgtaccagggcgccgcccagtacgagaaccccccccacatctacgccctggccgacaacatgtacagaaacatgatcatcgacagagagaaccagtgcgtgatcatcagcggcgagagcggcgccggcaagaccgtggccgccaagtacatcatgagctacatcagcagagtgagcggcggcggcaccaaggtgcagcacgtgaaggacatcatcctgcagagcaaccccctgctggaggccttcggcaacgccaagaccgtgagaaacaacaacagcagcagattcggcaagtacttcgagatccagttcagccccggcggcgagcccgacggcggcaagatcagcaacttcctgctggagaagagcagagtggtgatgagaaaccccggcgagagaagcttccacatcttctaccagctgatcgagggcgccagcgccgagcagaagcacagcctgggcatcaccagcatggactactactactacctgagcctgagcggcagctacaaggtggacgacatcgacgacagaagagagttccaggagaccctgcacgccatgaacgtgatcggcatcttcgccgaggagcagaccctggtgctgcagatcgtggccggcatcctgcacctgggcaacatcagcttcaaggaggtgggcaactacgccgccgtggagagcgaggagttcctggccttccccgcctacctgctgggcatcaaccaggacagactgaaggagaagctgaccagcagacagatggacagcaagtggggcggcaagagcgagagcatccacgtgaccctgaacgtggagcaggcctgctacaccagagacgccctggccaaggccctgcacgccagagtgttcgacttcctggtggacagcatcaacaaggccatggagaaggaccacgaggagtacaacatcggcgtgctggacatctacggcttcgagatcttccagaagaacggcttcgagcagttctgcatcaacttcgtgaacgagaagctgcagcagatcttcatcgagctgaccctgaaggccgagcaggaggagtacgtgcaggagggcatcagatggacccccatcgagtacttcaacaacaagatcgtgtgcgacctgatcgagaacaaggtgaacccccccggcatcatgagcatcctggacgacgtgtgcgccaccatgcacgccgtgggcgagggcgccgaccagaccctgctgcagaagctgcagatgcagatcggcagccacgagcacttcaacagctggaaccagggcttcatcatccaccactacgccggcaaggtgagctacgacatggacggcttctgcgagagaaacagagacgtgctgttcatggacctgatcgagctgatgcagagcagcgagctgcccttcatcaagagcctgttccccgagaacctgcaggccgacaagaagggcagacccaccaccgccggcagcaagatcaagaagcaggccaacgacctggtgagcaccctgatgaagtgcaccccccactacatcagatgcatcaagcccaacgagaccaagaagcccagagactgggaggagagcagagtgaagcaccaggtggagtacctgggcctgaaggagaacatcagagtgagaagagccggctacgcctacagaagaatcttccagaagttcctgcagagatacgccatcctgaccaaggccacctggcccagctggcagggcgaggagaagcagggcgtgctgcacctgctgcagagcgtgaacatggacagcgaccagttccagctgggcagaagcaaggtgttcatcaaggcccccgagagcctgttcctgctggaggagatgagagagagaaagtacgacggctacgccagagtgatccagaagagctggagaaagttcgtggccagaaagaagtacgtgcagatgagagaggaggccagcgacctgctgctgaacaagaaggagagaagaagaaacagcatcaacagaaacttcatcggcgactacatcggcatggaggagcaccccgagctgcagcagttcgtgggcaagagagagaagatcgacttcgccgacaccgtgaccaagtacgacagaagattcaagggcgtgaagagagacctgctgctgacccccaagtgcctgtacctgatcggcagagagaaggtgaagcagggccccgacaagggcctggtgaaggaggtgctgaagagaaagatcgagatcgagagaatcctgagcgtgagcctgagcaccatgcaggacgacatcttcatcctgcacgagcaggagtacgacagcctgctggagagcgtgttcaagaccgagttcctgagcctgctggccaagagatacgaggagaagacccagaagcagctgcccctgaagttcagcaacaccctggagctgaagctgaagaaggagaactggggcccctggagcgccggcggcagcagacaggtgcagttccaccagggcttcggcgacctggccgtgctgaagcccagcaacaaggtgctgcaggtgagcatcggccccggcctgcccaagaacagcagacccaccagaagaaacaccacccagaacaccggctacagcagcggcacccagaacgccaactaccccgtgagagccgccccccccccccccggctaccaccagaacggcgtgatcagaaaccagtacgtgccctacccccacgcccccggcagccagagaagcaaccagaagagcctgtacaccagcatggccagaccccccctgcccagacagcagagcaccagcagcgacagagtgagccagacccccgagagcctggacttcctgaaggtgcccgaccagggcgccgccggcgtgagaagacagaccaccagcagacccccccccgccggcggcagacccaagccccagcccaagcccaagccccaggtgccccagtgcaaggccctgtacgcctacgacgcccaggacaccgacgagctgagcttcaacgccaacgacatcatcgacatcatcaaggaggaccccagcggctggtggaccggcagactgagaggcaagcagggcctgttccccaacaactacgtgaccaagatctga

SEQ ID NO: 2826 - RNA, 3327 nt, synthetic construct
  misc_feature 1..3327: note = derived and/or modified sequence opt5 fromMYO1E__Homo_sapiens__CCDS32254.1
  source 1..3327: mol_type = other RNA
atgggcagcaagggggtgtaccagtatcactggcaatcccataacgtcaaacactctggagttgacgatatggtgctgctcagcaagatcaccgaaaattccattgtggaaaacctgaaaaagagatacatggacgattatatcttcacatacattggctctgtccttatcagcgtgaatccctttaaacagatgccttatttcggggagaaggaaattgagatgtaccagggagccgctcagtatgaaaacccgccccatatctacgccctggcggacaatatgtaccggaacatgatcattgatcgcgagaatcaatgcgttatcatttccggcgagtctggggctggaaagacggtggccgccaaatatatcatgagctacatttccagagtcagcggcggcgggaccaaggtgcagcacgttaaagacatcattctccagtctaaccctctgcttgaggcttttggaaatgccaagacagtgcggaacaataactccagccgcttcggcaaatattttgagatccagttctctcccgggggagaacctgatggcgggaagatctccaattttctgctcgaaaagagcagagtcgtgatgcggaaccccggagagcgctctttccatatcttttaccaactgattgaaggcgcttccgccgagcagaaacacagcctgggcattacctccatggactattactattacctctctctgagcgggtcctacaaggtggatgacatcgatgacagacgggagttccaggagacacttcacgcgatgaatgtcattggaatctttgccgaggaacagaccctggttctccaaatcgtggctggcattctgcatcttgggaacatcagcttcaaagaggtgggaaactatgccgctgtcgaatctgaggaatttctggccttccctgcgtacctcctgggcattaatcaggatcgcctgaaggagaaactcacatccagacagatggacagcaagtggggagggaaatctgaaagcatccacgtgaccctgaacgttgagcaagcctgttatacgcgggacgctcttgccaaggctctgcatgcccgcgtgttcgattttctcgtcgactccattaataaggccatggagaaagatcacgaagagtacaacatcggcgtgctggacatctatggcttcgaaatttttcagaagaatgggttcgagcagttttgcatcaacttcgttaatgaaaaacttcagcaaatttttatcgagctgaccctcaaggctgagcaggaagagtacgtgcaggaaggaattagatggacaccgatcgagtatttcaacaataaaattgtctgtgatctgatcgagaacaaggtgaatccccctggcatcatgtctattctggacgatgtctgcgcgaccatgcacgccgtgggggaaggagctgaccagacactcctgcaaaaacttcagatgcagatcggcagccatgagcactttaactcctggaatcaggggttcattatccatcactacgccggcaaagttagctacgatatggacggattttgtgaacggaaccgcgatgtgctgttcatggacctcattgagctgatgcaatcttccgaacttccctttatcaagagcctgttccctgagaatctccaggccgacaaaaagggcagacccaccacggctgggtctaaaatcaagaagcaggccaacgatctggtctccacactgatgaaatgcaccccgcattatattcggtgtatcaagcctaacgagacaaagaagcccagagactgggaagagagccgcgtgaaacaccaggttgaatacctcggactgaaggagaatattcgggtgagacgcgcgggctatgcttaccggagaatcttccaaaagtttcttcagcgctatgccattctgaccaaagccacctggccttcctggcagggggaagagaagcaaggagtcctccatctgctgcagtctgtgaacatggatagcgaccagttccagcttggccggtccaaagtgtttatcaaggctcccgagtctctcttcctgctggaagagatgagagaacgcaaatacgatgggtatgcccgggttatccaaaagagctggagaaaatttgtcgctcgcaagaagtacgtgcagatgcgggaggaagcctccgacctcctgcttaataaaaaggagagacggcgcaacagcattaatagaaacttcatcggcgattacattggaatggaggaacaccccgagctgcagcagtttgtgggcaaacgggaaaagatcgacttcgcggatacagtcacgaaatatgacagacgctttaagggggtgaagcgggatctcctgctgacccctaaatgcctttacctcattggaagagagaaggttaaacaaggcccggacaaggggctggtgaaagaggtcctgaagcgcaagatcgaaatcgagcggattctctctgtgtccctgagcacaatgcaggatgacatcttcattcttcacgaacaggagtatgactctctgctcgaatccgtttttaaaaccgagttcctgagcctgcttgccaagagatacgaggagaaaacacagaagcaactccccctgaaattttctaataccctggaactcaagctgaagaaagaaaactggggaccttggagcgctggcgggtcccgccaggtgcagttccatcaaggcttcggagatcttgccgtcctgaagcccagcaataaagtgctccaggtttctatcggccctgggctgcccaagaactccagaccgacgcggcgcaatacaacccagaacaccggatatagctccggcacacagaatgctaactaccctgtgagagccgcgccccctccccctgggtatcaccaaaatggagtcattcggaaccagtacgtgccctacccgcacgcccctggctctcagcgcagcaaccagaaatccctgtatacctctatggctagacctccccttccccggcaacagagcacatcctctgaccgcgtgagccagacgccggagtccctcgattttctgaaggtccccgaccagggggccgctggcgttagacggcaaaccacaagcagacctccccctgccggaggccgccccaaacctcagcccaagccgaagcctcaggtgccccagtgtaaagccctgtacgcttatgatgcgcaagacaccgatgaactctctttcaatgccaacgacatcattgatatcatcaaggaggacccttccgggtggtggacaggacggctgagaggcaaacaggggctttttcccaataactacgtgaccaagatttga

SEQ ID NO: 2827 - protein, 1098 aa, synthetic construct
  REGION 1..1098: note = MYO1F__Homo_sapiens__O00160
MGSKERFHWQSHNVKQSGVDDMVLLPQITEDAIAANLRKRFMDDYIFTYIGSVLISVNPFKQMPYFTDREIDLYQGAAQYENPPHIYALTDNMYRNMLIDCENQCVIISGESGAGKTVAAKYIMGYISKVSGGGEKVQHVKDIILQSNPLLEAFGNAKTVRNNNSSRFGKYFEIQFSRGGEPDGGKISNFLLEKSRVVMQNENERNFHIYYQLLEGASQEQRQNLGLMTPDYYYYLNQSDTYQVDGTDDRSDFGETLSAMQVIGIPPSIQQLVLQLVAGILHLGNISFCEDGNYARVESVDLLAFPAYLLGIDSGRLQEKLTSRKMDSRWGGRSESINVTLNVEQAAYTRDALAKGLYARLFDFLVEAINRAMQKPQEEYSIGVLDIYGFEIFQKNGFEQFCINFVNEKLQQIFIELTLKAEQEEYVQEGIRWTPIQYFNNKVVCDLIENKLSPPGIMSVLDDVCATMHATGGGADQTLLQKLQAAVGTHEHFNSWSAGFVIHHYAGKVSYDVSGFCERNRDVLFSDLIELMQTSEQAFLRMLFPEKLDGDKKGRPSTAGSKIKKQANDLVATLMRCTPHYIRCIKPNETKRPRDWEENRVKHQVEYLGLKENIRVRRAGFAYRRQFAKFLQRYAILTPETWPRWRGDERQGVQHLLRAVNMEPDQYQMGSTKVFVKNPESLFLLEEVRERKFDGFARTIQKAWRRHVAVRKYEEMREEASNILLNKKERRRNSINRNFVGDYLGLEERPELRQFLGKRERVDFADSVTKYDRRFKPIKRDLILTPKCVYVIGREKVKKGPEKGQVCEVLKKKVDIQALRGVSLSTRQDDFFILQEDAADSFLESVFKTEFVSLLCKRFEEATRRPLPLTFSDTLQFRVKKEGWGGGGTRSVTFSRGFGDLAVLKVGGRTLTVSVGDGLPKSSKPTRKGMAKGKPRRSSQAPTRAAPAPPRGMDRNGVPPSARGGPLPLEIMSGGGTHRPPRGPPSTSLGASRRPRARPPSEHNTEFLNVPDQGMAGMQRKRSVGQRPVPGVGRPKPQPRTHGPRCRALYQYVGQDVDELSFNVNEVIEILMEDPSGWWKGRLHGQEGLFPGNYVEKI

SEQ ID NO: 2828 - RNA, 3297 nt, synthetic construct
  misc_feature 1..3297: note = MYO1F__Homo_sapiens__AAH28071
  source 1..3297: mol_type = other RNA
atgggcagcaaggagcgcttccactggcagagccacaacgtgaagcagagcggcgtggatgacatggtgcttcttccccagatcaccgaagacgccattgccgccaacctccggaagcgcttcatggacgactacatcttcacctacatcggctctgtgctcatctctgtaaaccccttcaagcagatgccctacttcaccgaccgtgagatcgacctctatcagggcgcggcccagtatgagaatcccccgcacatctacgccctcacggacaacatgtaccggaacatgcttatcgactgtgagaaccagtgtgtcatcattagtggagagagtggagctgggaagacagtggcagccaaatatatcatgggctacatctccaaggtgtctggcggaggcgagaaggtccagcacgtcaaagatatcatcctgcagtccaacccgctgctcgaggccttcggcaacgccaagactgtgcgcaacaacaattccagccgctttggcaagtactttgagatccagttcagccgaggtggggagccagatgggggcaagatctccaacttcttgctggagaagtcccgcgtggtcatgcaaaatgaaaatgagaggaacttccacatctactaccagctgctggaaggggcctcccaggagcaaaggcagaacctgggcctcatgacaccggactactattactacctcaaccaatcggacacctaccaggtggacggcacggacgacagaagcgactttggtgagactctgagtgctatgcaggttattgggatcccgcccagcatccagcagctggtcctgcagctcgtggcggggatcttgcacctggggaacatcagtttctgtgaagacgggaattacgcccgagtggagagtgtggacctcctggcctttcccgcctacctgctgggcattgacagcgggcgactgcaggagaagctgaccagccgcaagatggacagccgctggggcgggcgcagcgagtccatcaatgtgaccctcaacgtggagcaggcagcctacacccgtgatgccctggccaaggggctctatgcccgcctcttcgacttcctcgtggaggccatcaaccgtgctatgcagaaaccccaggaagagtacagcatcggtgtgctggacatttacggcttcgagatcttccagaaaaatggcttcgagcagttttgcatcaacttcgtcaatgagaagctgcagcaaatctttatcgaacttaccctgaaggccgagcaggaggagtatgtgcaggaaggcatccgctggactccaatccagtacttcaacaacaaggtcgtctgtgacctcatcgaaaacaagctgagccccccaggcatcatgagcgtcttggacgacgtgtgcgccaccatgcacgccacgggcgggggagcagaccagacactgctgcagaagctgcaggcggctgtggggacccacgagcatttcaacagctggagcgccggcttcgtcatccaccactacgctggcaaggtctcctacgacgtcagcggcttctgcgagaggaaccgagacgttctcttctccgacctcatagagctgatgcagaccagtgagcaggccttcctccggatgctcttccccgagaagctggatggagacaagaaggggcgccccagcaccgccggctccaagatcaagaaacaagccaacgacctggtggccacactgatgaggtgcacaccccactacatccgctgcatcaaacccaacgagaccaagaggccccgagactgggaggagaacagagtcaagcaccaggtggaatacctgggcctgaaggagaacatcagggtgcgcagagccggcttcgcctaccgccgccagttcgccaaattcctgcagaggtatgccattctgacccccgagacgtggccgcggtggcgtggggacgaacgccagggcgtccagcacctgcttcgggcggtcaacatggagcccgaccagtaccagatggggagcaccaaggtctttgtcaagaacccagagtcgcttttcctcctggaggaggtgcgagagcgaaagttcgatggctttgcccgaaccatccagaaggcctggcggcgccacgtggctgtccggaagtacgaggagatgcgggaggaagcttccaacatcctgctgaacaagaaggagcggaggcgcaacagcatcaatcggaacttcgtcggggactacctggggctggaggagcggcccgagctgcgtcagttcctgggcaagagggagcgggtggacttcgccgattcggtcaccaagtacgaccgccgcttcaagcccatcaagcgggacttgatcctgacgcccaagtgtgtgtatgtgattgggcgagagaaagtgaagaagggacctgagaagggccaggtgtgtgaagtcttgaagaagaaagtggacatccaggctctgcggggagtctccctcagcacgcgacaggacgacttcttcatcctccaagaggatgccgccgacagcttcctggagagcgtcttcaagaccgagtttgtcagccttctgtgcaagcgcttcgaggaggcgacgcggaggcccctgcccctcaccttcagcgacacactacagtttcgggtgaagaaggagggctggggcggtggcggcacccgcagcgtcaccttctcccgcggcttcggcgacttggcagtgctcaaggttggcggtcggaccctcacggtcagcgtgggcgatgggctgcccaagagctccaagcctacgcggaagggaatggccaagggaaaacctcggaggtcgtcccaagcccctacccgggcggcccctgcgccccccagaggcatggatcgcaatggggtgcccccctctgccagagggggccccctgcccctggagatcatgtctggagggggcacccacaggcctccccggggccctccgtccacatccctgggagccagcagacgaccccgggcacgtccgccctcagagcacaacacagaattcctcaacgtgcctgaccagggcatggccggcatgcagaggaagcgcagcgtggggcaacggccagtgcctggtgtgggccgacccaagccccagcctcggacacatggtcccaggtgccgggccctataccagtacgtgggccaagatgtggacgagctgagcttcaacgtgaacgaggtcattgagatcctcatggaagatccctcgggctggtggaagggccggcttcacggccaggagggccttttcccaggaaactacgtggagaagatctga

SEQ ID NO: 2829 - RNA, 3297 nt, synthetic construct
  misc_feature 1..3297: note = derived and/or modified sequence opt1 fromMYO1F__Homo_sapiens__AAH28071
  source 1..3297: mol_type = other RNA
atgggcagcaaggagcgcttccactggcagtcccacaacgtgaagcagagcggggtcgacgacatggtgctgctcccccagatcaccgaggacgccatcgccgcgaacctgcggaagcgcttcatggacgactacatcttcacctacatcggctccgtgctgatcagcgtcaacccgttcaagcagatgccctacttcacggaccgggagatcgacctctaccagggggccgcccagtacgagaacccgccccacatctacgccctgaccgacaacatgtaccgcaacatgctgatcgactgcgagaaccagtgcgtgatcatctccggcgagagcggggccggcaagaccgtggcggccaagtacatcatgggctacatctccaaggtcagcgggggcggggagaaggtgcagcacgtgaaggacatcatcctccagtccaaccccctgctggaggccttcggcaacgccaagaccgtccggaacaacaacagctcccgcttcgggaagtacttcgagatccagttcagccggggcggcgagcccgacgggggcaagatctccaacttcctcctggagaagtcccgcgtggtgatgcagaacgagaacgagcggaacttccacatctactaccagctgctcgagggggcgtcccaggagcagcgccagaacctgggcctgatgacgcccgactactactactacctcaaccagagcgacacctaccaggtcgacggcaccgacgaccggtccgacttcggggagaccctgagcgccatgcaggtcatcggcatcccgccctccatccagcagctggtgctccagctggtcgccgggatcctgcacctcggcaacatcagcttctgcgaggacgggaactacgcccgcgtggagagcgtggacctgctggccttccccgcgtacctcctgggcatcgactccggccggctgcaggagaagctcacgagccgcaagatggactcccggtggggcgggcgcagcgagtccatcaacgtcaccctgaacgtggagcaggccgcctacacccgggacgccctggccaaggggctctacgcgcgcctgttcgacttcctggtggaggccatcaaccgggccatgcagaagccccaggaggagtacagcatcggcgtgctcgacatctacgggttcgagatcttccagaagaacggcttcgagcagttctgcatcaacttcgtgaacgagaagctgcagcagatcttcatcgagctgaccctcaaggccgagcaggaggagtacgtgcaggagggcatccgctggacgcccatccagtacttcaacaacaaggtcgtgtgcgacctgatcgagaacaagctgagcccgcccgggatcatgagcgtcctcgacgacgtgtgcgccaccatgcacgcgaccggcgggggcgccgaccagaccctgctgcagaagctccaggccgccgtggggacgcacgagcacttcaactcctggagcgccggcttcgtcatccaccactacgcgggcaaggtgtcctacgacgtgagcgggttctgcgagcggaaccgcgacgtcctgttctccgacctgatcgagctcatgcagaccagcgagcaggccttcctgcgcatgctgttccccgagaagctcgacggcgacaagaaggggcggccctccaccgccggcagcaagatcaagaagcaggccaacgacctggtggcgaccctgatgcgctgcacgccgcactacatccggtgcatcaagcccaacgagaccaagcgcccccgggactgggaggagaaccgcgtgaagcaccaggtcgagtacctgggcctcaaggagaacatccgggtgcgccgggccgggttcgcctaccgccggcagttcgccaagttcctgcagcgctacgccatcctgacccccgagacctggccgcggtggcgcggcgacgagcggcagggggtgcagcacctcctgcgcgcggtcaacatggagcccgaccagtaccagatgggctccacgaaggtgttcgtgaagaaccccgagagcctgttcctcctggaggaggtccgggagcgcaagttcgacgggttcgcccggaccatccagaaggcctggcgccgccacgtggccgtgcggaagtacgaggagatgcgcgaggaggcctccaacatcctgctcaacaagaaggagcggcgccggaacagcatcaaccgcaacttcgtcggcgactacctgggcctggaggagcggcccgagctccgccagttcctggggaagcgggagcgcgtggacttcgcggacagcgtgaccaagtacgaccggcgcttcaagccgatcaagcgggacctgatcctcacccccaagtgcgtctacgtgatcggccgcgagaaggtgaagaaggggcccgagaagggccaggtctgcgaggtgctgaagaagaaggtggacatccaggccctgcgcggggtctccctcagcacgcggcaggacgacttcttcatcctgcaggaggacgccgccgactccttcctggagagcgtgttcaagaccgagttcgtgtccctcctgtgcaagcggttcgaggaggccacccgccggcccctgccgctcaccttcagcgacacgctgcagttccgcgtcaagaaggagggctggggcgggggcgggacccggtccgtgaccttcagccgcggcttcggggacctggcggtgctcaaggtcggcggccgcaccctgacggtgtccgtgggggacggcctgcccaagagctccaagcccacccggaaggggatggccaagggcaagccgcgccggagctcccaggcccccacccgcgccgcgcccgcgcccccgcgggggatggaccgcaacggcgtcccgcccagcgcccggggcgggcccctccccctggagatcatgtccggcgggggcacccaccgcccgccccggggcccgcccagcacctccctgggggccagccgccggccccgcgcccggccgcccagcgagcacaacacggagttcctcaacgtgcccgaccagggcatggccgggatgcagcgcaagcggtccgtgggccagcgccccgtccccggggtgggccggcccaagccccagccccgcacccacggcccccggtgccgcgccctgtaccagtacgtggggcaggacgtcgacgagctgagcttcaacgtgaacgaggtgatcgagatcctcatggaggacccctccggctggtggaaggggcgcctgcacggccaggaggggctgttcccgggcaactacgtcgagaagatctga

SEQ ID NO: 2830 - RNA, 3297 nt, synthetic construct
  misc_feature 1..3297: note = derived and/or modified sequence opt2 fromMYO1F__Homo_sapiens__AAH28071
  source 1..3297: mol_type = other RNA
atgggctccaaggagcgcttccactggcagtcccacaacgtcaagcagtccggcgtcgacgacatggtcctcctcccccagatcaccgaggacgccatcgccgccaacctccgcaagcgcttcatggacgactacatcttcacctacatcggctccgtcctcatctccgtcaaccccttcaagcagatgccctacttcaccgaccgcgagatcgacctctaccagggcgccgcccagtacgagaaccccccccacatctacgccctcaccgacaacatgtaccgcaacatgctcatcgactgcgagaaccagtgcgtcatcatctccggcgagtccggcgccggcaagaccgtcgccgccaagtacatcatgggctacatctccaaggtctccggcggcggcgagaaggtccagcacgtcaaggacatcatcctccagtccaaccccctcctcgaggccttcggcaacgccaagaccgtccgcaacaacaactcctcccgcttcggcaagtacttcgagatccagttctcccgcggcggcgagcccgacggcggcaagatctccaacttcctcctcgagaagtcccgcgtcgtcatgcagaacgagaacgagcgcaacttccacatctactaccagctcctcgagggcgcctcccaggagcagcgccagaacctcggcctcatgacccccgactactactactacctcaaccagtccgacacctaccaggtcgacggcaccgacgaccgctccgacttcggcgagaccctctccgccatgcaggtcatcggcatccccccctccatccagcagctcgtcctccagctcgtcgccggcatcctccacctcggcaacatctccttctgcgaggacggcaactacgcccgcgtcgagtccgtcgacctcctcgccttccccgcctacctcctcggcatcgactccggccgcctccaggagaagctcacctcccgcaagatggactcccgctggggcggccgctccgagtccatcaacgtcaccctcaacgtcgagcaggccgcctacacccgcgacgccctcgccaagggcctctacgcccgcctcttcgacttcctcgtcgaggccatcaaccgcgccatgcagaagccccaggaggagtactccatcggcgtcctcgacatctacggcttcgagatcttccagaagaacggcttcgagcagttctgcatcaacttcgtcaacgagaagctccagcagatcttcatcgagctcaccctcaaggccgagcaggaggagtacgtccaggagggcatccgctggacccccatccagtacttcaacaacaaggtcgtctgcgacctcatcgagaacaagctctccccccccggcatcatgtccgtcctcgacgacgtctgcgccaccatgcacgccaccggcggcggcgccgaccagaccctcctccagaagctccaggccgccgtcggcacccacgagcacttcaactcctggtccgccggcttcgtcatccaccactacgccggcaaggtctcctacgacgtctccggcttctgcgagcgcaaccgcgacgtcctcttctccgacctcatcgagctcatgcagacctccgagcaggccttcctccgcatgctcttccccgagaagctcgacggcgacaagaagggccgcccctccaccgccggctccaagatcaagaagcaggccaacgacctcgtcgccaccctcatgcgctgcaccccccactacatccgctgcatcaagcccaacgagaccaagcgcccccgcgactgggaggagaaccgcgtcaagcaccaggtcgagtacctcggcctcaaggagaacatccgcgtccgccgcgccggcttcgcctaccgccgccagttcgccaagttcctccagcgctacgccatcctcacccccgagacctggccccgctggcgcggcgacgagcgccagggcgtccagcacctcctccgcgccgtcaacatggagcccgaccagtaccagatgggctccaccaaggtcttcgtcaagaaccccgagtccctcttcctcctcgaggaggtccgcgagcgcaagttcgacggcttcgcccgcaccatccagaaggcctggcgccgccacgtcgccgtccgcaagtacgaggagatgcgcgaggaggcctccaacatcctcctcaacaagaaggagcgccgccgcaactccatcaaccgcaacttcgtcggcgactacctcggcctcgaggagcgccccgagctccgccagttcctcggcaagcgcgagcgcgtcgacttcgccgactccgtcaccaagtacgaccgccgcttcaagcccatcaagcgcgacctcatcctcacccccaagtgcgtctacgtcatcggccgcgagaaggtcaagaagggccccgagaagggccaggtctgcgaggtcctcaagaagaaggtcgacatccaggccctccgcggcgtctccctctccacccgccaggacgacttcttcatcctccaggaggacgccgccgactccttcctcgagtccgtcttcaagaccgagttcgtctccctcctctgcaagcgcttcgaggaggccacccgccgccccctccccctcaccttctccgacaccctccagttccgcgtcaagaaggagggctggggcggcggcggcacccgctccgtcaccttctcccgcggcttcggcgacctcgccgtcctcaaggtcggcggccgcaccctcaccgtctccgtcggcgacggcctccccaagtcctccaagcccacccgcaagggcatggccaagggcaagccccgccgctcctcccaggcccccacccgcgccgcccccgcccccccccgcggcatggaccgcaacggcgtccccccctccgcccgcggcggccccctccccctcgagatcatgtccggcggcggcacccaccgccccccccgcggccccccctccacctccctcggcgcctcccgccgcccccgcgcccgccccccctccgagcacaacaccgagttcctcaacgtccccgaccagggcatggccggcatgcagcgcaagcgctccgtcggccagcgccccgtccccggcgtcggccgccccaagccccagccccgcacccacggcccccgctgccgcgccctctaccagtacgtcggccaggacgtcgacgagctctccttcaacgtcaacgaggtcatcgagatcctcatggaggacccctccggctggtggaagggccgcctccacggccaggagggcctcttccccggcaactacgtcgagaagatctga

SEQ ID NO: 2831 - RNA, 3297 nt, synthetic construct
  misc_feature 1..3297: note = derived and/or modified sequence opt3 fromMYO1F__Homo_sapiens__AAH28071
  source 1..3297: mol_type = other RNA
atgggcagcaaggagagattccactggcagtcccataacgtgaaacaatctggggtcgacgatatggttctgctcccccagatcaccgaagacgccattgctgcaaatcttaggaagcggtttatggatgactacatattcacatatatcggatcagtgctgattagtgtaaacccttttaaacagatgccatacttcactgatcgcgagatcgacttgtatcagggtgccgcgcaatacgaaaatccgccccacatttatgctttaacggataacatgtaccgaaatatgctgatcgactgcgagaaccagtgtgtgataatcagcggcgaatccggggccggaaagaccgtcgcagccaaatatattatgggctacatctctaaggtgtcgggtgggggagagaaggttcagcatgtgaaagatattatcctacagtcaaatcctctcctggaggcttttggcaacgcaaagacagtccgtaataacaatagcagtagattcggcaaatactttgaaatacaattctccaggggaggagagccagacggtggcaagatttctaactttcttctggagaaaagccgggtggtaatgcagaatgaaaacgagcgcaatttccacatctattaccagttgctcgaaggggcctcccaggagcaaagacagaacctgggactgatgactcccgattattactattacctcaaccagtcagacacctatcaagttgatggcacagacgacaggagtgattttggtgaaaccttaagcgctatgcaagtgattgggatccctccatctatccagcagctggtccttcagttggtggccgggattctgcatctaggcaatatatccttctgcgaggacggcaactacgcgcgggtggaatcagtcgatctcctggcatttcccgcctaccttctggggatcgacagcggacgcttgcaggagaagctcacttcacgaaagatggattctagatggggtggcaggtccgagagcattaatgttacactgaacgtggaacaggctgcctatacccgggacgcattagctaaagggctgtacgcccgtctcttcgatttccttgtagaggcgatcaatcgcgccatgcagaagcctcaagaagagtattcgataggagtgctggacatttacggctttgaaatcttccagaaaaacggttttgagcagttctgtatcaattttgtcaacgagaagttgcagcaaattttcatcgaactaacgctgaaagcagagcaggaagagtatgtgcaggaagggattagatggactccaatacagtactttaataacaaggttgtgtgcgatctcatcgagaataaactgtctccgcccggcattatgtccgtccttgacgatgtgtgtgctaccatgcacgccacaggaggcggggctgaccaaactctgttgcagaagctccaggccgcagtaggaacccacgagcatttcaactcatggagtgccggttttgttatccaccattatgctggcaaggtgagctacgacgtctccgggttctgcgaaaggaatcgggatgtgctgttttctgacttaatcgagctgatgcaaacaagcgaacaggcgttcctacgaatgctctttcctgagaaactggatggagacaagaaaggccgcccatcaaccgcaggtagtaagattaaaaagcaggccaacgatcttgtcgctacgttgatgagatgtactccccactacataaggtgcatcaagcctaatgagacaaaacggccacgcgactgggaagagaacagagtgaagcaccaggttgaatatctggggctcaaagagaacattagggtgcgtcgggccggcttcgcataccgaagacaattcgccaagtttctgcagaggtatgctatccttacccccgaaacttggccgcgctggcggggagatgagagacagggcgtacagcatctgttgagggccgtcaatatggagcctgaccaataccagatggggtccacaaaagtgttcgttaagaaccccgaaagcctctttctgttagaggaagtgcgcgagcgaaagttcgatggatttgcacggaccattcagaaagcgtggcgtagacacgtcgctgtgaggaagtatgaagagatgcgcgaggaagcctctaatatcctgctaaacaaaaaggagcggagaaggaatagtataaaccgaaatttcgtaggtgactacctcggcctggaggaacgcccagaacttcggcagtttttggggaaaagagagagggtggatttcgcagacagtgttacgaagtatgatcgtcgctttaagcctatcaaacgggacctgattctcacccccaagtgtgtctacgtgatcggaagagagaaagtgaagaaaggcccagaaaagggtcaagtctgcgaggttctgaaaaagaaggtggacattcaggccttacgaggggtgagcctgtccacaaggcaggatgacttctttatccttcaagaagatgctgccgactctttcttggagtcggtatttaaaactgagttcgtcagcctcctgtgtaagcggttcgaagaggcaacccgcagacccctacctctgacattttccgatactctccagttcagggtgaaaaaggaaggctggggaggcgggggaacccggtcagttacatttagtcgaggcttcggtgacctggctgtgcttaaagtcgggggaagaaccttgactgtgtctgttggcgatggtctgccaaagagctccaagccgacgcgcaaaggcatggccaaggggaaacccaggcgttcaagccaggcgcctacacgggccgctccagcaccccctagaggaatggacaggaacggcgtgccaccctctgcccgcgggggaccgttacctctcgagataatgtccggcggtgggacccatcgaccacccagaggacctcccagtactagcctgggcgcttctcggaggccacgcgcccgtcctccctccgaacacaataccgagtttcttaacgtaccagatcagggtatggcaggcatgcaaagaaagcggtcagtcgggcagaggccggtgcctggagtgggccgccccaaaccacagccccgaacacatgggcctagatgccgggcgctgtaccagtatgtcggacaagacgttgatgagttgagtttcaatgtgaacgaagtaattgagatcctcatggaagacccaagcggctggtggaagggtaggctgcacgggcaggagggactatttcccggcaattacgtggaaaagatttga

SEQ ID NO: 2832 - RNA, 3297 nt, synthetic construct
  misc_feature 1..3297: note = derived and/or modified sequence opt4 fromMYO1F__Homo_sapiens__AAH28071
  source 1..3297: mol_type = other RNA
atgggcagcaaggagagattccactggcagagccacaacgtgaagcagagcggcgtggacgacatggtgctgctgccccagatcaccgaggacgccatcgccgccaacctgagaaagagattcatggacgactacatcttcacctacatcggcagcgtgctgatcagcgtgaaccccttcaagcagatgccctacttcaccgacagagagatcgacctgtaccagggcgccgcccagtacgagaaccccccccacatctacgccctgaccgacaacatgtacagaaacatgctgatcgactgcgagaaccagtgcgtgatcatcagcggcgagagcggcgccggcaagaccgtggccgccaagtacatcatgggctacatcagcaaggtgagcggcggcggcgagaaggtgcagcacgtgaaggacatcatcctgcagagcaaccccctgctggaggccttcggcaacgccaagaccgtgagaaacaacaacagcagcagattcggcaagtacttcgagatccagttcagcagaggcggcgagcccgacggcggcaagatcagcaacttcctgctggagaagagcagagtggtgatgcagaacgagaacgagagaaacttccacatctactaccagctgctggagggcgccagccaggagcagagacagaacctgggcctgatgacccccgactactactactacctgaaccagagcgacacctaccaggtggacggcaccgacgacagaagcgacttcggcgagaccctgagcgccatgcaggtgatcggcatcccccccagcatccagcagctggtgctgcagctggtggccggcatcctgcacctgggcaacatcagcttctgcgaggacggcaactacgccagagtggagagcgtggacctgctggccttccccgcctacctgctgggcatcgacagcggcagactgcaggagaagctgaccagcagaaagatggacagcagatggggcggcagaagcgagagcatcaacgtgaccctgaacgtggagcaggccgcctacaccagagacgccctggccaagggcctgtacgccagactgttcgacttcctggtggaggccatcaacagagccatgcagaagccccaggaggagtacagcatcggcgtgctggacatctacggcttcgagatcttccagaagaacggcttcgagcagttctgcatcaacttcgtgaacgagaagctgcagcagatcttcatcgagctgaccctgaaggccgagcaggaggagtacgtgcaggagggcatcagatggacccccatccagtacttcaacaacaaggtggtgtgcgacctgatcgagaacaagctgagcccccccggcatcatgagcgtgctggacgacgtgtgcgccaccatgcacgccaccggcggcggcgccgaccagaccctgctgcagaagctgcaggccgccgtgggcacccacgagcacttcaacagctggagcgccggcttcgtgatccaccactacgccggcaaggtgagctacgacgtgagcggcttctgcgagagaaacagagacgtgctgttcagcgacctgatcgagctgatgcagaccagcgagcaggccttcctgagaatgctgttccccgagaagctggacggcgacaagaagggcagacccagcaccgccggcagcaagatcaagaagcaggccaacgacctggtggccaccctgatgagatgcaccccccactacatcagatgcatcaagcccaacgagaccaagagacccagagactgggaggagaacagagtgaagcaccaggtggagtacctgggcctgaaggagaacatcagagtgagaagagccggcttcgcctacagaagacagttcgccaagttcctgcagagatacgccatcctgacccccgagacctggcccagatggagaggcgacgagagacagggcgtgcagcacctgctgagagccgtgaacatggagcccgaccagtaccagatgggcagcaccaaggtgttcgtgaagaaccccgagagcctgttcctgctggaggaggtgagagagagaaagttcgacggcttcgccagaaccatccagaaggcctggagaagacacgtggccgtgagaaagtacgaggagatgagagaggaggccagcaacatcctgctgaacaagaaggagagaagaagaaacagcatcaacagaaacttcgtgggcgactacctgggcctggaggagagacccgagctgagacagttcctgggcaagagagagagagtggacttcgccgacagcgtgaccaagtacgacagaagattcaagcccatcaagagagacctgatcctgacccccaagtgcgtgtacgtgatcggcagagagaaggtgaagaagggccccgagaagggccaggtgtgcgaggtgctgaagaagaaggtggacatccaggccctgagaggcgtgagcctgagcaccagacaggacgacttcttcatcctgcaggaggacgccgccgacagcttcctggagagcgtgttcaagaccgagttcgtgagcctgctgtgcaagagattcgaggaggccaccagaagacccctgcccctgaccttcagcgacaccctgcagttcagagtgaagaaggagggctggggcggcggcggcaccagaagcgtgaccttcagcagaggcttcggcgacctggccgtgctgaaggtgggcggcagaaccctgaccgtgagcgtgggcgacggcctgcccaagagcagcaagcccaccagaaagggcatggccaagggcaagcccagaagaagcagccaggcccccaccagagccgcccccgccccccccagaggcatggacagaaacggcgtgccccccagcgccagaggcggccccctgcccctggagatcatgagcggcggcggcacccacagaccccccagaggcccccccagcaccagcctgggcgccagcagaagacccagagccagaccccccagcgagcacaacaccgagttcctgaacgtgcccgaccagggcatggccggcatgcagagaaagagaagcgtgggccagagacccgtgcccggcgtgggcagacccaagccccagcccagaacccacggccccagatgcagagccctgtaccagtacgtgggccaggacgtggacgagctgagcttcaacgtgaacgaggtgatcgagatcctgatggaggaccccagcggctggtggaagggcagactgcacggccaggagggcctgttccccggcaactacgtggagaagatctga

SEQ ID NO: 2833 - RNA, 3297 nt, synthetic construct
  misc_feature 1..3297: note = derived and/or modified sequence opt5 fromMYO1F__Homo_sapiens__AAH28071
  source 1..3297: mol_type = other RNA
atgggcagcaaggagagattccactggcagtcccataacgtgaaacaatctggggtcgacgatatggttctgctcccccagatcaccgaagacgccattgctgccaatctgcggaagcgctttatggatgactacatcttcacatatattggaagcgtgcttatctccgtgaacccttttaaacagatgccgtacttcacggatagagagattgacctgtatcagggcgcggctcaatacgaaaatccccctcacatctatgccctcaccgataacatgtaccggaatatgctgatcgactgcgagaaccagtgtgtcattatctctggggaaagcggagccggcaagacagtggctgccaaatatattatggggtacatctccaaggtttctggaggcggcgagaaggtgcagcatgtcaaagatattatccttcagagcaatcccctgctcgaggcttttgggaacgccaagaccgtgcgcaataacaattccagcagattcggaaaatactttgaaattcaattctctcggggcggggagcctgacggaggcaagatctccaactttctgctggaaaaatcccgcgttgtgatgcagaatgagaacgagagaaatttccacatctattaccagctcctggaaggggcgtctcaggagcaacggcagaaccttggactgatgacacccgattattactattacctcaaccagtccgacacctatcaagtcgatggcacagacgaccgcagcgattttggcgaaaccctgtctgccatgcaagtgattgggatccctccgtccattcagcagcttgtgctgcagctcgtcgctggaatcctgcatctgggcaatattagcttctgcgaggacgggaactacgccagagttgaatccgtggatctcctggcttttcccgcctaccttctgggaatcgactctggccggctccaggagaagctgacgagccgcaagatggattccagatggggagggcggagcgagtctatcaatgtgacccttaacgtcgaacaggcggcctatacacgcgacgctctggccaaaggcctctacgctagactgttcgatttcctggtggaggccattaatcgggccatgcagaagcctcaagaagagtattccatcggcgttctcgacatttacgggtttgaaatcttccagaaaaacggatttgagcagttctgtattaattttgtgaacgagaagctgcagcaaatcttcatcgaacttaccctgaaagctgagcaggaagagtatgtccaggaaggcattagatggacacccatccagtactttaataacaaggtggtttgcgatctcattgagaataaactgagccctcccgggatcatgtctgtgcttgacgatgtctgtgcgaccatgcacgccacgggaggcggggctgaccaaacactgctccagaagctgcaggccgccgtgggcacccacgagcatttcaacagctggtccgctggatttgtcattcaccattatgccggcaaggtgtcttacgacgttagcgggttctgcgaacgcaatcgggatgtgctgttttccgacctcatcgagctgatgcaaacaagcgaacaggcgttccttagaatgctgtttccggagaaactcgatggagacaagaaaggccgcccttctaccgctgggtccaagattaaaaagcaggccaacgatctggtcgccaccctgatgcggtgtacaccccactacatcagatgcatcaagcctaatgagacgaaacgcccccgggactgggaagagaacagagtgaagcaccaggttgaatatcttggactcaaagagaacattcgcgtgcggagagctggcttcgcctaccgccggcaattcgctaagtttctgcagagatatgccatcctgacccccgaaacatggcctcggtggcgcggggatgagagacagggcgtccagcatctcctgcgggcggtgaatatggagccggaccaataccagatgggaagcaccaaagtgttcgttaagaaccccgaatctctttttctgctcgaggaagtcagagagcgcaagttcgatggctttgcccggacaattcagaaggcttggagacgccacgtggccgtgagaaaatatgaagagatgcgggaggaagctagcaatatcctgctgaacaaaaaggagcgcagacggaatagcattaaccgcaatttcgtcggggactaccttggactcgaagagagacctgaactgcggcagtttctgggcaaacgcgagagagtggatttcgccgactccgttaccaagtatgatcggcgctttaagcccatcaaaagagacctcatcctgacgcctaagtgtgtgtacgtcattgggcgggagaaagtgaagaaaggacccgaaaagggccaagtttgcgaggtgcttaaaaagaaggtcgacatccaggcgctgagaggggtgtctctcagcacacgccaggatgacttctttattctgcaagaagatgccgctgactccttcctggagtctgtttttaaaaccgagttcgtgagccttctctgtaagcggttcgaagaggccaccagacgcccgctgcctctgacattttccgataccctccagttccgggtcaaaaaggaaggctggggaggcgggggaacaagaagcgtgacgttttctcgcggcttcggggacctggctgtgcttaaagtcggaggccggaccctgacagtttccgtgggggatggcctccccaagagctctaagcctaccagaaaaggaatggccaagggcaaaccccgccggtccagccaggcccctacaagagctgcgcccgccccgcctcgggggatggaccgcaacggagtgcctccctctgctagaggcgggcccctgccgctggagatcatgagcggaggcggcacccatcggccccctcgcgggcccccttccacgagccttggagcctctagacggcccagagcccgccctccctccgaacacaataccgagtttctcaacgtcccggatcagggcatggctgggatgcaacggaagagaagcgtgggacagcgccctgttcccggcgtggggcggcctaaaccccagccgagaacacatggacctcgctgccgggccctgtaccagtatgtcggccaagacgtggatgagctgtccttcaatgttaacgaagtgattgagatcctcatggaagacccctctggctggtggaaggggagactgcacggacaggagggcctttttcctgggaattacgtcgaaaagatctga

SEQ ID NO: 2834 - protein, 1018 aa, synthetic construct
  REGION 1..1018: note = MYO1G__Homo_sapiens__B0I1T2
MEDEEGPEYGKPDFVLLDQVTMEDFMRNLQLRFEKGRIYTYIGEVLVSVNPYQELPLYGPEAIARYQGRELYERPPHLYAVANAAYKAMKHRSRDTCIVISGESGAGKTEASKHIMQYIAAVTNPSQRAEVERVKDVLLKSTCVLEAFGNARTNRNHNSSRFGKYMDINFDFKGDPIGGHIHSYLLEKSRVLKQHVGERNFHAFYQLLRGSEDKQLHELHLERNPAVYNFTHQGAGLNMTVHSALDSDEQSHQAVTEAMRVIGFSPEEVESVHRILAAILHLGNIEFVETEEGGLQKEGLAVAEEALVDHVAELTATPRDLVLRSLLARTVASGGRELIEKGHTAAEASYARDACAKAVYQRLFEWVVNRINSVMEPRGRDPRRDGKDTVIGVLDIYGFEVFPVNSFEQFCINYCNEKLQQLFIQLILKQEQEEYEREGITWQSVEYFNNATIVDLVERPHRGILAVLDEACSSAGTITDRIFLQTLDMHHRHHLHYTSRQLCPTDKTMEFGRDFRIKHYAGDVTYSVEGFIDKNRDFLFQDFKRLLYNSTDPTLRAMWPDGQQDITEVTKRPLTAGTLFKNSMVALVENLASKEPFYVRCIKPNEDKVAGKLDENHCRHQVAYLGLLENVRVRRAGFASRQPYSRFLLRYKMTCEYTWPNHLLGSDKAAVSALLEQHGLQGDVAFGHSKLFIRSPRTLVTLEQSRARLIPIIVLLLQKAWRGTLARWRCRRLRAIYTIMRWFRRHKVRAHLAELQRRFQAARQPPLYGRDLVWPLPPAVLQPFQDTCHALFCRWRARQLVKNIPPSDMPQIKAKVAAMGALQGLRQDWGCRRAWARDYLSSATDNPTASSLFAQRLKTLQDKDGFGAVLFSSHVRKVNRFHKIRNRALLLTDQHLYKLDPDRQYRVMRAVPLEAVTGLSVTSGGDQLVVLHARGQDDLVVCLHRSRPPLDNRVGELVGVLAAHCQGEGRTLEVRVSDCIPLSHRGVRRLISVEPRPEQPEPDFRCARGSFTLLWPSR

SEQ ID NO: 2835 - RNA, 3057 nt, synthetic construct
  misc_feature 1..3057: note = MYO1G__Homo_sapiens__CCDS34629.1
  source 1..3057: mol_type = other RNA
atggaggacgaggaaggccctgagtatggcaaacctgactttgtgcttttggaccaagtgaccatggaggacttcatgaggaacctgcagctcaggttcgagaagggccgcatctacacctacatcggtgaggtgctggtgtccgtgaacccctaccaggagctgcccctgtatgggcctgaggccatcgccaggtaccagggccgtgagctctatgagcggccaccccatctctatgctgtggccaacgccgcctacaaggcaatgaagcaccggtccagggacacctgcatcgtcatctcaggggagagtggggcagggaagacagaagccagtaagcacatcatgcagtacatcgctgctgtcaccaatccaagccagagggctgaggtggagagggtcaaggacgtgctgctcaagtccacctgtgtgctggaggcctttggcaatgcccgcaccaaccgcaatcacaactccagccgctttggcaagtacatggacatcaactttgacttcaagggggacccgatcggaggacacatccacagctacctactggagaagtctcgggtcctcaagcagcacgtgggtgaaagaaacttccacgccttctaccaattgctgagaggcagtgaggacaagcagctgcatgaactgcacttggagagaaaccctgctgtatacaatttcacacaccagggagcaggactcaacatgactgtgcacagtgccttggacagtgatgagcagagccaccaggcagtgaccgaggccatgagggtcatcggcttcagtcctgaagaggtggagtctgtgcatcgcatcctggctgccatattgcacctgggaaacatcgagtttgtggagacggaggagggtgggctgcagaaggagggcctggcagtggccgaggaggcactggtggaccatgtggctgagctgacggccacaccccgggacctcgtgctccgctccctgctggctcgcacagttgcctcgggaggcagggaactcatagagaagggccacactgcagctgaggccagctatgcccgggatgcctgtgccaaggcagtgtaccagcggctgtttgagtgggtggtgaacaggatcaacagtgtcatggaaccccggggccgggatcctcggcgtgatggcaaggacacagtcattggcgtgctggacatctatggcttcgaggtgtttcccgtcaacagtttcgagcagttctgcatcaactactgcaacgagaagctgcagcagctattcatccagctcatcctgaagcaggaacaggaagagtacgagcgcgagggcatcacctggcagagcgttgagtatttcaacaacgccaccattgtggatctggtggagcggccccaccgtggcatcctggccgtgctggacgaggcctgcagctctgctggcaccatcactgaccgaatcttcctgcagaccctggacatgcaccaccgccatcacctacactacaccagccgccagctctgccccacagacaagaccatggagtttggccgagacttccggatcaagcactatgcaggggacgtcacgtactccgtggaaggcttcatcgacaagaacagagatttcctcttccaggacttcaagcggctgctgtacaacagcacggaccccactctacgggccatgtggccggacgggcagcaggacatcacagaggtgaccaagcgccccctgacggctggcacactcttcaagaactccatggtggccctggtggagaaccttgcctccaaggagcccttctacgtccgctgcatcaagcccaatgaggacaaggtagctgggaagctggatgagaaccactgtcgccaccaggtcgcatacctggggctgctggagaatgtgagggtccgcagggctggcttcgcttcccgccagccctactctcgattcctgctcaggtacaagatgacctgtgaatacacatggcccaaccacctgctgggctccgacaaggcagccgtgagcgctctcctggagcagcacgggctgcagggggacgtggcctttggccacagcaagctgttcatccgctcaccccggacactggtcacactggagcagagccgagcccgcctcatccccatcattgtgctgctattgcagaaggcatggcggggcaccttggcgaggtggcgctgccggaggctgagggctatctacaccatcatgcgctggttccggagacacaaggtgcgggctcacctggctgagctgcagcggcgattccaggctgcaaggcagccgccactctacgggcgtgaccttgtgtggccgctgccccctgctgtgctgcagcccttccaggacacctgccacgcactcttctgcaggtggcgggcccggcagctggtgaagaacatccccccttcagacatgccccagatcaaggccaaggtggccgccatgggggccctgcaagggcttcgtcaggactggggctgccgacgggcctgggcccgagactacctgtcctctgccactgacaatcccacagcatcaagcctgtttgctcagcgactaaagacacttcaggacaaagatggcttcggggctgtgctcttttcaagccatgtccgcaaggtgaaccgcttccacaagatccggaaccgggccctcctgctcacagaccagcacctctacaagctggaccctgaccggcagtaccgggtgatgcgggccgtgccccttgaggcggtgacggggctgagcgtgaccagcggaggagaccagctggtggtgctgcacgcccgcggccaggacgacctcgtggtgtgcctgcaccgctcccggccgccattggacaaccgcgttggggagctggtgggcgtgctggccgcacactgccagggggagggccgcaccctggaggttcgcgtctccgactgcatcccactaagccatcgcggggtccggcgcctcatctccgtggagcccaggccggagcagccagagcccgatttccgctgcgctcgcggctccttcaccctgctctggcccagccgctga

SEQ ID NO: 2836 - RNA, 3057 nt, synthetic construct
  misc_feature 1..3057: note = derived and/or modified sequence opt1 fromMYO1G__Homo_sapiens__CCDS34629.1
  source 1..3057: mol_type = other RNA
atggaggacgaggagggccccgagtacgggaagccggacttcgtgctgctcgaccaggtcaccatggaggacttcatgcgcaacctgcagctgcggttcgagaagggccgcatctacacctacatcggggaggtgctcgtgagcgtcaacccctaccaggagctgcccctgtacggccccgaggccatcgcccggtaccaggggcgcgagctctacgagcggccgccccacctgtacgcggtggccaacgccgcctacaaggccatgaagcaccgctcccgggacacgtgcatcgtgatcagcggcgagtccggcgcggggaagaccgaggccagcaagcacatcatgcagtacatcgccgccgtcaccaacccctcccagcgcgcggaggtggagcgggtgaaggacgtcctgctcaagagcacctgcgtgctggaggccttcggcaacgcccgcacgaaccggaaccacaactccagccgcttcgggaagtacatggacatcaacttcgacttcaagggcgaccccatcgggggccacatccactcctacctgctcgagaagagccgggtgctgaagcagcacgtcggcgagcgcaacttccacgccttctaccagctgctccgggggtccgaggacaagcagctgcacgagctgcacctcgagcgcaacccggccgtgtacaacttcacccaccagggcgcggggctgaacatgaccgtgcacagcgccctggactccgacgagcagagccaccaggccgtcaccgaggccatgcgggtgatcggcttctcccccgaggaggtggagagcgtccaccgcatcctcgccgcgatcctgcacctgggcaacatcgagttcgtggagacggaggaggggggcctccagaaggaggggctggccgtggccgaggaggccctggtcgaccacgtggccgagctcaccgcgaccccccgggacctggtgctgcgctccctcctggcccggaccgtcgccagcggcgggcgcgagctgatcgagaagggccacacggccgccgaggcgtcctacgcccgcgacgcctgcgccaaggcggtgtaccagcggctcttcgagtgggtcgtgaaccgcatcaacagcgtgatggagccccggggccgcgacccgcggcgcgacgggaaggacaccgtcatcggcgtgctggacatctacgggttcgaggtgttccccgtcaacagcttcgagcagttctgcatcaactactgcaacgagaagctgcagcagctcttcatccagctgatcctgaagcaggagcaggaggagtacgagcgggagggcatcacctggcagtccgtggagtacttcaacaacgccaccatcgtggacctcgtcgagcgcccccaccgggggatcctggccgtgctggacgaggcctgcagctccgccggcacgatcaccgaccgcatcttcctccagaccctggacatgcaccaccggcaccacctgcactacaccagccgccagctctgccccacggacaagaccatggagttcggccgggacttccgcatcaagcactacgcgggggacgtgacctactccgtcgagggcttcatcgacaagaaccgggacttcctgttccaggacttcaagcgcctgctctacaacagcaccgacccgacgctgcgggccatgtggcccgacgggcagcaggacatcaccgaggtgaccaagcgccccctgaccgccggcacgctgttcaagaactccatggtggccctcgtcgagaacctggccagcaaggagcccttctacgtgcggtgcatcaagccgaacgaggacaaggtggcggggaagctggacgagaaccactgccgccaccaggtcgcctacctcggcctgctggagaacgtgcgcgtgcggcgcgccggcttcgcctcccggcagccctacagccgcttcctcctgcggtacaagatgacctgcgagtacacctggcccaaccacctgctcgggtccgacaaggccgcggtcagcgccctgctggagcagcacggcctccagggggacgtggccttcggccactccaagctgttcatccgcagcccccggaccctggtgacgctcgagcagtcccgcgcccggctgatcccgatcatcgtcctgctcctgcagaaggcgtggcgcggcaccctggcccggtggcgctgccggcgcctccgggccatctacaccatcatgcgctggttccggcgccacaaggtgcgggcccacctggccgagctgcagcgccggttccaggcggcccgccagccccccctctacgggcgcgacctggtgtggcccctgccgcccgccgtcctccagcccttccaggacacctgccacgccctgttctgccggtggcgcgcccggcagctggtgaagaacatcccgcccagcgacatgccccagatcaaggcgaaggtggccgccatgggcgccctccaggggctgcgccaggactggggctgccggcgcgcctgggcgcgggactacctgtccagcgccacggacaaccccaccgcctccagcctcttcgcccagcgcctgaagaccctgcaggacaaggacgggttcggcgcggtcctcttcagctcccacgtgcggaaggtgaaccgcttccacaagatccggaaccgcgccctgctgctcaccgaccagcacctgtacaagctggacccggaccggcagtaccgcgtcatgcgggccgtgcccctcgaggccgtgaccggcctgagcgtcacgtccgggggcgaccagctggtggtgctccacgcccgcgggcaggacgacctggtcgtgtgcctgcaccggagccgcccccccctcgacaaccgggtgggcgagctggtcggggtgctggcggcccactgccagggcgagggccgcaccctcgaggtgcgcgtctccgactgcatcccgctgagccaccggggggtgcgccggctgatctccgtggagccccgccccgagcagcccgagccggacttccggtgcgcccgcggcagcttcaccctcctgtggccctcccggtga

SEQ ID NO: 2837 - RNA, 3057 nt, synthetic construct
  misc_feature 1..3057: note = derived and/or modified sequence opt2 fromMYO1G__Homo_sapiens__CCDS34629.1
  source 1..3057: mol_type = other RNA
atggaggacgaggagggccccgagtacggcaagcccgacttcgtcctcctcgaccaggtcaccatggaggacttcatgcgcaacctccagctccgcttcgagaagggccgcatctacacctacatcggcgaggtcctcgtctccgtcaacccctaccaggagctccccctctacggccccgaggccatcgcccgctaccagggccgcgagctctacgagcgccccccccacctctacgccgtcgccaacgccgcctacaaggccatgaagcaccgctcccgcgacacctgcatcgtcatctccggcgagtccggcgccggcaagaccgaggcctccaagcacatcatgcagtacatcgccgccgtcaccaacccctcccagcgcgccgaggtcgagcgcgtcaaggacgtcctcctcaagtccacctgcgtcctcgaggccttcggcaacgcccgcaccaaccgcaaccacaactcctcccgcttcggcaagtacatggacatcaacttcgacttcaagggcgaccccatcggcggccacatccactcctacctcctcgagaagtcccgcgtcctcaagcagcacgtcggcgagcgcaacttccacgccttctaccagctcctccgcggctccgaggacaagcagctccacgagctccacctcgagcgcaaccccgccgtctacaacttcacccaccagggcgccggcctcaacatgaccgtccactccgccctcgactccgacgagcagtcccaccaggccgtcaccgaggccatgcgcgtcatcggcttctcccccgaggaggtcgagtccgtccaccgcatcctcgccgccatcctccacctcggcaacatcgagttcgtcgagaccgaggagggcggcctccagaaggagggcctcgccgtcgccgaggaggccctcgtcgaccacgtcgccgagctcaccgccaccccccgcgacctcgtcctccgctccctcctcgcccgcaccgtcgcctccggcggccgcgagctcatcgagaagggccacaccgccgccgaggcctcctacgcccgcgacgcctgcgccaaggccgtctaccagcgcctcttcgagtgggtcgtcaaccgcatcaactccgtcatggagccccgcggccgcgacccccgccgcgacggcaaggacaccgtcatcggcgtcctcgacatctacggcttcgaggtcttccccgtcaactccttcgagcagttctgcatcaactactgcaacgagaagctccagcagctcttcatccagctcatcctcaagcaggagcaggaggagtacgagcgcgagggcatcacctggcagtccgtcgagtacttcaacaacgccaccatcgtcgacctcgtcgagcgcccccaccgcggcatcctcgccgtcctcgacgaggcctgctcctccgccggcaccatcaccgaccgcatcttcctccagaccctcgacatgcaccaccgccaccacctccactacacctcccgccagctctgccccaccgacaagaccatggagttcggccgcgacttccgcatcaagcactacgccggcgacgtcacctactccgtcgagggcttcatcgacaagaaccgcgacttcctcttccaggacttcaagcgcctcctctacaactccaccgaccccaccctccgcgccatgtggcccgacggccagcaggacatcaccgaggtcaccaagcgccccctcaccgccggcaccctcttcaagaactccatggtcgccctcgtcgagaacctcgcctccaaggagcccttctacgtccgctgcatcaagcccaacgaggacaaggtcgccggcaagctcgacgagaaccactgccgccaccaggtcgcctacctcggcctcctcgagaacgtccgcgtccgccgcgccggcttcgcctcccgccagccctactcccgcttcctcctccgctacaagatgacctgcgagtacacctggcccaaccacctcctcggctccgacaaggccgccgtctccgccctcctcgagcagcacggcctccagggcgacgtcgccttcggccactccaagctcttcatccgctccccccgcaccctcgtcaccctcgagcagtcccgcgcccgcctcatccccatcatcgtcctcctcctccagaaggcctggcgcggcaccctcgcccgctggcgctgccgccgcctccgcgccatctacaccatcatgcgctggttccgccgccacaaggtccgcgcccacctcgccgagctccagcgccgcttccaggccgcccgccagccccccctctacggccgcgacctcgtctggcccctcccccccgccgtcctccagcccttccaggacacctgccacgccctcttctgccgctggcgcgcccgccagctcgtcaagaacatccccccctccgacatgccccagatcaaggccaaggtcgccgccatgggcgccctccagggcctccgccaggactggggctgccgccgcgcctgggcccgcgactacctctcctccgccaccgacaaccccaccgcctcctccctcttcgcccagcgcctcaagaccctccaggacaaggacggcttcggcgccgtcctcttctcctcccacgtccgcaaggtcaaccgcttccacaagatccgcaaccgcgccctcctcctcaccgaccagcacctctacaagctcgaccccgaccgccagtaccgcgtcatgcgcgccgtccccctcgaggccgtcaccggcctctccgtcacctccggcggcgaccagctcgtcgtcctccacgcccgcggccaggacgacctcgtcgtctgcctccaccgctcccgcccccccctcgacaaccgcgtcggcgagctcgtcggcgtcctcgccgcccactgccagggcgagggccgcaccctcgaggtccgcgtctccgactgcatccccctctcccaccgcggcgtccgccgcctcatctccgtcgagccccgccccgagcagcccgagcccgacttccgctgcgcccgcggctccttcaccctcctctggccctcccgctga

SEQ ID NO: 2838 - RNA, 3057 nt, synthetic construct
  misc_feature 1..3057: note = derived and/or modified sequence opt3 fromMYO1G__Homo_sapiens__CCDS34629.1
  source 1..3057: mol_type = other RNA
atggaggacgaagagggccccgaatacgggaagcctgatttcgtgctgctcgaccaggtcaccatggaggattttatgagaaaccttcaactgaggttcgaaaaaggacggatctatacatacattggtgaggttttggtgagcgtaaatccatatcaggagttaccgctgtacggccccgaagccatagctcgctatcaggggcgagagctatacgaacgtcctccacacctctatgcagtggccaacgcggcttacaaggccatgaaacatagatccagggacacttgcatcgtcatttctggagagtcaggcgcaggtaagacggaggccagtaaacacatcatgcagtacattgctgcagtgaccaatcccagccaacgggccgaagttgagcgcgtgaaggatgtcctgcttaagtccacatgtgtgctggaagcctttgggaacgctagaactaataggaaccataattcttcgcggttcggaaaatatatggacatcaactttgatttcaagggcgaccctataggcgggcacatccattcatacttgctcgagaaaagccgcgtactgaagcagcacgttggagaacgaaattttcacgcgttctatcagctgctcagaggtagtgaggataaacagttacatgagctgcaccttgaaaggaacccagcagtgtacaattttacccatcaaggcgccgggttgaacatgacagtccactccgctctggactctgatgagcagagccaccaggccgtgaccgaagcaatgcgggtgattggattctcccccgaggaagtcgagtcagttcatcgtatcctagctgccattctccacctgggcaatatcgagtttgtggaaactgaggaaggtgggcttcagaaggagggactggcggtagccgaagaggcattggtggaccatgtcgctgagctcacagccacccctcgcgatctggtgttaagaagtctgctcgctaggacggttgccagcggcggccgggaacttatagagaaggggcacactgcagccgaggcttcttatgcgcgagacgcatgcgccaaagctgtgtaccaacgcctgttcgaatgggtcgtgaacagaattaattccgtaatggagccaaggggacgggacccgcgcagagatggtaaggacaccgttatcggcgtgttggatatttatgggtttgaagtcttccccgtgaactcattcgagcagttttgtatcaactactgcaatgaaaaactacagcaactgttcatccagctcattctgaagcaggagcaggaagagtacgagagggaaggaataacatggcaaagcgtcgagtattttaacaatgccactatcgtggaccttgttgaacgtcctcatcggggcattctggcagtgttggatgaggcctgtagttctgctggtaccatcacagaccgaatattcctccagaccctggatatgcaccacagacatcacttacattacacgtccaggcagctgtgcccaactgacaaaacaatggaatttgggcgcgatttccggattaagcactatgccggcgacgtaacctacagcgtcgagggatttatcgataaaaacagagacttcctatttcaggacttcaagaggctcctgtataattcgactgatcccacacttcgcgcaatgtggcctgacggccaacaggatatcaccgaggtgacgaagcgaccattgaccgcggggacactgtttaaaaactctatggttgctctcgtggaaaatctggcctccaaggagcccttctacgtccggtgtattaaaccgaacgaagacaaggtggcaggaaaacttgatgagaatcactgccgtcatcaggtagcctatctgggtttgctcgaaaacgtgagagttaggcgcgctggctttgcctcacggcagccttacagtagattcctgttaaggtacaagatgacttgtgagtatacctggcccaatcacctcctagggagcgacaaggcagctgtctccgccctcctggagcaacatggacttcagggcgatgtggcgttcggtcactctaaattgtttatccgaagcccacgcacactggtgactctcgaacagtcacgggccagactgattcctataatcgtcttactgcttcagaaggcttggagggggaccttggcacgttggcgctgccggagactcagggccatttacacaatcatgcgatggttccggcgccataaagttagagctcacctggccgagctacaaaggcggtttcaggcagcgcgacagcccccactgtatggcagagacctcgtgtggcccctgcctccagccgtgcttcaaccgttccaggatacctgtcacgctttgttttgccgctggagggcccgtcagctggtaaagaacattccccctagtgacatgccacagatcaaagcaaaggtcgctgccatgggagcattacaaggcctccggcaggattgggggtgcagaagggcctgggctcgcgactacctgtccagcgcgactgataatcccacggcctcttcacttttcgcacagcgactgaagacattgcaggacaaagacggatttggtgctgtgctgttcagtagccatgttagaaaggtgaaccggtttcacaaaataaggaatcgcgccctgctactgaccgatcaacatctctataagctggaccctgatcgtcagtacagagtcatgcgggccgtgccacttgaagctgttactggcttgtccgtgacctctgggggagaccagctggtagtcttacacgcaaggggccaggatgacctcgtggtgtgtctgcatcgctcgcgacccccgcttgataacagagtcggtgagctggttggggtgctagccgcgcactgccaaggcgagggacggacactcgaagtaagggtgagcgactgtatccctctgtcccaccgcggcgtcagaaggttgatttcagtggagccacggcccgaacagcctgagcccgatttccgttgcgctcgcgggagttttaccctgttatggccatctcgatga

SEQ ID NO: 2839 - RNA, 3057 nt, synthetic construct
  misc_feature 1..3057: note = derived and/or modified sequence opt4 fromMYO1G__Homo_sapiens__CCDS34629.1
  source 1..3057: mol_type = other RNA
atggaggacgaggagggccccgagtacggcaagcccgacttcgtgctgctggaccaggtgaccatggaggacttcatgagaaacctgcagctgagattcgagaagggcagaatctacacctacatcggcgaggtgctggtgagcgtgaacccctaccaggagctgcccctgtacggccccgaggccatcgccagataccagggcagagagctgtacgagagacccccccacctgtacgccgtggccaacgccgcctacaaggccatgaagcacagaagcagagacacctgcatcgtgatcagcggcgagagcggcgccggcaagaccgaggccagcaagcacatcatgcagtacatcgccgccgtgaccaaccccagccagagagccgaggtggagagagtgaaggacgtgctgctgaagagcacctgcgtgctggaggccttcggcaacgccagaaccaacagaaaccacaacagcagcagattcggcaagtacatggacatcaacttcgacttcaagggcgaccccatcggcggccacatccacagctacctgctggagaagagcagagtgctgaagcagcacgtgggcgagagaaacttccacgccttctaccagctgctgagaggcagcgaggacaagcagctgcacgagctgcacctggagagaaaccccgccgtgtacaacttcacccaccagggcgccggcctgaacatgaccgtgcacagcgccctggacagcgacgagcagagccaccaggccgtgaccgaggccatgagagtgatcggcttcagccccgaggaggtggagagcgtgcacagaatcctggccgccatcctgcacctgggcaacatcgagttcgtggagaccgaggagggcggcctgcagaaggagggcctggccgtggccgaggaggccctggtggaccacgtggccgagctgaccgccacccccagagacctggtgctgagaagcctgctggccagaaccgtggccagcggcggcagagagctgatcgagaagggccacaccgccgccgaggccagctacgccagagacgcctgcgccaaggccgtgtaccagagactgttcgagtgggtggtgaacagaatcaacagcgtgatggagcccagaggcagagaccccagaagagacggcaaggacaccgtgatcggcgtgctggacatctacggcttcgaggtgttccccgtgaacagcttcgagcagttctgcatcaactactgcaacgagaagctgcagcagctgttcatccagctgatcctgaagcaggagcaggaggagtacgagagagagggcatcacctggcagagcgtggagtacttcaacaacgccaccatcgtggacctggtggagagaccccacagaggcatcctggccgtgctggacgaggcctgcagcagcgccggcaccatcaccgacagaatcttcctgcagaccctggacatgcaccacagacaccacctgcactacaccagcagacagctgtgccccaccgacaagaccatggagttcggcagagacttcagaatcaagcactacgccggcgacgtgacctacagcgtggagggcttcatcgacaagaacagagacttcctgttccaggacttcaagagactgctgtacaacagcaccgaccccaccctgagagccatgtggcccgacggccagcaggacatcaccgaggtgaccaagagacccctgaccgccggcaccctgttcaagaacagcatggtggccctggtggagaacctggccagcaaggagcccttctacgtgagatgcatcaagcccaacgaggacaaggtggccggcaagctggacgagaaccactgcagacaccaggtggcctacctgggcctgctggagaacgtgagagtgagaagagccggcttcgccagcagacagccctacagcagattcctgctgagatacaagatgacctgcgagtacacctggcccaaccacctgctgggcagcgacaaggccgccgtgagcgccctgctggagcagcacggcctgcagggcgacgtggccttcggccacagcaagctgttcatcagaagccccagaaccctggtgaccctggagcagagcagagccagactgatccccatcatcgtgctgctgctgcagaaggcctggagaggcaccctggccagatggagatgcagaagactgagagccatctacaccatcatgagatggttcagaagacacaaggtgagagcccacctggccgagctgcagagaagattccaggccgccagacagccccccctgtacggcagagacctggtgtggcccctgccccccgccgtgctgcagcccttccaggacacctgccacgccctgttctgcagatggagagccagacagctggtgaagaacatcccccccagcgacatgccccagatcaaggccaaggtggccgccatgggcgccctgcagggcctgagacaggactggggctgcagaagagcctgggccagagactacctgagcagcgccaccgacaaccccaccgccagcagcctgttcgcccagagactgaagaccctgcaggacaaggacggcttcggcgccgtgctgttcagcagccacgtgagaaaggtgaacagattccacaagatcagaaacagagccctgctgctgaccgaccagcacctgtacaagctggaccccgacagacagtacagagtgatgagagccgtgcccctggaggccgtgaccggcctgagcgtgaccagcggcggcgaccagctggtggtgctgcacgccagaggccaggacgacctggtggtgtgcctgcacagaagcagaccccccctggacaacagagtgggcgagctggtgggcgtgctggccgcccactgccagggcgagggcagaaccctggaggtgagagtgagcgactgcatccccctgagccacagaggcgtgagaagactgatcagcgtggagcccagacccgagcagcccgagcccgacttcagatgcgccagaggcagcttcaccctgctgtggcccagcagatga

SEQ ID NO: 2840 - RNA, 3057 nt, synthetic construct
  misc_feature 1..3057: note = derived and/or modified sequence opt5 fromMYO1G__Homo_sapiens__CCDS34629.1
  source 1..3057: mol_type = other RNA
atggaggacgaagagggccccgaatacgggaagcctgatttcgtgctgctcgaccaggtcaccatggaggattttatgagaaacctgcaacttcggttcgaaaaaggacgcatctatacatacattggcgaggttctggtgagcgtgaatccgtatcaggagctccccctgtacgggcctgaagccatcgctagatatcagggacgggagctttacgaaagaccccctcacctgtatgccgtcgcgaacgctgcctacaaggccatgaaacatcgctcccgggacacgtgcattgtgatctctggcgagagcggggctggaaagaccgaggcctccaaacacattatgcagtacatcgctgccgttacaaatccctctcaacgcgcggaagtggagagagtcaaggatgtgctcctcaagagcacctgtgttctggaagcctttggcaacgctcggacaaatcgcaaccataattcctctagattcggcaaatatatggacatcaactttgatttcaagggggaccctattggaggccacatccatagctacctgctggagaaatcccgggtgcttaagcagcacgtcggggaacgcaattttcacgccttctatcagctgctcagaggaagcgaggataaacagctgcatgagcttcacctggaacggaacccggctgtgtacaattttacccatcaaggcgccgggctcaacatgacagtgcactctgcgctggactccgatgagcagagccaccaggccgtcaccgaagctatgcgcgttattggattctctcccgaggaagtggagtccgtgcatagaatcctggccgctattctccacctgggcaatatcgagtttgtcgaaacggaggaaggcgggcttcagaaggagggactggccgtggccgaagaggctctcgttgaccatgtggcggagctgaccgccacacctcgggatcttgtcctgagaagcctcctggctcgcaccgtggcctctggcgggcgggaactgattgagaagggacacacagccgctgaagcctcctatgcgagagacgcttgcgccaaagccgtttaccaacgcctcttcgagtgggtggtcaaccggatcaatagcgtgatggagcccagaggccgcgaccctcggagagatgggaaggacaccgtcatcggagtgctggatatttatggctttgaagttttccccgtgaactccttcgagcagttttgtatcaactactgcaatgaaaaacttcagcaactgttcattcagctcatcctgaagcaggagcaggaagagtacgagcgcgaaggcattacgtggcaatctgtcgagtattttaacaatgctacaatcgtggaccttgttgaacggccgcatagagggatcctggccgtgctcgatgaggcttgtagctccgccggaaccattacagaccgcatcttcctgcagaccctggatatgcaccaccggcatcacctccattacaccagcagacagctgtgccctacagacaaaacgatggaatttggccgggatttccgcattaagcactatgcgggggacgtcacctactctgtggagggatttatcgataaaaacagagacttcctttttcaggacttcaagcggctgctctataattccacagatcccaccctgagagccatgtggcctgacggccaacaggatattacagaggtgaccaagcgccccctgacggctgggacactttttaaaaacagcatggttgccctcgtcgaaaatctggcttctaaggagcccttctacgtgcggtgtatcaaacctaacgaagacaaggtggccggcaaactggatgagaatcactgcagacatcaggtcgcgtatctcggactgcttgaaaacgtgcgcgttagacgggccggctttgctagccgccagccgtactccagattcctgctccggtacaagatgacctgtgagtatacctggcccaatcatctgctggggtctgacaaggccgctgtgagcgcccttctcgagcaacacggactgcagggcgatgtcgccttcgggcactccaaactgtttatccgcagccctagaacactcgtgaccctggaacagtctcgggctcgccttattcccatcattgttctgctcctgcagaaggcgtggagaggaacactggcccggtggcgctgcagacggcttagagctatctacacgattatgcgctggttccggagacataaagtgcgcgcccacctcgccgagctgcaacggagatttcaggctgcccgccagcctcccctgtatggccgggacctcgtctggccgctgcctcccgcggtgcttcaacctttccaggatacctgtcacgctctgttttgcagatggcgcgcccggcagctcgttaagaacattcccccttccgacatgccccagatcaaagccaaggtggctgccatgggggcgctgcaaggcctgagacaggattggggatgccggcgcgcttgggccagagactaccttagctctgccacagataatccgaccgcttccagcctcttcgcccagcggctgaagacactgcaggacaaagacggctttggggctgtcctcttctcctctcatgtgcgcaaggtgaacagatttcacaaaatccggaatagagccctgcttctgaccgatcaacatctctataagctggaccctgatcgccagtaccgggtcatgagagcggttcccctggaagccgtgacgggacttagcgtgacctccggcggggaccagctggtcgtgctccacgctcgcggacaggatgacctggttgtgtgtctccatcggtctagaccccctctggataaccgcgtcggcgagcttgtgggggttctggccgctcactgccaaggcgagggacggacactcgaagtgagagtcagcgactgtatcccgctgtcccaccgcggcgtgagacggctgattagcgttgagccccgccctgaacagcccgagcctgatttcagatgcgcccgggggtcttttacccttctgtggccctcccgctga

SEQ ID NO: 2841 - protein, 1022 aa, synthetic construct
  REGION 1..1022: note = MYO1H__Homo_sapiens__NP_001094891
MEGALTARDKVGVQDFVLLDAYTSESAFVDNLRKRFSENLIYTYIGTLLVSVNPYQELGIYTVSQMELYQGVNFFELPPHVYAIADNAYRMMCAELNNHFILISGESGAGKTEASKKILEYFAVTCPMTQSLQIARDRLLFSNPVLEAFGNARTLRNDNSSRFGKYMDIQFDFQGIPVGGHIISYLIEKSRVVYQNEGERNFHIFYQLLAGGEEERLSYLGLERDPQLYKYLSQGHCAKESSISDKNDWKTVSNAFSVIDFTEADLENLFGIIASVLHLGNIGFEEDDQGCATIPDTHEIKWIAKLLGVHPSVLLEALTHRKIEAKTEEVICPLTLELSVYARDAMAKAVYGRTFTWLVNKINSSLVNKDFTRKTVIGLLDIYGFEVFDKNGFEQFCINYCNEKLQQLLIERTLKAEQAEYEMEGIEWEPIKYFNNKIICDLVEERHKGIISILDEECIRPGPATDLSFLEKLEEKVGKHAHFETRKLAGPKGRKRIGWMEFRLLHYAGEVTYCTKGFLEKNNDLLYRHLKEVLCKSKNIILRECFLLAELENRRRPPTVGTQFKNSLSSLLETLISKEPSYIRCIKPNDRKEPSKFDDFLIRHQIKYLGLMEHLRVRRAGFAYRRKYEHFLQRYKSLCPDTWPHWHGPPAEGVERLIKYIGYKPEEYKLGKTKIFIRFPRTLFATEDAFEFSKHQLVARIQATYKRCLGRREYVKKRQAAIKLEAHWRGALARKAIQRRKWAVRIIRKFIKGFISRNKPLCPDNEEFIVFVRKNYILNLRYHLPKTVLDKSWLRPPGILENASDLLRKMCVRNLVQKYCRGITAERKAMMQQKVVTSEIFRGRKDGYTESLNQPFVNSRIDEGDINPKVLQLISHEKIQYGVPVIKYDRKGFKARQRQLILTQKAAYVVELAKIKQKIEYSALKGVSTSNLSDGILVIHVSPEDSKQKGDAVLQCGHVFEAVTKLVMLVKKENIVNVVQGSLQFFISPGKEGTIVFDTGLEEQVYKNKNGQLTVVSVRRKS

SEQ ID NO: 2842 - RNA, 3069 nt, synthetic construct
  misc_feature 1..3069: note = MYO1H__Homo_sapiens__CCDS53826.1
  source 1..3069: mol_type = other RNA
atggaaggggcgctgactgcccgggacaaggtcggggttcaggattttgtgctattggacgcgtacaccagcgaatctgcctttgtcgacaacctccgcaagcgtttcagcgagaacctcatatacacatatattggcaccctccttgtgtctgtgaatccataccaggagctcggaatctacactgtgagccagatggaactttatcaaggggtcaatttctttgaactgccaccacatgtctacgctatagccgacaacgcttaccgaatgatgtgtgctgaactaaataaccatttcatcctcatttctggagagagtggggcagggaaaacagaggcctccaagaaaattctcgagtattttgcagtgacctgcccaatgacccagtcactacaaatagcccgtgacagactgctgttctccaacccagtgctggaggcttttggaaatgccagaacgctccggaatgacaactccagcagatttgggaaatacatggatatacaatttgattttcagggcattcccgtaggtgggcatatcatcagttacttgatagagaagtcccgagttgtctaccaaaacgaaggcgagcggaatttccacatcttctaccagctgctggcaggtggcgaagaggagcgcctgtcttacctgggactcgagcgagacccccagctgtataaatacctctcacagggtcattgtgccaaagagtcatccattagtgacaagaatgactggaaaactgtttccaacgccttttctgtcattgattttactgaagctgacctcgagaatctctttggaattattgccagtgtcttacacctggggaacattggttttgaagaagacgaccaaggctgtgccactatcccagacacccatgagatcaagtggatagccaagctcctgggggtccacccatcagtccttctggaagctctcacccacagaaaaattgaagccaaaactgaggaggtgatctgcccgttgacactagaactctctgtctacgctagagatgcaatggcaaaggctgtttatggacgaacgtttacttggctggtcaacaaaatcaattcctccttagttaacaaggatttcaccaggaaaactgtaattggattactggacatctatgggtttgaagtctttgacaagaatggttttgaacagttctgtataaattactgcaatgagaaactccagcaactgttaattgagaggactctaaaagcagaacaggcagaatatgaaatggaaggcatagagtgggagccaattaaatatttcaacaacaagatcatctgtgatttggtagaagagagacataaaggaatcatatctattctggatgaagaatgcattcggcctggtcctgctacagacttgagtttcctggagaaattggaagagaaagtgggcaaacatgcacacttcgaaacccgtaagctggctggtccaaagggccgaaagaggattggctggatggagttccgactcctccactatgcaggagaggtcacatactgcaccaagggattcttggaaaaaaacaatgatcttctttacagacatctgaaagaagtgctgtgcaagtccaagaacattatcctgagggaatgcttcctgctggccgagttagaaaaccggaggaggcccccaacagtggggactcagtttaaaaacagtctgagcagccttctagaaaccctcatctctaaggagccctcctacatccgttgcatcaagcccaacgacaggaaagaacccagcaaatttgatgacttcctcataaggcatcagatcaaatacctggggctgatggagcacctgcgggtgagacgggctggttttgcataccgaaggaaatacgagcatttcttgcaaaggtacaagtccttatgcccagacacctggccgcactggcacgggcctccagcagagggcgtggaacggctgatcaagtacatcggctacaaacccgaggaatacaagttaggcaaaaccaaaatattcattcgtttccccagaactctgtttgctaccgaagatgcctttgaatttagtaaacatcaactagttgcaagaatccaagccacttacaaacgctgcctaggaaggagagaatacgtgaaaaaaagacaagcagccatcaaactggaagcccactggcgtggggccctggctcggaaggcaatccaaaggagaaagtgggccgtgcggattatcagaaagttcattaaaggattcatcagtcgcaacaaacccctctgtcctgacaacgaggaatttatcgtgtttgtgcggaagaattacatcttgaatctccggtatcaccttccaaagactgtcctggacaagagctggctgaggcctcctggcatcttggaaaatgcatcagatctgctcaggaaaatgtgcgtgaggaacctggtgcagaagtactgccgcgggatcacagctgagcggaaagcaatgatgcagcaaaaggtagttacaagtgaaatcttcaggggaaggaaagacggctacacagaaagtttaaatcaaccctttgtcaacagtcggatagatgaaggagacattaatccgaaagtgcttcagctaattagccatgagaaaatccagtatggtgtcccggtcattaaatatgacagaaaaggcttcaaagcacggcagcggcaactcattcttactcagaaagcagcttacgtggtggaacttgccaaaatcaagcagaaaatagagtactcagctctcaaaggtgtctccactagcaatctgagtgatggaatcttagtcattcatgtttcaccagaggacagcaagcaaaagggggatgccgttttgcagtgtggacacgtgtttgaagcagttactaaactcgtcatgctggttaagaaggagaacattgtcaatgttgttcaaggaagtttacagttttttattagtccgggaaaagaaggcacaatagttttcgacactggactggaagaacaagtctataaaaataaaaatggacaattaacagtggtgtcagtccggaggaagtcctga

SEQ ID NO: 2843 - RNA, 3069 nt, synthetic construct
  misc_feature 1..3069: note = derived and/or modified sequence opt1 fromMYO1H__Homo_sapiens__CCDS53826.1
  source 1..3069: mol_type = other RNA
atggagggcgccctgaccgcccgcgacaaggtgggggtccaggacttcgtgctcctggacgcgtacaccagcgagtccgccttcgtggacaacctgcggaagcgcttcagcgagaacctcatctacacgtacatcggcaccctgctggtctccgtgaacccctaccaggagctcgggatctacaccgtgagccagatggagctgtaccagggcgtcaacttcttcgagctgccgccccacgtgtacgccatcgccgacaacgcctaccggatgatgtgcgcggagctcaacaaccacttcatcctgatctccggggagagcggcgccggcaagaccgaggcctccaagaagatcctggagtacttcgccgtgacgtgccccatgacccagagcctccagatcgcgcgcgaccggctgctgttctccaaccccgtcctcgaggccttcgggaacgcccgcaccctgcggaacgacaacagctcccgcttcggcaagtacatggacatccagttcgacttccaggggatcccggtgggcgggcacatcatcagctacctgatcgagaagtcccgggtggtctaccagaacgagggcgagcgcaacttccacatcttctaccagctcctggccggcggggaggaggagcggctgagctacctcggcctggagcgcgacccccagctgtacaagtacctctcccaggggcactgcgccaaggagagctccatcagcgacaagaacgactggaagaccgtgtccaacgcgttcagcgtgatcgacttcacggaggccgacctggagaacctgttcggcatcatcgccagcgtcctccacctgggcaacatcgggttcgaggaggacgaccagggctgcgccaccatccccgacacccacgagatcaagtggatcgccaagctgctcggggtgcacccctccgtgctgctggaggcgctcacccaccggaagatcgaggccaagacggaggaggtcatctgcccgctgaccctggagctcagcgtgtacgcccgcgacgccatggccaaggcggtgtacggccggaccttcacctggctggtcaacaagatcaactccagcctggtgaacaaggacttcacgcgcaagaccgtgatcgggctcctggacatctacggcttcgaggtcttcgacaagaacggcttcgagcagttctgcatcaactactgcaacgagaagctgcagcagctcctgatcgagcggaccctgaaggccgagcaggccgagtacgagatggaggggatcgagtgggagcccatcaagtacttcaacaacaagatcatctgcgacctcgtggaggagcgccacaagggcatcatctccatcctggacgaggagtgcatccggcccgggcccgccaccgacctgagcttcctcgagaagctggaggagaaggtcggcaagcacgcccacttcgagacgcgcaagctggcggggccgaagggccggaagcgcatcggctggatggagttccgcctgctccactacgccggggaggtgacctactgcaccaagggcttcctggagaagaacaacgacctgctctaccggcacctgaaggaggtgctgtgcaagtccaagaacatcatcctccgcgagtgcttcctgctggccgagctcgagaaccggcgccggccgcccaccgtcgggacgcagttcaagaacagcctgtccagcctgctcgagaccctgatctccaaggagcccagctacatccgctgcatcaagcccaacgaccggaaggagccctccaagttcgacgacttcctgatccgccaccagatcaagtacctcggcctgatggagcacctccgggtgcgccgggccgggttcgcgtaccgccggaagtacgagcacttcctgcagcgctacaagagcctgtgccccgacacctggccccactggcacggcccgcccgccgagggcgtggagcggctgatcaagtacatcgggtacaagcccgaggagtacaagctcggcaagaccaagatcttcatccgcttcccccggacgctgttcgccaccgaggacgccttcgagttctccaagcaccagctggtcgcccgcatccaggcgacctacaagcggtgcctcgggcgccgcgagtacgtgaagaagcggcaggccgccatcaagctggaggcccactggcgcggcgccctggcgcggaaggccatccagcgccggaagtgggccgtgcgcatcatccggaagttcatcaagggcttcatcagccgcaacaagccgctctgccccgacaacgaggagttcatcgtcttcgtgcggaagaactacatcctgaacctgcgctaccacctccccaagaccgtgctggacaagtcctggctgcggcccccggggatcctcgagaacgccagcgacctgctgcgcaagatgtgcgtccggaacctcgtgcagaagtactgccgcggcatcacggccgagcggaaggcgatgatgcagcagaaggtggtcacctccgagatcttccgcgggcggaaggacggctacaccgagagcctgaaccagcccttcgtgaacagccgcatcgacgagggggacatcaaccccaaggtgctgcagctcatctcccacgagaagatccagtacggcgtcccggtgatcaagtacgaccggaagggcttcaaggcccgccagcggcagctgatcctgacccagaaggccgcctacgtggtcgagctcgcgaagatcaagcagaagatcgagtacagcgccctgaagggggtgtccacgagcaacctgtccgacggcatcctcgtgatccacgtcagccccgaggactccaagcagaagggggacgccgtgctgcagtgcggccacgtgttcgaggccgtcaccaagctggtgatgctcgtgaagaaggagaacatcgtcaacgtggtgcaggggagcctgcagttcttcatctcccccggcaaggagggcaccatcgtcttcgacaccgggctggaggagcaggtctacaagaacaagaacggccagctcaccgtggtgagcgtgcgccgcaagtcctga

SEQ ID NO: 2844 - RNA, 3069 nt, synthetic construct
  misc_feature 1..3069: note = derived and/or modified sequence opt2 fromMYO1H__Homo_sapiens__CCDS53826.1
  source 1..3069: mol_type = other RNA
atggagggcgccctcaccgcccgcgacaaggtcggcgtccaggacttcgtcctcctcgacgcctacacctccgagtccgccttcgtcgacaacctccgcaagcgcttctccgagaacctcatctacacctacatcggcaccctcctcgtctccgtcaacccctaccaggagctcggcatctacaccgtctcccagatggagctctaccagggcgtcaacttcttcgagctccccccccacgtctacgccatcgccgacaacgcctaccgcatgatgtgcgccgagctcaacaaccacttcatcctcatctccggcgagtccggcgccggcaagaccgaggcctccaagaagatcctcgagtacttcgccgtcacctgccccatgacccagtccctccagatcgcccgcgaccgcctcctcttctccaaccccgtcctcgaggccttcggcaacgcccgcaccctccgcaacgacaactcctcccgcttcggcaagtacatggacatccagttcgacttccagggcatccccgtcggcggccacatcatctcctacctcatcgagaagtcccgcgtcgtctaccagaacgagggcgagcgcaacttccacatcttctaccagctcctcgccggcggcgaggaggagcgcctctcctacctcggcctcgagcgcgacccccagctctacaagtacctctcccagggccactgcgccaaggagtcctccatctccgacaagaacgactggaagaccgtctccaacgccttctccgtcatcgacttcaccgaggccgacctcgagaacctcttcggcatcatcgcctccgtcctccacctcggcaacatcggcttcgaggaggacgaccagggctgcgccaccatccccgacacccacgagatcaagtggatcgccaagctcctcggcgtccacccctccgtcctcctcgaggccctcacccaccgcaagatcgaggccaagaccgaggaggtcatctgccccctcaccctcgagctctccgtctacgcccgcgacgccatggccaaggccgtctacggccgcaccttcacctggctcgtcaacaagatcaactcctccctcgtcaacaaggacttcacccgcaagaccgtcatcggcctcctcgacatctacggcttcgaggtcttcgacaagaacggcttcgagcagttctgcatcaactactgcaacgagaagctccagcagctcctcatcgagcgcaccctcaaggccgagcaggccgagtacgagatggagggcatcgagtgggagcccatcaagtacttcaacaacaagatcatctgcgacctcgtcgaggagcgccacaagggcatcatctccatcctcgacgaggagtgcatccgccccggccccgccaccgacctctccttcctcgagaagctcgaggagaaggtcggcaagcacgcccacttcgagacccgcaagctcgccggccccaagggccgcaagcgcatcggctggatggagttccgcctcctccactacgccggcgaggtcacctactgcaccaagggcttcctcgagaagaacaacgacctcctctaccgccacctcaaggaggtcctctgcaagtccaagaacatcatcctccgcgagtgcttcctcctcgccgagctcgagaaccgccgccgcccccccaccgtcggcacccagttcaagaactccctctcctccctcctcgagaccctcatctccaaggagccctcctacatccgctgcatcaagcccaacgaccgcaaggagccctccaagttcgacgacttcctcatccgccaccagatcaagtacctcggcctcatggagcacctccgcgtccgccgcgccggcttcgcctaccgccgcaagtacgagcacttcctccagcgctacaagtccctctgccccgacacctggccccactggcacggcccccccgccgagggcgtcgagcgcctcatcaagtacatcggctacaagcccgaggagtacaagctcggcaagaccaagatcttcatccgcttcccccgcaccctcttcgccaccgaggacgccttcgagttctccaagcaccagctcgtcgcccgcatccaggccacctacaagcgctgcctcggccgccgcgagtacgtcaagaagcgccaggccgccatcaagctcgaggcccactggcgcggcgccctcgcccgcaaggccatccagcgccgcaagtgggccgtccgcatcatccgcaagttcatcaagggcttcatctcccgcaacaagcccctctgccccgacaacgaggagttcatcgtcttcgtccgcaagaactacatcctcaacctccgctaccacctccccaagaccgtcctcgacaagtcctggctccgcccccccggcatcctcgagaacgcctccgacctcctccgcaagatgtgcgtccgcaacctcgtccagaagtactgccgcggcatcaccgccgagcgcaaggccatgatgcagcagaaggtcgtcacctccgagatcttccgcggccgcaaggacggctacaccgagtccctcaaccagcccttcgtcaactcccgcatcgacgagggcgacatcaaccccaaggtcctccagctcatctcccacgagaagatccagtacggcgtccccgtcatcaagtacgaccgcaagggcttcaaggcccgccagcgccagctcatcctcacccagaaggccgcctacgtcgtcgagctcgccaagatcaagcagaagatcgagtactccgccctcaagggcgtctccacctccaacctctccgacggcatcctcgtcatccacgtctcccccgaggactccaagcagaagggcgacgccgtcctccagtgcggccacgtcttcgaggccgtcaccaagctcgtcatgctcgtcaagaaggagaacatcgtcaacgtcgtccagggctccctccagttcttcatctcccccggcaaggagggcaccatcgtcttcgacaccggcctcgaggagcaggtctacaagaacaagaacggccagctcaccgtcgtctccgtccgccgcaagtcctga

SEQ ID NO: 2845 - RNA, 3069 nt, synthetic construct
  misc_feature 1..3069: note = derived and/or modified sequence opt3 fromMYO1H__Homo_sapiens__CCDS53826.1
  source 1..3069: mol_type = other RNA
atggagggcgccctgaccgctagagacaaggtgggggtccaggatttcgttctccttgacgcatacacaagcgaatccgcctttgtggataacctgaggaaacggttctctgagaatttgatctatacttacattggaacgttactggtatcagtgaacccctatcaagaactaggtatatacaccgtcagtcagatggagctctatcagggcgtgaactttttcgaactgcctccacacgtttacgcgatcgctgacaatgcctatcgcatgatgtgcgcagagcttaataaccattttattctgatcagcggggagtccggagccggcaagacagaggcttctaaaaagattttggagtacttcgcagtgacttgtccgatgacccagtcgctccaaatcgcccgagatcgtctgctgttttcaaatcccgtcctcgaggctttcggtaacgccagaacattaaggaatgacaacagcagtcggtttgggaaatacatggatatacagttcgactttcagggaatccctgtgggcggccacattatctcctatctgattgagaagtctcgcgtagtttaccagaatgagggggaaagaaacttccatatcttttatcaacttttggcgggaggtgaggaagagaggctgagctacctaggcctcgaacgggatccacagctgtataagtacctttcccaggggcactgcgcaaaagagtcaagtataagcgacaagaatgattggaaaaccgtgtctaacgccttctccgtcattgacttcactgaggctgatctggaaaatttgtttggaatcattgcctcagtgctccatctgggcaacatcggtttcgaggaagacgaccaggggtgtgcaacaatccccgatacccacgagattaagtggatagctaaattactgggagtgcaccctagcgtcctccttgaagccctgacgcatcgcaagatcgaggcgaagactgaggaagttatttgcccattgaccctagagctgagtgtgtatgcccgagacgcaatggctaaagccgtatacggcagaacatttacttggctcgtgaacaagatcaattcttccctggtcaacaaagatttcaccaggaagacagtgataggccttctggacatttacgggtttgaagttttcgataaaaatggatttgagcaattctgtatcaactattgcaatgaaaagttgcagcagctcctgatcgagcggaccttaaaagctgagcaagccgaatacgagatggaaggtattgagtgggagcccatcaagtattttaacaataagattatatgtgacctggtggaagaacgtcacaaaggcatcattagcatcctagatgaagagtgcatccgccctgggccagcaacggacctctcgttcctggaaaaacttgaggagaaagtcggaaagcatgcccactttgaaactagaaaattggctggcccgaagggtaggaagcggattgggtggatggagttccgactgctccactacgcgggcgaagtgacatattgtaccaaaggatttctggagaagaacaatgatcttctgtaccgccatttgaaagaagtactctgcaagtctaaaaacataatcctgagagagtgtttcttactggcagagctagaaaataggcggcgaccccctactgttggcacacagttcaagaactccctctcaagtctgcttgagaccttgattagcaaggaaccatcctatatcagatgcattaaacccaatgacaggaaggagccttctaaatttgatgacttcctgatccgtcaccagataaagtacctcgggctgatggaacatttacgggtgcgcagagccggatttgcttacaggcgcaaatatgagcacttcctgcagcggtacaagagcctttgcccagacacgtggccccattggcacggtccgcctgccgagggcgtcgaaagattgatcaagtatattgggtacaaacccgaggaatataagctcggaaaaaccaagatctttattaggttcccacgcacactgtttgcaactgaggatgccttcgagttttcaaaacaccagctagtggctcgaatccaagccacctacaagcggtgtctgggccgtagagaatatgtcaaaaagaggcaggcagcgataaagctcgaggctcattggcgcggtgccctggcacggaaagccattcagagaaggaagtgggctgtgcgaatcattcgcaaattcatcaaggggtttataagtcggaacaaacctctttgccccgacaatgaagagttcatcgtttttgtgagaaagaactacattttgaacctgaggtaccacttaccaaagacagtactcgataaatcctggctgcgtccccctggcatccttgaaaatgccagcgacctgttgcgcaagatgtgtgtccggaacctcgtgcaaaaatattgcagaggaattactgcagagaggaaggctatgatgcagcagaaagttgtgacctctgagatcttccgaggccggaaggatgggtacacagaatcactgaatcagccattcgtcaacagtcgcatagacgagggagatattaatccgaaggtgctacaactgatcagccatgaaaagatccagtatggtgtacccgtgattaagtacgacagaaaaggctttaaggccaggcagcggcagctcatcctgacccaaaaagcggcctatgttgtcgagcttgctaagattaagcagaaaatagaatactccgcattgaagggggtgtctacttcgaacctgagcgatggaatcttagtgattcacgtctcccctgaggactcaaaacagaagggcgatgccgttctccaatgtggtcacgtgttcgaggctgtgacgaaactggtaatgcttgtcaagaaagaaaatatcgtgaacgttgtgcaggggagtctgcagtttttcatttctccaggcaaggagggaacaatcgtctttgacaccggcctagaagaacaggtgtataagaataaaaacgggcaactcactgttgtgagcgtacgaagaaagtcctga

SEQ ID NO: 2846 - RNA, 3069 nt, synthetic construct
  misc_feature 1..3069: note = derived and/or modified sequence opt4 fromMYO1H__Homo_sapiens__CCDS53826.1
  source 1..3069: mol_type = other RNA
atggagggcgccctgaccgccagagacaaggtgggcgtgcaggacttcgtgctgctggacgcctacaccagcgagagcgccttcgtggacaacctgagaaagagattcagcgagaacctgatctacacctacatcggcaccctgctggtgagcgtgaacccctaccaggagctgggcatctacaccgtgagccagatggagctgtaccagggcgtgaacttcttcgagctgcccccccacgtgtacgccatcgccgacaacgcctacagaatgatgtgcgccgagctgaacaaccacttcatcctgatcagcggcgagagcggcgccggcaagaccgaggccagcaagaagatcctggagtacttcgccgtgacctgccccatgacccagagcctgcagatcgccagagacagactgctgttcagcaaccccgtgctggaggccttcggcaacgccagaaccctgagaaacgacaacagcagcagattcggcaagtacatggacatccagttcgacttccagggcatccccgtgggcggccacatcatcagctacctgatcgagaagagcagagtggtgtaccagaacgagggcgagagaaacttccacatcttctaccagctgctggccggcggcgaggaggagagactgagctacctgggcctggagagagacccccagctgtacaagtacctgagccagggccactgcgccaaggagagcagcatcagcgacaagaacgactggaagaccgtgagcaacgccttcagcgtgatcgacttcaccgaggccgacctggagaacctgttcggcatcatcgccagcgtgctgcacctgggcaacatcggcttcgaggaggacgaccagggctgcgccaccatccccgacacccacgagatcaagtggatcgccaagctgctgggcgtgcaccccagcgtgctgctggaggccctgacccacagaaagatcgaggccaagaccgaggaggtgatctgccccctgaccctggagctgagcgtgtacgccagagacgccatggccaaggccgtgtacggcagaaccttcacctggctggtgaacaagatcaacagcagcctggtgaacaaggacttcaccagaaagaccgtgatcggcctgctggacatctacggcttcgaggtgttcgacaagaacggcttcgagcagttctgcatcaactactgcaacgagaagctgcagcagctgctgatcgagagaaccctgaaggccgagcaggccgagtacgagatggagggcatcgagtgggagcccatcaagtacttcaacaacaagatcatctgcgacctggtggaggagagacacaagggcatcatcagcatcctggacgaggagtgcatcagacccggccccgccaccgacctgagcttcctggagaagctggaggagaaggtgggcaagcacgcccacttcgagaccagaaagctggccggccccaagggcagaaagagaatcggctggatggagttcagactgctgcactacgccggcgaggtgacctactgcaccaagggcttcctggagaagaacaacgacctgctgtacagacacctgaaggaggtgctgtgcaagagcaagaacatcatcctgagagagtgcttcctgctggccgagctggagaacagaagaagaccccccaccgtgggcacccagttcaagaacagcctgagcagcctgctggagaccctgatcagcaaggagcccagctacatcagatgcatcaagcccaacgacagaaaggagcccagcaagttcgacgacttcctgatcagacaccagatcaagtacctgggcctgatggagcacctgagagtgagaagagccggcttcgcctacagaagaaagtacgagcacttcctgcagagatacaagagcctgtgccccgacacctggccccactggcacggcccccccgccgagggcgtggagagactgatcaagtacatcggctacaagcccgaggagtacaagctgggcaagaccaagatcttcatcagattccccagaaccctgttcgccaccgaggacgccttcgagttcagcaagcaccagctggtggccagaatccaggccacctacaagagatgcctgggcagaagagagtacgtgaagaagagacaggccgccatcaagctggaggcccactggagaggcgccctggccagaaaggccatccagagaagaaagtgggccgtgagaatcatcagaaagttcatcaagggcttcatcagcagaaacaagcccctgtgccccgacaacgaggagttcatcgtgttcgtgagaaagaactacatcctgaacctgagataccacctgcccaagaccgtgctggacaagagctggctgagaccccccggcatcctggagaacgccagcgacctgctgagaaagatgtgcgtgagaaacctggtgcagaagtactgcagaggcatcaccgccgagagaaaggccatgatgcagcagaaggtggtgaccagcgagatcttcagaggcagaaaggacggctacaccgagagcctgaaccagcccttcgtgaacagcagaatcgacgagggcgacatcaaccccaaggtgctgcagctgatcagccacgagaagatccagtacggcgtgcccgtgatcaagtacgacagaaagggcttcaaggccagacagagacagctgatcctgacccagaaggccgcctacgtggtggagctggccaagatcaagcagaagatcgagtacagcgccctgaagggcgtgagcaccagcaacctgagcgacggcatcctggtgatccacgtgagccccgaggacagcaagcagaagggcgacgccgtgctgcagtgcggccacgtgttcgaggccgtgaccaagctggtgatgctggtgaagaaggagaacatcgtgaacgtggtgcagggcagcctgcagttcttcatcagccccggcaaggagggcaccatcgtgttcgacaccggcctggaggagcaggtgtacaagaacaagaacggccagctgaccgtggtgagcgtgagaagaaagagctga

SEQ ID NO: 2847 - RNA, 3069 nt, synthetic construct
  misc_feature 1..3069: note = derived and/or modified sequence opt5 fromMYO1H__Homo_sapiens__CCDS53826.1
  source 1..3069: mol_type = other RNA
atggagggcgccctgaccgctagagacaaggtgggggtccaggatttcgttctcctggacgcctacacaagcgaatccgcgtttgtggataaccttcggaaacgcttctctgagaatctgatctatacgtacattggaaccctcctggtgagcgtcaacccctatcaagaacttggcatctacacagtgtcccagatggagctgtatcagggggttaactttttcgaactccctccgcacgtgtacgctattgccgacaatgcctatagaatgatgtgcgctgagctgaataaccattttatcctgatttctggagagagcggcgccgggaagaccgaggcttccaaaaagatcctcgagtacttcgccgtcacatgtcccatgacccagtctctgcaaatcgcgcgggatcgccttctgtttagcaatcctgtgctcgaagccttcggaaacgctagaacactgcggaatgacaactccagccgctttggcaaatacatggatattcagttcgactttcagggcatccccgttgggggacacattatctcttatcttattgagaagtccagagtggtctaccagaatgagggcgaacggaacttccatatcttttatcaactgctcgccgggggagaggaagaacgcctgagctacctgggcctcgaaagagatcctcagctgtataagtacctttctcaggggcactgcgctaaagagtccagcatttctgacaagaatgattggaaaaccgtgtccaacgccttcagcgtgatcgacttcacggaggcggatctggaaaatctctttggaatcattgcctccgtcctgcatcttggcaacatcggcttcgaggaagacgaccaggggtgtgctaccattcccgatacacacgagatcaagtggattgccaaactgctcggagttcacccttctgtgctgctggaagctctcacccatcggaagatcgaggccaagacagaggaagtgatctgcccgctgacccttgagctgagcgtctatgcccgcgacgctatggcgaaagccgtgtacggcagaacgtttacatggctcgttaacaagattaattccagcctggtgaacaaagatttcacccggaagacagtcatcgggcttctggacatttacggatttgaagtgttcgataaaaatggctttgagcaattctgtatcaactattgcaatgaaaagctccagcagctgctgattgagcgcaccctcaaagctgagcaagccgaatacgagatggaagggatcgagtgggagcccatcaagtattttaacaataagattatctgtgacctggttgaagagagacacaaaggaattatctctattcttgatgaagagtgcatccggcctggccccgccaccgacctgtccttcctcgaaaagctggaggagaaagtgggcaagcatgctcactttgaaacaagaaaactggccgggcctaagggacgcaagcggattggctggatggagttcagacttctccactacgcgggggaagtcacgtattgtaccaaaggatttctggagaagaacaatgatctgctctaccgccatctgaaagaagtgctttgcaagagcaaaaacatcatcctgcgggagtgtttcctcctggctgagctggaaaatagacgccggcccccgacagtcggcacccagttcaagaactctcttagctccctcctggagacactgatttctaaggaacctagctatatcagatgcattaaacccaatgaccgcaaggagccttccaaatttgatgacttcctcatccggcaccagattaagtacctggggcttatggaacatctgagagtgcgccgggccggctttgcctacagacggaaatatgagcacttcctccagcgctacaagagcctgtgccccgacacctggccccattggcacggacctccggctgagggcgttgaaagactgatcaagtatatcgggtacaaacccgaggaatataaacttggaaaaacgaagatttttatccggttccctagaacactctttgccaccgaggatgctttcgagttttctaaacaccaactggtggcccgcattcaggcgacctacaagcggtgtctgggcagacgcgaatatgtcaaaaagagacaggccgctatcaagctcgaggcccattggcgcggggctctggcccggaaagcgattcagagacggaagtgggccgtgcgcatcatcagaaaattcattaagggatttatctcccggaacaaacccctttgccctgacaatgaagagttcattgtttttgtgcgcaagaactacatcctgaacctcagataccatctgcccaagacagtcctggataaaagctggcttcggccgcctggcattctcgaaaatgcttctgacctgctgcgcaagatgtgtgtgagaaacctcgtgcaaaaatattgccgggggatcaccgccgagagaaaggctatgatgcagcagaaagttgtcacatccgagatcttccgcggccggaaggatggatacacggaaagcctgaatcagcccttcgtgaactccagaattgacgagggcgatatcaatcctaaggtgcttcaactgatttctcacgaaaagatccagtatggggtccccgtgattaagtacgaccgcaaaggatttaaggcccggcagagacagctcatcctgacccaaaaagccgcttatgttgtggagctggcgaagattaagcagaaaatcgaatacagcgcccttaagggcgtctccacatctaacctgagcgatgggatcctcgtgattcacgtttcccctgaggacagcaaacagaagggagatgctgtgctgcaatgtggccacgtcttcgaggccgtgaccaaactcgttatgctggtgaagaaagaaaatatcgtcaacgtggtgcaggggtctcttcagtttttcatttcccccggcaaggagggaacaatcgtctttgacaccggcctggaggaacaggtttataagaataaaaacgggcaactcacggtggtgagcgtccgccggaagtcttga

SEQ ID NO: 2848 - protein, 792 aa, synthetic construct
  REGION 1..792: note = NA17__Homo_sapiens__Q3V5L5
MITVNPDGKIMVRRCLVTLRPFRLFVLGIGFFTLCFLMTSLGGQFSARRLGDSPFTIRTEVMGGPESRGVLRKMSDLLELMVKRMDALARLENSSELHRAGGDLHFPADRMPPGAGLMERIQAIAQNVSDIAVKVDQILRHSLLLHSKVSEGRRDQCEAPSDPKFPDCSGKVEWMRARWTSDPCYAFFGVDGTECSFLIYLSEVEWFCPPLPWRNQTAAQRAPKPLPKVQAVFRSNLSHLLDLMGSGKESLIFMKKRTKRLTAQWALAAQRLAQKLGATQRDQKQILVHIGFLTEESGDVFSPRVLKGGPLGEMVQWADILTALYVLGHGLRVTVSLKELQSNLGVPPGRGSCPLTMPLPFDLIYTDYHGLQQMKRHMGLSFKKYRCRIRVIDTFGTEPAYNHEEYATLHGYRTNWGYWNLNPKQFMTMFPHTPDNSFMGFVSEELNETEKRLIKGGKASNMAVVYGKEASIWKLQGKEKFLGILNKYMEIHGTVYYESQRPPEVPAFVKNHGLLPQPEFQQLLRKAKLFIGFGFPYEGPAPLEAIANGCIFLQSRFSPPHSSLNHEFFRGKPTSREVFSQHPYAENFIGKPHVWTVDYNNSEEFEAAIKAIMRTQVDPYLPYEYTCEGMLERIHAYIQHQDFCRAPDPALPEAHAPQSPFVLAPNATHLEWARNTSLAPGAWPPAHALRAWLAVPGRACTDTCLDHGLICEPSFFPFLNSQDAFLKLQVPCDSTESEMNHLYPAFAQPGQECYLQKEPLLFSCAGSNTKYRRLCPCRDFRKGQVALCQGCL

SEQ ID NO: 2849 - RNA, 2379 nt, synthetic construct
  misc_feature 1..2379: note = NA17__Homo_sapiens__BAC84969
  source 1..2379: mol_type = other RNA
atgatcaccgtcaaccccgatgggaagataatggtcagaagatgcctggtcaccctgagaccctttcggctttttgtcctgggcatcggcttcttcactctctgcttcctgatgacgtctctgggaggccagttctcggcccggcgcctgggggactcgccattcaccatccgcacagaagtgatggggggccccgagtcccgcggcgtcctgcgcaagatgagcgacctgctggagctgatggtgaagcgcatggacgcactggccaggctggagaacagcagtgagctgcaccgggccggcggcgacctgcactttcccgcagacaggatgccccctggggccggcctcatggagcggatccaggctattgcccagaacgtctccgacatcgctgtgaaggtggaccagatcctgcgccacagtctgctcctgcacagcaaggtgtcagaaggccggcgggaccagtgtgaggcacccagtgaccccaagttccctgactgctcagggaaggtggagtggatgcgtgcccgctggacctctgacccctgctacgccttctttggggtggacggcaccgagtgctccttcctcatctacctcagtgaggtcgagtggttctgccccccgctgccctggaggaaccagacggctgcccagagggcacccaagcccctccccaaagtccaggcagttttccgaagcaacctgtcccaccttctggacctgatgggcagcgggaaggagtccctgatcttcatgaagaagcggaccaagaggctcacagcccagtgggcgctggctgcccagcgcctggcacagaagctgggggccacccagagggaccagaagcagatcctggtccacatcggcttcctgacggaggagtccggggacgtgttcagccctcgggtcctgaagggcgggcccctaggggagatggtgcagtgggcggacattctgactgcactctatgtcctgggccatggcctgcgggtcacagtctccctgaaggagctgcagagtaacttaggggtaccgccaggccggggaagctgcccgctcaccatgcccctgcccttcgacctcatctacaccgactaccacggcctgcagcagatgaagcggcacatgggactctccttcaagaagtaccggtgccgaatcagggtcatcgacaccttcgggacggaacctgcgtacaaccacgaggagtacgccacgctgcacggctaccggaccaactggggctactggaacctcaaccccaagcagttcatgaccatgtttcctcatacccccgacaactccttcatgggcttcgtgtccgaggagctcaacgagacggagaagcggctcatcaaaggcggcaaggccagcaacatggccgtggtgtacggcaaggaggcgagcatctggaagctccaggggaaggagaagttcctgggcatcctgaacaaatacatggagatccatggcaccgtgtactacgagagccagcggccccccgaggtgccagcctttgtgaagaaccacggcctcttaccgcagcctgagtttcagcagctgctgcgcaaggccaaactcttcatcgggtttggcttcccctacgagggccccgcccccctggaggccatcgccaatggttgcatcttcctgcagtcccgcttcagcccgccccacagctccctcaaccacgagttcttccgaggcaagcccacctccagagaggtgttctcccagcatccctacgcggagaacttcatcggcaagccccacgtgtggacagtcgactacaacaactcagaggagtttgaagcagccatcaaggccattatgagaactcaggtagacccctacctaccctatgagtacacctgcgaggggatgctggagcggatccacgcctacatccagcaccaggacttctgcagagctccagaccctgccctaccagaggcccacgccccgcagagcccctttgtcctggcccccaatgccacccacctcgagtgggctcggaacaccagcttggctcctggggcctggccccccgcgcacgccctgcgggcctggctggccgtgcctgggagggcctgcaccgacacctgcctggaccacgggctaatctgtgagccctccttcttccccttcctgaacagccaggacgccttcctcaagctgcaggtgccctgtgacagcaccgagtcggagatgaaccacctgtacccggcgttcgcccagcctggccaggagtgctacctgcagaaggagcctctgctcttcagctgcgccggctccaacaccaagtaccgccggctctgcccctgccgcgacttccgcaagggccaggtggccttgtgccagggctgtctgtga

SEQ ID NO: 2850 - RNA, 2379 nt, synthetic construct
  misc_feature 1..2379: note = derived and/or modified sequence opt1 fromNA17__Homo_sapiens__BAC84969
  source 1..2379: mol_type = other RNA
atgatcaccgtgaaccccgacggcaagatcatggtccgccggtgcctggtgaccctccgcccgttccggctgttcgtgctggggatcggcttcttcacgctctgcttcctgatgaccagcctcgggggccagttctccgcccgccggctgggggacagccccttcaccatccgcaccgaggtcatgggcggccccgagtcccgcggggtgctgcgcaagatgagcgacctgctcgagctgatggtgaagcggatggacgccctggcgcgcctcgagaactccagcgagctgcaccgggccggcggggacctgcacttccccgccgaccgcatgccgcccggcgccgggctcatggagcggatccaggccatcgcgcagaacgtctccgacatcgccgtgaaggtggaccagatcctgcgccacagcctgctcctgcactccaaggtcagcgagggccggcgcgaccagtgcgaggccccctccgaccccaagttcccggactgcagcggcaaggtggagtggatgcgggcccgctggacgtccgacccctgctacgcgttcttcggggtggacggcaccgagtgcagcttcctgatctacctctccgaggtcgagtggttctgcccgcccctgccctggcggaaccagaccgccgcccagcgcgcccccaagcccctgcccaaggtgcaggccgtgttccggagcaacctctcccacctcctggacctgatggggagcggcaaggagtccctgatcttcatgaagaagcgcaccaagcgcctgacggcgcagtgggccctcgccgcccagcggctggcccagaagctgggcgcgacccagcgcgaccagaagcagatcctcgtccacatcgggttcctgaccgaggagagcggcgacgtgttcagcccgcgggtgctgaagggcgggcccctcggggagatggtccagtgggccgacatcctgaccgccctgtacgtgctcggccacggcctgcgcgtgacggtctccctgaaggagctccagagcaacctgggggtgccgcccggccgggggtcctgccccctgaccatgcccctccccttcgacctgatctacaccgactaccacggcctgcagcagatgaagcgccacatggggctcagcttcaagaagtaccggtgccgcatccgggtgatcgacaccttcggcacggagcccgcctacaaccacgaggagtacgccaccctgcacggctaccgcaccaactgggggtactggaacctgaacccgaagcagttcatgaccatgttcccccacacgcccgacaactccttcatgggcttcgtcagcgaggagctgaacgagaccgagaagcggctcatcaagggcgggaaggcgtccaacatggccgtggtctacgggaaggaggccagcatctggaagctgcagggcaaggagaagttcctgggcatcctcaacaagtacatggagatccacgggaccgtgtactacgagtcccagcggcccccggaggtgcccgccttcgtcaagaaccacggcctgctgccccagccggagttccagcagctcctgcggaaggccaagctgttcatcgggttcggcttcccctacgagggccccgcgcccctcgaggccatcgccaacgggtgcatcttcctgcagagccgcttctccccgccccacagctccctgaaccacgagttcttccggggcaagcccaccagccgcgaggtgttctcccagcacccctacgccgagaacttcatcgggaagccgcacgtgtggacggtcgactacaacaacagcgaggagttcgaggcggccatcaaggccatcatgcggacccaggtggacccctacctcccctacgagtacacgtgcgagggcatgctggagcgcatccacgcctacatccagcaccaggacttctgccgggcccccgacccggcgctgcccgaggcccacgcgccccagtcccccttcgtgctcgccccgaacgccacccacctggagtgggcccgcaacaccagcctggcccccggggcctggccgcccgcccacgccctccgcgcgtggctggccgtccccggccgggcctgcaccgacacgtgcctggaccacggcctcatctgcgagccctccttcttccccttcctgaacagccaggacgccttcctgaagctccaggtgccctgcgacagcaccgagtccgagatgaaccacctgtacccggcgttcgcccagcccgggcaggagtgctacctgcagaaggagcccctcctgttcagctgcgccggctccaacaccaagtaccgccggctgtgcccgtgccgcgacttccggaagggccaggtggccctctgccaggggtgcctgtga

SEQ ID NO: 2851 - RNA, 2379 nt, synthetic construct
  misc_feature 1..2379: note = derived and/or modified sequence opt2 fromNA17__Homo_sapiens__BAC84969
  source 1..2379: mol_type = other RNA
atgatcaccgtcaaccccgacggcaagatcatggtccgccgctgcctcgtcaccctccgccccttccgcctcttcgtcctcggcatcggcttcttcaccctctgcttcctcatgacctccctcggcggccagttctccgcccgccgcctcggcgactcccccttcaccatccgcaccgaggtcatgggcggccccgagtcccgcggcgtcctccgcaagatgtccgacctcctcgagctcatggtcaagcgcatggacgccctcgcccgcctcgagaactcctccgagctccaccgcgccggcggcgacctccacttccccgccgaccgcatgccccccggcgccggcctcatggagcgcatccaggccatcgcccagaacgtctccgacatcgccgtcaaggtcgaccagatcctccgccactccctcctcctccactccaaggtctccgagggccgccgcgaccagtgcgaggccccctccgaccccaagttccccgactgctccggcaaggtcgagtggatgcgcgcccgctggacctccgacccctgctacgccttcttcggcgtcgacggcaccgagtgctccttcctcatctacctctccgaggtcgagtggttctgcccccccctcccctggcgcaaccagaccgccgcccagcgcgcccccaagcccctccccaaggtccaggccgtcttccgctccaacctctcccacctcctcgacctcatgggctccggcaaggagtccctcatcttcatgaagaagcgcaccaagcgcctcaccgcccagtgggccctcgccgcccagcgcctcgcccagaagctcggcgccacccagcgcgaccagaagcagatcctcgtccacatcggcttcctcaccgaggagtccggcgacgtcttctccccccgcgtcctcaagggcggccccctcggcgagatggtccagtgggccgacatcctcaccgccctctacgtcctcggccacggcctccgcgtcaccgtctccctcaaggagctccagtccaacctcggcgtcccccccggccgcggctcctgccccctcaccatgcccctccccttcgacctcatctacaccgactaccacggcctccagcagatgaagcgccacatgggcctctccttcaagaagtaccgctgccgcatccgcgtcatcgacaccttcggcaccgagcccgcctacaaccacgaggagtacgccaccctccacggctaccgcaccaactggggctactggaacctcaaccccaagcagttcatgaccatgttcccccacacccccgacaactccttcatgggcttcgtctccgaggagctcaacgagaccgagaagcgcctcatcaagggcggcaaggcctccaacatggccgtcgtctacggcaaggaggcctccatctggaagctccagggcaaggagaagttcctcggcatcctcaacaagtacatggagatccacggcaccgtctactacgagtcccagcgcccccccgaggtccccgccttcgtcaagaaccacggcctcctcccccagcccgagttccagcagctcctccgcaaggccaagctcttcatcggcttcggcttcccctacgagggccccgcccccctcgaggccatcgccaacggctgcatcttcctccagtcccgcttctcccccccccactcctccctcaaccacgagttcttccgcggcaagcccacctcccgcgaggtcttctcccagcacccctacgccgagaacttcatcggcaagccccacgtctggaccgtcgactacaacaactccgaggagttcgaggccgccatcaaggccatcatgcgcacccaggtcgacccctacctcccctacgagtacacctgcgagggcatgctcgagcgcatccacgcctacatccagcaccaggacttctgccgcgcccccgaccccgccctccccgaggcccacgccccccagtcccccttcgtcctcgcccccaacgccacccacctcgagtgggcccgcaacacctccctcgcccccggcgcctggccccccgcccacgccctccgcgcctggctcgccgtccccggccgcgcctgcaccgacacctgcctcgaccacggcctcatctgcgagccctccttcttccccttcctcaactcccaggacgccttcctcaagctccaggtcccctgcgactccaccgagtccgagatgaaccacctctaccccgccttcgcccagcccggccaggagtgctacctccagaaggagcccctcctcttctcctgcgccggctccaacaccaagtaccgccgcctctgcccctgccgcgacttccgcaagggccaggtcgccctctgccagggctgcctctga

SEQ ID NO: 2852 - RNA, 2379 nt, synthetic construct
  misc_feature 1..2379: note = derived and/or modified sequence opt3 fromNA17__Homo_sapiens__BAC84969
  source 1..2379: mol_type = other RNA
atgatcaccgtgaaccccgacggcaagattatggtcagaaggtgcctggttacactccggcctttccgcctttttgtgctggggataggattctttactttgtgtttcttaatgacgagcctgggtggccagttttccgcccgacgtctaggggattctccattcaccatcagaacagaggtaatgggaggcccggaatcaaggggtgtgctccggaaaatgagtgacctgcttgagctgatggtcaagcgcatggatgctttggcaagactcgaaaatagctccgagctgcacagggccgggggagacctgcattttcccgcggatcggatgcctccaggcgctggcctcatggaacgcattcaagccatcgcacagaacgtgtctgacattgccgttaaagtggatcagatcttacgacactcgctgcttttgcattcaaaggtcagcgaggggagaagggaccagtgcgaggctcccagtgatcctaaattcccagactgttccggaaaggtggaatggatgcgggcacgttggacttctgatccctgctacgcctttttcggtgtagacggcaccgagtgtagctttctgatatatctatccgaagttgagtggttctgccctccactcccgtggcgcaatcaaacagctgcccagagagcgcccaagcctctgccaaaagtgcaggcagtctttaggtcaaaccttagtcacctgttggatctcatggggagcggaaaggagtctctgatcttcatgaaaaagcggaccaaacgattaactgcccagtgggctctggccgcacaacgcctcgctcagaagctgggcgccacacagagagaccagaagcaaattctggtgcatatcggtttcttgaccgaagagtccggggacgtgttttcacccagggtcctaaaaggaggccctctgggcgaaatggttcagtgggcggatattctcacggccctgtacgtgcttgggcacggactgcgggtaactgtgagcttgaaggagctccagagtaatctgggtgtcccacccggccgcgggtcttgtccgttaaccatgcctctgcccttcgacctaatctatacagattaccacggactccaacagatgaaaagacatatgggcctgtcctttaagaaatataggtgccgtatacgggtgattgacactttcggtaccgaaccagcatacaaccacgaggagtatgctacacttcatgggtaccgaaccaattggggctactggaacttgaatcctaagcagtttatgacgatgttcccccacactccagataacagctttatgggattcgtttcggaggaactgaatgaaacagagaaaagactcatcaagggcgggaaggcctctaacatggctgtggtctatggaaaagaagcctccatttggaagctgcagggtaaagagaagtttcttggcatcctgaataaatacatggagatccacgggaccgtgtattacgaatcacaaaggccccctgaggtaccagcattcgttaagaaccatggattgctcccgcagcccgaatttcagcagctgttacgcaaggccaaactgttcattggctttggtttcccttatgaggggccagctcccctagaagcgatagcaaatggctgtatcttcctccaaagtcggtttagccctccacactcctctctgaaccatgagttctttagaggaaagcccactagcagggaggtgttctcacagcacccgtacgccgaaaactttattggcaaacctcatgtctggacagtggactataataacagtgaggaatttgaggctgccatcaaggcaataatgcgcacccaggtcgatccataccttccctacgagtatacgtgcgaagggatgttggagcggattcacgcctacatccagcaccaagacttttgtcgagctcctgatcccgccctgccagaagcacatgcgcctcagtcccccttcgtgctcgctccaaatgccacccacctggagtgggcacgtaacacaagcctggccccgggagcttggcctcccgcccatgcactgagagcttggcttgccgttccaggtagggcgtgcactgatacctgcttggaccacggcctcatctgtgaaccctctttcttcccttttcttaattcacaggacgccttcctaaaattacaggtgccatgcgacagtacagagagcgagatgaaccacctctatcccgcttttgcacaacctgggcaggaatgttacctgcagaaggagccgcttttgttctcctgcgccggatctaatactaagtatcgccggctgtgtccatgcagagatttcaggaaaggccaagtagctttatgtcagggttgcctctga

SEQ ID NO: 2853 - RNA, 2379 nt, synthetic construct
  misc_feature 1..2379: note = derived and/or modified sequence opt4 fromNA17__Homo_sapiens__BAC84969
  source 1..2379: mol_type = other RNA
atgatcaccgtgaaccccgacggcaagatcatggtgagaagatgcctggtgaccctgagacccttcagactgttcgtgctgggcatcggcttcttcaccctgtgcttcctgatgaccagcctgggcggccagttcagcgccagaagactgggcgacagccccttcaccatcagaaccgaggtgatgggcggccccgagagcagaggcgtgctgagaaagatgagcgacctgctggagctgatggtgaagagaatggacgccctggccagactggagaacagcagcgagctgcacagagccggcggcgacctgcacttccccgccgacagaatgccccccggcgccggcctgatggagagaatccaggccatcgcccagaacgtgagcgacatcgccgtgaaggtggaccagatcctgagacacagcctgctgctgcacagcaaggtgagcgagggcagaagagaccagtgcgaggcccccagcgaccccaagttccccgactgcagcggcaaggtggagtggatgagagccagatggaccagcgacccctgctacgccttcttcggcgtggacggcaccgagtgcagcttcctgatctacctgagcgaggtggagtggttctgcccccccctgccctggagaaaccagaccgccgcccagagagcccccaagcccctgcccaaggtgcaggccgtgttcagaagcaacctgagccacctgctggacctgatgggcagcggcaaggagagcctgatcttcatgaagaagagaaccaagagactgaccgcccagtgggccctggccgcccagagactggcccagaagctgggcgccacccagagagaccagaagcagatcctggtgcacatcggcttcctgaccgaggagagcggcgacgtgttcagccccagagtgctgaagggcggccccctgggcgagatggtgcagtgggccgacatcctgaccgccctgtacgtgctgggccacggcctgagagtgaccgtgagcctgaaggagctgcagagcaacctgggcgtgccccccggcagaggcagctgccccctgaccatgcccctgcccttcgacctgatctacaccgactaccacggcctgcagcagatgaagagacacatgggcctgagcttcaagaagtacagatgcagaatcagagtgatcgacaccttcggcaccgagcccgcctacaaccacgaggagtacgccaccctgcacggctacagaaccaactggggctactggaacctgaaccccaagcagttcatgaccatgttcccccacacccccgacaacagcttcatgggcttcgtgagcgaggagctgaacgagaccgagaagagactgatcaagggcggcaaggccagcaacatggccgtggtgtacggcaaggaggccagcatctggaagctgcagggcaaggagaagttcctgggcatcctgaacaagtacatggagatccacggcaccgtgtactacgagagccagagaccccccgaggtgcccgccttcgtgaagaaccacggcctgctgccccagcccgagttccagcagctgctgagaaaggccaagctgttcatcggcttcggcttcccctacgagggccccgcccccctggaggccatcgccaacggctgcatcttcctgcagagcagattcagccccccccacagcagcctgaaccacgagttcttcagaggcaagcccaccagcagagaggtgttcagccagcacccctacgccgagaacttcatcggcaagccccacgtgtggaccgtggactacaacaacagcgaggagttcgaggccgccatcaaggccatcatgagaacccaggtggacccctacctgccctacgagtacacctgcgagggcatgctggagagaatccacgcctacatccagcaccaggacttctgcagagcccccgaccccgccctgcccgaggcccacgccccccagagccccttcgtgctggcccccaacgccacccacctggagtgggccagaaacaccagcctggcccccggcgcctggccccccgcccacgccctgagagcctggctggccgtgcccggcagagcctgcaccgacacctgcctggaccacggcctgatctgcgagcccagcttcttccccttcctgaacagccaggacgccttcctgaagctgcaggtgccctgcgacagcaccgagagcgagatgaaccacctgtaccccgccttcgcccagcccggccaggagtgctacctgcagaaggagcccctgctgttcagctgcgccggcagcaacaccaagtacagaagactgtgcccctgcagagacttcagaaagggccaggtggccctgtgccagggctgcctgtga

SEQ ID NO: 2854 - RNA, 2379 nt, synthetic construct
  misc_feature 1..2379: note = derived and/or modified sequence opt5 fromNA17__Homo_sapiens__BAC84969
  source 1..2379: mol_type = other RNA
atgatcaccgtgaaccccgacggcaagattatggtcagacggtgcctggttacactccgccctttcagactgtttgtgcttgggatcggattctttacgctgtgtttcctcatgaccagcctgggcgggcagttttccgcccggcgccttggagattctccgttcacaattagaaccgaggtgatgggcgggcccgaaagccggggagtcctgcgcaaaatgtccgacctcctggagctgatggtgaagagaatggatgctctcgcccggctggaaaattctagcgagcttcaccgcgcgggcggcgacctgcattttcctgctgatagaatgccccctggggccggactcatggaacggatccaagccattgctcagaacgtttccgacatcgccgtgaaagtcgatcagatcctgcgccactctcttctgctccatagcaaggtgtccgagggcagacgggaccagtgcgaggctcccagcgatcctaaattcccggactgttctgggaaggttgaatggatgcgcgccagatggacatccgatccctgctacgcgtttttcggagtggacggcaccgagtgtagctttctgatttatctgtctgaagtcgagtggttctgccctcccctcccttggcggaatcaaacagccgctcagagagcccccaagccgctgcctaaagtgcaggctgtgtttcgctccaaccttagccatctgctcgatctgatggggtctggaaaggagtcccttatcttcatgaaaaagcggaccaaaagactgacggcccagtgggcgctcgccgctcaacgcctggcccagaagctgggcgctacccagcgggaccagaagcaaattctcgtccacatcggcttcctgacagaagagagcggggacgttttctcccccagagtgcttaaaggaggccctctgggggaaatggtgcagtgggccgatattctcaccgccctgtacgtccttggacacggcctgcgcgtgacagtttctctcaaggagctgcagagcaatctgggggtgcctcccggacggggctcctgtcccctcaccatgccgctgcccttcgaccttatctatacggattaccacggcctgcaacagatgaaaagacatatggggctcagctttaagaaatatcgctgccggattagagtcatcgacacattcggaaccgaacctgcttacaaccacgaggagtatgcgacactgcatggctaccgcaccaattgggggtactggaacctgaatcccaagcagtttatgaccatgttccctcacacacccgataactcttttatgggattcgtgtccgaggaacttaatgaaacggagaaacggctcatcaagggcgggaaggccagcaacatggctgttgtgtatggcaaagaagcctctatttggaagctgcagggaaaagagaagtttctgggcatcctcaataaatacatggagattcacgggaccgtctattacgaaagccaaagaccgcctgaggtgcccgccttcgtcaagaaccatggactgcttcctcagcccgaatttcagcagctgctccggaaggctaaactgttcatcggctttgggttcccttatgagggacccgccccgctggaagcgattgctaatggctgtatcttccttcaatcccgcttttctcctccccacagctccctcaaccatgagttctttagagggaagcccacaagccgggaggtgttctctcagcacccttacgccgaaaactttatcggcaaaccgcatgtttggaccgtggactataataactccgaggaatttgaggccgctattaaggccatcatgagaacacaggtcgatccctacctgccttacgagtatacctgcgaaggaatgctggagcgcattcacgcttacatccagcaccaagacttttgtcgggcccccgatcctgcgctccccgaagcccatgctcctcagagccccttcgtgctggccccgaatgctacgcaccttgagtgggccagaaacacatctctggcgcctggcgcctggccccctgctcatgccctccgcgcttggctggccgttcccgggagagcctgcaccgatacctgcctggaccacggacttatttgtgaaccgtcctttttcccttttctcaatagccaggacgctttcctgaaactccaggtgccctgcgactccacagagtctgagatgaaccacctgtatcctgcgtttgcccaacccggccaggaatgttacctgcagaaggagccccttctgttcagctgcgctgggtccaataccaagtatcggcgcctctgtccttgcagagatttccggaaaggacaagtcgccctgtgtcagggctgcctgtga

SEQ ID NO: 2855 - protein, 11 aa, synthetic construct
  REGION 1..11: note = NA88-A__Homo_sapiens__10790436
MTQGQHFLQKV

SEQ ID NO: 2856 - RNA, 36 nt, synthetic construct
  misc_feature 1..36: note = NA88-A__Homo_sapiens__AF164963.1
  source 1..36: mol_type = other RNA
atgactcaaggacagcacttcctgcagaaagtctag

SEQ ID NO: 2857 - RNA, 36 nt, synthetic construct
  misc_feature 1..36: note = derived and/or modified sequence opt1 fromNA88-A__Homo_sapiens__AF164963.1
  source 1..36: mol_type = other RNA
atgacccagggccagcacttcctgcagaaggtgtga

SEQ ID NO: 2858 - RNA, 36 nt, synthetic construct
  misc_feature 1..36: note = derived and/or modified sequence opt2 fromNA88-A__Homo_sapiens__AF164963.1
  source 1..36: mol_type = other RNA
atgacccagggccagcacttcctccagaaggtctga

SEQ ID NO: 2859 - RNA, 36 nt, synthetic construct
  misc_feature 1..36: note = derived and/or modified sequence opt3 fromNA88-A__Homo_sapiens__AF164963.1
  source 1..36: mol_type = other RNA
atgacccagggccaacacttcctgcagaaggtgtga

SEQ ID NO: 2860 - RNA, 36 nt, synthetic construct; identical to SEQ ID NO: 2857
  misc_feature 1..36: note = derived and/or modified sequence opt4 fromNA88-A__Homo_sapiens__AF164963.1
  source 1..36: mol_type = other RNA

SEQ ID NO: 2861 - RNA, 36 nt, synthetic construct; identical to SEQ ID NO: 2859
  misc_feature 1..36: note = derived and/or modified sequence opt5 fromNA88-A__Homo_sapiens__AF164963.1
  source 1..36: mol_type = other RNA

SEQ ID NO: 2862 - protein, 736 aa, synthetic construct
  REGION 1..736: note = Neo-PAP__Homo_sapiens__Q9BWT3
MKEMSANTVLDSQRQQKHYGITSPISLASPKEIDHIYTQKLIDAMKPFGVFEDEEELNHRLVVLGKLNNLVKEWISDVSESKNLPPSVVATVGGKIFTFGSYRLGVHTKGADIDALCVAPRHVERSDFFQSFFEKLKHQDGIRNLRAVEDAFVPVIKFEFDGIEIDLVFARLAIQTISDNLDLRDDSRLRSLDIRCIRSLNGCRVTDEILHLVPNKETFRLTLRAVKLWAKRRGIYSNMLGFLGGVSWAMLVARTCQLYPNAAASTLVHKFFLVFSKWEWPNPVLLKQPEESNLNLPVWDPRVNPSDRYHLMPIITPAYPQQNSTYNVSTSTRTVMVEEFKQGLAVTDEILQGKSDWSKLLEPPNFFQKYRHYIVLTASASTEENHLEWVGLVESKIRVLVGNLERNEFITLAHVNPQSFPGNKEHHKDNNYVSMWFLGIIFRRVENAESVNIDLTYDIQSFTDTVYRQANNINMLKEGMKIEATHVKKKQLHHYLPAEILQKKKKQSLSDVNRSSGGLQSKRLSLDSSCLDSSRDTDNGTPFNSPASKSDSPSVGETERNSAEPAAVIVEKPLSVPPAQGLSIPVIGAKVDSTVKTVSPPTVCTIPTVVGRNVIPRITTPHNPAQGQPHLNGMSNITKTVTPKRSHSPSIDGTPKRLKDVEKFIRLESTFKDPRTAEERKRKSVDAIGGESMPIPTIDTSRKKRLPSKELPDSSSPVPANNIRVIKNSIRLTLNR

SEQ ID NO: 2863 - RNA, 2211 nt, synthetic construct
  misc_feature 1..2211: note = Neo-PAP__Homo_sapiens__AAI11702
  source 1..2211: mol_type = other RNA
atgaaagagatgtctgcaaacaccgtgctggacagccagcgtcaacaaaagcattatggaattacctccccaattagtttggcatctcctaaagaaattgatcatatttacacacagaaattaattgacgccatgaaaccatttggagtgtttgaagatgaggaagaattgaaccacaggctggtggttcttggtaaattgaacaatttagtaaaagaatggatttctgatgtcagcgagagtaagaacctcccaccttctgttgtggctactgttggtggtaaaattttcacatttggatcctataggcttggagtacacaccaaaggagctgacattgatgcactttgtgtagctccaagacatgtggaaagatctgatttttttcagtctttttttgaaaaattgaaacatcaagatggcattagaaacttaagagctgtagaagatgcctttgtacctgttataaaatttgaatttgatggtattgaaattgatctagtctttgcaagactggcaatacaaaccatatcagataatttagatctaagagacgactctcgcctgagaagccttgatataaggtgtattcgcagcttaaatggttgtagagttactgatgaaattttgcatttagtgccaaataaagaaacttttagactcaccctaagagctgtcaaattatgggcaaaacgacgtggtatttattccaacatgctaggattccttggtggtgtctcctgggcaatgctagttgcaagaacttgccaattgtatccaaatgcagcagcatctactttagttcataagttctttttagttttttccaagtgggaatggccaaatcctgtgctgctgaagcaaccagaagaaagcaatttgaatttgcctgtctgggatcctcgggtaaatccatcagataggtatcatctcatgcccataatcacccctgcctacccacaacagaattctacgtataatgtgtccacatcaactcgaacagtaatggtagaagaatttaaacaaggtcttgcagtcacagatgaaattcttcaaggaaagtcagattggtccaaactacttgagccaccgaatttctttcaaaagtatagacattatatagtattgactgccagcgcatcaacagaagaaaaccatctagagtgggttggattagtagaatctaaaatccgtgtacttgttggaaacttggaacggaatgaatttattactcttgcccatgtgaatccccagtcattcccagggaataaggaacatcataaagacaacaattacgtatcaatgtggttccttgggataatttttcggagagtagaaaatgcagaaagtgtcaacatagacttgacatatgatatacagtcatttactgatacagtgtacagacaggcaaacaatataaatatgctaaaggagggaatgaaaattgaagcaactcatgtaaagaaaaaacaacttcaccactaccttcctgcagaaattcttcaaaagaagaaaaagcaaagtctctctgatgtcaatcgaagctcgggcggacttcaatccaaaagattgtctctggatagcagttgtctggatagctccagagacactgataatggaacaccttttaattctccagcgtccaagtctgatagcccttctgtaggagaaacagaaaggaatagtgctgagcctgctgctgtaattgtggagaagccactgagtgtaccaccagcccaaggactttccattccagtgattggcgcaaaagttgactctacagtaaaaactgtatcaccccccactgtgtgtaccattcctaccgtagtaggacgaaatgtcattcctagaatcacaacacctcacaaccctgcccagggacaaccgcatctgaatggaatgtcaaatataactaagactgttacacctaagagatcccattccccatccatagatgggactcctaagaggttgaaagacgtagaaaagtttattcgacttgaatcaacatttaaggacccccgcactgctgaagaaagaaaaagaaaatcagtggatgccattggaggagaatctatgcctattccaactattgatacatcacgcaaaaagagactacccagtaaagaactaccagattcatcatctccagttccagcaaacaacatccgtgtcatcaaaaattccattcgactgacccttaatcggtaa

SEQ ID NO: 2864 - RNA, 2211 nt, synthetic construct
  misc_feature 1..2211: note = derived and/or modified sequence opt1 fromNeo-PAP__Homo_sapiens__AAI11702
  source 1..2211: mol_type = other RNA
atgaaggagatgagcgccaacaccgtgctggactcccagcgccagcagaagcactacggcatcaccagccccatctccctcgccagcccgaaggagatcgaccacatctacacgcagaagctgatcgacgcgatgaagcccttcggggtcttcgaggacgaggaggagctgaaccaccggctcgtggtgctgggcaagctgaacaacctcgtcaaggagtggatctccgacgtgagcgagtccaagaacctgccgcccagcgtggtcgccaccgtcgggggcaagatcttcaccttcgggtcctaccgcctgggcgtgcacaccaagggcgccgacatcgacgccctctgcgtcgccccgcggcacgtggagcgcagcgacttcttccagtccttcttcgagaagctgaagcaccaggacgggatccggaacctgcgcgcggtggaggacgccttcgtccccgtgatcaagttcgagttcgacggcatcgagatcgacctcgtgttcgcccggctggccatccagacgatcagcgacaacctggacctccgcgacgactcccggctgcgcagcctggacatccggtgcatccgctccctcaacgggtgccgggtcaccgacgagatcctgcacctggtgcccaacaaggagaccttccgcctcaccctgcgggcggtgaagctgtgggccaagcgccggggcatctacagcaacatgctcgggttcctgggcggcgtctcctgggccatgctggtggcccgcacgtgccagctctaccccaacgccgcggccagcaccctggtgcacaagttcttcctggtcttctccaagtgggagtggccgaaccccgtgctcctgaagcagcccgaggagagcaacctgaacctccccgtgtgggacccgcgggtcaaccccagcgaccgctaccacctgatgcccatcatcacccccgcctacccgcagcagaactccacctacaacgtgagcacgtccacccggaccgtcatggtggaggagttcaagcaggggctggccgtgaccgacgagatcctccagggcaagagcgactggtccaagctgctggagccgcccaacttcttccagaagtaccgccactacatcgtcctcacggccagcgcgtccaccgaggagaaccacctggagtgggtggggctggtggagagcaagatccgcgtcctcgtgggcaacctggagcggaacgagttcatcaccctggcccacgtgaacccccagtccttccccggcaacaaggagcaccacaaggacaacaactacgtcagcatgtggttcctcgggatcatcttccgccgggtggagaacgccgagtccgtgaacatcgacctgacctacgacatccagagcttcacggacaccgtctaccgccaggccaacaacatcaacatgctgaaggagggcatgaagatcgaggccacccacgtgaagaagaagcagctccaccactacctgcccgcggagatcctgcagaagaagaagaagcagtccctgagcgacgtgaaccggtccagcgggggcctccagtccaagcgcctgagcctggactccagctgcctcgacagctcccgggacaccgacaacgggacgcccttcaacagccccgcctccaagagcgactccccgagcgtcggcgagaccgagcgcaactccgccgagcccgccgccgtgatcgtggagaagcccctgagcgtgcccccggcgcagggcctgtccatccccgtgatcggggccaaggtggacagcaccgtcaagaccgtgtccccgcccacggtgtgcaccatccccaccgtcgtgggccggaacgtgatcccccgcatcaccacgccccacaaccccgcccaggggcagccccacctcaacggcatgagcaacatcaccaagaccgtcacccccaagcggtcccacagcccctccatcgacgggacgccgaagcgcctgaaggacgtggagaagttcatccggctggagagcaccttcaaggacccccgcaccgccgaggagcggaagcgcaagtccgtggacgcgatcggcggcgagagcatgcccatccccaccatcgacaccagccggaagaagcgcctcccgtccaaggagctgcccgacagctccagccccgtccccgccaacaacatccgggtgatcaagaactccatccgcctgacgctcaaccgctga

SEQ ID NO: 2865 - RNA, 2211 nt, synthetic construct
  misc_feature 1..2211: note = derived and/or modified sequence opt2 fromNeo-PAP__Homo_sapiens__AAI11702
  source 1..2211: mol_type = other RNA
atgaaggagatgtccgccaacaccgtcctcgactcccagcgccagcagaagcactacggcatcacctcccccatctccctcgcctcccccaaggagatcgaccacatctacacccagaagctcatcgacgccatgaagcccttcggcgtcttcgaggacgaggaggagctcaaccaccgcctcgtcgtcctcggcaagctcaacaacctcgtcaaggagtggatctccgacgtctccgagtccaagaacctccccccctccgtcgtcgccaccgtcggcggcaagatcttcaccttcggctcctaccgcctcggcgtccacaccaagggcgccgacatcgacgccctctgcgtcgccccccgccacgtcgagcgctccgacttcttccagtccttcttcgagaagctcaagcaccaggacggcatccgcaacctccgcgccgtcgaggacgccttcgtccccgtcatcaagttcgagttcgacggcatcgagatcgacctcgtcttcgcccgcctcgccatccagaccatctccgacaacctcgacctccgcgacgactcccgcctccgctccctcgacatccgctgcatccgctccctcaacggctgccgcgtcaccgacgagatcctccacctcgtccccaacaaggagaccttccgcctcaccctccgcgccgtcaagctctgggccaagcgccgcggcatctactccaacatgctcggcttcctcggcggcgtctcctgggccatgctcgtcgcccgcacctgccagctctaccccaacgccgccgcctccaccctcgtccacaagttcttcctcgtcttctccaagtgggagtggcccaaccccgtcctcctcaagcagcccgaggagtccaacctcaacctccccgtctgggacccccgcgtcaacccctccgaccgctaccacctcatgcccatcatcacccccgcctacccccagcagaactccacctacaacgtctccacctccacccgcaccgtcatggtcgaggagttcaagcagggcctcgccgtcaccgacgagatcctccagggcaagtccgactggtccaagctcctcgagccccccaacttcttccagaagtaccgccactacatcgtcctcaccgcctccgcctccaccgaggagaaccacctcgagtgggtcggcctcgtcgagtccaagatccgcgtcctcgtcggcaacctcgagcgcaacgagttcatcaccctcgcccacgtcaacccccagtccttccccggcaacaaggagcaccacaaggacaacaactacgtctccatgtggttcctcggcatcatcttccgccgcgtcgagaacgccgagtccgtcaacatcgacctcacctacgacatccagtccttcaccgacaccgtctaccgccaggccaacaacatcaacatgctcaaggagggcatgaagatcgaggccacccacgtcaagaagaagcagctccaccactacctccccgccgagatcctccagaagaagaagaagcagtccctctccgacgtcaaccgctcctccggcggcctccagtccaagcgcctctccctcgactcctcctgcctcgactcctcccgcgacaccgacaacggcacccccttcaactcccccgcctccaagtccgactccccctccgtcggcgagaccgagcgcaactccgccgagcccgccgccgtcatcgtcgagaagcccctctccgtcccccccgcccagggcctctccatccccgtcatcggcgccaaggtcgactccaccgtcaagaccgtctccccccccaccgtctgcaccatccccaccgtcgtcggccgcaacgtcatcccccgcatcaccaccccccacaaccccgcccagggccagccccacctcaacggcatgtccaacatcaccaagaccgtcacccccaagcgctcccactccccctccatcgacggcacccccaagcgcctcaaggacgtcgagaagttcatccgcctcgagtccaccttcaaggacccccgcaccgccgaggagcgcaagcgcaagtccgtcgacgccatcggcggcgagtccatgcccatccccaccatcgacacctcccgcaagaagcgcctcccctccaaggagctccccgactcctcctcccccgtccccgccaacaacatccgcgtcatcaagaactccatccgcctcaccctcaaccgctga

SEQ ID NO: 2866 - RNA, 2211 nt, synthetic construct
  misc_feature 1..2211: note = derived and/or modified sequence opt3 fromNeo-PAP__Homo_sapiens__AAI11702
  source 1..2211: mol_type = other RNA
atgaaggagatgagcgccaacaccgtgctggactcccagagacaacagaaacactacggcatcacatctcccatttcactcgctagtcctaaggaaatagatcatatctatactcagaaacttattgacgcaatgaagccattcggggtctttgaggatgaagaggaactgaatcacaggttggttgtgttaggaaaactgaacaatctagtaaaggagtggatcagcgacgtgtccgagtctaagaacctcccgccctcggtcgtggccacggttggtggcaaaattttcacctttgggtcataccggctgggagtgcatacaaagggcgcggatatcgacgctctttgcgtcgcccctcgccacgtggaacgaagcgatttctttcagagtttctttgagaaactgaagcatcaagacggtatacgtaatttgagagcagtagaagatgccttcgttccagtgatcaaatttgagttcgacgggattgagatcgatctcgtctttgctaggctggcaattcagactatctccgacaacctggatctccgggacgactctcgcttaagaagcctggatataaggtgtattcggtcccttaatggatgccgcgtgaccgacgaaatcttgcacctggtgcccaacaaggagacattccgactaaccctcagagccgtcaagctgtgggctaaaaggcggggcatttattcaaatatgcttggctttctgggaggggttagttgggccatgttggtggcgcgtacttgtcagctctaccctaacgcagccgctagcacactggtacacaagttcttcttagtgttttctaaatgggaatggccaaatcccgtcctgctcaagcagcctgaggaatccaaccttaatctgccagtgtgggatccgcgcgttaacccctcagacagatatcatttgatgcctatcatcaccccagcctacccccaacagaatagcacgtataacgtgagtacttctaccaggacagtcatggtggaggagttcaaacagggtctagcagtaactgatgaaattctgcagggcaagtccgactggagcaaactcctggagcctccaaactttttccaaaagtaccggcactacatagttcttaccgcttcggcctctacagaagagaatcatctggaatgggtggggttggtcgagtccaagatccgagtgctcgtcggaaacctggagcgcaatgaatttattaccttagcgcacgtgaacccccagtcattcccgggcaataaagagcaccataaggataacaattatgttagtatgtggtttctgggtatcatattcagaagggtggaaaacgccgagagcgtaaatattgacctaacgtacgatatccagtcctttactgacacagtctatcggcaagcaaacaatatcaacatgctcaaagaagggatgaagattgaggctacccacgtgaaaaagaagcagctgcatcactaccttcctgccgagatcttgcagaaaaagaaaaagcagtctctgagcgatgttaatcgctcaagtggaggcctccaatccaaaagactgagccttgactcttcatgcctggacagtagcagggatactgacaacggcacacccttcaattccccagcttctaagtcggatagcccttccgtgggggaaaccgagcgtaactcagccgaacccgcagccgtcattgtggagaagccattgagtgtaccccctgctcagggactctctataccagtgatcggtgcgaaagttgacagcacggtcaagaccgtgtccccgcccacagtgtgtactattcctaccgtcgttggccggaacgtgatcccacgaatcacaactccccataatcctgcacaggggcagccacacctgaacggaatgtcaaatattaccaaaacagtgacccccaagagaagccactctccgtccatagatggcactcctaaaaggttaaaggacgtagagaagtttatccgcctggaaagtacgttcaaagatccacggacagccgaggaaagaaagaggaaaagcgtcgacgctattggtggggagtctatgcccatccctaccattgatacttcccgcaagaaacgactaccctcaaaggaactcccagacagtagctcgcctgtgcccgccaacaatatccgggttatcaaaaactccatacgtctgacccttaatagatga

SEQ ID NO: 2867 - RNA, 2211 nt, synthetic construct
  misc_feature 1..2211: note = derived and/or modified sequence opt4 fromNeo-PAP__Homo_sapiens__AAI11702
  source 1..2211: mol_type = other RNA
atgaaggagatgagcgccaacaccgtgctggacagccagagacagcagaagcactacggcatcaccagccccatcagcctggccagccccaaggagatcgaccacatctacacccagaagctgatcgacgccatgaagcccttcggcgtgttcgaggacgaggaggagctgaaccacagactggtggtgctgggcaagctgaacaacctggtgaaggagtggatcagcgacgtgagcgagagcaagaacctgccccccagcgtggtggccaccgtgggcggcaagatcttcaccttcggcagctacagactgggcgtgcacaccaagggcgccgacatcgacgccctgtgcgtggcccccagacacgtggagagaagcgacttcttccagagcttcttcgagaagctgaagcaccaggacggcatcagaaacctgagagccgtggaggacgccttcgtgcccgtgatcaagttcgagttcgacggcatcgagatcgacctggtgttcgccagactggccatccagaccatcagcgacaacctggacctgagagacgacagcagactgagaagcctggacatcagatgcatcagaagcctgaacggctgcagagtgaccgacgagatcctgcacctggtgcccaacaaggagaccttcagactgaccctgagagccgtgaagctgtgggccaagagaagaggcatctacagcaacatgctgggcttcctgggcggcgtgagctgggccatgctggtggccagaacctgccagctgtaccccaacgccgccgccagcaccctggtgcacaagttcttcctggtgttcagcaagtgggagtggcccaaccccgtgctgctgaagcagcccgaggagagcaacctgaacctgcccgtgtgggaccccagagtgaaccccagcgacagataccacctgatgcccatcatcacccccgcctacccccagcagaacagcacctacaacgtgagcaccagcaccagaaccgtgatggtggaggagttcaagcagggcctggccgtgaccgacgagatcctgcagggcaagagcgactggagcaagctgctggagccccccaacttcttccagaagtacagacactacatcgtgctgaccgccagcgccagcaccgaggagaaccacctggagtgggtgggcctggtggagagcaagatcagagtgctggtgggcaacctggagagaaacgagttcatcaccctggcccacgtgaacccccagagcttccccggcaacaaggagcaccacaaggacaacaactacgtgagcatgtggttcctgggcatcatcttcagaagagtggagaacgccgagagcgtgaacatcgacctgacctacgacatccagagcttcaccgacaccgtgtacagacaggccaacaacatcaacatgctgaaggagggcatgaagatcgaggccacccacgtgaagaagaagcagctgcaccactacctgcccgccgagatcctgcagaagaagaagaagcagagcctgagcgacgtgaacagaagcagcggcggcctgcagagcaagagactgagcctggacagcagctgcctggacagcagcagagacaccgacaacggcacccccttcaacagccccgccagcaagagcgacagccccagcgtgggcgagaccgagagaaacagcgccgagcccgccgccgtgatcgtggagaagcccctgagcgtgccccccgcccagggcctgagcatccccgtgatcggcgccaaggtggacagcaccgtgaagaccgtgagcccccccaccgtgtgcaccatccccaccgtggtgggcagaaacgtgatccccagaatcaccaccccccacaaccccgcccagggccagccccacctgaacggcatgagcaacatcaccaagaccgtgacccccaagagaagccacagccccagcatcgacggcacccccaagagactgaaggacgtggagaagttcatcagactggagagcaccttcaaggaccccagaaccgccgaggagagaaagagaaagagcgtggacgccatcggcggcgagagcatgcccatccccaccatcgacaccagcagaaagaagagactgcccagcaaggagctgcccgacagcagcagccccgtgcccgccaacaacatcagagtgatcaagaacagcatcagactgaccctgaacagatga

SEQ ID NO: 2868 - RNA, 2211 nt, synthetic construct
  misc_feature 1..2211: note = derived and/or modified sequence opt5 fromNeo-PAP__Homo_sapiens__AAI11702
  source 1..2211: mol_type = other RNA
atgaaggagatgagcgccaacaccgtgctggactcccagagacaacagaaacactacggcatcacatctcccattagcctcgcttcccctaaggaaatcgatcatatttatacgcagaaactgatcgacgccatgaagccgttcggggtctttgaggatgaagaggaacttaatcaccggctggttgtgctcggaaaactgaacaatcttgtgaaggagtggatttctgacgtcagcgagtccaagaacctgcccccttctgtggttgcgaccgtgggcgggaaaatcttcacatttggaagctaccgcctcggcgtccataccaagggggctgatatcgacgccctgtgcgtggcccccagacacgttgaacggtccgatttctttcagagcttctttgagaaactgaagcatcaagacggcattcgcaatctcagagctgtggaagatgccttcgtccctgtgatcaaatttgagttcgacggaattgagatcgatctggtgtttgctcggcttgccattcagacaatctctgacaacctggatctccgcgacgactccagactgcggagccttgatattcgctgtatcagatctctgaatggctgccgggtcaccgacgaaatcctccacctggttcccaacaaggagacattccgcctgaccctcagagcggtgaagctgtgggccaaacggcgcgggatttattccaatatgcttggatttctgggcggggtgagctgggctatgctcgtcgccagaacgtgtcagctgtaccctaacgctgccgcgtctacccttgtgcacaagttcttcctggtgttttccaaatgggaatggccgaatcccgttctcctgaagcagcctgaggaaagcaacctgaatctccccgtctgggatcctcgggtgaacccctccgacagatatcatctgatgccgatcattacccctgcctacccccaacaaaattctacatataacgttagcacatccacccgcacggtgatggtcgaggagttcaaacagggacttgctgtgacagatgaaatcctgcagggcaagagcgactggtctaaactcctggagcctcccaactttttccagaagtaccggcactacattgtccttaccgcctccgctagcacagaagagaatcatctggaatgggtggggctcgttgagtctaagatcagagtgctggtcggaaacctggagcgcaatgaatttatcaccctcgcccacgtgaacccccagagcttccctggcaataaagagcaccataaggataacaattatgtttccatgtggtttctgggcattatcttccggagagtggaaaacgccgagtctgtcaatattgaccttacctacgatatccagagctttacagacacggtgtatcgccaagctaacaatattaacatgctgaaagaagggatgaagatcgaggcgacccacgtgaaaaagaagcagctccatcactacctgccggccgagatcctgcagaaaaagaaaaagcagtcccttagcgatgttaatcggtcttccggaggcctccaaagcaaaagactgtctctggactccagctgcctcgactcctctcgcgatacagacaacgggacccccttcaatagccctgcttccaagtctgatagcccctccgtcggagaaacagagcggaacagcgccgaacctgccgctgtgattgtggagaagcccctgtctgtcccgcctgcccagggcctttccatccccgtgattggggcgaaagttgacagcaccgtgaagacggtctctcctcccacagtgtgtaccatccctaccgttgtgggaagaaacgtcattccccgcatcacaaccccgcataatcctgctcagggccagccccacctgaacggcatgtccaatattacaaaaacggtgacccccaagcggagccactctcctagcatcgatgggacaccgaaaagactcaaggacgttgagaagtttatccggctggaatccaccttcaaagatccccgcacagccgaggaaagaaagcggaaaagcgtggacgccattggaggcgagtctatgcctatccccaccattgatacgtccagaaagaaacgcctgcctagcaaggaacttcccgactcctctagccctgtccccgctaacaatatccgggtgattaaaaactccatcagactcaccctgaatcgctga

SEQ ID NO: 2869 - protein, 458 aa, synthetic construct
  REGION 1..458: note = NFYC/m__Homo_sapiens__Q13952
MSTEGGFGGTSSSDAQQSLQSFWPRVMEEIRNLTVKDFRVQELPLARIKKIMKLDEDVKMISAEAPVLFAKAAQIFITELTLRAWIHTEDNKRRTLQRNDIAMAITKFDQFDFLIDIVPRDELKPPKRQEEVRQSVTPAEPVQYYFTLAQQPTAVQVQGQQQGQQTTSSTTTIQPGQIIIAQPQQGQTTPVTMQVGEGQQVQIVQAQPQGQAQQAQSGTGQTMQVMQQIITNTGEIQQIPVQLNAGQLQYIRLAQPVSGTQVVQGQIQTLATNAQQGQRNASQGKPRRCLKETLQITQTEVQQGQQQFSQFTDGQRNSVQQARVSELTGEAEPREVKATGNSTPCTSSLPTTHPPSHRAGASCVCCSQPQQSSTSPPPSDALQWVVVEVSGTPNQLETHRELHAPLPGMTSLSPLHPSQQLYQIQQVTMPAGQDLAQPMFIQSANQPSDGQAPQVTGD

SEQ ID NO: 2870 - RNA, 1377 nt, synthetic construct
  misc_feature 1..1377: note = NFYC/m__Homo_sapiens__AAG28389
  source 1..1377: mol_type = other RNA
atgtccacagaaggaggatttggtggtactagcagcagtgatgcccagcaaagtctacagtcgttctggcctcgggtcatggaagaaatccggaatttaacagtgaaagacttccgagtgcaggaactcccactggctcgtattaagaagattatgaaactggatgaagatgtgaagatgatcagtgcagaagcgcctgtactctttgccaaggcagcccagatttttatcacagagttgactcttcgagcctggattcacacagaagataacaagcgccggactctacagagaaatgatatcgccatggcaattacaaaatttgatcagtttgattttctcatcgatattgttccaagagatgaactgaaacctccaaagcgtcaggaggaggtgcgccagtctgtaactcctgccgagccagtccagtactatttcacgctggctcagcaacccaccgctgtccaagtccagggccagcagcaaggccagcagaccaccagctccacgaccaccatccagcctgggcagatcatcatcgcacagcctcagcagggccagaccacacctgtgacaatgcaggttggagaaggtcagcaggtgcagattgtccaggctcagccacagggtcaagcccaacaggcccagagtggcactggacagaccatgcaggtgatgcagcagatcatcactaacacaggagagatccagcagatcccggtgcagctgaatgccggccagctgcagtatatccgcttagcccagcctgtatcaggcactcaagttgtgcagggacagatccagacacttgccaccaatgctcaacaggggcaaagaaatgcaagtcaggggaagcctcgaaggtgcctgaaagaaaccttacagattacacagacagaggtccagcaaggacagcagcagttcagccagttcacagatggacagaggaacagcgtgcagcaagctcgagtctctgagctaacgggagaggcagagcccagagaagtgaaagccacaggaaattcaactccctgcacctcttccctgcccaccacacaccccccctcacaccgggctggtgcctcctgtgtctgctgctcccaaccccagcagagctccacttcccctcctccttctgacgccttgcagtgggtggtggttgaggtatctgggacccccaaccagctcgagacccatagggagctgcatgcccctctcccagggatgacctcactctctcctctccacccctcgcagcagctctaccagatccagcaagtcaccatgcctgcgggccaggacctcgcccagcccatgttcatccagtcagccaaccagccctccgacgggcaggccccccaggtgaccggcgactga

SEQ ID NO: 2871 - RNA, 1377 nt, synthetic construct
  misc_feature 1..1377: note = derived and/or modified sequence opt1 fromNFYC/m__Homo_sapiens__AAG28389
  source 1..1377: mol_type = other RNA
atgagcaccgagggcgggttcggcgggacctccagctccgacgcccagcagagcctgcagtccttctggccccgcgtgatggaggagatccggaacctcacggtcaaggacttccgcgtgcaggagctgccgctggcccggatcaagaagatcatgaagctcgacgaggacgtgaagatgatcagcgccgaggcccccgtcctgttcgccaaggccgcccagatcttcatcaccgagctgaccctccgcgcgtggatccacaccgaggacaacaagcggcgcacgctgcagcggaacgacatcgccatggccatcaccaagttcgaccagttcgacttcctgatcgacatcgtgccccgcgacgagctcaagcccccgaagcggcaggaggaggtgcgccagtccgtcacccccgccgagcccgtgcagtactacttcaccctggcgcagcagcccacggccgtgcaggtccagggccagcagcaggggcagcagaccaccagctccaccacgaccatccagccgggccagatcatcatcgcccagccccagcagggccagaccacccccgtgacgatgcaggtcggggagggccagcaggtccagatcgtgcaggcccagccccaggggcaggcccagcaggcgcagagcggcaccgggcagaccatgcaggtcatgcagcagatcatcaccaacacgggcgagatccagcagatcccggtgcagctgaacgccggccagctccagtacatccggctggcccagcccgtgtccgggacccaggtggtgcagggccagatccagaccctggccaccaacgcccagcaggggcagcgcaacgcgagccagggcaagccccggcgctgcctcaaggagacgctgcagatcacccagaccgaggtgcagcagggccagcagcagttctcccagttcaccgacgggcagcggaacagcgtgcagcaggcccgcgtctccgagctgacgggcgaggccgagccccgggaggtgaaggccaccgggaacagcaccccgtgcacctccagcctccccacgacccacccgccctcccaccgcgccggcgcgagctgcgtgtgctgcagccagccccagcagtccagcacctccccgccgcccagcgacgccctgcagtgggtcgtggtcgaggtgtccgggacccccaaccagctggagacgcaccgggagctccacgcgcccctgcccggcatgaccagcctgagccccctccacccctcccagcagctgtaccagatccagcaggtcaccatgcccgccggccaggacctggcccagcccatgttcatccagtccgccaaccagccgagcgacgggcaggcgccccaggtgaccggcgactga

SEQ ID NO: 2872 - RNA, 1377 nt, synthetic construct
  misc_feature 1..1377: note = derived and/or modified sequence opt2 fromNFYC/m__Homo_sapiens__AAG28389
  source 1..1377: mol_type = other RNA
atgtccaccgagggcggcttcggcggcacctcctcctccgacgcccagcagtccctccagtccttctggccccgcgtcatggaggagatccgcaacctcaccgtcaaggacttccgcgtccaggagctccccctcgcccgcatcaagaagatcatgaagctcgacgaggacgtcaagatgatctccgccgaggcccccgtcctcttcgccaaggccgcccagatcttcatcaccgagctcaccctccgcgcctggatccacaccgaggacaacaagcgccgcaccctccagcgcaacgacatcgccatggccatcaccaagttcgaccagttcgacttcctcatcgacatcgtcccccgcgacgagctcaagccccccaagcgccaggaggaggtccgccagtccgtcacccccgccgagcccgtccagtactacttcaccctcgcccagcagcccaccgccgtccaggtccagggccagcagcagggccagcagaccacctcctccaccaccaccatccagcccggccagatcatcatcgcccagccccagcagggccagaccacccccgtcaccatgcaggtcggcgagggccagcaggtccagatcgtccaggcccagccccagggccaggcccagcaggcccagtccggcaccggccagaccatgcaggtcatgcagcagatcatcaccaacaccggcgagatccagcagatccccgtccagctcaacgccggccagctccagtacatccgcctcgcccagcccgtctccggcacccaggtcgtccagggccagatccagaccctcgccaccaacgcccagcagggccagcgcaacgcctcccagggcaagccccgccgctgcctcaaggagaccctccagatcacccagaccgaggtccagcagggccagcagcagttctcccagttcaccgacggccagcgcaactccgtccagcaggcccgcgtctccgagctcaccggcgaggccgagccccgcgaggtcaaggccaccggcaactccaccccctgcacctcctccctccccaccacccaccccccctcccaccgcgccggcgcctcctgcgtctgctgctcccagccccagcagtcctccacctccccccccccctccgacgccctccagtgggtcgtcgtcgaggtctccggcacccccaaccagctcgagacccaccgcgagctccacgcccccctccccggcatgacctccctctcccccctccacccctcccagcagctctaccagatccagcaggtcaccatgcccgccggccaggacctcgcccagcccatgttcatccagtccgccaaccagccctccgacggccaggccccccaggtcaccggcgactga

SEQ ID NO: 2873 - RNA, 1377 nt, synthetic construct
  misc_feature 1..1377: note = derived and/or modified sequence opt3 fromNFYC/m__Homo_sapiens__AAG28389
  source 1..1377: mol_type = other RNA
atgagcaccgagggcgggttcggaggtacatcctcttcagacgcccagcaaagtctgcagagcttttggcccagagtgatggaagagatcaggaacctcactgtcaaggatttccgggttcaggaacttcctctggctcgcattaaaaagataatgaaattggacgaggatgtgaagatgatctccgcagaagccccagtattatttgcgaaagctgcccagattttcatcacggagctgaccctacgagcatggattcacacagaggacaataagcgtagaactctccaaaggaacgatatcgccatggctataaccaagtttgaccagttcgattttctgatcgacattgtgccgcgggatgaacttaaaccccctaagcgccaggaggaagtcagacagtctgtgacaccagcagagcccgttcaatactatttcaccctggcccagcagcctactgctgtgcaggtccaaggccagcagcaagggcagcagacaacctcgtcaacgactaccatccagccaggacaaattatcatagcccagccccagcagggccaaacaactcctgtgaccatgcaggtaggtgaggggcagcaggttcaaattgtgcaggcgcagccacagggacaagcacagcaggcccaaagcggcacaggccagaccatgcaggtcatgcagcaaatcattacgaatactggggaaatccagcagatcccggtgcagttgaacgctggacaactccagtacattaggctggcccagcccgtgagtggtacacaggtcgttcaaggccagatacagaccctggcaactaatgctcaacaggggcagcggaacgcctcccagggaaaacctcgccgatgcctcaaggagacattacaaatcacccagacggaagtgcagcagggccaacagcagttttctcagttcaccgacggtcaaagaaatagcgtacagcaggcgagggtgtccgagctgacaggggaagccgagccacgggaggtcaaagcaactggaaactcaaccccctgtacaagtagccttcctactacccatccaccctctcaccgtgctggcgcctcctgcgtgtgttgctcacagccgcaacagagcagtacatctcctcccccatccgatgctttgcagtgggttgtggtcgaagtgagcggcacccctaatcaactggagactcatcgcgaactacacgcacccctcccagggatgacgtcgctgtctccccttcatccttcccagcagctgtatcagattcaacaggtaacaatgccagccggacaggacttggcccagccgatgtttatccaatcagctaaccagcccagtgatggtcaggcgcctcaggttaccggcgactga

SEQ ID NO: 2874 - RNA, 1377 nt, synthetic construct
  misc_feature 1..1377: note = derived and/or modified sequence opt4 fromNFYC/m__Homo_sapiens__AAG28389
  source 1..1377: mol_type = other RNA
atgagcaccgagggcggcttcggcggcaccagcagcagcgacgcccagcagagcctgcagagcttctggcccagagtgatggaggagatcagaaacctgaccgtgaaggacttcagagtgcaggagctgcccctggccagaatcaagaagatcatgaagctggacgaggacgtgaagatgatcagcgccgaggcccccgtgctgttcgccaaggccgcccagatcttcatcaccgagctgaccctgagagcctggatccacaccgaggacaacaagagaagaaccctgcagagaaacgacatcgccatggccatcaccaagttcgaccagttcgacttcctgatcgacatcgtgcccagagacgagctgaagccccccaagagacaggaggaggtgagacagagcgtgacccccgccgagcccgtgcagtactacttcaccctggcccagcagcccaccgccgtgcaggtgcagggccagcagcagggccagcagaccaccagcagcaccaccaccatccagcccggccagatcatcatcgcccagccccagcagggccagaccacccccgtgaccatgcaggtgggcgagggccagcaggtgcagatcgtgcaggcccagccccagggccaggcccagcaggcccagagcggcaccggccagaccatgcaggtgatgcagcagatcatcaccaacaccggcgagatccagcagatccccgtgcagctgaacgccggccagctgcagtacatcagactggcccagcccgtgagcggcacccaggtggtgcagggccagatccagaccctggccaccaacgcccagcagggccagagaaacgccagccagggcaagcccagaagatgcctgaaggagaccctgcagatcacccagaccgaggtgcagcagggccagcagcagttcagccagttcaccgacggccagagaaacagcgtgcagcaggccagagtgagcgagctgaccggcgaggccgagcccagagaggtgaaggccaccggcaacagcaccccctgcaccagcagcctgcccaccacccacccccccagccacagagccggcgccagctgcgtgtgctgcagccagccccagcagagcagcaccagccccccccccagcgacgccctgcagtgggtggtggtggaggtgagcggcacccccaaccagctggagacccacagagagctgcacgcccccctgcccggcatgaccagcctgagccccctgcaccccagccagcagctgtaccagatccagcaggtgaccatgcccgccggccaggacctggcccagcccatgttcatccagagcgccaaccagcccagcgacggccaggccccccaggtgaccggcgactga

SEQ ID NO: 2875 - RNA, 1377 nt, synthetic construct
  misc_feature 1..1377: note = derived and/or modified sequence opt5 fromNFYC/m__Homo_sapiens__AAG28389
  source 1..1377: mol_type = other RNA
atgagcaccgagggcgggttcggaggcacatcctctagcgacgcccagcaatccctgcagtctttttggcccagagtgatggaagagatccggaacctcacggtcaaggatttccgcgttcaggaactgcctcttgctagaattaaaaagatcatgaaactggacgaggatgtgaagatgattagcgccgaagcgccggtgctctttgctaaagccgcccagatcttcattaccgagctgacacttcgggcttggatccacaccgaggacaataagcgcagaacactgcaacggaacgatatcgccatggctattaccaagtttgaccagttcgattttctcatcgacattgtcccccgcgatgaactgaaacctcccaagagacaggaggaagtgcggcagtccgttacgcctgccgagcccgtgcaatactatttcaccctggcgcagcagcctacggccgtccaggtgcaagggcagcagcaaggacagcagaccacatctagcaccacaaccatccagccgggccaaattatcattgctcagccccagcaggggcaaacgacacctgttaccatgcaagtgggagagggccagcaggtccagatcgtgcaggcccagccccagggccaagctcagcaggcccaatccgggacaggacagaccatgcaagtgatgcagcagatcattaccaatacaggcgaaatccagcagattcctgtccagctcaacgcggggcaactgcagtacatccgccttgcccagcccgttagcggaacacaggtggtgcaaggccagattcagaccctggctacaaatgcccaacaggggcagagaaacgcttctcagggaaaaccgcggcgctgcctcaaggagaccctgcaaatcacacagaccgaagtccagcagggccaacagcagttttcccagttcacggacggccaaagaaatagcgtgcagcaggcccgggtttctgagcttacaggggaagccgagcctcgcgaggtgaaagctaccggaaactccaccccctgtacaagctctctgcctaccacacatcctccctcccacagagcgggcgccagctgcgtctgttgctcccagccccaacagtctagcacgtccccgccccctagcgatgctctccagtgggtggttgtggaagtctctgggacccccaatcaactggagacacatcgggaactgcacgcccctctccccggaatgacctccctgagcccgcttcatccttctcagcagctgtatcagatccaacaggtgacaatgcccgccggccaggacctcgctcagcctatgtttattcaaagcgccaaccagccctccgatgggcaggcgcctcaggtcaccggagactga

SEQ ID NO: 2876 - protein, 933 aa, synthetic construct
  REGION 1..933: note = NGEP__Homo_sapiens__Q6IWH7
MRMAATAWAGLQGPPLPTLCPAVRTGLYCRDQAHAERWAMTSETSSGSHCARSRMLRRRAQEEDSTVLIDVSPPEAEKRGSYGSTAHASEPGGQQAAACRAGSPAKPRIADFVLVWEEDLKLDRQQDSAARDRTDMHRTWRETFLDNLRAAGLCVDQQDVQDGNTTVHYALLSASWAVLCYYAEDLRLKLPLQELPNQASNWSAGLLAWLGIPNVLLEVVPDVPPEYYSCRFRVNKLPRFLGSDNQDTFFTSTKRHQILFEILAKTPYGHEKKNLLGIHQLLAEGVLSAAFPLHDGPFKTPPEGPQAPRLNQRQVLFQHWARWGKWNKYQPLDHVRRYFGEKVALYFAWLGFYTGWLLPAAVVGTLVFLVGCFLVFSDIPTQELCGSKDSFEMCPLCLDCPFWLLSSACALAQAGRLFDHGGTVFFSLFMALWAVLLLEYWKRKSATLAYRWDCSDYEDTEERPRPQFAASAPMTAPNPITGEDEPYFPERSRARRMLAGSVVIVVMVAVVVMCLVSIILYRAIMAIVVSRSGNTLLAAWASRIASLTGSVVNLVFILILSKIYVSLAHVLTRWEMHRTQTKFEDAFTLKVFIFQFVNFYSSPVYIAFFKGRFVGYPGNYHTLFGVRNEECAAGGCLIELAQELLVIMVGKQVINNMQEVLIPKLKGWWQKFRLRSKKRKAGASAGASQGPWEDDYELVPCEGLFDEYLEMVLQFGFVTIFVAACPLAPLFALLNNWVEIRLDARKFVCEYRRPVAERAQDIGIWFHILAGLTHLAVISNAFLLAFSSDFLPRAYYRWTRAHDLRGFLNFTLARAPSSFAAAHNRTCRYRAFRDDDGHYSQTYWNLLAIRLAFVIVFEHVVFSVGRLLDLLVPDIPESVEIKVKREYYLAKQALAENEVLFGTNGTKDEQPEGSELSSHWTPFTVPKASQLQQ

SEQ ID NO: 2877 - RNA, 2802 nt, synthetic construct
  misc_feature 1..2802: note = NGEP__Homo_sapiens__CCDS33423.1
  source 1..2802: mol_type = other RNA
atgcgaatggctgccactgcctgggcggggctccaagggccacccctccccaccctctgtcccgcagtgaggacgggactctactgccgagaccaggctcacgctgagaggtgggccatgacctccgagacctcttccggaagccactgtgccaggagcaggatgctgcggcgacgggcccaggaagaggacagcaccgtcctgatcgatgtgagcccccctgaggcagagaagaggggctcttacgggagcacagcccacgcctcggagccaggtggacagcaagcggccgcctgcagagctgggagtcctgccaagccccggatcgcagacttcgtcctcgtttgggaggaggacctgaagctagacaggcagcaggacagtgccgcccgggacagaacagacatgcacaggacctggcgggagacttttctggataatcttcgtgcggctgggctgtgtgtagaccagcaggacgtccaggacgggaacaccacagtgcactacgccctcctcagcgcctcctgggctgtgctctgctactacgccgaagacctgcgcctgaagctgcccttgcaggagttacccaaccaggcctccaactggtcggccggcctgctggcatggctgggcatccccaacgtcctgctggaggttgtgccagacgtaccccccgagtactactcctgccggttcagagtgaacaagctgccacgcttcctcgggagtgacaaccaggacaccttcttcacaagcaccaagaggcaccaaattctgtttgagatcctggccaagaccccgtatggccacgagaagaaaaacctgcttgggatccaccagctgctggcagagggtgtcctcagtgccgccttccccctgcatgacggccccttcaagacgcccccagagggcccgcaggctccacgcctcaaccagcgccaagtccttttccagcactgggcgcgctggggcaagtggaacaagtaccagcccctggaccacgtgcgcaggtacttcggggagaaggtggccctctacttcgcctggctcgggttttacacaggctggctcctgccagcggcagtggtgggcacactggtgttcctggtgggctgcttcctggtgttctcagacatacccacgcaggaactgtgtggcagcaaggacagcttcgagatgtgcccactttgcctcgactgccctttctggctgctctccagcgcctgtgccctggcccaggccggccggctgttcgaccacggcggcaccgtgttcttcagcttgttcatggcactgtgggccgtgctgctgctggagtactggaagcggaagagcgccacgctggcctaccgctgggactgctctgactacgaggacactgaggagaggcctcggccccagtttgccgcctcagcccccatgacagccccgaaccccatcacgggtgaggacgagccctacttccctgagaggagccgcgcgcgccgcatgctggccggctctgtggtgatcgtggtgatggtggccgtggtggtcatgtgcctcgtgtctatcatcctgtaccgtgccatcatggccatcgtggtgtccaggtcgggcaacacccttctcgcagcctgggcctctcgcatcgccagcctcacggggtctgtagtgaacctcgtcttcatcctcatcctctccaagatctatgtatccctggcccacgtcctgacacgatgggaaatgcaccgcacccagaccaagttcgaggacgccttcaccctcaaggtgttcatcttccagttcgtcaacttctactcctcacccgtctacattgccttcttcaagggcaggtttgtgggatacccaggcaactaccacaccttgtttggagtccgcaatgaggagtgcgcggctggaggctgcctgatcgagctggcacaggagctcctggtcatcatggtgggcaagcaggtcatcaacaacatgcaggaggtcctcatcccgaagctaaagggctggtggcagaagttccggcttcgctccaagaagaggaaggcgggagcttctgcaggggctagccaggggccctgggaggacgactatgagcttgtgccctgtgagggtctgtttgacgagtacctggaaatggtgctgcagttcggcttcgtcaccatcttcgtggccgcctgtccgctcgcgccgctcttcgccctgctcaacaactgggtggagatccgcttggacgcgcgcaagttcgtctgcgagtaccggcgcccggtggccgagcgcgcccaggacatcggcatctggttccacatcctggcgggcctcacgcacctggcggtcatcagcaacgccttcctcctggccttctcgtccgacttcctgccgcgcgcctactaccggtggacccgcgcccacgacctgcgcggcttcctcaacttcacgctggcgcgagccccgtcctccttcgccgccgcgcacaaccgcacgtgcaggtatcgggctttccgggatgacgatggacattattcccagacctactggaatcttcttgccatccgcctggccttcgtcattgtgtttgagcatgtggttttctccgttggccgcctcctggacctcctggtgcctgacatcccagagtctgtggagatcaaagtgaagcgggagtactacctggctaagcaggcactggctgagaatgaggttctttttggaacgaacggaacaaaggatgagcagcccgagggctcagagctcagctcccactggacacccttcacggttcccaaggccagccagctgcagcagtga

SEQ ID NO: 2878 - RNA, 2802 nt, synthetic construct
  misc_feature 1..2802: note = derived and/or modified sequence opt1 fromNGEP__Homo_sapiens__CCDS33423.1
  source 1..2802: mol_type = other RNA
atgcgcatggccgccaccgcgtgggccggcctgcaggggcccccgctccccaccctgtgccccgccgtgcggacgggcctgtactgccgcgaccaggcccacgccgagcggtgggcgatgaccagcgagacctccagcgggtcccactgcgcccgcagccggatgctccgccggcgcgcccaggaggaggactccaccgtcctgatcgacgtgagcccgcccgaggccgagaagcggggctcctacgggagcacggcgcacgcctccgagcccggcggccagcaggccgccgcctgccgcgcggggagccccgccaagccccggatcgccgacttcgtgctggtctgggaggaggacctcaagctggaccgccagcaggactccgccgcccgggaccgcaccgacatgcaccggacctggcgcgagaccttcctggacaacctccgggcggccggcctgtgcgtggaccagcaggacgtgcaggacgggaacacgaccgtccactacgccctgctcagcgcctcctgggccgtgctgtgctactacgcggaggacctgcgcctcaagctgccgctgcaggagctccccaaccaggccagcaactggtccgccggcctgctggcctggctcgggatccccaacgtgctgctggaggtcgtgcccgacgtgccgcccgagtactacagctgccggttccgcgtcaacaagctcccccggttcctgggctccgacaaccaggacaccttcttcaccagcacgaagcgccaccagatcctgttcgagatcctcgccaagaccccctacggccacgagaagaagaacctgctggggatccaccagctcctggcggagggcgtgctgtccgccgccttcccgctccacgacgggcccttcaagaccccgcccgagggcccccaggcgccccgcctgaaccagcgccaggtgctgttccagcactgggcccggtggggcaagtggaacaagtaccagcccctcgaccacgtccggcgctacttcggggagaaggtggccctgtacttcgcctggctgggcttctacaccgggtggctcctgcccgccgccgtggtcggcacgctggtgttcctcgtggggtgcttcctggtcttcagcgacatcccgacccaggagctgtgcggcagcaaggactccttcgagatgtgccccctctgcctggactgccccttctggctgctcagctccgcgtgcgccctggcccaggccggccggctgttcgaccacgggggcaccgtgttcttcagcctgttcatggccctctgggcggtgctgctgctcgagtactggaagcgcaagtccgccaccctggcctaccggtgggactgcagcgactacgaggacacggaggagcgcccccggccgcagttcgccgcctccgcgcccatgaccgcccccaacccgatcaccggggaggacgagccctacttccccgagcgcagccgggcccgccggatgctggccggctccgtcgtgatcgtcgtgatggtggcggtcgtggtgatgtgcctcgtcagcatcatcctgtaccgcgccatcatggccatcgtggtgtcccggagcgggaacaccctgctcgccgcctgggcgtcccgcatcgccagcctgacgggctccgtcgtgaacctggtgttcatcctcatcctgagcaagatctacgtctccctggcccacgtgctcacccggtgggagatgcaccgcacccagaccaagttcgaggacgccttcacgctgaaggtgttcatcttccagttcgtcaacttctacagctcccccgtgtacatcgccttcttcaagggccggttcgtggggtacccgggcaactaccacaccctgttcggggtccgcaacgaggagtgcgcggccggcgggtgcctcatcgagctggcccaggagctgctcgtgatcatggtgggcaagcaggtcatcaacaacatgcaggaggtgctgatccccaagctgaagggctggtggcagaagttccgcctccggagcaagaagcgcaaggccggggccagcgcgggcgcctcccaggggccctgggaggacgactacgagctggtgccctgcgagggcctgttcgacgagtacctcgagatggtcctgcagttcggcttcgtgaccatcttcgtggccgcctgcccgctggcgcccctcttcgccctgctgaacaactgggtcgagatccggctcgacgcccgcaagttcgtgtgcgagtaccggcgccccgtggccgagcgggcccaggacatcgggatctggttccacatcctggcgggcctgacccacctcgccgtcatcagcaacgccttcctgctggccttctccagcgacttcctcccccgcgcctactaccggtggacgcgcgcgcacgacctgcgggggttcctgaacttcaccctcgcccgcgccccgtccagcttcgccgccgcgcacaaccggacctgccgctaccgggccttccgcgacgacgacggccactactcccagacctactggaacctgctggccatccggctcgccttcgtgatcgtgttcgagcacgtcgtgttcagcgtggggcgcctgctggacctcctggtccccgacatccccgagtccgtggagatcaaggtgaagcgggagtactacctggccaagcaggcgctcgccgagaacgaggtcctgttcggcacgaacggcaccaaggacgagcagcccgaggggagcgagctgtccagccactggaccccgttcaccgtgcccaaggcctcccagctccagcagtga

SEQ ID NO: 2879 - RNA, 2802 nt, synthetic construct
  misc_feature 1..2802: note = derived and/or modified sequence opt2 fromNGEP__Homo_sapiens__CCDS33423.1
  source 1..2802: mol_type = other RNA
atgcgcatggccgccaccgcctgggccggcctccagggcccccccctccccaccctctgccccgccgtccgcaccggcctctactgccgcgaccaggcccacgccgagcgctgggccatgacctccgagacctcctccggctcccactgcgcccgctcccgcatgctccgccgccgcgcccaggaggaggactccaccgtcctcatcgacgtctccccccccgaggccgagaagcgcggctcctacggctccaccgcccacgcctccgagcccggcggccagcaggccgccgcctgccgcgccggctcccccgccaagccccgcatcgccgacttcgtcctcgtctgggaggaggacctcaagctcgaccgccagcaggactccgccgcccgcgaccgcaccgacatgcaccgcacctggcgcgagaccttcctcgacaacctccgcgccgccggcctctgcgtcgaccagcaggacgtccaggacggcaacaccaccgtccactacgccctcctctccgcctcctgggccgtcctctgctactacgccgaggacctccgcctcaagctccccctccaggagctccccaaccaggcctccaactggtccgccggcctcctcgcctggctcggcatccccaacgtcctcctcgaggtcgtccccgacgtcccccccgagtactactcctgccgcttccgcgtcaacaagctcccccgcttcctcggctccgacaaccaggacaccttcttcacctccaccaagcgccaccagatcctcttcgagatcctcgccaagaccccctacggccacgagaagaagaacctcctcggcatccaccagctcctcgccgagggcgtcctctccgccgccttccccctccacgacggccccttcaagaccccccccgagggcccccaggccccccgcctcaaccagcgccaggtcctcttccagcactgggcccgctggggcaagtggaacaagtaccagcccctcgaccacgtccgccgctacttcggcgagaaggtcgccctctacttcgcctggctcggcttctacaccggctggctcctccccgccgccgtcgtcggcaccctcgtcttcctcgtcggctgcttcctcgtcttctccgacatccccacccaggagctctgcggctccaaggactccttcgagatgtgccccctctgcctcgactgccccttctggctcctctcctccgcctgcgccctcgcccaggccggccgcctcttcgaccacggcggcaccgtcttcttctccctcttcatggccctctgggccgtcctcctcctcgagtactggaagcgcaagtccgccaccctcgcctaccgctgggactgctccgactacgaggacaccgaggagcgcccccgcccccagttcgccgcctccgcccccatgaccgcccccaaccccatcaccggcgaggacgagccctacttccccgagcgctcccgcgcccgccgcatgctcgccggctccgtcgtcatcgtcgtcatggtcgccgtcgtcgtcatgtgcctcgtctccatcatcctctaccgcgccatcatggccatcgtcgtctcccgctccggcaacaccctcctcgccgcctgggcctcccgcatcgcctccctcaccggctccgtcgtcaacctcgtcttcatcctcatcctctccaagatctacgtctccctcgcccacgtcctcacccgctgggagatgcaccgcacccagaccaagttcgaggacgccttcaccctcaaggtcttcatcttccagttcgtcaacttctactcctcccccgtctacatcgccttcttcaagggccgcttcgtcggctaccccggcaactaccacaccctcttcggcgtccgcaacgaggagtgcgccgccggcggctgcctcatcgagctcgcccaggagctcctcgtcatcatggtcggcaagcaggtcatcaacaacatgcaggaggtcctcatccccaagctcaagggctggtggcagaagttccgcctccgctccaagaagcgcaaggccggcgcctccgccggcgcctcccagggcccctgggaggacgactacgagctcgtcccctgcgagggcctcttcgacgagtacctcgagatggtcctccagttcggcttcgtcaccatcttcgtcgccgcctgccccctcgcccccctcttcgccctcctcaacaactgggtcgagatccgcctcgacgcccgcaagttcgtctgcgagtaccgccgccccgtcgccgagcgcgcccaggacatcggcatctggttccacatcctcgccggcctcacccacctcgccgtcatctccaacgccttcctcctcgccttctcctccgacttcctcccccgcgcctactaccgctggacccgcgcccacgacctccgcggcttcctcaacttcaccctcgcccgcgccccctcctccttcgccgccgcccacaaccgcacctgccgctaccgcgccttccgcgacgacgacggccactactcccagacctactggaacctcctcgccatccgcctcgccttcgtcatcgtcttcgagcacgtcgtcttctccgtcggccgcctcctcgacctcctcgtccccgacatccccgagtccgtcgagatcaaggtcaagcgcgagtactacctcgccaagcaggccctcgccgagaacgaggtcctcttcggcaccaacggcaccaaggacgagcagcccgagggctccgagctctcctcccactggacccccttcaccgtccccaaggcctcccagctccagcagtga

SEQ ID NO: 2880 - RNA, 2802 nt, synthetic construct
  misc_feature 1..2802: note = derived and/or modified sequence opt3 fromNGEP__Homo_sapiens__CCDS33423.1
  source 1..2802: mol_type = other RNA
atgagaatggccgctaccgcatgggccggcctgcaggggccccctctcccaacactttgcccggcggtgaggactggactgtactgtcgggaccaagctcacgccgagcgctgggcaatgacgagcgaaacctcctctggttcacattgcgcccgaagtcgtatgttgagaaggcgggctcaggaggaagatagcacagtcttaatcgacgtttcaccccctgaggcagaaaagcgcggctcttatgggtcgactgcccacgcttcagagccaggaggccagcaggccgcggcatgtagagccggtagccccgctaaacctaggattgccgatttcgtgctggtatgggaggaagacctaaagctcgatcggcaacaggacagtgcagctcgcgatcgaaccgacatgcatagaacatggagggagacctttctggataaccttcgggccgcggggctgtgcgtggaccagcaggatgtccaagacggaaatactacagtgcactacgccttgctctccgcatcttgggctgttctgtgttattacgccgaagatctgcgtctcaaattaccactgcaggagcttcccaaccaggctagcaattggtccgccggcttgctggcatggctaggcatacctaacgtgctcctggaggtcgtgccagacgtaccgcccgaatattactcatgccgcttcagagttaataaacttcctaggtttctggggagtgacaaccaggataccttctttacgagcactaagcggcatcaaatcttgttcgagattctcgccaagaccccatatggacacgaaaagaaaaatctgttaggtatccaccagctgctcgctgagggcgtgctttctgcggcatttcccctgcatgacgggcctttcaagacaccacccgaaggaccgcaggcccctcgattgaaccaacgccaggtcctatttcagcactgggctagatggggcaaatggaataagtaccagcccctggatcatgtgaggcggtacttcggtgagaaagtggccctctattttgcatggctggggttctacactggatggcttctgccagccgctgtcgttggcaccttggtgtttctcgtaggctgtttcctggtgttctccgacattcctacacaagagttatgcgggtcaaaggatagctttgaaatgtgtcccctgtgcctagactgtccattctggctcctgagttctgcctgcgcacttgcgcaggctggacgcttgtttgatcacggtggcaccgtcttcttttccctgttcatggccctctgggcagtgctgcttctggagtattggaagagaaaaagcgccacgttggcttacaggtgggactgctcggattatgaagacactgaggaacgtccccggcctcagtttgccgcatctgctccaatgacagccccgaaccccatcaccggggaggatgagccttacttcccagaacgatccagagcgaggcgcatgctcgccggatcagttgtgatagtcgtgatggtagctgttgtggtcatgtgtctggtgagtatcattttatatcgggcaatcatggccattgtcgtgagcagatccggcaatactctgctagctgcctgggcatctaggatcgcgagcctcacaggttcagttgtgaacctggtatttatacttattttgagtaagatctacgtctccctggcccacgtgctcacccgctgggagatgcatcgaacgcagaccaaattcgaagacgcttttacactgaaggttttcatttttcaattcgtgaatttctacagctctcccgtctatatcgcctttttcaaagggcggtttgtgggctaccctggaaactatcacactttattcggcgtacgtaatgaggaatgcgcagctgggggatgtctgatcgagcttgcccaggagttgctcgtgattatggttggtaagcaggtcataaacaacatgcaggaagtgctgatcccaaaactaaagggctggtggcaaaagtttagactgaggtccaaaaagcgcaaagcaggggccagtgctggagcgagccagggcccctgggaggacgattacgaactcgtgccgtgcgagggtctgttcgacgagtatcttgaaatggtcttgcagtttgggttcgttaccatttttgtggccgcatgtcctctggctccattattcgccctcctgaataactgggtggagatccggcttgatgccagaaagtttgtatgcgaatacaggcgacccgtcgctgagcgcgcacaggacataggcatttggttccatatcctggccggattgacacacctcgcggtgatctccaatgcttttctgctagccttctcttcggatttcctgcctcgggcatattacagatggactagggcccatgacctccgtggctttctgaacttcacccttgctcgcgcacccagctcctttgccgcggctcacaatcggacatgtagatacagggccttccgagatgacgatgggcactattcacaaacctactggaacttgctggcaattcggttagcctttgttatcgtgttcgaacatgtcgtgtttagtgttggacgcctcctggaccttctggtgccagatattcctgagtctgtagagataaaagtcaagagagaatattacctagctaagcaggccctcgcagagaatgaagtgctgttcggtactaacggcacgaaagacgagcagcccgaagggagcgagttgtcctcacactggacaccatttaccgtgccgaaggctagccaactgcagcagtga

SEQ ID NO: 2881 - RNA, 2802 nt, synthetic construct
  misc_feature 1..2802: note = derived and/or modified sequence opt4 fromNGEP__Homo_sapiens__CCDS33423.1
  source 1..2802: mol_type = other RNA
atgagaatggccgccaccgcctgggccggcctgcagggcccccccctgcccaccctgtgccccgccgtgagaaccggcctgtactgcagagaccaggcccacgccgagagatgggccatgaccagcgagaccagcagcggcagccactgcgccagaagcagaatgctgagaagaagagcccaggaggaggacagcaccgtgctgatcgacgtgagcccccccgaggccgagaagagaggcagctacggcagcaccgcccacgccagcgagcccggcggccagcaggccgccgcctgcagagccggcagccccgccaagcccagaatcgccgacttcgtgctggtgtgggaggaggacctgaagctggacagacagcaggacagcgccgccagagacagaaccgacatgcacagaacctggagagagaccttcctggacaacctgagagccgccggcctgtgcgtggaccagcaggacgtgcaggacggcaacaccaccgtgcactacgccctgctgagcgccagctgggccgtgctgtgctactacgccgaggacctgagactgaagctgcccctgcaggagctgcccaaccaggccagcaactggagcgccggcctgctggcctggctgggcatccccaacgtgctgctggaggtggtgcccgacgtgccccccgagtactacagctgcagattcagagtgaacaagctgcccagattcctgggcagcgacaaccaggacaccttcttcaccagcaccaagagacaccagatcctgttcgagatcctggccaagaccccctacggccacgagaagaagaacctgctgggcatccaccagctgctggccgagggcgtgctgagcgccgccttccccctgcacgacggccccttcaagaccccccccgagggcccccaggcccccagactgaaccagagacaggtgctgttccagcactgggccagatggggcaagtggaacaagtaccagcccctggaccacgtgagaagatacttcggcgagaaggtggccctgtacttcgcctggctgggcttctacaccggctggctgctgcccgccgccgtggtgggcaccctggtgttcctggtgggctgcttcctggtgttcagcgacatccccacccaggagctgtgcggcagcaaggacagcttcgagatgtgccccctgtgcctggactgccccttctggctgctgagcagcgcctgcgccctggcccaggccggcagactgttcgaccacggcggcaccgtgttcttcagcctgttcatggccctgtgggccgtgctgctgctggagtactggaagagaaagagcgccaccctggcctacagatgggactgcagcgactacgaggacaccgaggagagacccagaccccagttcgccgccagcgcccccatgaccgcccccaaccccatcaccggcgaggacgagccctacttccccgagagaagcagagccagaagaatgctggccggcagcgtggtgatcgtggtgatggtggccgtggtggtgatgtgcctggtgagcatcatcctgtacagagccatcatggccatcgtggtgagcagaagcggcaacaccctgctggccgcctgggccagcagaatcgccagcctgaccggcagcgtggtgaacctggtgttcatcctgatcctgagcaagatctacgtgagcctggcccacgtgctgaccagatgggagatgcacagaacccagaccaagttcgaggacgccttcaccctgaaggtgttcatcttccagttcgtgaacttctacagcagccccgtgtacatcgccttcttcaagggcagattcgtgggctaccccggcaactaccacaccctgttcggcgtgagaaacgaggagtgcgccgccggcggctgcctgatcgagctggcccaggagctgctggtgatcatggtgggcaagcaggtgatcaacaacatgcaggaggtgctgatccccaagctgaagggctggtggcagaagttcagactgagaagcaagaagagaaaggccggcgccagcgccggcgccagccagggcccctgggaggacgactacgagctggtgccctgcgagggcctgttcgacgagtacctggagatggtgctgcagttcggcttcgtgaccatcttcgtggccgcctgccccctggcccccctgttcgccctgctgaacaactgggtggagatcagactggacgccagaaagttcgtgtgcgagtacagaagacccgtggccgagagagcccaggacatcggcatctggttccacatcctggccggcctgacccacctggccgtgatcagcaacgccttcctgctggccttcagcagcgacttcctgcccagagcctactacagatggaccagagcccacgacctgagaggcttcctgaacttcaccctggccagagcccccagcagcttcgccgccgcccacaacagaacctgcagatacagagccttcagagacgacgacggccactacagccagacctactggaacctgctggccatcagactggccttcgtgatcgtgttcgagcacgtggtgttcagcgtgggcagactgctggacctgctggtgcccgacatccccgagagcgtggagatcaaggtgaagagagagtactacctggccaagcaggccctggccgagaacgaggtgctgttcggcaccaacggcaccaaggacgagcagcccgagggcagcgagctgagcagccactggacccccttcaccgtgcccaaggccagccagctgcagcagtga

SEQ ID NO: 2882 - RNA, 2802 nt, synthetic construct
  misc_feature 1..2802: note = derived and/or modified sequence opt5 fromNGEP__Homo_sapiens__CCDS33423.1
  source 1..2802: mol_type = other RNA
atgagaatggccgctaccgcctgggcgggcctgcaggggccccctctcccgacactgtgccccgctgtgcggacgggactttactgtcgcgaccaagcccacgccgagagatgggctatgaccagcgaaacatcctctggcagccattgcgcccggtcccgcatgctgagacggcgcgctcaggaggaagattctaccgtcctcatcgacgttagccctcccgaggccgaaaagagagggtcctatggatctacagcgcacgccagcgagcctggcgggcagcaggctgccgcttgtcgggccggatcccccgcgaaacctcgcattgccgatttcgtgctggtgtgggaggaagaccttaagctggatagacaacaggacagcgctgcccgggatcgcaccgacatgcatagaacatggcgggagacctttctcgataacctgcgcgctgccggcctgtgcgtcgaccagcaggatgtgcaagacggcaatacgaccgttcactacgccctcctgtctgcttcctgggcggtgctttgttattacgccgaagatctgagactcaaactgccgcttcaggagctgcccaaccaggctagcaattggtctgccgggctcctggcctggctgggaatccctaacgtcctcctggaggtggttcccgacgtgcctcccgaatattactcctgccggttcagagtcaataaacttccgcgctttctgggcagcgacaaccaggatacattctttacctctacaaagcggcatcaaattctcttcgagatcctggctaagaccccttatgggcacgaaaagaaaaatcttctgggcattcaccagctcctggccgagggagtgctgtccgcggcttttcccctccatgacgggcctttcaagacgcctcccgaaggaccccaggccccgagactgaaccaacgccaggtgctttttcagcactgggcccggtggggcaaatggaataagtaccagcccctggatcatgtcagacgctacttcggcgagaaagttgctctctattttgcctggctggggttctacacaggatggcttctgcctgctgccgtggtgggcaccctcgtctttctggtggggtgtttcctggttttcagcgacatccccacacaagagctctgcggatccaaggattcttttgaaatgtgtcctctgtgccttgactgtcccttctggctgctcagctccgcgtgcgccctggctcaggccggccggctgtttgatcacgggggaaccgtgttctttagccttttcatggctctctgggccgtcctgctgctcgagtattggaagagaaaatctgcgaccctggcctaccgctgggactgctccgattatgaagacacagaggaacggccgagacctcagtttgctgccagcgctcccatgacggcccctaaccccatcaccggcgaggatgagccttacttccccgaacgctctcgggccagacggatgcttgctggcagcgtggttattgtggtcatggtggcggtcgtggttatgtgtctggtgtccatcattctctatcgcgccatcatggctattgtcgtgtctagaagcgggaatacactgctggccgcctgggcttcccggatcgccagccttaccggatctgttgtgaacctcgtctttattctgatcctgtccaagatctacgtgagcctcgcgcacgtgctgacaagatgggagatgcatcgcacccagacgaaattcgaagacgcttttacacttaaggttttcatttttcaattcgtcaatttctactcttccccggtgtatatcgcctttttcaaaggccggtttgtggggtaccctggaaactatcacaccctgttcggcgtcagaaatgaggaatgcgccgctgggggctgtctcattgagctggcccaggagctgcttgtgatcatggttggaaagcaggttattaacaacatgcaggaagtcctcatccccaaactgaagggctggtggcaaaagtttcgcctgagaagcaaaaagcggaaagcgggggcttccgccggagcctctcagggcccctgggaggacgattacgaactcgtgccttgcgaggggctgttcgacgagtatcttgaaatggttctgcagtttggattcgtgaccatctttgtcgctgcctgtccgctcgctcccctgttcgccctgcttaataactgggtggagattcgcctcgatgcgagaaagtttgtttgcgaataccggcgccctgtggccgagagagctcaggacatcggcatttggttccatatcctggccgggctgacacacctcgctgtcattagcaatgcctttctgcttgccttctcctctgatttcctgccccgggcttattaccgctggaccagagcgcatgacctccggggctttctgaacttcacactggcccgcgctcctagctcctttgccgccgctcacaatagaacgtgtcggtacagagccttccgcgatgacgatggacactatagccaaacctactggaaccttctggcgatccggctcgcttttgtgatcgtgttcgaacatgtcgtgttttctgtgggcagactgctcgacctgcttgtgcccgatattcctgagtccgtcgagatcaaagtgaagcgcgaatattacctggccaagcaggccctcgctgagaatgaagttctgttcgggacaaacggaaccaaagacgagcagcccgaaggcagcgagctgtcttcccactggacaccgtttaccgtgcctaaggccagccaacttcagcagtga

SEQ ID NO: 2883 - protein, 294 aa, synthetic construct
  REGION 1..294: note = NPM__Homo_sapiens__P06748
MEDSMDMDMSPLRPQNYLFGCELKADKDYHFKVDNDENEHQLSLRTVSLGAGAKDELHIVEAEAMNYEGSPIKVTLATLKMSVQPTVSLGGFEITPPVVLRLKCGSGPVHISGQHLVAVEEDAESEDEEEEDVKLLSISGKRSAPGGGSKVPQKKVKLAADEDDDDDDEEDDDEDDDDDDFDDEEAEEKAPVKKSIRDTPAKNAQKSNQNGKDSKPSSTPRSKGQESFKKQEKTPKTPKGPSSVEDIKAKMQASIEKGGSLPKVEAKFINYVKNCFRMTDQEAIQDLWQWRKSL

SEQ ID NO: 2884 - RNA, 885 nt, synthetic construct
  misc_feature 1..885: note = NPM__Homo_sapiens__AAA36380
  source 1..885: mol_type = other RNA
atggaagattcgatggacatggacatgagccccctgaggccccagaactatcttttcggttgtgaactaaaggccgacaaagattatcactttaaggtggataatgatgaaaatgagcaccagttatctttaagaacggtcagtttaggggctggtgcaaaggatgagttgcacattgttgaagcagaggcaatgaattacgaaggcagtccaattaaagtaacactggcaactttgaaaatgtctgtacagccaacggtttcccttgggggctttgaaataacaccaccagtggtcttaaggttgaagtgtggttcagggccagtgcatattagtggacagcacttagtagctgtggaggaagatgcagagtcagaagatgaagaggaggaggatgtgaaactcttaagtatatctggaaagcggtctgcccctggaggtggtagcaaggttccacagaaaaaagtaaaacttgctgctgatgaagatgatgacgatgatgatgaagaggatgatgatgaagatgatgatgatgatgattttgatgatgaggaagctgaagaaaaagcgccagtgaagaaatctatacgagatactccagccaaaaatgcacaaaagtcaaatcagaatggaaaagactcaaaaccatcatcaacaccaagatcaaaaggacaagaatccttcaagaaacaggaaaaaactcctaaaacaccaaaaggacctagttctgtagaagacattaaagcaaaaatgcaagcaagtatagaaaaaggtggttctcttcccaaagtggaagccaaattcatcaattatgtgaagaattgcttccggatgactgaccaagaggctattcaagatctctggcagtggaggaagtctctttaa

SEQ ID NO: 2885 - RNA, 885 nt, synthetic construct
  misc_feature 1..885: note = derived and/or modified sequence opt1 fromNPM__Homo_sapiens__AAA36380
  source 1..885: mol_type = other RNA
atggaggacagcatggacatggacatgagccccctgcggccgcagaactacctcttcggctgcgagctgaaggccgacaaggactaccacttcaaggtggacaacgacgagaacgagcaccagctgagcctccggaccgtctccctgggggccggcgcgaaggacgagctgcacatcgtggaggccgaggccatgaactacgaggggagccccatcaaggtgaccctcgccacgctgaagatgtccgtccagcccaccgtgagcctgggcgggttcgagatcaccccgcccgtggtcctccgcctgaagtgcggctccggccccgtgcacatcagcgggcagcacctggtggccgtcgaggaggacgcggagtccgaggacgaggaggaggaggacgtgaagctcctgagcatctccggcaagcggagcgcccccgggggcgggtccaaggtgccccagaagaaggtcaagctggccgccgacgaggacgacgacgacgacgacgaggaggacgacgacgaggacgacgacgacgacgacttcgacgacgaggaggcggaggagaaggccccggtgaagaagtccatccgcgacacccccgccaagaacgcccagaagtccaaccagaacggcaaggacagcaagccctccagcacgccccggtccaagggccaggagagcttcaagaagcaggagaagaccccgaagacccccaaggggcccagctccgtggaggacatcaaggccaagatgcaggcgagcatcgagaagggcgggtccctccccaaggtcgaggccaagttcatcaactacgtgaagaactgcttccgcatgaccgaccaggaggccatccaggacctgtggcagtggcgcaagagcctgtga

SEQ ID NO: 2886 - RNA, 885 nt, synthetic construct
  misc_feature 1..885: note = derived and/or modified sequence opt2 fromNPM__Homo_sapiens__AAA36380
  source 1..885: mol_type = other RNA
atggaggactccatggacatggacatgtcccccctccgcccccagaactacctcttcggctgcgagctcaaggccgacaaggactaccacttcaaggtcgacaacgacgagaacgagcaccagctctccctccgcaccgtctccctcggcgccggcgccaaggacgagctccacatcgtcgaggccgaggccatgaactacgagggctcccccatcaaggtcaccctcgccaccctcaagatgtccgtccagcccaccgtctccctcggcggcttcgagatcaccccccccgtcgtcctccgcctcaagtgcggctccggccccgtccacatctccggccagcacctcgtcgccgtcgaggaggacgccgagtccgaggacgaggaggaggaggacgtcaagctcctctccatctccggcaagcgctccgcccccggcggcggctccaaggtcccccagaagaaggtcaagctcgccgccgacgaggacgacgacgacgacgacgaggaggacgacgacgaggacgacgacgacgacgacttcgacgacgaggaggccgaggagaaggcccccgtcaagaagtccatccgcgacacccccgccaagaacgcccagaagtccaaccagaacggcaaggactccaagccctcctccaccccccgctccaagggccaggagtccttcaagaagcaggagaagacccccaagacccccaagggcccctcctccgtcgaggacatcaaggccaagatgcaggcctccatcgagaagggcggctccctccccaaggtcgaggccaagttcatcaactacgtcaagaactgcttccgcatgaccgaccaggaggccatccaggacctctggcagtggcgcaagtccctctga

SEQ ID NO: 2887 - RNA, 885 nt, synthetic construct
  misc_feature 1..885: note = derived and/or modified sequence opt3 fromNPM__Homo_sapiens__AAA36380
  source 1..885: mol_type = other RNA
atggaggacagcatggatatggacatgtctcccctgagacctcagaactacctcttcggctgcgaacttaaggccgataaagactatcactttaaggtggataatgacgagaacgaacatcaactgtccttgaggaccgtctcattaggggctggagcaaaagatgagctgcacatcgttgaagccgaggcgatgaattacgagggtagtccaattaaggtgacactagctactctcaaaatgagcgtacagccgacggtgtccctgggcgggttcgaaataacaccccctgtcgtgcttcggctgaagtgtggatctggcccagttcatatctcgggtcagcacttggtggccgtcgaggaagacgcagagtcagaggatgaagaggaagaggacgtgaagctcctgagcattagtgggaaacgctccgcccccggaggcggctctaaggtacctcagaaaaaggttaaactggctgcagatgaagacgatgacgacgatgacgaggaggatgacgatgaagacgatgacgatgacgattttgacgacgaggaagccgaggaaaaggctccagtgaagaaaagcatccgagatacccccgccaagaacgcgcaaaaatccaatcagaacgggaaggactcaaaacctagtagcactccacgttctaagggacaggagtccttcaaaaagcaggagaagaccccgaaaacacccaagggtccttcaagcgtcgaagatattaaagcaaagatgcaagccagtatcgagaaaggcgggtctctcccaaaggtggaagctaagtttataaattatgtgaaaaactgcttcagaatgaccgaccaggaggccatccaggatttatggcagtggaggaagtccctgtga

SEQ ID NO: 2888 - RNA, 885 nt, synthetic construct
  misc_feature 1..885: note = derived and/or modified sequence opt4 fromNPM__Homo_sapiens__AAA36380
  source 1..885: mol_type = other RNA
atggaggacagcatggacatggacatgagccccctgagaccccagaactacctgttcggctgcgagctgaaggccgacaaggactaccacttcaaggtggacaacgacgagaacgagcaccagctgagcctgagaaccgtgagcctgggcgccggcgccaaggacgagctgcacatcgtggaggccgaggccatgaactacgagggcagccccatcaaggtgaccctggccaccctgaagatgagcgtgcagcccaccgtgagcctgggcggcttcgagatcaccccccccgtggtgctgagactgaagtgcggcagcggccccgtgcacatcagcggccagcacctggtggccgtggaggaggacgccgagagcgaggacgaggaggaggaggacgtgaagctgctgagcatcagcggcaagagaagcgcccccggcggcggcagcaaggtgccccagaagaaggtgaagctggccgccgacgaggacgacgacgacgacgacgaggaggacgacgacgaggacgacgacgacgacgacttcgacgacgaggaggccgaggagaaggcccccgtgaagaagagcatcagagacacccccgccaagaacgcccagaagagcaaccagaacggcaaggacagcaagcccagcagcacccccagaagcaagggccaggagagcttcaagaagcaggagaagacccccaagacccccaagggccccagcagcgtggaggacatcaaggccaagatgcaggccagcatcgagaagggcggcagcctgcccaaggtggaggccaagttcatcaactacgtgaagaactgcttcagaatgaccgaccaggaggccatccaggacctgtggcagtggagaaagagcctgtga

SEQ ID NO: 2889 - RNA, 885 nt, synthetic construct
  misc_feature 1..885: note = derived and/or modified sequence opt5 fromNPM__Homo_sapiens__AAA36380
  source 1..885: mol_type = other RNA
atggaggacagcatggatatggacatgagccccctgagacctcagaactacctcttcggctgcgaactgaaggccgataaagactatcactttaaggtggataatgacgagaacgaacatcaactttctctgcggaccgtcagcctcggggctggagccaaagatgagctgcacatcgttgaagcggaggctatgaattacgagggctccccgattaaggtgacacttgccacgctgaaaatgtctgtgcagcccaccgtcagcctcgggggattcgaaatcacacctcccgtggttctgcgcctgaagtgtggctccgggcctgtgcatatttctggacagcacctcgtcgccgtggaggaagacgctgagagcgaggatgaagaggaagaggacgttaagctgctttccatcagcggcaaaagatctgcccccggcgggggatccaaggtgcctcagaaaaaggtcaaactggctgccgatgaagacgatgacgacgatgacgaggaggatgacgatgaagacgatgacgatgacgattttgacgacgaggaagcggaggaaaaggccccggtgaagaaaagcattcgggatacccccgctaagaacgcccaaaaatctaatcagaacggcaaggactccaaacctagctctacaccccgctccaaggggcaggagagcttcaaaaagcaggagaagacccctaaaacacccaagggaccgtcctctgtggaagatatcaaagctaagatgcaagccagcatcgagaaaggcgggtccctccctaaggtcgaagcgaagtttattaattatgttaaaaactgcttcagaatgaccgaccaggaggccatccaggatctgtggcagtggcggaagtccctttga

SEQ ID NO: 2890 - protein, 1304 aa, synthetic construct
  REGION 1..1304: note = NRCAM__Homo_sapiens__Q92823
MQLKIMPKKKRLSAGRVPLILFLCQMISALEVPLDPKLLEDLVQPPTITQQSPKDYIIDPRENIVIQCEAKGKPPPSFSWTRNGTHFDIDKDPLVTMKPGTGTLIINIMSEGKAETYEGVYQCTARNERGAAVSNNIVVRPSRSPLWTKEKLEPITLQSGQSLVLPCRPPIGLPPPIIFWMDNSFQRLPQSERVSQGLNGDLYFSNVLPEDTREDYICYARFNHTQTIQQKQPISVKVISVDELNDTIAANLSDTEFYGAKSSRERPPTFLTPEGNASNKEELRGNVLSLECIAEGLPTPIIYWAKEDGMLPKNRTVYKNFEKTLQIIHVSEADSGNYQCIAKNALGAIHHTISVRVKAAPYWITAPQNLVLSPGEDGTLICRANGNPKPRISWLTNGVPIEIAPDDPSRKIDGDTIIFSNVQERSSAVYQCNASNEYGYLLANAFVNVLAEPPRILTPANTLYQVIANRPALLDCAFFGSPLPTIEWFKGAKGSALHEDIYVLHENGTLEIPVAQKDSTGTYTCVARNKLGMAKNEVHLEIKDPTWIVKQPEYAVVQRGSMVSFECKVKHDHTLSLTVLWLKDNRELPSDERFTVDKDHLVVADVSDDDSGTYTCVANTTLDSVSASAVLSVVAPTPTPAPVYDVPNPPFDLELTDQLDKSVQLSWTPGDDNNSPITKFIIEYEDAMHKPGLWHHQTEVSGTQTTAQLKLSPYVNYSFRVMAVNSIGKSLPSEASEQYLTKASEPDKNPTAVEGLGSEPDNLVITWKPLNGFESNGPGLQYKVSWRQKDGDDEWTSVVVANVSKYIVSGTPTFVPYLIKVQALNDMGFAPEPAVVMGHSGEDLPMVAPGNVRVNVVNSTLAEVHWDPVPLKSIRGHLQGYRIYYWKTQSSSKRNRRHIEKKILTFQGSKTHGMLPGLEPFSHYTLNVRVVNGKGEGPASPDRVFNTPEGVPSAPSSLKIVNPTLDSLTLEWDPPSHPNGILTEYTLKYQPINSTHELGPLVDLKIPANKTRWTLKNLNFSTRYKFYFYAQTSAGSGSQITEEAVTTVDEAGILPPDVGAGKVQAVNPRISNLTAAAAETYANISWEYEGPEHVNFYVEYGVAGSKEEWRKEIVNGSRSFFGLKGLMPGTAYKVRVGAVGDSGFVSSEDVFETGPAMASRQVDIATQGWFIGLMCAVALLILILLIVCFIRRNKGGKYPVKEKEDAHADPEIQPMKEDDGTFGEYSDAEDHKPLKKGSRTPSDRTVKKEDSDDSLVDYGEGVNGQFNEDGSFIGQYSGKKEKEPAEGNESSEAPSPVNAMNSFV

SEQ ID NO: 2891 - RNA, 3915 nt, synthetic construct
  misc_feature 1..3915: note = NRCAM__Homo_sapiens__CCDS47686.1
  source 1..3915: mol_type = other RNA
atgcagcttaaaataatgccgaaaaagaagcgcttatctgcgggcagagtgcccctgattctcttcctgtgccagatgattagtgcactggaagtacctcttgatccaaaacttcttgaagacttggtacagcctccaaccatcacccaacagtctccaaaagattacattattgaccctcgggagaatattgtaatccagtgtgaagccaaagggaaaccgcccccaagcttttcctggacccgtaatgggactcattttgacatcgataaagaccctctggtcaccatgaagcctggcacaggaacgctcataattaacatcatgagcgaagggaaagctgagacctatgaaggagtctatcagtgtacagcaaggaacgaacgcggagctgcagtttctaataacattgttgtccgcccatccagatcaccattgtggaccaaagaaaaacttgaaccaatcacacttcaaagtggtcagtctttagtacttccctgcagacccccaattggattaccaccacctataatattttggatggataattcctttcaaagacttccacaaagtgagagagtttctcaaggtttgaatggggacctttatttttccaatgtcctcccagaggacacccgcgaagactatatctgttatgctagatttaatcatactcaaaccatacagcagaagcaacctatttctgtgaaggtgatttcagtggatgaattgaatgacactatagctgctaatttgagtgacactgagttttatggtgctaaatcaagtagagagaggccaccaacatttttaactccagaaggcaatgcaagtaacaaagaggaattaagaggaaatgtgctttcactggagtgcattgcagaaggactgcctaccccaattatttactgggcaaaggaagatggaatgctacccaaaaacaggacagtttataagaactttgagaaaaccttgcagatcattcatgtttcagaagcagactctggaaattaccaatgtatagcaaaaaacgcattaggagccatccaccataccatttctgttagagttaaagcggctccatactggatcacagcccctcaaaatcttgtgctgtccccaggagaggatgggaccttgatctgcagagctaatggcaaccccaaacccagaattagctggttaacaaatggagtcccaatagaaattgcccctgatgaccccagcagaaaaatagatggcgataccattattttttcaaatgttcaagaaagatcaagtgcagtctatcagtgcaatgcctctaatgaatatggatatttactggcaaacgcatttgtaaatgtgctggctgagccaccacgaatcctcacacctgcaaacacactctaccaggtcattgcaaacaggcctgctttactagactgtgccttctttgggtctcctctcccaaccatcgagtggtttaaaggagctaaaggaagtgctcttcatgaagatatttatgttttacatgaaaatggaactttggaaattcctgtggcccaaaaggacagtacaggaacttatacgtgtgttgcaaggaataaattagggatggcgaagaatgaagttcacttagaaatcaaagatcctacatggatcgttaaacagcccgaatatgcagttgtgcaaagagggagcatggtgtcctttgaatgcaaagtgaaacatgatcacaccttatccctcactgtcctgtggctgaaggacaacagggaactgcccagtgatgaaaggttcactgttgacaaggatcatctagtggtagctgatgtcagtgacgatgacagcgggacctacacgtgtgtggccaacaccactctggacagcgtctccgccagcgctgtgcttagcgttgttgctcctactccaactccagctcccgtttacgatgtcccaaatcctccctttgacttagaactgacagatcaacttgacaaaagtgttcagctgtcatggaccccaggcgatgacaacaatagccccattacaaaattcatcatcgaatatgaagatgcaatgcacaagccagggctgtggcaccaccaaactgaagtttctggaacacagaccacagcccagctgaagctgtctccttacgtgaactactccttccgcgtgatggcagtgaacagcattgggaagagcttgcccagcgaggcgtctgagcagtatttgacgaaagcctcagaaccagataaaaaccccacagctgtggaaggactgggatcagagcctgataatttggtgattacgtggaagcccttgaatggtttcgaatctaatgggccaggccttcagtacaaagttagctggcgccagaaagatggtgatgatgaatggacatctgtggttgtggcaaatgtatccaaatatattgtctcaggcacgccaacctttgttccatacctgatcaaagttcaggccctgaatgacatggggtttgcccccgagccagctgtagtcatgggacattctggagaagacctcccaatggtggctcctgggaacgtgcgtgtgaatgtggtgaacagtaccttagccgaggtgcactgggacccagtacctctgaaaagcatccgaggacacctacaaggctatcggatttactattggaagacccagagttcatctaaaagaaacagacgtcacattgagaaaaagatcctcaccttccaaggcagcaagactcatggcatgttgccggggctagagccctttagccactacacactgaatgtccgagtggtcaatgggaaaggggagggcccagccagccctgacagagtctttaatactccagaaggagtccccagtgctccctcgtctttgaagattgtgaatccaacactggactctctcactttggaatgggatccaccgagccacccgaatggcattttgacagagtacaccttaaagtatcagccaattaacagcacacatgaattaggccctctggtagatttgaaaattcctgccaacaagacacggtggactttaaaaaatttaaatttcagcactcgatataagttttatttctatgcacaaacatcagcaggatcaggaagtcaaattacagaggaagcagtaacaactgtggatgaagctggtattcttccacctgatgtaggtgcaggcaaagttcaagcagtaaatcccaggatcagcaatcttactgctgcagctgctgagacctatgccaatatcagttgggaatatgagggaccagagcatgtgaacttttatgttgaatatggtgtagcaggcagcaaagaagaatggagaaaagaaattgtaaatggttctcggagcttctttgggttaaagggtctaatgccaggaacagcatacaaagttcgagttggtgctgtgggggactctggttttgtgagttcagaggatgtgtttgagacaggcccagcgatggcaagccggcaggtggatattgcaactcagggctggttcattggtctgatgtgtgctgttgctctccttatcttaattttgctgattgtttgcttcatcagaagaaacaagggtggtaaatatccagttaaagaaaaggaagatgcccatgctgaccctgaaatccagcctatgaaggaagatgatgggacatttggagaatacagtgatgcagaagaccacaagcctttgaaaaaaggaagtcgaactccttcagacaggactgtgaaaaaagaagatagtgacgacagcctagttgactatggagaaggggttaatggccagttcaatgaggatggctcctttattggacaatacagtggtaagaaagagaaagagccggctgaaggaaacgaaagctcagaggcaccttctcctgtcaacgccatgaattcctttgtttaa

SEQ ID NO: 2892 - RNA, 3915 nt, synthetic construct
  misc_feature 1..3915: note = derived and/or modified sequence opt1 fromNRCAM__Homo_sapiens__CCDS47686.1
  source 1..3915: mol_type = other RNA
atgcagctgaagatcatgcccaagaagaagcgcctcagcgccggccgggtgccgctgatcctgttcctctgccagatgatctccgccctggaggtccccctggaccccaagctcctggaggacctggtgcagcccccgaccatcacccagcagagccccaaggactacatcatcgacccccgcgagaacatcgtgatccagtgcgaggcgaaggggaagcccccgccctccttcagctggacgcggaacggcacccacttcgacatcgacaaggaccccctcgtcaccatgaagcccgggaccggcacgctgatcatcaacatcatgtccgaggggaaggccgagacctacgagggcgtgtaccagtgcaccgcccgcaacgagcggggcgccgccgtgagcaacaacatcgtcgtgcgcccgtcccggagccccctgtggaccaaggagaagctcgagcccatcacgctgcagtccgggcagagcctggtgctcccctgccgcccgcccatcggcctgcccccgcccatcatcttctggatggacaactccttccagcggctgccccagagcgagcgcgtctcccaggggctcaacggcgacctgtacttcagcaacgtgctgcccgaggacacccgggaggactacatctgctacgcgcgcttcaaccacacccagaccatccagcagaagcagcccatctccgtgaaggtcatcagcgtggacgagctcaacgacacgatcgccgccaacctgtccgacaccgagttctacggggccaagagctcccgggagcgcccgcccaccttcctgacccccgagggcaacgcgagcaacaaggaggagctccggggcaacgtgctgagcctggagtgcatcgccgaggggctccccacgccgatcatctactgggccaaggaggacggcatgctgcccaagaaccgcaccgtctacaagaacttcgagaagaccctgcagatcatccacgtgtccgaggccgacagcgggaactaccagtgcatcgccaagaacgcgctcggcgccatccaccacaccatctccgtgcgggtcaaggccgccccctactggatcacggccccgcagaacctggtgctgagccccggcgaggacgggaccctcatctgccgcgcgaacggcaaccccaagccccggatctcctggctgaccaacggggtgccgatcgagatcgcccccgacgaccccagccgcaagatcgacggcgacaccatcatcttctccaacgtccaggagcggagctccgccgtgtaccagtgcaacgccagcaacgagtacgggtacctgctcgccaacgcgttcgtgaacgtcctggccgagcccccgcgcatcctgacgcccgccaacaccctctaccaggtgatcgccaaccgccccgccctgctggactgcgcgttcttcggcagccccctcccgaccatcgagtggttcaagggcgccaaggggagcgccctgcacgaggacatctacgtcctgcacgagaacggcaccctcgagatccccgtggcccagaaggactccacggggacctacacgtgcgtggcgcggaacaagctgggcatggccaagaacgaggtccacctggagatcaaggaccccacctggatcgtgaagcagcccgagtacgccgtggtccagcgcgggagcatggtgtccttcgagtgcaaggtgaagcacgaccacaccctcagcctgaccgtcctgtggctgaaggacaaccgggagctcccgtccgacgagcgcttcaccgtggacaaggaccacctggtggtcgccgacgtgagcgacgacgactccggcacctacacgtgcgtggccaacaccaccctggacagcgtcagcgcgtccgccgtgctcagcgtggtcgcccccacccccacccccgccccggtgtacgacgtgcccaacccgcccttcgacctggagctgacggaccagctcgacaagtccgtccagctgagctggacccccggcgacgacaacaactcccccatcaccaagttcatcatcgagtacgaggacgccatgcacaagcccgggctgtggcaccaccagaccgaggtgagcggcacgcagaccaccgcgcagctcaagctgtccccgtacgtgaactacagcttccgggtcatggccgtgaactccatcgggaagtccctgccctccgaggccagcgagcagtacctcaccaaggcctccgagcccgacaagaaccccacggccgtggagggcctggggagcgagccggacaacctggtcatcacctggaagcccctcaacggcttcgagtccaacggccccgggctgcagtacaaggtgagctggcgccagaaggacggcgacgacgagtggacctccgtggtcgtggcgaacgtgagcaagtacatcgtcagcgggacccccacgttcgtgccgtacctgatcaaggtgcaggccctcaacgacatgggcttcgcccccgagcccgccgtcgtgatgggccactccggggaggacctgcccatggtggcgccgggcaacgtccgggtgaacgtggtcaacagcaccctggccgaggtgcactgggaccccgtgcccctcaagtccatccgcgggcacctccagggctaccggatctactactggaagacccagagctccagcaagcgcaaccggcgccacatcgagaagaagatcctgaccttccaggggtccaagacgcacggcatgctgcccggcctggagccgttcagccactacaccctgaacgtccgggtggtgaacgggaagggcgaggggcccgcctcccccgaccgcgtcttcaacacccccgagggcgtgccgagcgccccctccagcctcaagatcgtgaaccccaccctggactccctgacgctcgagtgggacccgcccagccaccccaacgggatcctgaccgagtacaccctgaagtaccagcccatcaactccacccacgagctcggccccctggtcgacctgaagatcccggccaacaagacgcggtggaccctcaagaacctgaacttcagcacccgctacaagttctacttctacgcgcagacctccgccggcagcgggtcccagatcacggaggaggccgtgaccaccgtcgacgaggccggcatcctgccgcccgacgtgggggccggcaaggtgcaggcggtcaacccccggatcagcaacctcaccgccgccgccgccgagacgtacgcgaacatcagctgggagtacgaggggcccgagcacgtgaacttctacgtggagtacggcgtcgccggctccaaggaggagtggcgcaaggagatcgtgaacgggagccggtccttcttcggcctgaaggggctgatgcccggcaccgcctacaaggtgcgcgtcggggccgtgggcgacagcggcttcgtgtccagcgaggacgtcttcgagaccgggcccgcgatggcctcccgccaggtggacatcgccacccagggctggttcatcgggctcatgtgcgccgtggccctgctgatcctcatcctgctgatcgtctgcttcatccggcgcaacaagggcggcaagtacccggtgaaggagaaggaggacgcgcacgccgaccccgagatccagcccatgaaggaggacgacgggacgttcggcgagtacagcgacgccgaggaccacaagcccctcaagaaggggtcccggaccccgagcgaccgcaccgtgaagaaggaggactccgacgacagcctggtcgactacggcgagggggtgaacggccagttcaacgaggacggctccttcatcgggcagtacagcggcaagaaggagaaggagcccgccgaggggaacgagtccagcgaggccccctcccccgtgaacgcgatgaacagcttcgtctga

SEQ ID NO: 2893 - RNA, 3915 nt, synthetic construct
  misc_feature 1..3915: note = derived and/or modified sequence opt2 fromNRCAM__Homo_sapiens__CCDS47686.1
  source 1..3915: mol_type = other RNA
atgcagctcaagatcatgcccaagaagaagcgcctctccgccggccgcgtccccctcatcctcttcctctgccagatgatctccgccctcgaggtccccctcgaccccaagctcctcgaggacctcgtccagccccccaccatcacccagcagtcccccaaggactacatcatcgacccccgcgagaacatcgtcatccagtgcgaggccaagggcaagccccccccctccttctcctggacccgcaacggcacccacttcgacatcgacaaggaccccctcgtcaccatgaagcccggcaccggcaccctcatcatcaacatcatgtccgagggcaaggccgagacctacgagggcgtctaccagtgcaccgcccgcaacgagcgcggcgccgccgtctccaacaacatcgtcgtccgcccctcccgctcccccctctggaccaaggagaagctcgagcccatcaccctccagtccggccagtccctcgtcctcccctgccgcccccccatcggcctccccccccccatcatcttctggatggacaactccttccagcgcctcccccagtccgagcgcgtctcccagggcctcaacggcgacctctacttctccaacgtcctccccgaggacacccgcgaggactacatctgctacgcccgcttcaaccacacccagaccatccagcagaagcagcccatctccgtcaaggtcatctccgtcgacgagctcaacgacaccatcgccgccaacctctccgacaccgagttctacggcgccaagtcctcccgcgagcgcccccccaccttcctcacccccgagggcaacgcctccaacaaggaggagctccgcggcaacgtcctctccctcgagtgcatcgccgagggcctccccacccccatcatctactgggccaaggaggacggcatgctccccaagaaccgcaccgtctacaagaacttcgagaagaccctccagatcatccacgtctccgaggccgactccggcaactaccagtgcatcgccaagaacgccctcggcgccatccaccacaccatctccgtccgcgtcaaggccgccccctactggatcaccgccccccagaacctcgtcctctcccccggcgaggacggcaccctcatctgccgcgccaacggcaaccccaagccccgcatctcctggctcaccaacggcgtccccatcgagatcgcccccgacgacccctcccgcaagatcgacggcgacaccatcatcttctccaacgtccaggagcgctcctccgccgtctaccagtgcaacgcctccaacgagtacggctacctcctcgccaacgccttcgtcaacgtcctcgccgagcccccccgcatcctcacccccgccaacaccctctaccaggtcatcgccaaccgccccgccctcctcgactgcgccttcttcggctcccccctccccaccatcgagtggttcaagggcgccaagggctccgccctccacgaggacatctacgtcctccacgagaacggcaccctcgagatccccgtcgcccagaaggactccaccggcacctacacctgcgtcgcccgcaacaagctcggcatggccaagaacgaggtccacctcgagatcaaggaccccacctggatcgtcaagcagcccgagtacgccgtcgtccagcgcggctccatggtctccttcgagtgcaaggtcaagcacgaccacaccctctccctcaccgtcctctggctcaaggacaaccgcgagctcccctccgacgagcgcttcaccgtcgacaaggaccacctcgtcgtcgccgacgtctccgacgacgactccggcacctacacctgcgtcgccaacaccaccctcgactccgtctccgcctccgccgtcctctccgtcgtcgcccccacccccacccccgcccccgtctacgacgtccccaacccccccttcgacctcgagctcaccgaccagctcgacaagtccgtccagctctcctggacccccggcgacgacaacaactcccccatcaccaagttcatcatcgagtacgaggacgccatgcacaagcccggcctctggcaccaccagaccgaggtctccggcacccagaccaccgcccagctcaagctctccccctacgtcaactactccttccgcgtcatggccgtcaactccatcggcaagtccctcccctccgaggcctccgagcagtacctcaccaaggcctccgagcccgacaagaaccccaccgccgtcgagggcctcggctccgagcccgacaacctcgtcatcacctggaagcccctcaacggcttcgagtccaacggccccggcctccagtacaaggtctcctggcgccagaaggacggcgacgacgagtggacctccgtcgtcgtcgccaacgtctccaagtacatcgtctccggcacccccaccttcgtcccctacctcatcaaggtccaggccctcaacgacatgggcttcgcccccgagcccgccgtcgtcatgggccactccggcgaggacctccccatggtcgcccccggcaacgtccgcgtcaacgtcgtcaactccaccctcgccgaggtccactgggaccccgtccccctcaagtccatccgcggccacctccagggctaccgcatctactactggaagacccagtcctcctccaagcgcaaccgccgccacatcgagaagaagatcctcaccttccagggctccaagacccacggcatgctccccggcctcgagcccttctcccactacaccctcaacgtccgcgtcgtcaacggcaagggcgagggccccgcctcccccgaccgcgtcttcaacacccccgagggcgtcccctccgccccctcctccctcaagatcgtcaaccccaccctcgactccctcaccctcgagtgggaccccccctcccaccccaacggcatcctcaccgagtacaccctcaagtaccagcccatcaactccacccacgagctcggccccctcgtcgacctcaagatccccgccaacaagacccgctggaccctcaagaacctcaacttctccacccgctacaagttctacttctacgcccagacctccgccggctccggctcccagatcaccgaggaggccgtcaccaccgtcgacgaggccggcatcctcccccccgacgtcggcgccggcaaggtccaggccgtcaacccccgcatctccaacctcaccgccgccgccgccgagacctacgccaacatctcctgggagtacgagggccccgagcacgtcaacttctacgtcgagtacggcgtcgccggctccaaggaggagtggcgcaaggagatcgtcaacggctcccgctccttcttcggcctcaagggcctcatgcccggcaccgcctacaaggtccgcgtcggcgccgtcggcgactccggcttcgtctcctccgaggacgtcttcgagaccggccccgccatggcctcccgccaggtcgacatcgccacccagggctggttcatcggcctcatgtgcgccgtcgccctcctcatcctcatcctcctcatcgtctgcttcatccgccgcaacaagggcggcaagtaccccgtcaaggagaaggaggacgcccacgccgaccccgagatccagcccatgaaggaggacgacggcaccttcggcgagtactccgacgccgaggaccacaagcccctcaagaagggctcccgcaccccctccgaccgcaccgtcaagaaggaggactccgacgactccctcgtcgactacggcgagggcgtcaacggccagttcaacgaggacggctccttcatcggccagtactccggcaagaaggagaaggagcccgccgagggcaacgagtcctccgaggccccctcccccgtcaacgccatgaactccttcgtctga

SEQ ID NO: 2894 - RNA, 3915 nt, synthetic construct
  misc_feature 1..3915: note = derived and/or modified sequence opt3 fromNRCAM__Homo_sapiens__CCDS47686.1
  source 1..3915: mol_type = other RNA
atgcagctgaagatcatgcccaaaaagaaaagactcagcgccggcagggtgcctcttattctgttcttgtgccaaatgatatccgctttagaggtcccactggacccgaagctactcgaagatctggttcagccccctaccatcacacagcagtctccaaaagactacattatcgatccccgggagaatattgtgatccaatgtgaagcaaaggggaagcctccaccctcatttagttggactcgcaatggaacgcacttcgacatagataaagaccctcttgtaaccatgaagccaggtacaggcactctgatcattaacatcatgagcgaggggaaagccgaaacctatgagggagtgtaccagtgcacagcgcgaaatgagcgtggcgctgccgtctccaacaatattgtggttagaccgtctaggtcgcccttgtggaccaaggaaaaactcgagcctatcactctgcagtcaggtcagagcctggtgctcccatgtcggccccctatagggttaccacccccgattatcttttggatggataacagtttccaacgcctgcctcagtccgaaagagtctctcagggacttaatggcgacttgtattttagcaacgtgctgcccgaggatacaagggaggactacatttgctatgcacggttcaatcatacccagacgatccaacagaagcagccaatctccgtaaaggttatttcagtggatgaactaaacgacactatagccgctaatctcagtgataccgagttttacggcgcaaaaagctctcgcgaacgacctcccacattcctgactccagaggggaacgcctccaataaggaggaacttagaggaaacgtcctgtcattggagtgtatcgctgaaggtctccccacccctattatctattgggccaaagaggacggcatgctgccaaagaataggacagtgtacaaaaactttgaaaagaccttacaaataattcacgtgagcgaggcggacagtgggaactaccagtgcatcgctaaaaatgccctgggagctatccatcacacgatttctgtccgggttaaggccgcaccgtattggatcactgctccccagaacctcgtgctttcccctggcgaagatggtacactgatttgtcgtgccaatgggaacccaaagccccgcataagctggttgaccaatggagtacctatcgagattgcgccagacgatccctcgagaaaaatcgacggcgatactatcattttctctaacgtgcaggagaggtcctcagccgtctaccaatgcaatgcaagtaacgaatatggctacctactggctaatgcctttgtgaacgttctcgctgagccgcctcggatactgacaccagccaataccctttatcaggtgatcgcaaaccgacccgccctgttggactgtgctttctttgggagccctctccccacgattgaatggttcaagggagcgaaaggttccgcactgcatgaggatatctacgtcttacacgaaaatggcaccctggagattccagtggcccagaaggactctacagggacttatacctgcgtagctcgcaacaaactaggaatggccaagaatgaggttcacctcgaaatcaaggatcctacatggatagtgaaacagcccgagtacgcagtcgtgcaaagaggcagcatggtctcattcgaatgtaaggtgaaacatgaccacactctgagtcttaccgttttgtggctgaaggataacagggagctcccatccgacgagcggtttacagtggacaaagatcatctggtagtcgccgacgtgagcgatgacgattctggtacctacacttgcgttgctaacacgacacttgactcagtgagtgccagcgcagtcctgtccgtggtagcgccgacccctactcccgctccagtgtatgatgttcccaatcctccattcgacttggaactcaccgatcagctggacaagtctgtccagttatcgtggacacccggggatgacaacaatagccctatcaccaagtttattatcgagtacgaagatgccatgcacaaaccgggcctgtggcaccatcagactgaggtgtccggaacacaaacgaccgcacagctaaagctctcaccatatgtgaactacagtttccgcgtcatggccgttaattctattggcaaaagcctgccctccgaagcatcagagcagtatcttactaaggccagcgagcctgacaaaaacccaacagcagtggaagggttgggatctgagcccgacaatctggtgatcacctggaagcctctcaacggttttgaatccaatggcccggggctgcagtacaaggtaagttggagacaaaaagatggagacgatgagtggacaagcgtcgtggttgctaacgtgtctaagtatatagtctccggcactcccaccttcgtgccatacttaattaaagttcaggccctgaatgacatgggttttgcgcctgaacccgccgtggtaatggggcactcaggcgaggatcttccaatggtcgctcctggaaacgtgagggtgaatgtcgttaacagtacgttggcagaggtgcattgggaccccgtaccactcaagagcatccgtggccatctgcaggggtaccggatttattactggaaaacccaatcgtcctctaagcgaaatagaaggcacatcgaaaagaagatactaacattccagggaagcaagactcacggtatgctgccgggcctcgagcctttttcacactataccctgaacgtgcgcgtcgtgaacgggaaaggagaaggccccgccagtccagatcgggttttcaatacacccgagggtgtgccttccgctccatctagccttaagatcgtcaaccccactttggactccctgaccttagaatgggatcctccgtcacatccaaatgggattctcacggagtacacactgaaatatcagcccatcaacagcacccacgagcttggccctctggtggacttgaagattcccgccaataaaactagatggacactcaagaacctgaattttagtaccaggtacaagttctatttttacgcacagacttctgcgggatccggcagccaaatcaccgaagaggccgttacaacggtggatgaagctgggatactaccacctgacgtcggagccggcaaagtacaggcagtgaacccccgcatttcgaatctgaccgctgccgcagccgagacttacgctaacatctcatgggagtatgaaggtccagagcatgttaatttctacgtggaatatggggtcgcgggatctaaggaggaatggcgaaaagagatcgtgaacggcagtcggtccttctttggtctcaagggcctgatgcctgggacagcctacaaagtacgtgtgggagcagtcggcgatagcgggttcgtttctagcgaggacgtgtttgaaaccggaccggctatggcctccagacaggtggacattgccacacagggctggttcatcggtcttatgtgcgctgtcgcattgctgattttaatactcctgatcgtgtgttttattaggcgcaataaagggggaaagtatcccgttaaagagaaggaagatgcccacgcggacccagagatccaacctatgaaagaagatgacggcactttcggtgagtactcagatgctgaggaccacaagccccttaaaaagggcagtcggaccccaagcgatagaacggtaaagaaagaagactctgatgactccctggtggattatggggagggagtcaacggccagtttaatgaagacgggtcattcattggacagtacagtggcaagaaagagaaggaacctgccgagggtaacgagagctccgaagcaccctctccggtgaacgccatgaactcgtttgtttga

SEQ ID NO: 2895 - RNA, 3915 nt, synthetic construct
  misc_feature 1..3915: note = derived and/or modified sequence opt4 fromNRCAM__Homo_sapiens__CCDS47686.1
  source 1..3915: mol_type = other RNA
atgcagctgaagatcatgcccaagaagaagagactgagcgccggcagagtgcccctgatcctgttcctgtgccagatgatcagcgccctggaggtgcccctggaccccaagctgctggaggacctggtgcagccccccaccatcacccagcagagccccaaggactacatcatcgaccccagagagaacatcgtgatccagtgcgaggccaagggcaagcccccccccagcttcagctggaccagaaacggcacccacttcgacatcgacaaggaccccctggtgaccatgaagcccggcaccggcaccctgatcatcaacatcatgagcgagggcaaggccgagacctacgagggcgtgtaccagtgcaccgccagaaacgagagaggcgccgccgtgagcaacaacatcgtggtgagacccagcagaagccccctgtggaccaaggagaagctggagcccatcaccctgcagagcggccagagcctggtgctgccctgcagaccccccatcggcctgcccccccccatcatcttctggatggacaacagcttccagagactgccccagagcgagagagtgagccagggcctgaacggcgacctgtacttcagcaacgtgctgcccgaggacaccagagaggactacatctgctacgccagattcaaccacacccagaccatccagcagaagcagcccatcagcgtgaaggtgatcagcgtggacgagctgaacgacaccatcgccgccaacctgagcgacaccgagttctacggcgccaagagcagcagagagagaccccccaccttcctgacccccgagggcaacgccagcaacaaggaggagctgagaggcaacgtgctgagcctggagtgcatcgccgagggcctgcccacccccatcatctactgggccaaggaggacggcatgctgcccaagaacagaaccgtgtacaagaacttcgagaagaccctgcagatcatccacgtgagcgaggccgacagcggcaactaccagtgcatcgccaagaacgccctgggcgccatccaccacaccatcagcgtgagagtgaaggccgccccctactggatcaccgccccccagaacctggtgctgagccccggcgaggacggcaccctgatctgcagagccaacggcaaccccaagcccagaatcagctggctgaccaacggcgtgcccatcgagatcgcccccgacgaccccagcagaaagatcgacggcgacaccatcatcttcagcaacgtgcaggagagaagcagcgccgtgtaccagtgcaacgccagcaacgagtacggctacctgctggccaacgccttcgtgaacgtgctggccgagccccccagaatcctgacccccgccaacaccctgtaccaggtgatcgccaacagacccgccctgctggactgcgccttcttcggcagccccctgcccaccatcgagtggttcaagggcgccaagggcagcgccctgcacgaggacatctacgtgctgcacgagaacggcaccctggagatccccgtggcccagaaggacagcaccggcacctacacctgcgtggccagaaacaagctgggcatggccaagaacgaggtgcacctggagatcaaggaccccacctggatcgtgaagcagcccgagtacgccgtggtgcagagaggcagcatggtgagcttcgagtgcaaggtgaagcacgaccacaccctgagcctgaccgtgctgtggctgaaggacaacagagagctgcccagcgacgagagattcaccgtggacaaggaccacctggtggtggccgacgtgagcgacgacgacagcggcacctacacctgcgtggccaacaccaccctggacagcgtgagcgccagcgccgtgctgagcgtggtggcccccacccccacccccgcccccgtgtacgacgtgcccaacccccccttcgacctggagctgaccgaccagctggacaagagcgtgcagctgagctggacccccggcgacgacaacaacagccccatcaccaagttcatcatcgagtacgaggacgccatgcacaagcccggcctgtggcaccaccagaccgaggtgagcggcacccagaccaccgcccagctgaagctgagcccctacgtgaactacagcttcagagtgatggccgtgaacagcatcggcaagagcctgcccagcgaggccagcgagcagtacctgaccaaggccagcgagcccgacaagaaccccaccgccgtggagggcctgggcagcgagcccgacaacctggtgatcacctggaagcccctgaacggcttcgagagcaacggccccggcctgcagtacaaggtgagctggagacagaaggacggcgacgacgagtggaccagcgtggtggtggccaacgtgagcaagtacatcgtgagcggcacccccaccttcgtgccctacctgatcaaggtgcaggccctgaacgacatgggcttcgcccccgagcccgccgtggtgatgggccacagcggcgaggacctgcccatggtggcccccggcaacgtgagagtgaacgtggtgaacagcaccctggccgaggtgcactgggaccccgtgcccctgaagagcatcagaggccacctgcagggctacagaatctactactggaagacccagagcagcagcaagagaaacagaagacacatcgagaagaagatcctgaccttccagggcagcaagacccacggcatgctgcccggcctggagcccttcagccactacaccctgaacgtgagagtggtgaacggcaagggcgagggccccgccagccccgacagagtgttcaacacccccgagggcgtgcccagcgcccccagcagcctgaagatcgtgaaccccaccctggacagcctgaccctggagtgggacccccccagccaccccaacggcatcctgaccgagtacaccctgaagtaccagcccatcaacagcacccacgagctgggccccctggtggacctgaagatccccgccaacaagaccagatggaccctgaagaacctgaacttcagcaccagatacaagttctacttctacgcccagaccagcgccggcagcggcagccagatcaccgaggaggccgtgaccaccgtggacgaggccggcatcctgccccccgacgtgggcgccggcaaggtgcaggccgtgaaccccagaatcagcaacctgaccgccgccgccgccgagacctacgccaacatcagctgggagtacgagggccccgagcacgtgaacttctacgtggagtacggcgtggccggcagcaaggaggagtggagaaaggagatcgtgaacggcagcagaagcttcttcggcctgaagggcctgatgcccggcaccgcctacaaggtgagagtgggcgccgtgggcgacagcggcttcgtgagcagcgaggacgtgttcgagaccggccccgccatggccagcagacaggtggacatcgccacccagggctggttcatcggcctgatgtgcgccgtggccctgctgatcctgatcctgctgatcgtgtgcttcatcagaagaaacaagggcggcaagtaccccgtgaaggagaaggaggacgcccacgccgaccccgagatccagcccatgaaggaggacgacggcaccttcggcgagtacagcgacgccgaggaccacaagcccctgaagaagggcagcagaacccccagcgacagaaccgtgaagaaggaggacagcgacgacagcctggtggactacggcgagggcgtgaacggccagttcaacgaggacggcagcttcatcggccagtacagcggcaagaaggagaaggagcccgccgagggcaacgagagcagcgaggcccccagccccgtgaacgccatgaacagcttcgtgtga

SEQ ID NO: 2896 - RNA, 3915 nt, synthetic construct
  misc_feature 1..3915: note = derived and/or modified sequence opt5 fromNRCAM__Homo_sapiens__CCDS47686.1
  source 1..3915: mol_type = other RNA
atgcagctgaagatcatgcccaaaaagaaaagactcagcgccggccgggtgcctctgattcttttcctgtgccaaatgatctccgctctcgaggtcccgctggaccccaaacttctggaagatctcgttcagcctcccaccattacacagcagtctcctaaagactacatcattgatccccgcgagaacatcgtgatccaatgtgaagccaaggggaagcctccgcccagcttttcctggacgagaaatggaacccacttcgacattgataaagaccctctggtgacaatgaagcccggcaccgggacactgatcattaacatcatgtctgagggaaaagcggaaacctatgagggcgtctaccagtgcacagctcggaatgagcgcggggccgccgtgagcaacaatattgttgtgagaccttcccggtctcccctctggaccaaggaaaaactggagccgatcacgcttcagagcggacagtccctggtcctcccttgtagaccccctattggcctgccccctcccatcatcttttggatggataacagcttccaacgccttccgcagtctgaacgggtgtcccagggcctgaatggggacctctattttagcaacgttctgcccgaggatacccgcgaggactacatttgctatgctagattcaatcatacacagaccatccaacagaagcagcctatttctgtgaaggtcatctccgtggatgaactgaacgacacaattgccgctaatctcagcgataccgagttttacggagccaaatcttcccgggaaagaccccctacgttcctgacacccgagggcaacgcgagcaataaggaggaacttcgcgggaacgtgctgtccctcgagtgtatcgccgaaggactgccgacccctatcatttattgggctaaagaggacggcatgcttcccaagaatcggacagtctacaaaaactttgaaaagaccctgcaaatcattcacgtttctgaggccgacagcgggaactaccagtgcatcgctaaaaatgccctcggagcgattcatcacaccatctccgtgcgcgtgaaggccgctccttattggatcacagctccccagaacctggtcctgagccctggcgaagatggcacgctcatttgtagagctaatgggaaccccaagccgcggatctcttggctgaccaatggagtgcctattgagatcgcccccgacgatccctccagaaaaattgacggcgatacaatcattttcagcaacgttcaggagcgctctagcgccgtgtaccaatgcaatgcttccaacgaatatgggtaccttctggcgaatgcctttgtcaacgtgctcgctgagcctccgcggatcctgacccccgccaatacactttatcaggttatcgccaacagacctgctctgctcgactgtgccttctttggatctcccctgcctaccattgaatggttcaagggcgcgaaagggagcgctctgcatgaggatatctacgtgctccacgaaaatggaacgctggagattcccgtcgcccagaaggactccacaggcacctatacctgcgtggcccgcaacaaacttggcatggctaagaatgaggtccacctggaaatcaaggatcctacatggattgtgaaacagcccgagtacgccgttgtgcaacgggggagcatggtctctttcgaatgtaaggtgaaacatgaccacaccctctccctgacagttctgtggcttaaggataacagagagctcccgagcgacgagcgctttacggtggacaaagatcatctggtcgtggctgacgtgtctgatgacgattccggaacctacacatgcgttgccaacaccacactggacagcgtctccgcgtctgccgtgctcagcgtggtcgctcctacccccacgcctgcccccgtgtatgatgttccgaatcctcccttcgacctggaacttaccgatcagctggacaagtccgtgcagctctcttggacacctggcgatgacaacaatagccccatcaccaagtttatcattgagtacgaagatgctatgcacaaacccgggctgtggcaccatcagacagaggtctccggaacccaaacgacagcccagctgaaacttagcccttatgtgaactactctttccgggttatggcggtcaattccatcggcaagagcctcccgtctgaagcctccgagcagtatctgaccaaggctagcgagcccgacaaaaaccctacagccgtggaagggctgggctctgagcccgacaatctcgtgattacctggaagcctctgaacggatttgaaagcaatggccccgggcttcagtacaaggtttcctggagacaaaaagatggagacgatgagtggaccagcgtggtcgtggctaacgtgtctaagtatatcgtctccggcacacctacgttcgttccgtacctgattaaagtgcaggccctcaatgacatggggtttgcccccgaacctgctgtggtcatgggacacagcggcgaggatctgcccatggtggcgcctgggaacgttcgcgtgaatgtcgtgaactccaccctggccgaggttcattgggaccccgtgccgcttaagtctatccggggccacctccagggatacagaatctattactggaaaacacaaagctcctctaagcgcaatcggagacatattgaaaagaagatcctgaccttccagggcagcaagacacacgggatgctgcctggactcgagcccttttcccactataccctgaacgtccgggtggttaacggcaaaggggaaggacccgcttctcctgatcgcgtgttcaatacgcccgagggcgtccctagcgccccgtccagccttaagattgtgaaccccacactggactctctcaccctggaatgggatcctccctcccatcctaatgggatcctgaccgagtacacacttaaatatcagcccattaacagcacccacgagctcggcccgctggtggacctgaagatccctgccaataaaacaagatggacgctcaagaacctgaatttttctacccggtacaagttctatttttacgctcagacatccgccggaagcggctctcaaatcaccgaagaggcggtcacaaccgttgatgaagctgggattcttccccctgacgtgggagccggcaaagtgcaggccgtcaaccccagaatctccaatctgacggctgccgcggctgagacctacgccaacattagctgggagtatgaagggcctgagcatgtgaatttctacgttgaatatggagtggccggctccaaggaggaatggcgcaaagagatcgtcaacgggagccggtctttctttggcctcaagggactgatgcccggcacagcttacaaagtgagagttggggccgtgggagatagcggcttcgtctcctctgaggacgtgtttgaaaccgggccggctatggccagccgccaggtcgacattgcgacacagggatggttcatcggcctgatgtgcgccgtggcccttctgattctcatcctgctcatcgtttgttttattagacggaataagggcgggaagtatcctgtgaaagagaaggaagatgcccacgctgaccccgagatccaacccatgaaagaagatgacggaaccttcggcgagtactccgatgccgaggaccacaagcctctgaaaaaggggtctcgcacaccgagcgatagaaccgtcaagaaagaagactccgatgactctcttgtggattatggagagggcgttaacgggcagtttaatgaagacggcagcttcattggacagtactccggcaagaaagagaaggaacccgccgaggggaacgagagctctgaagctccttcccccgtgaacgcgatgaatagctttgtctga

SEQ ID NO: 2897 - protein, 434 aa, synthetic construct
  REGION 1..434: note = NSE__Homo_sapiens__P09104
MSIEKIWAREILDSRGNPTVEVDLYTAKGLFRAAVPSGASTGIYEALELRDGDKQRYLGKGVLKAVDHINSTIAPALISSGLSVVEQEKLDNLMLELDGTENKSKFGANAILGVSLAVCKAGAAERELPLYRHIAQLAGNSDLILPVPAFNVINGGSHAGNKLAMQEFMILPVGAESFRDAMRLGAEVYHTLKGVIKDKYGKDATNVGDEGGFAPNILENSEALELVKEAIDKAGYTEKIVIGMDVAASEFYRDGKYDLDFKSPTDPSRYITGDQLGALYQDFVRDYPVVSIEDPFDQDDWAAWSKFTANVGIQIVGDDLTVTNPKRIERAVEEKACNCLLLKVNQIGSVTEAIQACKLAQENGWGVMVSHRSGETEDTFIADLVVGLCTGQIKTGAPCRSERLAKYNQLMRIEEELGDEARFAGHNFRNPSVL

SEQ ID NO: 2898 - RNA, 1305 nt, synthetic construct
  misc_feature 1..1305: note = NSE__Homo_sapiens__AAB51320
  source 1..1305: mol_type = other RNA
atgtccatagagaagatctgggcccgggagatcctggactcccgcgggaaccccacagtggaggtggatctctatactgccaaaggtcttttccgggctgcagtgcccagtggagcctctacgggcatctatgaggccctggagctgagggatggagacaaacagcgttacttaggcaaaggtgtcctgaaggcagtggaccacatcaactccaccatcgcgccagccctcatcagctcaggtctctctgtggtggagcaagagaaactggacaacctgatgctggagttggatgggactgagaacaaatccaagtttggggccaatgccatcctgggtgtgtctctggccgtgtgtaaggcaggggcagctgagcgggaactgcccctgtatcgccacattgctcagctggccgggaactcagacctcatcctgcctgtgccggccttcaacgtgatcaatggtggctctcatgctggcaacaagctggccatgcaggagttcatgatcctcccagtgggagctgagagctttcgggatgccatgcgactaggtgcagaggtctaccatacactcaagggagtcatcaaggacaaatacggcaaggatgccaccaatgtgggggatgaaggtggctttgcccccaatatcctggagaacagtgaagccttggagctggtgaaggaagccatcgacaaggctggctacacggaaaagatcgttattggcatggatgttgctgcctcagagttttatcgtgatggcaaatatgacttggacttcaagtctcccactgatccttcccgatacatcactggggaccagctgggggcactctaccaggactttgtcagggactatcctgtggtctccattgaggacccatttgaccaggatgattgggctgcctggtccaagttcacagccaatgtagggatccagattgtgggtgatgacctgacagtgaccaacccaaaacgtattgagcgggcagtggaagaaaaggcctgcaactgtctgctgctcaaggtcaaccagatcggctcggtcactgaagccatccaagcgtgcaagctggcccaggagaatggctggggggtcatggtgagtcatcgctcaggagagactgaggacacattcattgctgacctggtggtggggctgtgcacaggccagatcaagactggtgccccgtgccgttctgaacgtctggctaaatacaaccagctcatgagaattgaggaagagctgggggatgaagctcgctttgccggacataacttccgtaatcccagtgtgctgtga

SEQ ID NO: 2899 - RNA, 1305 nt, synthetic construct
  misc_feature 1..1305: note = derived and/or modified sequence opt1 fromNSE__Homo_sapiens__AAB51320
  source 1..1305: mol_type = other RNA
atgagcatcgagaagatctgggcccgcgagatcctggactcccggggcaaccccaccgtggaggtcgacctctacaccgccaaggggctgttccgcgcggccgtgccgagcggcgcctccacggggatctacgaggccctggagctccgggacggcgacaagcagcgctacctggggaagggcgtgctgaaggccgtcgaccacatcaacagcaccatcgcgcccgccctcatctccagcggcctgtccgtggtggagcaggagaagctggacaacctcatgctggagctggacgggaccgagaacaagagcaagttcggcgccaacgccatcctcggggtctccctggcggtgtgcaaggccggcgccgccgagcgggagctgcccctctaccgccacatcgcccagctggcggggaacagcgacctgatcctccccgtgccggccttcaacgtcatcaacggcggctcccacgccgggaacaagctggccatgcaggagttcatgatcctgcccgtgggcgccgagagcttccgggacgcgatgcgcctcggggccgaggtgtaccacaccctgaagggcgtcatcaaggacaagtacggcaaggacgccacgaacgtgggggacgagggcgggttcgcccccaacatcctggagaactccgaggccctcgagctggtgaaggaggcgatcgacaaggccggctacaccgagaagatcgtcatcgggatggacgtggccgccagcgagttctaccgggacggcaagtacgacctggacttcaagtcccccaccgacccgagccgctacatcaccggcgaccagctcggggccctgtaccaggacttcgtgcgggactaccccgtcgtgtccatcgaggaccccttcgaccaggacgactgggcggcctggagcaagttcacggccaacgtgggcatccagatcgtcggggacgacctgaccgtgaccaaccccaagcgcatcgagcgggccgtggaggagaaggcgtgcaactgcctcctgctgaaggtcaaccagatcggctccgtgaccgaggccatccaggcctgcaagctcgcccaggagaacgggtggggcgtcatggtgagccaccgcagcggcgagacggaggacaccttcatcgccgacctggtggtcgggctgtgcaccggccagatcaagaccggggcgccgtgccggtccgagcgcctcgccaagtacaaccagctgatgcggatcgaggaggagctgggcgacgaggcccgcttcgccgggcacaacttccggaaccccagcgtgctctga

SEQ ID NO: 2900 - RNA, 1305 nt, synthetic construct
  misc_feature 1..1305: note = derived and/or modified sequence opt2 fromNSE__Homo_sapiens__AAB51320
  source 1..1305: mol_type = other RNA
atgtccatcgagaagatctgggcccgcgagatcctcgactcccgcggcaaccccaccgtcgaggtcgacctctacaccgccaagggcctcttccgcgccgccgtcccctccggcgcctccaccggcatctacgaggccctcgagctccgcgacggcgacaagcagcgctacctcggcaagggcgtcctcaaggccgtcgaccacatcaactccaccatcgcccccgccctcatctcctccggcctctccgtcgtcgagcaggagaagctcgacaacctcatgctcgagctcgacggcaccgagaacaagtccaagttcggcgccaacgccatcctcggcgtctccctcgccgtctgcaaggccggcgccgccgagcgcgagctccccctctaccgccacatcgcccagctcgccggcaactccgacctcatcctccccgtccccgccttcaacgtcatcaacggcggctcccacgccggcaacaagctcgccatgcaggagttcatgatcctccccgtcggcgccgagtccttccgcgacgccatgcgcctcggcgccgaggtctaccacaccctcaagggcgtcatcaaggacaagtacggcaaggacgccaccaacgtcggcgacgagggcggcttcgcccccaacatcctcgagaactccgaggccctcgagctcgtcaaggaggccatcgacaaggccggctacaccgagaagatcgtcatcggcatggacgtcgccgcctccgagttctaccgcgacggcaagtacgacctcgacttcaagtcccccaccgacccctcccgctacatcaccggcgaccagctcggcgccctctaccaggacttcgtccgcgactaccccgtcgtctccatcgaggaccccttcgaccaggacgactgggccgcctggtccaagttcaccgccaacgtcggcatccagatcgtcggcgacgacctcaccgtcaccaaccccaagcgcatcgagcgcgccgtcgaggagaaggcctgcaactgcctcctcctcaaggtcaaccagatcggctccgtcaccgaggccatccaggcctgcaagctcgcccaggagaacggctggggcgtcatggtctcccaccgctccggcgagaccgaggacaccttcatcgccgacctcgtcgtcggcctctgcaccggccagatcaagaccggcgccccctgccgctccgagcgcctcgccaagtacaaccagctcatgcgcatcgaggaggagctcggcgacgaggcccgcttcgccggccacaacttccgcaacccctccgtcctctga

SEQ ID NO: 2901 - RNA, 1305 nt, synthetic construct
  misc_feature 1..1305: note = derived and/or modified sequence opt3 fromNSE__Homo_sapiens__AAB51320
  source 1..1305: mol_type = other RNA
atgagcatcgagaagatttgggccagagaaatactggactccaggggcaaccccaccgtggaggtcgatctctacacagctaaagggcttttccgggcagccgttccttctggagcgtcaactggtatctatgaagctctggagttgcgcgacggcgataagcagcgatacttagggaaaggagtgctgaaggccgtagaccacattaatagtacgatcgcaccagccctaattagctccggcctctctgtggtcgaacaagagaaactggataaccttatgctggagttggacggtaccgaaaataagtcgaagtttggggctaacgcaatcctcggagtgtcactggccgtttgcaaagctggcgccgcggagcgtgaactgccgctctatagacatatagcacagttagccggcaatagcgatctgatccttcccgtgcctgctttcaacgtcattaatgggggaagtcacgccggtaacaagttggcaatgcaggagtttatgatcctgccagtgggcgctgagtccttcagggacgccatgcggctaggggcggaagtataccatacactcaaaggagttattaaggataaatatggcaaggacgccactaatgtgggtgatgaagggggatttgcacccaacatcctggaaaattctgaggctcttgaactggtcaaggaggccatagacaaagctggctacaccgagaagattgtgatcggcatggatgtggccgcaagcgagttctatcgcgacgggaaatacgacttggattttaagtcccctacagacccatcaagatacattaccggagatcagctcggtgccctgtatcaagacttcgtcagggattaccccgttgtgagtatcgaggacccttttgatcaggacgattgggctgcgtggagcaaattcactgcaaacgtaggcatccagattgtgggggacgatttaacagtcaccaatccaaagcggatagaacgcgccgtggaggaaaaggcttgtaactgcctgctccttaaagttaatcagatcggatctgtgacggaggccattcaagcatgtaagctggcccaggagaacggctggggtgtcatggtgtcccaccgatcaggggaaactgaggacacctttatcgctgacttggtagttggcctatgcacaggacagataaaaactggcgccccgtgtagaagcgaaaggctggcaaagtataaccagctcatgcggattgaggaggaactgggggatgaggcgcgtttcgctggacataattttcgcaaccccagtgtgctttga

SEQ ID NO: 2902 - RNA, 1305 nt, synthetic construct
  misc_feature 1..1305: note = derived and/or modified sequence opt4 fromNSE__Homo_sapiens__AAB51320
  source 1..1305: mol_type = other RNA
atgagcatcgagaagatctgggccagagagatcctggacagcagaggcaaccccaccgtggaggtggacctgtacaccgccaagggcctgttcagagccgccgtgcccagcggcgccagcaccggcatctacgaggccctggagctgagagacggcgacaagcagagatacctgggcaagggcgtgctgaaggccgtggaccacatcaacagcaccatcgcccccgccctgatcagcagcggcctgagcgtggtggagcaggagaagctggacaacctgatgctggagctggacggcaccgagaacaagagcaagttcggcgccaacgccatcctgggcgtgagcctggccgtgtgcaaggccggcgccgccgagagagagctgcccctgtacagacacatcgcccagctggccggcaacagcgacctgatcctgcccgtgcccgccttcaacgtgatcaacggcggcagccacgccggcaacaagctggccatgcaggagttcatgatcctgcccgtgggcgccgagagcttcagagacgccatgagactgggcgccgaggtgtaccacaccctgaagggcgtgatcaaggacaagtacggcaaggacgccaccaacgtgggcgacgagggcggcttcgcccccaacatcctggagaacagcgaggccctggagctggtgaaggaggccatcgacaaggccggctacaccgagaagatcgtgatcggcatggacgtggccgccagcgagttctacagagacggcaagtacgacctggacttcaagagccccaccgaccccagcagatacatcaccggcgaccagctgggcgccctgtaccaggacttcgtgagagactaccccgtggtgagcatcgaggaccccttcgaccaggacgactgggccgcctggagcaagttcaccgccaacgtgggcatccagatcgtgggcgacgacctgaccgtgaccaaccccaagagaatcgagagagccgtggaggagaaggcctgcaactgcctgctgctgaaggtgaaccagatcggcagcgtgaccgaggccatccaggcctgcaagctggcccaggagaacggctggggcgtgatggtgagccacagaagcggcgagaccgaggacaccttcatcgccgacctggtggtgggcctgtgcaccggccagatcaagaccggcgccccctgcagaagcgagagactggccaagtacaaccagctgatgagaatcgaggaggagctgggcgacgaggccagattcgccggccacaacttcagaaaccccagcgtgctgtga

SEQ ID NO: 2903 - RNA, 1305 nt, synthetic construct
  misc_feature 1..1305: note = derived and/or modified sequence opt5 fromNSE__Homo_sapiens__AAB51320
  source 1..1305: mol_type = other RNA
atgagcatcgagaagatttgggccagagaaatcctggactcccggggcaaccccaccgtggaggtcgatctctacacagctaaagggctgttccgcgccgcggttccttctggagctagcacgggcatttatgaagcccttgagctgagagacggggataagcagcggtacctcggaaaaggcgtgctgaaggccgtggaccacatcaattccaccattgctccggcccttatctctagcgggctgtccgtcgtggaacaagagaaactcgataacctgatgctggagctcgacggaacagaaaataagtctaagtttggcgctaacgccatcctgggcgttagccttgcggtgtgcaaagccggggctgccgagcgcgaactgcccctctatagacatattgctcagctggccggaaattccgatcttatcctgcctgtccccgcgttcaacgtgattaatggcgggagccacgccggaaacaagctcgctatgcaggagtttatgatcctgcctgttggcgccgagtctttccgggacgctatgcgcctgggggccgaagtgtaccataccctcaaaggagtcattaaggataaatatggcaaggacgccacaaatgtgggcgatgagggaggatttgctcccaacatcctggaaaattccgaggcgcttgaactggtgaaggaggccattgacaaagctggctacaccgagaagatcgtcatcgggatggatgttgccgccagcgagttctatagagacggaaaatacgacctcgattttaagtctcctacagacccgtcccggtacattaccggcgatcagctgggggctctttatcaagacttcgtgcgcgattaccccgtggtcagcatcgaggacccttttgatcaggacgattgggccgcgtggtctaaattcacggctaacgtggggattcagatcgttggcgacgatctgaccgtgacaaatcccaagagaattgaacgggccgtcgaggaaaaagcctgtaactgcctcctgctgaaggtgaatcagatcggctccgttaccgaggctatccaagcctgtaagctcgctcaggagaacgggtggggagtgatggtcagccaccgctccggcgaaacagaggacacctttattgccgacctggtggtcgggctttgcacgggacagatcaaaacaggcgcgccttgtagatctgaacggctggccaagtataaccagctcatgcgcattgaggaagaactgggggatgaggctagattcgccggccataattttcggaaccccagcgtgctttga

SEQ ID NO: 2904 - protein, 464 aa, synthetic construct
  REGION 1..464: note = NUF2__Homo_sapiens__Q9BZD4
METLSFPRYNVAEIVIHIRNKILTGADGKNLTKNDLYPNPKPEVLHMIYMRALQIVYGIRLEHFYMMPVNSEVMYPHLMEGFLPFSNLVTHLDSFLPICRVNDFETADILCPKAKRTSRFLSGIINFIHFREACRETYMEFLWQYKSSADKMQQLNAAHQEALMKLERLDSVPVEEQEEFKQLSDGIQELQQSLNQDFHQKTIVLQEGNSQKKSNISEKTKRLNELKLSVVSLKEIQESLKTKIVDSPEKLKNYKEKMKDTVQKLKNARQEVVEKYEIYGDSVDCLPSCQLEVQLYQKKIQDLSDNREKLASILKESLNLEDQIESDESELKKLKTEENSFKRLMIVKKEKLATAQFKINKKHEDVKQYKRTVIEDCNKVQEKRGAVYERVTTINQEIQKIKLGIQQLKDAAEREKLKSQEIFLNLKTALEKYHDGIEKAAEDSYAKIDEKTAELKRKMFKMST

SEQ ID NO: 2905 - RNA, 1395 nt, synthetic construct
  misc_feature 1..1395: note = NUF2__Homo_sapiens__AAH08489
  source 1..1395: mol_type = other RNA
atggaaactttgtctttccccagatataatgtagctgagattgtgattcatattcgcaataagatcttaacaggagctgatggtaaaaacctcaccaagaatgatctttatccaaatccaaagcctgaagtcttgcacatgatctacatgagagccttacaaatagtatatggaattcgactggaacatttttacatgatgccagtgaactctgaagtcatgtatccacatttaatggaaggcttcttaccattcagcaatttagttactcatctggactcatttttgcctatctgccgggtgaatgactttgagactgctgatattctatgtccaaaagcaaaacggacaagtcggtttttaagtggcattatcaactttattcacttcagagaagcatgccgtgaaacgtatatggaatttctttggcaatataaatcctctgcggacaaaatgcaacagttaaacgccgcacaccaggaggcattaatgaaactggagagacttgattctgttccagttgaagagcaagaagagttcaagcagctttcagatggaattcaggagctacaacaatcactaaatcaggattttcatcaaaaaacgatagtgctgcaagagggaaattcccaaaagaagtcaaatatttcagagaaaaccaagcgtttgaatgaactaaaattgtcggtggtttctttgaaagaaatacaagagagtttgaaaacaaaaattgtggattctccagagaagttaaagaattataaagaaaaaatgaaagatacggtccagaagcttaaaaatgccagacaagaagtggtggagaaatatgaaatctatggagactcagttgactgcctgccttcatgtcagttggaagtgcagttatatcaaaagaaaatacaggacctttcagataatagggaaaaattagccagtatcttaaaggagagcctgaacttggaggaccaaattgagagtgatgagtcagaactgaagaaattgaagactgaagaaaattcgttcaaaagactgatgattgtgaagaaggaaaaacttgccacagcacaattcaaaataaataagaagcatgaagatgttaagcaatacaaacgcacagtaattgaggattgcaataaagttcaagaaaaaagaggtgctgtctatgaacgagtaaccacaattaatcaagaaatccaaaaaattaaacttggaattcaacaactaaaagatgctgctgaaagggagaaactgaagtcccaggaaatatttctaaacttgaaaactgctttggagaaataccacgacggtattgaaaaggcagcagaggactcctatgctaagatagatgagaagacagctgaactgaagaggaagatgttcaaaatgtcaacctga

SEQ ID NO: 2906 - RNA, 1395 nt, synthetic construct
  misc_feature 1..1395: note = derived and/or modified sequence opt1 fromNUF2__Homo_sapiens__AAH08489
  source 1..1395: mol_type = other RNA
atggagaccctgagcttcccccgctacaacgtggccgagatcgtcatccacatccggaacaagatcctcaccggcgccgacgggaagaacctgacgaagaacgacctgtacccgaaccccaagcccgaggtgctccacatgatctacatgcgcgcgctgcagatcgtgtacggcatccggctggagcacttctacatgatgcccgtcaactccgaggtgatgtacccgcacctcatggaggggttcctgcccttcagcaacctggtgacccacctcgactccttcctgcccatctgccgcgtcaacgacttcgagaccgccgacatcctgtgccccaaggccaagcggaccagccgcttcctctccggcatcatcaacttcatccacttccgggaggcctgccgcgagacgtacatggagttcctgtggcagtacaagagctccgccgacaagatgcagcagctgaacgcggcccaccaggaggccctcatgaagctggagcggctggacagcgtgccggtggaggagcaggaggagttcaagcagctctccgacgggatccaggagctgcagcagagcctgaaccaggacttccaccagaagaccatcgtcctccaggagggcaactcccagaagaagtccaacatcagcgagaagaccaagcgcctgaacgagctgaagctcagcgtggtgtccctgaaggagatccaggagagcctgaagaccaagatcgtcgactcccccgagaagctcaagaactacaaggagaagatgaaggacacggtgcagaagctgaagaacgcccggcaggaggtggtcgagaagtacgagatctacggcgacagcgtggactgcctgccctcctgccagctcgaggtgcagctgtaccagaagaagatccaggacctgagcgacaaccgcgagaagctcgcgagcatcctgaaggagtccctgaacctcgaggaccagatcgagagcgacgagtccgagctgaagaagctgaagaccgaggagaacagcttcaagcggctcatgatcgtcaagaaggagaagctggccaccgcccagttcaagatcaacaagaagcacgaggacgtgaagcagtacaagcgcaccgtgatcgaggactgcaacaaggtccaggagaagcgcggggccgtgtacgagcgggtgacgaccatcaaccaggagatccagaagatcaagctgggcatccagcagctcaaggacgccgcggagcgggagaagctgaagtcccaggagatcttcctgaacctcaagaccgccctggagaagtaccacgacgggatcgagaaggccgccgaggacagctacgccaagatcgacgagaagaccgcggagctgaagcgcaagatgttcaagatgtccacgtga

SEQ ID NO: 2907 - RNA, 1395 nt, synthetic construct
  misc_feature 1..1395: note = derived and/or modified sequence opt2 fromNUF2__Homo_sapiens__AAH08489
  source 1..1395: mol_type = other RNA
atggagaccctctccttcccccgctacaacgtcgccgagatcgtcatccacatccgcaacaagatcctcaccggcgccgacggcaagaacctcaccaagaacgacctctaccccaaccccaagcccgaggtcctccacatgatctacatgcgcgccctccagatcgtctacggcatccgcctcgagcacttctacatgatgcccgtcaactccgaggtcatgtacccccacctcatggagggcttcctccccttctccaacctcgtcacccacctcgactccttcctccccatctgccgcgtcaacgacttcgagaccgccgacatcctctgccccaaggccaagcgcacctcccgcttcctctccggcatcatcaacttcatccacttccgcgaggcctgccgcgagacctacatggagttcctctggcagtacaagtcctccgccgacaagatgcagcagctcaacgccgcccaccaggaggccctcatgaagctcgagcgcctcgactccgtccccgtcgaggagcaggaggagttcaagcagctctccgacggcatccaggagctccagcagtccctcaaccaggacttccaccagaagaccatcgtcctccaggagggcaactcccagaagaagtccaacatctccgagaagaccaagcgcctcaacgagctcaagctctccgtcgtctccctcaaggagatccaggagtccctcaagaccaagatcgtcgactcccccgagaagctcaagaactacaaggagaagatgaaggacaccgtccagaagctcaagaacgcccgccaggaggtcgtcgagaagtacgagatctacggcgactccgtcgactgcctcccctcctgccagctcgaggtccagctctaccagaagaagatccaggacctctccgacaaccgcgagaagctcgcctccatcctcaaggagtccctcaacctcgaggaccagatcgagtccgacgagtccgagctcaagaagctcaagaccgaggagaactccttcaagcgcctcatgatcgtcaagaaggagaagctcgccaccgcccagttcaagatcaacaagaagcacgaggacgtcaagcagtacaagcgcaccgtcatcgaggactgcaacaaggtccaggagaagcgcggcgccgtctacgagcgcgtcaccaccatcaaccaggagatccagaagatcaagctcggcatccagcagctcaaggacgccgccgagcgcgagaagctcaagtcccaggagatcttcctcaacctcaagaccgccctcgagaagtaccacgacggcatcgagaaggccgccgaggactcctacgccaagatcgacgagaagaccgccgagctcaagcgcaagatgttcaagatgtccacctga

SEQ ID NO: 2908 - RNA, 1395 nt, synthetic construct
  misc_feature 1..1395: note = derived and/or modified sequence opt3 fromNUF2__Homo_sapiens__AAH08489
  source 1..1395: mol_type = other RNA
atggagaccctgagcttccccagatacaacgtggccgaaatcgtcattcacataaggaataagatcctcacaggcgctgacgggaaaaaccttactaagaatgatctgtatcctaacccaaaaccggaggttttgcatatgatttacatgcgggcattacagatcgtgtatggtattcgcctggaacacttttacatgatgcccgtaaattccgaggtgatgtatcctcatctaatggaaggattcctcccattttctaacctggtcacgcaccttgactcattcctgcccatctgccgagtgaatgattttgagaccgccgacatattgtgtcctaaggcgaaacgtacaagtagattcctcagcggcatcattaactttatccatttcagggaggcttgccgggaaacttacatggagtttctgtggcaatataagtcctctgccgataagatgcagcagctgaatgcagcccaccaggaagctctcatgaaattagagcgcctggactcggttccagtggaggaacaagaggagttcaagcagctttcagatgggattcaggagttgcagcaaagcctgaaccaggactttcaccagaaaaccatcgtcctacaggaaggaaatagtcaaaagaaatccaacatatctgagaagacaaagagactcaatgagctgaaacttagcgtggtatccctgaaggaaattcaggagtcattgaaaaccaagatcgttgatagtcccgaaaaactcaagaactacaaagagaagatgaaggacactgtgcagaaactgaagaatgcaaggcaagaagtcgtggagaaatacgagatttatggcgatagcgtggactgtttaccttcttgccagctggaagtccagctctaccagaagaaaatccaagatctttccgacaaccgggagaagctggcctcaatcttgaaggaaagcctaaacctggaggaccagattgaaagtgatgagtctgagctcaaaaagctgaaaacagaagaaaattccttcaagcgccttatgatagttaaaaaggaaaagctggctaccgcccagtttaaaatcaacaagaaacatgaggacgtgaagcagtataaacgaacggtaattgaggattgtaataaggtgcaagaaaagagaggtgcggtctacgagagggtgactaccatcaaccaggaaatacagaaaattaagttggggatccagcaactcaaagacgcagccgagcgggaaaagctgaaaagccaggagatcttcttaaatctgaagacagctctagagaaatatcacgatggaattgaaaaggccgcagaggactcgtacgctaagatcgatgagaaaactgccgaactcaagcgtaaaatgttcaagatgtctacctga

SEQ ID NO: 2909 - RNA, 1395 nt, synthetic construct
  misc_feature 1..1395: note = derived and/or modified sequence opt4 fromNUF2__Homo_sapiens__AAH08489
  source 1..1395: mol_type = other RNA
atggagaccctgagcttccccagatacaacgtggccgagatcgtgatccacatcagaaacaagatcctgaccggcgccgacggcaagaacctgaccaagaacgacctgtaccccaaccccaagcccgaggtgctgcacatgatctacatgagagccctgcagatcgtgtacggcatcagactggagcacttctacatgatgcccgtgaacagcgaggtgatgtacccccacctgatggagggcttcctgcccttcagcaacctggtgacccacctggacagcttcctgcccatctgcagagtgaacgacttcgagaccgccgacatcctgtgccccaaggccaagagaaccagcagattcctgagcggcatcatcaacttcatccacttcagagaggcctgcagagagacctacatggagttcctgtggcagtacaagagcagcgccgacaagatgcagcagctgaacgccgcccaccaggaggccctgatgaagctggagagactggacagcgtgcccgtggaggagcaggaggagttcaagcagctgagcgacggcatccaggagctgcagcagagcctgaaccaggacttccaccagaagaccatcgtgctgcaggagggcaacagccagaagaagagcaacatcagcgagaagaccaagagactgaacgagctgaagctgagcgtggtgagcctgaaggagatccaggagagcctgaagaccaagatcgtggacagccccgagaagctgaagaactacaaggagaagatgaaggacaccgtgcagaagctgaagaacgccagacaggaggtggtggagaagtacgagatctacggcgacagcgtggactgcctgcccagctgccagctggaggtgcagctgtaccagaagaagatccaggacctgagcgacaacagagagaagctggccagcatcctgaaggagagcctgaacctggaggaccagatcgagagcgacgagagcgagctgaagaagctgaagaccgaggagaacagcttcaagagactgatgatcgtgaagaaggagaagctggccaccgcccagttcaagatcaacaagaagcacgaggacgtgaagcagtacaagagaaccgtgatcgaggactgcaacaaggtgcaggagaagagaggcgccgtgtacgagagagtgaccaccatcaaccaggagatccagaagatcaagctgggcatccagcagctgaaggacgccgccgagagagagaagctgaagagccaggagatcttcctgaacctgaagaccgccctggagaagtaccacgacggcatcgagaaggccgccgaggacagctacgccaagatcgacgagaagaccgccgagctgaagagaaagatgttcaagatgagcacctga

SEQ ID NO: 2910 - RNA, 1395 nt, synthetic construct
  misc_feature 1..1395: note = derived and/or modified sequence opt5 fromNUF2__Homo_sapiens__AAH08489
  source 1..1395: mol_type = other RNA
atggagaccctgagcttccccagatacaacgtggccgaaatcgtcattcacatccggaataagattctcacaggcgctgacgggaaaaacctgacgaagaatgatctttatcctaacccgaaacccgaggttctgcatatgatctacatgcgcgccctccagattgtgtatggaatcagactggaacacttttacatgatgcctgtcaattccgaggtgatgtatccccatcttatggaaggcttcctgcctttttctaacctcgtgacccacctggacagcttcctgcccatctgccgggttaatgattttgagacagcggacattctctgtcctaaggctaaacgcacctccagattcctgtctgggatcattaactttatccatttccgggaggcctgccgcgaaacatacatggagtttctttggcaatataagagctccgccgataagatgcagcagctgaatgctgcccaccaggaagctctcatgaaactggagagacttgactctgtgccggtcgaggaacaagaggagttcaagcagctgagcgatggcattcaggaactccagcaatccctgaaccaggactttcaccagaaaaccatcgtgctgcaggaaggaaatagccaaaagaaatctaacatttccgagaagacaaagcggctcaatgagctgaaacttagcgttgtgtctctgaaggaaatccaggagtccctcaaaaccaagatcgtcgatagccccgaaaaactgaagaactacaaagagaagatgaaggacacggtgcagaaacttaagaatgcccgccaagaagtggtcgagaaatacgagatttatggggattctgttgactgtctgccttcctgccagctcgaagtgcagctgtaccagaagaaaatccaagatctgagcgacaacagagagaagctcgcgtccattctgaaggaatctcttaacctggaggaccagatcgaaagcgatgagtccgagctcaaaaagctgaaaaccgaagagaatagcttcaagcggcttatgattgtgaaaaaggaaaagctggccacagctcagtttaaaatcaacaagaaacatgaggacgtcaagcagtataaacgcaccgtgatcgaggattgtaataaggttcaagaaaagagaggagccgtgtacgagcgggtcacaaccattaaccaggaaatccagaaaattaagctcggcatccagcaactgaaagacgctgccgagcgcgaaaagctgaaatctcaggagattttcctcaatctgaagacggcgcttgagaaatatcacgatggcatcgaaaaggccgctgaggactcctacgccaagatcgatgagaaaacagctgaactgaagagaaaaatgttcaagatgagcacctga

SEQ ID NO: 2911 - protein, 180 aa, synthetic construct
  REGION 1..180: note = NY-ESO-1__Homo_sapiens__P78358
MQAEGRGTGGSTGDADGPGGPGIPDGPGGNAGGPGEAGATGGRGPRGAGAARASGPGGGAPRGPHGGAASGLNGCCRCGARGPESRLLEFYLAMPFATPMEAELARRSLAQDAPPLPVPGVLLKEFTVSGNILTIRLTAADHRQLQLSISSCLQQLSLLMWITQCFLPVFLAQPPSGQRR

SEQ ID NO: 2912 - RNA, 543 nt, synthetic construct
  misc_feature 1..543: note = NY-ESO-1__Homo_sapiens__AAB49693
  source 1..543: mol_type = other RNA
atgcaggccgaaggccggggcacagggggttcgacgggcgatgctgatggcccaggaggccctggcattcctgatggcccagggggcaatgctggcggcccaggagaggcgggtgccacgggcggcagaggtccccggggcgcaggggcagcaagggcctcggggccgggaggaggcgccccgcggggtccgcatggcggcgcggcttcagggctgaatggatgctgcagatgcggggccagggggccggagagccgcctgcttgagttctacctcgccatgcctttcgcgacacccatggaagcagagctggcccgcaggagcctggcccaggatgccccaccgcttcccgtgccaggggtgcttctgaaggagttcactgtgtccggcaacatactgactatccgactgactgctgcagaccaccgccaactgcagctctccatcagctcctgtctccagcagctttccctgttgatgtggatcacgcagtgctttctgcccgtgtttttggctcagcctccctcagggcagaggcgctaa

SEQ ID NO: 2913 - RNA, 543 nt, synthetic construct
  misc_feature 1..543: note = derived and/or modified sequence opt1 fromNY-ESO-1__Homo_sapiens__AAB49693
  source 1..543: mol_type = other RNA
atgcaggccgagggccgcgggaccggcgggagcaccggcgacgccgacgggcccggcggcccggggatccccgacggccccgggggcaacgccgggggccccggcgaggccggggccacgggcgggcggggcccgcgcggcgccggggccgcgcgggcctccggccccgggggcggggcgccccgcggcccccacggcggggccgcgagcggcctgaacgggtgctgccggtgcggcgcccgcgggccggagtcccggctcctggagttctacctggccatgcccttcgccacccccatggaggccgagctcgcgcgccggagcctggcccaggacgcgcccccgctgcccgtgcccggcgtcctcctgaaggagttcaccgtgtccggcaacatcctgaccatccgcctcacggccgccgaccaccggcagctgcagctgagcatctccagctgcctccagcagctgtccctgctcatgtggatcacccagtgcttcctgcccgtgttcctggcccagccgcccagcgggcagcgccggtga

SEQ ID NO: 2914 - RNA, 543 nt, synthetic construct
  misc_feature 1..543: note = derived and/or modified sequence opt2 fromNY-ESO-1__Homo_sapiens__AAB49693
  source 1..543: mol_type = other RNA
atgcaggccgagggccgcggcaccggcggctccaccggcgacgccgacggccccggcggccccggcatccccgacggccccggcggcaacgccggcggccccggcgaggccggcgccaccggcggccgcggcccccgcggcgccggcgccgcccgcgcctccggccccggcggcggcgccccccgcggcccccacggcggcgccgcctccggcctcaacggctgctgccgctgcggcgcccgcggccccgagtcccgcctcctcgagttctacctcgccatgcccttcgccacccccatggaggccgagctcgcccgccgctccctcgcccaggacgccccccccctccccgtccccggcgtcctcctcaaggagttcaccgtctccggcaacatcctcaccatccgcctcaccgccgccgaccaccgccagctccagctctccatctcctcctgcctccagcagctctccctcctcatgtggatcacccagtgcttcctccccgtcttcctcgcccagcccccctccggccagcgccgctga

SEQ ID NO: 2915 - RNA, 543 nt, synthetic construct
  misc_feature 1..543: note = derived and/or modified sequence opt3 fromNY-ESO-1__Homo_sapiens__AAB49693
  source 1..543: mol_type = other RNA
atgcaggccgagggcagagggaccggaggtagcacaggcgacgctgatgggcccggaggccctggtatcccagacgggccgggaggcaacgcaggcgggcccggagaagccggtgcgactggcgggaggggacctcggggcgctggtgccgcacgcgcctccgggccaggaggcggcgctccccgagggcctcacggaggtgcagcctctggcctgaatgggtgctgtcgttgcggagctagaggcccagagtcaaggctccttgagttctacctggccatgccctttgcgacgcctatggaagcagaattggcccggcgcagtttagctcaagatgccccaccgctgcccgtgcctggtgtcctactcaaggagttcaccgttagcgggaacattctgacaataagacttactgcagctgaccataggcagctgcagttgtccatctcttcgtgtctccagcaactgtcactgctcatgtggattacccagtgctttttaccagtgttcctggcccagccccctagcggccagcggcgctga

SEQ ID NO: 2916 - RNA, 543 nt, synthetic construct
  misc_feature 1..543: note = derived and/or modified sequence opt4 fromNY-ESO-1__Homo_sapiens__AAB49693
  source 1..543: mol_type = other RNA
atgcaggccgagggcagaggcaccggcggcagcaccggcgacgccgacggccccggcggccccggcatccccgacggccccggcggcaacgccggcggccccggcgaggccggcgccaccggcggcagaggccccagaggcgccggcgccgccagagccagcggccccggcggcggcgcccccagaggcccccacggcggcgccgccagcggcctgaacggctgctgcagatgcggcgccagaggccccgagagcagactgctggagttctacctggccatgcccttcgccacccccatggaggccgagctggccagaagaagcctggcccaggacgccccccccctgcccgtgcccggcgtgctgctgaaggagttcaccgtgagcggcaacatcctgaccatcagactgaccgccgccgaccacagacagctgcagctgagcatcagcagctgcctgcagcagctgagcctgctgatgtggatcacccagtgcttcctgcccgtgttcctggcccagccccccagcggccagagaagatga

SEQ ID NO: 2917 - RNA, 543 nt, synthetic construct
  misc_feature 1..543: note = derived and/or modified sequence opt5 fromNY-ESO-1__Homo_sapiens__AAB49693
  source 1..543: mol_type = other RNA
atgcaggccgagggcagagggaccggaggcagcacaggggacgctgatggacccggcgggcctggaatcccggacggccccggcgggaacgccggaggccctggggaagcgggagctacgggcgggcggggaccccgcggcgccggcgccgctagagcctccgggcctggaggcggggctccccggggacctcacggcggggccgcgtctggactgaatggctgctgtcgctgcggcgccagagggccggagagccggctcctggagttctaccttgctatgccctttgccacccctatggaagctgaactggcccgcagatccctcgcgcaagatgctccccctctgcccgtgccgggagtccttctgaaggagttcacagtttctggcaacattctcaccatccggctgacagccgccgaccatcgccagctgcagctcagcatttcctcttgtctgcagcaacttagcctgctcatgtggatcacccagtgctttctgcctgtgttccttgctcagcccccttccgggcagagacggtga

SEQ ID NO: 2918 - protein, 404 aa, synthetic construct
  REGION 1..404: note = OA1__Homo_sapiens__P51810
MASPRLGTFCCPTRDAATQLVLSFQPRAFHALCLGSGGLRLALGLLQLLPGRRPAGPGSPATSPPASVRILRAAAACDLLGCLGMVIRSTVWLGFPNFVDSVSDMNHTEIWPAAFCVGSAMWIQLLYSACFWWLFCYAVDAYLVIRRSAGLSTILLYHIMAWGLATLLCVEGAAMLYYPSVSRCERGLDHAIPHYVTMYLPLLLVLVANPILFQKTVTAVASLLKGRQGIYTENERRMGAVIKIRFFKIMLVLIICWLSNIINESLLFYLEMQTDINGGSLKPVRTAAKTTWFIMGILNPAQGFLLSLAFYGWTGCSLGFQSPRKEIQWESLTTSAAEGAHPSPLMPHENPASGKVSQVGGQTSDEALSMLSEGSDASTIEIHTASESCNKNEGDPALPTHGDL

SEQ ID NO: 2919 - RNA, 1215 nt, synthetic construct
  misc_feature 1..1215: note = OA1__Homo_sapiens__CCDS14134.2
  source 1..1215: mol_type = other RNA
atggcctccccgcgcctagggaccttctgctgccccacgcgggacgcagccacgcagctcgtgctgagcttccagccgcgggccttccacgcgctctgcctgggcagcggcgggctccgcttggcgctgggccttctgcagctgctgcccggccgccggcccgcgggccccgggtcccccgcgacgtccccgccggcctcggtccgcatcctgcgcgctgccgctgcctgcgaccttctcggctgcctgggtatggtgatccggtccaccgtgtggttaggattcccaaattttgttgacagcgtctcggatatgaaccacacggaaatttggcctgctgctttctgcgtggggagtgcgatgtggatccagctgttgtacagtgcctgcttctggtggctgttttgctatgcagtggatgcttatctggtgatccggagatcggcaggactgagcaccatcctgctgtatcacatcatggcgtggggcctggccaccctgctctgtgtggagggagccgccatgctctactacccttccgtgtccaggtgtgagcggggcctggaccacgccatcccccactatgtcaccatgtacctgcccctgctgctggttctcgtggcgaaccccatcctgttccaaaagacagtgactgcagtggcctctttacttaaaggaagacaaggcatttacacggagaacgagaggaggatgggagccgtgatcaagatccgatttttcaaaatcatgctggttttaattatttgttggttgtcgaatatcatcaatgaaagccttttattctatcttgagatgcaaacagatatcaatggaggttctttgaaacctgtcagaactgcagccaagaccacatggtttattatgggaatcctgaatccagcccagggatttctcttgtctttggccttctacggctggacaggatgcagcctgggttttcagtctcccaggaaggagatccagtgggaatcactgaccacctcggctgctgagggggctcacccatccccactgatgccccatgaaaaccctgcttccgggaaggtgtctcaagtgggtgggcagacttctgacgaagccctgagcatgctgtctgaaggttctgatgccagcacaattgaaattcacactgcaagtgaatcctgcaacaaaaatgagggtgaccctgctctcccaacccatggagacctatga

SEQ ID NO: 2920 - RNA, 1215 nt, synthetic construct
  misc_feature 1..1215: note = derived and/or modified sequence opt1 fromOA1__Homo_sapiens__CCDS14134.2
  source 1..1215: mol_type = other RNA
atggccagcccccgcctgggcaccttctgctgcccgacccgggacgccgcgacgcagctcgtgctgtccttccagccccgcgccttccacgccctgtgcctcgggagcggcgggctgcggctggccctcggcctgctgcagctcctgcccgggcgccggcccgccggcccgggctcccccgcgaccagcccgcccgcctccgtccgcatcctgcgggccgccgcggcctgcgacctcctggggtgcctgggcatggtgatccgcagcaccgtgtggctcgggttccccaacttcgtcgactccgtgagcgacatgaaccacaccgagatctggcccgccgccttctgcgtgggctccgccatgtggatccagctgctgtacagcgcgtgcttctggtggctgttctgctacgccgtcgacgcctacctcgtgatccggcgctccgccgggctgagcacgatcctcctgtaccacatcatggcctggggcctggcgaccctcctgtgcgtggagggcgccgccatgctgtactacccctccgtcagccggtgcgagcgcgggctcgaccacgccatcccccactacgtgaccatgtacctgccgctgctcctggtgctggtcgccaaccccatcctcttccagaagaccgtgacggcggtggcctccctgctgaagggccggcaggggatctacaccgagaacgagcgccggatgggcgccgtcatcaagatccgcttcttcaagatcatgctcgtgctgatcatctgctggctgagcaacatcatcaacgagtccctcctgttctacctggagatgcagaccgacatcaacggcgggagcctcaagcccgtgcggaccgccgccaagacgacctggttcatcatgggcatcctgaaccccgcgcaggggttcctgctctccctggccttctacggctggaccgggtgcagcctgggcttccagagcccgcgcaaggagatccagtgggagtccctcaccacgagcgccgccgagggcgcgcaccccagccccctgatgccccacgagaacccggcctccgggaaggtctcccaggtgggcgggcagaccagcgacgaggccctgtccatgctgagcgagggctccgacgccagcaccatcgagatccacaccgcctccgagagctgcaacaagaacgagggggaccccgcgctccccacgcacggcgacctgtga

SEQ ID NO: 2921 - RNA, 1215 nt, synthetic construct
  misc_feature 1..1215: note = derived and/or modified sequence opt2 fromOA1__Homo_sapiens__CCDS14134.2
  source 1..1215: mol_type = other RNA
atggcctccccccgcctcggcaccttctgctgccccacccgcgacgccgccacccagctcgtcctctccttccagccccgcgccttccacgccctctgcctcggctccggcggcctccgcctcgccctcggcctcctccagctcctccccggccgccgccccgccggccccggctcccccgccacctccccccccgcctccgtccgcatcctccgcgccgccgccgcctgcgacctcctcggctgcctcggcatggtcatccgctccaccgtctggctcggcttccccaacttcgtcgactccgtctccgacatgaaccacaccgagatctggcccgccgccttctgcgtcggctccgccatgtggatccagctcctctactccgcctgcttctggtggctcttctgctacgccgtcgacgcctacctcgtcatccgccgctccgccggcctctccaccatcctcctctaccacatcatggcctggggcctcgccaccctcctctgcgtcgagggcgccgccatgctctactacccctccgtctcccgctgcgagcgcggcctcgaccacgccatcccccactacgtcaccatgtacctccccctcctcctcgtcctcgtcgccaaccccatcctcttccagaagaccgtcaccgccgtcgcctccctcctcaagggccgccagggcatctacaccgagaacgagcgccgcatgggcgccgtcatcaagatccgcttcttcaagatcatgctcgtcctcatcatctgctggctctccaacatcatcaacgagtccctcctcttctacctcgagatgcagaccgacatcaacggcggctccctcaagcccgtccgcaccgccgccaagaccacctggttcatcatgggcatcctcaaccccgcccagggcttcctcctctccctcgccttctacggctggaccggctgctccctcggcttccagtccccccgcaaggagatccagtgggagtccctcaccacctccgccgccgagggcgcccacccctcccccctcatgccccacgagaaccccgcctccggcaaggtctcccaggtcggcggccagacctccgacgaggccctctccatgctctccgagggctccgacgcctccaccatcgagatccacaccgcctccgagtcctgcaacaagaacgagggcgaccccgccctccccacccacggcgacctctga

SEQ ID NO: 2922 - RNA, 1215 nt, synthetic construct
  misc_feature 1..1215: note = derived and/or modified sequence opt3 fromOA1__Homo_sapiens__CCDS14134.2
  source 1..1215: mol_type = other RNA
atggccagccccagactgggcaccttctgctgtcctacaagggacgctgcaactcagctcgtgctttcctttcaaccacgggccttccacgcgctgtgcttggggtctggaggtttacgcctggctctaggcctcctgcagcttctgccggggcgacgtcccgccggacctggctcaccagcaacgagtccccctgccagcgtcagaatcttgagggctgcagccgcttgtgatctcctgggttgcctggggatggttattcggtccaccgtgtggctcggatttccaaacttcgtagactctgtgtcggatatgaatcatacagagatatggcccgccgcgttttgtgtcggctcagcaatgtggatccagttactgtacagcgcctgcttctggtggttgttttgttatgctgtggacgcctaccttgttattcgcagaagtgcaggcctgtccactatcctactctatcacattatggcttgggggctggccacccttctgtgcgtggaaggagcggccatgttgtactatccttctgtctccaggtgtgagcggggtctcgatcatgcaatcccacactacgtgacaatgtatctgccgttactgctcgtacttgttgctaaccccatactgttccagaagaccgtgactgccgtcgctagcttgctaaaaggccgccaagggatctacacagaaaatgagcgaagaatgggagccgtgattaagatcaggtttttcaaaattatgctggtgctcatcatatgctggctgtcaaacattatcaatgaaagtcttctgttttacttggagatgcagaccgacattaacggcggtagcctcaagcctgtccggacggcagccaaaactacctggttcatcatggggatcctgaatccagctcagggatttttactgtctctagcgttctatggctggacaggctgttccctcgggttccagtcaccccgtaaggagattcaatgggaaagcctgactaccagtgcagccgagggagctcatccttctccacttatgccccacgaaaacccggcctccggtaaggttagccaggtgggcgggcagacatcggatgaggcattgtctatgctgtccgagggatcagacgccagtaccatagaaatccacacggctagcgagtcctgcaataaaaacgaaggcgatcctgccctccccactcatggtgacctgtga

SEQ ID NO: 2923 - RNA, 1215 nt, synthetic construct
  misc_feature 1..1215: note = derived and/or modified sequence opt4 fromOA1__Homo_sapiens__CCDS14134.2
  source 1..1215: mol_type = other RNA
atggccagccccagactgggcaccttctgctgccccaccagagacgccgccacccagctggtgctgagcttccagcccagagccttccacgccctgtgcctgggcagcggcggcctgagactggccctgggcctgctgcagctgctgcccggcagaagacccgccggccccggcagccccgccaccagcccccccgccagcgtgagaatcctgagagccgccgccgcctgcgacctgctgggctgcctgggcatggtgatcagaagcaccgtgtggctgggcttccccaacttcgtggacagcgtgagcgacatgaaccacaccgagatctggcccgccgccttctgcgtgggcagcgccatgtggatccagctgctgtacagcgcctgcttctggtggctgttctgctacgccgtggacgcctacctggtgatcagaagaagcgccggcctgagcaccatcctgctgtaccacatcatggcctggggcctggccaccctgctgtgcgtggagggcgccgccatgctgtactaccccagcgtgagcagatgcgagagaggcctggaccacgccatcccccactacgtgaccatgtacctgcccctgctgctggtgctggtggccaaccccatcctgttccagaagaccgtgaccgccgtggccagcctgctgaagggcagacagggcatctacaccgagaacgagagaagaatgggcgccgtgatcaagatcagattcttcaagatcatgctggtgctgatcatctgctggctgagcaacatcatcaacgagagcctgctgttctacctggagatgcagaccgacatcaacggcggcagcctgaagcccgtgagaaccgccgccaagaccacctggttcatcatgggcatcctgaaccccgcccagggcttcctgctgagcctggccttctacggctggaccggctgcagcctgggcttccagagccccagaaaggagatccagtgggagagcctgaccaccagcgccgccgagggcgcccaccccagccccctgatgccccacgagaaccccgccagcggcaaggtgagccaggtgggcggccagaccagcgacgaggccctgagcatgctgagcgagggcagcgacgccagcaccatcgagatccacaccgccagcgagagctgcaacaagaacgagggcgaccccgccctgcccacccacggcgacctgtga

SEQ ID NO: 2924 - RNA, 1215 nt, synthetic construct
  misc_feature 1..1215: note = derived and/or modified sequence opt5 fromOA1__Homo_sapiens__CCDS14134.2
  source 1..1215: mol_type = other RNA
atggccagccccagactgggcaccttctgctgtcctacacgggacgctgccacgcagctcgtgctgtcctttcaaccgcgcgcgttccacgctctttgcctggggtctggaggcctcagactggcccttgggctgctccagctgctgcccggacggcgccctgccggccccgggagccctgctacctctccccctgcctccgtcagaatcctccgggctgccgcggcctgtgatctgcttggatgcctgggcatggttattcgcagcacagtgtggctcggctttccgaacttcgtggactccgtctctgatatgaatcataccgagatctggcccgctgccttttgtgtggggagcgctatgtggattcagctgctttactccgcctgcttctggtggctgttttgttatgcggttgacgcctacctcgtgatcagacggagcgctggactgtctacaattctgctctatcacatcatggcctggggcctggctacccttctgtgcgtcgaaggggccgccatgctctactatccttccgtgagccgctgtgagagaggactggatcatgctatcccccactacgttacaatgtatcttcctctgctcctggtgctggtcgcgaaccccattctcttccagaagaccgtgacggccgtggcttctctgcttaaaggccggcaagggatctacaccgaaaatgagcgcagaatgggagccgtcattaagatccggtttttcaaaattatgctggttctcatcatttgctggctgtccaacatcatcaatgaaagccttctgttttacctcgagatgcagacagacattaacggcggctctctgaagccggtgcgcaccgccgctaaaacaacctggttcatcatggggattctgaatcctgcccagggatttctcctgtcccttgcgttctatggctggacggggtgtagcctgggattccagtcccccagaaaggagatccaatgggaatctctcacaaccagcgctgccgagggcgcccatcctagccccctgatgccccacgaaaaccctgcttccgggaaggtgtctcaggtcggaggccagacatccgatgaggccctgagcatgctttctgagggcagcgacgcttccaccattgaaatccacaccgcctctgagagctgcaataaaaacgaaggggatccggcgctccccacacatggagacctgtga

SEQ ID NO: 2925 - protein, 1046 aa, synthetic construct
  REGION 1..1046: note = OGT__Homo_sapiens__O15294
MASSVGNVADSTEPTKRMLSFQGLAELAHREYQAGDFEAAERHCMQLWRQEPDNTGVLLLLSSIHFQCRRLDRSAHFSTLAIKQNPLLAEAYSNLGNVYKERGQLQEAIEHYRHALRLKPDFIDGYINLAAALVAAGDMEGAVQAYVSALQYNPDLYCVRSDLGNLLKALGRLEEAKACYLKAIETQPNFAVAWSNLGCVFNAQGEIWLAIHHFEKAVTLDPNFLDAYINLGNVLKEARIFDRAVAAYLRALSLSPNHAVVHGNLACVYYEQGLIDLAIDTYRRAIELQPHFPDAYCNLANALKEKGSVAEAEDCYNTALRLCPTHADSLNNLANIKREQGNIEEAVRLYRKALEVFPEFAAAHSNLASVLQQQGKLQEALMHYKEAIRISPTFADAYSNMGNTLKEMQDVQGALQCYTRAIQINPAFADAHSNLASIHKDSGNIPEAIASYRTALKLKPDFPDAYCNLAHCLQIVCDWTDYDERMKKLVSIVADQLEKNRLPSVHPHHSMLYPLSHGFRKAIAERHGNLCLDKINVLHKPPYEHPKDLKLSDGRLRVGYVSSDFGNHPTSHLMQSIPGMHNPDKFEVFCYALSPDDGTNFRVKVMAEANHFIDLSQIPCNGKAADRIHQDGIHILVNMNGYTKGARNELFALRPAPIQAMWLGYPGTSGALFMDYIITDQETSPAEVAEQYSEKLAYMPHTFFIGDHANMFPHLKKKAVIDFKSNGHIYDNRIVLNGIDLKAFLDSLPDVKIVKMKCPDGGDNADSSNTALNMPVIPMNTIAEAVIEMINRGQIQITINGFSISNGLATTQINNKAATGEEVPRTIIVTTRSQYGLPEDAIVYCNFNQLYKIDPSTLQMWANILKRVPNSVLWLLRFPAVGEPNIQQYAQNMGLPQNRIIFSPVAPKEEHVRRGQLADVCLDTPLCNGHTTGMDVLWAGTPMVTMPGETLASRVAASQLTCLGCLELIAKNRQEYEDIAVKLGTDLEYLKKVRGKVWKQRISSPLFNTKQYTMELERLYLQMWEHYAAGNKPDHMIKPVEVTESA

SEQ ID NO: 2926 - RNA, 3141 nt, synthetic construct
  misc_feature 1..3141: note = OGT__Homo_sapiens__AAH38180
  source 1..3141: mol_type = other RNA
atggcgtcttccgtgggcaacgtggccgacagcacagaaccaacgaaacgtatgctttccttccaagggttagctgagttggcacatcgagaatatcaggcaggagattttgaggcagctgagagacactgcatgcagctctggagacaagagccagacaatactggtgtgcttttattactttcatctatacacttccagtgtcgaaggctggacagatctgctcactttagcactctggcaattaaacagaacccccttctggcagaagcttattcgaatttggggaatgtgtacaaggaaagagggcagttgcaggaggcaattgagcattatcgacatgcattgcgtctcaaacctgatttcatcgatggttatattaacctggcagccgccttggtagcagcgggtgacatggaaggggcagtacaagcttacgtctctgctcttcagtacaatcctgatttgtactgtgttcgcagtgacctggggaacctgctcaaagccctgggtcgcttggaagaagccaaggcatgttatttgaaagcaattgagacgcaaccgaactttgcagtagcttggagtaatcttggctgtgttttcaatgcacaaggggaaatttggcttgcaattcatcactttgaaaaggctgtcacccttgacccaaactttctggatgcttatatcaatttaggaaatgtcttgaaagaggcacgcatttttgacagagctgtggcagcttatcttcgtgccctaagtttgagtccaaatcacgcagtggtgcacggcaacctggcttgtgtatactatgagcaaggcctgatagatctggcaatagacacctacaggcgggctatcgaactacaaccacatttccctgatgcttactgcaacctagccaatgctctcaaagagaagggcagtgttgctgaagcagaagattgttataatacagctctccgtctgtgtcccacccatgcagactctctgaataacctagccaatatcaaacgagaacagggaaacattgaagaggcagttcgcttgtatcgtaaagcattagaagtcttcccagagtttgctgctgcccattcaaatttagcaagtgtactgcagcagcagggaaaactgcaggaagctctgatgcattataaggaggctattcgaatcagtcctacctttgctgatgcctactctaatatgggaaacactctaaaggagatgcaggatgttcagggagccttgcagtgttatacgcgtgccatccaaattaatcctgcatttgcagatgcacatagcaatctggcttccattcataaggattcagggaatattccagaagccatagcttcttaccgcacggctctgaaacttaagcctgattttcctgatgcttattgtaacttggctcattgcctgcagattgtctgtgattggacagactatgatgagcgaatgaagaagttggtcagtattgtggctgaccagttagagaagaataggttgccttctgtgcatcctcatcatagtatgctatatcctctttctcatggcttcaggaaggctattgctgagaggcacggcaacctgtgcttagataagattaatgttcttcataaaccaccatatgaacatccaaaagacttgaagctcagtgatggtcggctgcgtgtaggatatgtgagttccgactttgggaatcatcctacttctcaccttatgcagtctattccaggcatgcacaatcctgataaatttgaggtgttctgttatgccctgagcccagacgatggcacaaacttccgagtgaaggtgatggcagaagccaatcatttcattgatctttctcagattccatgcaatggaaaagcagctgatcgcatccatcaggatggaattcatatccttgtaaatatgaatggctatactaagggcgctcgaaatgagctttttgctctcaggccagctcctattcaggcaatgtggctgggataccctgggacgagtggtgcgcttttcatggattatattatcactgatcaggaaacttcgccagctgaagttgctgagcagtattccgagaaattggcttatatgccccacactttttttattggtgatcatgctaatatgttccctcacctgaagaaaaaagcagtcatcgattttaagtccaatgggcacatttatgacaatcggatagttctgaatggcatcgacctcaaagcatttcttgatagtctaccagatgtgaaaattgtcaagatgaagtgtcctgatggaggagacaatgcagatagcagtaacacagctcttaatatgcctgttattcctatgaatactattgcagaagcagttattgaaatgattaaccgaggacagattcaaataacaattaatggattcagtattagcaatggactggcaactactcagatcaacaataaggctgcaactggagaggaggttccccgtaccattattgtaaccacccgttctcagtacgggttaccagaagatgccatcgtatactgtaactttaatcagttgtataaaattgacccttctactttgcagatgtgggcaaacattctgaagcgtgttcccaatagtgtactctggctgttgcgttttccagcagtaggagaacctaatattcaacagtatgcacaaaacatgggcctgccccagaaccgtatcattttttcacctgttgctcctaaagaggaacacgtcaggagaggccagctggctgatgtctgcttggacactccactctgtaatgggcacaccacagggatggatgtcctctgggcagggacccccatggtgactatgccaggagagactcttgcttctcgagttgcagcatcccagctcacttgcttaggttgtcttgagcttattgctaaaaacagacaagaatatgaagacatagctgtgaagctgggaactgatctagaatacctgaagaaagttcgtggcaaagtctggaagcaaagaatatctagccctctgttcaacaccaaacaatacacaatggaactagagcggctctatctacagatgtgggagcattatgcagctggcaacaaacctgaccacatgattaagcctgttgaagtcactgagtcagcataa

SEQ ID NO: 2927 - RNA, 3141 nt, synthetic construct
  misc_feature 1..3141: note = derived and/or modified sequence opt1 fromOGT__Homo_sapiens__AAH38180
  source 1..3141: mol_type = other RNA
atggccagctccgtgggcaacgtcgccgacagcaccgagcccaccaagcgcatgctgtccttccaggggctcgcggagctggcccaccgggagtaccaggccggcgacttcgaggccgccgagcgccactgcatgcagctgtggcggcaggagccggacaacacgggggtgctcctgctgctcagctccatccacttccagtgccgccggctggaccgcagcgcgcacttctccaccctggccatcaagcagaaccccctcctggccgaggcctacagcaacctgggcaacgtgtacaaggagcgggggcagctccaggaggcgatcgagcactaccgccacgccctgcggctgaagcccgacttcatcgacggctacatcaacctcgccgccgccctggtcgcggccggcgacatggagggggccgtgcaggcctacgtgtccgccctgcagtacaaccccgacctctactgcgtccgcagcgacctgggcaacctgctcaaggcgctggggcggctggaggaggccaaggcctgctacctcaaggccatcgagacccagccgaacttcgccgtggcgtggtccaacctgggctgcgtgttcaacgcccagggggagatctggctggccatccaccacttcgagaaggccgtcaccctcgaccccaacttcctggacgcctacatcaacctgggcaacgtgctcaaggaggcgcgcatcttcgaccgggccgtggccgcctacctgcgcgcgctgagcctctcccccaaccacgccgtcgtgcacggcaacctggcctgcgtgtactacgagcaggggctgatcgacctcgccatcgacacgtaccggcgcgccatcgagctgcagccccacttcccggacgcgtactgcaacctggccaacgccctcaaggagaagggcagcgtcgccgaggccgaggactgctacaacaccgcgctgcggctgtgccccacccacgccgactccctcaacaacctggccaacatcaagcgcgagcaggggaacatcgaggaggccgtgcggctgtaccgcaaggccctcgaggtgttccccgagttcgcggccgcccacagcaacctggcctccgtcctgcagcagcagggcaagctccaggaggcgctgatgcactacaaggaggccatccggatcagccccaccttcgccgacgcctactccaacatgggcaacacgctgaaggagatgcaggacgtgcagggggccctgcagtgctacacccgcgcgatccagatcaacccggccttcgccgacgcccacagcaacctcgccagcatccacaaggactccggcaacatccccgaggcgatcgccagctaccgcaccgccctgaagctgaagcccgacttccccgacgcctactgcaacctcgcccactgcctgcagatcgtgtgcgactggaccgactacgacgagcggatgaagaagctggtctccatcgtggcggaccagctcgagaagaaccgcctgccgagcgtgcacccccaccactccatgctgtaccccctcagccacgggttccggaaggccatcgccgagcgccacggcaacctgtgcctggacaagatcaacgtcctccacaagcccccgtacgagcaccccaaggacctgaagctgtccgacgggcggctccgcgtgggctacgtcagctccgacttcggcaaccaccccacgagccacctgatgcagtccatccccgggatgcacaacccggacaagttcgaggtgttctgctacgccctgagccccgacgacggcaccaacttccgggtgaaggtcatggcggaggccaaccacttcatcgacctctcccagatcccctgcaacgggaaggccgccgaccgcatccaccaggacggcatccacatcctggtgaacatgaacgggtacaccaagggcgcccggaacgagctgttcgcgctccgccccgccccgatccaggccatgtggctgggctaccccgggaccagcggcgccctgttcatggactacatcatcacggaccaggagacctcccccgccgaggtggcggagcagtacagcgagaagctcgcctacatgccgcacaccttcttcatcggggaccacgccaacatgttcccccacctgaagaagaaggccgtcatcgacttcaagtccaacggccacatctacgacaaccggatcgtgctgaacgggatcgacctcaaggccttcctggacagcctgcccgacgtgaagatcgtcaagatgaagtgccccgacggcggcgacaacgcggactccagcaacaccgccctcaacatgccggtgatccccatgaacacgatcgccgaggccgtgatcgagatgatcaaccgcgggcagatccagatcaccatcaacggcttcagcatctccaacgggctggccaccacccagatcaacaacaaggcggccacgggcgaggaggtcccccggaccatcatcgtgaccacccgcagccagtacggcctgcccgaggacgccatcgtgtactgcaacttcaaccagctctacaagatcgacccgtccacgctgcagatgtgggccaacatcctgaagcgggtccccaacagcgtgctctggctgctgcgcttccccgcggtgggggagcccaacatccagcagtacgcccagaacatgggcctcccgcagaaccggatcatcttctcccccgtcgcccccaaggaggagcacgtgcgccgggggcagctggccgacgtgtgcctggacacgcccctctgcaacggccacaccaccgggatggacgtcctgtgggccggcaccccgatggtgaccatgcccggcgagaccctggcgagccgcgtggccgcctcccagctgacctgcctcgggtgcctggagctcatcgccaagaaccgccaggagtacgaggacatcgccgtcaagctgggcacggacctggagtacctcaagaaggtgcgggggaaggtgtggaagcagcgcatcagcagccccctgttcaacaccaagcagtacaccatggagctggagcggctctacctgcagatgtgggagcactacgcggccggcaacaagcccgaccacatgatcaagccggtcgaggtgaccgagtccgcctga

SEQ ID NO: 2928 - RNA, 3141 nt, synthetic construct
  misc_feature 1..3141: note = derived and/or modified sequence opt2 fromOGT__Homo_sapiens__AAH38180
  source 1..3141: mol_type = other RNA
atggcctcctccgtcggcaacgtcgccgactccaccgagcccaccaagcgcatgctctccttccagggcctcgccgagctcgcccaccgcgagtaccaggccggcgacttcgaggccgccgagcgccactgcatgcagctctggcgccaggagcccgacaacaccggcgtcctcctcctcctctcctccatccacttccagtgccgccgcctcgaccgctccgcccacttctccaccctcgccatcaagcagaaccccctcctcgccgaggcctactccaacctcggcaacgtctacaaggagcgcggccagctccaggaggccatcgagcactaccgccacgccctccgcctcaagcccgacttcatcgacggctacatcaacctcgccgccgccctcgtcgccgccggcgacatggagggcgccgtccaggcctacgtctccgccctccagtacaaccccgacctctactgcgtccgctccgacctcggcaacctcctcaaggccctcggccgcctcgaggaggccaaggcctgctacctcaaggccatcgagacccagcccaacttcgccgtcgcctggtccaacctcggctgcgtcttcaacgcccagggcgagatctggctcgccatccaccacttcgagaaggccgtcaccctcgaccccaacttcctcgacgcctacatcaacctcggcaacgtcctcaaggaggcccgcatcttcgaccgcgccgtcgccgcctacctccgcgccctctccctctcccccaaccacgccgtcgtccacggcaacctcgcctgcgtctactacgagcagggcctcatcgacctcgccatcgacacctaccgccgcgccatcgagctccagccccacttccccgacgcctactgcaacctcgccaacgccctcaaggagaagggctccgtcgccgaggccgaggactgctacaacaccgccctccgcctctgccccacccacgccgactccctcaacaacctcgccaacatcaagcgcgagcagggcaacatcgaggaggccgtccgcctctaccgcaaggccctcgaggtcttccccgagttcgccgccgcccactccaacctcgcctccgtcctccagcagcagggcaagctccaggaggccctcatgcactacaaggaggccatccgcatctcccccaccttcgccgacgcctactccaacatgggcaacaccctcaaggagatgcaggacgtccagggcgccctccagtgctacacccgcgccatccagatcaaccccgccttcgccgacgcccactccaacctcgcctccatccacaaggactccggcaacatccccgaggccatcgcctcctaccgcaccgccctcaagctcaagcccgacttccccgacgcctactgcaacctcgcccactgcctccagatcgtctgcgactggaccgactacgacgagcgcatgaagaagctcgtctccatcgtcgccgaccagctcgagaagaaccgcctcccctccgtccacccccaccactccatgctctaccccctctcccacggcttccgcaaggccatcgccgagcgccacggcaacctctgcctcgacaagatcaacgtcctccacaagcccccctacgagcaccccaaggacctcaagctctccgacggccgcctccgcgtcggctacgtctcctccgacttcggcaaccaccccacctcccacctcatgcagtccatccccggcatgcacaaccccgacaagttcgaggtcttctgctacgccctctcccccgacgacggcaccaacttccgcgtcaaggtcatggccgaggccaaccacttcatcgacctctcccagatcccctgcaacggcaaggccgccgaccgcatccaccaggacggcatccacatcctcgtcaacatgaacggctacaccaagggcgcccgcaacgagctcttcgccctccgccccgcccccatccaggccatgtggctcggctaccccggcacctccggcgccctcttcatggactacatcatcaccgaccaggagacctcccccgccgaggtcgccgagcagtactccgagaagctcgcctacatgccccacaccttcttcatcggcgaccacgccaacatgttcccccacctcaagaagaaggccgtcatcgacttcaagtccaacggccacatctacgacaaccgcatcgtcctcaacggcatcgacctcaaggccttcctcgactccctccccgacgtcaagatcgtcaagatgaagtgccccgacggcggcgacaacgccgactcctccaacaccgccctcaacatgcccgtcatccccatgaacaccatcgccgaggccgtcatcgagatgatcaaccgcggccagatccagatcaccatcaacggcttctccatctccaacggcctcgccaccacccagatcaacaacaaggccgccaccggcgaggaggtcccccgcaccatcatcgtcaccacccgctcccagtacggcctccccgaggacgccatcgtctactgcaacttcaaccagctctacaagatcgacccctccaccctccagatgtgggccaacatcctcaagcgcgtccccaactccgtcctctggctcctccgcttccccgccgtcggcgagcccaacatccagcagtacgcccagaacatgggcctcccccagaaccgcatcatcttctcccccgtcgcccccaaggaggagcacgtccgccgcggccagctcgccgacgtctgcctcgacacccccctctgcaacggccacaccaccggcatggacgtcctctgggccggcacccccatggtcaccatgcccggcgagaccctcgcctcccgcgtcgccgcctcccagctcacctgcctcggctgcctcgagctcatcgccaagaaccgccaggagtacgaggacatcgccgtcaagctcggcaccgacctcgagtacctcaagaaggtccgcggcaaggtctggaagcagcgcatctcctcccccctcttcaacaccaagcagtacaccatggagctcgagcgcctctacctccagatgtgggagcactacgccgccggcaacaagcccgaccacatgatcaagcccgtcgaggtcaccgagtccgcctga

SEQ ID NO: 2929 - RNA, 3141 nt, synthetic construct
  misc_feature 1..3141: note = derived and/or modified sequence opt3 fromOGT__Homo_sapiens__AAH38180
  source 1..3141: mol_type = other RNA
atggccagctccgtgggcaacgtcgctgactctaccgagcccacaaagagaatgctgtcattccaggggctcgcagaacttgcccacagggagtaccaagcgggagattttgaagctgccgagcggcattgcatgcagctgtggcgccaggaacctgacaatactggtgttttgttactgctaagtagcatccacttccagtgtcgacgtctcgatagatccgcacatttttctacgctggccattaaacaaaacccacttctggctgaggcatattcgaatttgggcaacgtgtacaaggagagggggcagctccaggaagccatagagcactatcggcatgctctgcgcctgaaaccggacttcatcgatggatacattaatctcgccgcggcattagtagccgctggcgacatggaaggtgccgtgcaggcatatgtctcagctctgcaatacaaccccgatctttattgcgtgagaagcgacttggggaatctgctaaaggccctcggaaggctggaggaggcgaaagcctgttaccttaaggcaatcgaaacccagcctaactttgctgttgcctggagtaatctgggctgcgtgttcaacgctcagggcgagatttggttggccatccaccactttgaaaaggcagtcacactcgatccaaatttcctggacgcctacataaacttagggaatgtgctgaaagaggctcggatctttgatcgcgcggtagcagcctatctccgagctctttccctgtctcccaaccatgccgttgtgcacggaaatttggcatgtgtctactatgaacagggtctaattgacctggccatcgatacttacagaagggctattgagctccaacctcatttcccagacgcctattgcaacctggcaaacgcgcttaaggagaaaggcagcgtggctgaagccgaggactgttacaataccgcactgcggttgtgccccacacacgccgattccctcaacaatctggctaacatcaagcgtgaacaggggaatatagaggaagccgtgcgcttatatagaaaagcactggaggtctttcctgagttcgctgccgcgcactcaaacctagccagtgttctccagcaacagggaaagctgcaggaagctcttatgcattacaaggaggcaattaggatcagcccaacctttgccgacgcttactctaatatgggcaacactttgaaagaaatgcaggatgtgcaaggtgccctgcagtgttatacacgggcaattcagatcaatccggcgttcgccgacgctcactccaacctcgcctcaatccataaggatagcgggaatattcccgaggcaatagctagttaccgaaccgccctgaaacttaagcctgacttcccagatgcatattgcaacctggcccactgtttgcagatcgtatgcgactggacggattacgacgaacgcatgaaaaagctcgtgtctattgtcgctgatcaactggagaaaaatagattaccctccgtgcatcctcaccacagcatgctgtatccactatcgcatggatttaggaaggcgatcgccgagcggcacggcaacctctgcctggacaagataaatgttcttcataaacccccgtacgaacaccctaaggacttgaaactgtctgatggccgcctcagagtggggtatgtctcctcagacttcggaaaccaccccaccagtcatctgatgcagagcattccaggtatgcacaaccctgataagtttgaggtgttctgttacgcattatcccccgacgatggcactaattttagggtaaaagttatggctgaagccaaccatttcatcgacctgtctcagatcccatgcaatgggaaggccgctgatcgtattcaccaggacggaatccatattcttgtgaacatgaatggctacacaaagggtgcacggaacgagttgtttgccctccgacccgcgcctatacaagctatgtggctggggtatccaggcactagcggagccctattcatggattacatcattaccgaccaggagacatcaccggcagaagtcgccgagcagtatagtgaaaaactggcttacatgccccacacctttttcatcggcgatcacgcaaatatgtttcctcatctcaagaaaaaggccgtgatcgacttcaaatccaacgggcacatttatgataatagaatagtcctgaacggaatcgaccttaaggcgtttttggacagcctgccagatgtgaagattgttaaaatgaagtgtcccgacggtggcgataatgctgactcttcaaacacggccttaaatatgcctgtgatcccaatgaacactattgcagaggccgtaatcgaaatgataaatagggggcagatccaaattacaatcaacggattcagtattagcaacggcctcgctaccactcagatcaataacaaagccgcaacaggtgaggaggtcccccgcaccataattgtgacgacccggtcccagtacgggctgccggaagatgctatcgtttattgcaatttcaaccaactttacaagattgacccttctacactgcagatgtgggccaatatcttgaaaagagtgccaaactcggtcctctggctgctaaggtttcccgcggtgggcgagcctaatatacagcagtacgcccaaaacatgggactgccccagaatcgcatcattttcagcccagtagcacctaaggaggaacatgtgcgacggggccagctcgctgatgtttgtctggacactcccctttgcaacgggcacaccacaggaatggatgtcttgtgggccggtactccaatggtgaccatgccgggcgaaacactggcttcccgtgtggcagcctcacagttaacctgtctcgggtgcctggagcttatcgccaagaatagacaagagtatgaagacattgctgtcaaactgggaactgatctagagtacctcaagaaagttaggggcaaggtgtggaaacagcgcatcagttctcctctgtttaacacgaagcagtatacaatggaattggagcggctgtacttacagatgtgggaacattatgcggcaggtaataaacccgaccacatgataaagccagtggaggtaaccgagagcgcctga

SEQ ID NO: 2930 - RNA, 3141 nt, synthetic construct
  misc_feature 1..3141: note = derived and/or modified sequence opt4 fromOGT__Homo_sapiens__AAH38180
  source 1..3141: mol_type = other RNA
atggccagcagcgtgggcaacgtggccgacagcaccgagcccaccaagagaatgctgagcttccagggcctggccgagctggcccacagagagtaccaggccggcgacttcgaggccgccgagagacactgcatgcagctgtggagacaggagcccgacaacaccggcgtgctgctgctgctgagcagcatccacttccagtgcagaagactggacagaagcgcccacttcagcaccctggccatcaagcagaaccccctgctggccgaggcctacagcaacctgggcaacgtgtacaaggagagaggccagctgcaggaggccatcgagcactacagacacgccctgagactgaagcccgacttcatcgacggctacatcaacctggccgccgccctggtggccgccggcgacatggagggcgccgtgcaggcctacgtgagcgccctgcagtacaaccccgacctgtactgcgtgagaagcgacctgggcaacctgctgaaggccctgggcagactggaggaggccaaggcctgctacctgaaggccatcgagacccagcccaacttcgccgtggcctggagcaacctgggctgcgtgttcaacgcccagggcgagatctggctggccatccaccacttcgagaaggccgtgaccctggaccccaacttcctggacgcctacatcaacctgggcaacgtgctgaaggaggccagaatcttcgacagagccgtggccgcctacctgagagccctgagcctgagccccaaccacgccgtggtgcacggcaacctggcctgcgtgtactacgagcagggcctgatcgacctggccatcgacacctacagaagagccatcgagctgcagccccacttccccgacgcctactgcaacctggccaacgccctgaaggagaagggcagcgtggccgaggccgaggactgctacaacaccgccctgagactgtgccccacccacgccgacagcctgaacaacctggccaacatcaagagagagcagggcaacatcgaggaggccgtgagactgtacagaaaggccctggaggtgttccccgagttcgccgccgcccacagcaacctggccagcgtgctgcagcagcagggcaagctgcaggaggccctgatgcactacaaggaggccatcagaatcagccccaccttcgccgacgcctacagcaacatgggcaacaccctgaaggagatgcaggacgtgcagggcgccctgcagtgctacaccagagccatccagatcaaccccgccttcgccgacgcccacagcaacctggccagcatccacaaggacagcggcaacatccccgaggccatcgccagctacagaaccgccctgaagctgaagcccgacttccccgacgcctactgcaacctggcccactgcctgcagatcgtgtgcgactggaccgactacgacgagagaatgaagaagctggtgagcatcgtggccgaccagctggagaagaacagactgcccagcgtgcacccccaccacagcatgctgtaccccctgagccacggcttcagaaaggccatcgccgagagacacggcaacctgtgcctggacaagatcaacgtgctgcacaagcccccctacgagcaccccaaggacctgaagctgagcgacggcagactgagagtgggctacgtgagcagcgacttcggcaaccaccccaccagccacctgatgcagagcatccccggcatgcacaaccccgacaagttcgaggtgttctgctacgccctgagccccgacgacggcaccaacttcagagtgaaggtgatggccgaggccaaccacttcatcgacctgagccagatcccctgcaacggcaaggccgccgacagaatccaccaggacggcatccacatcctggtgaacatgaacggctacaccaagggcgccagaaacgagctgttcgccctgagacccgcccccatccaggccatgtggctgggctaccccggcaccagcggcgccctgttcatggactacatcatcaccgaccaggagaccagccccgccgaggtggccgagcagtacagcgagaagctggcctacatgccccacaccttcttcatcggcgaccacgccaacatgttcccccacctgaagaagaaggccgtgatcgacttcaagagcaacggccacatctacgacaacagaatcgtgctgaacggcatcgacctgaaggccttcctggacagcctgcccgacgtgaagatcgtgaagatgaagtgccccgacggcggcgacaacgccgacagcagcaacaccgccctgaacatgcccgtgatccccatgaacaccatcgccgaggccgtgatcgagatgatcaacagaggccagatccagatcaccatcaacggcttcagcatcagcaacggcctggccaccacccagatcaacaacaaggccgccaccggcgaggaggtgcccagaaccatcatcgtgaccaccagaagccagtacggcctgcccgaggacgccatcgtgtactgcaacttcaaccagctgtacaagatcgaccccagcaccctgcagatgtgggccaacatcctgaagagagtgcccaacagcgtgctgtggctgctgagattccccgccgtgggcgagcccaacatccagcagtacgcccagaacatgggcctgccccagaacagaatcatcttcagccccgtggcccccaaggaggagcacgtgagaagaggccagctggccgacgtgtgcctggacacccccctgtgcaacggccacaccaccggcatggacgtgctgtgggccggcacccccatggtgaccatgcccggcgagaccctggccagcagagtggccgccagccagctgacctgcctgggctgcctggagctgatcgccaagaacagacaggagtacgaggacatcgccgtgaagctgggcaccgacctggagtacctgaagaaggtgagaggcaaggtgtggaagcagagaatcagcagccccctgttcaacaccaagcagtacaccatggagctggagagactgtacctgcagatgtgggagcactacgccgccggcaacaagcccgaccacatgatcaagcccgtggaggtgaccgagagcgcctga

SEQ ID NO: 2931 - RNA, 3141 nt, synthetic construct
  misc_feature 1..3141: note = derived and/or modified sequence opt5 fromOGT__Homo_sapiens__AAH38180
  source 1..3141: mol_type = other RNA
atggccagctccgtgggcaacgtcgctgactctaccgagcccacaaagagaatgctgagcttccaggggctcgccgaactggcgcaccgggagtaccaagctggagattttgaagccgccgagcgccattgcatgcagctttggagacaggaacctgacaatacgggcgttctgctcctgctttcctctatccacttccagtgtcggcgcctggatagaagcgctcatttttccaccctcgccattaaacaaaacccgctgctggctgaggcctattctaatctcgggaacgtgtacaaggagcggggacagctgcaggaagcgatcgagcactatcgccatgcccttagactgaaacccgacttcattgatggctacatcaatctcgctgccgctctggtggccgcgggggacatggaaggagccgtccaggcttatgtgagcgcccttcaatacaaccctgatctgtattgcgttcggtccgacctcggcaatctgctgaaggctctcggccgcctggaggaggccaaagcctgttaccttaaggctattgaaacacagcccaactttgcggtggcctggagcaatctggggtgcgtcttcaacgctcagggagagatctggctcgccatccaccactttgaaaaggccgtgaccctggatcctaatttccttgacgcttacattaacctgggcaatgttctcaaagaggccagaatctttgatcgggcggtggctgcctatctgcgcgccctgtctctctcccccaaccatgctgtcgtgcacgggaatctggcctgtgtgtactatgaacagggacttattgacctggctatcgatacatacagacgggccattgagctccaacctcatttcccggacgcgtattgcaacctggccaacgctcttaaggagaaaggcagcgtcgccgaagctgaggactgttacaataccgccctgcgcctctgccccacacacgcggattctctgaacaatctggccaacatcaagagagaacaggggaatattgaggaagctgttcggctctatagaaaagccctggaggtgtttcctgagttcgctgccgcccactccaaccttgctagcgtgctgcagcaacagggaaagctccaggaagcgctgatgcattacaaggaggccatccgcatctctcccacctttgctgacgcctactccaatatgggcaacacgctgaaagaaatgcaggatgtccaaggcgcccttcagtgttatacccgggctattcagatcaatcctgccttcgcggacgctcacagcaacctcgcctccattcataaggattctgggaatatccccgaggccattgctagctacagaacagccctgaaactgaagccggacttccctgatgcgtattgcaacctcgctcactgtctgcagatcgtgtgcgactggaccgattacgacgaacgcatgaaaaagctggtttccatcgtggccgatcaacttgagaaaaatcggctccccagcgtccatcctcaccactctatgctgtatcccctgtcccatggatttagaaaggccattgctgagcgccacggcaacctttgcctcgacaagatcaatgtgctgcataaacccccttacgaacacccgaaggacctgaaactcagcgatgggcggctgagagttggatatgtgtctagcgacttcggcaaccaccccacatcccatcttatgcagtctattcctgggatgcacaaccccgataagtttgaggtcttctgttacgccctgagccctgacgatggaaccaattttcgcgtgaaagtcatggctgaagccaaccatttcatcgacctctcccagattccctgcaatggcaaggcggccgatcggatccaccaggacggcatccatattctggtgaacatgaatgggtacacgaagggagctagaaacgagctgtttgcccttcgcccggctcctatccaagccatgtggctcggctatcccgggacaagcggagccctgttcatggattacattatcaccgaccaggagacatctcctgctgaagttgcggagcagtattccgaaaaactggcctacatgccccacacctttttcattggcgatcacgctaatatgtttcctcatctcaagaaaaaggccgtgatcgacttcaaaagcaacgggcacatttatgataatcggatcgtcctgaacggcatcgaccttaaggcctttctggactctctccccgatgtgaagattgttaaaatgaagtgtccggacggaggcgataatgctgactccagcaacaccgccctgaatatgcctgtgatccccatgaacacaattgcggaggctgtcatcgaaatgattaatagagggcagatccaaatcacgattaacggattctccatctctaacggcctggccaccacacagattaataacaaagccgctaccggggaggaggtgccccggacaatcattgtgaccacgcgcagccagtacggacttcctgaagatgccatcgtttattgcaatttcaaccaactctacaagatcgacccgtccacactgcagatgtgggcgaatattctgaaaagagtccccaactctgtgctctggctgcttcggtttcctgctgtgggcgagcccaatatccagcagtacgcccaaaacatggggctgcctcagaatagaattatcttcagccccgtcgcccctaaggaggaacatgtgcgccggggccagctcgctgatgtttgtctggacacacccctgtgcaacggacacaccaccggcatggatgtgctttgggccgggaccccgatggtcacaatgcctggagaaacgctggcttccagagtggccgcgagccagctcacctgtctgggctgcctcgagctgattgccaagaatcgccaagagtatgaagacatcgctgttaaacttgggacagatctggagtacctcaagaaagtgagaggaaaggtctggaaacagcggatctctagccccctgtttaacaccaagcagtatacaatggaactggagcgcctttacctgcagatgtgggaacattatgccgctggcaataaacctgaccacatgattaagcccgtggaggttaccgagtccgcctga

SEQ ID NO: 2932 - protein, 146 aa, synthetic construct [sequence omitted]

SEQ ID NO: 2933 - RNA, 441 nt, synthetic construct
  misc_feature 1..441: note = OS-9__Homo_sapiens__BAG57972
  source 1..441: mol_type = other RNA
atggcggcggaaacgctgctgtccagtttgttaggactgctgcttctgggactcctgttacccgcaagtctgaccggcggtgtcgggagtctgaacctggaggagctgagtgagatgcgttatgggatcgagatcctgccgttgcctgtcatgggagggcagagccaatcttcggacgtggtgattgtctcctctaagtacaaacagcgctatgagtgtcgcctgccagttggagctattcacttccagcgtgaaagggaggaggaaacacctgcttaccaagggcctgggatccctgagttgttgagcccaatgagagatgctccctgcttgctgaagacaaaggactggtggacatatgaattctgttatggacgccacatccagcaataccacatggaagattcagagatcaaaggcctccaagcagcatcgtcttaa

SEQ ID NO: 2934 - RNA, 441 nt, synthetic construct
  misc_feature 1..441: note = derived and/or modified sequence opt1 fromOS-9__Homo_sapiens__BAG57972
  source 1..441: mol_type = other RNA
atggccgccgagaccctgctcagctccctgctgggcctcctgctgctcgggctgctgctccccgcgagcctgaccggcggggtgggctccctgaacctcgaggagctgagcgagatgcgctacgggatcgagatcctgccgctccccgtcatgggcggccagtcccagagctccgacgtggtgatcgtcagctccaagtacaagcagcggtacgagtgccgcctgcccgtgggggccatccacttccagcgggagcgcgaggaggagacgcccgcctaccagggcccggggatccccgagctgctcagccccatgcgggacgccccctgcctgctgaagaccaaggactggtggacctacgagttctgctacggccgccacatccagcagtaccacatggaggactccgagatcaaggggctccaggccgcgagctcctga

SEQ ID NO: 2935 - RNA, 441 nt, synthetic construct
  misc_feature 1..441: note = derived and/or modified sequence opt2 fromOS-9__Homo_sapiens__BAG57972
  source 1..441: mol_type = other RNA
atggccgccgagaccctcctctcctccctcctcggcctcctcctcctcggcctcctcctccccgcctccctcaccggcggcgtcggctccctcaacctcgaggagctctccgagatgcgctacggcatcgagatcctccccctccccgtcatgggcggccagtcccagtcctccgacgtcgtcatcgtctcctccaagtacaagcagcgctacgagtgccgcctccccgtcggcgccatccacttccagcgcgagcgcgaggaggagacccccgcctaccagggccccggcatccccgagctcctctcccccatgcgcgacgccccctgcctcctcaagaccaaggactggtggacctacgagttctgctacggccgccacatccagcagtaccacatggaggactccgagatcaagggcctccaggccgcctcctcctga

SEQ ID NO: 2936 - RNA, 441 nt, synthetic construct
  misc_feature 1..441: note = derived and/or modified sequence opt3 fromOS-9__Homo_sapiens__BAG57972
  source 1..441: mol_type = other RNA
atggccgctgagaccctgctcagctcccttctgggcttgttactgctagggctcctgcttcccgcatctctgacaggaggtgtgggctcattgaacctcgaggaactgagtgaaatgagatacgggatcgagattctgcctctcccagtcatgggaggccagagccaatcctctgacgttgtgatagtatcgtcaaagtataaacagaggtacgaatgccggttaccggtgggtgccatccacttccagcgcgagcgagaggaagagactcccgcgtatcaggggcctggcattccagaactgcttagccccatgcgtgatgctccttgtttgctgaagacgaaagactggtggacctacgagttttgctatggaagacatatccaacagtaccacatggaggatagtgaaattaagggcctacaggccgcatcctcttga

SEQ ID NO: 2937 - RNA, 441 nt, synthetic construct
  misc_feature 1..441: note = derived and/or modified sequence opt4 fromOS-9__Homo_sapiens__BAG57972
  source 1..441: mol_type = other RNA
atggccgccgagaccctgctgagcagcctgctgggcctgctgctgctgggcctgctgctgcccgccagcctgaccggcggcgtgggcagcctgaacctggaggagctgagcgagatgagatacggcatcgagatcctgcccctgcccgtgatgggcggccagagccagagcagcgacgtggtgatcgtgagcagcaagtacaagcagagatacgagtgcagactgcccgtgggcgccatccacttccagagagagagagaggaggagacccccgcctaccagggccccggcatccccgagctgctgagccccatgagagacgccccctgcctgctgaagaccaaggactggtggacctacgagttctgctacggcagacacatccagcagtaccacatggaggacagcgagatcaagggcctgcaggccgccagcagctga

SEQ ID NO: 2938 - RNA, 441 nt, synthetic construct
  misc_feature 1..441: note = derived and/or modified sequence opt5 fromOS-9__Homo_sapiens__BAG57972
  source 1..441: mol_type = other RNA
atggccgctgagaccctgctcagctccctgcttggcctgctcctgcttgggctgctcctgcccgcctctctgacaggaggcgtggggagcctcaacctggaggaactttccgaaatgagatacggaatcgagattctgcctctcccggtcatgggcgggcagtctcaaagctccgacgttgtgatcgtgtctagcaagtataaacagcggtacgaatgccgcctgcccgtcggagcgattcacttccagagagagcgggaggaagagacgcctgcttatcagggccccggcatccctgaacttctgtcccccatgcgcgatgccccttgtctcctgaagaccaaagactggtggacatacgagttttgctatgggagacatattcaacagtaccacatggaggatagcgaaatcaagggactgcaggccgcttcttcctga

SEQ ID NO: 2939 - protein, 406 aa, synthetic construct
  REGION 1..406: note = OS-9__Homo_sapiens__B4E321
MAAETLLSSLLGLLLLGLLLPASLTGGVGSLNLEELSEMRYGIEILPLPVMGGQSQSSDVVIVSSKYKQRYECRLPAGAIHFQREREEETPAYQGPGIPELLSPMRDAPCLLKTKDWWTYEFCYGRHIQQYHMEDSASGAPNDFQNNVQVKVIRSPADLIRFIEELKGGTKKGKPNIGQEQPVDDAAEVPQREPEKERGDPERQREMEEEEDEDEDEDEDEDERQLLGEFEKELEGILLPSDRDRLRSEVKAGMERELENIIQETEKELDPDGLKKESERDRAMLALTSTLNKLIKRLEEKQSPELVKKHKKKRVVPKKPPPSPQPTGKIEIKIVRPWAEGTEEGARWLTDEDTRNLKEIFFNILVPGAEEAQKERQRQKELESNYRRVWGSPGGEGTGDLDEFDF

SEQ ID NO: 2940 - RNA, 1221 nt, synthetic construct
  misc_feature 1..1221: note = OS-9__Homo_sapiens__BAG65333
  source 1..1221: mol_type = other RNA
atggcggcggaaacgctgctgtccagtttgttaggactgctgcttctgggactcctgttacccgcaagtctgaccggcggtgtcgggagcctgaacctggaggagctgagtgagatgcgttatgggatcgagatcctgccgttgcctgtcatgggagggcagagccaatcttcggacgtggtgattgtctcctctaagtacaaacagcgctatgagtgtcgcctgccagctggagctattcacttccagcgtgaaagggaggaggaaacacctgcttaccaagggcctgggatccctgagttgttgagcccaatgagagatgctccctgcttgctgaagacaaaggactggtggacatatgaattctgttatggacgccacatccagcaataccacatggaagattcagcttctggtgctcccaatgattttcagaacaacgtgcaggtcaaagtcattcgaagccctgcggatttgattcgattcatagaggagctgaaaggtggaacaaaaaaggggaagccaaatataggccaagagcagcctgtggatgatgctgcagaagtccctcagagggaaccagagaaggaaaggggtgatccagaacggcagagagagatggaagaagaggaggatgaggatgaggatgaggatgaagatgaggatgaacggcagttactgggagaatttgagaaggaactggaagggatcctgcttccgtcagaccgagaccggctccgttcggaggtgaaggctggcatggagcgggaactggaaaacatcatccaggagacagagaaagagctggacccagatgggctgaagaaggagtcagagcgggatcgggcaatgctggctctcacatccactctcaacaaactcatcaaaagactggaggaaaaacagagtccagagctggtgaagaagcacaagaaaaagagggttgtccccaaaaagcctcccccatcaccccaacctacagggaaaattgagatcaaaattgtccgcccatgggctgaagggactgaagagggtgcacgttggctgactgatgaggacacgagaaacctcaaggagatcttcttcaatatcttggtgccgggagctgaagaggcccagaaggaacgccagcggcagaaagagctggagagcaattaccgccgggtgtggggctctccaggtggggagggcacaggggacctggacgaatttgacttctga

SEQ ID NO: 2941 - RNA, 1221 nt, synthetic construct
  misc_feature 1..1221: note = derived and/or modified sequence opt1 fromOS-9__Homo_sapiens__BAG65333
  source 1..1221: mol_type = other RNA
atggccgccgagaccctgctcagctccctgctgggcctcctgctgctcgggctgctgctccccgcgagcctgaccggcggggtgggctccctgaacctcgaggagctgagcgagatgcgctacgggatcgagatcctgccgctccccgtcatgggcggccagtcccagagctccgacgtggtgatcgtcagctccaagtacaagcagcggtacgagtgccgcctgcccgccggggccatccacttccagcgggagcgcgaggaggagacgcccgcctaccagggcccggggatccccgagctgctcagccccatgcgggacgccccctgcctgctgaagaccaaggactggtggacctacgagttctgctacggccgccacatccagcagtaccacatggaggactccgcgagcggggccccgaacgacttccagaacaacgtccaggtgaaggtgatccggtcccccgccgacctcatccgcttcatcgaggagctgaagggcggcaccaagaaggggaagcccaacatcggccaggagcagcccgtggacgacgccgcggaggtgccgcagcgggagcccgagaaggagcgcggggaccccgagcggcagcgcgagatggaggaggaggaggacgaggacgaggacgaggacgaggacgaggacgagcggcagctgctcggcgagttcgagaaggagctggagggcatcctgctccccagcgaccgcgaccggctgcgctccgaggtcaaggccgggatggagcgggagctggagaacatcatccaggagacggagaaggagctcgacccggacggcctgaagaaggagagcgagcgcgaccgggccatgctggccctcacctccaccctgaacaagctgatcaagcgcctcgaggagaagcagagccccgagctggtgaagaagcacaagaagaagcgggtggtccccaagaagcccccgcccagcccccagcccaccgggaagatcgagatcaagatcgtgcgcccgtgggccgagggcacggaggagggggcgcgctggctgaccgacgaggacacccggaacctcaaggagatcttcttcaacatcctggtgcccggcgccgaggaggcccagaaggagcgccagcggcagaaggagctggagtccaactaccgccgggtctggggcagccccgggggcgaggggaccggcgacctcgacgagttcgacttctga

SEQ ID NO: 2942 - RNA, 1221 nt, synthetic construct
  misc_feature 1..1221: note = derived and/or modified sequence opt2 fromOS-9__Homo_sapiens__BAG65333
  source 1..1221: mol_type = other RNA
atggccgccgagaccctcctctcctccctcctcggcctcctcctcctcggcctcctcctccccgcctccctcaccggcggcgtcggctccctcaacctcgaggagctctccgagatgcgctacggcatcgagatcctccccctccccgtcatgggcggccagtcccagtcctccgacgtcgtcatcgtctcctccaagtacaagcagcgctacgagtgccgcctccccgccggcgccatccacttccagcgcgagcgcgaggaggagacccccgcctaccagggccccggcatccccgagctcctctcccccatgcgcgacgccccctgcctcctcaagaccaaggactggtggacctacgagttctgctacggccgccacatccagcagtaccacatggaggactccgcctccggcgcccccaacgacttccagaacaacgtccaggtcaaggtcatccgctcccccgccgacctcatccgcttcatcgaggagctcaagggcggcaccaagaagggcaagcccaacatcggccaggagcagcccgtcgacgacgccgccgaggtcccccagcgcgagcccgagaaggagcgcggcgaccccgagcgccagcgcgagatggaggaggaggaggacgaggacgaggacgaggacgaggacgaggacgagcgccagctcctcggcgagttcgagaaggagctcgagggcatcctcctcccctccgaccgcgaccgcctccgctccgaggtcaaggccggcatggagcgcgagctcgagaacatcatccaggagaccgagaaggagctcgaccccgacggcctcaagaaggagtccgagcgcgaccgcgccatgctcgccctcacctccaccctcaacaagctcatcaagcgcctcgaggagaagcagtcccccgagctcgtcaagaagcacaagaagaagcgcgtcgtccccaagaagccccccccctccccccagcccaccggcaagatcgagatcaagatcgtccgcccctgggccgagggcaccgaggagggcgcccgctggctcaccgacgaggacacccgcaacctcaaggagatcttcttcaacatcctcgtccccggcgccgaggaggcccagaaggagcgccagcgccagaaggagctcgagtccaactaccgccgcgtctggggctcccccggcggcgagggcaccggcgacctcgacgagttcgacttctga

SEQ ID NO: 2943 - RNA, 1221 nt, synthetic construct
  misc_feature 1..1221: note = derived and/or modified sequence opt3 fromOS-9__Homo_sapiens__BAG65333
  source 1..1221: mol_type = other RNA
atggccgctgagaccctgctcagctcccttctgggcttgttactgctagggctcctgcttcccgcatctctgacaggaggtgtgggctcattgaacctcgaagaactgagtgaaatgagatacgggatcgagattctgcctctcccagtcatgggaggccagagccaatcctctgacgttgtgatagtatcgtcaaagtataaacagaggtacgaatgccggttaccggccggtgcgatccacttccagcgcgagcgagaggaagagactcccgcttatcaggggcctggcattccagaactgcttagccccatgcgtgatgccccttgtttgctgaagacgaaagactggtggacctacgagttttgctatggaagacatatccaacagtaccacatggaggatagtgcatccggcgccccaaatgacttccagaacaatgtgcaggtcaaggtgattaggtctcccgctgatctaatccggtttatagaggagctcaaagggggaacaaagaagggtaaacctaacatcggccaagaacagccagttgacgatgcagccgaggtgccgcagcgcgaacccgagaaggagagaggggaccctgaaaggcagcgggagatggaagaggaagaggatgaggacgaagatgaggacgaagatgaggacgaacgccaactgcttggagagttcgagaaagaactggagggcattttgctcccaagcgaccgagatagactgaggtccgaagtcaaggctggtatggagcgggagttagaaaatatcattcaggagactgaaaaagagctggaccccgatgggctcaagaaggaatcagagcgtgaccgcgccatgcttgcgctgaccagtacattgaacaaactaatcaagagactggaggaaaaacagagccctgagctcgtgaagaaacataagaaaaagagggtagttccaaagaaacccccgccttctccccaaccaaccggaaagatagaaattaaaatcgtgcggccttgggcagagggcactgaagagggcgcccgatggctgacagatgaggacacccgcaatcttaaggaaatctttttcaacattctggtccccggggctgaggaagcccagaaagagagacagaggcagaaggaattggagtccaattatcggcgcgtgtggggatcaccaggtggcgaggggacgggagatctcgacgaatttgatttctga

SEQ ID NO: 2944 - RNA, 1221 nt, synthetic construct
  misc_feature 1..1221: note = derived and/or modified sequence opt4 fromOS-9__Homo_sapiens__BAG65333
  source 1..1221: mol_type = other RNA
atggccgccgagaccctgctgagcagcctgctgggcctgctgctgctgggcctgctgctgcccgccagcctgaccggcggcgtgggcagcctgaacctggaggagctgagcgagatgagatacggcatcgagatcctgcccctgcccgtgatgggcggccagagccagagcagcgacgtggtgatcgtgagcagcaagtacaagcagagatacgagtgcagactgcccgccggcgccatccacttccagagagagagagaggaggagacccccgcctaccagggccccggcatccccgagctgctgagccccatgagagacgccccctgcctgctgaagaccaaggactggtggacctacgagttctgctacggcagacacatccagcagtaccacatggaggacagcgccagcggcgcccccaacgacttccagaacaacgtgcaggtgaaggtgatcagaagccccgccgacctgatcagattcatcgaggagctgaagggcggcaccaagaagggcaagcccaacatcggccaggagcagcccgtggacgacgccgccgaggtgccccagagagagcccgagaaggagagaggcgaccccgagagacagagagagatggaggaggaggaggacgaggacgaggacgaggacgaggacgaggacgagagacagctgctgggcgagttcgagaaggagctggagggcatcctgctgcccagcgacagagacagactgagaagcgaggtgaaggccggcatggagagagagctggagaacatcatccaggagaccgagaaggagctggaccccgacggcctgaagaaggagagcgagagagacagagccatgctggccctgaccagcaccctgaacaagctgatcaagagactggaggagaagcagagccccgagctggtgaagaagcacaagaagaagagagtggtgcccaagaagcccccccccagcccccagcccaccggcaagatcgagatcaagatcgtgagaccctgggccgagggcaccgaggagggcgccagatggctgaccgacgaggacaccagaaacctgaaggagatcttcttcaacatcctggtgcccggcgccgaggaggcccagaaggagagacagagacagaaggagctggagagcaactacagaagagtgtggggcagccccggcggcgagggcaccggcgacctggacgagttcgacttctga

SEQ ID NO: 2945 - RNA, 1221 nt, synthetic construct
  misc_feature 1..1221: note = derived and/or modified sequence opt5 fromOS-9__Homo_sapiens__BAG65333
  source 1..1221: mol_type = other RNA
atggccgctgagaccctgctcagctccctgcttggcctgctcctgcttgggctgctcctgcccgcctctctgacaggaggcgtggggagcctcaacctggaagaactttccgaaatgagatacggaatcgagattctgcctctcccggtcatgggcgggcagtctcaaagctccgacgttgtgatcgtgtctagcaagtataaacagcggtacgaatgccgcctgcccgcgggagctattcacttccagagagagcgggaggaagagacgcctgcctatcagggccccggcatccctgaacttctgtcccccatgcgcgatgccccttgtctcctgaagaccaaagactggtggacatacgagttttgctatgggagacatattcaacagtaccacatggaggatagcgcttctggagccccgaatgacttccagaacaatgtccaggtgaaggttatccggtcccccgctgatctgatccgctttattgaggagctcaaaggcgggaccaagaagggaaaacctaacatcggccaagaacagcccgtggacgatgccgcggaggtccctcagagagaacccgagaaggagcgcggggacccggaacggcagagagagatggaagaggaagaggatgaggacgaagatgaggacgaagatgaggacgaacggcaactgcttggagagttcgagaaagaactggagggcattctcctgcctagcgaccgcgatagacttcggtctgaagtgaaggccggcatggagcgcgagctggaaaatatcattcaggagacagaaaaagagctcgaccccgatgggctgaagaaggaatccgagagagaccgggctatgctggccctcaccagcacactgaacaaacttatcaagagactggaggaaaaacagtctcctgagctcgttaagaaacataagaaaaagcgcgtggtccccaagaaaccccctccgagcccccaacctaccggaaagattgaaatcaaaatcgtgcggccctgggctgagggcacggaagagggggccagatggctgaccgatgaggacacacgcaatcttaaggaaatctttttcaacattctggtgcctggagcggaggaagcccagaaagagcggcagagacagaaggaactcgagtccaattatcgccgggtctggggctcccccgggggagagggcaccggcgatctggacgaatttgatttctga

SEQ ID NO: 2946 - protein, 740 aa, synthetic construct
  REGION 1..740: note = OS-9__Homo_sapiens__B7Z8E7
MAVETLLSSLLGLLLLGLLLPASLTGGVGSLNLEELSEMRYGIEILPLPVMGGQSQSSDVVIVSSKYKQRYECRLPAGAIHFQREREEETPAYQGPGIPELLSPMRDAPCLLKTKDWWTYEFCYGRHIQQYHMEDSEIKGEVLYLGYYQSAFDWDDETAKASKQHRLKRYHSQTYGNGSKCDLNGRPREAEVRFLCDEGAGISGDYIDRVDEPLSCSYVLTIRTPRLCPHPLLRPPPSAAPQAILCHPSLQPEEYMAYVQRQADSKQYGDKIIEELQDLGPQVWSETKSGVAPQKMAGRTLFHLFREIHFHFFPSPDLTVLTDWWGGGGVEKYHGPSSLGDRGGEGTPSYLLPSVSPLLSDQSLPVLCTLGASPTKDDSKDSDFWKMLNEPEDQAPGGEEVPAEEQDPSPEAADSASGAPNDFQNNVQVKVIRSPADLIRFIEELKGGTKKGKPNIGQEQPVDDAAEVPQREPEKERGDPERQREMEEEEDEDEDEDEDEDERQLLGEFEKELEGILLPSDRDRLRSEVKAGMERELENIIQETEKELDPDGLKKESERDRAMLALTSTLNKLIKRLEEKQSPELVKKHKKKRVVPKKPPPSPQPTEEDPEHRVRVRVTKLRLGGPNQDLTVLEMKRENPQLKQIEGLVKELLEREGLTAAGKIEIKIVRPWAEGTEEGARWLTDEDTRNLKEIFFNILVPGAEEAQKERQRQKELESNYRRVWGSPGGEGTGDLDEFDF

SEQ ID NO: 2947 - RNA, 2223 nt, synthetic construct
  misc_feature 1..2223: note = OS-9__Homo_sapiens__BAH13933
  source 1..2223: mol_type = other RNA
atggcggtggaaacgctgctgtccagtttgttaggactgctgcttctgggactcctgttacccgcaagtctgaccggcggtgtcgggagcctgaacctggaggagctgagtgagatgcgttatgggatcgagatcctgccgttgcctgtcatgggagggcagagccaatcttcggacgtggtgattgtctcctctaagtacaaacagcgctatgagtgtcgcctgccagctggagctattcacttccagcgtgaaagggaggaggaaacacctgcttaccaagggcctgggatccctgagttgttgagcccaatgagagatgctccctgcttgctgaagacaaaggactggtggacatatgaattctgttatggacgccacatccagcaataccacatggaagattcagagatcaaaggtgaagtcctctatctcggctactaccaatcagccttcgactgggatgatgaaacagccaaggcctccaagcagcatcgtcttaaacgctaccacagccagacctatggcaatgggtccaagtgcgaccttaatgggaggccccgggaggccgaggttcggttcctctgtgacgagggtgcaggtatctctggggactacatcgatcgcgtggacgagcccttgtcctgctcttatgtgctgaccattcgcactcctcggctctgcccccaccctctcctccggcccccacccagtgctgcaccgcaggccatcctctgtcacccttccctacagcctgaggagtacatggcctacgttcagaggcaagccgactcaaagcagtatggagataaaatcatagaggagctgcaagatctaggcccccaagtgtggagtgagaccaagtctggggtggcaccccaaaagatggcaggtaggaccttgtttcacctgttccgtgaaattcacttccatttcttcccttcccctgatcttactgtcctgactgactggtggggtggggggggggtggaaaagtaccatgggccctcctcccttggtgatagaggaggggaagggaccccatcctatttgctcccttctgtctcacccctcctgtcagatcagtctctccctgttctctgtaccctaggtgcgagcccgaccaaggatgacagtaaggactcagatttctggaagatgcttaatgagccagaggaccaggccccaggaggggaggaggtgccggctgaggagcaggacccaagccctgaggcagcagattcagcttctggtgctcccaatgattttcagaacaacgtgcaggtcaaagtcattcgaagccctgcggatttgattcgattcatagaggagctgaaaggtggaacaaaaaaggggaagccaaatataggccaagagcagcctgtggatgatgctgcagaagtccctcagagggaaccagagaaggaaaggggtgatccagaacggcagagagagatggaagaagaggaggatgaggatgaggatgaggatgaagatgaggatgaacggcagttactgggagaatttgagaaggaactggaagggatcctgcttccgtcagaccgagaccggctccgttcggaggtgaaggctggcatggagcgggaactggagaacatcatccaggagacagagaaagagctggacccagatgggctgaagaaggagtcagagcgggatcgggcaatgctggctctcacatccactctcaacaaactcatcaaaagactggaggaaaaacagagtccagagctggtgaagaagcacaagaaaaagagggttgtccccaaaaagcctcccccatcaccccaacctacagaggaggatcctgagcacagagtccgggtccgggtcaccaagctccgtctcggaggccctaatcaggatctgactgtcctcgagatgaaacgggaaaacccacagctgaaacaaatcgaggggctggtgaaggagctgctggagagggagggactcacagctgcagggaaaattgagatcaaaattgtccgcccatgggctgaagggactgaagagggtgcacgttggctgactgatgaggacacgagaaacctcaaggagatcttcttcaatatcttggtgccgggagctgaagaggcccagaaggaacgccagcggcagaaagagctggagagcaattaccgccgggtgtggggctctccaggtggggagggcacaggggacctggacgaatttgacttctga

SEQ ID NO: 2948 - RNA, 2223 nt, synthetic construct
  misc_feature 1..2223: note = derived and/or modified sequence opt1 fromOS-9__Homo_sapiens__BAH13933
  source 1..2223: mol_type = other RNA
atggccgtggagaccctgctcagctccctgctgggcctcctgctgctcgggctgctgctccccgccagcctgaccggcggggtcggctccctgaacctcgaggagctgagcgagatgcgctacgggatcgagatcctgccgctccccgtgatgggcggccagtcccagagctccgacgtggtcatcgtgagctccaagtacaagcagcggtacgagtgccgcctgcccgcgggggccatccacttccagcgggagcgcgaggaggagacgcccgcctaccagggcccggggatccccgagctgctcagccccatgcgggacgccccctgcctgctgaagaccaaggactggtggacctacgagttctgctacggccgccacatccagcagtaccacatggaggactccgagatcaagggggaggtgctctacctgggctactaccagagcgccttcgactgggacgacgagaccgcgaaggcctccaagcagcaccggctgaagcgctaccacagccagacgtacggcaacgggtccaagtgcgacctcaacggccggccgcgcgaggccgaggtccggttcctgtgcgacgagggggccggcatcagcggcgactacatcgaccgcgtggacgagcccctgtcctgcagctacgtgctcaccatccggacgccccgcctgtgcccccacccgctgctccggcccccgccctccgcggccccgcaggccatcctgtgccaccccagcctgcagcccgaggagtacatggcctacgtccagcgccaggccgacagcaagcagtacggggacaagatcatcgaggagctccaggacctgggcccccaggtgtggtccgagaccaagagcggggtggcgccgcagaagatggccggccggaccctgttccacctcttccgcgagatccacttccacttcttcccctcccccgacctgaccgtcctgaccgactggtggggcgggggcggggtggagaagtaccacggccccagctccctcggggaccggggcggggagggcaccccgagctacctgctgccctccgtgagccccctcctgtccgaccagagcctgcccgtcctctgcacgctgggcgcctccccgaccaaggacgacagcaaggactccgacttctggaagatgctgaacgagcccgaggaccaggcccccgggggcgaggaggtgccggccgaggagcaggaccccagccccgaggcggccgactccgccagcggggcccccaacgacttccagaacaacgtgcaggtcaaggtgatccgctccccggccgacctcatccggttcatcgaggagctgaagggcgggaccaagaagggcaagcccaacatcggccaggagcagcccgtggacgacgcggccgaggtcccccagcgcgagccggagaaggagcgcggggaccccgagcggcagcgcgagatggaggaggaggaggacgaggacgaggacgaggacgaggacgaggacgagcggcagctgctgggcgagttcgagaaggagctcgaggggatcctgctgcccagcgaccgcgaccggctccgctccgaggtgaaggccggcatggagcgggagctggagaacatcatccaggagaccgagaaggagctggaccccgacggcctcaagaaggagagcgagcgcgaccgggccatgctggccctgacgagcaccctcaacaagctgatcaagcgcctggaggagaagcagtccccggagctcgtgaagaagcacaagaagaagcgggtcgtgcccaagaagcccccgcccagcccccagcccaccgaggaggaccccgagcaccgcgtccgggtgcgcgtgaccaagctgcggctcgggggcccgaaccaggacctgacggtcctggagatgaagcgcgagaacccccagctgaagcagatcgaggggctcgtgaaggagctgctggagcgggagggcctcaccgcggccgggaagatcgagatcaagatcgtgcgcccctgggccgagggcaccgaggagggcgcccggtggctgaccgacgaggacacgcgcaacctgaaggagatcttcttcaacatcctcgtccccggggcggaggaggcccagaaggagcgccagcggcagaaggagctggagtccaactaccgccgggtgtggggcagccccgggggcgaggggaccggcgacctggacgagttcgacttctga

SEQ ID NO: 2949 - RNA, 2223 nt, synthetic construct
  misc_feature 1..2223: note = derived and/or modified sequence opt2 fromOS-9__Homo_sapiens__BAH13933
  source 1..2223: mol_type = other RNA
atggccgtcgagaccctcctctcctccctcctcggcctcctcctcctcggcctcctcctccccgcctccctcaccggcggcgtcggctccctcaacctcgaggagctctccgagatgcgctacggcatcgagatcctccccctccccgtcatgggcggccagtcccagtcctccgacgtcgtcatcgtctcctccaagtacaagcagcgctacgagtgccgcctccccgccggcgccatccacttccagcgcgagcgcgaggaggagacccccgcctaccagggccccggcatccccgagctcctctcccccatgcgcgacgccccctgcctcctcaagaccaaggactggtggacctacgagttctgctacggccgccacatccagcagtaccacatggaggactccgagatcaagggcgaggtcctctacctcggctactaccagtccgccttcgactgggacgacgagaccgccaaggcctccaagcagcaccgcctcaagcgctaccactcccagacctacggcaacggctccaagtgcgacctcaacggccgcccccgcgaggccgaggtccgcttcctctgcgacgagggcgccggcatctccggcgactacatcgaccgcgtcgacgagcccctctcctgctcctacgtcctcaccatccgcaccccccgcctctgcccccaccccctcctccgcccccccccctccgccgccccccaggccatcctctgccacccctccctccagcccgaggagtacatggcctacgtccagcgccaggccgactccaagcagtacggcgacaagatcatcgaggagctccaggacctcggcccccaggtctggtccgagaccaagtccggcgtcgccccccagaagatggccggccgcaccctcttccacctcttccgcgagatccacttccacttcttcccctcccccgacctcaccgtcctcaccgactggtggggcggcggcggcgtcgagaagtaccacggcccctcctccctcggcgaccgcggcggcgagggcaccccctcctacctcctcccctccgtctcccccctcctctccgaccagtccctccccgtcctctgcaccctcggcgcctcccccaccaaggacgactccaaggactccgacttctggaagatgctcaacgagcccgaggaccaggcccccggcggcgaggaggtccccgccgaggagcaggacccctcccccgaggccgccgactccgcctccggcgcccccaacgacttccagaacaacgtccaggtcaaggtcatccgctcccccgccgacctcatccgcttcatcgaggagctcaagggcggcaccaagaagggcaagcccaacatcggccaggagcagcccgtcgacgacgccgccgaggtcccccagcgcgagcccgagaaggagcgcggcgaccccgagcgccagcgcgagatggaggaggaggaggacgaggacgaggacgaggacgaggacgaggacgagcgccagctcctcggcgagttcgagaaggagctcgagggcatcctcctcccctccgaccgcgaccgcctccgctccgaggtcaaggccggcatggagcgcgagctcgagaacatcatccaggagaccgagaaggagctcgaccccgacggcctcaagaaggagtccgagcgcgaccgcgccatgctcgccctcacctccaccctcaacaagctcatcaagcgcctcgaggagaagcagtcccccgagctcgtcaagaagcacaagaagaagcgcgtcgtccccaagaagccccccccctccccccagcccaccgaggaggaccccgagcaccgcgtccgcgtccgcgtcaccaagctccgcctcggcggccccaaccaggacctcaccgtcctcgagatgaagcgcgagaacccccagctcaagcagatcgagggcctcgtcaaggagctcctcgagcgcgagggcctcaccgccgccggcaagatcgagatcaagatcgtccgcccctgggccgagggcaccgaggagggcgcccgctggctcaccgacgaggacacccgcaacctcaaggagatcttcttcaacatcctcgtccccggcgccgaggaggcccagaaggagcgccagcgccagaaggagctcgagtccaactaccgccgcgtctggggctcccccggcggcgagggcaccggcgacctcgacgagttcgacttctga

SEQ ID NO: 2950 - RNA, 2223 nt, synthetic construct
  misc_feature 1..2223: note = derived and/or modified sequence opt3 fromOS-9__Homo_sapiens__BAH13933
  source 1..2223: mol_type = other RNA
atggccgtggagaccctgctcagctcccttctgggcttgttactgctagggctcctgcttcccgcttctctgacaggaggtgtcggctcattgaacctcgaagaactgagtgaaatgagatacgggatcgagattctgcctctcccagttatgggaggccagagccaatcctctgacgtggtaatagtgtcgtcaaagtataaacagaggtacgaatgccggttaccggccggtgcaatccacttccagcgcgagcgagaggaagagactcccgcgtatcaggggcctggcattccagaactgcttagccccatgcgtgatgctccttgtttgctgaagacgaaagactggtggacctacgagttttgctatggaagacatatccaacagtaccacatggaggatagtgaaattaagggcgaggtcctatatctcgggtactaccagtccgccttcgactgggatgacgaaacagcaaaagcctctaagcagcataggctgaagcggtatcacagccaaacttacggaaatggttccaaatgtgatcttaacggccgcccaagagaggctgaagtgaggtttctgtgcgacgagggggcaggaatctcaggcgattatatagaccgggttgatgagcccttgagttgtagctacgtgctcaccatccgcacacctcgactgtgcccacatccgttactgagaccccctccatctgccgctccccaggccattctctgtcacccttcccttcagccagaagagtatatggcgtacgtccagaggcaagcagactcaaagcagtatggtgataaaatcattgaggagctgcaggacttggggccccaagtgtggagcgaaaccaagagtggagtagccccgcagaaaatggctggccggactctattccacctgtttcgtgagatccatttccactttttcccttctcccgacctcacagttctgaccgattggtggggcgggggaggtgtggagaagtaccatggcccatccagccttggggaccgcggaggcgaaggtacgccttcgtacctgttgccctctgtctccccactcctgtcagatcagagtttacccgtgctgtgcactctaggggccagccctaccaaggacgattccaaagactctgatttttggaagatgctcaatgagccagaagaccaggcaccgggcggagaggaagtgcccgctgaggagcaagatcctagcccagaagccgcggactcagccagtggcgcacccaacgatttccagaataacgtccaggttaaagtgataagatcccctgctgacctgattaggtttatcgaggaacttaaagggggaacaaagaagggtaaaccaaatattggccaggagcaacccgtagacgatgccgctgaggtgccgcagcgggaacctgagaaggaacgaggggacccagagcgccagagagaaatggaggaggaagaggatgaagacgaggatgaagacgaggatgaggacgaaaggcagttgctgggagagttcgaaaaggagctcgaaggcatcctgcttcccagcgatcgggaccgcctgagatctgaggtcaaagccggtatggagagggaattggagaacatcattcaagaaactgagaaggagctcgatcctgacgggctgaaaaaggaatcagagcgtgatcgggcaatgttagccctgaccagtacactaaataaactcataaagcgactggaagagaagcagagccccgaacttgtgaaaaagcacaaaaagaaaagagttgtgccaaagaagcctcccccatccccgcagcctaccgaggaggaccccgaacacagggtccgcgtgcgggtaacgaaattgagactgggcggaccaaaccaggacctcactgttctggagatgaagagggaaaatccccaattaaaacagatcgagggcctggtgaaggaacttttggagcgcgaggggctcacagctgcgggaaaaattgaaatcaagatagtccgaccttgggcagagggtaccgaagagggcgcccggtggctgactgatgaagacacacgtaacctaaaggagattttcttcaatatcctggtgccaggggctgaggaagcccagaaagagagacaaaggcagaaggaactcgagtctaactatcgccgggtctggggatcgcccggcggtgaggggaccggcgatctggacgaatttgatttttga

SEQ ID NO: 2951 - RNA, 2223 nt, synthetic construct
  misc_feature 1..2223: note = derived and/or modified sequence opt4 fromOS-9__Homo_sapiens__BAH13933
  source 1..2223: mol_type = other RNA
atggccgtggagaccctgctgagcagcctgctgggcctgctgctgctgggcctgctgctgcccgccagcctgaccggcggcgtgggcagcctgaacctggaggagctgagcgagatgagatacggcatcgagatcctgcccctgcccgtgatgggcggccagagccagagcagcgacgtggtgatcgtgagcagcaagtacaagcagagatacgagtgcagactgcccgccggcgccatccacttccagagagagagagaggaggagacccccgcctaccagggccccggcatccccgagctgctgagccccatgagagacgccccctgcctgctgaagaccaaggactggtggacctacgagttctgctacggcagacacatccagcagtaccacatggaggacagcgagatcaagggcgaggtgctgtacctgggctactaccagagcgccttcgactgggacgacgagaccgccaaggccagcaagcagcacagactgaagagataccacagccagacctacggcaacggcagcaagtgcgacctgaacggcagacccagagaggccgaggtgagattcctgtgcgacgagggcgccggcatcagcggcgactacatcgacagagtggacgagcccctgagctgcagctacgtgctgaccatcagaacccccagactgtgcccccaccccctgctgagacccccccccagcgccgccccccaggccatcctgtgccaccccagcctgcagcccgaggagtacatggcctacgtgcagagacaggccgacagcaagcagtacggcgacaagatcatcgaggagctgcaggacctgggcccccaggtgtggagcgagaccaagagcggcgtggccccccagaagatggccggcagaaccctgttccacctgttcagagagatccacttccacttcttccccagccccgacctgaccgtgctgaccgactggtggggcggcggcggcgtggagaagtaccacggccccagcagcctgggcgacagaggcggcgagggcacccccagctacctgctgcccagcgtgagccccctgctgagcgaccagagcctgcccgtgctgtgcaccctgggcgccagccccaccaaggacgacagcaaggacagcgacttctggaagatgctgaacgagcccgaggaccaggcccccggcggcgaggaggtgcccgccgaggagcaggaccccagccccgaggccgccgacagcgccagcggcgcccccaacgacttccagaacaacgtgcaggtgaaggtgatcagaagccccgccgacctgatcagattcatcgaggagctgaagggcggcaccaagaagggcaagcccaacatcggccaggagcagcccgtggacgacgccgccgaggtgccccagagagagcccgagaaggagagaggcgaccccgagagacagagagagatggaggaggaggaggacgaggacgaggacgaggacgaggacgaggacgagagacagctgctgggcgagttcgagaaggagctggagggcatcctgctgcccagcgacagagacagactgagaagcgaggtgaaggccggcatggagagagagctggagaacatcatccaggagaccgagaaggagctggaccccgacggcctgaagaaggagagcgagagagacagagccatgctggccctgaccagcaccctgaacaagctgatcaagagactggaggagaagcagagccccgagctggtgaagaagcacaagaagaagagagtggtgcccaagaagcccccccccagcccccagcccaccgaggaggaccccgagcacagagtgagagtgagagtgaccaagctgagactgggcggccccaaccaggacctgaccgtgctggagatgaagagagagaacccccagctgaagcagatcgagggcctggtgaaggagctgctggagagagagggcctgaccgccgccggcaagatcgagatcaagatcgtgagaccctgggccgagggcaccgaggagggcgccagatggctgaccgacgaggacaccagaaacctgaaggagatcttcttcaacatcctggtgcccggcgccgaggaggcccagaaggagagacagagacagaaggagctggagagcaactacagaagagtgtggggcagccccggcggcgagggcaccggcgacctggacgagttcgacttctga

SEQ ID NO: 2952 - RNA, 2223 nt, synthetic construct
  misc_feature 1..2223: note = derived and/or modified sequence opt5 fromOS-9__Homo_sapiens__BAH13933
  source 1..2223: mol_type = other RNA
atggccgtggagaccctgctcagctccctgcttggcctgctcctgcttgggctgctcctgcccgcttctctgacaggaggcgtcgggagcctcaacctggaagaactttccgaaatgagatacggaatcgagattctgcctctcccggttatgggcgggcagtctcaaagctccgacgtggtgatcgtctctagcaagtataaacagcggtacgaatgccgcctgcccgccggagcgattcacttccagagagagcgggaggaagagacgcctgcttatcagggccccggcatccctgaacttctgtcccccatgcgcgatgccccttgtctcctgaagaccaaagactggtggacatacgagttttgctatgggagacatattcaacagtaccacatggaggatagcgaaatcaagggagaggtgctgtatctcggctactaccagtctgccttcgactgggatgacgaaaccgctaaagcctccaagcagcatcggctgaagcgctatcacagccaaacatacgggaatggatctaaatgtgatcttaacggcagaccgcgggaggctgaagttcgctttctgtgcgacgagggggccggaatctccggcgattatattgacagagtggatgagcccctcagctgttcttacgtcctgaccatccggacacctcgcctttgcccccatcctctgctcagacccccgccttccgcggctccccaggccattctgtgtcaccctagcctgcagcccgaagagtatatggcctacgtgcagcggcaagctgactccaagcagtatggcgataaaatcattgaggagctccaggacctggggccccaagtttggtctgaaaccaagagcggagtggcccctcagaaaatggcgggccgcacgcttttccacctgtttagagagatccatttccactttttcccgtcccccgacctcaccgtcctgacagattggtggggagggggcggggtggagaagtaccatggacctagctctcttggcgaccggggcggggaaggaaccccctcctacctgctccctagcgtgtctcccctgctgagcgatcagtccctcccggtcctgtgcacacttggcgcctctcctaccaaggacgatagcaaagactccgatttttggaagatgctgaatgagcccgaagaccaggctcctgggggagaggaagttcccgccgaggagcaagatcctagccccgaagctgccgactctgcctccggcgctccgaacgatttccagaataacgtccaggtgaaagtgattagaagccctgcggacctcatccgctttatcgaggaactgaaagggggcacgaagaagggaaaacccaatattggccaggagcaacccgtggacgatgccgctgaggttcctcagcgggaaccggagaaggaaagaggggaccccgagcgccagcgggaaatggaggaggaagaggatgaagacgaggatgaagacgaggatgaggacgaaagacagctgcttggagagttcgaaaaggagctcgaaggcatcctgctgccttctgatcgcgaccggctcagatccgaggtgaaagccgggatggagcgcgaactggagaacattatccaagaaacagagaaggagcttgatcccgacggactgaaaaaggaaagcgagcgggatagagccatgctcgctctgacctccacactgaataaacttattaagcgcctcgaagagaagcagtctcctgaactggtcaaaaagcacaaaaagaaacgggtggttcccaagaagcctcccccgagccctcagcccaccgaggaggaccctgaacacagagtgcgggtccgcgtgaccaaactgagactcggcgggcccaaccaggacctgacagtccttgagatgaagcgggaaaatccgcaactgaaacagatcgagggcctcgtgaaggaactgctggagagagagggacttacggccgcgggcaaaatcgaaattaagatcgttcgcccttgggctgaggggaccgaagagggagcccggtggctcacagatgaagacaccagaaacctgaaggagattttcttcaatatcctggtgcccggcgccgaggaagctcagaaagagcgccaaagacagaaggaactcgagtccaactatcggcgcgtctgggggtctcctggaggcgaggggacaggcgatctggacgaatttgatttttga

SEQ ID NO: 2953 - protein, 667 aa, synthetic construct
  REGION 1..667: note = OS-9__Homo_sapiens__Q13438
MAAETLLSSLLGLLLLGLLLPASLTGGVGSLNLEELSEMRYGIEILPLPVMGGQSQSSDVVIVSSKYKQRYECRLPAGAIHFQREREEETPAYQGPGIPELLSPMRDAPCLLKTKDWWTYEFCYGRHIQQYHMEDSEIKGEVLYLGYYQSAFDWDDETAKASKQHRLKRYHSQTYGNGSKCDLNGRPREAEVRFLCDEGAGISGDYIDRVDEPLSCSYVLTIRTPRLCPHPLLRPPPSAAPQAILCHPSLQPEEYMAYVQRQADSKQYGDKIIEELQDLGPQVWSETKSGVAPQKMAGASPTKDDSKDSDFWKMLNEPEDQAPGGEEVPAEEQDPSPEAADSASGAPNDFQNNVQVKVIRSPADLIRFIEELKGGTKKGKPNIGQEQPVDDAAEVPQREPEKERGDPERQREMEEEEDEDEDEDEDEDERQLLGEFEKELEGILLPSDRDRLRSEVKAGMERELENIIQETEKELDPDGLKKESERDRAMLALTSTLNKLIKRLEEKQSPELVKKHKKKRVVPKKPPPSPQPTEEDPEHRVRVRVTKLRLGGPNQDLTVLEMKRENPQLKQIEGLVKELLEREGLTAAGKIEIKIVRPWAEGTEEGARWLTDEDTRNLKEIFFNILVPGAEEAQKERQRQKELESNYRRVWGSPGGEGTGDLDEFDF

SEQ ID NO: 2954 - RNA, 2004 nt, synthetic construct
  misc_feature 1..2004: note = OS-9__Homo_sapiens__AAB06495
  source 1..2004: mol_type = other RNA
atggcggcggaaacgctgctgtccagtttgttaggactgctgcttctgggactcctgttacccgcaagtctgaccggcggtgtcgggagcctgaacctggaggagctgagtgagatgcgttatgggatcgagatcctgccgttgcctgtcatgggagggcagagccaatcttcggacgtggtgattgtctcctctaagtacaaacagcgctatgagtgtcgcctgccagctggagctattcacttccagcgtgaaagggaggaggaaacacctgcttaccaagggcctgggatccctgagttgttgagcccaatgagagatgctccctgcttgctgaagacaaaggactggtggacatatgaattctgttatggacgccacatccagcaataccacatggaagattcagagatcaaaggtgaagtcctctatctcggctactaccaatcagccttcgactgggatgatgaaacagccaaggcctccaagcagcatcgtcttaaacgctaccacagccagacctatggcaatgggtccaagtgcgaccttaatgggaggccccgggaggccgaggttcggttcctctgtgacgagggtgcaggtatctctggggactacatcgatcgcgtggacgagcccttgtcctgctcttatgtgctgaccattcgcactcctcggctctgcccccaccctctcctccggcccccacccagtgctgcaccacaggccatcctctgtcacccttccctacagcctgaggagtacatggcctacgttcagaggcaagccgactcaaagcagtatggagataaaatcatagaggagctgcaagatctaggcccccaagtgtggagtgagaccaagtctggggtggcaccccaaaagatggcaggtgcgagcccgaccaaggatgacagtaaggactcagatttctggaagatgcttaatgagccagaggaccaggccccaggaggggaggaggtgccggctgaggagcaggacccaagccctgaggcagcagattcagcttctggtgctcccaatgattttcagaacaacgtgcaggtcaaagtcattcgaagccctgcggatttgattcgattcatagaggagctgaaaggtggaacaaaaaaggggaagccaaatataggccaagagcagcctgtggatgatgctgcagaagtccctcagagggaaccagagaaggaaaggggtgatccagaacggcagagagagatggaagaagaggaggatgaggatgaggatgaggatgaagatgaggatgaacggcagttactgggagaatttgagaaggaactggaagggatcctgcttccgtcagaccgagaccggctccgttcggaggtgaaggctggcatggagcgggaactggagaacatcatccaggagacagagaaagagctggacccagatgggctgaagaaggagtcagagcgggatcgggcaatgctggctctcacatccactctcaacaaactcatcaaaagactggaggaaaaacagagtccagagctggtgaagaagcacaagaaaaagagggttgtccccaaaaagcctcccccatcaccccaacctacagaggaggatcctgagcacagagtccgggtccgggtcaccaagctccgtctcggaggccctaatcaggatctgactgtcctcgagatgaaacgggaaaacccacagctgaaacaaatcgaggggctggtgaaggagctgctggagagggagggactcacagctgcagggaaaattgagatcaaaattgtccgcccatgggctgaagggactgaagagggtgcacgttggctgactgatgaggacacgagaaacctcaaggagatcttcttcaatatcttggtgccgggagctgaagaggcccagaaggaacgccagcggcagaaagagctggagagcaattaccgccgggtgtggggctctccaggtggggagggcacaggggacctggacgaatttgacttctga

SEQ ID NO: 2955 - RNA, 2004 nt, synthetic construct
  misc_feature 1..2004: note = derived and/or modified sequence opt1 fromOS-9__Homo_sapiens__AAB06495
  source 1..2004: mol_type = other RNA
atggccgccgagaccctgctcagctccctgctgggcctcctgctgctcgggctgctgctccccgcgagcctgaccggcggggtgggctccctgaacctcgaggagctgagcgagatgcgctacgggatcgagatcctgccgctccccgtcatgggcggccagtcccagagctccgacgtggtgatcgtcagctccaagtacaagcagcggtacgagtgccgcctgcccgccggggccatccacttccagcgggagcgcgaggaggagacgcccgcctaccagggcccggggatccccgagctgctcagccccatgcgggacgccccctgcctgctgaagaccaaggactggtggacctacgagttctgctacggccgccacatccagcagtaccacatggaggactccgagatcaagggggaggtgctctacctgggctactaccagagcgcgttcgactgggacgacgagaccgccaaggcctccaagcagcaccggctgaagcgctaccacagccagacgtacggcaacgggtccaagtgcgacctcaacggccggccgcgcgaggccgaggtgcggttcctgtgcgacgagggggcgggcatcagcggcgactacatcgaccgcgtcgacgagcccctgtcctgcagctacgtgctcaccatccggacgccccgcctgtgcccccacccgctgctccggcccccgccctccgccgcgccccaggccatcctgtgccaccccagcctgcagcccgaggagtacatggcctacgtgcagcgccaggccgacagcaagcagtacggggacaagatcatcgaggagctccaggacctgggcccccaggtctggtccgagaccaagagcggggtggccccgcagaagatggccggcgcctcccccaccaaggacgacagcaaggactccgacttctggaagatgctgaacgagcccgaggaccaggcccccgggggcgaggaggtgccggcggaggagcaggaccccagccccgaggccgccgactccgccagcggcgcccccaacgacttccagaacaacgtccaggtgaaggtgatccggtccccggcggacctcatccgcttcatcgaggagctgaagggcgggaccaagaaggggaagcccaacatcggccaggagcagcccgtcgacgacgccgccgaggtgccgcagcgggagcccgagaaggagcgcggggaccccgagcggcagcgcgagatggaggaggaggaggacgaggacgaggacgaggacgaggacgaggacgagcgccagctgctcggcgagttcgagaaggagctggagggcatcctgctccccagcgaccgggaccgcctgcggtccgaggtgaaggccgggatggagcgcgagctggagaacatcatccaggagaccgagaaggagctcgacccggacggcctgaagaaggagagcgagcgggaccgcgccatgctggcgctcacctccacgctgaacaagctgatcaagcggctggaggagaagcagagccccgagctcgtcaagaagcacaagaagaagcgcgtggtgcccaagaagcccccgcccagcccccagcccaccgaggaggacccggagcaccgggtccgcgtgcgggtgaccaagctgcgcctcgggggccccaaccaggacctgaccgtcctggagatgaagcgggagaacccccagctgaagcagatcgaggggctcgtgaaggagctgctggagcgcgagggcctcacggccgccggcaagatcgagatcaagatcgtccggccctgggccgaggggaccgaggagggcgcgcgctggctgaccgacgaggacacccggaacctgaaggagatcttcttcaacatcctcgtgccgggggccgaggaggcccagaaggagcgccagcggcagaaggagctggagtccaactaccgccgcgtgtggggctcccccggcggggagggcacgggggacctggacgagttcgacttctga

SEQ ID NO: 2956 - RNA, 2004 nt, synthetic construct
  misc_feature 1..2004: note = derived and/or modified sequence opt2 fromOS-9__Homo_sapiens__AAB06495
  source 1..2004: mol_type = other RNA
atggccgccgagaccctcctctcctccctcctcggcctcctcctcctcggcctcctcctccccgcctccctcaccggcggcgtcggctccctcaacctcgaggagctctccgagatgcgctacggcatcgagatcctccccctccccgtcatgggcggccagtcccagtcctccgacgtcgtcatcgtctcctccaagtacaagcagcgctacgagtgccgcctccccgccggcgccatccacttccagcgcgagcgcgaggaggagacccccgcctaccagggccccggcatccccgagctcctctcccccatgcgcgacgccccctgcctcctcaagaccaaggactggtggacctacgagttctgctacggccgccacatccagcagtaccacatggaggactccgagatcaagggcgaggtcctctacctcggctactaccagtccgccttcgactgggacgacgagaccgccaaggcctccaagcagcaccgcctcaagcgctaccactcccagacctacggcaacggctccaagtgcgacctcaacggccgcccccgcgaggccgaggtccgcttcctctgcgacgagggcgccggcatctccggcgactacatcgaccgcgtcgacgagcccctctcctgctcctacgtcctcaccatccgcaccccccgcctctgcccccaccccctcctccgcccccccccctccgccgccccccaggccatcctctgccacccctccctccagcccgaggagtacatggcctacgtccagcgccaggccgactccaagcagtacggcgacaagatcatcgaggagctccaggacctcggcccccaggtctggtccgagaccaagtccggcgtcgccccccagaagatggccggcgcctcccccaccaaggacgactccaaggactccgacttctggaagatgctcaacgagcccgaggaccaggcccccggcggcgaggaggtccccgccgaggagcaggacccctcccccgaggccgccgactccgcctccggcgcccccaacgacttccagaacaacgtccaggtcaaggtcatccgctcccccgccgacctcatccgcttcatcgaggagctcaagggcggcaccaagaagggcaagcccaacatcggccaggagcagcccgtcgacgacgccgccgaggtcccccagcgcgagcccgagaaggagcgcggcgaccccgagcgccagcgcgagatggaggaggaggaggacgaggacgaggacgaggacgaggacgaggacgagcgccagctcctcggcgagttcgagaaggagctcgagggcatcctcctcccctccgaccgcgaccgcctccgctccgaggtcaaggccggcatggagcgcgagctcgagaacatcatccaggagaccgagaaggagctcgaccccgacggcctcaagaaggagtccgagcgcgaccgcgccatgctcgccctcacctccaccctcaacaagctcatcaagcgcctcgaggagaagcagtcccccgagctcgtcaagaagcacaagaagaagcgcgtcgtccccaagaagccccccccctccccccagcccaccgaggaggaccccgagcaccgcgtccgcgtccgcgtcaccaagctccgcctcggcggccccaaccaggacctcaccgtcctcgagatgaagcgcgagaacccccagctcaagcagatcgagggcctcgtcaaggagctcctcgagcgcgagggcctcaccgccgccggcaagatcgagatcaagatcgtccgcccctgggccgagggcaccgaggagggcgcccgctggctcaccgacgaggacacccgcaacctcaaggagatcttcttcaacatcctcgtccccggcgccgaggaggcccagaaggagcgccagcgccagaaggagctcgagtccaactaccgccgcgtctggggctcccccggcggcgagggcaccggcgacctcgacgagttcgacttctga

SEQ ID NO: 2957 - RNA, 2004 nt, synthetic construct
  misc_feature 1..2004: note = derived and/or modified sequence opt3 fromOS-9__Homo_sapiens__AAB06495
  source 1..2004: mol_type = other RNA
atggccgctgagaccctgctcagctcccttctgggcttgttactgctagggctcctgcttcccgcatctctgacaggaggtgtgggctcattgaacctcgaagaactgagtgaaatgagatacgggatcgagattctgcctctcccagtcatgggaggccagagccaatcctctgacgttgtgatagtatcgtcaaagtataaacagaggtacgaatgccggttaccggccggtgcgatccacttccagcgcgagcgagaggaagagactcccgcttatcaggggcctgggattccagaactgcttagccccatgcgtgatgccccttgtttgctgaagacgaaagactggtggacctacgagttttgctatggcagacatatccaacagtaccacatggaggatagtgaaattaagggcgaggtgctatatctcgggtactaccagtccgcattcgactgggatgacgaaacagccaaagcctctaagcagcataggctgaagcggtatcacagccaaacttacggaaatggttccaaatgtgatcttaacggccgcccaagagaggcagaagtcaggtttctgtgcgacgagggggccggaatctcaggcgattatatagaccgggtggatgagcccttgagttgtagctacgttctcaccatccgcacacctcgactgtgcccacatccgttactgagaccccctccatctgctgctccccaggcgattctctgtcacccttcccttcagccagaagagtatatggcatacgtgcagaggcaagccgactcaaagcagtatggtgataaaatcattgaagaactgcaggacttggggccccaagtctggagcgaaaccaagagtggagtggctccgcagaaaatggccggcgcatctcctactaaggacgattccaaggacagcgatttctggaaaatgctaaatgagcccgaggaccaggctccaggcggggaagaggtacctgccgaggagcaggatccctcgccagaagcggccgactctgcatccggagctcccaacgattttcaaaataacgttcaggtgaaggtcatccggagtcctgccgacctgatacgtttcattgaggagctcaaaggtggcacaaagaaagggaagccaaatatcggacaggaacagccggtggatgacgctgccgaggtgccccaacgcgaacctgagaaagagagaggcgatccagaaaggcagcgggagatggaagaggaagaggacgaggacgaagatgaggacgaagatgaggacgaacgacagctgcttggtgagtttgagaaggaactggaggggattttgctcccctcagatcgcgacagactgaggagcgaagtcaaggcaggcatggagcgggaattagagaacatcatccaggagaccgaaaaagagctggatcctgacggactaaagaaagaatccgagcgcgatagagccatgctcgctctgacgtctactcttaataagttgattaaaaggctggaggaaaagcaaagcccagagctcgttaagaaacacaagaaaaagcgtgtggtacccaaaaagccgcctccatcaccccagcctaccgaagaggaccccgaacatcgggtgcgagtcagagtgacaaagctgaggcttggcgggccaaaccaggatctgactgttttggagatgaaacgcgagaatcctcagctcaagcaaatagaaggactggtgaaagagttactggaacgggagggtctaaccgcggcaggcaagatcgaaattaaaatcgtcagaccctgggccgaggggacagaggaaggagctaggtggctcaccgacgaggatacgcgcaacctgaaggaaatattctttaatattcttgtgccaggcgccgaggaagcacagaaggagcgacagcggcaaaaagagttggaaagtaactaccgtagagtatggggttccccgggaggcgagggaactggcgacctggacgagttcgatttttga

SEQ ID NO: 2958 - RNA, 2004 nt, synthetic construct
  misc_feature 1..2004: note = derived and/or modified sequence opt4 fromOS-9__Homo_sapiens__AAB06495
  source 1..2004: mol_type = other RNA
atggccgccgagaccctgctgagcagcctgctgggcctgctgctgctgggcctgctgctgcccgccagcctgaccggcggcgtgggcagcctgaacctggaggagctgagcgagatgagatacggcatcgagatcctgcccctgcccgtgatgggcggccagagccagagcagcgacgtggtgatcgtgagcagcaagtacaagcagagatacgagtgcagactgcccgccggcgccatccacttccagagagagagagaggaggagacccccgcctaccagggccccggcatccccgagctgctgagccccatgagagacgccccctgcctgctgaagaccaaggactggtggacctacgagttctgctacggcagacacatccagcagtaccacatggaggacagcgagatcaagggcgaggtgctgtacctgggctactaccagagcgccttcgactgggacgacgagaccgccaaggccagcaagcagcacagactgaagagataccacagccagacctacggcaacggcagcaagtgcgacctgaacggcagacccagagaggccgaggtgagattcctgtgcgacgagggcgccggcatcagcggcgactacatcgacagagtggacgagcccctgagctgcagctacgtgctgaccatcagaacccccagactgtgcccccaccccctgctgagacccccccccagcgccgccccccaggccatcctgtgccaccccagcctgcagcccgaggagtacatggcctacgtgcagagacaggccgacagcaagcagtacggcgacaagatcatcgaggagctgcaggacctgggcccccaggtgtggagcgagaccaagagcggcgtggccccccagaagatggccggcgccagccccaccaaggacgacagcaaggacagcgacttctggaagatgctgaacgagcccgaggaccaggcccccggcggcgaggaggtgcccgccgaggagcaggaccccagccccgaggccgccgacagcgccagcggcgcccccaacgacttccagaacaacgtgcaggtgaaggtgatcagaagccccgccgacctgatcagattcatcgaggagctgaagggcggcaccaagaagggcaagcccaacatcggccaggagcagcccgtggacgacgccgccgaggtgccccagagagagcccgagaaggagagaggcgaccccgagagacagagagagatggaggaggaggaggacgaggacgaggacgaggacgaggacgaggacgagagacagctgctgggcgagttcgagaaggagctggagggcatcctgctgcccagcgacagagacagactgagaagcgaggtgaaggccggcatggagagagagctggagaacatcatccaggagaccgagaaggagctggaccccgacggcctgaagaaggagagcgagagagacagagccatgctggccctgaccagcaccctgaacaagctgatcaagagactggaggagaagcagagccccgagctggtgaagaagcacaagaagaagagagtggtgcccaagaagcccccccccagcccccagcccaccgaggaggaccccgagcacagagtgagagtgagagtgaccaagctgagactgggcggccccaaccaggacctgaccgtgctggagatgaagagagagaacccccagctgaagcagatcgagggcctggtgaaggagctgctggagagagagggcctgaccgccgccggcaagatcgagatcaagatcgtgagaccctgggccgagggcaccgaggagggcgccagatggctgaccgacgaggacaccagaaacctgaaggagatcttcttcaacatcctggtgcccggcgccgaggaggcccagaaggagagacagagacagaaggagctggagagcaactacagaagagtgtggggcagccccggcggcgagggcaccggcgacctggacgagttcgacttctga

SEQ ID NO: 2959 - RNA, 2004 nt, synthetic construct
  misc_feature 1..2004: note = derived and/or modified sequence opt5 fromOS-9__Homo_sapiens__AAB06495
  source 1..2004: mol_type = other RNA
atggccgctgagaccctgctcagctccctgcttggcctgctcctgcttgggctgctcctgcccgcctctctgacaggaggcgtggggagcctcaacctggaagaactttccgaaatgagatacggaatcgagattctgcctctcccggtcatgggcgggcagtctcaaagctccgacgttgtgatcgtgtctagcaagtataaacagcggtacgaatgccgcctgcccgcgggagctattcacttccagagagagcgggaggaagagacgcctgcctatcagggccccggcatccctgaacttctgtcccccatgcgcgatgccccttgtctcctgaagaccaaagactggtggacatacgagttttgctatgggagacatattcaacagtaccacatggaggatagcgaaatcaagggagaggtcctgtatctcggctactaccagtctgctttcgactgggatgacgaaaccgccaaggcttccaaacagcatcggctgaagcgctatcacagccaaacatacgggaatggatctaaatgtgatcttaacggcagaccgcgggaggccgaagtgcgctttctgtgcgacgagggggcgggaatctccggcgattatattgacagagttgatgagcccctcagctgttcttacgtgctgaccatccggacacctcgcctttgcccccatcctctgctcagacccccgccttccgccgctccccaggccattctgtgtcaccctagcctgcagcccgaagagtatatggcttacgtccagcggcaagccgactccaagcagtatggcgataaaatcattgaagaactccaggacctggggccccaagtgtggtctgaaaccaagagcggagttgcgcctcagaaaatggccggcgcttccccgacgaaggacgatagcaaggactctgatttctggaaaatgcttaatgagcccgaggaccaggcccctgggggagaagaggtgcccgctgaggagcaggatccttcccccgaagccgccgacagcgcttctggcgcgccgaacgattttcaaaataacgtccaggtgaaggtgatccgcagccctgccgacctgattagattcatcgaggagctcaaagggggaaccaagaaaggcaagcccaatatcggccaggaacagcctgtcgatgacgctgccgaggttccccaacgggaacctgagaaagagagaggggatcccgaacgccagcgggagatggaagaggaagaggacgaggacgaagatgaggacgaagatgaggacgaaagacagctgcttggagagtttgagaaggaactggagggcattctcctgccgtccgatcgcgaccggctgagatctgaagtgaaggccgggatggagcgcgaactcgagaacatcattcaggagacagaaaaagagctggatcctgacggacttaagaaagaaagcgagcgggatagagctatgctggccctcacctccacactgaataagctgatcaaacgccttgaggaaaagcaaagccccgagctcgtgaagaaacacaagaaaaagcgggtcgtgcccaaaaagcctccgccctctcctcagcccaccgaagaggaccctgaacatagagttcgcgtgcgggtcacgaagctgagactgggcgggcccaaccaggatctcacagtgctggagatgaaacgggagaatcctcagcttaagcaaattgaaggcctggttaaagagctcctggaacgcgagggactgaccgcggctggcaagatcgaaatcaaaattgtgagaccctgggccgaggggacagaggaaggagcccggtggcttaccgacgaggataccagaaacctcaaggaaatcttctttaatattctggtcccgggcgctgaggaagcccagaaggagcgccagcggcaaaaagagctggaatccaactacagacgcgtgtgggggagccctggaggcgaggggacaggcgacctcgacgagttcgatttttga

SEQ ID NO: 2960 - protein, 100 aa, synthetic construct
  REGION 1..100: note = osteocalcin__Homo_sapiens__P02818
MRALTLLALLALAALCIAGQAGAKPSGAESSKGAAFVSKQEGSEVVKRPRRYLYQWLGAPVPYPDPLEPRREVCELNPDCDELADHIGFQEAYRRFYGPV

SEQ ID NO: 2961 - RNA, 303 nt, synthetic construct
  misc_feature 1..303: note = osteocalcin__Homo_sapiens__AAI13433
  source 1..303: mol_type = other RNA
atgagagccctcacactcctcgccctattggccctggccgcactttgcatcgctggccaggcaggtgcgaagcccagcggtgcagagtccagcaaaggtgcagcctttgtgtccaagcaggagggcagcgaggtagtgaagagacccaggcgctacctgtatcaatggctgggagccccagtcccctacccggatcccctggagcccaggagggaggtgtgtgagctcaatccggactgtgacgagttggctgaccacatcggctttcaggaggcctatcggcgcttctacggcccggtctag

SEQ ID NO: 2962 - RNA, 303 nt, synthetic construct
  misc_feature 1..303: note = derived and/or modified sequence opt1 fromosteocalcin__Homo_sapiens__AAI13433
  source 1..303: mol_type = other RNA
atgcgcgccctgaccctcctggccctgctcgcgctggccgccctgtgcatcgccggccaggccggggcgaagcccagcggcgccgagtccagcaagggggccgccttcgtgtccaagcaggagggcagcgaggtcgtgaagcggccgcgccggtacctctaccagtggctgggggcgcccgtgccctaccccgacccgctggagccccgccgggaggtctgcgagctcaaccccgactgcgacgagctggccgaccacatcggcttccaggaggcctaccgccggttctacggccccgtgtga

SEQ ID NO: 2963 - RNA, 303 nt, synthetic construct
  misc_feature 1..303: note = derived and/or modified sequence opt2 fromosteocalcin__Homo_sapiens__AAI13433
  source 1..303: mol_type = other RNA
atgcgcgccctcaccctcctcgccctcctcgccctcgccgccctctgcatcgccggccaggccggcgccaagccctccggcgccgagtcctccaagggcgccgccttcgtctccaagcaggagggctccgaggtcgtcaagcgcccccgccgctacctctaccagtggctcggcgcccccgtcccctaccccgaccccctcgagccccgccgcgaggtctgcgagctcaaccccgactgcgacgagctcgccgaccacatcggcttccaggaggcctaccgccgcttctacggccccgtctga

SEQ ID NO: 2964 - RNA, 303 nt, synthetic construct
  misc_feature 1..303: note = derived and/or modified sequence opt3 fromosteocalcin__Homo_sapiens__AAI13433
  source 1..303: mol_type = other RNA
atgagagccctgaccctccttgctctgttggcattagccgcgctgtgcatcgctggccaggccggggcaaagcccagcggagccgagtcctctaaaggtgctgcattcgtgtcaaagcaagaaggcagtgaggtcgttaaaaggcctcggcgctacctatatcagtggctcggggccccagtgccgtaccccgaccctctggaaccacgacgtgaggtatgtgaacttaaccccgattgcgacgagctggctgatcacattggatttcaggaggcctatagaaggttctacggccctgtgtga

SEQ ID NO: 2965 - RNA, 303 nt, synthetic construct
  misc_feature 1..303: note = derived and/or modified sequence opt4 fromosteocalcin__Homo_sapiens__AAI13433
  source 1..303: mol_type = other RNA
atgagagccctgaccctgctggccctgctggccctggccgccctgtgcatcgccggccaggccggcgccaagcccagcggcgccgagagcagcaagggcgccgccttcgtgagcaagcaggagggcagcgaggtggtgaagagacccagaagatacctgtaccagtggctgggcgcccccgtgccctaccccgaccccctggagcccagaagagaggtgtgcgagctgaaccccgactgcgacgagctggccgaccacatcggcttccaggaggcctacagaagattctacggccccgtgtga

SEQ ID NO: 2966 - RNA, 303 nt, synthetic construct
  misc_feature 1..303: note = derived and/or modified sequence opt5 fromosteocalcin__Homo_sapiens__AAI13433
  source 1..303: mol_type = other RNA
atgagagccctgaccctcctggcccttctggctctcgcggctctgtgcatcgccggccaggccggggctaagcccagcggagccgagtcctctaaaggcgctgccttcgtgagcaagcaagaagggtccgaggtcgttaaacggcctcgcagatacctttatcagtggctgggagcgccggtgccctaccctgaccccctcgaacctcggcgcgaggtgtgtgaactgaaccccgattgcgacgagctggccgatcacattggctttcaggaggcttatagacggttctacgggcctgtctga

SEQ ID NO: 2967 - protein, 314 aa, synthetic construct
  REGION 1..314: note = osteopontin__Homo_sapiens__A0A024RDE2
MRIAVICFCLLGITCAIPVKQADSGSSEEKQLYNKYPDAVATWLNPDPSQKQNLLAPQNAVSSEETNDFKQETLPSKSNESHDHMDDMDDEDDDDHVDSQDSIDSNDSDDVDDTDDSHQSDESHHSDESDELVTDFPTDLPATEVFTPVVPTVDTYDGRGDSVVYGLRSKSKKFRRPDIQYPDATDEDITSHMESEELNGAYKAIPVAQDLNAPSDWDSRGKDSYETSQLDDQSAETHSHKQSRLYKRKANDESNEHSDVIDSQELSKVSREFHSHEFHSHEDMLVVDPKSKEEDKHLKFRISHELDSASSEVN

SEQ ID NO: 2968 - RNA, 945 nt, synthetic construct
  misc_feature 1..945: note = osteopontin__Homo_sapiens__EAX06008
  source 1..945: mol_type = other RNA
atgagaattgcagtgatttgcttttgcctcctaggcatcacctgtgccataccagttaaacaggctgattctggaagttctgaggaaaagcagctttacaacaaatacccagatgctgtggccacatggctaaaccctgacccatctcagaagcagaatctcctagccccacagaatgctgtgtcctctgaagaaaccaatgactttaaacaagagacccttccaagtaagtccaacgaaagccatgaccacatggatgatatggatgatgaagatgatgatgaccatgtggacagccaggactccattgactcgaacgactctgatgatgtagatgacactgatgattctcaccagtctgatgagtctcaccattctgatgaatctgatgaactggtcactgattttcccacggacctgccagcaaccgaagttttcactccagttgtccccacagtagacacatatgatggccgaggtgatagtgtggtttatggactgaggtcaaaatctaagaagtttcgcagacctgacatccagtaccctgatgctacagacgaggacatcacctcacacatggaaagcgaggagttgaatggtgcatacaaggccatccccgttgcccaggacctgaacgcgccttctgattgggacagccgtgggaaggacagttatgaaacgagtcagctggatgaccagagtgctgaaacccacagccacaagcagtccagattatataagcggaaagccaatgatgagagcaatgagcattccgatgtgattgatagtcaggaactttccaaagtcagccgtgaattccacagccatgaatttcacagccatgaagatatgctggttgtagaccccaaaagtaaggaagaagataaacacctgaaatttcgtatttctcatgaattagatagtgcatcttctgaggtcaattaa

SEQ ID NO: 2969 - RNA, 945 nt, synthetic construct
  misc_feature 1..945: note = derived and/or modified sequence opt1 fromosteopontin__Homo_sapiens__EAX06008
  source 1..945: mol_type = other RNA
atgcgcatcgccgtgatctgcttctgcctgctcggcatcacgtgcgccatccccgtcaagcaggcggacagcgggtccagcgaggagaagcagctgtacaacaagtacccggacgccgtggccacctggctgaaccccgacccctcccagaagcagaacctcctggcgccccagaacgccgtgagctccgaggagaccaacgacttcaagcaggagaccctgccgagcaagtccaacgagagccacgaccacatggacgacatggacgacgaggacgacgacgaccacgtcgactcccaggacagcatcgactccaacgacagcgacgacgtggacgacaccgacgactcccaccagagcgacgagtcccaccacagcgacgagtccgacgagctcgtgaccgacttccccacggacctgcccgccaccgaggtcttcacccccgtggtgccgaccgtcgacacgtacgacggccgcggggacagcgtggtgtacggcctgcggtccaagagcaagaagttccggcgccccgacatccagtaccccgacgccaccgacgaggacatcaccagccacatggagtccgaggagctcaacggggcctacaaggccatccccgtcgcgcaggacctgaacgccccgagcgactgggactcccggggcaaggacagctacgagacctcccagctggacgaccagagcgccgagacgcactcccacaagcagagccgcctctacaagcggaaggccaacgacgagtccaacgagcacagcgacgtgatcgactcccaggagctgagcaaggtgtcccgcgagttccacagccacgagttccactcccacgaggacatgctggtcgtggaccccaagagcaaggaggaggacaagcacctcaagttccggatctcccacgagctggacagcgcctccagcgaggtgaactga

SEQ ID NO: 2970 - RNA, 945 nt, synthetic construct
  misc_feature 1..945: note = derived and/or modified sequence opt2 fromosteopontin__Homo_sapiens__EAX06008
  source 1..945: mol_type = other RNA
atgcgcatcgccgtcatctgcttctgcctcctcggcatcacctgcgccatccccgtcaagcaggccgactccggctcctccgaggagaagcagctctacaacaagtaccccgacgccgtcgccacctggctcaaccccgacccctcccagaagcagaacctcctcgccccccagaacgccgtctcctccgaggagaccaacgacttcaagcaggagaccctcccctccaagtccaacgagtcccacgaccacatggacgacatggacgacgaggacgacgacgaccacgtcgactcccaggactccatcgactccaacgactccgacgacgtcgacgacaccgacgactcccaccagtccgacgagtcccaccactccgacgagtccgacgagctcgtcaccgacttccccaccgacctccccgccaccgaggtcttcacccccgtcgtccccaccgtcgacacctacgacggccgcggcgactccgtcgtctacggcctccgctccaagtccaagaagttccgccgccccgacatccagtaccccgacgccaccgacgaggacatcacctcccacatggagtccgaggagctcaacggcgcctacaaggccatccccgtcgcccaggacctcaacgccccctccgactgggactcccgcggcaaggactcctacgagacctcccagctcgacgaccagtccgccgagacccactcccacaagcagtcccgcctctacaagcgcaaggccaacgacgagtccaacgagcactccgacgtcatcgactcccaggagctctccaaggtctcccgcgagttccactcccacgagttccactcccacgaggacatgctcgtcgtcgaccccaagtccaaggaggaggacaagcacctcaagttccgcatctcccacgagctcgactccgcctcctccgaggtcaactga

SEQ ID NO: 2971 - RNA, 945 nt, synthetic construct
  misc_feature 1..945: note = derived and/or modified sequence opt3 fromosteopontin__Homo_sapiens__EAX06008
  source 1..945: mol_type = other RNA
atgagaatcgccgtgatttgcttctgtctgctcggcataacctgcgctatccccgtcaagcaggcagacagcgggtcctctgaggaaaaacaactttacaacaagtatcctgatgccgttgcgacatggctgaatccagacccgtcacagaaacagaacttgttagctccccagaatgccgtgagtagcgaggaaactaacgattttaagcaagagacgctgccttccaaatctaatgaatcgcacgaccatatggatgacatggatgacgaggatgacgatgaccacgtagattcacaggacagcattgacagtaacgattccgacgatgtggacgataccgacgattctcatcagagcgacgagtcccaccattcagatgaaagtgacgagctagtcacagatttcccaactgacctccccgcaaccgaagtgtttacacctgttgtgccaaccgtcgacacttacgatggaaggggtgacagcgtggtatatggcctgcggtctaagtccaagaaattccgccgacccgatatccagtaccctgacgccacagatgaggacattacctcacacatggagagcgaggaacttaatggggcttataaggcaatcccagttgcccaagatctgaacgctccgagtgactgggattctcgtggaaaagactcctacgaaacgagccagttggatgaccagtcggccgagactcactctcataagcagtccagactctataaaaggaaggcgaatgatgaatcaaacgagcacagtgacgtgatagacagccaagagctgtccaaggtctctcgggaatttcatagccacgagttccactcacatgaagatatgctggtggtggaccccaaaagtaaggaggaagataaacacctcaagtttcgcatctcccatgagttagacagcgcatcttcagaggtcaattga

SEQ ID NO: 2972 - RNA, 945 nt, synthetic construct
  misc_feature 1..945: note = derived and/or modified sequence opt4 fromosteopontin__Homo_sapiens__EAX06008
  source 1..945: mol_type = other RNA
atgagaatcgccgtgatctgcttctgcctgctgggcatcacctgcgccatccccgtgaagcaggccgacagcggcagcagcgaggagaagcagctgtacaacaagtaccccgacgccgtggccacctggctgaaccccgaccccagccagaagcagaacctgctggccccccagaacgccgtgagcagcgaggagaccaacgacttcaagcaggagaccctgcccagcaagagcaacgagagccacgaccacatggacgacatggacgacgaggacgacgacgaccacgtggacagccaggacagcatcgacagcaacgacagcgacgacgtggacgacaccgacgacagccaccagagcgacgagagccaccacagcgacgagagcgacgagctggtgaccgacttccccaccgacctgcccgccaccgaggtgttcacccccgtggtgcccaccgtggacacctacgacggcagaggcgacagcgtggtgtacggcctgagaagcaagagcaagaagttcagaagacccgacatccagtaccccgacgccaccgacgaggacatcaccagccacatggagagcgaggagctgaacggcgcctacaaggccatccccgtggcccaggacctgaacgcccccagcgactgggacagcagaggcaaggacagctacgagaccagccagctggacgaccagagcgccgagacccacagccacaagcagagcagactgtacaagagaaaggccaacgacgagagcaacgagcacagcgacgtgatcgacagccaggagctgagcaaggtgagcagagagttccacagccacgagttccacagccacgaggacatgctggtggtggaccccaagagcaaggaggaggacaagcacctgaagttcagaatcagccacgagctggacagcgccagcagcgaggtgaactga

SEQ ID NO: 2973 - RNA, 945 nt, synthetic construct
  misc_feature 1..945: note = derived and/or modified sequence opt5 fromosteopontin__Homo_sapiens__EAX06008
  source 1..945: mol_type = other RNA
atgagaatcgccgtgatttgcttctgtctgctcggcattacctgcgctatccccgtcaagcaggccgacagcgggtcctctgaggaaaaacaactgtacaacaagtatcctgatgcggttgctacatggcttaatccggaccccagccagaaacagaacctgctcgcccctcagaatgccgtgtcctctgaggaaacgaacgattttaagcaagagaccctgcccagcaaatccaatgaatctcacgaccatatggatgacatggatgacgaggatgacgatgaccacgtggatagccaggactccatcgacagcaacgattctgacgatgtcgacgatacagacgattcccatcagagcgacgagtctcaccattccgatgaaagcgacgagcttgtgaccgatttccctacagacctgcccgctaccgaagtttttacacctgtggtcccgaccgtggacacgtacgatggacggggcgactctgttgtgtatgggctccgctccaagagcaagaaattcagacggcccgatattcagtaccctgacgccaccgatgaggacatcacatcccacatggagtctgaggaactgaatggagcttataaggccatccccgtcgcgcaagatctgaacgcccctagcgactgggattcccgcggcaaagacagctacgaaacctctcagctcgatgaccagtccgctgagacacacagccataagcagtctagactgtataaacggaaggccaatgatgaaagcaacgagcactccgacgtgattgactctcaagagcttagcaaggtgtcccgcgaatttcatagccacgagttccactctcatgaagatatgctggtcgttgaccccaaatccaaggaggaagataaacacctcaagtttagaatcagccatgagctggactctgcttccagcgaggtgaattga

SEQ ID NO: 2974 - protein, 300 aa, synthetic construct
  REGION 1..300: note = osteopontin__Homo_sapiens__A0A024RDE6
MRIAVICFCLLGITCAIPVKQADSGSSEEKQLYNKYPDAVATWLNPDPSQKQNLLAPQTLPSKSNESHDHMDDMDDEDDDDHVDSQDSIDSNDSDDVDDTDDSHQSDESHHSDESDELVTDFPTDLPATEVFTPVVPTVDTYDGRGDSVVYGLRSKSKKFRRPDIQYPDATDEDITSHMESEELNGAYKAIPVAQDLNAPSDWDSRGKDSYETSQLDDQSAETHSHKQSRLYKRKANDESNEHSDVIDSQELSKVSREFHSHEFHSHEDMLVVDPKSKEEDKHLKFRISHELDSASSEVN

SEQ ID NO: 2975 - RNA, 903 nt, synthetic construct
  misc_feature 1..903: note = osteopontin__Homo_sapiens__EAX06009
  source 1..903: mol_type = other RNA
atgagaattgcagtgatttgcttttgcctcctaggcatcacctgtgccataccagttaaacaggctgattctggaagttctgaggaaaagcagctttacaacaaatacccagatgctgtggccacatggctaaaccctgacccatctcagaagcagaatctcctagccccacagacccttccaagtaagtccaacgaaagccatgaccacatggatgatatggatgatgaagatgatgatgaccatgtggacagccaggactccattgactcgaacgactctgatgatgtagatgacactgatgattctcaccagtctgatgagtctcaccattctgatgaatctgatgaactggtcactgattttcccacggacctgccagcaaccgaagttttcactccagttgtccccacagtagacacatatgatggccgaggtgatagtgtggtttatggactgaggtcaaaatctaagaagtttcgcagacctgacatccagtaccctgatgctacagacgaggacatcacctcacacatggaaagcgaggagttgaatggtgcatacaaggccatccccgttgcccaggacctgaacgcgccttctgattgggacagccgtgggaaggacagttatgaaacgagtcagctggatgaccagagtgctgaaacccacagccacaagcagtccagattatataagcggaaagccaatgatgagagcaatgagcattccgatgtgattgatagtcaggaactttccaaagtcagccgtgaattccacagccatgaatttcacagccatgaagatatgctggttgtagaccccaaaagtaaggaagaagataaacacctgaaatttcgtatttctcatgaattagatagtgcatcttctgaggtcaattaa

SEQ ID NO: 2976 - RNA, 903 nt, synthetic construct
  misc_feature 1..903: note = derived and/or modified sequence opt1 fromosteopontin__Homo_sapiens__EAX06009
  source 1..903: mol_type = other RNA
atgcgcatcgccgtgatctgcttctgcctgctcggcatcacgtgcgccatccccgtcaagcaggcggacagcgggtccagcgaggagaagcagctgtacaacaagtacccggacgccgtggccacctggctgaaccccgacccctcccagaagcagaacctcctggcgccccagaccctgccgagcaagtccaacgagagccacgaccacatggacgacatggacgacgaggacgacgacgaccacgtggactcccaggacagcatcgactccaacgacagcgacgacgtcgacgacaccgacgactcccaccagagcgacgagtcccaccacagcgacgagtccgacgagctcgtgaccgacttccccaccgacctgcccgccacggaggtgttcacccccgtcgtgccgaccgtggacacctacgacggccgcggggacagcgtcgtgtacggcctgcggtccaagagcaagaagttccggcgccccgacatccagtaccccgacgccacggacgaggacatcacctcccacatggagagcgaggagctcaacggggcctacaaggccatccccgtggcccaggacctgaacgcgccgagcgactgggactcccggggcaaggacagctacgagacctcccagctggacgaccagagcgccgagacccactcccacaagcagagccgcctctacaagcggaaggccaacgacgagtccaacgagcacagcgacgtcatcgactcccaggagctgagcaaggtgtcccgcgagttccacagccacgagttccactcccacgaggacatgctggtggtcgaccccaagagcaaggaggaggacaagcacctcaagttccggatctcccacgagctggacagcgcctccagcgaggtgaactga

SEQ ID NO: 2977 - RNA, 903 nt, synthetic construct
  misc_feature 1..903: note = derived and/or modified sequence opt2 fromosteopontin__Homo_sapiens__EAX06009
  source 1..903: mol_type = other RNA
atgcgcatcgccgtcatctgcttctgcctcctcggcatcacctgcgccatccccgtcaagcaggccgactccggctcctccgaggagaagcagctctacaacaagtaccccgacgccgtcgccacctggctcaaccccgacccctcccagaagcagaacctcctcgccccccagaccctcccctccaagtccaacgagtcccacgaccacatggacgacatggacgacgaggacgacgacgaccacgtcgactcccaggactccatcgactccaacgactccgacgacgtcgacgacaccgacgactcccaccagtccgacgagtcccaccactccgacgagtccgacgagctcgtcaccgacttccccaccgacctccccgccaccgaggtcttcacccccgtcgtccccaccgtcgacacctacgacggccgcggcgactccgtcgtctacggcctccgctccaagtccaagaagttccgccgccccgacatccagtaccccgacgccaccgacgaggacatcacctcccacatggagtccgaggagctcaacggcgcctacaaggccatccccgtcgcccaggacctcaacgccccctccgactgggactcccgcggcaaggactcctacgagacctcccagctcgacgaccagtccgccgagacccactcccacaagcagtcccgcctctacaagcgcaaggccaacgacgagtccaacgagcactccgacgtcatcgactcccaggagctctccaaggtctcccgcgagttccactcccacgagttccactcccacgaggacatgctcgtcgtcgaccccaagtccaaggaggaggacaagcacctcaagttccgcatctcccacgagctcgactccgcctcctccgaggtcaactga

SEQ ID NO: 2978 - RNA, 903 nt, synthetic construct
  misc_feature 1..903: note = derived and/or modified sequence opt3 fromosteopontin__Homo_sapiens__EAX06009
  source 1..903: mol_type = other RNA
atgagaatcgccgtgatttgcttctgtctgctcggcataacctgcgctatccccgtcaagcaggcagacagcgggtcctctgaggaaaaacaactttacaacaagtatcctgatgccgttgcgacatggctgaatccagacccgtcacagaaacagaacttgttagctccccagactctgcctagtaagagcaatgagtcccacgatcatatggacgatatggacgatgaagacgatgacgatcacgtggactctcaagattcgattgactcaaacgacagcgatgacgtagatgacacggatgacagtcatcagtccgatgagtctcaccatagcgacgaatccgatgagctagtgaccgactttccaacagatctccccgccactgaggtcttcacccctgtggttccaacagtggacacctacgacggaaggggtgattcagtcgtgtatggcctgcggagtaaaagcaagaagtttcgccgacccgacatccagtaccctgatgcaactgacgaagatattacatctcacatggagtccgaagaacttaatggggcctataaagctatcccagtagcacaggacctgaacgccccgtcagattgggacagccgtggaaaggatagttacgagacctctcaattggacgatcagtccgctgaaacgcacagccataaacagtcgagactctataagaggaaagccaatgacgagtctaacgaacactccgatgttatagactcacaggagctgagtaaggtgagccgggagttccattcccacgagtttcactctcatgaggacatgctggtcgtggatcccaagagcaaagaagaggacaagcacctcaaattccgcatctcacatgaattagatagtgcgtccagcgaggtgaattga

SEQ ID NO: 2979 - RNA, 903 nt, synthetic construct
  misc_feature 1..903: note = derived and/or modified sequence opt4 fromosteopontin__Homo_sapiens__EAX06009
  source 1..903: mol_type = other RNA
atgagaatcgccgtgatctgcttctgcctgctgggcatcacctgcgccatccccgtgaagcaggccgacagcggcagcagcgaggagaagcagctgtacaacaagtaccccgacgccgtggccacctggctgaaccccgaccccagccagaagcagaacctgctggccccccagaccctgcccagcaagagcaacgagagccacgaccacatggacgacatggacgacgaggacgacgacgaccacgtggacagccaggacagcatcgacagcaacgacagcgacgacgtggacgacaccgacgacagccaccagagcgacgagagccaccacagcgacgagagcgacgagctggtgaccgacttccccaccgacctgcccgccaccgaggtgttcacccccgtggtgcccaccgtggacacctacgacggcagaggcgacagcgtggtgtacggcctgagaagcaagagcaagaagttcagaagacccgacatccagtaccccgacgccaccgacgaggacatcaccagccacatggagagcgaggagctgaacggcgcctacaaggccatccccgtggcccaggacctgaacgcccccagcgactgggacagcagaggcaaggacagctacgagaccagccagctggacgaccagagcgccgagacccacagccacaagcagagcagactgtacaagagaaaggccaacgacgagagcaacgagcacagcgacgtgatcgacagccaggagctgagcaaggtgagcagagagttccacagccacgagttccacagccacgaggacatgctggtggtggaccccaagagcaaggaggaggacaagcacctgaagttcagaatcagccacgagctggacagcgccagcagcgaggtgaactga

SEQ ID NO: 2980 - RNA, 903 nt, synthetic construct
  misc_feature 1..903: note = derived and/or modified sequence opt5 fromosteopontin__Homo_sapiens__EAX06009
  source 1..903: mol_type = other RNA
atgagaatcgccgtgatttgcttctgtctgctcggcattacctgcgctatccccgtcaagcaggccgacagcgggtcctctgaggaaaaacaactgtacaacaagtatcctgatgcggttgctacatggcttaatccggaccccagccagaaacagaacctgctcgcccctcagacgctgccctccaagtctaatgagagccacgatcatatggacgatatggacgatgaagacgatgacgatcacgtggactcccaagattctatcgacagcaacgactccgatgacgtggatgacaccgatgacagccatcagtctgatgagtcccaccatagcgacgaatctgatgagcttgtcacagactttcctaccgatctgcccgccacagaggtgttcacccctgttgtgccgacagtcgacacctacgacggacggggcgattccgtggtttatgggctccgcagcaaatctaagaagtttagacggcccgacattcagtaccctgatgctacggacgaagatatcacctcccacatggagagcgaagaactgaatggagcctataaagctatccccgtggcccaggacctgaacgcgccttccgattgggactctcgcggcaaggatagctacgagacatcccaactcgacgatcagagcgccgaaacccactctcataaacagtccagactgtataagcggaaagctaatgacgagagcaacgaacactctgatgtcattgacagccaggagctttccaaggtgtctcgcgagttccatagccacgagtttcactcccatgaggacatgctggtggtcgatcccaagagcaaagaagaggacaagcacctcaaattcagaatctctcatgaactggattccgccagctctgaggttaattga

SEQ ID NO: 2981 - protein, 287 aa, synthetic construct
  REGION 1..287: note = osteopontin__Homo_sapiens__A0A024RDJ0
MRIAVICFCLLGITCAIPVKQADSGSSEEKQNAVSSEETNDFKQETLPSKSNESHDHMDDMDDEDDDDHVDSQDSIDSNDSDDVDDTDDSHQSDESHHSDESDELVTDFPTDLPATEVFTPVVPTVDTYDGRGDSVVYGLRSKSKKFRRPDIQYPDATDEDITSHMESEELNGAYKAIPVAQDLNAPSDWDSRGKDSYETSQLDDQSAETHSHKQSRLYKRKANDESNEHSDVIDSQELSKVSREFHSHEFHSHEDMLVVDPKSKEEDKHLKFRISHELDSASSEVN

SEQ ID NO: 2982 - RNA, 864 nt, synthetic construct
  misc_feature 1..864: note = osteopontin__Homo_sapiens__EAX06010
  source 1..864: mol_type = other RNA
atgagaattgcagtgatttgcttttgcctcctaggcatcacctgtgccataccagttaaacaggctgattctggaagttctgaggaaaagcagaatgctgtgtcctctgaagaaaccaatgactttaaacaagagacccttccaagtaagtccaacgaaagccatgaccacatggatgatatggatgatgaagatgatgatgaccatgtggacagccaggactccattgactcgaacgactctgatgatgtagatgacactgatgattctcaccagtctgatgagtctcaccattctgatgaatctgatgaactggtcactgattttcccacggacctgccagcaaccgaagttttcactccagttgtccccacagtagacacatatgatggccgaggtgatagtgtggtttatggactgaggtcaaaatctaagaagtttcgcagacctgacatccagtaccctgatgctacagacgaggacatcacctcacacatggaaagcgaggagttgaatggtgcatacaaggccatccccgttgcccaggacctgaacgcgccttctgattgggacagccgtgggaaggacagttatgaaacgagtcagctggatgaccagagtgctgaaacccacagccacaagcagtccagattatataagcggaaagccaatgatgagagcaatgagcattccgatgtgattgatagtcaggaactttccaaagtcagccgtgaattccacagccatgaatttcacagccatgaagatatgctggttgtagaccccaaaagtaaggaagaagataaacacctgaaatttcgtatttctcatgaattagatagtgcatcttctgaggtcaattaa

SEQ ID NO: 2983 - RNA, 864 nt, synthetic construct
  misc_feature 1..864: note = derived and/or modified sequence opt1 fromosteopontin__Homo_sapiens__EAX06010
  source 1..864: mol_type = other RNA
atgcgcatcgccgtgatctgcttctgcctgctcggcatcacgtgcgccatccccgtcaagcaggcggacagcgggtccagcgaggagaagcagaacgccgtgtccagcgaggagaccaacgacttcaagcaggagaccctgccgtccaagagcaacgagtcccacgaccacatggacgacatggacgacgaggacgacgacgaccacgtggacagccaggactccatcgacagcaacgactccgacgacgtcgacgacaccgacgacagccaccagtccgacgagagccaccactccgacgagagcgacgagctggtgaccgacttccccaccgacctccccgccacggaggtgttcacccccgtcgtgccgaccgtggacacctacgacggccgcggggactccgtcgtgtacggcctgcggagcaagtccaagaagttccggcgccccgacatccagtaccccgacgccacggacgaggacatcaccagccacatggagagcgaggagctgaacggggcctacaaggcgatccccgtggcccaggacctcaacgccccgtccgactgggacagccggggcaaggactcctacgagaccagccagctggacgaccagtccgccgagacccacagccacaagcagtcccgcctgtacaagcggaaggcgaacgacgagagcaacgagcactccgacgtcatcgacagccaggagctctccaaggtgagccgcgagttccactcccacgagttccacagccacgaggacatgctggtggtcgaccccaagtccaaggaggaggacaagcacctgaagttccggatcagccacgagctcgactccgccagctccgaggtgaactga

SEQ ID NO: 2984 - RNA, 864 nt, synthetic construct
  misc_feature 1..864: note = derived and/or modified sequence opt2 fromosteopontin__Homo_sapiens__EAX06010
  source 1..864: mol_type = other RNA
atgcgcatcgccgtcatctgcttctgcctcctcggcatcacctgcgccatccccgtcaagcaggccgactccggctcctccgaggagaagcagaacgccgtctcctccgaggagaccaacgacttcaagcaggagaccctcccctccaagtccaacgagtcccacgaccacatggacgacatggacgacgaggacgacgacgaccacgtcgactcccaggactccatcgactccaacgactccgacgacgtcgacgacaccgacgactcccaccagtccgacgagtcccaccactccgacgagtccgacgagctcgtcaccgacttccccaccgacctccccgccaccgaggtcttcacccccgtcgtccccaccgtcgacacctacgacggccgcggcgactccgtcgtctacggcctccgctccaagtccaagaagttccgccgccccgacatccagtaccccgacgccaccgacgaggacatcacctcccacatggagtccgaggagctcaacggcgcctacaaggccatccccgtcgcccaggacctcaacgccccctccgactgggactcccgcggcaaggactcctacgagacctcccagctcgacgaccagtccgccgagacccactcccacaagcagtcccgcctctacaagcgcaaggccaacgacgagtccaacgagcactccgacgtcatcgactcccaggagctctccaaggtctcccgcgagttccactcccacgagttccactcccacgaggacatgctcgtcgtcgaccccaagtccaaggaggaggacaagcacctcaagttccgcatctcccacgagctcgactccgcctcctccgaggtcaactga

SEQ ID NO: 2985 - RNA, 864 nt, synthetic construct
  misc_feature 1..864: note = derived and/or modified sequence opt3 fromosteopontin__Homo_sapiens__EAX06010
  source 1..864: mol_type = other RNA
atgagaatcgccgtgatttgcttctgtctgctcggcataacctgcgctatccccgtcaagcaggcagacagcgggtcctctgaggaaaaacaaaacgccgtttcaagtgaggaaacaaatgattttaagcaggagactcttcctagcaaatccaacgaatctcacgaccatatggatgacatggatgacgaggatgacgatgaccacgtggattcgcaggactcaattgatagcaatgacagtgacgatgtagacgatacggacgattcccatcagtctgacgagagccaccattccgatgaatcagacgagctggtgaccgatttcccaacagacttgccggcgactgaagtctttacccccgtggttcctacagtggatacctacgacggaaggggtgacagtgtcgtgtatggcttacggagcaagtctaaaaagttccgccgaccagatatccaataccccgacgctactgatgaggacattacatcccacatggagtcagaggaactgaacggggcctataaggcaatccctgtagcccaggatctaaatgctccaagcgactgggatagtcgtggaaaagactcttacgaaacctcccagctcgatgaccagagcgcagagacgcactcgcataagcaatctagactgtataaaaggaaggccaacgatgaatccaatgagcactcagacgttatagatagtcaggagcttagcaaagtgtcccgggaatttcattctcacgagttccacagccatgaagacatgctggtcgtggaccccaagtcaaaggaggaagataaacacttgaagtttcgcatcagtcatgagctcgactccgctagctctgaggtgaactga

SEQ ID NO: 2986 - RNA, 864 nt, synthetic construct
  misc_feature 1..864: note = derived and/or modified sequence opt4 fromosteopontin__Homo_sapiens__EAX06010
  source 1..864: mol_type = other RNA
atgagaatcgccgtgatctgcttctgcctgctgggcatcacctgcgccatccccgtgaagcaggccgacagcggcagcagcgaggagaagcagaacgccgtgagcagcgaggagaccaacgacttcaagcaggagaccctgcccagcaagagcaacgagagccacgaccacatggacgacatggacgacgaggacgacgacgaccacgtggacagccaggacagcatcgacagcaacgacagcgacgacgtggacgacaccgacgacagccaccagagcgacgagagccaccacagcgacgagagcgacgagctggtgaccgacttccccaccgacctgcccgccaccgaggtgttcacccccgtggtgcccaccgtggacacctacgacggcagaggcgacagcgtggtgtacggcctgagaagcaagagcaagaagttcagaagacccgacatccagtaccccgacgccaccgacgaggacatcaccagccacatggagagcgaggagctgaacggcgcctacaaggccatccccgtggcccaggacctgaacgcccccagcgactgggacagcagaggcaaggacagctacgagaccagccagctggacgaccagagcgccgagacccacagccacaagcagagcagactgtacaagagaaaggccaacgacgagagcaacgagcacagcgacgtgatcgacagccaggagctgagcaaggtgagcagagagttccacagccacgagttccacagccacgaggacatgctggtggtggaccccaagagcaaggaggaggacaagcacctgaagttcagaatcagccacgagctggacagcgccagcagcgaggtgaactga

SEQ ID NO: 2987 - RNA, 864 nt, synthetic construct
  misc_feature 1..864: note = derived and/or modified sequence opt5 fromosteopontin__Homo_sapiens__EAX06010
  source 1..864: mol_type = other RNA
atgagaatcgccgtgatttgcttctgtctgctcggcattacctgcgctatccccgtcaagcaggccgacagcgggtcctctgaggaaaaacaaaacgcggttagctccgaggaaacaaatgattttaagcaggagacgctgccttctaaaagcaacgaatcccacgaccatatggatgacatggatgacgaggatgacgatgaccacgtggattctcaggacagcatcgattccaatgacagcgacgatgtggacgataccgacgattctcatcagtccgacgagagccaccattctgatgaatccgacgagcttgtcacagatttcccgaccgacctgcccgctacagaagtgtttacccctgttgtgcccacagtcgatacctacgacggacggggcgacagcgtggtttatgggctccgctctaagtccaaaaagttcagacggcctgatattcaataccccgacgccacggatgaggacatcaccagccacatggagtccgaggaactgaacggagcctataaggctatccctgtggcccaggatcttaatgctccgtctgactgggatagccgcggcaaagactcctacgaaacaagccagctggatgaccagtctgccgagacccactcccataagcaaagcagactctataaacggaaggcgaacgatgaatctaatgagcacagcgacgtcattgattcccaggagctgtctaaagtgagccgcgaatttcattcccacgagttccacagccatgaagacatgctggtggtcgaccccaagtctaaggaggaagataaacacctcaagtttagaatctcccatgagctggacagcgcctcttccgaggttaactga

SEQ ID NO: 2988 - protein, 327 aa, synthetic construct
  REGION 1..327: note = osteopontin__Homo_sapiens__B7Z351
MGIVPRSLDKKAHRVQFQLNRIKAKIELPWGSLQLDCLMKTLKELYNKYPDAVATWLNPDPSQKQNLLAPQNAVSSEETNDFKQETLPSKSNESHDHMDDMDDEDDDDHVDSQDSIDSNDSDDVDDTDDSHQSDESHHSDESDELVTDFPTDLPATEVFTPVVPTVDTYDGRGDSVVYGLRSKSKKFRRPDIQYPDATDEDITSHMESEELNGAYKAIPVAQDLNAPSDWDSRGKDSYETSQLDDQSAETHSHKQSRLYKRKANDESNEHSDVIDSQELSKVSREFHSHEFHSHEDMLVVDPKSKEEDKHLKFRISHELDSASSEVN

SEQ ID NO: 2989 - RNA, 984 nt, synthetic construct
  misc_feature 1..984: note = osteopontin__Homo_sapiens__BAH12087
  source 1..984: mol_type = other RNA
atgggcattgtccccagaagcttggacaaaaaggcacacagagttcaattccagttgaacagaataaaggccaaaatagagctgccttgggggtcactgcaattagactgcttgatgaagacattaaaagaactttacaacaaatacccagatgctgtggccacatggctaaaccctgacccatctcagaagcagaatctcctagccccacagaatgctgtgtcctctgaagaaaccaatgactttaaacaagagacccttccaagtaagtccaacgaaagccatgaccacatggatgatatggatgatgaagatgatgatgaccatgtggacagccaggactccattgactcgaacgactctgatgatgtagatgacactgatgattctcaccagtctgatgagtctcaccattctgatgaatctgatgaactggtcactgattttcccacggacctgccagcaaccgaagttttcactccagttgtccccacagtagacacatatgatggccgaggtgatagtgtggtttatggactgaggtcaaaatctaagaagtttcgcagacctgacatccagtaccctgatgctacagacgaggacatcacctcacacatggaaagcgaggagttgaatggtgcatacaaggccatccccgttgcccaggacctgaacgcgccttctgattgggacagccgtgggaaggacagttatgaaacgagtcagctggatgaccagagtgctgaaacccacagccacaagcagtccagattatataagcggaaagccaatgatgagagcaatgagcattccgatgtgattgatagtcaggaactttccaaagtcagccgtgaattccacagccatgaatttcacagccatgaagatatgctggttgtagaccccaaaagtaaggaagaagataaacacctgaaatttcgtatttctcatgaattagatagtgcatcttctgaggtcaattaa

SEQ ID NO: 2990 - RNA, 984 nt, synthetic construct
  misc_feature 1..984: note = derived and/or modified sequence opt1 fromosteopontin__Homo_sapiens__BAH12087
  source 1..984: mol_type = other RNA
atgggcatcgtgccccgcagcctggacaagaaggcccaccgggtccagttccagctcaaccgcatcaaggccaagatcgagctgccgtgggggtccctgcagctcgactgcctgatgaagaccctgaaggagctctacaacaagtaccccgacgcggtggccacctggctgaaccccgaccccagccagaagcagaacctgctcgccccgcagaacgccgtgtccagcgaggagacgaacgacttcaagcaggagaccctgccctccaagagcaacgagtcccacgaccacatggacgacatggacgacgaggacgacgacgaccacgtcgacagccaggactccatcgacagcaacgactccgacgacgtggacgacaccgacgacagccaccagtccgacgagagccaccactccgacgagagcgacgagctggtgaccgacttccccacggacctccccgccaccgaggtcttcaccccggtggtgcccaccgtcgacacgtacgacggccgcggggactccgtggtgtacggcctgcggagcaagtccaagaagttccggcgccccgacatccagtaccccgacgcgaccgacgaggacatcaccagccacatggagagcgaggagctgaacggggcctacaaggccatcccggtcgcccaggacctcaacgcgccctccgactgggacagccggggcaaggactcctacgagaccagccagctggacgaccagtccgccgagacgcacagccacaagcagtcccgcctgtacaagcggaaggccaacgacgagagcaacgagcactccgacgtgatcgacagccaggagctctccaaggtgagccgcgagttccactcccacgagttccacagccacgaggacatgctggtcgtggaccccaagtccaaggaggaggacaagcacctgaagttccggatcagccacgagctcgactccgccagctccgaggtgaactga

SEQ ID NO: 2991 - RNA, 984 nt, synthetic construct
  misc_feature 1..984: note = derived and/or modified sequence opt2 fromosteopontin__Homo_sapiens__BAH12087
  source 1..984: mol_type = other RNA
atgggcatcgtcccccgctccctcgacaagaaggcccaccgcgtccagttccagctcaaccgcatcaaggccaagatcgagctcccctggggctccctccagctcgactgcctcatgaagaccctcaaggagctctacaacaagtaccccgacgccgtcgccacctggctcaaccccgacccctcccagaagcagaacctcctcgccccccagaacgccgtctcctccgaggagaccaacgacttcaagcaggagaccctcccctccaagtccaacgagtcccacgaccacatggacgacatggacgacgaggacgacgacgaccacgtcgactcccaggactccatcgactccaacgactccgacgacgtcgacgacaccgacgactcccaccagtccgacgagtcccaccactccgacgagtccgacgagctcgtcaccgacttccccaccgacctccccgccaccgaggtcttcacccccgtcgtccccaccgtcgacacctacgacggccgcggcgactccgtcgtctacggcctccgctccaagtccaagaagttccgccgccccgacatccagtaccccgacgccaccgacgaggacatcacctcccacatggagtccgaggagctcaacggcgcctacaaggccatccccgtcgcccaggacctcaacgccccctccgactgggactcccgcggcaaggactcctacgagacctcccagctcgacgaccagtccgccgagacccactcccacaagcagtcccgcctctacaagcgcaaggccaacgacgagtccaacgagcactccgacgtcatcgactcccaggagctctccaaggtctcccgcgagttccactcccacgagttccactcccacgaggacatgctcgtcgtcgaccccaagtccaaggaggaggacaagcacctcaagttccgcatctcccacgagctcgactccgcctcctccgaggtcaactga

SEQ ID NO: 2992 - RNA, 984 nt, synthetic construct
  misc_feature 1..984: note = derived and/or modified sequence opt3 fromosteopontin__Homo_sapiens__BAH12087
  source 1..984: mol_type = other RNA
atgggcatcgtgcccagaagcctggacaagaaagcccacagggtccagttccaactcaaccggattaaggctaaaatagagcttccttgggggtccctgcagttggattgcttaatgaagaccctgaaagaactatacaataagtatccagacgcagttgccacatggctcaacccggatccctctcagaagcagaatctgcttgcgcctcaaaacgctgtgtcaagtgaggaaactaatgactttaaacaggagacgctgccaagcaagtccaacgaatctcatgatcacatggacgatatggacgatgaggacgatgacgatcatgtagactcgcaggactcaatcgatagcaatgacagtgatgacgtggatgacaccgatgactcccaccagtctgatgagagccatcactccgacgaatcagatgagttggtcacagacttccccactgacctccctgccaccgaagtgtttacaccagttgtgcccaccgtcgatacttacgacggacgcggtgatagtgtggtatatggcctgcgaagcaaatctaagaaattccgtagacctgacattcaatacccagatgcaacagacgaggatatcacctcccacatggagtcagaggaactgaacggggcctataaggctattccggttgcacaggacctcaatgcccccagcgattgggacagtaggggaaaggattcttacgaaacgtcccagttagacgatcagagcgctgagactcattcgcacaaacaatctcggctgtataagcgcaaagccaacgacgaatccaatgagcattcagacgtgatcgatagtcaggagcttagcaaggtctccagagaatttcactctcacgagttccatagccacgaagacatgttggtggtggatcctaaatcaaaggaggaagacaaacatctgaagtttaggataagtcacgagctagattccgcgagctctgaggtcaactga

SEQ ID NO: 2993 - RNA, 984 nt, synthetic construct
  misc_feature 1..984: note = derived and/or modified sequence opt4 fromosteopontin__Homo_sapiens__BAH12087
  source 1..984: mol_type = other RNA
atgggcatcgtgcccagaagcctggacaagaaggcccacagagtgcagttccagctgaacagaatcaaggccaagatcgagctgccctggggcagcctgcagctggactgcctgatgaagaccctgaaggagctgtacaacaagtaccccgacgccgtggccacctggctgaaccccgaccccagccagaagcagaacctgctggccccccagaacgccgtgagcagcgaggagaccaacgacttcaagcaggagaccctgcccagcaagagcaacgagagccacgaccacatggacgacatggacgacgaggacgacgacgaccacgtggacagccaggacagcatcgacagcaacgacagcgacgacgtggacgacaccgacgacagccaccagagcgacgagagccaccacagcgacgagagcgacgagctggtgaccgacttccccaccgacctgcccgccaccgaggtgttcacccccgtggtgcccaccgtggacacctacgacggcagaggcgacagcgtggtgtacggcctgagaagcaagagcaagaagttcagaagacccgacatccagtaccccgacgccaccgacgaggacatcaccagccacatggagagcgaggagctgaacggcgcctacaaggccatccccgtggcccaggacctgaacgcccccagcgactgggacagcagaggcaaggacagctacgagaccagccagctggacgaccagagcgccgagacccacagccacaagcagagcagactgtacaagagaaaggccaacgacgagagcaacgagcacagcgacgtgatcgacagccaggagctgagcaaggtgagcagagagttccacagccacgagttccacagccacgaggacatgctggtggtggaccccaagagcaaggaggaggacaagcacctgaagttcagaatcagccacgagctggacagcgccagcagcgaggtgaactga

SEQ ID NO: 2994 - RNA, 984 nt, synthetic construct
  misc_feature 1..984: note = derived and/or modified sequence opt5 fromosteopontin__Homo_sapiens__BAH12087
  source 1..984: mol_type = other RNA
atgggcatcgtgcccagaagcctggacaagaaagcccaccgggtccagttccaactcaaccgcattaaggctaaaatcgagctgccttgggggtcccttcagctggattgcctcatgaagaccctgaaagaactttacaataagtatccggacgccgttgcgacatggctgaaccccgatccttctcagaagcagaatctcctggctccccaaaacgccgtgagctccgaggaaacgaatgactttaaacaggagaccctgccttctaagagcaacgaatcccatgatcacatggacgatatggacgatgaggacgatgacgatcatgtggactctcaggacagcattgattccaatgacagcgatgacgtcgatgacacagatgactctcaccagtccgatgagagccatcactctgacgaatccgatgagctcgtgaccgacttccccacagacctgcctgccaccgaagtttttacaccggtggtccccaccgtggatacgtacgacggaagaggcgatagcgttgtgtatgggcttcggtctaaatccaagaaattccgcagacctgacatccaataccccgatgctaccgacgaggatattacaagccacatggagtccgaggaactgaacggagcctataaggctatccctgtcgcccaggacctcaatgcgccctctgattgggacagccggggcaaggattcctacgaaaccagccagctggacgatcagtctgccgagacacattcccacaaacaaagccgcctttataagagaaaagctaacgacgaatctaatgagcatagcgacgtgatcgattcccaggagctgtctaaggtgagccgggaatttcactcccacgagttccatagccacgaagacatgctcgtcgttgatccgaaatctaaggaggaagacaaacatctgaagtttcgcatttcccacgagctggatagcgcctcttccgaggtgaactga

SEQ ID NO: 2995 - protein, 292 aa, synthetic construct
  REGION 1..292: note = osteopontin__Homo_sapiens__F2YQ21
MRIAVICFCLLGITCAIPVKQADSGSSEEKQLYNKYPDAVATWLNPDPSQKQNLLAPQNAVSSEETNDFKQETLPSKSNESHDHMDDMDDEDDDSHQSDESHHSDESDELVTDFPTDLPATEVFTPVVPTVDTYDGRGDSVVYGLRSKSKKFRRPDIQYPDATDEDITSHMESEELNGAYKAIPVAQDLNAPSDWDSRGKDSYETSQLDDQSAETHSHKQSRLYKRKANDESNEHSDVIDSQELSKVSREFHSHEFHSHEDMLVVDPKSKEEDKHLKFRISHELDSASSEVN

SEQ ID NO: 2996 - RNA, 879 nt, synthetic construct
  misc_feature 1..879: note = osteopontin__Homo_sapiens__AEA49030
  source 1..879: mol_type = other RNA
atgagaattgcagtgatttgcttttgcctcctaggcatcacctgtgccataccagttaaacaggctgattctggaagttctgaggaaaagcagctttacaacaaatacccagatgctgtggccacatggctaaaccctgacccatctcagaagcagaatctcctagccccacagaatgctgtgtcctctgaagaaaccaatgactttaaacaagagacccttccaagtaagtccaacgaaagccatgaccacatggatgatatggatgatgaagatgatgattctcaccagtctgatgagtctcaccattctgatgaatctgatgaactggtcactgattttcccacggacctgccagcaaccgaagttttcactccagttgtccccacagtagacacatatgatggccgaggtgatagtgtggtttatggactgaggtcaaaatctaagaagtttcgcagacctgacatccagtaccctgatgctacagacgaggacatcacctcacacatggaaagcgaggagttgaatggtgcatacaaggccatccccgttgcccaggacctgaacgcgccttctgattgggacagccgtgggaaggacagttatgaaacgagtcagctggatgaccagagtgctgaaacccacagccacaagcagtccagattatataagcggaaagctaatgatgagagcaatgagcattccgatgtgattgatagtcaggaactttccaaagtcagccgtgaattccacagccatgaatttcacagccatgaagatatgctggttgtagaccccaaaagtaaggaagaagataaacacctgaaatttcgtatttctcatgaattagatagtgcatcttctgaggtcaattaa

SEQ ID NO: 2997 - RNA, 879 nt, synthetic construct
  misc_feature 1..879: note = derived and/or modified sequence opt1 fromosteopontin__Homo_sapiens__AEA49030
  source 1..879: mol_type = other RNA
atgcgcatcgccgtgatctgcttctgcctgctcggcatcacgtgcgccatccccgtcaagcaggcggacagcgggtccagcgaggagaagcagctgtacaacaagtacccggacgccgtggccacctggctgaaccccgacccctcccagaagcagaacctcctggcgccccagaacgccgtgagctccgaggagaccaacgacttcaagcaggagaccctgccgagcaagtccaacgagagccacgaccacatggacgacatggacgacgaggacgacgactcccaccagagcgacgagtcccaccacagcgacgagtccgacgagctcgtcaccgacttccccaccgacctgcccgccacggaggtgttcacccccgtggtcccgaccgtggacacctacgacggccgcggggacagcgtggtctacggcctgcggtccaagagcaagaagttccggcgccccgacatccagtaccccgacgccacggacgaggacatcacctcccacatggagagcgaggagctcaacggggcctacaaggccatccccgtggcgcaggacctgaacgccccgtccgactgggacagccggggcaaggacagctacgagacctcccagctggacgaccagagcgccgagacccactcccacaagcagagccgcctctacaagcggaaggccaacgacgagtccaacgagcacagcgacgtgatcgactcccaggagctgagcaaggtctcccgcgagttccacagccacgagttccactcccacgaggacatgctggtggtggaccccaagagcaaggaggaggacaagcacctcaagttccggatctcccacgagctggacagcgcctccagcgaggtcaactga

SEQ ID NO: 2998 - RNA, 879 nt, synthetic construct
  misc_feature 1..879: note = derived and/or modified sequence opt2 fromosteopontin__Homo_sapiens__AEA49030
  source 1..879: mol_type = other RNA
atgcgcatcgccgtcatctgcttctgcctcctcggcatcacctgcgccatccccgtcaagcaggccgactccggctcctccgaggagaagcagctctacaacaagtaccccgacgccgtcgccacctggctcaaccccgacccctcccagaagcagaacctcctcgccccccagaacgccgtctcctccgaggagaccaacgacttcaagcaggagaccctcccctccaagtccaacgagtcccacgaccacatggacgacatggacgacgaggacgacgactcccaccagtccgacgagtcccaccactccgacgagtccgacgagctcgtcaccgacttccccaccgacctccccgccaccgaggtcttcacccccgtcgtccccaccgtcgacacctacgacggccgcggcgactccgtcgtctacggcctccgctccaagtccaagaagttccgccgccccgacatccagtaccccgacgccaccgacgaggacatcacctcccacatggagtccgaggagctcaacggcgcctacaaggccatccccgtcgcccaggacctcaacgccccctccgactgggactcccgcggcaaggactcctacgagacctcccagctcgacgaccagtccgccgagacccactcccacaagcagtcccgcctctacaagcgcaaggccaacgacgagtccaacgagcactccgacgtcatcgactcccaggagctctccaaggtctcccgcgagttccactcccacgagttccactcccacgaggacatgctcgtcgtcgaccccaagtccaaggaggaggacaagcacctcaagttccgcatctcccacgagctcgactccgcctcctccgaggtcaactga

SEQ ID NO: 2999 - RNA, 879 nt, synthetic construct
  misc_feature 1..879: note = derived and/or modified sequence opt3 fromosteopontin__Homo_sapiens__AEA49030
  source 1..879: mol_type = other RNA
atgagaatcgccgtgatttgcttctgtctgctcggcataacctgcgctatccccgtcaagcaggcagacagcgggtcctctgaggaaaaacaactttacaacaagtatcctgatgccgttgcgacatggctgaatccagacccgtcacagaaacagaacttgttagctccccagaatgccgtgagtagcgaggaaactaacgattttaagcaagagacgctgccttccaaatctaatgaatcgcacgaccatatggatgacatggatgacgaggatgacgattcacaccagagcgacgagagtcatcactccgatgaatctgacgagctagtaaccgacttcccaacagatctccccgcaactgaagtgtttacccctgtcgtgccaacagttgacacctacgatggaaggggtgacagcgtggtctatggcctgcggtccaagtcaaagaaattccgccgacccgatattcagtaccctgacgccactgatgaggacatcacaagtcatatggagagcgaggaacttaacggggcttataaggcaattccagtggcccaggatctgaatgctccgtctgactgggattcccgtggaaaagactcatacgaaaccagccaattggacgatcagagtgccgagacgcactctcacaagcagtccagactctataaaaggaaggcgaacgacgaaagcaatgagcattcggatgtaatcgactctcaggagctgtccaaggtttcacgggaatttcacagtcatgagttccacagccacgaagatatgctggtggtcgaccccaaatccaaggaggaagataaacatctcaagtttcgcatatctcacgagttagacagcgcatcaagtgaggtgaactga

SEQ ID NO: 3000 - RNA, 879 nt, synthetic construct
  misc_feature 1..879: note = derived and/or modified sequence opt4 fromosteopontin__Homo_sapiens__AEA49030
  source 1..879: mol_type = other RNA
atgagaatcgccgtgatctgcttctgcctgctgggcatcacctgcgccatccccgtgaagcaggccgacagcggcagcagcgaggagaagcagctgtacaacaagtaccccgacgccgtggccacctggctgaaccccgaccccagccagaagcagaacctgctggccccccagaacgccgtgagcagcgaggagaccaacgacttcaagcaggagaccctgcccagcaagagcaacgagagccacgaccacatggacgacatggacgacgaggacgacgacagccaccagagcgacgagagccaccacagcgacgagagcgacgagctggtgaccgacttccccaccgacctgcccgccaccgaggtgttcacccccgtggtgcccaccgtggacacctacgacggcagaggcgacagcgtggtgtacggcctgagaagcaagagcaagaagttcagaagacccgacatccagtaccccgacgccaccgacgaggacatcaccagccacatggagagcgaggagctgaacggcgcctacaaggccatccccgtggcccaggacctgaacgcccccagcgactgggacagcagaggcaaggacagctacgagaccagccagctggacgaccagagcgccgagacccacagccacaagcagagcagactgtacaagagaaaggccaacgacgagagcaacgagcacagcgacgtgatcgacagccaggagctgagcaaggtgagcagagagttccacagccacgagttccacagccacgaggacatgctggtggtggaccccaagagcaaggaggaggacaagcacctgaagttcagaatcagccacgagctggacagcgccagcagcgaggtgaactga

SEQ ID NO: 3001 - RNA, 879 nt, synthetic construct
  misc_feature 1..879: note = derived and/or modified sequence opt5 fromosteopontin__Homo_sapiens__AEA49030
  source 1..879: mol_type = other RNA
atgagaatcgccgtgatttgcttctgtctgctcggcattacctgcgctatccccgtcaagcaggccgacagcgggtcctctgaggaaaaacaactgtacaacaagtatcctgatgcggttgctacatggcttaatccggaccccagccagaaacagaacctgctcgcccctcagaatgccgtgtcctctgaggaaacgaacgattttaagcaagagaccctgcccagcaaatccaatgaatctcacgaccatatggatgacatggatgacgaggatgacgatagccaccagtccgacgagagccatcactctgatgaatccgacgagcttgtgacagacttccctaccgatctgcccgctacagaagtctttacccctgtggttccgacagtggacacctacgatggacggggcgacagcgtcgtgtatgggctccgctctaagtccaagaaattcagacggcccgatatccagtaccctgacgccacggatgaggacattaccagccatatggagtctgaggaactgaacggagcttataaggccatccccgttgcgcaggatctgaatgccccttccgactgggatagccgcggcaaagactcctacgaaacatctcaactcgacgatcagagcgctgagacccactcccacaagcagagcagactgtataaacggaaggccaacgacgaatctaatgagcattccgatgtgatcgacagccaggagctttctaaggtcagccgcgaatttcactcccatgagttccactctcacgaagatatgctggtggtggaccccaaaagcaaggaggaagataaacatctcaagtttagaatttcccacgagctggacagcgcttcttccgaggtcaactga

SEQ ID NO: 3002 - protein, 314 aa, synthetic construct; identical to SEQ ID NO: 2967
  REGION 1..314: note = osteopontin__Homo_sapiens__P10451

SEQ ID NO: 3003 - RNA, 945 nt, synthetic construct; identical to SEQ ID NO: 2968
  misc_feature 1..945: note = osteopontin__Homo_sapiens__AAA86886
  source 1..945: mol_type = other RNA

SEQ ID NO: 3004 - RNA, 945 nt, synthetic construct; identical to SEQ ID NO: 2969
  misc_feature 1..945: note = derived and/or modified sequence opt1 fromosteopontin__Homo_sapiens__AAA86886
  source 1..945: mol_type = other RNA

SEQ ID NO: 3005 - RNA, 945 nt, synthetic construct; identical to SEQ ID NO: 2970
  misc_feature 1..945: note = derived and/or modified sequence opt2 fromosteopontin__Homo_sapiens__AAA86886
  source 1..945: mol_type = other RNA

SEQ ID NO: 3006 - RNA, 945 nt, synthetic construct; identical to SEQ ID NO: 2971
  misc_feature 1..945: note = derived and/or modified sequence opt3 fromosteopontin__Homo_sapiens__AAA86886
  source 1..945: mol_type = other RNA

SEQ ID NO: 3007 - RNA, 945 nt, synthetic construct; identical to SEQ ID NO: 2972
  misc_feature 1..945: note = derived and/or modified sequence opt4 fromosteopontin__Homo_sapiens__AAA86886
  source 1..945: mol_type = other RNA

SEQ ID NO: 3008 - RNA, 945 nt, synthetic construct; identical to SEQ ID NO: 2973
  misc_feature 1..945: note = derived and/or modified sequence opt5 fromosteopontin__Homo_sapiens__AAA86886
  source 1..945: mol_type = other RNA

SEQ ID NO: 3009 - protein, 393 aa, synthetic construct [sequence omitted]

SEQ ID NO: 3010 - RNA, 1182 nt, synthetic construct
  misc_feature 1..1182: note = p53__Homo_sapiens__AAA59988
  source 1..1182: mol_type = other RNA
atggaggagccgcagtcagatcctagcgtcgagccccctctgagtcaggaaacattttcagacctatggaaactacttcctgaaaacaacgttctgtcccccttgccgtcccaagcaatggatgatttgatgctgtccccggacgatattgaacaatggttcactgaagacccaggtccagatgaagctcccagaatgccagaggctgctccccccgtggcccctgcaccagcagctcctacaccggcggcccctgcaccagccccctcctggcccctgtcatcttctgtcccttcccagaaaacctaccagggcagctacggtttccgtctgggcttcttgcattctgggacagccaagtctgtgacttgcacgtactcccctgccctcaacaagatgttttgccaactggccaagacctgccctgtgcagctgtgggttgattccacacccccgcccggcacccgcgtccgcgccatggccatctacaagcagtcacagcacatgacggaggttgtgaggcgctgcccccaccatgagcgctgctcagatagcgatggtctggcccctcctcagcatcttatccgagtggaaggaaatttgcgtgtggagtatttggatgacagaaacacttttcgacatagtgtggtggtgccctatgagccgcctgaggttggctctgactgtaccaccatccactacaactacatgtgtaacagttcctgcatgggcggcatgaaccggaggcccatcctcaccatcatcacactggaagactccagtggtaatctactgggacggaacagctttgaggtgcgtgtttgtgcctgtcctgggagagaccggcgcacagaggaagagaatctccgcaagaaaggggagcctcaccacgagctgcccccagggagcactaagcgagcactgcccaacaacaccagctcctctccccagccaaagaagaaaccactggatggagaatatttcacccttcagatccgtgggcgtgagcgcttcgagatgttccgagagctgaatgaggccttggaactcaaggatgcccaggctgggaaggagccaggggggagcagggctcactccagccacctgaagtccaaaaagggtcagtctacctcccgccataaaaaactcatgttcaagacagaagggcctgactcagactga

SEQ ID NO: 3011 - RNA, 1182 nt, synthetic construct
  misc_feature 1..1182: note = derived and/or modified sequence opt1 fromp53__Homo_sapiens__AAA59988
  source 1..1182: mol_type = other RNA
atggaggagccccagagcgacccgtccgtggagccgcccctgagccaggagaccttctccgacctctggaagctgctgcccgagaacaacgtcctcagccccctgccctcccaggccatggacgacctgatgctcagccccgacgacatcgagcagtggttcaccgaggaccccggcccggacgaggcgccccgcatgcccgaggccgcgcccccggtggcccccgcccccgccgcccccacgccggccgcccccgcccccgcgccctcctggccgctgagctccagcgtgccctcccagaagacctaccaggggagctacggcttccggctggggttcctccactccggcaccgccaagagcgtgacctgcacgtactcccccgccctgaacaagatgttctgccagctggccaagacctgccccgtccagctctgggtggacagcaccccgccgcccgggacccgcgtccgggccatggcgatctacaagcagtcccagcacatgacggaggtggtgcgccggtgcccccaccacgagcgctgcagcgactccgacggcctggccccgccccagcacctgatccgggtcgagggcaacctccgcgtggagtacctggacgaccggaacaccttccgccacagcgtggtcgtgccctacgagccgcccgaggtggggagcgactgcaccaccatccactacaactacatgtgcaactccagctgcatgggcgggatgaaccggcgccccatcctgacgatcatcaccctcgaggactccagcggcaacctgctggggcggaactccttcgaggtccgcgtgtgcgcctgccccggccgggaccgccggaccgaggaggagaacctccgcaagaagggcgagccccaccacgagctgccgcccgggagcaccaagcgggccctgcccaacaacacgtccagcagcccccagcccaagaagaagcccctcgacggcgagtacttcaccctgcagatccgcgggcgggagcgcttcgagatgttccgcgagctgaacgaggccctcgagctgaaggacgcgcaggccggcaaggagcccggcgggtcccgggcccactccagccacctgaagtccaagaagggccagagcacctcccgccacaagaagctcatgttcaagaccgaggggccggacagcgactga

SEQ ID NO: 3012 - RNA, 1182 nt, synthetic construct
  misc_feature 1..1182: note = derived and/or modified sequence opt2 fromp53__Homo_sapiens__AAA59988
  source 1..1182: mol_type = other RNA
atggaggagccccagtccgacccctccgtcgagccccccctctcccaggagaccttctccgacctctggaagctcctccccgagaacaacgtcctctcccccctcccctcccaggccatggacgacctcatgctctcccccgacgacatcgagcagtggttcaccgaggaccccggccccgacgaggccccccgcatgcccgaggccgccccccccgtcgcccccgcccccgccgcccccacccccgccgcccccgcccccgccccctcctggcccctctcctcctccgtcccctcccagaagacctaccagggctcctacggcttccgcctcggcttcctccactccggcaccgccaagtccgtcacctgcacctactcccccgccctcaacaagatgttctgccagctcgccaagacctgccccgtccagctctgggtcgactccacccccccccccggcacccgcgtccgcgccatggccatctacaagcagtcccagcacatgaccgaggtcgtccgccgctgcccccaccacgagcgctgctccgactccgacggcctcgcccccccccagcacctcatccgcgtcgagggcaacctccgcgtcgagtacctcgacgaccgcaacaccttccgccactccgtcgtcgtcccctacgagccccccgaggtcggctccgactgcaccaccatccactacaactacatgtgcaactcctcctgcatgggcggcatgaaccgccgccccatcctcaccatcatcaccctcgaggactcctccggcaacctcctcggccgcaactccttcgaggtccgcgtctgcgcctgccccggccgcgaccgccgcaccgaggaggagaacctccgcaagaagggcgagccccaccacgagctcccccccggctccaccaagcgcgccctccccaacaacacctcctcctccccccagcccaagaagaagcccctcgacggcgagtacttcaccctccagatccgcggccgcgagcgcttcgagatgttccgcgagctcaacgaggccctcgagctcaaggacgcccaggccggcaaggagcccggcggctcccgcgcccactcctcccacctcaagtccaagaagggccagtccacctcccgccacaagaagctcatgttcaagaccgagggccccgactccgactga

SEQ ID NO: 3013 - RNA, 1182 nt, synthetic construct
  misc_feature 1..1182: note = derived and/or modified sequence opt3 fromp53__Homo_sapiens__AAA59988
  source 1..1182: mol_type = other RNA
atggaggaaccccagagcgacccttccgtggagccaccgctgtctcaagaaaccttctcagatctctggaaacttctgcccgagaacaatgtcttgagtcctttaccaagccaggccatggacgatctgatgctatcccccgacgatatcgaacagtggtttacagaggaccctggcccagatgaggctcccagaatgcctgaagcagccccaccggttgcgcccgctcctgccgcaccaactcccgccgctcctgcaccagccccctcttggccgctctcgtcaagcgtgcctagtcagaagacgtaccaagggtcctatggattcaggctgggttttcttcactctggcaccgctaagagcgtaacatgcacttactcccccgccctgaacaaaatgttctgtcagttggcgaagacctgcccagtgcagctctgggtcgactcaacacctcccccagggacccgggtgcgcgcaatggccatttataaacagagtcaacatatgactgaggttgtgcgacgttgtccccaccatgaaagatgcagcgattctgacggactggctcctccacagcacctgataagggtcgagggcaatctccgggtggagtacttagatgaccgcaacacatttagacattccgtagttgtgccgtatgaaccccctgaggtcggttcagattgtaccacgatccactacaattatatgtgcaacagcagttgtatgggagggatgaataggcggccaattctgactatcattacccttgaagactcttccggcaacttgctgggccgcaatagcttcgaggtgcgagtgtgcgcctgtcccgggagagacaggcggacagaagaggagaacctacgtaagaagggagaacctcaccatgagctcccacccggttcgactaaacgcgcactgccgaataacacctcttcctcacctcagccaaagaaaaagccccttgatggcgaatactttacactgcagatcagagggagggagcggttcgaaatgtttcgagagttgaatgaggctctcgaactgaaagacgcccaagcgggaaaggagcctggcggtagtcgcgcccacagctcccatttaaagtctaaaaaggggcagagcacctcaagacacaaaaagctgatgttcaaaacggaaggacccgatagtgactga

SEQ ID NO: 3014 - RNA, 1182 nt, synthetic construct
  misc_feature 1..1182: note = derived and/or modified sequence opt4 fromp53__Homo_sapiens__AAA59988
  source 1..1182: mol_type = other RNA
atggaggagccccagagcgaccccagcgtggagccccccctgagccaggagaccttcagcgacctgtggaagctgctgcccgagaacaacgtgctgagccccctgcccagccaggccatggacgacctgatgctgagccccgacgacatcgagcagtggttcaccgaggaccccggccccgacgaggcccccagaatgcccgaggccgccccccccgtggcccccgcccccgccgcccccacccccgccgcccccgcccccgcccccagctggcccctgagcagcagcgtgcccagccagaagacctaccagggcagctacggcttcagactgggcttcctgcacagcggcaccgccaagagcgtgacctgcacctacagccccgccctgaacaagatgttctgccagctggccaagacctgccccgtgcagctgtgggtggacagcacccccccccccggcaccagagtgagagccatggccatctacaagcagagccagcacatgaccgaggtggtgagaagatgcccccaccacgagagatgcagcgacagcgacggcctggcccccccccagcacctgatcagagtggagggcaacctgagagtggagtacctggacgacagaaacaccttcagacacagcgtggtggtgccctacgagccccccgaggtgggcagcgactgcaccaccatccactacaactacatgtgcaacagcagctgcatgggcggcatgaacagaagacccatcctgaccatcatcaccctggaggacagcagcggcaacctgctgggcagaaacagcttcgaggtgagagtgtgcgcctgccccggcagagacagaagaaccgaggaggagaacctgagaaagaagggcgagccccaccacgagctgccccccggcagcaccaagagagccctgcccaacaacaccagcagcagcccccagcccaagaagaagcccctggacggcgagtacttcaccctgcagatcagaggcagagagagattcgagatgttcagagagctgaacgaggccctggagctgaaggacgcccaggccggcaaggagcccggcggcagcagagcccacagcagccacctgaagagcaagaagggccagagcaccagcagacacaagaagctgatgttcaagaccgagggccccgacagcgactga

SEQ ID NO: 3015 - RNA, 1182 nt, synthetic construct
  misc_feature 1..1182: note = derived and/or modified sequence opt5 fromp53__Homo_sapiens__AAA59988
  source 1..1182: mol_type = other RNA
atggaggaaccccagagcgacccttccgtggagccgcccctgtctcaagaaaccttcagcgatctctggaagctgcttcctgagaacaatgtcctgtctcccctcccttcccaggccatggacgatctgatgcttagccccgacgatatcgaacagtggtttacagaggaccctggcccggatgaggctcccagaatgcctgaagccgcgccccctgttgctcccgccccggccgctcctacgcccgccgctcctgcccccgcgccctcctggcctctgtctagctccgtgccgagccagaaaacctaccaagggtcttatggattccggctcggctttctgcactccgggacagccaagagcgtgacctgcacatactctcccgctctgaacaaaatgttctgtcagctcgccaagacctgccctgtccagctgtgggtggactccacaccccctcccggaacccgcgttagagctatggccatttataaacagagccaacatatgacggaggtggtccggcgctgtccgcaccatgaaagatgctctgattccgacggccttgcgcctccccagcacctgatccgggtggaggggaatctccgcgttgagtacctggatgacagaaacacctttcggcatagcgtggtcgtgccttatgaaccccctgaggtgggatccgattgtacaaccattcactacaattatatgtgcaactctagctgtatgggcggcatgaatcgcagacccatccttacaattatcaccctggaagactccagcgggaacctcctgggacgcaattctttcgaggtccgggtttgcgcctgtccgggcagagaccggcgcacggaagaggagaacctgagaaagaagggggaacctcaccatgagctccctcccggatccacaaaacgggctctgcccaataacaccagctctagcccgcagcccaagaaaaagcctcttgatggcgaatactttacactgcagatcagagggcgcgagcggttcgaaatgtttagagagctcaatgaggccctggaacttaaagacgctcaagccggaaaggagcccggcggctcccgcgcccactctagccatctgaagtccaaaaaggggcagagcacctctcggcacaaaaagctcatgttcaaaaccgaaggacctgattccgactga

SEQ ID NO: 3016 - protein, 102 aa, synthetic construct
  REGION 1..102: note = PAGE-4__Homo_sapiens__O60829
MSARVRSRSRGRGDGQEAPDVVAFVAPGESQQEEPPTDNQDIEPGQEREGTPPIEERKVEGDCQEMDLEKTRSERGDGSDVKEKTPPNPKHAKTKEAGDGQP

SEQ ID NO: 3017 - RNA, 309 nt, synthetic construct
  misc_feature 1..309: note = PAGE-4__Homo_sapiens__AAF88037
  source 1..309: mol_type = other RNA
atgagtgcacgagtgagatcaagatccagaggaagaggagatggtcaggaggctcccgatgtggttgcattcgtggctcccggtgaatctcagcaagaggaaccaccaactgacaatcaggatattgaacctggacaagagagagaaggaacacctccgatcgaagaacgtaaagtagaaggtgattgccaggaaatggatctggaaaagactcggagtgagcgtggagatggctctgatgtaaaagagaagactccacctaatcctaagcatgctaagactaaagaagcaggagatgggcagccataa

SEQ ID NO: 3018 - RNA, 309 nt, synthetic construct
  misc_feature 1..309: note = derived and/or modified sequence opt1 fromPAGE-4__Homo_sapiens__AAF88037
  source 1..309: mol_type = other RNA
atgagcgcccgcgtgcggtcccgcagccggggccgcggggacggccaggaggcccccgacgtcgtggcgttcgtggcccccggggagtcccagcaggaggagccgcccaccgacaaccaggacatcgagcccggccaggagcgggaggggaccccgcccatcgaggagcgcaaggtcgagggcgactgccaggagatggacctggagaagacgcggagcgagcgcggcgacgggtccgacgtgaaggagaagaccccgcccaaccccaagcacgccaagaccaaggaggccggcgacgggcagccctga

SEQ ID NO: 3019 - RNA, 309 nt, synthetic construct
  misc_feature 1..309: note = derived and/or modified sequence opt2 fromPAGE-4__Homo_sapiens__AAF88037
  source 1..309: mol_type = other RNA
atgtccgcccgcgtccgctcccgctcccgcggccgcggcgacggccaggaggcccccgacgtcgtcgccttcgtcgcccccggcgagtcccagcaggaggagccccccaccgacaaccaggacatcgagcccggccaggagcgcgagggcaccccccccatcgaggagcgcaaggtcgagggcgactgccaggagatggacctcgagaagacccgctccgagcgcggcgacggctccgacgtcaaggagaagaccccccccaaccccaagcacgccaagaccaaggaggccggcgacggccagccctga

SEQ ID NO: 3020 - RNA, 309 nt, synthetic construct
  misc_feature 1..309: note = derived and/or modified sequence opt3 fromPAGE-4__Homo_sapiens__AAF88037
  source 1..309: mol_type = other RNA
atgagcgccagagtgaggtcccggtctcgcggccgaggggacggacaggaggctcccgatgtcgttgcattcgtggcccctggtgaatcacaacaggaggaaccaccgaccgacaaccaggatatcgagcccggccaggaacgtgaggggacacctccaattgaggaaagaaaggtagagggagactgccaagaaatggatctggagaaaactaggagtgagcggggcgacggtagcgatgtgaaggagaaaacgccccctaatccaaagcacgcgaaaaccaaggaagctggggacggacagccctga

SEQ ID NO: 3021 - RNA, 309 nt, synthetic construct
  misc_feature 1..309: note = derived and/or modified sequence opt4 fromPAGE-4__Homo_sapiens__AAF88037
  source 1..309: mol_type = other RNA
atgagcgccagagtgagaagcagaagcagaggcagaggcgacggccaggaggcccccgacgtggtggccttcgtggcccccggcgagagccagcaggaggagccccccaccgacaaccaggacatcgagcccggccaggagagagagggcaccccccccatcgaggagagaaaggtggagggcgactgccaggagatggacctggagaagaccagaagcgagagaggcgacggcagcgacgtgaaggagaagaccccccccaaccccaagcacgccaagaccaaggaggccggcgacggccagccctga

SEQ ID NO: 3022 - RNA, 309 nt, synthetic construct
  misc_feature 1..309: note = derived and/or modified sequence opt5 fromPAGE-4__Homo_sapiens__AAF88037
  source 1..309: mol_type = other RNA
atgagcgccagagtgcggtcccgctctagaggccgcggggacggacaggaggctcccgatgtcgttgccttcgtggcgcctggcgaaagccaacaggaggaaccgcccaccgacaaccaggatatcgagcctgggcaggaacgggagggaacaccccctattgaggaaagaaaggtggagggcgactgccaagaaatggatctggagaaaacgcggtccgagcgcggggacggatctgatgtcaaggagaaaacaccccctaatccgaagcacgctaaaaccaaggaagccggcgacggccagccctga

SEQ ID NO: 3023 - protein, 402 aa, synthetic construct [sequence omitted]

SEQ ID NO: 3024 - RNA, 1209 nt, synthetic construct
  misc_feature 1..1209: note = PAI-1__Homo_sapiens__AAA60003
  source 1..1209: mol_type = other RNA
atgcagatgtctccagccctcacctgcctagtcctgggcctggcccttgtctttggtgaagggtctgctgtgcaccatcccccatcctacgtggcccacctggcctcagacttcggggtgagggtgtttcagcaggtggcgcaggcctccaaggaccgcaacgtggttttctcaccctatggggtggcctcggtgttggccatgctccagctgacaacaggaggagaaacccagcagcagattcaagcagctatgggattcaagattgatgacaagggcatggcccccgccctccggcatctgtacaaggagctcatggggccatggaacaaggatgagatcagcaccacagacgcgatcttcgtccagcgggatctgaagctggtccagggcttcatgccccacttcttcaggctgttccggagcacggtcaagcaagtggacttttcagaggtggagagagccagattcatcatcaatgactgggtgaagacacacacaaaaggtatgatcagcaacttgcttgggaaaggagccgtggaccagctgacacggctggtgctggtgaatgccctctacttcaacggccagtggaagactcccttccccgactccagcacccaccgccgcctcttccacaaatcagacggcagcactgtctctgtgcccatgatggctcagaccaacaagttcaactatactgagttcaccacgcccgatggccattactacgacatcctggaactgccctaccacggggacaccctcagcatgttcattgctgccccttatgaaaaagaggtgcctctctctgccctcaccaacattctgagtgcccagctcatcagccactggaaaggcaacatgaccaggctgccccgcctcctggttctgcccaagttctccctggagactgaagtcgacctcaggaagcccctagagaacctgggaatgaccgacatgttcagacagtttcaggctgacttcacgagtctttcagaccaagagcctctccacgtcgcgcaggcgctgcagaaagtgaagatcgaggtgaacgagagtggcacggtggcctcctcatccacagctgtcatagtctcagcccgcatggcccccgaggagatcatcatggacagacccttcctctttgtggtccggcacaaccccacaggaacagtccttttcatgggccaagtgatggaaccctga

SEQ ID NO: 3025 - RNA, 1209 nt, synthetic construct
  misc_feature 1..1209: note = derived and/or modified sequence opt1 fromPAI-1__Homo_sapiens__AAA60003
  source 1..1209: mol_type = other RNA
atgcagatgagccccgccctgacctgcctcgtgctggggctggccctcgtcttcggggagggctccgcggtgcaccacccgcccagctacgtggcccacctggcctccgacttcggggtccgcgtgttccagcaggtcgcccaggccagcaaggaccggaacgtggtgttctccccctacggcgtggcgagcgtcctggccatgctccagctgaccaccgggggcgagacgcagcagcagatccaggccgccatgggcttcaagatcgacgacaaggggatggcgcccgccctgcgccacctctacaaggagctgatgggcccgtggaacaaggacgagatctccaccaccgacgccatcttcgtgcagcgggacctgaagctcgtgcaggggttcatgccccacttcttccgcctgttccggagcacggtcaagcaggtcgacttctccgaggtggagcgcgcccggttcatcatcaacgactgggtgaagacccacaccaagggcatgatcagcaacctgctcgggaagggcgccgtggaccagctgacccgcctggtgctcgtcaacgcgctgtacttcaacggccagtggaagacgcccttccccgactccagcacccaccggcgcctgttccacaagtccgacgggagcaccgtgtccgtgccgatgatggcccagaccaacaagttcaactacacggagttcaccacccccgacggccactactacgacatcctcgagctgccctaccacggggacaccctgagcatgttcatcgccgccccctacgagaaggaggtcccgctctccgccctgacgaacatcctgagcgcgcagctcatctcccactggaagggcaacatgacccggctgccccgcctgctcgtgctgcccaagttcagcctggagaccgaggtggacctccggaagcccctggagaacctgggcatgaccgacatgttccgccagttccaggccgacttcacgagcctctccgaccaggagccgctgcacgtcgcccaggccctgcagaaggtgaagatcgaggtcaacgagagcgggaccgtggcctccagctccaccgcggtgatcgtcagcgcccggatggcccccgaggagatcatcatggaccgccccttcctcttcgtggtgcggcacaaccccaccggcacggtcctgttcatgggccaggtgatggagccgtga

SEQ ID NO: 3026 - RNA, 1209 nt, synthetic construct
  misc_feature 1..1209: note = derived and/or modified sequence opt2 fromPAI-1__Homo_sapiens__AAA60003
  source 1..1209: mol_type = other RNA
atgcagatgtcccccgccctcacctgcctcgtcctcggcctcgccctcgtcttcggcgagggctccgccgtccaccaccccccctcctacgtcgcccacctcgcctccgacttcggcgtccgcgtcttccagcaggtcgcccaggcctccaaggaccgcaacgtcgtcttctccccctacggcgtcgcctccgtcctcgccatgctccagctcaccaccggcggcgagacccagcagcagatccaggccgccatgggcttcaagatcgacgacaagggcatggcccccgccctccgccacctctacaaggagctcatgggcccctggaacaaggacgagatctccaccaccgacgccatcttcgtccagcgcgacctcaagctcgtccagggcttcatgccccacttcttccgcctcttccgctccaccgtcaagcaggtcgacttctccgaggtcgagcgcgcccgcttcatcatcaacgactgggtcaagacccacaccaagggcatgatctccaacctcctcggcaagggcgccgtcgaccagctcacccgcctcgtcctcgtcaacgccctctacttcaacggccagtggaagacccccttccccgactcctccacccaccgccgcctcttccacaagtccgacggctccaccgtctccgtccccatgatggcccagaccaacaagttcaactacaccgagttcaccacccccgacggccactactacgacatcctcgagctcccctaccacggcgacaccctctccatgttcatcgccgccccctacgagaaggaggtccccctctccgccctcaccaacatcctctccgcccagctcatctcccactggaagggcaacatgacccgcctcccccgcctcctcgtcctccccaagttctccctcgagaccgaggtcgacctccgcaagcccctcgagaacctcggcatgaccgacatgttccgccagttccaggccgacttcacctccctctccgaccaggagcccctccacgtcgcccaggccctccagaaggtcaagatcgaggtcaacgagtccggcaccgtcgcctcctcctccaccgccgtcatcgtctccgcccgcatggcccccgaggagatcatcatggaccgccccttcctcttcgtcgtccgccacaaccccaccggcaccgtcctcttcatgggccaggtcatggagccctga

SEQ ID NO: 3027 - RNA, 1209 nt, synthetic construct
  misc_feature 1..1209: note = derived and/or modified sequence opt3 fromPAI-1__Homo_sapiens__AAA60003
  source 1..1209: mol_type = other RNA
atgcagatgagccccgccctgacctgcctcgtgcttggcctggctttggtcttcggggagggatccgcagttcaccatcctccatcttacgtggcccacttagcgtcagactttggtgtaagagtgttccaacaggtcgctcaggccagtaaggataggaacgtggtttttagcccgtatggcgtggcatccgtcctggccatgctacagctcacaactgggggagaaacgcaacagcagatccaggctgcaatgggcttcaaaattgacgataagggtatggcccccgctctgcggcatctttacaaagagctgatggggccttggaataaggacgaaatatctaccacagatgccatctttgtgcaacgcgacttgaaactcgtacagggattcatgccacactttttccgactgtttcgttcgactgttaaacaggtggatttctcagaggtcgaaagagcgaggtttattatcaacgactgggtgaagacccatacaaagggcatgattagcaatctgctcggcaagggggcagtggatcagttaacccggctggtccttgttaacgccttgtatttcaatggacaatggaaaactccctttcctgacagttccacacaccgcagactgttccacaagtctgatggtagcaccgtgtccgtaccaatgatggctcagacgaacaaattcaattacactgagtttaccacacccgacggccattattacgatatcctagagctcccttatcacggggacactctgtcaatgttcatagccgcaccatacgaaaaggaggtgccgcttagtgctctgaccaacatcttgagcgcccagctcatttctcattggaagggaaatatgacaaggctgccccggttactggtcctccctaaattttcccttgaaaccgaggtggacctgcgcaagccattggagaacctaggcatgacggatatgttccgacaatttcaggcggacttcacttcactgagcgatcaggaacccctccacgttgcccaggcactgcaaaaagtgaagatcgaggtcaatgaaagtggtacagtggcttcttccagcaccgccgtaattgtttcggctagaatggcccctgaggaaatcataatggacaggccatttcttttcgtggtccggcacaaccccactgggacagtgctgtttatgggacaggtcatggagccgtga

SEQ ID NO: 3028 - RNA, 1209 nt, synthetic construct
  misc_feature 1..1209: note = derived and/or modified sequence opt4 fromPAI-1__Homo_sapiens__AAA60003
  source 1..1209: mol_type = other RNA
atgcagatgagccccgccctgacctgcctggtgctgggcctggccctggtgttcggcgagggcagcgccgtgcaccacccccccagctacgtggcccacctggccagcgacttcggcgtgagagtgttccagcaggtggcccaggccagcaaggacagaaacgtggtgttcagcccctacggcgtggccagcgtgctggccatgctgcagctgaccaccggcggcgagacccagcagcagatccaggccgccatgggcttcaagatcgacgacaagggcatggcccccgccctgagacacctgtacaaggagctgatgggcccctggaacaaggacgagatcagcaccaccgacgccatcttcgtgcagagagacctgaagctggtgcagggcttcatgccccacttcttcagactgttcagaagcaccgtgaagcaggtggacttcagcgaggtggagagagccagattcatcatcaacgactgggtgaagacccacaccaagggcatgatcagcaacctgctgggcaagggcgccgtggaccagctgaccagactggtgctggtgaacgccctgtacttcaacggccagtggaagacccccttccccgacagcagcacccacagaagactgttccacaagagcgacggcagcaccgtgagcgtgcccatgatggcccagaccaacaagttcaactacaccgagttcaccacccccgacggccactactacgacatcctggagctgccctaccacggcgacaccctgagcatgttcatcgccgccccctacgagaaggaggtgcccctgagcgccctgaccaacatcctgagcgcccagctgatcagccactggaagggcaacatgaccagactgcccagactgctggtgctgcccaagttcagcctggagaccgaggtggacctgagaaagcccctggagaacctgggcatgaccgacatgttcagacagttccaggccgacttcaccagcctgagcgaccaggagcccctgcacgtggcccaggccctgcagaaggtgaagatcgaggtgaacgagagcggcaccgtggccagcagcagcaccgccgtgatcgtgagcgccagaatggcccccgaggagatcatcatggacagacccttcctgttcgtggtgagacacaaccccaccggcaccgtgctgttcatgggccaggtgatggagccctga

SEQ ID NO: 3029 - RNA, 1209 nt, synthetic construct
  misc_feature 1..1209: note = derived and/or modified sequence opt5 fromPAI-1__Homo_sapiens__AAA60003
  source 1..1209: mol_type = other RNA
atgcagatgagccccgccctgacctgcctcgtgctgggccttgctctggtcttcggggagggatccgccgttcaccatcctccgtcttacgtggcgcacctcgctagcgactttggcgtgagagtcttccaacaggtggcccaggcctccaaggatcggaacgttgtgttttctccctatggggtcgctagcgtgctggccatgcttcagctgacaacgggaggcgaaacccaacagcagatccaggctgccatggggttcaaaattgacgataagggaatggcgcctgccctccgccatctgtacaaagagctgatgggcccctggaataaggacgaaatctccacaaccgatgctatttttgttcaaagagacctcaaactggtgcagggcttcatgcctcactttttccggctttttcgctctacagtcaaacaggtggatttcagcgaggtggaaagagcccggtttatcattaacgactgggtcaagacccatacaaaggggatgatctccaatctgctcggaaagggcgctgttgatcagctgacccgccttgtgctggtgaacgccctctatttcaatgggcaatggaaaacgccctttcctgacagctctacccacagacggctgttccacaagtccgatggaagcacagtctctgtgccgatgatggcgcagaccaacaaattcaattacacagagtttaccacgcccgacggccattattacgatatcctggagctcccttatcacggggacacactgtccatgttcattgccgctccctacgaaaaggaggttcctcttagcgccctgaccaacatcctctctgctcagctgatttcccattggaagggaaatatgacacgccttcccagactgctcgtgctgccgaaatttagcctggaaaccgaggtcgacctccggaagcctctggagaaccttggcatgaccgatatgttccgccaatttcaggccgacttcacatccctgtctgatcaggaacccctccacgtggcccaggctctgcaaaaagttaagatcgaggtgaatgaaagcggcacggtcgcgtccagctctaccgccgtgattgtctccgctagaatggcccctgaggaaatcattatggaccggccctttcttttcgtggttcgccacaaccccacagggaccgtgctgtttatgggacaggtcatggagccttga

SEQ ID NO: 3030 - protein, 415 aa, synthetic construct
  REGION 1..415: note = PAI-2__Homo_sapiens__P05120
MEDLCVANTLFALNLFKHLAKASPTQNLFLSPWSISSTMAMVYMGSRGSTEDQMAKVLQFNEVGANAVTPMTPENFTSCGFMQQIQKGSYPDAILQAQAADKIHSSFRSLSSAINASTGNYLLESVNKLFGEKSASFREEYIRLCQKYYSSEPQAVDFLECAEEARKKINSWVKTQTKGKIPNLLPEGSVDGDTRMVLVNAVYFKGKWKTPFEKKLNGLYPFRVNSAQRTPVQMMYLREKLNIGYIEDLKAQILELPYAGDVSMFLLLPDEIADVSTGLELLESEITYDKLNKWTSKDKMAEDEVEVYIPQFKLEEHYELRSILRSMGMEDAFNKGRANFSGMSERNDLFLSEVFHQAMVDVNEEGTEAAAGTGGVMTGRTGHGGPQFVADHPFLFLIMHKITNCILFFGRFSSP

SEQ ID NO: 3031 - RNA, 1248 nt, synthetic construct
  misc_feature 1..1248: note = PAI-2__Homo_sapiens__AAA36797
  source 1..1248: mol_type = other RNA
atggaggatctttgtgtggcaaacacactctttgccctcaatttattcaagcatctggcaaaagcaagccccacccagaacctcttcctctccccatggagcatctcgtccaccatggccatggtctacatgggctccaggggcagcaccgaagaccagatggccaaggtgcttcagtttaatgaagtgggagccaatgcagttacccccatgactccagagaactttaccagctgtgggttcatgcagcagatccagaagggtagttatcctgatgcgattttgcaggcacaagctgcagataaaatccattcatccttccgctctctcagctctgcaatcaatgcatccacagggaattatttactggaaagtgtcaataagctgtttggtgagaagtctgcgagcttccgggaagaatatattcgactctgtcagaaatattactcctcagaaccccaggcagtagacttcctagaatgtgcagaagaagctagaaaaaagattaattcctgggtcaagactcaaaccaaaggcaaaatcccaaacttgttacctgaaggttctgtagatggggataccaggatggtcctggtgaatgctgtctacttcaaaggaaagtggaaaactccatttgagaagaaactaaatgggctttatcctttccgtgtaaactcggctcagcgcacacctgtacagatgatgtacttgcgtgaaaagctaaacattggatacatagaagacctaaaggctcagattctagaactcccatatgctggagatgttagcatgttcttgttgcttccagatgaaattgccgatgtgtccactggcttggagctgctggaaagtgaaataacctatgacaaactcaacaagtggaccagcaaagacaaaatggctgaagatgaagttgaggtatacataccccagttcaaattagaagagcattatgaactcagatccattctgagaagcatgggcatggaggacgccttcaacaagggacgggccaatttctcagggatgtcggagaggaatgacctgtttctttctgaagtgttccaccaagccatggtggatgtgaatgaggagggcactgaagcagccgctggcacaggaggtgttatgacagggagaactggacatggaggcccacagtttgtggcagatcatccttttctttttcttattatgcataagataaccaactgcattttatttttcggcagattttcctcaccctaa

SEQ ID NO: 3032 - RNA, 1248 nt, synthetic construct
  misc_feature 1..1248: note = derived and/or modified sequence opt1 fromPAI-2__Homo_sapiens__AAA36797
  source 1..1248: mol_type = other RNA
atggaggacctgtgcgtggccaacaccctcttcgccctgaacctgttcaagcacctcgcgaaggccagccccacccagaacctgttcctgtccccgtggagcatctccagcacgatggccatggtctacatgggctcccgcgggagcaccgaggaccagatggccaaggtgctccagttcaacgaggtgggcgccaacgcggtcacccccatgacccccgagaacttcacgtcctgcgggttcatgcagcagatccagaagggcagctaccccgacgccatcctgcaggcccaggccgcggacaagatccactccagcttccggtccctgagctccgccatcaacgccagcaccgggaactacctcctggagtccgtgaacaagctgttcggcgagaagtccgccagcttccgcgaggagtacatccggctctgccagaagtactacagctccgagccgcaggccgtggacttcctggagtgcgcggaggaggcccgcaagaagatcaacagctgggtcaagacccagaccaagggcaagatccccaacctgctccccgaggggagcgtggacggcgacacgcggatggtgctggtcaacgccgtgtacttcaaggggaagtggaagacccccttcgagaagaagctgaacggcctctacccgttccgcgtgaactccgcccagcggacccccgtccagatgatgtacctgcgcgagaagctgaacatcgggtacatcgaggacctcaaggcccagatcctggagctgccctacgcgggcgacgtgagcatgttcctcctgctgcccgacgagatcgccgacgtgtccaccggcctcgagctgctggagagcgagatcacgtacgacaagctcaacaagtggacctccaaggacaagatggccgaggacgaggtcgaggtgtacatcccgcagttcaagctggaggagcactacgagctgcggagcatcctccgctccatggggatggaggacgccttcaacaagggccgggccaacttcagcgggatgtccgagcgcaacgacctgttcctgagcgaggtgttccaccaggcgatggtcgacgtgaacgaggagggcaccgaggccgccgccggcaccgggggcgtgatgacggggcggaccggccacgggggcccccagttcgtcgccgaccaccccttcctcttcctgatcatgcacaagatcaccaactgcatcctgttcttcggccgcttctccagcccctga

SEQ ID NO: 3033 - RNA, 1248 nt, synthetic construct
  misc_feature 1..1248: note = derived and/or modified sequence opt2 fromPAI-2__Homo_sapiens__AAA36797
  source 1..1248: mol_type = other RNA
atggaggacctctgcgtcgccaacaccctcttcgccctcaacctcttcaagcacctcgccaaggcctcccccacccagaacctcttcctctccccctggtccatctcctccaccatggccatggtctacatgggctcccgcggctccaccgaggaccagatggccaaggtcctccagttcaacgaggtcggcgccaacgccgtcacccccatgacccccgagaacttcacctcctgcggcttcatgcagcagatccagaagggctcctaccccgacgccatcctccaggcccaggccgccgacaagatccactcctccttccgctccctctcctccgccatcaacgcctccaccggcaactacctcctcgagtccgtcaacaagctcttcggcgagaagtccgcctccttccgcgaggagtacatccgcctctgccagaagtactactcctccgagccccaggccgtcgacttcctcgagtgcgccgaggaggcccgcaagaagatcaactcctgggtcaagacccagaccaagggcaagatccccaacctcctccccgagggctccgtcgacggcgacacccgcatggtcctcgtcaacgccgtctacttcaagggcaagtggaagacccccttcgagaagaagctcaacggcctctaccccttccgcgtcaactccgcccagcgcacccccgtccagatgatgtacctccgcgagaagctcaacatcggctacatcgaggacctcaaggcccagatcctcgagctcccctacgccggcgacgtctccatgttcctcctcctccccgacgagatcgccgacgtctccaccggcctcgagctcctcgagtccgagatcacctacgacaagctcaacaagtggacctccaaggacaagatggccgaggacgaggtcgaggtctacatcccccagttcaagctcgaggagcactacgagctccgctccatcctccgctccatgggcatggaggacgccttcaacaagggccgcgccaacttctccggcatgtccgagcgcaacgacctcttcctctccgaggtcttccaccaggccatggtcgacgtcaacgaggagggcaccgaggccgccgccggcaccggcggcgtcatgaccggccgcaccggccacggcggcccccagttcgtcgccgaccaccccttcctcttcctcatcatgcacaagatcaccaactgcatcctcttcttcggccgcttctcctccccctga

SEQ ID NO: 3034 - RNA, 1248 nt, synthetic construct
  misc_feature 1..1248: note = derived and/or modified sequence opt3 fromPAI-2__Homo_sapiens__AAA36797
  source 1..1248: mol_type = other RNA
atggaggacctgtgcgtggccaacaccctcttcgctcttaatctgtttaagcacttggcaaaagccagccccacacagaacttattcctgtccccttggtctatctcaagtactatggcgatggtctacatgggcagcagagggtccacggaagatcaaatggctaaggttctacagtttaatgaggtgggagccaacgcagtaaccccaatgacaccggaaaatttcacttcttgtggttttatgcagcagattcaaaaaggctcgtatcccgacgccatactccaggctcaggcagccgataagatccatagctcattcaggagtctgtcctctgctattaacgccagcaccgggaattaccttctggagtccgtgaacaaattgtttggagaaaagtcagcgagtttccgggaggagtatatccgcctctgccagaagtactatagctctgaacctcaagcagtcgactttctggagtgtgccgaagaggctcgtaaaaagattaattcctgggtgaaaacacagaccaagggcaaaatcccaaacctgctccccgagggttcagttgatggggacactcgaatggtgttagtcaatgccgtgtacttcaagggaaagtggaaaacaccttttgaaaagaaactgaacggcctttatccattcagagtaaatagcgcacagaggacccccgttcagatgatgtacttgcgggagaagctgaacataggctacatcgaagatctaaaagctcaaattctcgagctgccttatgccggggacgtgagtatgtttcttctgttgccagatgaaatcgcggacgtctctacgggactcgagctgttagagtccgaaattacttacgataagctgaataaatggaccagcaaggacaagatggccgaggatgaagtggaggtgtatatcccgcagttcaaactcgaggaacactacgagcttcgctcgatactgagatctatgggtatggaagacgcattcaacaagggcagggctaacttttccgggatgtcagagcggaatgacttgttcctaagtgaagtctttcatcaggccatggttgatgtgaacgaggaaggaacagaggctgccgcaggcactggtggggtaatgaccggacgcacaggccacggcgggccccaattcgtggccgaccatccttttctgttcctcattatgcacaaaatcaccaattgcattctgtttttcggacgatttagctccccatga

SEQ ID NO: 3035 - RNA, 1248 nt, synthetic construct
  misc_feature 1..1248: note = derived and/or modified sequence opt4 fromPAI-2__Homo_sapiens__AAA36797
  source 1..1248: mol_type = other RNA
atggaggacctgtgcgtggccaacaccctgttcgccctgaacctgttcaagcacctggccaaggccagccccacccagaacctgttcctgagcccctggagcatcagcagcaccatggccatggtgtacatgggcagcagaggcagcaccgaggaccagatggccaaggtgctgcagttcaacgaggtgggcgccaacgccgtgacccccatgacccccgagaacttcaccagctgcggcttcatgcagcagatccagaagggcagctaccccgacgccatcctgcaggcccaggccgccgacaagatccacagcagcttcagaagcctgagcagcgccatcaacgccagcaccggcaactacctgctggagagcgtgaacaagctgttcggcgagaagagcgccagcttcagagaggagtacatcagactgtgccagaagtactacagcagcgagccccaggccgtggacttcctggagtgcgccgaggaggccagaaagaagatcaacagctgggtgaagacccagaccaagggcaagatccccaacctgctgcccgagggcagcgtggacggcgacaccagaatggtgctggtgaacgccgtgtacttcaagggcaagtggaagacccccttcgagaagaagctgaacggcctgtaccccttcagagtgaacagcgcccagagaacccccgtgcagatgatgtacctgagagagaagctgaacatcggctacatcgaggacctgaaggcccagatcctggagctgccctacgccggcgacgtgagcatgttcctgctgctgcccgacgagatcgccgacgtgagcaccggcctggagctgctggagagcgagatcacctacgacaagctgaacaagtggaccagcaaggacaagatggccgaggacgaggtggaggtgtacatcccccagttcaagctggaggagcactacgagctgagaagcatcctgagaagcatgggcatggaggacgccttcaacaagggcagagccaacttcagcggcatgagcgagagaaacgacctgttcctgagcgaggtgttccaccaggccatggtggacgtgaacgaggagggcaccgaggccgccgccggcaccggcggcgtgatgaccggcagaaccggccacggcggcccccagttcgtggccgaccaccccttcctgttcctgatcatgcacaagatcaccaactgcatcctgttcttcggcagattcagcagcccctga

SEQ ID NO: 3036 - RNA, 1248 nt, synthetic construct
  misc_feature 1..1248: note = derived and/or modified sequence opt5 fromPAI-2__Homo_sapiens__AAA36797
  source 1..1248: mol_type = other RNA
atggaggacctgtgcgtggccaacaccctcttcgctctgaatctttttaagcacctggccaaagcgagccccacacagaacctcttcctgtccccttggtctatcagctccacgatggctatggtctacatgggctctagagggagcaccgaagatcaaatggccaaggttcttcagtttaatgaggtgggagccaacgctgtgacaccgatgacccccgaaaatttcacatcctgtggctttatgcagcagattcaaaaagggtcttatcctgacgccatcctgcaggctcaggccgcggataagattcatagctccttccggagcctctcttccgccatcaacgctagcaccggaaattacctgctggagtctgtcaacaaactctttggcgaaaagtccgccagcttccgcgaggagtatattagactgtgccagaagtactattcttccgaaccccaagctgtggactttcttgagtgtgccgaagaggcgcggaaaaagatcaatagctgggttaaaacacagaccaaggggaaaatccctaacctgctccccgagggatccgtggatggcgacacgcgcatggtcctggtgaatgccgtttacttcaagggcaagtggaaaaccccttttgaaaagaaacttaacgggctgtatccgttcagagtcaattctgctcagcggacacccgtgcagatgatgtacctccgcgagaagctgaacattggatacatcgaagatctgaaagcccaaattctcgagctgccttatgctggcgacgtgagcatgtttcttctgctccccgatgaaatcgccgacgtgtccaccgggctggagcttctggagagcgaaattacatacgataagctcaataaatggacctctaaggacaagatggccgaggatgaagtcgaggtttatatccctcagttcaaactggaggaacactacgagctgagatccattctccggagcatgggaatggaagacgctttcaacaagggccgcgcgaacttttctgggatgagcgagagaaatgacctgttcctttccgaagtgtttcatcaggccatggtggatgtcaacgaggaaggaacggaggctgccgccggcacaggcggggtgatgaccggacggacaggccacgggggaccccaattcgttgctgaccatccgtttctgttcctcatcatgcacaaaatcaccaattgcattctgtttttcggccgcttttctagcccttga

SEQ ID NO: 3037 - protein, 175 aa, synthetic construct
  REGION 1..175: note = PAP__Homo_sapiens__Q06141
MLPPMALPSVSWMLLSCLMLLSQVQGEEPQRELPSARIRCPKGSKAYGSHCYALFLSPKSWTDADLACQKRPSGNLVSVLSGAEGSFVSSLVKSIGNSYSYVWIGLHDPTQGTEPNGEGWEWSSSDVMNYFAWERNPSTISSPGHCASLSRSTAFLRWKDYNCNVRLPYVCKFTD

SEQ ID NO: 3038 - RNA, 528 nt, synthetic construct
  misc_feature 1..528: note = PAP__Homo_sapiens__AAA60020
  source 1..528: mol_type = other RNA
atgctgcctcccatggccctgcccagtgtatcttggatgctgctttcctgcctcatgctgctgtctcaggttcaaggtgaagaaccccagagggaactgccctctgcacggatccgctgtcccaaaggctccaaggcctatggctcccactgctatgccttgtttttgtcaccaaaatcctggacagatgcagatctggcctgccagaagcggccctctggaaacctggtgtctgtgctcagtggggctgagggatccttcgtgtcctccctggtgaagagcattggtaacagctactcatacgtctggattgggctccatgaccccacacagggcaccgagcccaatggagaaggttgggagtggagtagcagtgatgtgatgaattactttgcatgggagagaaatccctccaccatctcaagccccggccactgtgcgagcctgtcgagaagcacagcatttctgaggtggaaagattataactgtaatgtgaggttaccctatgtctgcaagttcactgactag

SEQ ID NO: 3039 - RNA, 528 nt, synthetic construct
  misc_feature 1..528: note = derived and/or modified sequence opt1 fromPAP__Homo_sapiens__AAA60020
  source 1..528: mol_type = other RNA
atgctgcccccgatggccctccccagcgtgtcctggatgctgctgagctgcctcatgctgctgtcccaggtccagggcgaggagccccagcgcgagctccccagcgcccggatccgctgcccgaaggggtccaaggcgtacggcagccactgctacgccctgttcctgtcccccaagagctggaccgacgccgacctcgcctgccagaagcggccctccgggaacctggtgagcgtgctgtccggcgccgaggggagcttcgtctccagcctcgtgaagtccatcggcaacagctactcctacgtgtggatcggcctgcacgaccccacccaggggacggagccgaacggcgaggggtgggagtggagctccagcgacgtcatgaactacttcgcgtgggagcgcaaccccagcaccatctccagccccggccactgcgcctccctgagccggtccaccgccttcctccgctggaaggactacaactgcaacgtgcggctgccctacgtgtgcaagttcaccgactga

SEQ ID NO: 3040 - RNA, 528 nt, synthetic construct
  misc_feature 1..528: note = derived and/or modified sequence opt2 fromPAP__Homo_sapiens__AAA60020
  source 1..528: mol_type = other RNA
atgctcccccccatggccctcccctccgtctcctggatgctcctctcctgcctcatgctcctctcccaggtccagggcgaggagccccagcgcgagctcccctccgcccgcatccgctgccccaagggctccaaggcctacggctcccactgctacgccctcttcctctcccccaagtcctggaccgacgccgacctcgcctgccagaagcgcccctccggcaacctcgtctccgtcctctccggcgccgagggctccttcgtctcctccctcgtcaagtccatcggcaactcctactcctacgtctggatcggcctccacgaccccacccagggcaccgagcccaacggcgagggctgggagtggtcctcctccgacgtcatgaactacttcgcctgggagcgcaacccctccaccatctcctcccccggccactgcgcctccctctcccgctccaccgccttcctccgctggaaggactacaactgcaacgtccgcctcccctacgtctgcaagttcaccgactga

SEQ ID NO: 3041 - RNA, 528 nt, synthetic construct
  misc_feature 1..528: note = derived and/or modified sequence opt3 fromPAP__Homo_sapiens__AAA60020
  source 1..528: mol_type = other RNA
atgctgccccctatggccctcccaagcgtgtcctggatgcttctgtcttgcttgatgttactgtcacaggtccaaggcgaggaaccgcagagagagctacccagtgctaggatccggtgtcctaaggggagcaaagcatacggatcccactgctatgccctcttcctgtctccaaagtcgtggaccgacgcggatcttgcttgtcagaaacgcccctcaggtaacctggttagcgtgttgagtggcgccgaagggtcctttgtatctagcctcgtgaagtccattggaaattcatacagttatgtctggataggcctgcatgaccctacacagggtactgagccaaacggggaaggatgggagtggtctagctccgatgtgatgaattacttcgcatgggagcgaaacccctcaacgatcagcagtcctggccactgcgcctctctgtcccgtagcaccgcttttctcagatggaaagactataattgtaacgttaggttaccatacgtgtgcaagttcacagattga

SEQ ID NO: 3042 - RNA, 528 nt, synthetic construct
  misc_feature 1..528: note = derived and/or modified sequence opt4 fromPAP__Homo_sapiens__AAA60020
  source 1..528: mol_type = other RNA
atgctgccccccatggccctgcccagcgtgagctggatgctgctgagctgcctgatgctgctgagccaggtgcagggcgaggagccccagagagagctgcccagcgccagaatcagatgccccaagggcagcaaggcctacggcagccactgctacgccctgttcctgagccccaagagctggaccgacgccgacctggcctgccagaagagacccagcggcaacctggtgagcgtgctgagcggcgccgagggcagcttcgtgagcagcctggtgaagagcatcggcaacagctacagctacgtgtggatcggcctgcacgaccccacccagggcaccgagcccaacggcgagggctgggagtggagcagcagcgacgtgatgaactacttcgcctgggagagaaaccccagcaccatcagcagccccggccactgcgccagcctgagcagaagcaccgccttcctgagatggaaggactacaactgcaacgtgagactgccctacgtgtgcaagttcaccgactga

SEQ ID NO: 3043 - RNA, 528 nt, synthetic construct
  misc_feature 1..528: note = derived and/or modified sequence opt5 fromPAP__Homo_sapiens__AAA60020
  source 1..528: mol_type = other RNA
atgctgccccctatggccctcccgagcgtgtcctggatgctgctttcttgcctgatgctcctgagccaggtccaaggcgaggaaccccagagagagcttccttccgctcggatccgctgtcccaaggggtctaaagcctacggaagccactgctatgcgctgttcctctcccctaagtcttggaccgacgctgatctggcctgtcagaaaagacccagcggcaacctggtttccgtgctcagcggggccgaaggatcttttgtgtccagcctggtcaagtctattggcaattcctacagctatgtgtggatcgggcttcatgaccctacacagggaacggagccgaacggcgaaggctgggagtggtcttccagcgatgttatgaattacttcgcttgggagcggaacccctccaccatttctagccctgggcactgcgcctccctgagccgctctacagcttttctcagatggaaagactataattgtaacgtgcggctgccctacgtctgcaagttcaccgattga

SEQ ID NO: 3044 - protein, 175 aa, synthetic construct; identical to SEQ ID NO: 3037
  REGION 1..175: note = PAP__Homo_sapiens__Q53S56

SEQ ID NO: 3045 - RNA, 528 nt, synthetic construct; identical to SEQ ID NO: 3038
  misc_feature 1..528: note = PAP__Homo_sapiens__AAT11159
  source 1..528: mol_type = other RNA

SEQ ID NO: 3046 - RNA, 528 nt, synthetic construct; identical to SEQ ID NO: 3039
  misc_feature 1..528: note = derived and/or modified sequence opt1 fromPAP__Homo_sapiens__AAT11159
  source 1..528: mol_type = other RNA

SEQ ID NO: 3047 - RNA, 528 nt, synthetic construct; identical to SEQ ID NO: 3040
  misc_feature 1..528: note = derived and/or modified sequence opt2 fromPAP__Homo_sapiens__AAT11159
  source 1..528: mol_type = other RNA

SEQ ID NO: 3048 - RNA, 528 nt, synthetic construct; identical to SEQ ID NO: 3041
  misc_feature 1..528: note = derived and/or modified sequence opt3 fromPAP__Homo_sapiens__AAT11159
  source 1..528: mol_type = other RNA

SEQ ID NO: 3049 - RNA, 528 nt, synthetic construct; identical to SEQ ID NO: 3042
  misc_feature 1..528: note = derived and/or modified sequence opt4 fromPAP__Homo_sapiens__AAT11159
  source 1..528: mol_type = other RNA

SEQ ID NO: 3050 - RNA, 528 nt, synthetic construct; identical to SEQ ID NO: 3043
  misc_feature 1..528: note = derived and/or modified sequence opt5 fromPAP__Homo_sapiens__AAT11159
  source 1..528: mol_type = other RNA

SEQ ID NO: 3051 - protein, 126 aa, synthetic construct
  REGION 1..126: note = PATE__Homo_sapiens__Q8WXA2
MDKSLLLELPILLCCFRALSGSLSMRNDAVNEIVAVKNNFPVIEIVQCRMCHLQFPGEKCSRGRGICTATTEEACMVGRMFKRDGNPWLTFMGCLKNCADVKGIRWSVYLVNFRCCRSHDLCNEDL

SEQ ID NO: 3052 - RNA, 381 nt, synthetic construct
  misc_feature 1..381: note = PATE__Homo_sapiens__AAH39863
  source 1..381: mol_type = other RNA
atggacaagtccctcttgctggaactccccatcctgctctgctgctttagggcattatctggatcactttcaatgagaaatgatgcagtcaatgaaatagttgctgtgaaaaacaattttcctgtgatagaaattgttcagtgtaggatgtgccacctccagttcccaggagaaaagtgctccagaggaagaggaatatgcacagcaacaacagaagaggcctgcatggttggaaggatgttcaaaagggatggtaatccctggttaaccttcatgggctgcctaaagaactgtgctgatgtgaaaggcataaggtggagtgtctatttggtgaacttcaggtgctgcaggagccatgacctgtgcaatgaagacctttag

SEQ ID NO: 3053 - RNA, 381 nt, synthetic construct
  misc_feature 1..381: note = derived and/or modified sequence opt1 fromPATE__Homo_sapiens__AAH39863
  source 1..381: mol_type = other RNA
atggacaagagcctgctcctggagctgcccatcctcctgtgctgcttccgcgccctgtccggcagcctctccatgcggaacgacgccgtgaacgagatcgtcgcggtgaagaacaacttcccggtgatcgagatcgtccagtgccgcatgtgccacctccagttccccggggagaagtgcagccggggccgcgggatctgcaccgccaccacggaggaggcctgcatggtgggccggatgttcaagcgcgacgggaacccctggctgaccttcatgggctgcctgaagaactgcgccgacgtgaagggcatccggtggtccgtctacctggtgaacttccgctgctgccggagccacgacctgtgcaacgaggacctctga

SEQ ID NO: 3054 - RNA, 381 nt, synthetic construct
  misc_feature 1..381: note = derived and/or modified sequence opt2 fromPATE__Homo_sapiens__AAH39863
  source 1..381: mol_type = other RNA
atggacaagtccctcctcctcgagctccccatcctcctctgctgcttccgcgccctctccggctccctctccatgcgcaacgacgccgtcaacgagatcgtcgccgtcaagaacaacttccccgtcatcgagatcgtccagtgccgcatgtgccacctccagttccccggcgagaagtgctcccgcggccgcggcatctgcaccgccaccaccgaggaggcctgcatggtcggccgcatgttcaagcgcgacggcaacccctggctcaccttcatgggctgcctcaagaactgcgccgacgtcaagggcatccgctggtccgtctacctcgtcaacttccgctgctgccgctcccacgacctctgcaacgaggacctctga

SEQ ID NO: 3055 - RNA, 381 nt, synthetic construct
  misc_feature 1..381: note = derived and/or modified sequence opt3 fromPATE__Homo_sapiens__AAH39863
  source 1..381: mol_type = other RNA
atggacaagagcctgctccttgagctgcccatcttgttatgctgtttcagagccctgtccggctctctatcaatgaggaacgatgctgtgaatgaaattgtcgcagttaaaaacaattttcctgtgatagagatcgtacagtgccggatgtgtcacctccaattcccaggggaaaagtgcagtcgcggacgaggtatttgtaccgccacaactgaggaagcgtgcatggtgggccgtatgtttaaaagagacgggaacccgtggctgacgttcatgggatgtcttaagaattgcgctgatgtcaaaggcatcaggtggagcgtgtacctggttaactttcggtgttgccgctcccatgacttgtgtaatgaggatctctga

SEQ ID NO: 3056 - RNA, 381 nt, synthetic construct
  misc_feature 1..381: note = derived and/or modified sequence opt4 fromPATE__Homo_sapiens__AAH39863
  source 1..381: mol_type = other RNA
atggacaagagcctgctgctggagctgcccatcctgctgtgctgcttcagagccctgagcggcagcctgagcatgagaaacgacgccgtgaacgagatcgtggccgtgaagaacaacttccccgtgatcgagatcgtgcagtgcagaatgtgccacctgcagttccccggcgagaagtgcagcagaggcagaggcatctgcaccgccaccaccgaggaggcctgcatggtgggcagaatgttcaagagagacggcaacccctggctgaccttcatgggctgcctgaagaactgcgccgacgtgaagggcatcagatggagcgtgtacctggtgaacttcagatgctgcagaagccacgacctgtgcaacgaggacctgtga

SEQ ID NO: 3057 - RNA, 381 nt, synthetic construct
  misc_feature 1..381: note = derived and/or modified sequence opt5 fromPATE__Homo_sapiens__AAH39863
  source 1..381: mol_type = other RNA
atggacaagagcctgctcctggagcttcccatcctgctctgctgtttcagagccctgtccggctctcttagcatgcggaacgatgctgtgaatgaaattgtcgccgttaaaaacaattttcctgtgatcgagattgtgcagtgccgcatgtgtcatctgcaattcccgggggaaaagtgctccagaggacggggcatctgtaccgcgacaacggaggaggcttgcatggtcgggcgcatgtttaaaagagacggaaacccctggctcaccttcatgggctgtctgaagaattgcgccgatgtgaaagggattcggtggtctgtttacctggtgaactttcgctgttgcagaagccacgacctctgtaatgaagatctgtga

SEQ ID NO: 3058 - protein, 479 aa, synthetic construct
  REGION 1..479: note = PAX3__Homo_sapiens__P23760
MTTLAGAVPRMMRPGPGQNYPRSGFPLEVSTPLGQGRVNQLGGVFINGRPLPNHIRHKIVEMAHHGIRPCVISRQLRVSHGCVSKILCRYQETGSIRPGAIGGSKPKQVTTPDVEKKIEEYKRENPGMFSWEIRDKLLKDAVCDRNTVPSVSSISRILRSKFGKGEEEEADLERKEAEESEKKAKHSIDGILSERASAPQSDEGSDIDSEPDLPLKRKQRRSRTTFTAEQLEELERAFERTHYPDIYTREELAQRAKLTEARVQVWFSNRRARWRKQAGANQLMAFNHLIPGGFPPTAMPTLPTYQLSETSYQPTSIPQAVSDPSSTVHRPQPLPPSTVHQSTIPSNPDSSSAYCLPSTRHGFSSYTDSFVPPSGPSNPMNPTIGNGLSPQVMGLLTNHGGVPHQPQTDYALSPLTGGLEPTTTVSASCSQRLDHMKSLDSLPTSQSYCPPTYSTTGYSMDPVTGYQYGQYGQSKPWTF

SEQ ID NO: 3059 - RNA, 1440 nt, synthetic construct
  misc_feature 1..1440: note = PAX3__Homo_sapiens__CCDS42826.1
  source 1..1440: mol_type = other RNA
atgaccacgctggccggcgctgtgcccaggatgatgcggccgggcccggggcagaactacccgcgtagcgggttcccgctggaagtgtccactcccctcggccagggccgcgtcaaccagctcggcggtgtttttatcaacggcaggccgctgcccaaccacatccgccacaagatcgtggagatggcccaccacggcatccggccctgcgtcatctcgcgccagctgcgcgtgtcccacggctgcgtctccaagatcctgtgcaggtaccaggagactggctccatacgtcctggtgccatcggcggcagcaagcccaagcaggtgacaacgcctgacgtggagaagaaaattgaggaatacaaaagagagaacccgggcatgttcagctgggaaatccgagacaaattactcaaggacgcggtctgtgatcgaaacaccgtgccgtcagtgagttccatcagccgcatcctgagaagtaaattcgggaaaggtgaagaggaggaggccgacttggagaggaaggaggcagaggaaagcgagaagaaggccaaacacagcatcgacggcatcctgagcgagcgagcctcagcaccccaatcagatgaaggctctgatattgactctgaaccagatttaccactaaagaggaaacagcgcagaagccgaaccaccttcacagcagaacagctggaggaactggagcgtgcttttgagagaactcattaccctgacatttatactagggaggaactggcccagagggcgaagctcaccgaggcccgagtacaggtctggtttagcaaccgccgtgcaagatggaggaagcaagctggggccaatcaactgatggctttcaaccatctcattcccggggggttccctcccactgccatgccgaccttgccaacgtaccagctgtcggagacctcttaccagcccacatctattccacaagctgtgtcagatcccagcagcaccgttcacagacctcaaccgcttcctccaagcactgtacaccaaagcacgattccttccaacccagacagcagctctgcctactgcctccccagcaccaggcatggattttccagctatacagacagctttgtgcctccgtcggggccctccaaccccatgaaccccaccattggcaatggcctctcacctcaggtaatgggactcctgaccaaccacggtggggtacctcatcagccccagactgattacgcgctctcccctctcaccgggggtctggaacctaccaccacggtgtcggccagctgcagtcagagactagaccatatgaagagcttggacagtctgccaacatctcagtcctactgtccacccacctatagcaccacaggctacagtatggaccctgtcacaggctaccaatatgggcagtatggacaaagtaagccttggactttttag

SEQ ID NO: 3060 - RNA, 1440 nt, synthetic construct
  misc_feature 1..1440: note = derived and/or modified sequence opt1 fromPAX3__Homo_sapiens__CCDS42826.1
  source 1..1440: mol_type = other RNA
atgaccaccctggccggcgccgtgccccgcatgatgcggccggggcccggccagaactacccccgcagcgggttccccctcgaggtctccacgccgctgggccaggggcgggtgaaccagctgggcggcgtgttcatcaacgggcgccccctccccaaccacatccggcacaagatcgtcgagatggcgcaccacggcatccgcccctgcgtgatcagccggcagctgcgcgtgtcccacgggtgcgtcagcaagatcctgtgccggtaccaggagaccggctccatccgcccgggggccatcggcggcagcaagcccaagcaggtcaccacccccgacgtggagaagaagatcgaggagtacaagcgggagaaccccgggatgttctcctgggagatccgcgacaagctcctgaaggacgccgtgtgcgaccggaacacggtgccgagcgtgtccagcatctcccgcatcctgcggagcaagttcggcaagggggaggaggaggaggccgacctcgagcgcaaggaggccgaggagtccgagaagaaggcgaagcacagcatcgacggcatcctgtccgagcgggccagcgcgccccagtccgacgagggcagcgacatcgactccgagcccgacctgcccctcaagcgcaagcagcggcgcagccggaccaccttcaccgccgagcagctggaggagctggagcgcgccttcgagcgcacgcactacccggacatctacacccgggaggagctcgcccagcgcgccaagctgaccgaggcccgggtccaggtgtggttcagcaaccgccgggcccgctggcggaagcaggcgggggccaaccagctgatggccttcaaccacctcatccccggcgggttcccgcccaccgccatgcccacgctgcccacctaccagctgtccgagaccagctaccagcccacctccatcccccaggccgtgagcgacccgtccagcacggtccaccgcccccagcccctgcccccgtccaccgtgcaccagagcaccatcccctccaaccccgacagctccagcgcgtactgcctcccgtccacccggcacggcttcagctcctacacggacagcttcgtgccgccctccgggcccagcaaccccatgaaccccaccatcggcaacggcctgtccccgcaggtcatggggctcctgaccaaccacggcggggtgccccaccagccccagaccgactacgccctgagccccctcacgggcgggctggagcccaccaccaccgtgagcgcctcctgcagccagcgcctggaccacatgaagtccctcgacagcctgcccacgtcccagagctactgcccgcccacctactccaccaccggctacagcatggaccccgtcacgggctaccagtacgggcagtacggccagtccaagccctggaccttctga

SEQ ID NO: 3061 - RNA, 1440 nt, synthetic construct
  misc_feature 1..1440: note = derived and/or modified sequence opt2 fromPAX3__Homo_sapiens__CCDS42826.1
  source 1..1440: mol_type = other RNA
atgaccaccctcgccggcgccgtcccccgcatgatgcgccccggccccggccagaactacccccgctccggcttccccctcgaggtctccacccccctcggccagggccgcgtcaaccagctcggcggcgtcttcatcaacggccgccccctccccaaccacatccgccacaagatcgtcgagatggcccaccacggcatccgcccctgcgtcatctcccgccagctccgcgtctcccacggctgcgtctccaagatcctctgccgctaccaggagaccggctccatccgccccggcgccatcggcggctccaagcccaagcaggtcaccacccccgacgtcgagaagaagatcgaggagtacaagcgcgagaaccccggcatgttctcctgggagatccgcgacaagctcctcaaggacgccgtctgcgaccgcaacaccgtcccctccgtctcctccatctcccgcatcctccgctccaagttcggcaagggcgaggaggaggaggccgacctcgagcgcaaggaggccgaggagtccgagaagaaggccaagcactccatcgacggcatcctctccgagcgcgcctccgccccccagtccgacgagggctccgacatcgactccgagcccgacctccccctcaagcgcaagcagcgccgctcccgcaccaccttcaccgccgagcagctcgaggagctcgagcgcgccttcgagcgcacccactaccccgacatctacacccgcgaggagctcgcccagcgcgccaagctcaccgaggcccgcgtccaggtctggttctccaaccgccgcgcccgctggcgcaagcaggccggcgccaaccagctcatggccttcaaccacctcatccccggcggcttcccccccaccgccatgcccaccctccccacctaccagctctccgagacctcctaccagcccacctccatcccccaggccgtctccgacccctcctccaccgtccaccgcccccagcccctccccccctccaccgtccaccagtccaccatcccctccaaccccgactcctcctccgcctactgcctcccctccacccgccacggcttctcctcctacaccgactccttcgtccccccctccggcccctccaaccccatgaaccccaccatcggcaacggcctctccccccaggtcatgggcctcctcaccaaccacggcggcgtcccccaccagccccagaccgactacgccctctcccccctcaccggcggcctcgagcccaccaccaccgtctccgcctcctgctcccagcgcctcgaccacatgaagtccctcgactccctccccacctcccagtcctactgcccccccacctactccaccaccggctactccatggaccccgtcaccggctaccagtacggccagtacggccagtccaagccctggaccttctga

SEQ ID NO: 3062 - RNA, 1440 nt, synthetic construct
  misc_feature 1..1440: note = derived and/or modified sequence opt3 fromPAX3__Homo_sapiens__CCDS42826.1
  source 1..1440: mol_type = other RNA
atgaccacactggccggcgctgtgcccagaatgatgaggcctgggccaggacagaactacccgcggagcggtttccccctcgaggtctccactcctcttggccaagggcgcgttaatcagctgggaggcgtgtttatcaacggtcgaccattgcccaatcacattcgtcataagatagtagaaatggcacaccatgggatcagaccttgcgtgatttctaggcagttacgggtctcacacggatgcgtgagtaaaatcctgtgccgctatcaggagacgggcagcattagaccaggcgccatcgggggatccaagcccaaacaagttaccacacctgacgtggaaaagaaaatagaggaatacaagagggagaacccaggtatgttctcttgggagatccgggataagctactcaaagacgcggtctgtgatcgcaatactgtgccgtcggtatcaagcattagtcgaatcctgagatccaagtttggcaaaggggaagaggaagaggctgaccttgagaggaaggaagccgaggaatctgagaaaaaggcaaagcatagcattgatggaatcctgtccgaacgggcctcagctccccagagtgacgagggcagcgatatagactctgagcctgatttgccactcaaacgtaagcagcgcagatccaggaccacattcaccgcagaacagctggaggaactggagcgggcctttgaacgaactcactatcccgacatttacacacgcgaggagctcgctcaaagagccaaattaaccgaagcgagggttcaggtgtggttctcaaaccggcgcgcaagatggaggaagcaggccggtgctaatcagctgatggcctttaaccaccttatccctgggggattcccacccacggcaatgccgactttgcctacctatcaactgagcgagacaagttaccagcccacttctattccacaggctgtctccgatcctagctcgaccgtgcatcgtccccaaccactacccccttctacagtgcaccagtccaccatcccatcaaatccggacagtagctccgcctattgcctcccctctacgcggcatggctttagctcatacactgatagtttcgtccctccatccggccccagcaaccctatgaatccaacaatcgggaacggactgtctccccaggttatgggtcttctgaccaatcacggcggggtgccgcaccagcctcaaactgactacgcgttgtcaccactcacaggaggcctggaacccaccacgaccgtaagtgccagctgttcccagcgattagaccatatgaaatctctggattcgctccctacaagccagtcctattgtcccccaacttactcaaccacaggttatagtatggaccctgtgactgggtaccagtatggccaatacggacagtctaagccctggaccttttga

SEQ ID NO: 3063 - RNA, 1440 nt, synthetic construct
  misc_feature 1..1440: note = derived and/or modified sequence opt4 fromPAX3__Homo_sapiens__CCDS42826.1
  source 1..1440: mol_type = other RNA
atgaccaccctggccggcgccgtgcccagaatgatgagacccggccccggccagaactaccccagaagcggcttccccctggaggtgagcacccccctgggccagggcagagtgaaccagctgggcggcgtgttcatcaacggcagacccctgcccaaccacatcagacacaagatcgtggagatggcccaccacggcatcagaccctgcgtgatcagcagacagctgagagtgagccacggctgcgtgagcaagatcctgtgcagataccaggagaccggcagcatcagacccggcgccatcggcggcagcaagcccaagcaggtgaccacccccgacgtggagaagaagatcgaggagtacaagagagagaaccccggcatgttcagctgggagatcagagacaagctgctgaaggacgccgtgtgcgacagaaacaccgtgcccagcgtgagcagcatcagcagaatcctgagaagcaagttcggcaagggcgaggaggaggaggccgacctggagagaaaggaggccgaggagagcgagaagaaggccaagcacagcatcgacggcatcctgagcgagagagccagcgccccccagagcgacgagggcagcgacatcgacagcgagcccgacctgcccctgaagagaaagcagagaagaagcagaaccaccttcaccgccgagcagctggaggagctggagagagccttcgagagaacccactaccccgacatctacaccagagaggagctggcccagagagccaagctgaccgaggccagagtgcaggtgtggttcagcaacagaagagccagatggagaaagcaggccggcgccaaccagctgatggccttcaaccacctgatccccggcggcttcccccccaccgccatgcccaccctgcccacctaccagctgagcgagaccagctaccagcccaccagcatcccccaggccgtgagcgaccccagcagcaccgtgcacagaccccagcccctgccccccagcaccgtgcaccagagcaccatccccagcaaccccgacagcagcagcgcctactgcctgcccagcaccagacacggcttcagcagctacaccgacagcttcgtgccccccagcggccccagcaaccccatgaaccccaccatcggcaacggcctgagcccccaggtgatgggcctgctgaccaaccacggcggcgtgccccaccagccccagaccgactacgccctgagccccctgaccggcggcctggagcccaccaccaccgtgagcgccagctgcagccagagactggaccacatgaagagcctggacagcctgcccaccagccagagctactgcccccccacctacagcaccaccggctacagcatggaccccgtgaccggctaccagtacggccagtacggccagagcaagccctggaccttctga

SEQ ID NO: 3064 - RNA, 1440 nt, synthetic construct
  misc_feature 1..1440: note = derived and/or modified sequence opt5 fromPAX3__Homo_sapiens__CCDS42826.1
  source 1..1440: mol_type = other RNA
atgaccacactggccggcgctgtgcccagaatgatgcggcctgggccgggacagaactacccccgcagcggcttccctctcgaggtctccacgcccctggggcaaggaagagttaatcagcttggcggggtgtttatcaacggacggcctctgcccaatcacattcgccataagatcgtggaaatggcccaccatggcattagaccttgcgtcatctctcggcagctccgcgtgagccacggctgtgtttccaaaattctgtgcagatatcaggagaccgggtctatccggccgggagcgatcggcgggagcaagcccaaacaagtgacaacccctgacgtcgaaaagaaaattgaggaatacaagcgcgagaaccccggaatgttctcctgggagatcagagataaacttctgaaggacgctgtgtgtgatcggaatacagttccttctgtgagctccattagccgcatcctcagatctaagtttggcaaaggggaagaggaagaggccgacctggagcggaaggaagccgaggaatccgagaaaaaggctaagcatagcattgatggaatcctgtctgaacgcgcctccgctccccagagcgacgagggctctgatattgactccgagccggatctccctctgaaaagaaagcagcggagaagccgcaccacattcaccgccgaacagcttgaggaactggagcgggcgtttgaaagaacgcactatcccgacatctacacccgcgaggagctcgcccaacgggctaaactgacagaagccagagtccaggtgtggttctccaaccgccgggctagatggcgcaagcaggccggcgcgaatcagcttatggcctttaaccacctgatccctgggggattccctcccaccgctatgcccacactcccgacctatcaactgtctgagacgagctaccagcccacatccattcctcaggccgtgagcgatccctcttccaccgtccatcggcctcaacccctgccgcctagcacagttcaccagtctaccatccccagcaatcctgactcctctagcgcttattgcctcccctccaccagacatggctttagctcttacacagattccttcgtgcctcccagcgggccgtctaaccctatgaatcccacgattggaaacggcctgtcccctcaggtgatggggcttctgaccaatcacggaggcgtcccccaccagccgcaaacagactacgccctcagccccctgaccggcgggcttgaacctacaaccacggtgtccgcctcttgtagccagcgcctggaccatatgaaatccctcgattctctgcccacaagccagtcctattgccctcccacctacagcaccacaggatattctatggaccctgttaccggctaccagtatgggcaatacggacagtccaagccctggacattttga

SEQ ID NO: 3065 - protein, 391 aa, synthetic construct
  REGION 1..391: note = PAX5__Homo_sapiens__Q02548
MDLEKNYPTPRTSRTGHGGVNQLGGVFVNGRPLPDVVRQRIVELAHQGVRPCDISRQLRVSHGCVSKILGRYYETGSIKPGVIGGSKPKVATPKVVEKIAEYKRQNPTMFAWEIRDRLLAERVCDNDTVPSVSSINRIIRTKVQQPPNQPVPASSHSIVSTGSVTQVSSVSTDSAGSSYSISGILGITSPSADTNKRKRDEGIQESPVPNGHSLPGRDFLRKQMRGDLFTQQQLEVLDRVFERQHYSDIFTTTEPIKPEQTTEYSAMASLAGGLDDMKANLASPTPADIGSSVPGPQSYPIVTGRDLASTTLPGYPPHVPPAGQGSYSAPTLTGMVPGSEFSGSPYSHPQYSSYNDSWRFPNPGLLGSPYYYSAAARGAAPPAAATAYDRH

SEQ ID NO: 3066 - RNA, 1176 nt, synthetic construct
  misc_feature 1..1176: note = PAX5__Homo_sapiens__AAA58397
  source 1..1176: mol_type = other RNA
atggatttagagaaaaattatccgactcctcggaccagcaggacaggacatggaggagtgaatcagcttgggggggtttttgtgaatggacggccactcccggatgtagtccgccagaggatagtggaacttgctcatcaaggtgtcaggccctgcgacatctccaggcagcttcgggtcagccatggttgtgtcagcaaaattcttggcaggtattatgagacaggaagcatcaagcctggggtaattggaggatccaaaccaaaggtcgccacacccaaagtggtggaaaaaatcgctgaatataaacgccaaaatcccaccatgtttgcctgggagatcagggaccggctgctggcagagcgggtgtgtgacaatgacaccgtgcctagcgtcagttccatcaacaggatcatccggacaaaagtacagcagccacccaaccaaccagtcccagcttccagtcacagcatagtgtccactggctccgtgacgcaggtgtcctcggtgagcacggattcggccggctcgtcgtactccatcagcggcatcctgggcatcacgtcccccagcgccgacaccaacaagcgcaagagagacgaaggtattcaggagtctccggtgccgaacggccactcgcttccgggcagagacttcctccggaagcagatgcggggagacttgttcacacagcagcagctggaggtgctggaccgcgtgtttgagaggcagcactactcagacatcttcaccaccacagagcccatcaagcccgagcagaccacagagtattcagccatggcctcgctggctggtgggctggacgacatgaaggccaatctggccagccccacccctgctgacatcgggagcagtgtgccaggcccgcagtcctaccccattgtgacaggccgtgacttggcgagcacgaccctccccgggtaccctccacacgtcccccccgctggacagggcagctactcagcaccgacgctgacagggatggtgcctgggagtgagttttccgggagtccctacagccaccctcagtattcctcgtacaacgactcctggaggttccccaacccggggctgcttggctccccctactattatagcgctgccgcccgaggagccgccccacctgcagccgccactgcctatgaccgtcactga

SEQ ID NO: 3067 - RNA, 1176 nt, synthetic construct
  misc_feature 1..1176: note = derived and/or modified sequence opt1 fromPAX5__Homo_sapiens__AAA58397
  source 1..1176: mol_type = other RNA
atggacctggagaagaactaccccacgccccgcaccagccggaccggccacgggggcgtgaaccagctcgggggcgtcttcgtgaacgggcgccccctgcccgacgtggtccggcagcgcatcgtggagctggcccaccagggcgtgcggccctgcgacatctcccgccagctccgggtcagccacggctgcgtgtccaagatcctggggcgctactacgagaccggcagcatcaagccgggggtgatcggcgggtccaagcccaaggtcgccacccccaaggtggtggagaagatcgcggagtacaagcggcagaaccccaccatgttcgcctgggagatccgcgaccggctgctcgccgagcgcgtctgcgacaacgacacggtgccgagcgtgtccagcatcaaccggatcatccgcaccaaggtccagcagccgcccaaccagcccgtgcccgcctccagccactccatcgtgagcaccggctccgtcacccaggtgagctccgtgagcacggactccgccggcagctcctacagcatcagcgggatcctgggcatcacctcccccagcgcggacaccaacaagcggaagcgcgacgaggggatccaggagtcccccgtccccaacggccacagcctgccgggccgggacttcctccgcaagcagatgcgcggggacctgttcacccagcagcagctggaggtgctcgaccgggtgttcgagcggcagcactactccgacatcttcacgaccaccgagcccatcaagcccgagcagaccacggagtacagcgccatggcctccctggccggcgggctggacgacatgaaggcgaacctcgccagccccaccccggccgacatcggctccagcgtccccgggccccagtcctaccccatcgtgaccggccgcgacctggccagcaccacgctgccgggctacccgccccacgtcccgcccgccgggcagggctcctacagcgcgcccaccctcaccgggatggtgcccggctccgagttcagcgggtccccctacagccacccccagtactccagctacaacgacagctggcgcttccccaaccccggcctgctgggctccccgtactactacagcgccgccgcccgcggggccgcgccgcccgccgccgccaccgcctacgaccggcactga

SEQ ID NO: 3068 - RNA, 1176 nt, synthetic construct
  misc_feature 1..1176: note = derived and/or modified sequence opt2 fromPAX5__Homo_sapiens__AAA58397
  source 1..1176: mol_type = other RNA
atggacctcgagaagaactaccccaccccccgcacctcccgcaccggccacggcggcgtcaaccagctcggcggcgtcttcgtcaacggccgccccctccccgacgtcgtccgccagcgcatcgtcgagctcgcccaccagggcgtccgcccctgcgacatctcccgccagctccgcgtctcccacggctgcgtctccaagatcctcggccgctactacgagaccggctccatcaagcccggcgtcatcggcggctccaagcccaaggtcgccacccccaaggtcgtcgagaagatcgccgagtacaagcgccagaaccccaccatgttcgcctgggagatccgcgaccgcctcctcgccgagcgcgtctgcgacaacgacaccgtcccctccgtctcctccatcaaccgcatcatccgcaccaaggtccagcagccccccaaccagcccgtccccgcctcctcccactccatcgtctccaccggctccgtcacccaggtctcctccgtctccaccgactccgccggctcctcctactccatctccggcatcctcggcatcacctccccctccgccgacaccaacaagcgcaagcgcgacgagggcatccaggagtcccccgtccccaacggccactccctccccggccgcgacttcctccgcaagcagatgcgcggcgacctcttcacccagcagcagctcgaggtcctcgaccgcgtcttcgagcgccagcactactccgacatcttcaccaccaccgagcccatcaagcccgagcagaccaccgagtactccgccatggcctccctcgccggcggcctcgacgacatgaaggccaacctcgcctcccccacccccgccgacatcggctcctccgtccccggcccccagtcctaccccatcgtcaccggccgcgacctcgcctccaccaccctccccggctaccccccccacgtcccccccgccggccagggctcctactccgcccccaccctcaccggcatggtccccggctccgagttctccggctccccctactcccacccccagtactcctcctacaacgactcctggcgcttccccaaccccggcctcctcggctccccctactactactccgccgccgcccgcggcgccgccccccccgccgccgccaccgcctacgaccgccactga

SEQ ID NO: 3069 - RNA, 1176 nt, synthetic construct
  misc_feature 1..1176: note = derived and/or modified sequence opt3 fromPAX5__Homo_sapiens__AAA58397
  source 1..1176: mol_type = other RNA
atggacctggagaagaactaccccacccctagaacaagcaggactggccacgggggagtgaatcagctcggtggcgtcttcgttaacgggcggccacttccggatgtggtacgccaacgaatcgtggaactggcccatcagggagtccgtccctgcgacatttccagacagttgagggtgtctcacggctgtgtttcaaaaatattaggtcggtattacgagacggggagtatcaagcctggagtgattggcggcagcaaaccaaaggtcgctacccccaaagtggtagaaaagatcgcagagtataagcgccagaatcctacaatgtttgcctgggaaattagagataggctgctagcggagcgggtttgcgacaacgatactgtgccatccgtctcttcgatcaatcgcataatccgaaccaaagtgcaacagccccctaaccagccagtgccggcttcaagccatagtattgtctccacagggtctgttacccaggtgagctccgtatcaactgacagtgccggaagctcttactccatctcaggtattctcggcatcacaagccccagtgcagataccaataagagaaaaagggacgaggggatacaagaatctcctgtgccaaacggacactccctgcccggccgggatttccttcgtaagcagatgcgcggtgacctgtttacgcagcagcaattggaggtcctcgatagagtgttcgaaaggcagcattatagcgacatttttactaccacagagcctatcaaaccagagcagactaccgaatactcggccatggcttctctggcagggggactggatgacatgaaggccaatctcgcttcccccacaccggccgacattggctcaagtgttcctggcccccaaagctatccaatcgtgaccgggcgggatttagcgtccacgactctgcctggatatcccccacacgtgccccctgcaggtcagggctcttacagcgccccaacacttaccgggatggtcccgggatcagagttcagtggctccccctacagccaccctcagtactcttcatataacgacagttggcgatttccaaatcccggtttgctggggagcccttactattactccgctgccgcacgcggcgctgccccacccgcggccgcaactgcttatgatagacattga

SEQ ID NO: 3070 - RNA, 1176 nt, synthetic construct
  misc_feature 1..1176: note = derived and/or modified sequence opt4 fromPAX5__Homo_sapiens__AAA58397
  source 1..1176: mol_type = other RNA
atggacctggagaagaactaccccacccccagaaccagcagaaccggccacggcggcgtgaaccagctgggcggcgtgttcgtgaacggcagacccctgcccgacgtggtgagacagagaatcgtggagctggcccaccagggcgtgagaccctgcgacatcagcagacagctgagagtgagccacggctgcgtgagcaagatcctgggcagatactacgagaccggcagcatcaagcccggcgtgatcggcggcagcaagcccaaggtggccacccccaaggtggtggagaagatcgccgagtacaagagacagaaccccaccatgttcgcctgggagatcagagacagactgctggccgagagagtgtgcgacaacgacaccgtgcccagcgtgagcagcatcaacagaatcatcagaaccaaggtgcagcagccccccaaccagcccgtgcccgccagcagccacagcatcgtgagcaccggcagcgtgacccaggtgagcagcgtgagcaccgacagcgccggcagcagctacagcatcagcggcatcctgggcatcaccagccccagcgccgacaccaacaagagaaagagagacgagggcatccaggagagccccgtgcccaacggccacagcctgcccggcagagacttcctgagaaagcagatgagaggcgacctgttcacccagcagcagctggaggtgctggacagagtgttcgagagacagcactacagcgacatcttcaccaccaccgagcccatcaagcccgagcagaccaccgagtacagcgccatggccagcctggccggcggcctggacgacatgaaggccaacctggccagccccacccccgccgacatcggcagcagcgtgcccggcccccagagctaccccatcgtgaccggcagagacctggccagcaccaccctgcccggctaccccccccacgtgccccccgccggccagggcagctacagcgcccccaccctgaccggcatggtgcccggcagcgagttcagcggcagcccctacagccacccccagtacagcagctacaacgacagctggagattccccaaccccggcctgctgggcagcccctactactacagcgccgccgccagaggcgccgccccccccgccgccgccaccgcctacgacagacactga

SEQ ID NO: 3071 - RNA, 1176 nt, synthetic construct
  misc_feature 1..1176: note = derived and/or modified sequence opt5 fromPAX5__Homo_sapiens__AAA58397
  source 1..1176: mol_type = other RNA
atggacctggagaagaactaccccacccctagaacaagccggacgggccacgggggagtgaatcagctcggcggggtcttcgttaacggacgcccgctgcccgatgtggtgagacaacggatcgtcgaacttgcccatcagggcgtgcgcccttgcgacatttccagacagctgcgggtttctcacgggtgtgtgagcaaaatcctcggacgctattacgagaccggctccattaagcccggcgtcatcgggggatctaaacctaaggtggctacacccaaagttgtggaaaagattgccgagtataagagacagaatcctaccatgtttgcgtgggaaatccgggatcgcctgcttgctgagagagtctgcgacaacgatacagtgccgagcgtgtcctctatcaatcggattatccgcaccaaagtccaacagccccctaaccagcccgttcctgccagctcccatagcattgtgtctacaggctccgtgacccaggtcagctctgtgtccacggacagcgccgggtcttcctacagcatctccggcattctgggaatcacctctcccagcgctgatacaaataagagaaaacgggacgaggggattcaagaatccccggttcctaacggacacagcctccccggccgcgatttcctgagaaagcagatgcggggcgacctgtttacccagcagcaactcgaggtgctggatagagtcttcgaacgccagcattattctgacatctttacaaccacggagcctatcaaacccgagcagacaaccgaatactccgccatggctagccttgccgggggactggatgacatgaaggcgaatctcgcctctcccacacccgctgacattggcagctccgtgccggggccccaatcttatcctatcgttaccggacgggatctggccagcaccacacttcccggctaccctccccacgtgccgcctgctgggcagggatcctacagcgcccccacgctgaccggcatggtccctggctctgagttctccgggagcccctattctcaccctcagtactccagctataacgactcctggagatttcccaatccgggactcctgggctctccttactattacagcgcggccgctcgcggggccgctcctcccgccgccgctacagcgtatgatcggcattga

SEQ ID NO: 3072 - protein, 290 aa, synthetic construct
  REGION 1..290: note = PD1L1__Homo_sapiens__Q9NZQ7
MRIFAVFIFMTYWHLLNAFTVTVPKDLYVVEYGSNMTIECKFPVEKQLDLAALIVYWEMEDKNIIQFVHGEEDLKVQHSSYRQRARLLKDQLSLGNAALQITDVKLQDAGVYRCMISYGGADYKRITVKVNAPYNKINQRILVVDPVTSEHELTCQAEGYPKAEVIWTSSDHQVLSGKTTTTNSKREEKLFNVTSTLRINTTTNEIFYCTFRRLDPEENHTAELVIPELPLAHPPNERTHLVILGAILLCLGVALTFIFRLRKGRMMDVKKCGIQDTNSKKQSDTHLEET

SEQ ID NO: 3073 - RNA, 873 nt, synthetic construct
  misc_feature 1..873: note = PD1L1__Homo_sapiens__AAF25807
  source 1..873: mol_type = other RNA
atgaggatatttgctgtctttatattcatgacctactggcatttgctgaacgcatttactgtcacggttcccaaggacctatatgtggtagagtatggtagcaatatgacaattgaatgcaaattcccagtagaaaaacaattagacctggctgcactaattgtctattgggaaatggaggataagaacattattcaatttgtgcatggagaggaagacctgaaggttcagcatagtagctacagacagagggcccggctgttgaaggaccagctctccctgggaaatgctgcacttcagatcacagatgtgaaattgcaggatgcaggggtgtaccgctgcatgatcagctatggtggtgccgactacaagcgaattactgtgaaagtcaatgccccatacaacaaaatcaaccaaagaattttggttgtggatccagtcacctctgaacatgaactgacatgtcaggctgagggctaccccaaggccgaagtcatctggacaagcagtgaccatcaagtcctgagtggtaagaccaccaccaccaattccaagagagaggagaagcttttcaatgtgaccagcacactgagaatcaacacaacaactaatgagattttctactgcacttttaggagattagatcctgaggaaaaccatacagctgaattggtcatcccagaactacctctggcacatcctccaaatgaaaggactcacttggtaattctgggagccatcttattatgccttggtgtagcactgacattcatcttccgtttaagaaaagggagaatgatggatgtgaaaaaatgtggcatccaagatacaaactcaaagaagcaaagtgatacacatttggaggagacgtaa

SEQ ID NO: 3074 - RNA, 873 nt, synthetic construct
  misc_feature 1..873: note = derived and/or modified sequence opt1 fromPD1L1__Homo_sapiens__AAF25807
  source 1..873: mol_type = other RNA
atgcgcatcttcgccgtgttcatcttcatgacctactggcacctcctcaacgccttcaccgtcacggtgcccaaggacctgtacgtggtcgagtacggcagcaacatgaccatcgagtgcaagttcccggtggagaagcagctggacctcgcggccctgatcgtgtactgggagatggaggacaagaacatcatccagttcgtccacggggaggaggacctgaaggtgcagcactccagctaccggcagcgcgcccggctcctgaaggaccagctgtccctcggcaacgccgccctgcagatcaccgacgtgaagctgcaggacgcgggggtctaccgctgcatgatcagctacggcggggccgactacaagcggatcaccgtgaaggtgaacgccccctacaacaagatcaaccagcgcatcctcgtcgtggaccccgtgacgtccgagcacgagctgacctgccaggccgagggctaccccaaggcggaggtcatctggaccagctccgaccaccaggtgctgagcggcaagaccacgaccaccaactccaagcgggaggagaagctgttcaacgtgaccagcacgctgcgcatcaacaccaccaccaacgagatcttctactgcacgttccggcgcctggacccggaggagaaccacaccgccgagctcgtcatccccgagctgcccctggcccacccgcccaacgagcggacccacctcgtgatcctgggggccatcctgctctgcctgggcgtggccctgaccttcatcttccgcctccggaaggggcgcatgatggacgtcaagaagtgcggcatccaggacacgaactccaagaagcagagcgacacccacctggaggagacctga

SEQ ID NO: 3075 - RNA, 873 nt, synthetic construct
  misc_feature 1..873: note = derived and/or modified sequence opt2 fromPD1L1__Homo_sapiens__AAF25807
  source 1..873: mol_type = other RNA
atgcgcatcttcgccgtcttcatcttcatgacctactggcacctcctcaacgccttcaccgtcaccgtccccaaggacctctacgtcgtcgagtacggctccaacatgaccatcgagtgcaagttccccgtcgagaagcagctcgacctcgccgccctcatcgtctactgggagatggaggacaagaacatcatccagttcgtccacggcgaggaggacctcaaggtccagcactcctcctaccgccagcgcgcccgcctcctcaaggaccagctctccctcggcaacgccgccctccagatcaccgacgtcaagctccaggacgccggcgtctaccgctgcatgatctcctacggcggcgccgactacaagcgcatcaccgtcaaggtcaacgccccctacaacaagatcaaccagcgcatcctcgtcgtcgaccccgtcacctccgagcacgagctcacctgccaggccgagggctaccccaaggccgaggtcatctggacctcctccgaccaccaggtcctctccggcaagaccaccaccaccaactccaagcgcgaggagaagctcttcaacgtcacctccaccctccgcatcaacaccaccaccaacgagatcttctactgcaccttccgccgcctcgaccccgaggagaaccacaccgccgagctcgtcatccccgagctccccctcgcccacccccccaacgagcgcacccacctcgtcatcctcggcgccatcctcctctgcctcggcgtcgccctcaccttcatcttccgcctccgcaagggccgcatgatggacgtcaagaagtgcggcatccaggacaccaactccaagaagcagtccgacacccacctcgaggagacctga

SEQ ID NO: 3076 - RNA, 873 nt, synthetic construct
  misc_feature 1..873: note = derived and/or modified sequence opt3 fromPD1L1__Homo_sapiens__AAF25807
  source 1..873: mol_type = other RNA
atgagaatcttcgccgtgtttattttcatgacctactggcacctcctcaacgcttttacagtcactgttcccaaggacctttatgtggtagagtacggcagcaatatgacgatagaatgcaaattccctgtggagaagcagctggatttggcagccttaatcgtctattgggaaatggaggacaaaaacattatccaatttgtgcatggggaagaggatctgaaggttcagcactcctcttacaggcagcgggcgcgcctactcaaagaccagctgtcacttggaaatgctgccctgcaaattaccgatgtgaagttgcaggacgccggtgtctatcgatgtatgatcagttacggcggggcagattataagcgtataacagtgaaagtaaacgctccatacaataagatcaaccagaggattctcgttgtggacccggtcactagcgagcatgaactgacctgccaggcagagggataccccaaagccgaagtgatctggacatcctctgatcaccaagtgctgtcgggcaagaccactacaaccaattcaaaaagagaggagaagctgttcaacgtcacgagcactttacggattaataccacaactaacgaaatcttttattgtaccttccgcagactggaccctgaggaaaatcatacagctgagcttgttataccagaattgcccctggcccaccctccaaacgagaggacccacctagtgattctcggtgcgatcctgctttgcctgggggtagcattgacgtttattttccggctccgcaagggacgaatgatggatgtgaaaaagtgtggcatccaggacactaatagtaaaaagcagtccgatacacatctggaggaaacctga

SEQ ID NO: 3077 - RNA, 873 nt, synthetic construct
  misc_feature 1..873: note = derived and/or modified sequence opt4 fromPD1L1__Homo_sapiens__AAF25807
  source 1..873: mol_type = other RNA
atgagaatcttcgccgtgttcatcttcatgacctactggcacctgctgaacgccttcaccgtgaccgtgcccaaggacctgtacgtggtggagtacggcagcaacatgaccatcgagtgcaagttccccgtggagaagcagctggacctggccgccctgatcgtgtactgggagatggaggacaagaacatcatccagttcgtgcacggcgaggaggacctgaaggtgcagcacagcagctacagacagagagccagactgctgaaggaccagctgagcctgggcaacgccgccctgcagatcaccgacgtgaagctgcaggacgccggcgtgtacagatgcatgatcagctacggcggcgccgactacaagagaatcaccgtgaaggtgaacgccccctacaacaagatcaaccagagaatcctggtggtggaccccgtgaccagcgagcacgagctgacctgccaggccgagggctaccccaaggccgaggtgatctggaccagcagcgaccaccaggtgctgagcggcaagaccaccaccaccaacagcaagagagaggagaagctgttcaacgtgaccagcaccctgagaatcaacaccaccaccaacgagatcttctactgcaccttcagaagactggaccccgaggagaaccacaccgccgagctggtgatccccgagctgcccctggcccacccccccaacgagagaacccacctggtgatcctgggcgccatcctgctgtgcctgggcgtggccctgaccttcatcttcagactgagaaagggcagaatgatggacgtgaagaagtgcggcatccaggacaccaacagcaagaagcagagcgacacccacctggaggagacctga

SEQ ID NO: 3078 - RNA, 873 nt, synthetic construct
  misc_feature 1..873: note = derived and/or modified sequence opt5 fromPD1L1__Homo_sapiens__AAF25807
  source 1..873: mol_type = other RNA
atgagaatcttcgccgtgtttattttcatgacctactggcacctcctcaacgcttttacagtcacggttcccaaggacctgtatgtggtggagtacggcagcaatatgaccatcgaatgcaaattccctgtcgagaagcagcttgatctggccgcgctcattgtgtattgggaaatggaggacaaaaacatcattcaatttgttcatggggaagaggatctgaaggtgcagcactcctcttaccggcagcgcgctagacttctgaaagaccagctcagcctgggaaatgccgccctgcaaatcacagatgtcaagctccaggacgctggcgtgtatcggtgtatgatctcctacgggggagccgattataagcgcattaccgttaaagtgaacgctccgtacaataagatcaaccagcggattctggtcgtggaccccgtgacatctgagcatgaacttacctgccaggccgagggctaccctaaagcggaagtcatctggacaagctccgatcaccaagttctgtctgggaagaccacgaccacaaatagcaaaagagaggagaagctgttcaacgtgacctccacactgcgcattaataccacgacaaacgaaatcttttattgtaccttcagacggcttgaccccgaggaaaatcatacagccgagctggtgattcctgaactccccctggctcaccctccgaacgagcgcacccacctggtcatcctcggagccatcctgctttgcctgggcgtggctctcacctttattttcagactgcggaagggccgcatgatggatgttaaaaagtgtgggatccaggacacaaatagcaaaaagcagtctgatacgcatcttgaggaaacctga

SEQ ID NO: 3079 - protein, 288 aa, synthetic construct
  REGION 1..288: note = PDCD1__Homo_sapiens__Q15116
MQIPQAPWPVVWAVLQLGWRPGWFLDSPDRPWNPPTFSPALLVVTEGDNATFTCSFSNTSESFVLNWYRMSPSNQTDKLAAFPEDRSQPGQDCRFRVTQLPNGRDFHMSVVRARRNDSGTYLCGAISLAPKAQIKESLRAELRVTERRAEVPTAHPSPSPRPAGQFQTLVVGVVGGLLGSLVLLVWVLAVICSRAARGTIGARRTGQPLKEDPSAVPVFSVDYGELDFQWREKTPEPPVPCVPEQTEYATIVFPSGMGTSSPARRGSADGPRSAQPLRPEDGHCSWPL

SEQ ID NO: 3080 - RNA, 867 nt, synthetic construct
  misc_feature 1..867: note = PDCD1__Homo_sapiens__AAH74740
  source 1..867: mol_type = other RNA
atgcagatcccacaggcgccctggccagtcgtctgggcggtgctacaactgggctggcggccaggatggttcttagactccccagacaggccctggaacccccccaccttctccccagccctgctcgtggtgaccgaaggggacaacgccaccttcacctgcagcttctccaacacatcggagagcttcgtgctaaactggtaccgcatgagccccagcaaccagacggacaagctggccgctttccccgaggaccgcagccagcccggccaggactgccgcttccgtgtcacacaactgcccaacgggcgtgacttccacatgagcgtggtcagggcccggcgcaatgacagcggcacctacctctgtggggccatctccctggcccccaaggcgcagatcaaagagagcctgcgggcagagctcagggtgacagagagaagggcagaagtgcccacagcccaccccagcccctcacccaggccagccggccagttccaaaccctggtggttggtgtcgtgggcggcctgctgggcagcctggtgctgctagtctgggtcctggccgtcatctgctcccgggccgcacgagggacaataggagccaggcgcaccggccagcccctgaaggaggacccctcagccgtgcctgtgttctctgtggactatggggagctggatttccagtggcgagagaagaccccggagccccccgtgccctgtgtccctgagcagacggagtatgccaccattgtctttcctagcggaatgggcacctcatcccccgcccgcaggggctcagccgacggccctcggagtgcccagccactgaggcctgaggatggacactgctcttggcccctctga

SEQ ID NO: 3081 - RNA, 867 nt, synthetic construct
  misc_feature 1..867: note = derived and/or modified sequence opt1 fromPDCD1__Homo_sapiens__AAH74740
  source 1..867: mol_type = other RNA
atgcagatcccccaggccccgtggcccgtggtctgggccgtgctgcagctcggctggcgccccgggtggttcctggacagccccgaccggccgtggaacccgcccaccttctcccccgcgctgctcgtggtcaccgagggcgacaacgccacgttcacgtgcagcttctccaacaccagcgagtccttcgtgctgaactggtaccgcatgagcccctccaaccagaccgacaagctggccgccttccccgaggaccggagccagcccgggcaggactgccgcttccgggtgacccagctccccaacggccgcgacttccacatgtccgtcgtgcgggcccgccggaacgacagcgggacctacctgtgcggcgcgatctccctggccccgaaggcccagatcaaggagagcctccgcgccgagctgcgggtgaccgagcgccgggcggaggtccccaccgcccacccctcccccagcccgcgccccgccggccagttccagacgctggtggtgggggtcgtgggcgggctcctgggctccctggtgctcctggtctgggtgctggccgtgatctgcagccgggccgcgcgcgggaccatcggcgcccggcgcaccggccagcccctcaaggaggacccctccgccgtcccggtgttcagcgtggactacggggagctggacttccagtggcgggagaagacccccgagccgcccgtcccctgcgtgcccgagcagacggagtacgccaccatcgtgttcccctccggcatggggaccagcagccccgcccgccggggctccgcggacggcccgcgcagcgcccagcccctgcgccccgaggacgggcactgctcctggccgctctga

SEQ ID NO: 3082 - RNA, 867 nt, synthetic construct
  misc_feature 1..867: note = derived and/or modified sequence opt2 fromPDCD1__Homo_sapiens__AAH74740
  source 1..867: mol_type = other RNA
atgcagatcccccaggccccctggcccgtcgtctgggccgtcctccagctcggctggcgccccggctggttcctcgactcccccgaccgcccctggaacccccccaccttctcccccgccctcctcgtcgtcaccgagggcgacaacgccaccttcacctgctccttctccaacacctccgagtccttcgtcctcaactggtaccgcatgtccccctccaaccagaccgacaagctcgccgccttccccgaggaccgctcccagcccggccaggactgccgcttccgcgtcacccagctccccaacggccgcgacttccacatgtccgtcgtccgcgcccgccgcaacgactccggcacctacctctgcggcgccatctccctcgcccccaaggcccagatcaaggagtccctccgcgccgagctccgcgtcaccgagcgccgcgccgaggtccccaccgcccacccctccccctccccccgccccgccggccagttccagaccctcgtcgtcggcgtcgtcggcggcctcctcggctccctcgtcctcctcgtctgggtcctcgccgtcatctgctcccgcgccgcccgcggcaccatcggcgcccgccgcaccggccagcccctcaaggaggacccctccgccgtccccgtcttctccgtcgactacggcgagctcgacttccagtggcgcgagaagacccccgagccccccgtcccctgcgtccccgagcagaccgagtacgccaccatcgtcttcccctccggcatgggcacctcctcccccgcccgccgcggctccgccgacggcccccgctccgcccagcccctccgccccgaggacggccactgctcctggcccctctga

SEQ ID NO: 3083 - RNA, 867 nt, synthetic construct
  misc_feature 1..867: note = derived and/or modified sequence opt3 fromPDCD1__Homo_sapiens__AAH74740
  source 1..867: mol_type = other RNA
atgcagatcccccaagccccttggccagtggtctgggctgttctgcagctcggctggagaccggggtggttccttgacagccccgataggccttggaacccacccaccttttcccctgcactgttggtggtaacagagggagacaatgccactttcacgtgctctttttcaaacaccagtgagagcttcgtgttaaattggtaccggatgtccccatctaaccagacagataagctggcggcttttcccgaagaccgctcgcagcctggtcaagattgtcgattccgtgtcactcagctaccaaatggcagagactttcacatgtcagtggttagggcccggcgcaacgatagcgggacctatctctgcggagcaattagtctggccccgaaagctcagataaaggaatcccttagagcagagctgagggtgacagaacggcgcgccgaggtccccaccgctcatccttctccaagcccccgacctgccggccagttccaaactttggtggtaggtgttgtcgggggactcctgggctccctggtgctcttagtgtgggtgctggcggtcatctgttcaagagcagccaggggcacaattggggctcggcgtaccggacagccacttaaagaggaccccagtgccgttccggtgtttagcgtagattacggtgaattggacttccagtggcgcgagaagacgcctgaacccccagtgccttgcgtccccgagcagactgagtatgcaaccatcgtgtttccatctggcatggggacatcctcacccgctagaaggggaagcgccgatggccctcggagtgcgcaaccactgcgaccggaagacggtcactgttcttggcccctatga

SEQ ID NO: 3084 - RNA, 867 nt, synthetic construct
  misc_feature 1..867: note = derived and/or modified sequence opt4 fromPDCD1__Homo_sapiens__AAH74740
  source 1..867: mol_type = other RNA
atgcagatcccccaggccccctggcccgtggtgtgggccgtgctgcagctgggctggagacccggctggttcctggacagccccgacagaccctggaacccccccaccttcagccccgccctgctggtggtgaccgagggcgacaacgccaccttcacctgcagcttcagcaacaccagcgagagcttcgtgctgaactggtacagaatgagccccagcaaccagaccgacaagctggccgccttccccgaggacagaagccagcccggccaggactgcagattcagagtgacccagctgcccaacggcagagacttccacatgagcgtggtgagagccagaagaaacgacagcggcacctacctgtgcggcgccatcagcctggcccccaaggcccagatcaaggagagcctgagagccgagctgagagtgaccgagagaagagccgaggtgcccaccgcccaccccagccccagccccagacccgccggccagttccagaccctggtggtgggcgtggtgggcggcctgctgggcagcctggtgctgctggtgtgggtgctggccgtgatctgcagcagagccgccagaggcaccatcggcgccagaagaaccggccagcccctgaaggaggaccccagcgccgtgcccgtgttcagcgtggactacggcgagctggacttccagtggagagagaagacccccgagccccccgtgccctgcgtgcccgagcagaccgagtacgccaccatcgtgttccccagcggcatgggcaccagcagccccgccagaagaggcagcgccgacggccccagaagcgcccagcccctgagacccgaggacggccactgcagctggcccctgtga

SEQ ID NO: 3085 - RNA, 867 nt, synthetic construct
  misc_feature 1..867: note = derived and/or modified sequence opt5 fromPDCD1__Homo_sapiens__AAH74740
  source 1..867: mol_type = other RNA
atgcagatcccccaagccccttggccggtggtctgggctgttctgcagctcggctggagacccgggtggttcctggacagccctgatcggccctggaaccctcccaccttttcccctgcccttctggtggtgacagagggagacaatgcgacgtttacctgctctttcagcaacacatccgaatctttcgtcctcaattggtaccgcatgagcccgtccaaccagaccgataagctggctgcctttcccgaggacagatctcagcctggccaagattgtcggttccgcgtgacacagcttcccaatgggagagactttcacatgagcgttgtgcgggcccgcagaaacgattccggaacctatctgtgcggcgctattagcctcgcccctaaagctcagatcaaggaatctctgcgggccgagctgcgcgtcacagaaagacgggcggaggtgcccaccgcccatccgtcccctagcccccgccctgctgggcagttccaaacgctcgttgtgggagtcgtgggcggcctgcttgggtctctggtgctcctggtctgggttcttgccgtgatttgttccagagctgcccggggaaccatcggcgcgcgcagaacagggcagcccctgaaagaggaccccagcgccgtgcctgtcttttctgtggattacggagaactcgacttccagtggcgggagaagaccccggaaccccctgttccctgcgtgcctgagcagacagagtatgctaccattgtctttccctccggcatggggacgagctccccggccagacgcggatctgctgatggccctcggagcgcccaacccctgagacctgaagacggccactgttcctggcccctgtga

SEQ ID NO: 3086 - protein, 335 aa, synthetic construct
  REGION 1..335: note = PDEF__Homo_sapiens__O95238
MGSASPGLSSVSPSHLLLPPDTVSRTGLEKAAAGAVGLERRDWSPSPPATPEQGLSAFYLSYFDMLYPEDSSWAAKAPGASSREEPPEEPEQCPVIDSQAPAGSLDLVPGGLTLEEHSLEQVQSMVVGEVLKDIETACKLLNITADPMDWSPSNVQKWLLWTEHQYRLPPMGKAFQELAGKELCAMSEEQFRQRSPLGGDVLHAHLDIWKSAAWMKERTSPGAIHYCASTSEESWTDSEVDSSCSGQPIHLWQFLKELLLKPHSYGRFIRWLNKEKGIFKIEDSAQVARLWGIRKNRPAMNYDKLSRSIRQYYKKGIIRKPDISQRLVYQFVHPI

SEQ ID NO: 3087 - RNA, 1008 nt, synthetic construct
  misc_feature 1..1008: note = PDEF__Homo_sapiens__AAC95296
  source 1..1008: mol_type = other RNA
atgggcagcgccagcccgggtctgagcagcgtatcccccagccacctcctgctgccccccgacacggtgtcgcggacaggcttggagaaggcggcagcgggggcagtgggtctcgagagacgggactggagtcccagtccacccgccacgcccgagcagggcctgtccgccttctacctctcctactttgacatgctgtaccctgaggacagcagctgggcagccaaggcccctggggccagcagtcgggaggagccacctgaggagcctgagcagtgcccggtcattgacagccaagccccagcgggcagcctggacttggtgcccggcgggctgaccttggaggagcactcgctggagcaggtgcagtccatggtggtgggcgaagtgctcaaggacatcgagacggcctgcaagctgctcaacatcaccgcagatcccatggactggagccccagcaatgtgcagaagtggctcctgtggacagagcaccaataccggctgccccccatgggcaaggccttccaggagctggcgggcaaggagctgtgcgccatgtcggaggagcagttccgccagcgctcgcccctgggtggggatgtgctgcacgcccacctggacatctggaagtcagcggcctggatgaaagagcggacttcacctggggcgattcactactgtgcctcgaccagtgaggagagctggaccgacagcgaggtggactcatcatgctccgggcagcccatccacctgtggcagttcctcaaggagttgctactcaagccccacagctatggccgcttcattaggtggctcaacaaggagaagggcatcttcaaaattgaggactcagcccaggtggcccggctgtggggcatccgcaagaaccgtcccgccatgaactacgacaagctgagccgctccatccgccagtattacaagaagggcatcatccggaagccagacatctcccagcgcctcgtctaccagttcgtgcaccccatctga

SEQ ID NO: 3088 - RNA, 1008 nt, synthetic construct
  misc_feature 1..1008: note = derived and/or modified sequence opt1 fromPDEF__Homo_sapiens__AAC95296
  source 1..1008: mol_type = other RNA
atgggcagcgcctcccccgggctgagctccgtgagcccgtcccacctcctgctgccgcccgacaccgtcagccgcaccggcctcgagaaggccgcggccggggccgtgggcctggagcggcgcgactggtcccccagcccgcccgccacgcccgagcaggggctgtccgccttctacctcagctacttcgacatgctgtaccccgaggactccagctgggcggccaaggcccccggcgcctccagccgggaggagccgcccgaggagcccgagcagtgccccgtgatcgactcccaggcgcccgccggcagcctggacctcgtccccgggggcctgaccctggaggagcactccctcgagcaggtccagagcatggtggtgggggaggtgctgaaggacatcgagaccgcctgcaagctgctcaacatcaccgccgaccccatggactggtccccgagcaacgtgcagaagtggctgctgtggacggagcaccagtaccgcctcccgcccatgggcaaggccttccaggagctggcggggaaggagctgtgcgccatgagcgaggagcagttccggcagcgcagccccctcggcggcgacgtcctgcacgcccacctggacatctggaagtccgccgcctggatgaaggagcggacctcccccggggcgatccactactgcgccagcacctccgaggagagctggaccgactccgaggtggacagctcctgcagcggccagcccatccacctctggcagttcctgaaggagctgctcctgaagccccactcctacgggcgcttcatccggtggctgaacaaggagaagggcatcttcaagatcgaggacagcgcccaggtggcccgcctctggggcatccggaagaaccgccccgccatgaactacgacaagctgtcccggagcatccgccagtactacaagaaggggatcatccggaagccggacatctcccagcgcctggtctaccagttcgtgcaccccatctga

SEQ ID NO: 3089 - RNA, 1008 nt, synthetic construct
  misc_feature 1..1008: note = derived and/or modified sequence opt2 fromPDEF__Homo_sapiens__AAC95296
  source 1..1008: mol_type = other RNA
atgggctccgcctcccccggcctctcctccgtctccccctcccacctcctcctcccccccgacaccgtctcccgcaccggcctcgagaaggccgccgccggcgccgtcggcctcgagcgccgcgactggtccccctccccccccgccacccccgagcagggcctctccgccttctacctctcctacttcgacatgctctaccccgaggactcctcctgggccgccaaggcccccggcgcctcctcccgcgaggagccccccgaggagcccgagcagtgccccgtcatcgactcccaggcccccgccggctccctcgacctcgtccccggcggcctcaccctcgaggagcactccctcgagcaggtccagtccatggtcgtcggcgaggtcctcaaggacatcgagaccgcctgcaagctcctcaacatcaccgccgaccccatggactggtccccctccaacgtccagaagtggctcctctggaccgagcaccagtaccgcctcccccccatgggcaaggccttccaggagctcgccggcaaggagctctgcgccatgtccgaggagcagttccgccagcgctcccccctcggcggcgacgtcctccacgcccacctcgacatctggaagtccgccgcctggatgaaggagcgcacctcccccggcgccatccactactgcgcctccacctccgaggagtcctggaccgactccgaggtcgactcctcctgctccggccagcccatccacctctggcagttcctcaaggagctcctcctcaagccccactcctacggccgcttcatccgctggctcaacaaggagaagggcatcttcaagatcgaggactccgcccaggtcgcccgcctctggggcatccgcaagaaccgccccgccatgaactacgacaagctctcccgctccatccgccagtactacaagaagggcatcatccgcaagcccgacatctcccagcgcctcgtctaccagttcgtccaccccatctga

SEQ ID NO: 3090 - RNA, 1008 nt, synthetic construct
  misc_feature 1..1008: note = derived and/or modified sequence opt3 fromPDEF__Homo_sapiens__AAC95296
  source 1..1008: mol_type = other RNA
atgggcagcgcctcccccgggctgtcttcagtgagtcctagccacctccttctgccaccggacaccgtctccagaacaggattggagaaggctgcagccggtgcggttggcttagaaaggcgggattggtctccctcgcctccagctactcccgagcaggggctgtcagccttctacctaagctattttgacatgctctaccctgaagatagttcctgggcagccaaagctccaggagcatctagccgcgaggaaccccctgaggagccagaacaatgcccggtgatcgactcccaggcccccgctggctcactggatcttgtacctggtgggctgacgttggaggaacatagtctcgaacaggtgcagagcatggtcgtgggagaggttctgaaggacattgaaaccgcctgtaaactgctcaacataacagcggatccaatggactggtctccctccaatgtgcaaaagtggttactgtggactgagcaccagtatcgacttcctccaatgggcaaagcattccaggaattggccggcaaggagctgtgcgctatgtcagaggagcagtttcgtcaaagaagccccctagggggagatgtcctccatgcccacctggacatctggaagagtgcagcttggatgaaagagaggacctctccgggtgccattcattactgtgcgtccacaagcgaagagtcgtggaccgattctgaagtggactcctcatgcagtggccagcctatccacctttggcagttcctgaaggagttgctcctgaaaccccacagctatgggcggtttattcgctggttaaacaaggaaaaaggaatcttcaagatagaggattccgcccaggtagcaagactgtggggcatcaggaagaatcggccagctatgaactacgacaaactctctcgcagcattcgacaatattacaagaaaggtatcattagaaagcctgacatctcacagaggcttgtttaccagtttgtgcatcccatatga

SEQ ID NO: 3091 - RNA, 1008 nt, synthetic construct
  misc_feature 1..1008: note = derived and/or modified sequence opt4 fromPDEF__Homo_sapiens__AAC95296
  source 1..1008: mol_type = other RNA
atgggcagcgccagccccggcctgagcagcgtgagccccagccacctgctgctgccccccgacaccgtgagcagaaccggcctggagaaggccgccgccggcgccgtgggcctggagagaagagactggagccccagcccccccgccacccccgagcagggcctgagcgccttctacctgagctacttcgacatgctgtaccccgaggacagcagctgggccgccaaggcccccggcgccagcagcagagaggagccccccgaggagcccgagcagtgccccgtgatcgacagccaggcccccgccggcagcctggacctggtgcccggcggcctgaccctggaggagcacagcctggagcaggtgcagagcatggtggtgggcgaggtgctgaaggacatcgagaccgcctgcaagctgctgaacatcaccgccgaccccatggactggagccccagcaacgtgcagaagtggctgctgtggaccgagcaccagtacagactgccccccatgggcaaggccttccaggagctggccggcaaggagctgtgcgccatgagcgaggagcagttcagacagagaagccccctgggcggcgacgtgctgcacgcccacctggacatctggaagagcgccgcctggatgaaggagagaaccagccccggcgccatccactactgcgccagcaccagcgaggagagctggaccgacagcgaggtggacagcagctgcagcggccagcccatccacctgtggcagttcctgaaggagctgctgctgaagccccacagctacggcagattcatcagatggctgaacaaggagaagggcatcttcaagatcgaggacagcgcccaggtggccagactgtggggcatcagaaagaacagacccgccatgaactacgacaagctgagcagaagcatcagacagtactacaagaagggcatcatcagaaagcccgacatcagccagagactggtgtaccagttcgtgcaccccatctga

SEQ ID NO: 3092 - RNA, 1008 nt, synthetic construct
  misc_feature 1..1008: note = derived and/or modified sequence opt5 fromPDEF__Homo_sapiens__AAC95296
  source 1..1008: mol_type = other RNA
atgggcagcgcctcccccgggctgtctagcgtgtccccttctcacctcctgcttccgcccgacaccgtcagcagaacaggactggagaaggctgccgcgggcgctgttgggctcgaacggcgcgattggtccccttctccccctgccacgcccgagcagggactgagcgccttctacctttcctattttgacatgctgtaccctgaagatagctcttgggctgccaaagctccgggcgcctccagcagagaggaaccccctgaggagcccgaacaatgccctgtgatcgactctcaggcgcccgccgggtccctcgatctggtgccgggaggcctgaccctcgaggaacatagcctggagcaggtccagtctatggtggttggcgaggtgcttaaggacattgaaacagcttgtaaactgctcaacatcaccgccgatcctatggactggtcccccagcaatgtccaaaagtggctgctttggacagagcaccagtatcggctgcctcccatggggaaggctttccaggaactcgccggaaaggagctgtgcgcgatgtccgaggaacagtttcgccaaagatctcccctgggcggggatgtgctccatgcccacctggacatttggaaaagcgctgcctggatgaaagagcggacctcccctggagctatccattactgtgccagcacatctgaagagtcctggaccgatagcgaagttgactctagctgctccggccagccgattcacctttggcagttcctgaaggagctcctgcttaaaccccactcttatgggcgctttatcagatggctgaacaaggaaaaaggaatcttcaagattgaggatagcgcccaggtggctcggctctggggcatccgcaagaatagacctgcgatgaactacgacaaactgtcccggagcattcgccaatattacaagaaaggcatcattagaaagcccgacatctctcagcggctggtctaccagtttgtgcatcctatttga

SEQ ID NO: 3093 - protein, 738 aa, synthetic construct
  REGION 1..738: note = PECA1__Homo_sapiens__P16284
MQPRWAQGATMWLGVLLTLLLCSSLEGQENSFTINSVDMKSLPDWTVQNGKNLTLQCFADVSTTSHVKPQHQMLFYKDDVLFYNISSMKSTESYFIPEVRIYDSGTYKCTVIVNNKEKTTAEYQLLVEGVPSPRVTLDKKEAIQGGIVRVNCSVPEEKAPIHFTIEKLELNEKMVKLKREKNSRDQNFVILEFPVEEQDRVLSFRCQARIISGIHMQTSESTKSELVTVTESFSTPKFHISPTGMIMEGAQLHIKCTIQVTHLAQEFPEIIIQKDKAIVAHNRHGNKAVYSVMAMVEHSGNYTCKVESSRISKVSSIVVNITELFSKPELESSFTHLDQGERLNLSCSIPGAPPANFTIQKEDTIVSQTQDFTKIASKSDSGTYICTAGIDKVVKKSNTVQIVVCEMLSQPRISYDAQFEVIKGQTIEVRCESISGTLPISYQLLKTSKVLENSTKNSNDPAVFKDNPTEDVEYQCVADNCHSHAKMLSEVLRVKVIAPVDEVQISILSSKVVESGEDIVLQCAVNEGSGPITYKFYREKEGKPFYQMTSNATQAFWTKQKASKEQEGEYYCTAFNRANHASSVPRSKILTVRVILAPWKKGLIAVVIIGVIIALLIIAAKCYFLRKAKAKQMPVEMSRPAVPLLNSNNEKMSDPNMEANSHYGHNDDVRNHAMKPINDNKEPLNSDVQYTEVQVSSAESHKDLGKKDTETVYSEVRKAVPDAVESRYSRTEGSLDGT

SEQ ID NO: 3094 - RNA, 2217 nt, synthetic construct
  misc_feature 1..2217: note = PECA1__Homo_sapiens__AAA36429
  source 1..2217: mol_type = other RNA
atgcagccgaggtgggcccaaggggccacgatgtggcttggagtcctgctgacccttctgctctgttcaagccttgagggtcaagaaaactctttcacaatcaacagtgttgacatgaagagcctgccggactggacggtgcaaaatgggaagaacctgaccctgcagtgcttcgcggatgtcagcaccacctctcacgtcaagcctcagcaccagatgctgttctataaggatgacgtgctgttttacaacatctcctccatgaagagcacagagagttattttattcctgaagtccggatctatgactcagggacatataaatgtactgtgattgtgaacaacaaagagaaaaccactgcagagtaccagctgttggtggaaggagtgcccagtcccagggtgacactggacaagaaagaggccatccaaggtgggatcgtgagggtcaactgttctgtcccagaggaaaaggccccaatacacttcacaattgaaaaacttgaactaaatgaaaaaatggtcaagctgaaaagagagaagaattctcgagaccagaattttgtgatactggaattccccgttgaggaacaggaccgcgttttatccttccgatgtcaagctaggatcatttctgggatccatatgcagacctcagaatctaccaagagtgaactggtcaccgtgacggaatccttctctacacccaagttccacatcagccccaccggaatgatcatggaaggagctcagctccacattaagtgcaccattcaagtgactcacctggcccaggagtttccagaaatcataattcagaaggacaaggcgattgtggcccacaacagacatggcaacaaggctgtgtactcagtcatggccatggtggagcacagtggcaactacacgtgcaaagtggagtccagccgcatatccaaggtcagcagcatcgtggtcaacataacagaactattttccaagcccgaactggaatcttccttcacacatctggaccaaggtgaaagactgaacctgtcctgctccatcccaggagcacctccagccaacttcaccatccagaaggaagatacgattgtgtcacagactcaagatttcaccaagatagcctcaaagtcggacagtgggacgtatatctgcactgcaggtattgacaaagtggtcaagaaaagcaacacagtccagatagtcgtatgtgaaatgctctcccagcccaggatttcttatgatgcccagtttgaggtcataaaaggacagaccatcgaagtccgttgcgaatcgatcagtggaactttgcctatttcttaccaacttttaaaaacaagtaaagttttggagaatagtaccaagaactcaaatgatcctgcggtattcaaagacaaccccactgaagacgtcgaataccagtgtgttgcagataattgccattcccatgccaaaatgttaagtgaggttctgagggtgaaggtgatagccccggtggatgaggtccagatttctatcctgtcaagtaaggtggtggagtctggagaggacattgtgctgcaatgtgctgtgaatgaaggatctggtcccatcacctataagttttacagagaaaaagagggcaaacccttctatcaaatgacctcaaatgccacccaggcattttggaccaagcagaaggctagcaaggaacaggagggagagtattactgcacagccttcaacagagccaaccacgcctccagtgtccccagaagcaaaatactgacagtcagagtcattcttgccccatggaagaaaggacttattgcagtggttatcatcggagtgatcattgctctcttgatcattgcggccaaatgttattttctgaggaaagccaaggccaagcagatgccagtggaaatgtccaggccagcagtaccacttctgaactccaacaacgagaaaatgtcagatcccaatatggaagctaacagtcattacggtcacaatgacgatgtcagaaaccatgcaatgaaaccaataaatgataataaagagcctctgaactcagacgtgcagtacacggaagttcaagtgtcctcagctgagtctcacaaagatctaggaaagaaggacacagagacagtgtacagtgaagtccggaaagctgtccctgatgccgtggaaagcagatactctagaacggaaggctcccttgatggaacttag

SEQ ID NO: 3095 - RNA, 2217 nt, synthetic construct
  misc_feature 1..2217: note = derived and/or modified sequence opt1 fromPECA1__Homo_sapiens__AAA36429
  source 1..2217: mol_type = other RNA
atgcagccccgctgggcccagggcgccaccatgtggctgggggtgctcctgaccctgctcctgtgcagctccctggagggccaggagaacagcttcacgatcaactccgtcgacatgaagtccctcccggactggaccgtgcagaacgggaagaacctgaccctgcagtgcttcgcggacgtgagcaccacgagccacgtcaagccccagcaccagatgctgttctacaaggacgacgtcctcttctacaacatctccagcatgaagtccaccgagagctacttcatccccgaggtgcggatctacgactccggcacctacaagtgcaccgtgatcgtgaacaacaaggagaagacgaccgccgagtaccagctgctcgtggagggggtccccagcccgcgcgtgaccctggacaagaaggaggccatccagggcggcatcgtgcgggtcaactgctccgtgcccgaggagaaggcccccatccacttcaccatcgagaagctggagctcaacgagaagatggtgaagctgaagcgcgagaagaacagccgggaccagaacttcgtcatcctggagttccccgtggaggagcaggaccgcgtgctctccttccggtgccaggcccgcatcatcagcgggatccacatgcagacgtccgagagcaccaagtccgagctggtcaccgtgaccgagagcttcagcacgccgaagttccacatctcccccaccggcatgatcatggagggggcgcagctgcacatcaagtgcaccatccaggtgacccacctcgcccaggagttccccgagatcatcatccagaaggacaaggccatcgtcgcccacaaccggcacggcaacaaggcggtgtacagcgtgatggccatggtcgagcactccgggaactacacgtgcaaggtggagagctcccgcatcagcaaggtctccagcatcgtggtgaacatcaccgagctgttctccaagcccgagctggagagctccttcacccacctcgaccagggcgagcggctgaacctgagctgctccatcccgggcgccccgcccgccaacttcaccatccagaaggaggacacgatcgtcagccagacccaggacttcaccaagatcgcctccaagagcgactccgggacctacatctgcacggcgggcatcgacaaggtggtgaagaagtccaacaccgtccagatcgtggtgtgcgagatgctcagccagccccgcatcagctacgacgcccagttcgaggtcatcaaggggcagaccatcgaggtgcggtgcgagagcatctccggcaccctgcccatcagctaccagctgctcaagacgtccaaggtgctggagaacagcaccaagaactccaacgaccccgccgtcttcaaggacaaccccaccgaggacgtggagtaccagtgcgtggccgacaactgccacagccacgccaagatgctgtccgaggtcctccgcgtgaaggtgatcgcgcccgtcgacgaggtgcagatcagcatcctgtccagcaaggtggtcgagtccggcgaggacatcgtgctgcagtgcgccgtgaacgaggggagcggcccgatcacctacaagttctaccgggagaaggaggggaagcccttctaccagatgacgtccaacgccacccaggccttctggaccaagcagaaggccagcaaggagcaggagggcgagtactactgcaccgcgttcaaccgcgccaaccacgcctccagcgtcccccggtccaagatcctcaccgtgcgcgtgatcctggccccctggaagaaggggctgatcgccgtcgtgatcatcggcgtgatcatcgcgctcctgatcatcgccgccaagtgctacttcctgcggaaggccaaggcgaagcagatgccggtcgagatgagccgccccgccgtgcccctcctgaacagcaacaacgagaagatgtccgaccccaacatggaggccaacagccactacggccacaacgacgacgtgcggaaccacgccatgaagccgatcaacgacaacaaggagcccctgaactccgacgtccagtacacggaggtccaggtgagctccgccgagagccacaaggacctcgggaagaaggacaccgagaccgtgtactccgaggtgcgcaaggcggtgcccgacgccgtcgagagccgctactcccggaccgagggcagcctggacgggacgtga

SEQ ID NO: 3096 - RNA, 2217 nt, synthetic construct
  misc_feature 1..2217: note = derived and/or modified sequence opt2 fromPECA1__Homo_sapiens__AAA36429
  source 1..2217: mol_type = other RNA
atgcagccccgctgggcccagggcgccaccatgtggctcggcgtcctcctcaccctcctcctctgctcctccctcgagggccaggagaactccttcaccatcaactccgtcgacatgaagtccctccccgactggaccgtccagaacggcaagaacctcaccctccagtgcttcgccgacgtctccaccacctcccacgtcaagccccagcaccagatgctcttctacaaggacgacgtcctcttctacaacatctcctccatgaagtccaccgagtcctacttcatccccgaggtccgcatctacgactccggcacctacaagtgcaccgtcatcgtcaacaacaaggagaagaccaccgccgagtaccagctcctcgtcgagggcgtcccctccccccgcgtcaccctcgacaagaaggaggccatccagggcggcatcgtccgcgtcaactgctccgtccccgaggagaaggcccccatccacttcaccatcgagaagctcgagctcaacgagaagatggtcaagctcaagcgcgagaagaactcccgcgaccagaacttcgtcatcctcgagttccccgtcgaggagcaggaccgcgtcctctccttccgctgccaggcccgcatcatctccggcatccacatgcagacctccgagtccaccaagtccgagctcgtcaccgtcaccgagtccttctccacccccaagttccacatctcccccaccggcatgatcatggagggcgcccagctccacatcaagtgcaccatccaggtcacccacctcgcccaggagttccccgagatcatcatccagaaggacaaggccatcgtcgcccacaaccgccacggcaacaaggccgtctactccgtcatggccatggtcgagcactccggcaactacacctgcaaggtcgagtcctcccgcatctccaaggtctcctccatcgtcgtcaacatcaccgagctcttctccaagcccgagctcgagtcctccttcacccacctcgaccagggcgagcgcctcaacctctcctgctccatccccggcgccccccccgccaacttcaccatccagaaggaggacaccatcgtctcccagacccaggacttcaccaagatcgcctccaagtccgactccggcacctacatctgcaccgccggcatcgacaaggtcgtcaagaagtccaacaccgtccagatcgtcgtctgcgagatgctctcccagccccgcatctcctacgacgcccagttcgaggtcatcaagggccagaccatcgaggtccgctgcgagtccatctccggcaccctccccatctcctaccagctcctcaagacctccaaggtcctcgagaactccaccaagaactccaacgaccccgccgtcttcaaggacaaccccaccgaggacgtcgagtaccagtgcgtcgccgacaactgccactcccacgccaagatgctctccgaggtcctccgcgtcaaggtcatcgcccccgtcgacgaggtccagatctccatcctctcctccaaggtcgtcgagtccggcgaggacatcgtcctccagtgcgccgtcaacgagggctccggccccatcacctacaagttctaccgcgagaaggagggcaagcccttctaccagatgacctccaacgccacccaggccttctggaccaagcagaaggcctccaaggagcaggagggcgagtactactgcaccgccttcaaccgcgccaaccacgcctcctccgtcccccgctccaagatcctcaccgtccgcgtcatcctcgccccctggaagaagggcctcatcgccgtcgtcatcatcggcgtcatcatcgccctcctcatcatcgccgccaagtgctacttcctccgcaaggccaaggccaagcagatgcccgtcgagatgtcccgccccgccgtccccctcctcaactccaacaacgagaagatgtccgaccccaacatggaggccaactcccactacggccacaacgacgacgtccgcaaccacgccatgaagcccatcaacgacaacaaggagcccctcaactccgacgtccagtacaccgaggtccaggtctcctccgccgagtcccacaaggacctcggcaagaaggacaccgagaccgtctactccgaggtccgcaaggccgtccccgacgccgtcgagtcccgctactcccgcaccgagggctccctcgacggcacctga

SEQ ID NO: 3097 - RNA, 2217 nt, synthetic construct
  misc_feature 1..2217: note = derived and/or modified sequence opt3 fromPECA1__Homo_sapiens__AAA36429
  source 1..2217: mol_type = other RNA
atgcagcccagatgggcccaaggcgctaccatgtggctgggggtgctccttacactgttgttatgcagctccctggagggacaggaaaactctttcactatcaattcagtcgacatgaagagtctacctgattggacggttcagaacggtaaaaatctcaccctgcagtgttttgcagacgtgagcacaacttcccacgtaaagccacaacatcagatgcttttctacaaagatgacgtgctgttttataacatttcttcgatgaagtcaaccgagagctacttcataccggaagtcaggatctatgatagtggcacatacaaatgcaccgtgattgttaataacaaggagaagactacagccgaatatcagttgctcgtggagggggtcccctcccctcgggtgaccctggacaaaaaggaggcgatccagggaggcattgtacgcgttaattgttctgtgccagaagagaaagctcccatccactttacgatagaaaagctggagctcaacgagaaaatggtcaagttaaagcgagaaaagaatagccgtgatcaaaacttcgtgatcctggagtttcctgtggaggagcaggacagagtcctttccttcaggtgccaggcccggattatctcaggtattcatatgcagaccagtgaaagcactaagtctgagttggttacagtgactgagtccttttcaaccccaaaattccacatcagccccacagggatgataatggaaggagcacaactgcatattaagtgtaccatccaggtaacgcacctagcccaggagtttcctgaaattatcatccaaaaagataaggctattgtggcacacaatcgccatggcaacaaagccgtctacagtgtgatggctatggttgagcactctggcaattatacttgcaaggtggaatccagcagaatatcgaaggtctcttccatcgtggtaaacattacagaactcttctcaaaaccagagctggaaagtagctttacccatcttgaccagggggagaggctgaatttgtcctgttctatcccgggagctccccctgcgaacttcactatacagaaggaagatacaattgttagccagacccaagacttcacgaaaatcgcatcaaagagtgattccggtacctacatctgcacagccggcattgacaaagtggtcaaaaagagcaacactgtgcagatcgtcgtgtgtgagatgctctctcagccacggatttcatacgacgctcagtttgaagttataaaagggcaaaccatcgaggtgcgctgcgagagtattagcggaacactgcccatctcctatcagttactgaagacttctaaagtactcgaaaattcgaccaagaacagcaatgatcctgccgtcttcaaagacaacccaacagaggatgtggaataccagtgtgttgcagacaattgccactcccacgctaagatgctttcagaggtgctgcgagtcaaggtgatcgcccccgtagatgaggtgcagattagtatattgtctagcaaagttgtcgaatccggcgaggacatcgtgctacaatgcgcggtgaacgaaggttcagggccgattacctataagttttacagagagaaagaaggaaagcctttctatcagatgactagcaatgccacgcaggcattttggacaaaacagaaggcttctaaggagcaagagggcgaatactattgtaccgccttcaacagggctaatcatgcctccagtgtcccccggagcaaaatcctgactgttcgtgtgattctcgcaccatggaagaaaggcctgatcgccgtggtaataatcggggtcattatcgcccttctgattatcgcggcaaagtgctactttttgcgcaaagccaaggctaaacagatgcctgtggagatgtctagacccgccgttccactcctgaactccaataacgaaaagatgtcagatcccaatatggaggcaaacagtcactacggacataatgacgatgtgaggaaccacgccatgaagcctataaacgacaataaagaaccattaaacagcgatgtccagtataccgaggtgcaagtttcgtccgctgagtctcataaggacctgggtaaaaaggacacagaaaccgtgtacagcgaggtacggaaagccgtcccggatgcagtggaatcacgatatagtcgcactgagggctccctagacgggacatga

SEQ ID NO: 3098 - RNA, 2217 nt, synthetic construct
  misc_feature 1..2217: note = derived and/or modified sequence opt4 fromPECA1__Homo_sapiens__AAA36429
  source 1..2217: mol_type = other RNA
atgcagcccagatgggcccagggcgccaccatgtggctgggcgtgctgctgaccctgctgctgtgcagcagcctggagggccaggagaacagcttcaccatcaacagcgtggacatgaagagcctgcccgactggaccgtgcagaacggcaagaacctgaccctgcagtgcttcgccgacgtgagcaccaccagccacgtgaagccccagcaccagatgctgttctacaaggacgacgtgctgttctacaacatcagcagcatgaagagcaccgagagctacttcatccccgaggtgagaatctacgacagcggcacctacaagtgcaccgtgatcgtgaacaacaaggagaagaccaccgccgagtaccagctgctggtggagggcgtgcccagccccagagtgaccctggacaagaaggaggccatccagggcggcatcgtgagagtgaactgcagcgtgcccgaggagaaggcccccatccacttcaccatcgagaagctggagctgaacgagaagatggtgaagctgaagagagagaagaacagcagagaccagaacttcgtgatcctggagttccccgtggaggagcaggacagagtgctgagcttcagatgccaggccagaatcatcagcggcatccacatgcagaccagcgagagcaccaagagcgagctggtgaccgtgaccgagagcttcagcacccccaagttccacatcagccccaccggcatgatcatggagggcgcccagctgcacatcaagtgcaccatccaggtgacccacctggcccaggagttccccgagatcatcatccagaaggacaaggccatcgtggcccacaacagacacggcaacaaggccgtgtacagcgtgatggccatggtggagcacagcggcaactacacctgcaaggtggagagcagcagaatcagcaaggtgagcagcatcgtggtgaacatcaccgagctgttcagcaagcccgagctggagagcagcttcacccacctggaccagggcgagagactgaacctgagctgcagcatccccggcgccccccccgccaacttcaccatccagaaggaggacaccatcgtgagccagacccaggacttcaccaagatcgccagcaagagcgacagcggcacctacatctgcaccgccggcatcgacaaggtggtgaagaagagcaacaccgtgcagatcgtggtgtgcgagatgctgagccagcccagaatcagctacgacgcccagttcgaggtgatcaagggccagaccatcgaggtgagatgcgagagcatcagcggcaccctgcccatcagctaccagctgctgaagaccagcaaggtgctggagaacagcaccaagaacagcaacgaccccgccgtgttcaaggacaaccccaccgaggacgtggagtaccagtgcgtggccgacaactgccacagccacgccaagatgctgagcgaggtgctgagagtgaaggtgatcgcccccgtggacgaggtgcagatcagcatcctgagcagcaaggtggtggagagcggcgaggacatcgtgctgcagtgcgccgtgaacgagggcagcggccccatcacctacaagttctacagagagaaggagggcaagcccttctaccagatgaccagcaacgccacccaggccttctggaccaagcagaaggccagcaaggagcaggagggcgagtactactgcaccgccttcaacagagccaaccacgccagcagcgtgcccagaagcaagatcctgaccgtgagagtgatcctggccccctggaagaagggcctgatcgccgtggtgatcatcggcgtgatcatcgccctgctgatcatcgccgccaagtgctacttcctgagaaaggccaaggccaagcagatgcccgtggagatgagcagacccgccgtgcccctgctgaacagcaacaacgagaagatgagcgaccccaacatggaggccaacagccactacggccacaacgacgacgtgagaaaccacgccatgaagcccatcaacgacaacaaggagcccctgaacagcgacgtgcagtacaccgaggtgcaggtgagcagcgccgagagccacaaggacctgggcaagaaggacaccgagaccgtgtacagcgaggtgagaaaggccgtgcccgacgccgtggagagcagatacagcagaaccgagggcagcctggacggcacctga

SEQ ID NO: 3099 - RNA, 2217 nt, synthetic construct
  misc_feature 1..2217: note = derived and/or modified sequence opt5 fromPECA1__Homo_sapiens__AAA36429
  source 1..2217: mol_type = other RNA
atgcagcccagatgggcccaaggcgctaccatgtggctgggggtgctcctgacacttctgctctgcagctccctggagggacaggaaaactctttcacgatcaatagcgtcgacatgaagtcccttcctgattggaccgttcagaacggcaaaaatctgacactccagtgttttgccgacgtgtctaccacaagccacgtgaagccgcaacatcagatgctgttctacaaagatgacgtcctgttttataacatttcctctatgaaaagcaccgagtcctacttcatccccgaagtgcggatttatgatagcgggacatacaaatgcaccgttatcgtgaataacaaggagaagacgaccgcggaatatcagctcctggtcgagggagtgccttctccccgcgttacacttgacaaaaaggaggctattcagggcgggatcgtgagagtcaattgttccgtgcctgaagagaaagcccccatccactttaccattgaaaagctggagctcaacgagaaaatggtgaagctgaagcgggaaaagaatagccgcgatcaaaacttcgtcatccttgagtttcctgttgaggagcaggacagagtgctgtctttccggtgccaggcccgcattatctccggcattcatatgcagacaagcgaatctaccaagtccgagctcgtgacggtcacagagagcttttccaccccgaaattccacatctctcccacaggaatgattatggaaggcgctcaactgcatatcaagtgtaccatccaggtgacccacctggcccaggagtttcctgaaattatcattcaaaaagataaggctatcgttgcccacaatagacatgggaacaaagcggtgtacagcgtcatggccatggtggagcactccggaaattatacatgcaaggttgaaagctctcggatttccaaggtgagctctatcgtcgtgaacatcacggaactcttcagcaaacccgagctggaatcctcttttacccatcttgaccagggcgagcgcctgaatctcagctgttccattcctggggctcccccggccaacttcacaatccagaaggaagataccattgtcagccagacacaagacttcaccaaaatcgcttctaagtccgatagcggaacgtacatttgcacagccggcatcgacaaagtggttaagaagtctaacaccgtgcagatcgtcgtgtgtgagatgctgtcccagcctagaattagctacgacgcgcagtttgaagttatcaaagggcaaaccattgaggtgcggtgcgagtccatctctggaacacttcccattagctatcagctgctcaagacctccaaagtcctggaaaattctacaaagaacagcaatgatcctgccgtgttcaaagacaaccccacggaggatgtggaataccagtgtgttgctgacaattgccactcccacgccaagatgctgagcgaggtcctccgcgtgaaggtgatcgctcccgtcgatgaggtgcagatttctatcctgtccagcaaagttgtggaatctggcgaggacatcgtccttcaatgcgccgtgaacgaaggctccgggcctattacctataagttttacagagagaaagaaggaaagccgttctatcagatgacaagcaatgccacccaggctttttggacaaaacagaaggcgtctaaggagcaagagggcgaatactattgtaccgccttcaaccgggctaatcatgccagctccgttccccgcagcaaaatcctgacggtgagagtcattctcgccccttggaagaaagggctgatcgctgtggttattatcggagtgatcattgcccttctgatcattgcggctaagtgctactttctccggaaagccaaggccaaacagatgcccgtcgagatgtctagacctgctgtgcccctgctgaactccaataacgaaaagatgagcgatccgaatatggaggccaactcccactacggccataatgacgatgtgcgcaaccacgctatgaagcctatcaacgacaataaagaacccctcaactctgatgtccagtataccgaggttcaagtgagctccgccgagtctcataaggacctggggaaaaaggacacagaaaccgtgtacagcgaggtccggaaagcggtgcctgatgccgttgaatccagatattctcgcacagagggaagccttgacggcacctga

SEQ ID NO: 3100 - protein, 911 aa, synthetic construct
  REGION 1..911: note = PGCB__Homo_sapiens__Q96GW7
MAQLFLPLLAALVLAQAPAALADVLEGDSSEDRAFRVRIAGDAPLQGVLGGALTIPCHVHYLRPPPSRRAVLGSPRVKWTFLSRGREAEVLVARGVRVKVNEAYRFRVALPAYPASLTDVSLALSELRPNDSGIYRCEVQHGIDDSSDAVEVKVKGVVFLYREGSARYAFSFSGAQEACARIGAHIATPEQLYAAYLGGYEQCDAGWLSDQTVRYPIQTPREACYGDMDGFPGVRNYGVVDPDDLYDVYCYAEDLNGELFLGDPPEKLTLEEARAYCQERGAEIATTGQLYAAWDGGLDHCSPGWLADGSVRYPIVTPSQRCGGGLPGVKTLFLFPNQTGFPNKHSRFNVYCFRDSAQPSAIPEASNPASNPASDGLEAIVTVTETLEELQLPQEATESESRGAIYSIPIMEDGGGGSSTPEDPAEAPRTLLEFETQSMVPPTGFSEEEGKALEEEEKYEDEEEKEEEEEEEEVEDEALWAWPSELSSPGPEASLPTEPAAQEESLSQAPARAVLQPGASPLPDGESEASRPPRVHGPPTETLPTPRERNLASPSPSTLVEAREVGEATGGPELSGVPRGESEETGSSEGAPSLLPATRAPEGTRELEAPSEDNSGRTAPAGTSVQAQPVLPTDSASRGGVAVVPASGDCVPSPCHNGGTCLEEEEGVRCLCLPGYGGDLCDVGLRFCNPGWDAFQGACYKHFSTRRSWEEAETQCRMYGAHLASISTPEEQDFINNRYREYQWIGLNDRTIEGDFLWSDGVPLLYENWNPGQPDSYFLSGENCVVMVWHDQGQWSDVPCNYHLSYTCKMGLVSCGPPPELPLAQVFGRPRLRYEVDTVLRYRCREGLAQRNLPLIRCQENGRWEAPQISCVPRRPARALHPEEDPEGRQGRLLGRWKALLIPPSSPMPGP

SEQ ID NO: 3101 - RNA, 2736 nt, synthetic construct
  misc_feature 1..2736: note = PGCB__Homo_sapiens__AAG23134
  source 1..2736: mol_type = other RNA
atggcccagctgttcctgcccctgctggcagccctggtcctggcccaggctcctgcagctttagcagatgttctggaaggagacagctcagaggaccgcgcttttcgcgtgcgcatcgcgggcgacgcgccactgcagggcgtgctcggcggcgccctcaccatcccttgccacgtccactacctgcggccaccgccgagccgccgggctgtgctgggctctccgcgggtcaagtggactttcctgtcccggggccgggaggcagaggtgctggtggcgcggggagtgcgcgtcaaggtgaacgaggcctaccggttccgcgtggcactgcctgcgtacccagcgtcgctcaccgacgtctccctggcgctgagcgagctgcgccccaacgactcaggtatctatcgctgtgaggtccagcacggcatcgatgacagcagcgacgctgtggaggtcaaggtcaaaggggtcgtctttctctaccgagagggctctgcccgctatgctttctccttttctggggcccaggaggcctgtgcccgcattggagcccacatcgccaccccggagcagctctatgccgcctaccttgggggctatgagcaatgtgatgctggctggctgtcggatcagaccgtgaggtatcccatccagaccccacgagaggcctgttacggagacatggatggcttccccggggtccggaactatggtgtggtggacccggatgacctctatgatgtgtactgttatgctgaagacctaaatggagaattgttcctgggtgaccctccagagaagctgacattggaggaagcacgggcgtactgccaggagcggggtgcagagattgccaccacgggccaactgtatgcagcctgggatggtggcctggaccactgcagcccagggtggctagctgatggcagtgtgcgctaccccatcgtcacacccagccagcgctgtggtgggggcttgcctggtgtcaagactctcttcctcttccccaaccagactggcttccccaataagcacagccgcttcaacgtctactgcttccgagactcggcccagccttctgccatccctgaggcctccaacccagcctccaacccagcctctgatggactagaggctatcgtcacagtgacagagaccctggaggaactgcagctgcctcaggaagccacagagagtgaatcccgtggggccatctactccatccccatcatggaggacggaggaggtggaagctccactccagaagacccagcagaggcccctaggacgctcctagaatttgaaacacaatccatggtaccgcccacggggttctcagaagaggaaggtaaggcattggaggaagaagagaaatatgaagatgaagaagagaaagaggaggaagaagaagaggaggaggtggaggatgaggctctgtgggcatggcccagcgagctcagcagcccgggccctgaggcctctctccccactgagccagcagcccaggaggagtcactctcccaggcgccagcaagggcagtcctgcagcctggtgcatcaccacttcctgatggagagtcagaagcttccaggcctccaagggtccatggaccacctactgagactctgcccactcccagggagaggaacctagcatccccatcaccttccactctggttgaggcaagagaggtgggggaggcaactggtggtcctgagctatctggggtccctcgaggagagagcgaggagacaggaagctccgagggtgccccttccctgcttccagccacacgggcccctgagggtaccagggagctggaggccccctctgaagataattctggaagaactgccccagcagggacctcagtgcaggcccagccagtgctgcccactgacagcgccagccgaggtggagtggccgtggtccccgcatcaggtgactgtgtccccagcccctgccacaatggtgggacatgcttggaggaggaggaaggggtccgctgcctatgtctgcctggctatgggggggacctgtgcgatgttggcctccgcttctgcaaccccggctgggacgccttccagggcgcctgctacaagcacttttccacacgaaggagctgggaggaggcagagacccagtgccggatgtacggcgcgcatctggccagcatcagcacacccgaggaacaggacttcatcaacaaccggtaccgggagtaccagtggatcggactcaacgacaggaccatcgaaggcgacttcttgtggtcggatggcgtccccctgctctatgagaactggaaccctgggcagcctgacagctacttcctgtctggagagaactgcgtggtcatggtgtggcatgatcagggacaatggagtgacgtgccctgcaactaccacctgtcctacacctgcaagatggggctggtgtcctgtgggccgccaccggagctgcccctggctcaagtgttcggccgcccacggctgcgctatgaggtggacactgtgcttcgctaccggtgccgggaaggactggcccagcgcaatctgccgctgatccgatgccaagagaacggtcgttgggaggccccccagatctcctgtgtgcccagaagacctgcccgagctctgcacccagaggaggacccagaaggacgtcaggggaggctactgggacgctggaaggcgctgttgatccccccttccagccccatgccaggtccctag

SEQ ID NO: 3102 - RNA, 2736 nt, synthetic construct
  misc_feature 1..2736: note = derived and/or modified sequence opt1 fromPGCB__Homo_sapiens__AAG23134
  source 1..2736: mol_type = other RNA
atggcccagctgttcctccccctgctggccgcgctcgtgctggcccaggccccggccgccctggcggacgtcctcgagggcgacagctccgaggaccgcgccttccgggtgcgcatcgccggggacgcgcccctgcagggcgtgctcgggggcgccctgaccatcccctgccacgtccactacctgcggcccccgcccagccgccgggccgtgctggggagcccccgcgtgaagtggaccttcctctcccggggccgcgaggccgaggtcctggtggcccggggcgtgcgcgtcaaggtgaacgaggcctaccggttccgcgtggcgctgcccgcctacccggcctccctcacggacgtcagcctggccctgtccgagctccggcccaacgacagcgggatctaccgctgcgaggtgcagcacggcatcgacgactccagcgacgccgtggaggtcaaggtgaagggggtggtcttcctgtaccgggagggctccgcgcgctacgccttcagcttctccggggcccaggaggcctgcgcccggatcggcgcgcacatcgccacccccgagcagctgtacgccgcctacctcggcgggtacgagcagtgcgacgccggctggctgagcgaccagaccgtgcgctaccccatccagaccccgcgggaggcgtgctacggggacatggacggcttccccggcgtgcgcaactacggggtcgtggaccccgacgacctgtacgacgtgtactgctacgccgaggacctcaacggcgagctgttcctgggggacccgcccgagaagctcacgctggaggaggcccgggcctactgccaggagcgcggcgcggagatcgccaccaccgggcagctgtacgccgcctgggacggcggcctcgaccactgctcccccgggtggctggccgacggcagcgtccgctaccccatcgtgaccccctcccagcggtgcgggggcgggctgccgggcgtcaagaccctcttcctgttccccaaccagaccggcttccccaacaagcacagccgcttcaacgtgtactgcttccgggactccgcgcagcccagcgccatcccggaggccagcaaccccgcctccaaccccgccagcgacgggctggaggcgatcgtgaccgtcaccgagacgctcgaggagctgcagctgccccaggaggccaccgagtccgagagccgcggcgccatctactccatcccgatcatggaggacgggggcgggggcagctccacccccgaggaccccgccgaggccccgcggaccctcctggagttcgagacgcagagcatggtgccgcccaccggcttctccgaggaggaggggaaggcgctggaggaggaggagaagtacgaggacgaggaggagaaggaggaggaggaggaggaggaggaggtggaggacgaggccctctgggcctggcccagcgagctgtccagccccggccccgaggcctccctgcccaccgagcccgcggcccaggaggagagcctctcccaggccccggcccgcgccgtcctgcagcccggggcgagccccctgcccgacggcgagtccgaggccagccggccgccccgcgtgcacggcccgcccaccgagacgctccccacgccccgggagcgcaacctggcctcccccagccccagcaccctggtggaggcccgggaggtcggggaggccaccggcgggccggagctgtccggcgtgccccgcggggagagcgaggagacgggctccagcgagggcgcgccctccctcctgcccgccacccgggccccggaggggacccgcgagctggaggcccccagcgaggacaactccggccggaccgcccccgcggggacgagcgtgcaggcccagccggtcctccccaccgactccgccagccgcggcggggtggccgtggtccccgcgtccggcgactgcgtgcccagcccgtgccacaacggcgggacctgcctggaggaggaggagggcgtgcggtgcctgtgcctccccgggtacggcggggacctgtgcgacgtcggcctgcgcttctgcaaccccggctgggacgccttccagggggcctgctacaagcacttctccacccggcgcagctgggaggaggccgagacgcagtgccgcatgtacggcgcccacctcgcgtccatcagcacccccgaggagcaggacttcatcaacaaccggtaccgcgagtaccagtggatcgggctgaacgaccggaccatcgagggcgacttcctgtggtccgacggggtgccgctcctgtacgagaactggaaccccggccagcccgacagctacttcctgagcggcgagaactgcgtggtcatggtgtggcacgaccaggggcagtggtccgacgtgccctgcaactaccacctcagctacacgtgcaagatgggcctggtctcctgcgggccgccgcccgagctgcccctcgcccaggtgttcggccgcccccggctgcgctacgaggtggacaccgtcctgcggtaccgctgccgggagggcctcgcccagcgcaacctgcccctgatccggtgccaggagaacgggcgctgggaggcgccccagatcagctgcgtgccccggcgcccggcccgggccctccaccccgaggaggaccccgagggccgccaggggcggctgctgggccgctggaaggccctcctgatcccgccctccagccccatgcccgggccctga

SEQ ID NO: 3103 - RNA, 2736 nt, synthetic construct
  misc_feature 1..2736: note = derived and/or modified sequence opt2 fromPGCB__Homo_sapiens__AAG23134
  source 1..2736: mol_type = other RNA
atggcccagctcttcctccccctcctcgccgccctcgtcctcgcccaggcccccgccgccctcgccgacgtcctcgagggcgactcctccgaggaccgcgccttccgcgtccgcatcgccggcgacgcccccctccagggcgtcctcggcggcgccctcaccatcccctgccacgtccactacctccgcccccccccctcccgccgcgccgtcctcggctccccccgcgtcaagtggaccttcctctcccgcggccgcgaggccgaggtcctcgtcgcccgcggcgtccgcgtcaaggtcaacgaggcctaccgcttccgcgtcgccctccccgcctaccccgcctccctcaccgacgtctccctcgccctctccgagctccgccccaacgactccggcatctaccgctgcgaggtccagcacggcatcgacgactcctccgacgccgtcgaggtcaaggtcaagggcgtcgtcttcctctaccgcgagggctccgcccgctacgccttctccttctccggcgcccaggaggcctgcgcccgcatcggcgcccacatcgccacccccgagcagctctacgccgcctacctcggcggctacgagcagtgcgacgccggctggctctccgaccagaccgtccgctaccccatccagaccccccgcgaggcctgctacggcgacatggacggcttccccggcgtccgcaactacggcgtcgtcgaccccgacgacctctacgacgtctactgctacgccgaggacctcaacggcgagctcttcctcggcgacccccccgagaagctcaccctcgaggaggcccgcgcctactgccaggagcgcggcgccgagatcgccaccaccggccagctctacgccgcctgggacggcggcctcgaccactgctcccccggctggctcgccgacggctccgtccgctaccccatcgtcaccccctcccagcgctgcggcggcggcctccccggcgtcaagaccctcttcctcttccccaaccagaccggcttccccaacaagcactcccgcttcaacgtctactgcttccgcgactccgcccagccctccgccatccccgaggcctccaaccccgcctccaaccccgcctccgacggcctcgaggccatcgtcaccgtcaccgagaccctcgaggagctccagctcccccaggaggccaccgagtccgagtcccgcggcgccatctactccatccccatcatggaggacggcggcggcggctcctccacccccgaggaccccgccgaggccccccgcaccctcctcgagttcgagacccagtccatggtcccccccaccggcttctccgaggaggagggcaaggccctcgaggaggaggagaagtacgaggacgaggaggagaaggaggaggaggaggaggaggaggaggtcgaggacgaggccctctgggcctggccctccgagctctcctcccccggccccgaggcctccctccccaccgagcccgccgcccaggaggagtccctctcccaggcccccgcccgcgccgtcctccagcccggcgcctcccccctccccgacggcgagtccgaggcctcccgccccccccgcgtccacggcccccccaccgagaccctccccaccccccgcgagcgcaacctcgcctccccctccccctccaccctcgtcgaggcccgcgaggtcggcgaggccaccggcggccccgagctctccggcgtcccccgcggcgagtccgaggagaccggctcctccgagggcgccccctccctcctccccgccacccgcgcccccgagggcacccgcgagctcgaggccccctccgaggacaactccggccgcaccgcccccgccggcacctccgtccaggcccagcccgtcctccccaccgactccgcctcccgcggcggcgtcgccgtcgtccccgcctccggcgactgcgtcccctccccctgccacaacggcggcacctgcctcgaggaggaggagggcgtccgctgcctctgcctccccggctacggcggcgacctctgcgacgtcggcctccgcttctgcaaccccggctgggacgccttccagggcgcctgctacaagcacttctccacccgccgctcctgggaggaggccgagacccagtgccgcatgtacggcgcccacctcgcctccatctccacccccgaggagcaggacttcatcaacaaccgctaccgcgagtaccagtggatcggcctcaacgaccgcaccatcgagggcgacttcctctggtccgacggcgtccccctcctctacgagaactggaaccccggccagcccgactcctacttcctctccggcgagaactgcgtcgtcatggtctggcacgaccagggccagtggtccgacgtcccctgcaactaccacctctcctacacctgcaagatgggcctcgtctcctgcggccccccccccgagctccccctcgcccaggtcttcggccgcccccgcctccgctacgaggtcgacaccgtcctccgctaccgctgccgcgagggcctcgcccagcgcaacctccccctcatccgctgccaggagaacggccgctgggaggccccccagatctcctgcgtcccccgccgccccgcccgcgccctccaccccgaggaggaccccgagggccgccagggccgcctcctcggccgctggaaggccctcctcatccccccctcctcccccatgcccggcccctga

SEQ ID NO: 3104 - RNA, 2736 nt, synthetic construct
  misc_feature 1..2736: note = derived and/or modified sequence opt3 fromPGCB__Homo_sapiens__AAG23134
  source 1..2736: mol_type = other RNA
atggcccagctgttcctcccccttctggctgcattggtgttagcccaagcgcctgctgccctggcagacgtcctagagggcgatagctccgaagacagagcctttagggttcggatcgctggggatgcaccactccagggagtgctgggtggcgcccttaccattccgtgccacgtacattacctgcgaccccctccatctcgccgtgctgtgttggggtcacccagagtcaagtggacattcctcagtaggggacgggaggccgaagtgctggttgcgcgcggcgtgagagtcaaagtgaacgaggcatataggtttcgggtagccctgcctgcttacccagccagcctcactgacgtttccttagcactgtctgaacttcgccccaatgattcgggtatatatcgatgtgaggtgcagcacgggatcgacgattcaagcgacgctgtcgaggtgaaggtgaaaggagtcgttttcttgtacagagaaggcagtgccaggtatgcgttttccttctctggcgcccaggaggcatgcgctcggattggggcccatatcgctacgcctgaacaactgtacgccgcatatctaggaggttacgagcagtgtgatgccggctggctcagcgaccagaccgtgcgttacccaattcagacaccgcgcgaggcttgctatggggatatggacggatttcccggcgtaagaaactacggtgtggtcgatcctgacgacctgtatgatgtgtactgttatgcggaagaccttaatggggagctgttcttgggagatccacccgaaaagctcactctggaggaagcaagggcctactgccaagagcggggcgctgagatcgccaccacaggccagttatatgcagcctgggacgggggactggatcactgttcccctggttggctcgctgacggctcagttcgatacccaatagtgacccccagtcagcgctgcgggggaggccttccgggtgtcaaaactctgtttttgttccctaaccagacagggtttcccaataagcatagcagattcaacgtgtactgttttagggattctgcccaaccatccgcaatccctgaagcgtcaaatcccgctagcaacccagccagtgacggcctagaggcaattgtaaccgttacggaaactctggaggaactccagctgccccaggaggccaccgagtctgaatcccggggagctatctatagcattcctatcatggaggatggcgggggaggttcgtctacaccagaagacccggccgaggcaccccgcactcttctggagttcgaaacccaatccatggtgcctccaacaggcttctcagaggaagaggggaaggctttggaagaggaggaaaaatacgaggatgaagaggaaaaggaggaggaagaggaagaggaagaggtcgaggacgaagccctctgggcgtggcccagtgagctgagctcccctggaccagaagcctctttacccaccgagccggctgcacaggaagagagcctgtcacaggcccctgctagagccgtgctacagccaggcgcaagtcccctccctgacggtgagtccgaagcgagcaggcccccacgtgtccacgggcctcccacggagactctgccaacaccgcgggaacgaaatcttgcctctccttcacccagtaccttggtggaggctagagaggttggcgaagccactggaggcccagagctgagcggggtgcccaggggagaatccgaggaaacaggttcttcggagggcgcacctagcctcctgccagctacccgcgcccccgaggggacgcgggaacttgaggcaccttccgaagataactcaggaagaaccgccccggctggcacaagtgtacaagcgcagccagtcctgcccactgactctgccagcaggggtggggtggcagttgtgcctgcttccggcgattgcgtcccatcaccctgtcacaatggagggacctgcttggaggaagaggagggcgtgcgctgcctctgtctgcctggatatggcggtgacttatgcgatgtagggctgcgattttgtaacccgggatgggacgccttccagggcgcctgctacaaacattttagcacacggcgttcttgggaagaggctgaaactcagtgtagaatgtatggtgcacacctagcctccataagtacccccgaggaacaagatttcattaataacaggtaccgcgagtatcagtggatcggcctcaatgaccggacaattgagggggattttctgtggagcgacggagtgccacttttgtacgaaaactggaaccctggccagcccgattcttacttcctgtccggggagaattgcgttgtcatggtgtggcatgaccagggacaatggtcagatgtgccatgtaactatcacctcagttatacctgcaagatgggcctggtcagctgtggtcctcccccagaattaccgctggcgcaggtttttgggagacctaggcttcgatacgaggtggacactgtgttgcgctaccggtgcagagagggactcgctcagaggaatctgcccctaatccgttgtcaggaaaacggccgctgggaggccccacaaatctcgtgcgtaccccggagacctgcaagggccctgcacccagaagaggaccccgaaggtcgacagggccggctcctggggcgctggaaagctcttttgattcctccgtcctctccaatgcccggaccttga

SEQ ID NO: 3105 - RNA, 2736 nt, synthetic construct
  misc_feature 1..2736: note = derived and/or modified sequence opt4 fromPGCB__Homo_sapiens__AAG23134
  source 1..2736: mol_type = other RNA
atggcccagctgttcctgcccctgctggccgccctggtgctggcccaggcccccgccgccctggccgacgtgctggagggcgacagcagcgaggacagagccttcagagtgagaatcgccggcgacgcccccctgcagggcgtgctgggcggcgccctgaccatcccctgccacgtgcactacctgagacccccccccagcagaagagccgtgctgggcagccccagagtgaagtggaccttcctgagcagaggcagagaggccgaggtgctggtggccagaggcgtgagagtgaaggtgaacgaggcctacagattcagagtggccctgcccgcctaccccgccagcctgaccgacgtgagcctggccctgagcgagctgagacccaacgacagcggcatctacagatgcgaggtgcagcacggcatcgacgacagcagcgacgccgtggaggtgaaggtgaagggcgtggtgttcctgtacagagagggcagcgccagatacgccttcagcttcagcggcgcccaggaggcctgcgccagaatcggcgcccacatcgccacccccgagcagctgtacgccgcctacctgggcggctacgagcagtgcgacgccggctggctgagcgaccagaccgtgagataccccatccagacccccagagaggcctgctacggcgacatggacggcttccccggcgtgagaaactacggcgtggtggaccccgacgacctgtacgacgtgtactgctacgccgaggacctgaacggcgagctgttcctgggcgacccccccgagaagctgaccctggaggaggccagagcctactgccaggagagaggcgccgagatcgccaccaccggccagctgtacgccgcctgggacggcggcctggaccactgcagccccggctggctggccgacggcagcgtgagataccccatcgtgacccccagccagagatgcggcggcggcctgcccggcgtgaagaccctgttcctgttccccaaccagaccggcttccccaacaagcacagcagattcaacgtgtactgcttcagagacagcgcccagcccagcgccatccccgaggccagcaaccccgccagcaaccccgccagcgacggcctggaggccatcgtgaccgtgaccgagaccctggaggagctgcagctgccccaggaggccaccgagagcgagagcagaggcgccatctacagcatccccatcatggaggacggcggcggcggcagcagcacccccgaggaccccgccgaggcccccagaaccctgctggagttcgagacccagagcatggtgccccccaccggcttcagcgaggaggagggcaaggccctggaggaggaggagaagtacgaggacgaggaggagaaggaggaggaggaggaggaggaggaggtggaggacgaggccctgtgggcctggcccagcgagctgagcagccccggccccgaggccagcctgcccaccgagcccgccgcccaggaggagagcctgagccaggcccccgccagagccgtgctgcagcccggcgccagccccctgcccgacggcgagagcgaggccagcagaccccccagagtgcacggcccccccaccgagaccctgcccacccccagagagagaaacctggccagccccagccccagcaccctggtggaggccagagaggtgggcgaggccaccggcggccccgagctgagcggcgtgcccagaggcgagagcgaggagaccggcagcagcgagggcgcccccagcctgctgcccgccaccagagcccccgagggcaccagagagctggaggcccccagcgaggacaacagcggcagaaccgcccccgccggcaccagcgtgcaggcccagcccgtgctgcccaccgacagcgccagcagaggcggcgtggccgtggtgcccgccagcggcgactgcgtgcccagcccctgccacaacggcggcacctgcctggaggaggaggagggcgtgagatgcctgtgcctgcccggctacggcggcgacctgtgcgacgtgggcctgagattctgcaaccccggctgggacgccttccagggcgcctgctacaagcacttcagcaccagaagaagctgggaggaggccgagacccagtgcagaatgtacggcgcccacctggccagcatcagcacccccgaggagcaggacttcatcaacaacagatacagagagtaccagtggatcggcctgaacgacagaaccatcgagggcgacttcctgtggagcgacggcgtgcccctgctgtacgagaactggaaccccggccagcccgacagctacttcctgagcggcgagaactgcgtggtgatggtgtggcacgaccagggccagtggagcgacgtgccctgcaactaccacctgagctacacctgcaagatgggcctggtgagctgcggccccccccccgagctgcccctggcccaggtgttcggcagacccagactgagatacgaggtggacaccgtgctgagatacagatgcagagagggcctggcccagagaaacctgcccctgatcagatgccaggagaacggcagatgggaggccccccagatcagctgcgtgcccagaagacccgccagagccctgcaccccgaggaggaccccgagggcagacagggcagactgctgggcagatggaaggccctgctgatcccccccagcagccccatgcccggcccctga

SEQ ID NO: 3106 - RNA, 2736 nt, synthetic construct
  misc_feature 1..2736: note = derived and/or modified sequence opt5 fromPGCB__Homo_sapiens__AAG23134
  source 1..2736: mol_type = other RNA
atggcccagctgttcctccccctgcttgctgccctggtgctcgcgcaagctcctgccgccctggctgacgtccttgagggcgatagctccgaagacagagcctttcgggttcgcatcgctggggatgccccgctgcagggagtgctcggcggggcgctgaccattccctgccacgtgcattacctgagacctcccccttctcggcgcgccgtcctcggaagccccagagtgaagtggacattcctgtcccggggccgcgaggctgaagttcttgtggccagaggggtccgggtgaaagttaacgaggcttatcgctttagagtggccctgcctgcgtacccggcctctctcacggacgtcagcctggctctttccgaactgcggcccaatgattctggaatctatcgctgtgaggtgcagcacggcattgacgatagctccgacgccgtggaggtcaaggttaaaggcgtggtgttcctctacagagaagggagcgctcggtatgccttttctttctccggagcccaggaggcttgcgcgcgcatcggcgcccatattgctacccctgaacaactgtacgccgcctatctgggcggatacgagcagtgtgatgctggctggctcagcgaccagacagtcagataccccatccagacccctcgggaggcctgctatggggatatggacggatttcccggcgtgagaaactacggcgttgtggatccggacgacctgtatgatgtctactgttatgcggaagaccttaatggggagctgttcctcggagatcctcccgaaaagctgacacttgaggaagctcgcgcctactgccaagagcggggcgccgagatcgctaccacagggcagctgtatgccgcttgggacggaggcctcgatcactgttctcctgggtggctggccgacggatccgtgagataccccattgttacccccagccagcgctgcggcggcgggctgcctggagtgaaaacgctctttctgttcccgaaccagaccggctttcccaataagcattctcggttcaacgtctactgttttagagattccgcgcaacctagcgccatccccgaagcctccaatcctgcctctaaccccgctagcgacgggcttgaggccattgtgacagtcaccgaaacactggaggaactccagctgccgcaggaggcgaccgagtccgaaagccgcggagccatctattctattcctatcatggaggatggcgggggcggatccagcacgcccgaagaccctgctgaggctccccggacacttctggagttcgaaacccaatctatggtgcctcccacaggcttcagcgaggaagaggggaaggctctcgaagaggaggaaaaatacgaggatgaagaggaaaaggaggaggaagaggaagaggaagaggttgaggacgaagccctgtgggcctggccgtccgagctgtctagccctggacccgaggcttccctccccaccgaacctgcggcccaggaagagagcctgtctcaggctccggccagagccgtgcttcagcccggcgcttcccctctgcccgacggggagagcgaagcctctcgccctccccgggtccacggacctcccaccgagacactcccgacgcctagagaacgcaatctggcgtcccccagcccttccaccctggtggaggctcgggaggttggcgaagccacagggggccccgagctttctggagtgccgagaggcgaaagcgaggaaaccgggtcctctgagggagcccctagcctcctgcccgctacacgggcccctgagggcacccgcgaactggaggcgccctccgaagataacagcgggagaacggctcccgccggaacatctgtccaagcccagcctgtgctcccgaccgactccgctagccggggcggggtggccgttgtccccgcttctggcgattgcgtgccttccccctgtcacaatggagggacctgcctggaggaagaggagggggtgagatgcctttgtctgcctggatatggcggggacctctgcgatgtcggactgcgcttttgtaaccccggctgggacgccttccagggggcgtgctacaaacattttagcacacggagatcttgggaagaggccgaaacccagtgtcgcatgtatggcgctcacctggccagcatttccacacctgaggaacaagatttcatcaataacagataccgggagtatcagtggatcggacttaatgaccgcacgattgagggcgattttctctggagcgacggggtgccgctgctgtacgaaaactggaaccccggacagcctgattcttacttcctctccggcgagaattgcgttgtgatggtctggcatgaccaggggcaatggagcgatgtgccctgtaactatcacctgtcctatacctgcaagatgggacttgtttcttgtggccctcccccggaactgcctctcgctcaggtgtttggcagaccccggctgcgctacgaggtcgacacagtgctgagataccggtgccgcgaggggcttgcccagagaaatctccccctgatccggtgtcaggaaaacggacgctgggaggcccctcaaattagctgcgttcccagacggcctgctagagcgctgcacccggaagaggaccccgaaggccgccaggggcggctcctgggaagatggaaagcccttctgatccctccctcctctcctatgcccggcccgtga

SEQ ID NO: 3107 - protein, 1106 aa, synthetic construct
  REGION 1..1106: note = PGFRB__Homo_sapiens__P09619
MRLPGAMPALALKGELLLLSLLLLLEPQISQGLVVTPPGPELVLNVSSTFVLTCSGSAPVVWERMSQEPPQEMAKAQDGTFSSVLTLTNLTGLDTGEYFCTHNDSRGLETDERKRLYIFVPDPTVGFLPNDAEELFIFLTEITEITIPCRVTDPQLVVTLHEKKGDVALPVPYDHQRGFSGIFEDRSYICKTTIGDREVDSDAYYVYRLQVSSINVSVNAVQTVVRQGENITLMCIVIGNEVVNFEWTYPRKESGRLVEPVTDFLLDMPYHIRSILHIPSAELEDSGTYTCNVTESVNDHQDEKAINITVVESGYVRLLGEVGTLQFAELHRSRTLQVVFEAYPPPTVLWFKDNRTLGDSSAGEIALSTRNVSETRYVSELTLVRVKVAEAGHYTMRAFHEDAEVQLSFQLQINVPVRVLELSESHPDSGEQTVRCRGRGMPQPNIIWSACRDLKRCPRELPPTLLGNSSEEESQLETNVTYWEEEQEFEVVSTLRLQHVDRPLSVRCTLRNAVGQDTQEVIVVPHSLPFKVVVISAILALVVLTIISLIILIMLWQKKPRYEIRWKVIESVSSDGHEYIYVDPMQLPYDSTWELPRDQLVLGRTLGSGAFGQVVEATAHGLSHSQATMKVAVKMLKSTARSSEKQALMSELKIMSHLGPHLNVVNLLGACTKGGPIYIITEYCRYGDLVDYLHRNKHTFLQHHSDKRRPPSAELYSNALPVGLPLPSHVSLTGESDGGYMDMSKDESVDYVPMLDMKGDVKYADIESSNYMAPYDNYVPSAPERTCRATLINESPVLSYMDLVGFSYQVANGMEFLASKNCVHRDLAARNVLICEGKLVKICDFGLARDIMRDSNYISKGSTFLPLKWMAPESIFNSLYTTLSDVWSFGILLWEIFTLGGTPYPELPMNEQFYNAIKRGYRMAQPAHASDEIYEIMQKCWEEKFEIRPPFSQLVLLLERLLGEGYKKKYQQVDEEFLRSDHPAILRSQARLPGFHGLRSPLDTSSVLYTAVQPNEGDNDYIIPLPDPKPEVADEGPLEGSPSLASSTLNEVNTSSTISCDSPLEPQDEPEPEPQLELQVEPEPELEQLPDSGCPAPRAEAEDSFL

SEQ ID NO: 3108 - RNA, 3321 nt, synthetic construct
  misc_feature 1..3321: note = PGFRB__Homo_sapiens__AAA60049
  source 1..3321: mol_type = other RNA
atgcggcttccgggtgcgatgccagctctggccctcaaaggcgagctgctgttgctgtctctcctgttacttctggaaccacagatctctcagggcctggtcgtcacacccccggggccagagcttgtcctcaatgtctccagcaccttcgttctgacctgctcgggttcagctccggtggtgtgggaacggatgtcccaggagcccccacaggaaatggccaaggcccaggatggcaccttctccagcgtgctcacactgaccaacctcactgggctagacacgggagaatacttttgcacccacaatgactcccgtggactggagaccgatgagcggaaacggctctacatctttgtgccagatcccaccgtgggcttcctccctaatgatgccgaggaactattcatctttctcacggaaataactgagatcaccattccatgccgagtaacagacccacagctggtggtgacactgcacgagaagaaaggggacgttgcactgcctgtcccctatgatcaccaacgtggcttttctggtatctttgaggacagaagctacatctgcaaaaccaccattggggacagggaggtggattctgatgcctactatgtctacagactccaggtgtcatccatcaacgtctctgtgaacgcagtgcagactgtggtccgccagggtgagaacatcaccctcatgtgcattgtgatcgggaatgaggtggtcaacttcgagtggacatacccccgcaaagaaagtgggcggctggtggagccggtgactgacttcctcttggatatgccttaccacatccgctccatcctgcacatccccagtgccgagttagaagactcggggacctacacctgcaatgtgacggagagtgtgaatgaccatcaggatgaaaaggccatcaacatcaccgtggttgagagcggctacgtgcggctcctgggagaggtgggcacactacaatttgctgagctgcatcggagccggacactgcaggtagtgttcgaggcctacccaccgcccactgtcctgtggttcaaagacaaccgcaccctgggcgactccagcgctggcgaaatcgccctgtccacgcgcaacgtgtcggagacccggtatgtgtcagagctgacactggttcgcgtgaaggtggcagaggctggccactacaccatgcgggccttccatgaggatgctgaggtccagctctccttccagctacagatcaatgtccctgtccgagtgctggagctaagtgagagccaccctgacagtggggaacagacagtccgctgtcgtggccggggcatgccccagccgaacatcatctggtctgcctgcagagacctcaaaaggtgtccacgtgagctgccgcccacgctgctggggaacagttccgaagaggagagccagctggagactaacgtgacgtactgggaggaggagcaggagtttgaggtggtgagcacactgcgtctgcagcacgtggatcggccactgtcggtgcgctgcacgctgcgcaacgctgtgggccaggacacgcaggaggtcatcgtggtgccacactccttgccctttaaggtggtggtgatctcagccatcctggccctggtggtgctcaccatcatctcccttatcatcctcatcatgctttggcagaagaagccacgttacgagatccgatggaaggtgattgagtctgtgagctctgacggccatgagtacatctacgtggaccccatgcagctgccctatgactccacgtgggagctgccgcgggaccagcttgtgctgggacgcaccctcggctctggggcctttgggcaggtggtggaggccacggctcatggcctgagccattctcaggccacgatgaaagtggccgtcaagatgcttaaatccacagcccgcagcagtgagaagcaagcccttatgtcggagctgaagatcatgagtcaccttgggccccacctgaacgtggtcaacctgttgggggcctgcaccaaaggaggacccatctatatcatcactgagtactgccgctacggagacctggtggactacctgcaccgcaacaaacacaccttcctgcagcaccactccgacaagcgccgcccgcccagcgcggagctctacagcaatgctctgcccgttgggctccccctgcccagccatgtgtccttgaccggggagagcgacggtggctacatggacatgagcaaggacgagtcggtggactatgtgcccatgctggacatgaaaggagacgtcaaatatgcagacatcgagtcctccaactacatggccccttacgataactacgttccctctgcccctgagaggacctgccgagcaactttgatcaacgagtctccagtgctaagctacatggacctcgtgggcttcagctaccaggtggccaatggcatggagtttctggcctccaagaactgcgtccacagagacctggcggctaggaacgtgctcatctgtgaaggcaagctggtcaagatctgtgactttggcctggctcgagacatcatgcgggactcgaattacatctccaaaggcagcacctttttgcctttaaagtggatggctccggagagcatcttcaacagcctctacaccaccctgagcgacgtgtggtccttcgggatcctgctctgggagatcttcaccttgggtggcaccccttacccagagctgcccatgaacgagcagttctacaatgccatcaaacggggttaccgcatggcccagcctgcccatgcctccgacgagatctatgagatcatgcagaagtgctgggaagagaagtttgagattcggccccccttctcccagctggtgctgcttctcgagagactgttgggcgaaggttacaaaaagaagtaccagcaggtggatgaggagtttctgaggagtgaccacccagccatccttcggtcccaggcccgcttgcctgggttccatggcctccgatctcccctggacaccagctccgtcctctatactgccgtgcagcccaatgagggtgacaacgactatatcatccccctgcctgaccccaaacccgaggttgctgacgagggcccactggagggttcccccagcctagccagctccaccctgaatgaagtcaacacctcctcaaccatctcctgtgacagccccctggagccccaggacgaaccagagccagagccccagcttgagctccaggtggagccggagccagagctggaacagttgccggattcggggtgccctgcgcctcgggcggaagcagaggatagcttcctgtag

SEQ ID NO: 3109 - RNA, 3321 nt, synthetic construct
  misc_feature 1..3321: note = derived and/or modified sequence opt1 fromPGFRB__Homo_sapiens__AAA60049
  source 1..3321: mol_type = other RNA
atgcgcctgcccggcgccatgccggccctcgcgctgaagggggagctgctcctgctgagcctcctgctgctcctggagccccagatctcccagggcctggtggtcaccccgcccgggcccgagctcgtgctgaacgtgagctccaccttcgtcctgacgtgcagcggctccgcccccgtggtgtgggagcggatgagccaggagccgccccaggagatggccaaggcccaggacgggaccttctccagcgtcctcaccctgaccaacctgacgggcctcgacaccggcgagtacttctgcacccacaacgactcccgcgggctggagaccgacgagcggaagcgcctgtacatcttcgtgcccgaccccacggtgggcttcctccccaacgacgccgaggagctgttcatcttcctgaccgagatcaccgagatcaccatcccctgccgggtcacggacccgcagctcgtggtgaccctgcacgagaagaagggggacgtcgcgctgcccgtgccctacgaccaccagcgcggcttcagcgggatcttcgaggaccggtcctacatctgcaagaccaccatcggcgaccgcgaggtggacagcgacgcctactacgtctaccggctccaggtgtccagcatcaacgtgtccgtcaacgccgtgcagacggtggtccgccagggcgagaacatcaccctgatgtgcatcgtgatcgggaacgaggtggtcaacttcgagtggacctacccccggaaggagagcggccgcctggtggagccggtcaccgacttcctcctggacatgccctaccacatccggtccatcctgcacatccccagcgccgagctcgaggactccgggacgtacacgtgcaacgtgaccgagagcgtgaacgaccaccaggacgagaaggcgatcaacatcaccgtcgtggagagcggctacgtgcgcctgctgggcgaggtcgggaccctccagttcgccgagctgcaccggtcccgcaccctccaggtggtgttcgaggcctacccgccgcccaccgtcctgtggttcaaggacaaccggaccctgggcgacagctccgccggggagatcgccctgagcacgcgcaacgtgtccgagacccggtacgtgagcgagctcaccctggtccgcgtgaaggtggcggaggccggccactacaccatgcgggccttccacgaggacgccgaggtccagctgtccttccagctccagatcaacgtgcccgtgcgcgtcctggagctgagcgagtcccaccccgacagcggggagcagacggtgcgctgccggggccgcggcatgccccagcccaacatcatctggtccgcctgccgggacctcaagcgctgcccccgggagctgcccccgaccctgctggggaacagctccgaggaggagagccagctcgagaccaacgtgacctactgggaggaggagcaggagttcgaggtcgtgtccacgctgcgcctgcagcacgtggaccggcccctcagcgtccgctgcaccctgcggaacgcggtgggccaggacacccaggaggtgatcgtcgtgccccactccctgccgttcaaggtggtcgtgatcagcgccatcctcgccctggtggtcctgaccatcatctccctcatcatcctgatcatgctgtggcagaagaagccccgctacgagatccggtggaaggtgatcgagagcgtgagctccgacgggcacgagtacatctacgtcgaccccatgcagctcccctacgacagcacctgggagctgccgcgcgaccagctggtgctcggccggacgctggggtccggcgccttcggccaggtggtcgaggccaccgcgcacgggctgagccactcccaggccaccatgaaggtggccgtgaagatgctcaagagcaccgcccgctccagcgagaagcaggccctgatgtccgagctgaagatcatgagccacctcggcccccacctgaacgtcgtgaacctgctcggggcgtgcacgaagggcgggcccatctacatcatcaccgagtactgccggtacggcgacctggtggactacctgcaccgcaacaagcacaccttcctccagcaccactccgacaagcggcggcccccgagcgccgagctgtactccaacgccctgcccgtcggcctccccctgcccagccacgtgtccctgaccggggagagcgacggcgggtacatggacatgtccaaggacgagagcgtggactacgtcccgatgctcgacatgaagggcgacgtgaagtacgccgacatcgagagctccaactacatggcgccctacgacaactacgtgcccagcgcccccgagcgcacgtgccgcgccaccctgatcaacgagtccccggtcctgagctacatggacctcgtgggcttctcctaccaggtcgccaacgggatggagttcctggccagcaagaactgcgtgcaccgcgacctggcggcccggaacgtgctcatctgcgagggcaagctggtcaagatctgcgacttcgggctggcccgcgacatcatgcgggactccaactacatcagcaagggctccaccttcctccccctgaagtggatggcccccgagagcatcttcaactccctgtacaccacgctcagcgacgtgtggtccttcgggatcctgctgtgggagatcttcaccctcggcggcaccccctacccggagctgcccatgaacgagcagttctacaacgccatcaagcgcgggtaccggatggcgcagcccgcccacgccagcgacgagatctacgagatcatgcagaagtgctgggaggagaagttcgagatccggcccccgttctcccagctggtgctcctgctggagcgcctcctgggcgaggggtacaagaagaagtaccagcaggtcgacgaggagttcctgcgcagcgaccaccccgccatcctccggtcccaggcccgcctgcccggcttccacgggctgcggagcccgctcgacacctccagcgtgctgtacacggcggtgcagcccaacgagggcgacaacgactacatcatccccctgcccgacccgaagcccgaggtcgccgacgagggccccctcgaggggagcccctccctggccagctccaccctgaacgaggtgaacaccagctccaccatcagctgcgactccccgctcgagccccaggacgagcccgagcccgagccgcagctggagctccaggtggagcccgagcccgagctggagcagctgcccgacagcggctgcccggcgccccgcgccgaggccgaggactccttcctgtga

SEQ ID NO: 3110 - RNA, 3321 nt, synthetic construct
  misc_feature 1..3321: note = derived and/or modified sequence opt2 fromPGFRB__Homo_sapiens__AAA60049
  source 1..3321: mol_type = other RNA
atgcgcctccccggcgccatgcccgccctcgccctcaagggcgagctcctcctcctctccctcctcctcctcctcgagccccagatctcccagggcctcgtcgtcaccccccccggccccgagctcgtcctcaacgtctcctccaccttcgtcctcacctgctccggctccgcccccgtcgtctgggagcgcatgtcccaggagcccccccaggagatggccaaggcccaggacggcaccttctcctccgtcctcaccctcaccaacctcaccggcctcgacaccggcgagtacttctgcacccacaacgactcccgcggcctcgagaccgacgagcgcaagcgcctctacatcttcgtccccgaccccaccgtcggcttcctccccaacgacgccgaggagctcttcatcttcctcaccgagatcaccgagatcaccatcccctgccgcgtcaccgacccccagctcgtcgtcaccctccacgagaagaagggcgacgtcgccctccccgtcccctacgaccaccagcgcggcttctccggcatcttcgaggaccgctcctacatctgcaagaccaccatcggcgaccgcgaggtcgactccgacgcctactacgtctaccgcctccaggtctcctccatcaacgtctccgtcaacgccgtccagaccgtcgtccgccagggcgagaacatcaccctcatgtgcatcgtcatcggcaacgaggtcgtcaacttcgagtggacctacccccgcaaggagtccggccgcctcgtcgagcccgtcaccgacttcctcctcgacatgccctaccacatccgctccatcctccacatcccctccgccgagctcgaggactccggcacctacacctgcaacgtcaccgagtccgtcaacgaccaccaggacgagaaggccatcaacatcaccgtcgtcgagtccggctacgtccgcctcctcggcgaggtcggcaccctccagttcgccgagctccaccgctcccgcaccctccaggtcgtcttcgaggcctaccccccccccaccgtcctctggttcaaggacaaccgcaccctcggcgactcctccgccggcgagatcgccctctccacccgcaacgtctccgagacccgctacgtctccgagctcaccctcgtccgcgtcaaggtcgccgaggccggccactacaccatgcgcgccttccacgaggacgccgaggtccagctctccttccagctccagatcaacgtccccgtccgcgtcctcgagctctccgagtcccaccccgactccggcgagcagaccgtccgctgccgcggccgcggcatgccccagcccaacatcatctggtccgcctgccgcgacctcaagcgctgcccccgcgagctcccccccaccctcctcggcaactcctccgaggaggagtcccagctcgagaccaacgtcacctactgggaggaggagcaggagttcgaggtcgtctccaccctccgcctccagcacgtcgaccgccccctctccgtccgctgcaccctccgcaacgccgtcggccaggacacccaggaggtcatcgtcgtcccccactccctccccttcaaggtcgtcgtcatctccgccatcctcgccctcgtcgtcctcaccatcatctccctcatcatcctcatcatgctctggcagaagaagccccgctacgagatccgctggaaggtcatcgagtccgtctcctccgacggccacgagtacatctacgtcgaccccatgcagctcccctacgactccacctgggagctcccccgcgaccagctcgtcctcggccgcaccctcggctccggcgccttcggccaggtcgtcgaggccaccgcccacggcctctcccactcccaggccaccatgaaggtcgccgtcaagatgctcaagtccaccgcccgctcctccgagaagcaggccctcatgtccgagctcaagatcatgtcccacctcggcccccacctcaacgtcgtcaacctcctcggcgcctgcaccaagggcggccccatctacatcatcaccgagtactgccgctacggcgacctcgtcgactacctccaccgcaacaagcacaccttcctccagcaccactccgacaagcgccgccccccctccgccgagctctactccaacgccctccccgtcggcctccccctcccctcccacgtctccctcaccggcgagtccgacggcggctacatggacatgtccaaggacgagtccgtcgactacgtccccatgctcgacatgaagggcgacgtcaagtacgccgacatcgagtcctccaactacatggccccctacgacaactacgtcccctccgcccccgagcgcacctgccgcgccaccctcatcaacgagtcccccgtcctctcctacatggacctcgtcggcttctcctaccaggtcgccaacggcatggagttcctcgcctccaagaactgcgtccaccgcgacctcgccgcccgcaacgtcctcatctgcgagggcaagctcgtcaagatctgcgacttcggcctcgcccgcgacatcatgcgcgactccaactacatctccaagggctccaccttcctccccctcaagtggatggcccccgagtccatcttcaactccctctacaccaccctctccgacgtctggtccttcggcatcctcctctgggagatcttcaccctcggcggcaccccctaccccgagctccccatgaacgagcagttctacaacgccatcaagcgcggctaccgcatggcccagcccgcccacgcctccgacgagatctacgagatcatgcagaagtgctgggaggagaagttcgagatccgcccccccttctcccagctcgtcctcctcctcgagcgcctcctcggcgagggctacaagaagaagtaccagcaggtcgacgaggagttcctccgctccgaccaccccgccatcctccgctcccaggcccgcctccccggcttccacggcctccgctcccccctcgacacctcctccgtcctctacaccgccgtccagcccaacgagggcgacaacgactacatcatccccctccccgaccccaagcccgaggtcgccgacgagggccccctcgagggctccccctccctcgcctcctccaccctcaacgaggtcaacacctcctccaccatctcctgcgactcccccctcgagccccaggacgagcccgagcccgagccccagctcgagctccaggtcgagcccgagcccgagctcgagcagctccccgactccggctgccccgccccccgcgccgaggccgaggactccttcctctga

SEQ ID NO: 3111 - RNA, 3321 nt, synthetic construct
  misc_feature 1..3321: note = derived and/or modified sequence opt3 fromPGFRB__Homo_sapiens__AAA60049
  source 1..3321: mol_type = other RNA
atgagactgcccggcgccatgcctgctctcgcacttaagggggagctgttgttactgagcctactcctgcttctggaaccacagatctcccaaggattggtggtcaccccgcccggtcctgagctcgttctgaacgtgtcttcaacattcgtactgacttgcagtggcagcgccccagtggtctgggaaaggatgtcccaggagccccctcaggaaatggcgaaagctcaggacgggacgttttcttcggtgctcaccttaacaaatctgactggacttgataccggcgagtacttctgtacacacaacgactcacggggtttggagaccgatgaacgcaagcgactgtatatttttgttccagaccccactgtggggttcctacctaatgatgccgaggaactctttatattcctgacagagatcaccgagattacgatcccatgccgtgtcactgacccgcaacttgtggtaaccctgcatgaaaagaagggagatgttgcattgcccgtgccttacgaccaccagagaggctttagcggcattttcgaggataggagttatatctgtaaaacaactataggggaccgggaagtcgattccgacgcctactatgtgtaccgcctccaggtgtctagcatcaacgtctccgttaatgctgtgcagaccgtagtgagacaaggagagaacattacactgatgtgcatcgtcattggtaatgaagtggttaactttgagtggacctatccaaggaaggagtcaggccggttagtggaacccgtcacggatttcctgctcgacatgccttaccatatccgcagtatacttcacattccaagcgcagagctggaagactctgggacttacacatgtaatgtgaccgagtccgtaaacgatcatcaggacgaaaaggccatcaatattactgttgtggagtcaggatatgtccgattgctaggcgaggtgggtacactgcagtttgctgaactccacagaagcaggaccctgcaggtcgtgttcgaggcctatcccccgcctacggttctttggtttaaagataaccggaccctgggggacagttctgcgggagaaatcgcattgtccacacgtaatgtgagcgagactcgctacgtatcggaactcaccctggtcagagtgaaggttgccgaggctggccactacacaatgagggccttccatgaggatgcagaagtgcaattatctttccagctgcagatcaacgtccccgtgcgggtactagagctctccgaatcacacccagacagtggcgagcaaactgtgcgatgccgcgggagaggaatgcctcagcccaatattatatggagcgcttgtagggatctgaaacggtgcccacgcgagcttccccctaccttgctgggtaactcctctgaagaggaaagccagctcgagacaaacgttacctattgggaagaggagcaggaatttgaggtcgtgtcaactctgagacttcaacatgtggacaggccactgagtgtccgttgtacgttgcggaatgccgttggccaggatacacaggaagtgatcgtggtaccgcactccctccccttcaaggtcgtggttattagcgcgatcctggccttagtggtcctgaccataatttctctaatcatcctcattatgctgtggcagaaaaagcctcgatacgagatcagatggaaggtgattgaatcagttagtagcgacgggcacgagtatatatacgtggatccaatgcaacttccctacgactccacttgggagttgcctagggaccagctggtactcggacgcaccctgggctctggtgcatttgggcaggtcgtggaagctacagcccatggcttatcgcacagccaggctaccatgaaagtggccgtcaagatgctgaaatccactgcacggtcaagtgagaagcaagcccttatgtctgaattgaaaatcatgagccatctcggaccacacctgaacgttgtgaatctactgggcgcttgcacaaaagggggacccatttatatcatcacggagtactgtagatatggtgatctcgtagactacctgcataggaacaaacacaccttccttcagcaccattccgataagcgccgaccgccttcagcggaattgtatagcaatgcactgccagtgggcttacccctcccttctcacgtctccctgactggggagagtgacggaggctacatggatatgagcaaggacgagtctgtggattatgttcccatgcttgacatgaaaggtgatgtgaagtacgccgacattgaatcctcaaactacatggctccatatgataattacgtccctagtgcccccgagcggacatgccgtgcaaccctgataaacgaaagcccagtgttgtcgtatatggacctcgttgggttttcctaccaggtggccaatggcatggagttcctggcttctaaaaactgcgtccatagagatctagccgcaaggaatgtactgatctgtgagggaaagctcgtgaaaatttgcgactttggcctggcgcgcgacatcatgcgggatagcaactatatttcaaaggggagtacattccttccgttgaagtggatggctcctgaatccatctttaattctctgtacactaccttaagcgacgtttggtccttcggaatactcctgtgggagatctttacgcttggtggcaccccctatccagaactgcccatgaacgagcagttctacaatgccattaaaagagggtacaggatggcacaacctgcccacgcttcagatgaaatctatgagattatgcagaagtgttgggaggaaaaatttgagatccgaccacccttcagccagctagtgctcctgttggaacgcctgttaggagagggctacaagaaaaagtatcaacaggtcgacgaagagttcctccggagtgatcaccctgccatactgagatctcaggcaaggcttccgggttttcatgggctgcgttccccattggacacaagctcggtgctctacactgctgtacagcccaacgagggcgataacgactatattatccctctgccagatcccaagcctgaagtggccgacgagggaccgctagaaggctcaccctctctggcgagttccacccttaatgaggtcaacacaagctctactattagctgcgattccccactcgaacctcaagacgagcccgagccagaacctcagctggagttgcaggttgaacccgagccagagctggaacagttaccggattcagggtgtcctgctccccgcgccgaggcagaagacagtttcctctga

SEQ ID NO: 3112 - RNA, 3321 nt, synthetic construct
  misc_feature 1..3321: note = derived and/or modified sequence opt4 fromPGFRB__Homo_sapiens__AAA60049
  source 1..3321: mol_type = other RNA
atgagactgcccggcgccatgcccgccctggccctgaagggcgagctgctgctgctgagcctgctgctgctgctggagccccagatcagccagggcctggtggtgaccccccccggccccgagctggtgctgaacgtgagcagcaccttcgtgctgacctgcagcggcagcgcccccgtggtgtgggagagaatgagccaggagcccccccaggagatggccaaggcccaggacggcaccttcagcagcgtgctgaccctgaccaacctgaccggcctggacaccggcgagtacttctgcacccacaacgacagcagaggcctggagaccgacgagagaaagagactgtacatcttcgtgcccgaccccaccgtgggcttcctgcccaacgacgccgaggagctgttcatcttcctgaccgagatcaccgagatcaccatcccctgcagagtgaccgacccccagctggtggtgaccctgcacgagaagaagggcgacgtggccctgcccgtgccctacgaccaccagagaggcttcagcggcatcttcgaggacagaagctacatctgcaagaccaccatcggcgacagagaggtggacagcgacgcctactacgtgtacagactgcaggtgagcagcatcaacgtgagcgtgaacgccgtgcagaccgtggtgagacagggcgagaacatcaccctgatgtgcatcgtgatcggcaacgaggtggtgaacttcgagtggacctaccccagaaaggagagcggcagactggtggagcccgtgaccgacttcctgctggacatgccctaccacatcagaagcatcctgcacatccccagcgccgagctggaggacagcggcacctacacctgcaacgtgaccgagagcgtgaacgaccaccaggacgagaaggccatcaacatcaccgtggtggagagcggctacgtgagactgctgggcgaggtgggcaccctgcagttcgccgagctgcacagaagcagaaccctgcaggtggtgttcgaggcctaccccccccccaccgtgctgtggttcaaggacaacagaaccctgggcgacagcagcgccggcgagatcgccctgagcaccagaaacgtgagcgagaccagatacgtgagcgagctgaccctggtgagagtgaaggtggccgaggccggccactacaccatgagagccttccacgaggacgccgaggtgcagctgagcttccagctgcagatcaacgtgcccgtgagagtgctggagctgagcgagagccaccccgacagcggcgagcagaccgtgagatgcagaggcagaggcatgccccagcccaacatcatctggagcgcctgcagagacctgaagagatgccccagagagctgccccccaccctgctgggcaacagcagcgaggaggagagccagctggagaccaacgtgacctactgggaggaggagcaggagttcgaggtggtgagcaccctgagactgcagcacgtggacagacccctgagcgtgagatgcaccctgagaaacgccgtgggccaggacacccaggaggtgatcgtggtgccccacagcctgcccttcaaggtggtggtgatcagcgccatcctggccctggtggtgctgaccatcatcagcctgatcatcctgatcatgctgtggcagaagaagcccagatacgagatcagatggaaggtgatcgagagcgtgagcagcgacggccacgagtacatctacgtggaccccatgcagctgccctacgacagcacctgggagctgcccagagaccagctggtgctgggcagaaccctgggcagcggcgccttcggccaggtggtggaggccaccgcccacggcctgagccacagccaggccaccatgaaggtggccgtgaagatgctgaagagcaccgccagaagcagcgagaagcaggccctgatgagcgagctgaagatcatgagccacctgggcccccacctgaacgtggtgaacctgctgggcgcctgcaccaagggcggccccatctacatcatcaccgagtactgcagatacggcgacctggtggactacctgcacagaaacaagcacaccttcctgcagcaccacagcgacaagagaagaccccccagcgccgagctgtacagcaacgccctgcccgtgggcctgcccctgcccagccacgtgagcctgaccggcgagagcgacggcggctacatggacatgagcaaggacgagagcgtggactacgtgcccatgctggacatgaagggcgacgtgaagtacgccgacatcgagagcagcaactacatggccccctacgacaactacgtgcccagcgcccccgagagaacctgcagagccaccctgatcaacgagagccccgtgctgagctacatggacctggtgggcttcagctaccaggtggccaacggcatggagttcctggccagcaagaactgcgtgcacagagacctggccgccagaaacgtgctgatctgcgagggcaagctggtgaagatctgcgacttcggcctggccagagacatcatgagagacagcaactacatcagcaagggcagcaccttcctgcccctgaagtggatggcccccgagagcatcttcaacagcctgtacaccaccctgagcgacgtgtggagcttcggcatcctgctgtgggagatcttcaccctgggcggcaccccctaccccgagctgcccatgaacgagcagttctacaacgccatcaagagaggctacagaatggcccagcccgcccacgccagcgacgagatctacgagatcatgcagaagtgctgggaggagaagttcgagatcagaccccccttcagccagctggtgctgctgctggagagactgctgggcgagggctacaagaagaagtaccagcaggtggacgaggagttcctgagaagcgaccaccccgccatcctgagaagccaggccagactgcccggcttccacggcctgagaagccccctggacaccagcagcgtgctgtacaccgccgtgcagcccaacgagggcgacaacgactacatcatccccctgcccgaccccaagcccgaggtggccgacgagggccccctggagggcagccccagcctggccagcagcaccctgaacgaggtgaacaccagcagcaccatcagctgcgacagccccctggagccccaggacgagcccgagcccgagccccagctggagctgcaggtggagcccgagcccgagctggagcagctgcccgacagcggctgccccgcccccagagccgaggccgaggacagcttcctgtga

SEQ ID NO: 3113 - RNA, 3321 nt, synthetic construct
  misc_feature 1..3321: note = derived and/or modified sequence opt5 fromPGFRB__Homo_sapiens__AAA60049
  source 1..3321: mol_type = other RNA
atgagactgcccggcgccatgcctgctctcgccctgaagggggagcttctgctcctgagccttctgctcctgctggaaccgcagatctcccaaggactcgtggtcacaccccctggccccgagctggttcttaacgtgtctagcaccttcgtgctgacgtgctccgggtctgcgcctgtcgtgtgggaacggatgagccaggagccccctcaggaaatggctaaagcccaggacggaaccttttcctctgttctcacactgaccaatcttacaggcctggataccggggagtacttctgtacacacaacgacagccgcggactcgagaccgatgaaagaaagcggctgtatatttttgtgccggaccccacggtcggcttcctgcctaatgatgccgaggaactctttatcttcctgaccgagattacagagatcaccattccctgccgcgtgacagaccctcaacttgttgtgaccctgcatgaaaagaagggcgatgtcgctctccccgtgccgtacgaccaccagagagggttttccggaatcttcgaggatcggagctatatctgtaaaacgacaattggcgaccgcgaagtggattctgacgcctactatgtctacagactgcaggtttccagcatcaacgtgtctgtgaatgctgtccagaccgtggttcggcaaggggagaacattacacttatgtgcatcgtgattggaaatgaagtcgtgaactttgagtggacctatcctcgcaaggagtccggcagactggttgaacccgtgaccgatttcctcctggacatgccttaccatatccggagcattctgcacatcccctctgccgagctcgaagactccgggacatacacgtgtaatgtcaccgagagcgtgaacgatcatcaggacgaaaaggcgatcaatattacagtcgtggagtccggatatgttcgcctgcttggcgaggtgggcaccctgcagtttgccgaactccacagatctcggacactgcaggtcgtgttcgaggcttatccccctccgaccgttctttggtttaaagataaccgcacgctgggggacagctccgccggagaaatcgctctcagcacaagaaatgtgtctgagacccggtacgtctccgaactgaccctggtgagagtgaaggttgccgaggcgggccactacacaatgcgcgccttccatgaggatgctgaagtccaactcagcttccagctgcagattaacgtgcccgtgcgggtccttgagctgtctgaaagccaccctgactccggggagcaaaccgtgagatgccgcggacggggcatgccccagcctaatatcatttggtctgcctgtagagatctcaaacgctgcccccgggagctgccgcctacactgcttgggaacagctccgaagaggaaagccagctcgagacgaacgttacctattgggaagaggagcaggaatttgaggtggtctctacactgagactgcaacatgtggaccgccccctctccgttcggtgtaccctgagaaatgctgtgggacaggatacacaggaagtcatcgtggttcctcacagccttcccttcaaggtggtcgtgatctctgccattctggccctcgtggtcctgaccatcatttccctgatcattcttatcatgctctggcagaaaaagcctcgctacgagatccggtggaaggttattgaaagcgtgtcctctgacggccacgagtatatctacgtggatcccatgcaactgccgtacgacagcacgtgggagctgcctagagaccagctcgtcctgggccggacccttgggtccggagcttttggccaggtggttgaagcgacagcccatgggctgtctcacagccaggctaccatgaaagtggccgtcaagatgctcaaatccacagcccgcagctctgagaagcaagctctgatgtccgaactgaaaattatgagccatcttggaccccacctcaacgtggttaatctgctgggcgcctgcaccaaagggggccccatctatattatcacggagtactgtagatatggagatctcgtggactacctgcatcggaacaaacacacattccttcagcaccattctgataagagacgccctccgtccgcggaactgtatagcaatgctctccccgtcggcctgcctctgccctctcacgtgagccttaccggggagtccgacggaggctacatggatatgagcaaggacgagtctgttgattatgtgcctatgctcgacatgaaaggggatgtcaagtacgccgacattgaatccagcaactacatggccccctatgataattacgtgccttccgctcccgagcggacatgcagagccaccctgatcaacgaatctccggtgctgagctatatggacctcgtcggattttcctaccaggttgctaatggcatggagttcctggcctctaaaaactgcgtgcatcgcgatcttgcggccagaaatgtgctgatctgtgaggggaagctcgtcaaaatttgcgactttggcctggctcgggacatcatgcgcgatagcaactatatttccaagggatctaccttcctgcctcttaagtggatggcccccgaaagcatctttaattccctgtacacaacgctcagcgacgtgtggtctttcggcattctgctctgggagatctttacccttgggggaacaccttatcccgaactgccgatgaacgagcagttctacaatgctatcaaaagaggctaccggatggcccaacctgcgcacgcctccgatgaaatttatgagatcatgcagaagtgttgggaggaaaaatttgagattagaccccctttcagccagctggttctcctgctggaacgccttctgggggagggatacaagaaaaagtatcaacaggtggacgaagagttcctccggtctgatcaccccgctatcctgcgctcccaggccagactccccggctttcatgggctgcggagccctcttgacacctcttccgtcctgtacacagctgtgcagccgaacgagggcgataacgactatattatccccctccctgatcccaagcctgaagttgccgacgagggacccctggaaggcagcccttccctggccagctctacccttaatgaggtgaacacgagctccacaatctcttgcgatagcccgctggaaccccaagacgagcctgagcccgaacctcagctcgagctgcaggtcgaacccgagccggagctcgaacagctgcctgattccgggtgtcccgctccccgcgcggaggccgaagactctttcctttga

SEQ ID NO: 3114 - protein, 313 aa, synthetic construct
  REGION 1..313: note = Pim-1_-Kinase__Homo_sapiens__A0A024RD25
MLLSKINSLAHLRAAPCNDLHATKLAPGKEKEPLESQYQVGPLLGSGGFGSVYSGIRVSDNLPVAIKHVEKDRISDWGELPNGTRVPMEVVLLKKVSSGFSGVIRLLDWFERPDSFVLILERPEPVQDLFDFITERGALQEELARSFFWQVLEAVRHCHNCGVLHRDIKDENILIDLNRGELKLIDFGSGALLKDTVYTDFDGTRVYSPPEWIRYHRYHGRSAAVWSLGILLYDMVCGDIPFEHDEEIIRGQVFFRQRVSSECQHLIRWCLALRPSDRPTFEEIQNHPWMQDVLLPQETAEIHLHSLSPGPSK

SEQ ID NO: 3115 - RNA, 942 nt, synthetic construct
  misc_feature 1..942: note = Pim-1_-Kinase__Homo_sapiens__EAX03935
  source 1..942: mol_type = other RNA
atgctcttgtccaaaatcaactcgcttgcccacctgcgcgccgcgccctgcaacgacctgcacgccaccaagctggcgcccggcaaggagaaggagcccctggagtcgcagtaccaggtgggcccgctactgggcagcggcggcttcggctcggtctactcaggcatccgcgtctccgacaacttgccggtggccatcaaacacgtggagaaggaccggatttccgactggggagagctgcctaatggcactcgagtgcccatggaagtggtcctgctgaagaaggtgagctcgggtttctccggcgtcattaggctcctggactggttcgagaggcccgacagtttcgtcctgatcctggagaggcccgagccggtgcaagatctcttcgacttcatcacggaaaggggagccctgcaagaggagctggcccgcagcttcttctggcaggtgctggaggccgtgcggcactgccacaactgcggggtgctccaccgcgacatcaaggacgaaaacatccttatcgacctcaatcgcggcgagctcaagctcatcgacttcgggtcgggggcgctgctcaaggacaccgtctacacggacttcgatgggacccgagtgtatagccctccagagtggatccgctaccatcgctaccatggcaggtcggcggcagtctggtccctggggatcctgctgtatgatatggtgtgtggagatattcctttcgagcatgacgaagagatcatcaggggccaggttttcttcaggcagagggtctcttcagaatgtcagcatctcattagatggtgcttggccctgagaccatcagataggccaaccttcgaagaaatccagaaccatccatggatgcaagatgttctcctgccccaggaaactgctgagatccacctccacagcctgtcgccggggcccagcaaatag

SEQ ID NO: 3116 - RNA, 942 nt, synthetic construct
  misc_feature 1..942: note = derived and/or modified sequence opt1 fromPim-1_-Kinase__Homo_sapiens__EAX03935
  source 1..942: mol_type = other RNA
atgctgctcagcaagatcaactccctggcccacctccgcgccgcgccctgcaacgacctgcacgccaccaagctggccccgggcaaggagaaggagcccctggagagccagtaccaggtggggcccctcctgggctccgggggcttcgggagcgtctactccggcatccgggtgagcgacaacctgcccgtggccatcaagcacgtcgagaaggaccgcatctccgactggggcgagctcccgaacgggacccgggtgcccatggaggtggtcctgctgaagaaggtgagctccggcttcagcggggtgatccgcctcctggactggttcgagcggcccgactccttcgtcctgatcctcgagcgccccgagccggtgcaggacctgttcgacttcatcacggagcggggcgccctgcaggaggagctcgcgcgcagcttcttctggcaggtcctggaggccgtgcggcactgccacaactgcggggtgctgcaccgcgacatcaaggacgagaacatcctcatcgacctgaaccggggcgagctgaagctcatcgacttcggctccggggccctgctgaaggacaccgtgtacaccgacttcgacggcacccgcgtctacagcccgcccgagtggatccggtaccaccgctaccacgggcggtccgccgcggtgtggagcctcggcatcctgctgtacgacatggtgtgcggcgacatccccttcgagcacgacgaggagatcatccgcgggcaggtcttcttccggcagcgcgtgtccagcgagtgccagcacctcatccggtggtgcctggccctgcgcccctccgaccggcccacgttcgaggagatccagaaccacccctggatgcaggacgtgctcctgccccaggagaccgccgagatccacctccacagcctgagcccgggcccctccaagtga

SEQ ID NO: 3117 - RNA, 942 nt, synthetic construct
  misc_feature 1..942: note = derived and/or modified sequence opt2 fromPim-1_-Kinase__Homo_sapiens__EAX03935
  source 1..942: mol_type = other RNA
atgctcctctccaagatcaactccctcgcccacctccgcgccgccccctgcaacgacctccacgccaccaagctcgcccccggcaaggagaaggagcccctcgagtcccagtaccaggtcggccccctcctcggctccggcggcttcggctccgtctactccggcatccgcgtctccgacaacctccccgtcgccatcaagcacgtcgagaaggaccgcatctccgactggggcgagctccccaacggcacccgcgtccccatggaggtcgtcctcctcaagaaggtctcctccggcttctccggcgtcatccgcctcctcgactggttcgagcgccccgactccttcgtcctcatcctcgagcgccccgagcccgtccaggacctcttcgacttcatcaccgagcgcggcgccctccaggaggagctcgcccgctccttcttctggcaggtcctcgaggccgtccgccactgccacaactgcggcgtcctccaccgcgacatcaaggacgagaacatcctcatcgacctcaaccgcggcgagctcaagctcatcgacttcggctccggcgccctcctcaaggacaccgtctacaccgacttcgacggcacccgcgtctactccccccccgagtggatccgctaccaccgctaccacggccgctccgccgccgtctggtccctcggcatcctcctctacgacatggtctgcggcgacatccccttcgagcacgacgaggagatcatccgcggccaggtcttcttccgccagcgcgtctcctccgagtgccagcacctcatccgctggtgcctcgccctccgcccctccgaccgccccaccttcgaggagatccagaaccacccctggatgcaggacgtcctcctcccccaggagaccgccgagatccacctccactccctctcccccggcccctccaagtga

SEQ ID NO: 3118 - RNA, 942 nt, synthetic construct
  misc_feature 1..942: note = derived and/or modified sequence opt3 fromPim-1_-Kinase__Homo_sapiens__EAX03935
  source 1..942: mol_type = other RNA
atgctgctcagcaagatcaactcccttgcccacctgagagctgcaccctgcaatgacttgcatgccaccaaattagcgcctggcaaggagaaagaaccactggagtctcagtaccaagtggggccgctactcggatcaggtggcttcgggagtgtctatagcggaattagggtttccgataacctgcccgtggctataaagcacgtagaaaaagaccggatctctgattggggcgagcttcctaatggtacacgcgtgccaatggaagtcgtgctgttgaagaaggtttcgtcagggtttagcggagtgattcgactcctggactggttcgagcgtcccgatagttttgtcctgatcctcgagagacctgaaccagtgcaggacttattcgattttattactgagaggggcgccctgcaggaggaacttgcacggtccttcttttggcaggtattggaggccgttcgccattgtcacaactgcggcgtgctgcatagagacatcaaagatgaaaatatactaatcgacctcaacaggggagagctgaaacttattgatttcggatctggtgctctgttgaaggacacggtctacaccgattttgacggcacacgggtgtatagccctcccgaatggatccgctaccaccgatatcacgggagatccgcagccgtgtggtcactcgggattctgttatacgacatggtctgtggcgatatcccattcgagcatgacgaagagataattaggggtcaagtgtttttccggcagcgtgttagtagcgagtgccagcacctgatccgctggtgtctcgctcttagaccgtctgataggcccacttttgaagagattcagaatcatccttggatgcaagacgtactgttgccacaggaaaccgccgagatccacctacactccctgtcacccgggcctagcaagtga

SEQ ID NO: 3119 - RNA, 942 nt, synthetic construct
  misc_feature 1..942: note = derived and/or modified sequence opt4 fromPim-1_-Kinase__Homo_sapiens__EAX03935
  source 1..942: mol_type = other RNA
atgctgctgagcaagatcaacagcctggcccacctgagagccgccccctgcaacgacctgcacgccaccaagctggcccccggcaaggagaaggagcccctggagagccagtaccaggtgggccccctgctgggcagcggcggcttcggcagcgtgtacagcggcatcagagtgagcgacaacctgcccgtggccatcaagcacgtggagaaggacagaatcagcgactggggcgagctgcccaacggcaccagagtgcccatggaggtggtgctgctgaagaaggtgagcagcggcttcagcggcgtgatcagactgctggactggttcgagagacccgacagcttcgtgctgatcctggagagacccgagcccgtgcaggacctgttcgacttcatcaccgagagaggcgccctgcaggaggagctggccagaagcttcttctggcaggtgctggaggccgtgagacactgccacaactgcggcgtgctgcacagagacatcaaggacgagaacatcctgatcgacctgaacagaggcgagctgaagctgatcgacttcggcagcggcgccctgctgaaggacaccgtgtacaccgacttcgacggcaccagagtgtacagcccccccgagtggatcagataccacagataccacggcagaagcgccgccgtgtggagcctgggcatcctgctgtacgacatggtgtgcggcgacatccccttcgagcacgacgaggagatcatcagaggccaggtgttcttcagacagagagtgagcagcgagtgccagcacctgatcagatggtgcctggccctgagacccagcgacagacccaccttcgaggagatccagaaccacccctggatgcaggacgtgctgctgccccaggagaccgccgagatccacctgcacagcctgagccccggccccagcaagtga

SEQ ID NO: 3120 - RNA, 942 nt, synthetic construct
  misc_feature 1..942: note = derived and/or modified sequence opt5 fromPim-1_-Kinase__Homo_sapiens__EAX03935
  source 1..942: mol_type = other RNA
atgctgctcagcaagatcaactccctggcccaccttagagctgccccctgcaatgacctgcatgcgaccaaactcgctcctggcaaggagaaagaaccgctggagtctcagtaccaagtggggccccttctgggaagcggcgggttcggatccgtctattctggcattcgggttagcgataacctccctgtggccatcaagcacgtggaaaaagaccgcatttccgattggggagagctgcccaatggaacaagagtccctatggaagtggttctgctcaagaaggtgtctagcggcttttccggcgtcatccggctgcttgactggttcgagcgccccgatagctttgtgctgattctcgagagacctgaaccggttcaggacctgttcgattttatcacggagcgcggggcccttcaggaggaactggctcggtctttcttttggcaagtgctcgaggccgtcagacattgtcacaactgcggagtgctgcatcgggacatcaaagatgaaaatattctgatcgacctcaaccgcggcgagctgaaacttattgatttcgggtccggagctctgctcaaggacaccgtgtacacagattttgacggcaccagagtctattctccccctgaatggatccggtaccaccgctatcacgggagaagcgccgcggtttggtccctggggattcttctgtacgacatggtgtgtggcgatatccccttcgagcatgacgaagagattatccggggccaggtgtttttccgccagagagtcagctctgagtgccagcacctcatccggtggtgtctggccctgagaccttccgatcgccccacatttgaagagattcagaatcatccgtggatgcaagacgtgctcctgcctcaggaaaccgctgagatccaccttcacagcctgtcccccgggccttctaagtga

SEQ ID NO: 3121 - protein, 100 aa, synthetic construct
  REGION 1..100: note = Pin-1__Homo_sapiens__O15428
MADEEKLPPGWEKRMSRPSGRGYYFNHITNPSQWERPSGNSSSGGKIWQGEPARVRRSHLLVKPVKAALDLAAGNHPDQGGGPGADQRLHPEDQGRREGL

SEQ ID NO: 3122 - RNA, 303 nt, synthetic construct
  misc_feature 1..303: note = Pin-1__Homo_sapiens__AAB81333
  source 1..303: mol_type = other RNA
atggcggacgaggagaaactgccgcctggctgggaaaagcgcatgagccgcccctcaggccgagggtactacttcaaccacatcactaaccccagccagtgggagcggcccagcgggaacagcagcagtggcggcaaaatctggcagggggagcccgccagggtccgccgctcgcacctgctagtgaagccagtcaaggcggccctcgacctggcggcaggaaatcacccggaccaaggaggaggccctggagctgatcagcggctacatccagaagatcaaggcaggagagaaggactttga

SEQ ID NO: 3123 - RNA, 303 nt, synthetic construct
  misc_feature 1..303: note = derived and/or modified sequence opt1 fromPin-1__Homo_sapiens__AAB81333
  source 1..303: mol_type = other RNA
atggccgacgaggagaagctgcccccgggctgggagaagcgcatgagccggccctccgggcgcggctactacttcaaccacatcaccaaccccagccagtgggagcggccctccgggaacagctccagcggcgggaagatctggcagggcgagccggcccgcgtgcggcgctcccacctcctggtcaagcccgtgaaggcggccctggacctcgccgccggcaaccaccccgaccagggcggcgggcccggggccgaccagcggctgcacccggaggaccaggggcgccgggagggcctgtga

SEQ ID NO: 3124 - RNA, 303 nt, synthetic construct
  misc_feature 1..303: note = derived and/or modified sequence opt2 fromPin-1__Homo_sapiens__AAB81333
  source 1..303: mol_type = other RNA
atggccgacgaggagaagctcccccccggctgggagaagcgcatgtcccgcccctccggccgcggctactacttcaaccacatcaccaacccctcccagtgggagcgcccctccggcaactcctcctccggcggcaagatctggcagggcgagcccgcccgcgtccgccgctcccacctcctcgtcaagcccgtcaaggccgccctcgacctcgccgccggcaaccaccccgaccagggcggcggccccggcgccgaccagcgcctccaccccgaggaccagggccgccgcgagggcctctga

SEQ ID NO: 3125 - RNA, 303 nt, synthetic construct
  misc_feature 1..303: note = derived and/or modified sequence opt3 fromPin-1__Homo_sapiens__AAB81333
  source 1..303: mol_type = other RNA
atggccgacgaggaaaagctgccccctggctgggagaaaagaatgagcaggccatccgggcggggatactatttcaaccacatcaccaatccgtctcagtgggaacgcccctcaggtaacagtagctccggcgggaagatttggcaaggagagcctgctcgagtgcgtagatctcatctccttgtcaaaccagttaaggcagccctggatttggcggctggcaatcaccccgaccagggtgggggacctggcgccgatcagaggttacatccagaagaccagggccggcgcgaggggctgtga

SEQ ID NO: 3126 - RNA, 303 nt, synthetic construct
  misc_feature 1..303: note = derived and/or modified sequence opt4 fromPin-1__Homo_sapiens__AAB81333
  source 1..303: mol_type = other RNA
atggccgacgaggagaagctgccccccggctgggagaagagaatgagcagacccagcggcagaggctactacttcaaccacatcaccaaccccagccagtgggagagacccagcggcaacagcagcagcggcggcaagatctggcagggcgagcccgccagagtgagaagaagccacctgctggtgaagcccgtgaaggccgccctggacctggccgccggcaaccaccccgaccagggcggcggccccggcgccgaccagagactgcaccccgaggaccagggcagaagagagggcctgtga

SEQ ID NO: 3127 - RNA, 303 nt, synthetic construct
  misc_feature 1..303: note = derived and/or modified sequence opt5 fromPin-1__Homo_sapiens__AAB81333
  source 1..303: mol_type = other RNA
atggccgacgaggaaaagctgccccctggctgggagaaaagaatgagccggccgtccgggcgcggatactatttcaaccacatcaccaatccctctcagtgggaaagacctagcggcaactcctctagcgggggaaagatttggcaaggcgagcccgctcgggtgcgcagatcccatctcctggtcaaacctgttaaggccgcgcttgatctggctgccgggaatcaccccgaccagggaggcggccctggggccgatcagcggctccatccggaagaccagggacgcagagagggcctgtga

SEQ ID NO: 3128 - protein, 163 aa, synthetic construct
  REGION 1..163: note = Pin-1__Homo_sapiens__Q13526
MADEEKLPPGWEKRMSRSSGRVYYFNHITNASQWERPSGNSSSGGKNGQGEPARVRCSHLLVKHSQSRRPSSWRQEKITRTKEEALELINGYIQKIKSGEEDFESLASQFSDCSSAKARGDLGAFSRGQMQKPFEDASFALRTGEMSGPVFTDSGIHIILRTE

SEQ ID NO: 3129 - RNA, 492 nt, synthetic construct
  misc_feature 1..492: note = Pin-1__Homo_sapiens__AAC50492
  source 1..492: mol_type = other RNA
atggcggacgaggagaagctgccgcccggctgggagaagcgcatgagccgcagctcaggccgagtgtactacttcaaccacatcactaacgccagccagtgggagcggcccagcggcaacagcagcagtggtggcaaaaacgggcagggggagcctgccagggtccgctgctcgcacctgctggtgaagcacagccagtcacggcggccctcgtcctggcggcaggagaagatcacccggaccaaggaggaggccctggagctgatcaacggctacatccagaagatcaagtcgggagaggaggactttgagtctctggcctcacagttcagcgactgcagctcagccaaggccaggggagacctgggtgccttcagcagaggtcagatgcagaagccatttgaagacgcctcgtttgcgctgcggacgggggagatgagcgggcccgtgttcacggattccggcatccacatcatcctccgcactgagtga

SEQ ID NO: 3130 - RNA, 492 nt, synthetic construct
  misc_feature 1..492: note = derived and/or modified sequence opt1 fromPin-1__Homo_sapiens__AAC50492
  source 1..492: mol_type = other RNA
atggccgacgaggagaagctgcccccgggctgggagaagcgcatgagccggtccagcgggcgcgtgtactacttcaaccacatcaccaacgcctcccagtgggagcggcccagcggcaactccagctccgggggcaagaacgggcagggcgagcccgcgcgcgtccggtgcagccacctcctggtgaagcactcccagagccgccggccctccagctggcgccaggagaagatcacccggacgaaggaggaggccctggagctcatcaacggctacatccagaagatcaagtccggggaggaggacttcgagagcctggcctcccagttcagcgactgctccagcgccaaggcccgcggcgacctgggggcgttctcccggggccagatgcagaagccgttcgaggacgccagcttcgccctccgcaccggggagatgagcggccccgtgttcaccgactccggcatccacatcatcctgcggaccgagtga

SEQ ID NO: 3131 - RNA, 492 nt, synthetic construct
  misc_feature 1..492: note = derived and/or modified sequence opt2 fromPin-1__Homo_sapiens__AAC50492
  source 1..492: mol_type = other RNA
atggccgacgaggagaagctcccccccggctgggagaagcgcatgtcccgctcctccggccgcgtctactacttcaaccacatcaccaacgcctcccagtgggagcgcccctccggcaactcctcctccggcggcaagaacggccagggcgagcccgcccgcgtccgctgctcccacctcctcgtcaagcactcccagtcccgccgcccctcctcctggcgccaggagaagatcacccgcaccaaggaggaggccctcgagctcatcaacggctacatccagaagatcaagtccggcgaggaggacttcgagtccctcgcctcccagttctccgactgctcctccgccaaggcccgcggcgacctcggcgccttctcccgcggccagatgcagaagcccttcgaggacgcctccttcgccctccgcaccggcgagatgtccggccccgtcttcaccgactccggcatccacatcatcctccgcaccgagtga

SEQ ID NO: 3132 - RNA, 492 nt, synthetic construct
  misc_feature 1..492: note = derived and/or modified sequence opt3 fromPin-1__Homo_sapiens__AAC50492
  source 1..492: mol_type = other RNA
atggccgacgaggaaaagctgccccctggctgggagaaaagaatgagcaggtcctctgggcgggtgtactatttcaaccacatcaccaatgcttcacagtgggaacgcccaagtggaaacagctcctctggtggcaagaatgggcaaggagagccggcacgagtccgttgctcgcatctccttgttaaacactcacagagcagaaggcccagttcctggcggcaggaaaagattacacgcactaaagaggaggccctggaattgataaacggctacatccagaagattaagtctggtgaggaagattttgagagcttagcgtcccaattctcagactgtagtagcgctaaagccagaggggatctgggagcattttctaggggccagatgcagaagcctttcgaggacgcctcctttgctctacggacgggcgaaatgtcagggccagtgttcaccgatagcggaatccatattatcctccgcacagagtga

SEQ ID NO: 3133 - RNA, 492 nt, synthetic construct
  misc_feature 1..492: note = derived and/or modified sequence opt4 fromPin-1__Homo_sapiens__AAC50492
  source 1..492: mol_type = other RNA
atggccgacgaggagaagctgccccccggctgggagaagagaatgagcagaagcagcggcagagtgtactacttcaaccacatcaccaacgccagccagtgggagagacccagcggcaacagcagcagcggcggcaagaacggccagggcgagcccgccagagtgagatgcagccacctgctggtgaagcacagccagagcagaagacccagcagctggagacaggagaagatcaccagaaccaaggaggaggccctggagctgatcaacggctacatccagaagatcaagagcggcgaggaggacttcgagagcctggccagccagttcagcgactgcagcagcgccaaggccagaggcgacctgggcgccttcagcagaggccagatgcagaagcccttcgaggacgccagcttcgccctgagaaccggcgagatgagcggccccgtgttcaccgacagcggcatccacatcatcctgagaaccgagtga

SEQ ID NO: 3134 - RNA, 492 nt, synthetic construct
  misc_feature 1..492: note = derived and/or modified sequence opt5 fromPin-1__Homo_sapiens__AAC50492
  source 1..492: mol_type = other RNA
atggccgacgaggaaaagctgccccctggctgggagaaaagaatgagccggtcctctgggcgcgtgtactatttcaaccacatcaccaatgctagccagtgggaaagaccgtccggaaactctagctccggcgggaagaatggacaaggcgagcccgcccgggtccgctgctctcatctcctggttaaacacagccagtccagacggcctagctcttggcgccaggaaaagattacaagaacgaaagaggaggcgcttgaactgatcaacgggtacattcagaagatcaagtccggagaggaagattttgagagcctcgcttctcaattctccgactgtagctctgccaaagcccggggcgatctgggcgctttttcccgcgggcagatgcagaagcccttcgaggacgccagctttgctcttagaaccggagaaatgtccggccctgtgttcacagattctgggattcatatcatcctgcggaccgagtga

SEQ ID NO: 3135 - protein, 45 aa, synthetic construct
  REGION 1..45: note = Pin-1__Homo_sapiens__Q49AR7
MQKPFEDASFALRTGEMSGPVFTDSGIHIILRTECWRQTRGPNCF

SEQ ID NO: 3136 - RNA, 138 nt, synthetic construct
  misc_feature 1..138: note = Pin-1__Homo_sapiens__AAH31971
  source 1..138: mol_type = other RNA
atgcagaagccatttgaagacgcctcgtttgcgctgcggacgggggagatgagcgggcccgtgttcacggattccggcatccacatcatcctccgcactgagtgctggaggcagactcgagggccgaattgtttctag

SEQ ID NO: 3137 - RNA, 138 nt, synthetic construct
  misc_feature 1..138: note = derived and/or modified sequence opt1 fromPin-1__Homo_sapiens__AAH31971
  source 1..138: mol_type = other RNA
atgcagaagcccttcgaggacgccagcttcgccctgcgcaccggcgagatgtccgggccggtgttcaccgacagcggcatccacatcatcctccggacggagtgctggcgccagacccgggggcccaactgcttctga

SEQ ID NO: 3138 - RNA, 138 nt, synthetic construct
  misc_feature 1..138: note = derived and/or modified sequence opt2 fromPin-1__Homo_sapiens__AAH31971
  source 1..138: mol_type = other RNA
atgcagaagcccttcgaggacgcctccttcgccctccgcaccggcgagatgtccggccccgtcttcaccgactccggcatccacatcatcctccgcaccgagtgctggcgccagacccgcggccccaactgcttctga

SEQ ID NO: 3139 - RNA, 138 nt, synthetic construct
  misc_feature 1..138: note = derived and/or modified sequence opt3 fromPin-1__Homo_sapiens__AAH31971
  source 1..138: mol_type = other RNA
atgcagaagcccttcgaggacgccagctttgctctgagaaccggcgaaatgtccgggcctgtgttcacagattctggaatccacattatactcaggactgagtgctggcggcaaacgcgcggtccaaactgtttttga

SEQ ID NO: 3140 - RNA, 138 nt, synthetic construct
  misc_feature 1..138: note = derived and/or modified sequence opt4 fromPin-1__Homo_sapiens__AAH31971
  source 1..138: mol_type = other RNA
atgcagaagcccttcgaggacgccagcttcgccctgagaaccggcgagatgagcggccccgtgttcaccgacagcggcatccacatcatcctgagaaccgagtgctggagacagaccagaggccccaactgcttctga

SEQ ID NO: 3141 - RNA, 138 nt, synthetic construct
  misc_feature 1..138: note = derived and/or modified sequence opt5 fromPin-1__Homo_sapiens__AAH31971
  source 1..138: mol_type = other RNA
atgcagaagcccttcgaggacgccagctttgctctgagaaccggcgaaatgtccgggcctgtgttcacagattctggaatccacattatcctccggacggagtgctggcgccaaaccagaggcccgaactgtttttga

SEQ ID NO: 3142 - protein, 212 aa, synthetic construct
  REGION 1..212: note = PLAC1__Homo_sapiens__Q9HBJ0
MKVFKFIGLMILLTSAFSAGSGQSPMTVLCSIDWFMVTVHPFMLNNDVCVHFHELHLGLGCPPNHVQPHAYQFTYRVTECGIRAKAVSQDMVIYSTEIHYSSKGTPSKFVIPVSCAAPQKSPWLTKPCSMRVASKSRATAQKDEKCYEVFSLSQSSQRPNCDCPPCVFSEEEHTQVPCHQAGAQEAQPLQPSHFLDISEDWSLHTDDMIGSM

SEQ ID NO: 3143 - RNA, 639 nt, synthetic construct
  misc_feature 1..639: note = PLAC1__Homo_sapiens__AAG22596
  source 1..639: mol_type = other RNA
atgaaagtttttaagttcataggactgatgatcctcctcacctctgcgttttcagccggttcaggacaaagtccaatgactgtgctgtgctccatagactggttcatggtcacagtgcaccccttcatgctaaacaacgatgtgtgtgtacactttcatgaactacacttgggcctgggttgccccccaaaccatgttcagccacacgcctaccagttcacctaccgtgttactgaatgtggcatcagggccaaagctgtctctcaggacatggttatctacagcactgagatacactactcttctaagggcacgccatctaagtttgtgatcccagtgtcatgtgctgccccccaaaagtccccatggctcaccaagccctgctccatgagagtagccagcaagagcagggccacagcccagaaggatgagaaatgctacgaggtgttcagcttgtcacagtccagtcaaaggcccaactgcgattgtccaccttgtgtcttcagtgaagaagagcatacccaggtcccttgtcaccaagcaggggctcaggaggctcaacctctgcagccatctcactttcttgatatttctgaggattggtctcttcacacagatgatatgattgggtccatgtga

SEQ ID NO: 3144 - RNA, 639 nt, synthetic construct
  misc_feature 1..639: note = derived and/or modified sequence opt1 fromPLAC1__Homo_sapiens__AAG22596
  source 1..639: mol_type = other RNA
atgaaggtgttcaagttcatcggcctgatgatcctcctgaccagcgccttctccgccgggagcggccagtcccccatgaccgtcctgtgcagcatcgactggttcatggtgacggtgcacccgttcatgctcaacaacgacgtctgcgtgcacttccacgagctgcacctggggctcggctgcccgcccaaccacgtgcagccccacgcgtaccagttcacctaccgcgtcaccgagtgcgggatccgggccaaggccgtgtcccaggacatggtgatctacagcaccgagatccactactccagcaagggcacgccctccaagttcgtcatccccgtgagctgcgccgcgccccagaagtccccctggctgaccaagccgtgcagcatgcgcgtggcctccaagagccgggccaccgcccagaaggacgagaagtgctacgaggtcttctccctgagccagtccagccagcgccccaactgcgactgcccgccctgcgtgttctccgaggaggagcacacccaggtgccctgccaccaggccggcgcgcaggaggcccagcccctccagcccagccacttcctggacatcagcgaggactggtccctgcacacggacgacatgatcgggagcatgtga

SEQ ID NO: 3145 - RNA, 639 nt, synthetic construct
  misc_feature 1..639: note = derived and/or modified sequence opt2 fromPLAC1__Homo_sapiens__AAG22596
  source 1..639: mol_type = other RNA
atgaaggtcttcaagttcatcggcctcatgatcctcctcacctccgccttctccgccggctccggccagtcccccatgaccgtcctctgctccatcgactggttcatggtcaccgtccaccccttcatgctcaacaacgacgtctgcgtccacttccacgagctccacctcggcctcggctgcccccccaaccacgtccagccccacgcctaccagttcacctaccgcgtcaccgagtgcggcatccgcgccaaggccgtctcccaggacatggtcatctactccaccgagatccactactcctccaagggcaccccctccaagttcgtcatccccgtctcctgcgccgccccccagaagtccccctggctcaccaagccctgctccatgcgcgtcgcctccaagtcccgcgccaccgcccagaaggacgagaagtgctacgaggtcttctccctctcccagtcctcccagcgccccaactgcgactgccccccctgcgtcttctccgaggaggagcacacccaggtcccctgccaccaggccggcgcccaggaggcccagcccctccagccctcccacttcctcgacatctccgaggactggtccctccacaccgacgacatgatcggctccatgtga

SEQ ID NO: 3146 - RNA, 639 nt, synthetic construct
  misc_feature 1..639: note = derived and/or modified sequence opt3 fromPLAC1__Homo_sapiens__AAG22596
  source 1..639: mol_type = other RNA
atgaaggtgttcaaatttatcggcctgatgattctccttaccagcgccttctccgctgggtctggacagtcacccatgacagtcctgtgcagtatagactggtttatggttactgtgcaccctttcatgttgaacaatgatgtatgtgtgcattttcacgagttacatctgggtctaggctgcccaccgaaccacgtccaaccccatgcataccagttcacgtatagagtgaccgaatgtgggatcagggccaaggcggttagccaggacatggtgatttactccacagagatccactattcttcgaaaggaactccttcaaagtttgtcattccagtgagctgcgctgcaccccagaaaagtccttggctcaccaagccatgttccatgcgggtagcctctaagagccgcgccacagctcaaaaagatgaaaagtgctacgaggttttctccctgtcacagagtagccagcgacccaattgtgactgccctccatgtgtgttttctgaagaggagcacacccaggtcccgtgccatcaagcaggcgcccaggaagctcagccccttcagccttcccacttcctggatatctcagaggactggagcttgcatactgatgacatgataggtagtatgtga

SEQ ID NO: 3147 - RNA, 639 nt, synthetic construct
  misc_feature 1..639: note = derived and/or modified sequence opt4 fromPLAC1__Homo_sapiens__AAG22596
  source 1..639: mol_type = other RNA
atgaaggtgttcaagttcatcggcctgatgatcctgctgaccagcgccttcagcgccggcagcggccagagccccatgaccgtgctgtgcagcatcgactggttcatggtgaccgtgcaccccttcatgctgaacaacgacgtgtgcgtgcacttccacgagctgcacctgggcctgggctgcccccccaaccacgtgcagccccacgcctaccagttcacctacagagtgaccgagtgcggcatcagagccaaggccgtgagccaggacatggtgatctacagcaccgagatccactacagcagcaagggcacccccagcaagttcgtgatccccgtgagctgcgccgccccccagaagagcccctggctgaccaagccctgcagcatgagagtggccagcaagagcagagccaccgcccagaaggacgagaagtgctacgaggtgttcagcctgagccagagcagccagagacccaactgcgactgccccccctgcgtgttcagcgaggaggagcacacccaggtgccctgccaccaggccggcgcccaggaggcccagcccctgcagcccagccacttcctggacatcagcgaggactggagcctgcacaccgacgacatgatcggcagcatgtga

SEQ ID NO: 3148 - RNA, 639 nt, synthetic construct
  misc_feature 1..639: note = derived and/or modified sequence opt5 fromPLAC1__Homo_sapiens__AAG22596
  source 1..639: mol_type = other RNA
atgaaggtgttcaaatttatcggcctgatgattctcctgaccagcgccttctccgctgggtctggacagagccccatgacagtcctttgctccatcgactggtttatggttacggtgcaccctttcatgctgaacaatgatgtgtgtgtccattttcacgagctccatctgggccttgggtgcccgcccaaccacgtgcaacctcatgcctaccagttcacctatagagttacagaatgtggcattcgggcgaaggctgtgtctcaggacatggtcatctacagcaccgagattcactattcctctaaaggaacacccagcaagtttgtgatccctgtttcctgcgccgctccccagaaaagcccttggctgaccaagccgtgttctatgcgcgtggcctccaagagcagagccacagctcaaaaagatgaaaagtgctacgaggtcttctctctctcccagagctctcagcggcccaattgtgactgccctccctgtgtgttttccgaagaggagcacacccaggtgccttgccatcaagccggggcgcaggaagcccagcccctgcagccgagccacttcctggatatctccgaggactggtctctccatacggatgacatgattggaagcatgtga

SEQ ID NO: 3149 - protein, 661 aa, synthetic construct
  REGION 1..661: note = PMEL__Homo_sapiens__P40967
MDLVLKRCLLHLAVIGALLAVGATKVPRNQDWLGVSRQLRTKAWNRQLYPEWTEAQRLDCWRGGQVSLKVSNDGPTLIGANASFSIALNFPGSQKVLPDGQVIWVNNTIINGSQVWGGQPVYPQETDDACIFPDGGPCPSGSWSQKRSFVYVWKTWGQYWQVLGGPVSGLSIGTGRAMLGTHTMEVTVYHRRGSRSYVPLAHSSSAFTITDQVPFSVSVSQLRALDGGNKHFLRNQPLTFALQLHDPSGYLAEADLSYTWDFGDSSGTLISRALVVTHTYLEPGPVTAQVVLQAAIPLTSCGSSPVPGTTDGHRPTAEAPNTTAGQVPTTEVVGTTPGQAPTAEPSGTTSVQVPTTEVISTAPVQMPTAESTGMTPEKVPVSEVMGTTLAEMSTPEATGMTPAEVSIVVLSGTTAAQVTTTEWVETTARELPIPEPEGPDASSIMSTESITGSLGPLLDGTATLRLVKRQVPLDCVLYRYGSFSVTLDIVQGIESAEILQAVPSGEGDAFELTVSCQGGLPKEACMEISSPGCQPPAQRLCQPVLPSPACQLVLHQILKGGSGTYCLNVSLADTNSLAVVSTQLIMPGQEAGLGQVPLIVGILLVLMAVVLASLIYRRRLMKQDFSVPQLPHSSSHWLRLPRIFCSCPIGENSPLLSGQQV

SEQ ID NO: 3150 - RNA, 1986 nt, synthetic construct
  misc_feature 1..1986: note = PMEL__Homo_sapiens__AAB00386
  source 1..1986: mol_type = other RNA
atggatctggtgctaaaaagatgccttcttcatttggctgtgataggtgctttgctggctgtgggggctacaaaagtacccagaaaccaggactggcttggtgtctcaaggcaactcagaaccaaagcctggaacaggcagctgtatccagagtggacagaagcccagagacttgactgctggagaggtggtcaagtgtccctcaaggtcagtaatgatgggcctacactgattggtgcaaatgcctccttctctattgccttgaacttccctggaagccaaaaggtattgccagatgggcaggttatctgggtcaacaataccatcatcaatgggagccaggtgtggggaggacagccagtgtatccccaggaaactgacgatgcctgcatcttccctgatggtggaccttgcccatctggctcttggtctcagaagagaagctttgtttatgtctggaagacctggggccaatactggcaagttctagggggcccagtgtctgggctgagcattgggacaggcagggcaatgctgggcacacacaccatggaagtgactgtctaccatcgccggggatcccggagctatgtgcctcttgctcattccagctcagccttcaccattactgaccaggtgcctttctccgtgagcgtgtcccagttgcgggccttggatggagggaacaagcacttcctgagaaatcagcctctgacctttgccctccagctccatgaccccagtggctatctggctgaagctgacctctcctacacctgggactttggagacagtagtggaaccctgatctctcgggcacttgtggtcactcatacttacctggagcctggcccagtcactgcccaggtggtcctgcaggctgccattcctctcacctcctgtggctcctccccagttccaggcaccacagatgggcacaggccaactgcagaggcccctaacaccacagctggccaagtgcctactacagaagttgtgggtactacacctggtcaggcgccaactgcagagccctctggaaccacatctgtgcaggtgccaaccactgaagtcataagcactgcacctgtgcagatgccaactgcagagagcacaggtatgacacctgagaaggtgccagtttcagaggtcatgggtaccacactggcagagatgtcaactccagaggctacaggtatgacacctgcagaggtatcaattgtggtgctttctggaaccacagctgcacaggtaacaactacagagtgggtggagaccacagctagagagctacctatccctgagcctgaaggtccagatgccagctcaatcatgtctacggaaagtattacaggttccctgggccccctgctggatggtacagccaccttaaggctggtgaagagacaagtccccctggattgtgttctgtatcgatatggttccttttccgtcaccctggacattgtccagggtattgaaagtgccgagatcctgcaggctgtgccgtccggtgagggggatgcatttgagctgactgtgtcctgccaaggcgggctgcccaaggaagcctgcatggagatctcatcgccagggtgccagccccctgcccagcggctgtgccagcctgtgctacccagcccagcctgccagctggttctgcaccagatactgaagggtggctcggggacatactgcctcaatgtgtctctggctgataccaacagcctggcagtggtcagcacccagcttatcatgcctggtcaagaagcaggccttgggcaggttccgctgatcgtgggcatcttgctggtgttgatggctgtggtccttgcatctctgatatataggcgcagacttatgaagcaagacttctccgtaccccagttgccacatagcagcagtcactggctgcgtctaccccgcatcttctgctcttgtcccattggtgagaatagccccctcctcagtgggcagcaggtctga

SEQ ID NO: 3151 - RNA, 1986 nt, synthetic construct
  misc_feature 1..1986: note = derived and/or modified sequence opt1 fromPMEL__Homo_sapiens__AAB00386
  source 1..1986: mol_type = other RNA
atggacctggtgctcaagcgctgcctgctgcacctcgccgtgatcggcgccctgctggcggtgggggccaccaaggtgccccggaaccaggactggctcggcgtcagccgccagctgcggaccaaggcctggaaccgccagctgtacccggagtggacggaggcccagcggctcgactgctggcgcgggggccaggtgtccctgaaggtgagcaacgacgggcccaccctgatcggcgccaacgcgtccttcagcatcgccctcaacttccccggctcccagaaggtcctgcccgacggccaggtgatctgggtgaacaacaccatcatcaacgggagccaggtctggggcgggcagccggtgtacccccaggagaccgacgacgcctgcatcttccccgacgggggcccctgcccgtccggcagctggtcccagaagcggagcttcgtgtacgtctggaagacgtgggggcagtactggcaggtcctgggcgggcccgtgtccggcctcagcatcggcaccgggcgcgccatgctgggcacccacaccatggaggtgacggtgtaccaccggcgcgggtcccggagctacgtgcccctggcgcactccagctccgccttcaccatcaccgaccaggtccccttcagcgtgtccgtgagccagctccgcgccctggacggcgggaacaagcacttcctgcggaaccagccgctcaccttcgccctgcagctgcacgaccccagcggctacctcgccgaggcggacctgtcctacacgtgggacttcggcgacagctccgggaccctgatcagccgcgccctcgtcgtgacccacacctacctggagcccggccccgtgacggcccaggtcgtgctgcaggccgccatcccgctcacctcctgcgggagctcccccgtccccggcaccaccgacgggcaccggcccacggcggaggccccgaacaccaccgccggccaggtgcccaccacggaggtggtcggcaccacccccgggcaggcccccaccgccgagccgagcggcacgacctccgtccaggtgcccaccaccgaggtgatcagcacggcgcccgtgcagatgcccaccgccgagtccaccgggatgaccccggagaaggtgcccgtcagcgaggtgatgggcacgaccctggccgagatgtccacccccgaggccaccgggatgaccccggccgaggtgagcatcgtcgtgctgtccggcacgaccgcggcccaggtgaccaccacggagtgggtcgagaccaccgcccgcgagctccccatccccgagcccgagggcccggacgccagctccatcatgagcaccgagtccatcacggggagcctgggccccctgctcgacgggaccgcgaccctgcggctggtgaagcgccaggtgcccctcgactgcgtcctgtaccggtacggcagcttctccgtgaccctggacatcgtgcagggcatcgagagcgccgagatcctccaggccgtcccctccggggagggcgacgccttcgagctgacggtgagctgccagggcgggctgccgaaggaggcctgcatggagatctccagccccgggtgccagccgcccgcgcagcgcctctgccagcccgtgctgccctcccccgcctgccagctggtcctccaccagatcctgaagggcggcagcgggacctactgcctgaacgtgtccctggccgacaccaacagcctcgccgtggtctccacccagctgatcatgcccggccaggaggccgggctgggccaggtgccgctcatcgtggggatcctgctggtcctcatggcggtggtgctggccagcctgatctaccggcgccgcctcatgaagcaggacttctccgtcccccagctgccccacagctccagccactggctgcggctcccccgcatcttctgctcctgcccgatcggcgagaacagccccctgctgagcggccagcaggtctga

SEQ ID NO: 3152 - RNA, 1986 nt, synthetic construct
  misc_feature 1..1986: note = derived and/or modified sequence opt2 fromPMEL__Homo_sapiens__AAB00386
  source 1..1986: mol_type = other RNA
atggacctcgtcctcaagcgctgcctcctccacctcgccgtcatcggcgccctcctcgccgtcggcgccaccaaggtcccccgcaaccaggactggctcggcgtctcccgccagctccgcaccaaggcctggaaccgccagctctaccccgagtggaccgaggcccagcgcctcgactgctggcgcggcggccaggtctccctcaaggtctccaacgacggccccaccctcatcggcgccaacgcctccttctccatcgccctcaacttccccggctcccagaaggtcctccccgacggccaggtcatctgggtcaacaacaccatcatcaacggctcccaggtctggggcggccagcccgtctacccccaggagaccgacgacgcctgcatcttccccgacggcggcccctgcccctccggctcctggtcccagaagcgctccttcgtctacgtctggaagacctggggccagtactggcaggtcctcggcggccccgtctccggcctctccatcggcaccggccgcgccatgctcggcacccacaccatggaggtcaccgtctaccaccgccgcggctcccgctcctacgtccccctcgcccactcctcctccgccttcaccatcaccgaccaggtccccttctccgtctccgtctcccagctccgcgccctcgacggcggcaacaagcacttcctccgcaaccagcccctcaccttcgccctccagctccacgacccctccggctacctcgccgaggccgacctctcctacacctgggacttcggcgactcctccggcaccctcatctcccgcgccctcgtcgtcacccacacctacctcgagcccggccccgtcaccgcccaggtcgtcctccaggccgccatccccctcacctcctgcggctcctcccccgtccccggcaccaccgacggccaccgccccaccgccgaggcccccaacaccaccgccggccaggtccccaccaccgaggtcgtcggcaccacccccggccaggcccccaccgccgagccctccggcaccacctccgtccaggtccccaccaccgaggtcatctccaccgcccccgtccagatgcccaccgccgagtccaccggcatgacccccgagaaggtccccgtctccgaggtcatgggcaccaccctcgccgagatgtccacccccgaggccaccggcatgacccccgccgaggtctccatcgtcgtcctctccggcaccaccgccgcccaggtcaccaccaccgagtgggtcgagaccaccgcccgcgagctccccatccccgagcccgagggccccgacgcctcctccatcatgtccaccgagtccatcaccggctccctcggccccctcctcgacggcaccgccaccctccgcctcgtcaagcgccaggtccccctcgactgcgtcctctaccgctacggctccttctccgtcaccctcgacatcgtccagggcatcgagtccgccgagatcctccaggccgtcccctccggcgagggcgacgccttcgagctcaccgtctcctgccagggcggcctccccaaggaggcctgcatggagatctcctcccccggctgccagccccccgcccagcgcctctgccagcccgtcctcccctcccccgcctgccagctcgtcctccaccagatcctcaagggcggctccggcacctactgcctcaacgtctccctcgccgacaccaactccctcgccgtcgtctccacccagctcatcatgcccggccaggaggccggcctcggccaggtccccctcatcgtcggcatcctcctcgtcctcatggccgtcgtcctcgcctccctcatctaccgccgccgcctcatgaagcaggacttctccgtcccccagctcccccactcctcctcccactggctccgcctcccccgcatcttctgctcctgccccatcggcgagaactcccccctcctctccggccagcaggtctga

SEQ ID NO: 3153 - RNA, 1986 nt, synthetic construct
  misc_feature 1..1986: note = derived and/or modified sequence opt3 fromPMEL__Homo_sapiens__AAB00386
  source 1..1986: mol_type = other RNA
atggacctggtgctcaagagatgccttctgcacttggccgtcatcggcgctttactggcagttggggccaccaaagtgcccaggaaccaggattggctaggagtaagccggcaactccgcacaaaggcgtggaatcgacagctgtaccctgagtggactgaagctcagcgtcttgactgttggagaggtggccaggtgtccctgaaagtctctaacgatgggccaacgttgattggagccaatgcatcattcagtatagccctcaactttccgggcagccaaaaggtgctgcccgacggtcaggttatctgggtgaataacaccattatcaatgggtcccaggtctggggaggccagcctgtgtatccacaagagacagatgacgcttgcattttccccgatggcgggccttgtccatctggatcgtggtcacagaaaaggagctttgtatacgtttggaagacttggggtcagtattggcaagtgctgggcgggcccgtcagtggactctccatcggcaccggtcgggcaatgttagggacacataccatggaagtgactgtgtaccaccgcagaggatctaggagctatgtccctctggcccattcctcaagtgctttcacaataaccgaccaggttccatttagcgtgtctgtatcccagcttcgggccttggatggcggcaacaagcacttcctgcgcaatcagccgctaacgtttgcgctccaactgcatgacccctcagggtaccttgcagaggccgatctgagctatacttgggacttcggagatagttctggtaccttgatctcccgagctctcgtggtcacacacacttacctggaacctggcccagtgaccgcccaggttgtgttacaggcagctattcccctgacaagctgcgggtcgtctcctgtcccaggaaccacggacggccacagacccactgccgaggcgccgaacacaaccgccggtcaggtgcctactacagaggtagttgggaccacgcccggccaagcaccaaccgctgaaccttccggaacaacttcagtgcaggtccccaccacagaggtgatcagtactgccccagtccagatgcccaccgctgaaagcacaggcatgacccctgagaaagtgccagtttccgaggtgatggggactacgctcgccgaaatgtctacaccggaggcaaccggaatgactcccgccgaagtaagcattgtcgtgctttcaggtaccacagctgcgcaggttaccactacagagtgggtggaaacgaccgcaagggagctgcctatcccagagcccgaaggccctgacgccagttccataatgagcactgagtctattacagggtcattgggaccactactggatggcaccgctacactccggctggtcaagcgtcaagtgccccttgactgtgtactgtaccgctatggtagttttagcgtgactttggatatcgttcaggggattgaatccgccgagatcctccaggcagtcccgtctggcgaaggagacgccttcgagctgaccgtgtcgtgccagggcgggttacctaaagaggcttgtatggaaatcagctccccaggatgccaaccccctgcccagagactgtgtcagcccgtgctaccaagtcctgcatgccagctcgtcctgcatcaaattcttaagggtggctcagggacgtactgtttgaatgtttctctggcggataccaacagcctcgctgtggtgtccacacagctgataatgcccggacaggaggccggccttggtcaagtaccactgatcgtcgggattttgctcgtgctgatggcagttgtgttagcctcactgatctataggcggcgactaatgaaacaggactttagcgtcccgcagctccctcactcttccagtcattggctgcgccttcccagaatattctgcagctgcccaattggcgaaaattctcccttgctgtccggacagcaagtgtga

SEQ ID NO: 3154 - RNA, 1986 nt, synthetic construct
  misc_feature 1..1986: note = derived and/or modified sequence opt4 fromPMEL__Homo_sapiens__AAB00386
  source 1..1986: mol_type = other RNA
atggacctggtgctgaagagatgcctgctgcacctggccgtgatcggcgccctgctggccgtgggcgccaccaaggtgcccagaaaccaggactggctgggcgtgagcagacagctgagaaccaaggcctggaacagacagctgtaccccgagtggaccgaggcccagagactggactgctggagaggcggccaggtgagcctgaaggtgagcaacgacggccccaccctgatcggcgccaacgccagcttcagcatcgccctgaacttccccggcagccagaaggtgctgcccgacggccaggtgatctgggtgaacaacaccatcatcaacggcagccaggtgtggggcggccagcccgtgtacccccaggagaccgacgacgcctgcatcttccccgacggcggcccctgccccagcggcagctggagccagaagagaagcttcgtgtacgtgtggaagacctggggccagtactggcaggtgctgggcggccccgtgagcggcctgagcatcggcaccggcagagccatgctgggcacccacaccatggaggtgaccgtgtaccacagaagaggcagcagaagctacgtgcccctggcccacagcagcagcgccttcaccatcaccgaccaggtgcccttcagcgtgagcgtgagccagctgagagccctggacggcggcaacaagcacttcctgagaaaccagcccctgaccttcgccctgcagctgcacgaccccagcggctacctggccgaggccgacctgagctacacctgggacttcggcgacagcagcggcaccctgatcagcagagccctggtggtgacccacacctacctggagcccggccccgtgaccgcccaggtggtgctgcaggccgccatccccctgaccagctgcggcagcagccccgtgcccggcaccaccgacggccacagacccaccgccgaggcccccaacaccaccgccggccaggtgcccaccaccgaggtggtgggcaccacccccggccaggcccccaccgccgagcccagcggcaccaccagcgtgcaggtgcccaccaccgaggtgatcagcaccgcccccgtgcagatgcccaccgccgagagcaccggcatgacccccgagaaggtgcccgtgagcgaggtgatgggcaccaccctggccgagatgagcacccccgaggccaccggcatgacccccgccgaggtgagcatcgtggtgctgagcggcaccaccgccgcccaggtgaccaccaccgagtgggtggagaccaccgccagagagctgcccatccccgagcccgagggccccgacgccagcagcatcatgagcaccgagagcatcaccggcagcctgggccccctgctggacggcaccgccaccctgagactggtgaagagacaggtgcccctggactgcgtgctgtacagatacggcagcttcagcgtgaccctggacatcgtgcagggcatcgagagcgccgagatcctgcaggccgtgcccagcggcgagggcgacgccttcgagctgaccgtgagctgccagggcggcctgcccaaggaggcctgcatggagatcagcagccccggctgccagccccccgcccagagactgtgccagcccgtgctgcccagccccgcctgccagctggtgctgcaccagatcctgaagggcggcagcggcacctactgcctgaacgtgagcctggccgacaccaacagcctggccgtggtgagcacccagctgatcatgcccggccaggaggccggcctgggccaggtgcccctgatcgtgggcatcctgctggtgctgatggccgtggtgctggccagcctgatctacagaagaagactgatgaagcaggacttcagcgtgccccagctgccccacagcagcagccactggctgagactgcccagaatcttctgcagctgccccatcggcgagaacagccccctgctgagcggccagcaggtgtga

SEQ ID NO: 3155 - RNA, 1986 nt, synthetic construct
  misc_feature 1..1986: note = derived and/or modified sequence opt5 fromPMEL__Homo_sapiens__AAB00386
  source 1..1986: mol_type = other RNA
atggacctggtgctcaagagatgcctgcttcacctggccgtcatcggcgctctcctggccgttggggcgaccaaagtgccccggaaccaggattggcttggagtgagccgccaactgagaacaaaggcttggaatcggcagctctaccctgagtggacggaagcccagcgcctggactgttggagaggcgggcaggtctccctgaaagtgtctaacgatggaccgaccctcattggcgccaatgctagcttctccatcgccctgaactttcccgggtctcaaaaggttcttcctgacggacaggtgatttgggtcaataacacaatcattaatggcagccaggtgtggggcgggcagcccgtttatcctcaagagaccgatgacgcttgcatcttccccgatggaggcccttgtccgtccgggtcttggagccagaaacggtcctttgtgtacgtctggaagacatggggacagtattggcaagtgctgggcgggcccgtgagcggactctctatcggcaccggccgcgccatgctggggacacataccatggaagtcacggtttaccacagacggggatcccgcagctatgtgcctcttgcgcattcttccagcgccttcaccattacagaccaggtgcccttttctgtctccgtgagccagctgagagctctcgatggcgggaacaagcacttcctgcggaatcagcctctgacctttgccctccaactgcatgacccctccggataccttgctgaggccgatctgtcttatacatgggacttcggcgatagctccgggaccctcatcagccgcgcgctggttgtgacgcacacataccttgaaccgggacctgtcaccgcccaggtggttctgcaggctgccattcccctcacatcttgcggctccagccctgtgcccggcaccaccgacgggcacagacccacagctgaggcccctaacacgaccgccggacaggtcccgacaaccgaggtggtcggcacaacccccgggcaagctcctacggcggaaccctctggaacaaccagcgtgcaggttcctaccacagaggtgatctccaccgcccccgtccagatgccgacagctgaatctacgggcatgacccctgagaaagtgcccgttagcgaggtgatggggacaaccctggccgaaatgtccacacctgaggccaccggcatgacgcccgctgaagtcagcattgtggtgctgtctggaaccacagccgcgcaggttaccacaaccgagtgggtcgaaacgacagctcgggagctccctatccccgagccggaaggccctgacgcctccagcattatgtctaccgagtccatcacagggagcctgggaccccttctggatggcaccgccaccctccgcctggtgaagagacaagtgccccttgactgtgtcctgtaccggtatgggtccttttctgtgacactcgatatcgttcagggaattgaaagcgctgagatcctgcaggccgtgccttccggcgaaggggacgctttcgagctgacggtctcttgccagggcggactcccgaaagaggcctgtatggaaattagctcccccggctgccaacctcccgcgcagagactgtgtcagcctgtgcttcccagccctgcctgccagctggttctccatcaaatcctgaaagggggatctggcacctactgtctgaatgtgtcccttgctgatacaaacagcctcgccgtcgtgtctacccagctgattatgcccgggcaggaggctggactgggccaagttccgctcatcgtggggatcctgcttgtcctgatggccgtggtgctcgcgtccctgatttatcgccggagactgatgaagcaggactttagcgtccctcagcttccccactctagctcccattggctccgcctgcctcggatcttctgcagctgccccattggcgaaaattctccgctgctctccggacagcaagtttga

SEQ ID NO: 3156 - protein, 882 aa, synthetic construct
  REGION 1..882: note = PML__Homo_sapiens__P29590
MEPAPARSPRPQQDPARPQEPTMPPPETPSEGRQPSPSPSPTERAPASEEEFQFLRCQQCQAEAKCPKLLPCLHTLCSGCLEASGMQCPICQAPWPLGADTPALDNVFFESLQRRLSVYRQIVDAQAVCTRCKESADFWCFECEQLLCAKCFEAHQWFLKHEARPLAELRNQSVREFLDGTRKTNNIFCSNPNHRTPTLTSIYCRGCSKPLCCSCALLDSSHSELKCDISAEIQQRQEELDAMTQALQEQDSAFGAVHAQMHAAVGQLGRARAETEELIRERVRQVVAHVRAQERELLEAVDARYQRDYEEMASRLGRLDAVLQRIRTGSALVQRMKCYASDQEVLDMHGFLRQALCRLRQEEPQSLQAAVRTDGFDEFKVRLQDLSSCITQGKDAAVSKKASPEAASTPRDPIDVDLPEEAERVKAQVQALGLAEAQPMAVVQSVPGAHPVPVYAFSIKGPSYGEDVSNTTTAQKRKCSQTQCPRKVIKMESEEGKEARLARSSPEQPRPSTSKAVSPPHLDGPPSPRSPVIGSEVFLPNSNHVASGAGEAEERVVVISSSEDSDAENSSSRELDDSSSESSDLQLEGPSTLRVLDENLADPQAEDRPLVFFDLKIDNETQKISQLAAVNRESKFRVVIQPEAFFSIYSKAVSLEVGLQHFLSFLSSMRRPILACYKLWGPGLPNFFRALEDINRLWEFQEAISGFLAALPLIRERVPGASSFKLKNLAQTYLARNMSERSAMAAVLAMRDLCRLLEVSPGPQLAQHVYPFSSLQCFASLQPLVQAAVLPRAEARLLALHNVSFMELLSAHRRDRQGGLKKYSRYLSLQTTTLPPAQPAFNLQALGTYFEGLLEGPALARAEGVSTPLAGRGLAERASQQS

SEQ ID NO: 3157 - RNA, 2649 nt, synthetic construct
  misc_feature 1..2649: note = PML__Homo_sapiens__CCDS10255.1
  source 1..2649: mol_type = other RNA
atggagcctgcacccgcccgatctccgaggccccagcaggaccccgcccggccccaggagcccaccatgcctccccccgagaccccctctgaaggccgccagcccagccccagccccagccctacagagcgagcccccgcttcggaggaggagttccagtttctgcgctgccagcaatgccaggcggaagccaagtgcccgaagctgctgccttgtctgcacacgctgtgctcaggatgcctggaggcgtcgggcatgcagtgccccatctgccaggcgccctggcccctaggtgcagacacacccgccctggataacgtctttttcgagagtctgcagcggcgcctgtcggtgtaccggcagattgtggatgcgcaggctgtgtgcacccgctgcaaagagtcggccgacttctggtgctttgagtgcgagcagctcctctgcgccaagtgcttcgaggcacaccagtggttcctcaagcacgaggcccggcccctagcagagctgcgcaaccagtcggtgcgtgagttcctggacggcacccgcaagaccaacaacatcttctgctccaaccccaaccaccgcacccctacgctgaccagcatctactgccgaggatgttccaagccgctgtgctgctcgtgcgcgctccttgacagcagccacagtgagctcaagtgcgacatcagcgcagagatccagcagcgacaggaggagctggacgccatgacgcaggcgctgcaggagcaggatagtgcctttggcgcggttcacgcgcagatgcacgcggccgtcggccagctgggccgcgcgcgtgccgagaccgaggagctgatccgcgagcgcgtgcgccaggtggtagctcacgtgcgggctcaggagcgcgagctgctggaggctgtggacgcgcggtaccagcgcgactacgaggagatggccagtcggctgggccgcctggatgctgtgctgcagcgcatccgcacgggcagcgcgctggtgcagaggatgaagtgctacgcctcggaccaggaggtgctggacatgcacggtttcctgcgccaggcgctctgccgcctgcgccaggaggagccccagagcctgcaagctgccgtgcgcaccgatggcttcgacgagttcaaggtgcgcctgcaggacctcagctcttgcatcacccaggggaaagatgcagctgtatccaagaaagccagcccagaggctgccagcactcccagggaccctattgacgttgacctgcccgaggaggcagagagagtgaaggcccaggttcaggccctggggctggctgaagcccagcctatggctgtggtacagtcagtgcccggggcacaccccgtgccagtgtacgccttctccatcaaaggcccttcctatggagaggatgtctccaatacaacgacagcccagaagaggaagtgcagccagacccagtgccccaggaaggtcatcaagatggagtctgaggaggggaaggaggcaaggttggctcggagctccccggagcagcccaggcccagcacctccaaggcagtctcaccaccccacctggatggaccgcctagccccaggagccccgtcataggaagtgaggtcttcctgcccaacagcaaccacgtggccagtggcgccggggaggcagaggaacgcgttgtggtgatcagcagctcggaagactcagatgccgaaaactcgtcctcccgagagctggatgacagcagcagtgagtccagtgacctccagctggaaggccccagcaccctcagggtcctggacgagaaccttgctgacccccaagcagaagacagacctctggttttctttgacctcaagattgacaatgaaacccagaagattagccagctggctgcggtgaaccgggaaagcaagttccgcgtggtcatccagcctgaagccttcttcagcatctactccaaggccgtgtccctggaggtggggctgcagcacttcctcagctttctgagctccatgcgccgccctatcttggcctgctacaagctgtgggggcctggcctcccaaacttcttccgggccctggaggacattaacaggctgtgggaattccaggaggccatctcgggcttcctggctgccctgcctctcatccgggagcgtgtgcccggggccagcagcttcaaactcaagaacctggcccagacctacctggcgagaaacatgagcgagcgcagcgccatggctgccgtgctggccatgcgtgacctgtgccgcctcctcgaggtctccccgggcccccagctggcccagcatgtctaccccttcagtagcctgcagtgctttgcctccctgcagcccctggtgcaggcagctgtgctgccccgggctgaggcccgcctcctggccctacacaacgtgagcttcatggagctgctgagtgcacaccgccgtgaccggcaggggggcctgaagaagtacagccgctatctaagcctgcagaccaccacgttgccccctgcccagcctgctttcaacctgcaggctctgggcacctactttgaaggcctgttggagggtccggcgctggcacgggcagaaggagtctccaccccacttgctggccgtggcttggcagagagggcctcccagcagagctga

SEQ ID NO: 3158 - RNA, 2649 nt, synthetic construct
  misc_feature 1..2649: note = derived and/or modified sequence opt1 fromPML__Homo_sapiens__CCDS10255.1
  source 1..2649: mol_type = other RNA
atggagcccgccccggcccgcagcccccggccccagcaggaccccgcgcgcccgcaggagcccaccatgcccccgcccgagaccccctccgagggccggcagcccagcccctccccgagccccaccgagcgcgcccccgcctccgaggaggagttccagttcctgcggtgccagcagtgccaggccgaggccaagtgccccaagctcctgccgtgcctgcacaccctctgcagcgggtgcctggaggcgtccggcatgcagtgccccatctgccaggccccctggcccctgggggccgacaccccggccctcgacaacgtgttcttcgagagcctgcagcgccggctgtccgtctaccgccagatcgtggacgcgcaggccgtgtgcacccggtgcaaggagagcgccgacttctggtgcttcgagtgcgagcagctcctgtgcgccaagtgcttcgaggcccaccagtggttcctgaagcacgaggcgcgccccctcgccgagctgcggaaccagtccgtccgcgagttcctggacggcacgcggaagaccaacaacatcttctgcagcaaccccaaccaccgcacccccaccctcacgtccatctactgccgggggtgcagcaagccgctgtgctgctcctgcgccctgctcgacagctcccacagcgagctgaagtgcgacatctccgccgagatccagcagcgccaggaggagctggacgccatgacccaggcgctccaggagcaggacagcgccttcggcgccgtgcacgcccagatgcacgccgcggtgggccagctggggcgggcccgcgccgagaccgaggagctgatccgggagcgcgtccgccaggtggtggcccacgtccgggcccaggagcgcgagctcctggaggcggtggacgcccggtaccagcgcgactacgaggagatggccagccggctgggccgcctcgacgccgtgctgcagcggatccgcaccgggtccgcgctggtccagcggatgaagtgctacgccagcgaccaggaggtgctcgacatgcacggcttcctgcgccaggccctgtgccggctccgccaggaggagccccagtccctgcaggccgccgtgcggacggacgggttcgacgagttcaaggtccgcctgcaggacctcagctcctgcatcacccagggcaaggacgcggccgtgagcaagaaggcctcccccgaggccgccagcacgccccgggacccgatcgacgtggacctgcccgaggaggcggagcgcgtcaaggcccaggtgcaggccctgggcctcgccgaggcccagcccatggcggtggtccagtccgtgccgggggcccaccccgtgcccgtctacgccttcagcatcaagggcccctcctacggggaggacgtgagcaacaccaccaccgcccagaagcggaagtgctcccagacccagtgcccgcgcaaggtcatcaagatggagagcgaggagggcaaggaggcgcggctggcccgctccagccccgagcagccccggccctccaccagcaaggccgtgtccccgccccacctggacggcccgcccagcccccgcagccccgtgatcgggtccgaggtcttcctccccaacagcaaccacgtggcctccggcgccggggaggcggaggagcgcgtggtcgtgatcagctccagcgaggactccgacgccgagaacagctccagccgggagctggacgactccagctccgagagctccgacctgcagctcgagggccccagcacgctgcgcgtgctggacgagaacctcgccgacccgcaggccgaggaccggcccctggtcttcttcgacctgaagatcgacaacgagacccagaagatctcccagctggccgcggtgaaccgcgagagcaagttccgggtggtcatccagcccgaggccttcttcagcatctactccaaggccgtgagcctcgaggtggggctgcagcacttcctgtccttcctcagctccatgcgccggcccatcctggcctgctacaagctgtggggcccgggcctccccaacttcttccgcgccctggaggacatcaaccggctgtgggagttccaggaggcgatcagcgggttcctcgccgccctgcccctgatccgcgagcgggtccccggcgcctccagcttcaagctcaagaacctggcgcagacctacctggcccgcaacatgtccgagcggagcgccatggccgccgtgctcgcgatgcgcgacctgtgccggctgctcgaggtgtccccggggccccagctggcccagcacgtctaccccttcagctccctgcagtgcttcgccagcctccagccgctggtgcaggccgccgtgctgccccgcgcggaggcccggctcctggccctgcacaacgtctccttcatggagctcctgagcgcccaccgccgggaccgccagggcgggctgaagaagtactcccggtacctcagcctgcagaccacgaccctgccgcccgcccagcccgcgttcaacctccaggccctgggcacctacttcgagggcctgctcgaggggcccgccctggcccgcgccgagggcgtgtccacgcccctggcggggcgcggcctcgccgagcgggccagccagcagagctga

SEQ ID NO: 3159 - RNA, 2649 nt, synthetic construct
  misc_feature 1..2649: note = derived and/or modified sequence opt2 fromPML__Homo_sapiens__CCDS10255.1
  source 1..2649: mol_type = other RNA
atggagcccgcccccgcccgctccccccgcccccagcaggaccccgcccgcccccaggagcccaccatgcccccccccgagaccccctccgagggccgccagccctccccctccccctcccccaccgagcgcgcccccgcctccgaggaggagttccagttcctccgctgccagcagtgccaggccgaggccaagtgccccaagctcctcccctgcctccacaccctctgctccggctgcctcgaggcctccggcatgcagtgccccatctgccaggccccctggcccctcggcgccgacacccccgccctcgacaacgtcttcttcgagtccctccagcgccgcctctccgtctaccgccagatcgtcgacgcccaggccgtctgcacccgctgcaaggagtccgccgacttctggtgcttcgagtgcgagcagctcctctgcgccaagtgcttcgaggcccaccagtggttcctcaagcacgaggcccgccccctcgccgagctccgcaaccagtccgtccgcgagttcctcgacggcacccgcaagaccaacaacatcttctgctccaaccccaaccaccgcacccccaccctcacctccatctactgccgcggctgctccaagcccctctgctgctcctgcgccctcctcgactcctcccactccgagctcaagtgcgacatctccgccgagatccagcagcgccaggaggagctcgacgccatgacccaggccctccaggagcaggactccgccttcggcgccgtccacgcccagatgcacgccgccgtcggccagctcggccgcgcccgcgccgagaccgaggagctcatccgcgagcgcgtccgccaggtcgtcgcccacgtccgcgcccaggagcgcgagctcctcgaggccgtcgacgcccgctaccagcgcgactacgaggagatggcctcccgcctcggccgcctcgacgccgtcctccagcgcatccgcaccggctccgccctcgtccagcgcatgaagtgctacgcctccgaccaggaggtcctcgacatgcacggcttcctccgccaggccctctgccgcctccgccaggaggagccccagtccctccaggccgccgtccgcaccgacggcttcgacgagttcaaggtccgcctccaggacctctcctcctgcatcacccagggcaaggacgccgccgtctccaagaaggcctcccccgaggccgcctccaccccccgcgaccccatcgacgtcgacctccccgaggaggccgagcgcgtcaaggcccaggtccaggccctcggcctcgccgaggcccagcccatggccgtcgtccagtccgtccccggcgcccaccccgtccccgtctacgccttctccatcaagggcccctcctacggcgaggacgtctccaacaccaccaccgcccagaagcgcaagtgctcccagacccagtgcccccgcaaggtcatcaagatggagtccgaggagggcaaggaggcccgcctcgcccgctcctcccccgagcagccccgcccctccacctccaaggccgtctcccccccccacctcgacggccccccctccccccgctcccccgtcatcggctccgaggtcttcctccccaactccaaccacgtcgcctccggcgccggcgaggccgaggagcgcgtcgtcgtcatctcctcctccgaggactccgacgccgagaactcctcctcccgcgagctcgacgactcctcctccgagtcctccgacctccagctcgagggcccctccaccctccgcgtcctcgacgagaacctcgccgacccccaggccgaggaccgccccctcgtcttcttcgacctcaagatcgacaacgagacccagaagatctcccagctcgccgccgtcaaccgcgagtccaagttccgcgtcgtcatccagcccgaggccttcttctccatctactccaaggccgtctccctcgaggtcggcctccagcacttcctctccttcctctcctccatgcgccgccccatcctcgcctgctacaagctctggggccccggcctccccaacttcttccgcgccctcgaggacatcaaccgcctctgggagttccaggaggccatctccggcttcctcgccgccctccccctcatccgcgagcgcgtccccggcgcctcctccttcaagctcaagaacctcgcccagacctacctcgcccgcaacatgtccgagcgctccgccatggccgccgtcctcgccatgcgcgacctctgccgcctcctcgaggtctcccccggcccccagctcgcccagcacgtctaccccttctcctccctccagtgcttcgcctccctccagcccctcgtccaggccgccgtcctcccccgcgccgaggcccgcctcctcgccctccacaacgtctccttcatggagctcctctccgcccaccgccgcgaccgccagggcggcctcaagaagtactcccgctacctctccctccagaccaccaccctcccccccgcccagcccgccttcaacctccaggccctcggcacctacttcgagggcctcctcgagggccccgccctcgcccgcgccgagggcgtctccacccccctcgccggccgcggcctcgccgagcgcgcctcccagcagtcctga

SEQ ID NO: 3160 - RNA, 2649 nt, synthetic construct
  misc_feature 1..2649: note = derived and/or modified sequence opt3 fromPML__Homo_sapiens__CCDS10255.1
  source 1..2649: mol_type = other RNA
atggagcccgcccctgctagaagcccaaggccgcagcaagaccccgcacggcctcaggaaccaaccatgccccctccagagacaccctccgaaggccgccagccttctccatcaccgagtcccactgagcgagcccctgcgagcgaagaggagttccagtttctgcgttgccaacagtgtcaggctgaagccaagtgcccaaaactccttccctgtctgcacacgttgtgctccgggtgtttagaggcatctggaatgcagtgccctatctgtcaagccccatggcccctgggtgctgataccccggcactagacaacgtgttctttgaatcgctccagagaaggctgtcagtctaccggcagattgttgatgcccaggctgtgtgcacacgctgtaaggagagcgccgacttctggtgctttgagtgtgaacaacttctgtgcgcgaaatgcttcgaggcacatcagtggtttttgaagcacgaagccagacctctcgctgagctgaggaatcagagtgtacgggaatttctggatggcactcgcaaaaccaacaatatattttgttccaaccccaatcatcgaacaccaaccctcacttctatctattgcagagggtgtagcaagcctttatgctgttcctgcgccctgcttgactcaagtcacagcgagttgaagtgtgatatttctgcagagatccaacagaggcaggaagaactggacgctatgacacaggccctacaagaacaggattccgcgttcggagccgtgcatgcacagatgcacgctgccgtcggccagctcggtcgggctcgtgccgagaccgaggagctgattcgcgagagagtgaggcaagttgtggcacacgtccgggcccaggaacgagagcttctggaagctgtggacgcgcgctaccagagagattatgaggaaatggcatcaaggttggggcggctcgacgccgtactgcagcgcatcagaacgggaagcgctttagttcaaaggatgaaatgctacgccagtgatcaggaggtgctggacatgcatggctttctccgtcaggcactttgtcggctgcgacaggaggaaccccaatctttgcaggccgctgtcagaactgacggcttcgatgagtttaaggtgaggctacaggacctgtccagctgcataacccaagggaaagatgccgcagtgtcgaagaaagcgtctccagaagctgcctccacaccccgcgaccctatcgatgtcgacctcccagaggaggcagaacgggttaaggcccaggtgcaggctctgggacttgccgaggcacagccgatggctgtagtgcaatcagtccccggtgcccaccctgtgccagtttatgcgttcagtattaagggccccagctacggggaagatgtgtccaacactaccacagcccagaaaagaaagtgttctcagacccagtgccctaggaaagtcatcaagatggagagcgaagagggaaaagaggctcgcctggcacgatcaagtccagaacaaccccggccgtccacgagcaaggccgtgtctcctccacatttggacggtcccccttcaccccgtagtccagtaattggcagcgaggttttcctccctaattccaaccacgtggcttctggggccggagaagcagaggaaagagtcgtggtcatctcgagctccgaggattcagacgcggagaatagttctagcagggaactggatgactcctcaagcgagtcttccgacttacagctggaaggccccagtactctacgcgtgctcgatgagaacctggccgacccacaggctgaagatcggccgcttgttttcttcgacttgaaaatagataatgagacacagaagattagccaactggccgcagtgaacagagagtctaagtttagggtagtcatccagcctgaggctttcttttccatttattcaaaagccgtgagtctcgaagttggcctgcagcacttccttagctttctgtcgtccatgcgacgccccatcttggcatgctacaagctctgggggccaggactgcccaatttctttcgggccttagaagacatcaacagactgtgggagttccaagaggctatttctggttttctagcggccctccctctgataagggaacgtgtgccaggcgcaagctcattcaaacttaagaatttggctcagacctacctggcccgcaacatgagtgagcggtccgccatggctgcagtcctcgccatgagagatctgtgtaggttactggaagtgtctcccgggcctcagcttgcgcagcatgtatatccgtttagctccttgcaatgcttcgcttcactccagccactggtgcaggccgcagttctaccccgagccgaggctcggctgctcgcactgcacaacgtcagcttcatggaacttttgagtgcccatcgcagagacaggcagggaggcctgaaaaagtactctcggtatttatccctccaaactacaaccctgcctccagcgcagcccgcttttaatcttcaggccctgggtacgtacttcgaggggttgctcgagggccctgcactggcccgagctgaaggagtgagcaccccgctagccggcagagggctggcagagcgcgcttcgcagcaatcatga

SEQ ID NO: 3161 - RNA, 2649 nt, synthetic construct
  misc_feature 1..2649: note = derived and/or modified sequence opt4 fromPML__Homo_sapiens__CCDS10255.1
  source 1..2649: mol_type = other RNA
atggagcccgcccccgccagaagccccagaccccagcaggaccccgccagaccccaggagcccaccatgcccccccccgagacccccagcgagggcagacagcccagccccagccccagccccaccgagagagcccccgccagcgaggaggagttccagttcctgagatgccagcagtgccaggccgaggccaagtgccccaagctgctgccctgcctgcacaccctgtgcagcggctgcctggaggccagcggcatgcagtgccccatctgccaggccccctggcccctgggcgccgacacccccgccctggacaacgtgttcttcgagagcctgcagagaagactgagcgtgtacagacagatcgtggacgcccaggccgtgtgcaccagatgcaaggagagcgccgacttctggtgcttcgagtgcgagcagctgctgtgcgccaagtgcttcgaggcccaccagtggttcctgaagcacgaggccagacccctggccgagctgagaaaccagagcgtgagagagttcctggacggcaccagaaagaccaacaacatcttctgcagcaaccccaaccacagaacccccaccctgaccagcatctactgcagaggctgcagcaagcccctgtgctgcagctgcgccctgctggacagcagccacagcgagctgaagtgcgacatcagcgccgagatccagcagagacaggaggagctggacgccatgacccaggccctgcaggagcaggacagcgccttcggcgccgtgcacgcccagatgcacgccgccgtgggccagctgggcagagccagagccgagaccgaggagctgatcagagagagagtgagacaggtggtggcccacgtgagagcccaggagagagagctgctggaggccgtggacgccagataccagagagactacgaggagatggccagcagactgggcagactggacgccgtgctgcagagaatcagaaccggcagcgccctggtgcagagaatgaagtgctacgccagcgaccaggaggtgctggacatgcacggcttcctgagacaggccctgtgcagactgagacaggaggagccccagagcctgcaggccgccgtgagaaccgacggcttcgacgagttcaaggtgagactgcaggacctgagcagctgcatcacccagggcaaggacgccgccgtgagcaagaaggccagccccgaggccgccagcacccccagagaccccatcgacgtggacctgcccgaggaggccgagagagtgaaggcccaggtgcaggccctgggcctggccgaggcccagcccatggccgtggtgcagagcgtgcccggcgcccaccccgtgcccgtgtacgccttcagcatcaagggccccagctacggcgaggacgtgagcaacaccaccaccgcccagaagagaaagtgcagccagacccagtgccccagaaaggtgatcaagatggagagcgaggagggcaaggaggccagactggccagaagcagccccgagcagcccagacccagcaccagcaaggccgtgagccccccccacctggacggcccccccagccccagaagccccgtgatcggcagcgaggtgttcctgcccaacagcaaccacgtggccagcggcgccggcgaggccgaggagagagtggtggtgatcagcagcagcgaggacagcgacgccgagaacagcagcagcagagagctggacgacagcagcagcgagagcagcgacctgcagctggagggccccagcaccctgagagtgctggacgagaacctggccgacccccaggccgaggacagacccctggtgttcttcgacctgaagatcgacaacgagacccagaagatcagccagctggccgccgtgaacagagagagcaagttcagagtggtgatccagcccgaggccttcttcagcatctacagcaaggccgtgagcctggaggtgggcctgcagcacttcctgagcttcctgagcagcatgagaagacccatcctggcctgctacaagctgtggggccccggcctgcccaacttcttcagagccctggaggacatcaacagactgtgggagttccaggaggccatcagcggcttcctggccgccctgcccctgatcagagagagagtgcccggcgccagcagcttcaagctgaagaacctggcccagacctacctggccagaaacatgagcgagagaagcgccatggccgccgtgctggccatgagagacctgtgcagactgctggaggtgagccccggcccccagctggcccagcacgtgtaccccttcagcagcctgcagtgcttcgccagcctgcagcccctggtgcaggccgccgtgctgcccagagccgaggccagactgctggccctgcacaacgtgagcttcatggagctgctgagcgcccacagaagagacagacagggcggcctgaagaagtacagcagatacctgagcctgcagaccaccaccctgccccccgcccagcccgccttcaacctgcaggccctgggcacctacttcgagggcctgctggagggccccgccctggccagagccgagggcgtgagcacccccctggccggcagaggcctggccgagagagccagccagcagagctga

SEQ ID NO: 3162 - RNA, 2649 nt, synthetic construct
  misc_feature 1..2649: note = derived and/or modified sequence opt5 fromPML__Homo_sapiens__CCDS10255.1
  source 1..2649: mol_type = other RNA
atggagcccgcccctgctagaagcccgcggccccagcaagaccctgcccgcccccaggaacctaccatgccccctccggagacaccctccgaaggcagacagccttctcccagcccttcccccacggagcgggcgccggcttctgaagaggagttccagtttctgcgctgccaacagtgtcaggccgaagccaagtgccctaaactcctgccctgtcttcacaccctgtgcagcgggtgtctcgaggcttccggaatgcagtgccctatctgtcaagccccctggcccctgggcgctgatacccctgcccttgacaacgtgttctttgaatctctgcagagacggctcagcgtctaccgccagattgttgatgcgcaggccgtgtgcacaagatgtaaggagtccgctgacttctggtgctttgagtgtgaacaactgctgtgcgccaaatgcttcgaggctcatcagtggtttctcaagcacgaagcccggccgctggcggagcttcgcaatcagagcgtgagagaatttctggatgggacacggaaaaccaacaatatcttttgttctaaccccaatcatcgcacacctaccctcacgtccatttattgcagaggatgtagcaagcccctgtgctgttcttgcgcccttctggactccagccactctgagctcaagtgtgatatctccgctgagattcaacagcggcaggaggagctggacgccatgacccaggctctgcaagaacaggatagcgccttcggcgccgtccatgctcagatgcacgcggccgtggggcagctcggacgcgctagagccgagacagaggaactgatccgggagagagttcgccaagtggtcgcccacgtgcgggctcaggaaagagagcttctggaagccgttgacgcgcgctaccagcgggattatgaggaaatggcttccagactcggccgcctggacgccgtgcttcagcggatcagaaccggctctgccctggtccaacgcatgaaatgctacgctagcgatcaggaggtgctcgacatgcatgggtttctgcggcaggccctgtgtagactccgccaggaggaacctcaatccctgcaggctgccgtgcggacagacggattcgatgagtttaaggtcagacttcaggacctgagctcttgcattacccaaggcaaagatgcggccgtttccaagaaagctagccccgaagccgcttctacgccgcgggaccctatcgatgtggacctccccgaggaggccgaacgcgtgaaggcgcaggtccaggccctggggcttgctgaggcccagcctatggctgtggttcaaagcgtgcccggagcccaccctgtccccgtgtatgccttctccattaagggcccgtcttacggggaagatgttagcaacacaaccacagctcagaaaagaaagtgttcccagacccagtgccctcggaaagtgatcaagatggagagcgaagagggaaaagaggcgagactggcccggtcttcccccgaacaaccccgccctagcacctctaaggctgtctccccgccccatctcgacggccctcccagccctagatcccccgtgattggctctgaggtcttcctgcctaatagcaaccacgtggcctccggggccggagaagctgaggaacgcgttgtggtcatctctagctccgaggatagcgacgccgaaaattcttccagcagagaactggatgactcttccagcgagtctagcgacctccagctggaaggcccctccacacttcgggtgctggatgagaacctcgcggacccgcaggctgaagatcgccctctggttttcttcgacctgaaaattgataatgagacgcagaagatcagccaacttgccgccgtgaacagagagtctaagtttcgggtcgtgatccagcccgaggctttcttttccatttatagcaaagccgtgtccctcgaagttgggctgcagcacttcctgtcttttctcagctccatgcgcagacctatcctggcgtgctacaaactttggggacccggcctgccgaatttctttcgggctctcgaagacattaaccgcctgtgggagttccaagaggccatctctgggtttctggccgcccttcctctcattagagaacgggtccccggagctagctccttcaagctgaagaatctggctcagacctacctcgcccgcaacatgtctgagagaagcgcgatggccgctgtgctggccatgcgggatctttgtagactgctcgaagtgtcccctggcccccagctggctcagcatgtctatccctttagctctctgcaatgcttcgcctcccttcagcctctcgtgcaggccgctgttctgccgcgcgcggaggcccggctgctcgctctgcacaacgtgagcttcatggaacttctgtctgcccatagacgcgaccggcagggcgggctcaaaaagtactccagatatctgagcctgcaaacaaccacacttccccctgcccagcccgcttttaatctccaggccctgggaacctacttcgagggcctgctcgaggggcctgcgctggctcgcgccgaaggagtctctacgccccttgccggccgggggctggctgagagagcctcccagcaaagctga

SEQ ID NO: 3163 - protein, 1075 aa, synthetic construct
  REGION 1..1075: note = POTEF__Homo_sapiens__A5A3E0
MVVEVDSMPAASSVKKPFGLRSKMGKWCCRCFPCCRESGKSNVGTSGDHDDSAMKTLRSKMGKWCRHCFPCCRGSGKSNVGASGDHDDSAMKTLRNKMGKWCCHCFPCCRGSSKSKVGAWGDYDDSAFMEPRYHVRGEDLDKLHRAAWWGKVPRKDLIVMLRDTDVNKQDKQKRTALHLASANGNSEVVKLLLDRRCQLNVLDNKKRTALIKAVQCQEDECALMLLEHGTDPNIPDEYGNTTLHYAIYNEDKLMAKALLLYGADIESKNKHGLTPLLLGVHEQKQQVVKFLIKKKANLNALDRYGRTALILAVCCGSASIVSLLLEQNIDVSSQDLSGQTAREYAVSSHHHVICQLLSDYKEKQMLKISSENSNPEQDLKLTSEEESQRFKGSENSQPEKMSQEPEINKDGDREVEEEMKKHESNNVGLLENLTNGVTAGNGDNGLIPQRKSRTPENQQFPDNESEEYHRICELLSDYKEKQMPKYSSENSNPEQDLKLTSEEESQRLKGSENGQPEKRSQEPEINKDGDRELENFMAIEEMKKHRSTHVGFPENLTNGATAGNGDDGLIPPRKSRTPESQQFPDTENEEYHSDEQNDTQKQFCEEQNTGILHDEILIHEEKQIEVVEKMNSELSLSCKKEKDILHENSTLREEIAMLRLELDTMKHQSQLREKKYLEDIESVKKRNDNLLKALQLNELTMDDDTAVLVIDNGSGMCKAGFAGDDAPRAVFPSIVGRPRQQGMMGGMHQKESYVGKEAQSKRGILTLKYPMEHGIITNWDDMEKIWHHTFYNELRVAPEEHPVLLTEATLNPKANREKMTQIMFETFNTPAMYVAIQAVLSLYTSGRTTGIVMDSGDGVTHTVPIYEGNALPHATLRLDLAGRELPDYLMKILTEHGYRFTTMAEREIVRDIKEKLCYVALDFEQEMATVASSSSLEKSYELPDGQVITIGNERFRCPEALFQPCFLGMESCGIHETTFNSIMKSDVDIRKDLYTNTVLSGGTTMYPGMAHRMQKEIAALAPSMMKIRIIAPPKRKYSVWVGGSILASLSTFQQMWISKQEYDESGPSIVHRKCL

SEQ ID NO: 3164 - RNA, 3228 nt, synthetic construct
  misc_feature 1..3228: note = POTEF__Homo_sapiens__CCDS46409.1
  source 1..3228: mol_type = other RNA
atggtggttgaggttgattccatgccggctgcctcttctgtgaagaagccatttggtctcaggagcaagatgggcaagtggtgctgccgttgcttcccctgctgcagggagagcggcaagagcaacgtgggcacttctggagaccacgacgactctgctatgaagacactcaggagcaagatgggcaagtggtgccgccactgcttcccctgctgcagggggagtggcaagagcaacgtgggcgcttctggagaccacgacgactctgctatgaagacactcaggaacaagatgggcaagtggtgctgccactgcttcccctgctgcagggggagcagcaagagcaaggtgggcgcttggggagactacgatgacagtgccttcatggagcccaggtaccacgtccgtggagaagatctggacaagctccacagagctgcctggtggggtaaagtccccagaaaggatctcatcgtcatgctcagggacactgacgtgaacaagcaggacaagcaaaagaggactgctctacatctggcctctgccaatgggaattcagaagtagtaaaactcctgctggacagacgatgtcaacttaatgtccttgacaacaaaaagaggacagctctgataaaggccgtacaatgccaggaagatgaatgtgcgttaatgttgctggaacatggcactgatccaaatattccagatgagtatggaaataccactctgcactacgctatctataatgaagataaattaatggccaaagcactgctcttatatggtgctgatatcgaatcaaaaaacaagcatggcctcacaccactgttacttggtgtacatgagcaaaaacagcaagtcgtgaaatttttaattaagaaaaaagcgaatttaaatgcactggatagatatggaagaactgctctcatacttgctgtatgttgtggatcagcaagtatagtcagccttctacttgagcaaaatattgatgtatcttctcaagatctatctggacagacggccagagagtatgctgtttctagtcatcatcatgtaatttgccagttactttctgactacaaagaaaaacagatgctaaaaatctcttctgaaaacagcaatccagaacaagacttaaagctgacatcagaggaagagtcacaaaggttcaaaggcagtgaaaatagccagccagagaaaatgtctcaagaaccagaaataaataaggatggtgatagagaggttgaagaagaaatgaagaagcatgaaagtaataatgtgggattactagaaaacctgactaatggtgtcactgctggcaatggtgataatggattaattcctcaaaggaagagcagaacacctgaaaatcagcaatttcctgacaacgaaagtgaagagtatcacagaatttgtgaattactttctgactacaaagaaaagcagatgccaaaatactcttctgaaaacagcaacccagaacaagacttaaagctgacatcagaggaagagtcacaaaggcttaaaggcagtgaaaatggccagccagagaaaagatctcaagaaccagaaataaataaggatggtgatagagagctagaaaattttatggctatcgaagaaatgaagaagcacagaagtactcatgtcggattcccagaaaacctgactaatggtgccactgctggcaatggtgatgatggattaattcctccaaggaagagcagaacacctgaaagccagcaatttcctgacactgagaatgaagagtatcacagtgacgaacaaaatgatactcagaagcaattttgtgaagaacagaacactggaatattacacgatgagattctgattcatgaagaaaagcagatagaagtggttgaaaaaatgaattctgagctttctcttagttgtaagaaagaaaaagacatcttgcatgaaaatagtacgttgcgggaagaaattgccatgctaagactggagctagacacaatgaaacatcagagccagctaagagaaaagaaatatttggaggatattgaaagtgtgaaaaaaaggaatgataatcttttaaaggctctacaattgaatgagctcaccatggatgatgataccgctgtgctcgtcattgacaacggctctggcatgtgcaaggccggctttgcgggcgacgatgccccccgggctgtcttcccttccatcgtggggcgccccaggcagcagggcatgatggggggcatgcatcagaaagagtcctatgtgggcaaggaggcccagagcaaaagaggcatcctgaccctgaagtaccccatggaacacggcatcatcaccaactgggatgacatggagaagatctggcaccacaccttctacaacgagctgcgtgtggctcccgaggagcaccccgtcctgctgaccgaggccaccctgaaccctaaggccaaccgcgagaagatgacccagatcatgtttgagaccttcaacaccccagccatgtacgtggccatccaggctgtgctgtccctgtacacctctggccgtactactggcatcgtgatggactctggtgacggggtcacccacactgtgcccatctatgaggggaatgccctcccccatgccaccctgcgcctagacctggctgggcgggaactgcctgactacctcatgaagatcctcaccgagcatggctataggttcaccaccatggccgagcgggaaatcgtgcgtgacatcaaagagaagctgtgctatgttgccctggacttcgagcaggagatggccacggtggcctccagctcctccctagagaagagctacgagctgcccgatggccaggtcatcaccatcggcaacgagcggttccgctgccccgaggcgctcttccagccttgcttcctgggcatggaatcctgtggcatccatgaaactaccttcaactccatcatgaagtctgatgtggacatccgcaaagacctgtacaccaacacagtgctgtctggcggcaccaccatgtaccctggcatggcccacagaatgcagaaggagatcgctgccctggcgcctagcatgatgaagatcaggatcattgctcctcccaagcgcaagtactccgtgtgggtcggtggctccatcctggcctcgctgtccaccttccagcagatgtggatcagcaagcaggagtatgatgagtcaggcccctccattgtccaccgcaaatgcttgtag

SEQ ID NO: 3165 - RNA, 3228 nt, synthetic construct
  misc_feature 1..3228: note = derived and/or modified sequence opt1 fromPOTEF__Homo_sapiens__CCDS46409.1
  source 1..3228: mol_type = other RNA
atggtggtcgaggtggacagcatgcccgccgcctccagcgtgaagaagcccttcggcctgcgctccaagatggggaagtggtgctgccggtgcttcccctgctgccgcgagagcggcaagtccaacgtcgggaccagcggcgaccacgacgactccgcgatgaagaccctccggagcaagatggggaagtggtgccgccactgcttcccctgctgccggggctccggcaagagcaacgtgggggcctccggcgaccacgacgacagcgccatgaagacgctgcgcaacaagatggggaagtggtgctgccactgcttcccctgctgccggggctccagcaagtccaaggtgggggcctggggcgactacgacgacagcgccttcatggagccgcgctaccacgtccggggcgaggacctggacaagctccaccgcgcggcctggtgggggaaggtgccccggaaggacctgatcgtgatgctgcgcgacaccgacgtcaacaagcaggacaagcagaagcggaccgccctccacctggcctccgcgaacggcaacagcgaggtggtgaagctgctcctggaccgccggtgccagctgaacgtcctcgacaacaagaagcgcaccgccctgatcaaggccgtgcagtgccaggaggacgagtgcgccctgatgctcctggagcacgggacggaccccaacatccccgacgagtacggcaacaccaccctgcactacgccatctacaacgaggacaagctcatggcgaaggccctgctgctctacggcgccgacatcgagtccaagaacaagcacgggctgaccccgctgctcctgggcgtgcacgagcagaagcagcaggtcgtgaagttcctgatcaagaagaaggccaacctcaacgccctggaccggtacgggcgcacggcgctgatcctcgccgtgtgctgcggcagcgccagcatcgtctccctgctgctcgagcagaacatcgacgtgagctcccaggacctgagcgggcagaccgcccgggagtacgccgtgtccagccaccaccacgtcatctgccagctgctctccgactacaaggagaagcagatgctgaagatcagctccgagaacagcaaccccgagcaggacctgaagctcacctccgaggaggagagccagcgcttcaagggctccgagaacagccagcccgagaagatgtcccaggagcccgagatcaacaaggacggcgaccgggaggtggaggaggagatgaagaagcacgagagcaacaacgtggggctgctggagaacctcaccaacggcgtcacggcggggaacggcgacaacgggctgatcccgcagcgcaagtcccgcacccccgagaaccagcagttccccgacaacgagagcgaggagtaccaccggatctgcgagctgctctccgactacaaggagaagcagatgcccaagtacagcagcgagaactccaacccggagcaggacctgaagctgaccagcgaggaggagtcccagcgcctcaagggcagcgagaacggccagcccgagaagcggtcccaggagcccgagatcaacaaggacggggaccgcgagctggagaacttcatggccatcgaggagatgaagaagcaccggagcacccacgtgggcttccccgagaacctgacgaacggggccaccgccggcaacggggacgacggcctgatcccgccccgcaagtcccggacccccgagagccagcagttccccgacaccgagaacgaggagtaccactccgacgagcagaacgacacgcagaagcagttctgcgaggagcagaacaccggcatcctccacgacgagatcctgatccacgaggagaagcagatcgaggtcgtggagaagatgaacagcgagctgtccctcagctgcaagaaggagaaggacatcctgcacgagaactccaccctgcgcgaggagatcgccatgctccggctggagctggacaccatgaagcaccagagccagctccgcgagaagaagtacctggaggacatcgagtccgtgaagaagcggaacgacaacctgctcaaggcgctgcagctgaacgagctcacgatggacgacgacaccgccgtcctggtgatcgacaacgggagcggcatgtgcaaggccgggttcgccggcgacgacgcgccgcgcgccgtgttcccctccatcgtcggccggccccgccagcaggggatgatgggcgggatgcaccagaaggagagctacgtgggcaaggaggcccagagcaagcgggggatcctgaccctcaagtaccccatggagcacggcatcatcaccaactgggacgacatggagaagatctggcaccacacgttctacaacgagctgcgcgtggccccggaggagcaccccgtcctgctcaccgaggccaccctgaaccccaaggcgaaccgggagaagatgacccagatcatgttcgagacgttcaacaccccggccatgtacgtggccatccaggccgtgctgtccctctacaccagcggccgcaccacggggatcgtcatggactccggcgacggggtgacccacaccgtgcccatctacgagggcaacgccctgccccacgcgaccctgcggctcgacctggccgggcgcgagctgcccgactacctcatgaagatcctgaccgagcacggctaccgcttcacgaccatggccgagcgggagatcgtccgcgacatcaaggagaagctgtgctacgtggccctcgacttcgagcaggagatggccaccgtggcgagctccagctccctggagaagtcctacgagctgccggacggccaggtcatcaccatcgggaacgagcggttccgctgccccgaggccctcttccagccctgcttcctgggcatggagagctgcgggatccacgagacgaccttcaacagcatcatgaagtccgacgtggacatccggaaggacctgtacaccaacaccgtgctcagcggcgggacgaccatgtaccccggcatggcccaccgcatgcagaaggagatcgccgcgctggccccgtccatgatgaagatccggatcatcgccccgcccaagcgcaagtacagcgtctgggtgggcgggtccatcctggccagcctctccaccttccagcagatgtggatcagcaagcaggagtacgacgagtccggccccagcatcgtgcaccggaagtgcctgtga

SEQ ID NO: 3166 - RNA, 3228 nt, synthetic construct
  misc_feature 1..3228: note = derived and/or modified sequence opt2 fromPOTEF__Homo_sapiens__CCDS46409.1
  source 1..3228: mol_type = other RNA
atggtcgtcgaggtcgactccatgcccgccgcctcctccgtcaagaagcccttcggcctccgctccaagatgggcaagtggtgctgccgctgcttcccctgctgccgcgagtccggcaagtccaacgtcggcacctccggcgaccacgacgactccgccatgaagaccctccgctccaagatgggcaagtggtgccgccactgcttcccctgctgccgcggctccggcaagtccaacgtcggcgcctccggcgaccacgacgactccgccatgaagaccctccgcaacaagatgggcaagtggtgctgccactgcttcccctgctgccgcggctcctccaagtccaaggtcggcgcctggggcgactacgacgactccgccttcatggagccccgctaccacgtccgcggcgaggacctcgacaagctccaccgcgccgcctggtggggcaaggtcccccgcaaggacctcatcgtcatgctccgcgacaccgacgtcaacaagcaggacaagcagaagcgcaccgccctccacctcgcctccgccaacggcaactccgaggtcgtcaagctcctcctcgaccgccgctgccagctcaacgtcctcgacaacaagaagcgcaccgccctcatcaaggccgtccagtgccaggaggacgagtgcgccctcatgctcctcgagcacggcaccgaccccaacatccccgacgagtacggcaacaccaccctccactacgccatctacaacgaggacaagctcatggccaaggccctcctcctctacggcgccgacatcgagtccaagaacaagcacggcctcacccccctcctcctcggcgtccacgagcagaagcagcaggtcgtcaagttcctcatcaagaagaaggccaacctcaacgccctcgaccgctacggccgcaccgccctcatcctcgccgtctgctgcggctccgcctccatcgtctccctcctcctcgagcagaacatcgacgtctcctcccaggacctctccggccagaccgcccgcgagtacgccgtctcctcccaccaccacgtcatctgccagctcctctccgactacaaggagaagcagatgctcaagatctcctccgagaactccaaccccgagcaggacctcaagctcacctccgaggaggagtcccagcgcttcaagggctccgagaactcccagcccgagaagatgtcccaggagcccgagatcaacaaggacggcgaccgcgaggtcgaggaggagatgaagaagcacgagtccaacaacgtcggcctcctcgagaacctcaccaacggcgtcaccgccggcaacggcgacaacggcctcatcccccagcgcaagtcccgcacccccgagaaccagcagttccccgacaacgagtccgaggagtaccaccgcatctgcgagctcctctccgactacaaggagaagcagatgcccaagtactcctccgagaactccaaccccgagcaggacctcaagctcacctccgaggaggagtcccagcgcctcaagggctccgagaacggccagcccgagaagcgctcccaggagcccgagatcaacaaggacggcgaccgcgagctcgagaacttcatggccatcgaggagatgaagaagcaccgctccacccacgtcggcttccccgagaacctcaccaacggcgccaccgccggcaacggcgacgacggcctcatccccccccgcaagtcccgcacccccgagtcccagcagttccccgacaccgagaacgaggagtaccactccgacgagcagaacgacacccagaagcagttctgcgaggagcagaacaccggcatcctccacgacgagatcctcatccacgaggagaagcagatcgaggtcgtcgagaagatgaactccgagctctccctctcctgcaagaaggagaaggacatcctccacgagaactccaccctccgcgaggagatcgccatgctccgcctcgagctcgacaccatgaagcaccagtcccagctccgcgagaagaagtacctcgaggacatcgagtccgtcaagaagcgcaacgacaacctcctcaaggccctccagctcaacgagctcaccatggacgacgacaccgccgtcctcgtcatcgacaacggctccggcatgtgcaaggccggcttcgccggcgacgacgccccccgcgccgtcttcccctccatcgtcggccgcccccgccagcagggcatgatgggcggcatgcaccagaaggagtcctacgtcggcaaggaggcccagtccaagcgcggcatcctcaccctcaagtaccccatggagcacggcatcatcaccaactgggacgacatggagaagatctggcaccacaccttctacaacgagctccgcgtcgcccccgaggagcaccccgtcctcctcaccgaggccaccctcaaccccaaggccaaccgcgagaagatgacccagatcatgttcgagaccttcaacacccccgccatgtacgtcgccatccaggccgtcctctccctctacacctccggccgcaccaccggcatcgtcatggactccggcgacggcgtcacccacaccgtccccatctacgagggcaacgccctcccccacgccaccctccgcctcgacctcgccggccgcgagctccccgactacctcatgaagatcctcaccgagcacggctaccgcttcaccaccatggccgagcgcgagatcgtccgcgacatcaaggagaagctctgctacgtcgccctcgacttcgagcaggagatggccaccgtcgcctcctcctcctccctcgagaagtcctacgagctccccgacggccaggtcatcaccatcggcaacgagcgcttccgctgccccgaggccctcttccagccctgcttcctcggcatggagtcctgcggcatccacgagaccaccttcaactccatcatgaagtccgacgtcgacatccgcaaggacctctacaccaacaccgtcctctccggcggcaccaccatgtaccccggcatggcccaccgcatgcagaaggagatcgccgccctcgccccctccatgatgaagatccgcatcatcgccccccccaagcgcaagtactccgtctgggtcggcggctccatcctcgcctccctctccaccttccagcagatgtggatctccaagcaggagtacgacgagtccggcccctccatcgtccaccgcaagtgcctctga

SEQ ID NO: 3167 - RNA, 3228 nt, synthetic construct
  misc_feature 1..3228: note = derived and/or modified sequence opt3 fromPOTEF__Homo_sapiens__CCDS46409.1
  source 1..3228: mol_type = other RNA
atggtggtcgaggttgacagcatgcccgccgcttcctctgtgaagaaacctttcggcctgagatcaaagatggggaaatggtgctgtaggtgctttccatgttgccgggaaagtggaaagagcaacgtaggtacctccggcgatcacgacgattctgcaatgaaaacactccgctcgaagatggggaagtggtgtcgacattgcttcccgtgttgccgtggatcaggcaaaagcaatgtgggtgccagtggggaccacgatgactccgcgatgaagactcttagaaacaaaatgggaaagtggtgttgccattgttttccctgctgcaggggctctagcaaatccaaggtcggcgcttggggagattacgacgattcagccttcatggagcctcggtatcacgtgcgcggggaagacctggataagttgcatagagcagcctggtggggtaaagttccaaggaaggacttaatcgtgatgctgcgggatacggacgtcaataaacaggacaagcaaaaacgcaccgctctacacctcgcaagtgccaacggcaatagcgaggtggtaaagctgcttctggatcgaagatgtcagttgaacgttctcgacaataaaaagaggacagctctgattaaggccgtgcagtgccaggaagatgagtgtgcgctgatgctcttagagcacgggactgaccccaacatacctgatgaatacggaaataccacactgcattatgcaatctacaacgaggacaaacttatggccaaggctttgctgctatatggcgccgatattgaatctaaaaataagcacggtctcaccccactgcttctgggggtccatgagcaaaaacaacaggtggtgaagtttttgatcaagaaaaaggcaaacctcaatgctctggaccggtacggacgtactgccttaattctggcggtctgctgtggctccgcctcaatcgttagcctccttctggagcagaacatagatgtgagttctcaggacttgtccggccagacagcacgcgaatatgctgtaagctcgcaccaccatgtgatctgccagctactgtctgattacaaagagaagcagatgctcaaaatttcctcagaaaatagtaaccccgagcaagacctgaaacttaccagcgaagaggagtcccagagattcaaggggtctgaaaacagccagcctgagaagatgtcacaagaaccagagatcaataaggacggagatagggaagtcgaggaggaaatgaaaaagcacgagagtaacaatgtgggtctgttggaaaacctcacgaatggcgttactgccgggaacggagacaatggcctgattccgcagcggaaatcccgaacccccgagaaccagcagtttcctgataatgaaagcgaggagtaccatcgcatctgtgaattactgtctgactataaggagaagcaaatgccaaaatactcaagtgaaaacagcaatcccgagcaggatctaaagctcacatccgaggaagagtctcagagactgaaaggttcggaaaacgggcagcctgagaagaggagccaagaaccagagataaataaagacggcgatcgggagcttgaaaacttcatggctattgaggaaatgaagaaacaccgctccactcatgtgggatttcccgagaatttgaccaacggcgccacagcagggaacggagacgatggtctgatcccgcctagaaagtcaaggacccccgaaagtcagcagttcccagacacggagaatgaggaatatcactctgatgagcagaacgacactcaaaagcagttttgcgaggaacagaatacaggcattctccacgatgaaatcctgatccatgaggagaaacagattgaagtcgtggagaagatgaacagcgaactttccctgtcatgtaaaaaggagaaagacatattgcacgagaatagcaccctccgtgaagagatcgccatgctgcggttagaactggacactatgaagcatcaatctcagctacgagagaagaaatacctcgaagatattgagtccgtaaagaaaagaaacgacaatctgcttaaggctttgcagctgaacgagctcacaatggatgacgataccgcggttctggtgatcgacaatgggagtggaatgtgcaaagcaggcttcgccggtgatgacgctcctagggccgtctttcccagcatagtggggcgcccacggcaacagggcatgatgggaggcatgcaccagaaggaatcttatgtcgggaaggaggcacagtccaaaagaggaattttaacgctgaagtaccccatggaacacggtatcatcaccaactgggatgacatggagaaaatttggcatcacacattctataatgaacttagggtggcccctgaggagcatccagttttgctcactgaagctaccctgaacccgaaggccaatcgcgagaaaatgacacaaatcatgttcgaaacttttaacacccccgcaatgtacgtggcgattcaggctgtactatcactgtacacaagtggccgaaccactgggatagtcatggatagcggagacggcgtgacgcacacagttcctatctatgagggtaatgccctcccacatgcaaccctgcggcttgatttggccgggcgtgaactgcccgactacttaatgaagattctcactgagcacggctatagattcaccacaatggctgagagggaaatcgtgcgcgacatcaaggagaaactgtgttacgtcgcccttgattttgaacaggagatggcaaccgtggcttcgtcctctagcctggagaagtcatatgaattgcctgacggacaggtaattactataggcaacgagcggttcagatgcccagaagccctctttcaaccctgcttcctggggatggagagttgtggaatccacgaaacaacgtttaactccattatgaaatctgatgtggacatcaggaaggatctatacaccaatactgttctgagcggcggtacaaccatgtatccggggatggcgcatcgaatgcagaaagagattgccgctctcgcaccttccatgatgaagatccgcataatcgccccacccaaacggaagtactcagtctgggtgggaggcagcattctggctagtctttctacattccagcagatgtggatctccaagcaagagtacgacgaaagcggtccttcgattgtgcacagaaaatgcttgtga

SEQ ID NO: 3168 - RNA, 3228 nt, synthetic construct
  misc_feature 1..3228: note = derived and/or modified sequence opt4 fromPOTEF__Homo_sapiens__CCDS46409.1
  source 1..3228: mol_type = other RNA
atggtggtggaggtggacagcatgcccgccgccagcagcgtgaagaagcccttcggcctgagaagcaagatgggcaagtggtgctgcagatgcttcccctgctgcagagagagcggcaagagcaacgtgggcaccagcggcgaccacgacgacagcgccatgaagaccctgagaagcaagatgggcaagtggtgcagacactgcttcccctgctgcagaggcagcggcaagagcaacgtgggcgccagcggcgaccacgacgacagcgccatgaagaccctgagaaacaagatgggcaagtggtgctgccactgcttcccctgctgcagaggcagcagcaagagcaaggtgggcgcctggggcgactacgacgacagcgccttcatggagcccagataccacgtgagaggcgaggacctggacaagctgcacagagccgcctggtggggcaaggtgcccagaaaggacctgatcgtgatgctgagagacaccgacgtgaacaagcaggacaagcagaagagaaccgccctgcacctggccagcgccaacggcaacagcgaggtggtgaagctgctgctggacagaagatgccagctgaacgtgctggacaacaagaagagaaccgccctgatcaaggccgtgcagtgccaggaggacgagtgcgccctgatgctgctggagcacggcaccgaccccaacatccccgacgagtacggcaacaccaccctgcactacgccatctacaacgaggacaagctgatggccaaggccctgctgctgtacggcgccgacatcgagagcaagaacaagcacggcctgacccccctgctgctgggcgtgcacgagcagaagcagcaggtggtgaagttcctgatcaagaagaaggccaacctgaacgccctggacagatacggcagaaccgccctgatcctggccgtgtgctgcggcagcgccagcatcgtgagcctgctgctggagcagaacatcgacgtgagcagccaggacctgagcggccagaccgccagagagtacgccgtgagcagccaccaccacgtgatctgccagctgctgagcgactacaaggagaagcagatgctgaagatcagcagcgagaacagcaaccccgagcaggacctgaagctgaccagcgaggaggagagccagagattcaagggcagcgagaacagccagcccgagaagatgagccaggagcccgagatcaacaaggacggcgacagagaggtggaggaggagatgaagaagcacgagagcaacaacgtgggcctgctggagaacctgaccaacggcgtgaccgccggcaacggcgacaacggcctgatcccccagagaaagagcagaacccccgagaaccagcagttccccgacaacgagagcgaggagtaccacagaatctgcgagctgctgagcgactacaaggagaagcagatgcccaagtacagcagcgagaacagcaaccccgagcaggacctgaagctgaccagcgaggaggagagccagagactgaagggcagcgagaacggccagcccgagaagagaagccaggagcccgagatcaacaaggacggcgacagagagctggagaacttcatggccatcgaggagatgaagaagcacagaagcacccacgtgggcttccccgagaacctgaccaacggcgccaccgccggcaacggcgacgacggcctgatcccccccagaaagagcagaacccccgagagccagcagttccccgacaccgagaacgaggagtaccacagcgacgagcagaacgacacccagaagcagttctgcgaggagcagaacaccggcatcctgcacgacgagatcctgatccacgaggagaagcagatcgaggtggtggagaagatgaacagcgagctgagcctgagctgcaagaaggagaaggacatcctgcacgagaacagcaccctgagagaggagatcgccatgctgagactggagctggacaccatgaagcaccagagccagctgagagagaagaagtacctggaggacatcgagagcgtgaagaagagaaacgacaacctgctgaaggccctgcagctgaacgagctgaccatggacgacgacaccgccgtgctggtgatcgacaacggcagcggcatgtgcaaggccggcttcgccggcgacgacgcccccagagccgtgttccccagcatcgtgggcagacccagacagcagggcatgatgggcggcatgcaccagaaggagagctacgtgggcaaggaggcccagagcaagagaggcatcctgaccctgaagtaccccatggagcacggcatcatcaccaactgggacgacatggagaagatctggcaccacaccttctacaacgagctgagagtggcccccgaggagcaccccgtgctgctgaccgaggccaccctgaaccccaaggccaacagagagaagatgacccagatcatgttcgagaccttcaacacccccgccatgtacgtggccatccaggccgtgctgagcctgtacaccagcggcagaaccaccggcatcgtgatggacagcggcgacggcgtgacccacaccgtgcccatctacgagggcaacgccctgccccacgccaccctgagactggacctggccggcagagagctgcccgactacctgatgaagatcctgaccgagcacggctacagattcaccaccatggccgagagagagatcgtgagagacatcaaggagaagctgtgctacgtggccctggacttcgagcaggagatggccaccgtggccagcagcagcagcctggagaagagctacgagctgcccgacggccaggtgatcaccatcggcaacgagagattcagatgccccgaggccctgttccagccctgcttcctgggcatggagagctgcggcatccacgagaccaccttcaacagcatcatgaagagcgacgtggacatcagaaaggacctgtacaccaacaccgtgctgagcggcggcaccaccatgtaccccggcatggcccacagaatgcagaaggagatcgccgccctggcccccagcatgatgaagatcagaatcatcgccccccccaagagaaagtacagcgtgtgggtgggcggcagcatcctggccagcctgagcaccttccagcagatgtggatcagcaagcaggagtacgacgagagcggccccagcatcgtgcacagaaagtgcctgtga

SEQ ID NO: 3169 - RNA, 3228 nt, synthetic construct
  misc_feature 1..3228: note = derived and/or modified sequence opt5 fromPOTEF__Homo_sapiens__CCDS46409.1
  source 1..3228: mol_type = other RNA
atggtggtcgaggttgacagcatgcccgccgcttcctctgtgaagaaacctttcggcctgagaagcaagatggggaaatggtgctgtcggtgctttccgtgttgccgcgaatccggaaagtctaacgtgggcaccagcggggatcacgacgattccgccatgaaaacactcagatctaagatgggaaagtggtgtcggcattgcttcccctgttgccgcggcagcgggaaatccaatgtcggagcgagcggcgaccacgatgactctgctatgaagacgctgagaaacaaaatgggcaagtggtgttgccattgttttccttgctgccgggggtccagcaaatctaaggtgggagcctggggcgattacgacgattccgccttcatggagccccgctatcacgttagaggggaagaccttgataagctgcatcgggctgcctggtggggaaaagtgcctcgcaaggacctcatcgtcatgctgagagataccgacgtgaataaacaggacaagcaaaaacggacagcccttcacctggctagcgcgaacggcaattctgaggttgtgaagctcctgctggatcgcagatgtcagctcaacgtcctggacaataaaaagcggaccgcccttattaaggctgtgcagtgccaggaagatgagtgtgccctgatgctcctggagcacgggacagaccccaacatccctgatgaatacggaaataccacacttcattatgctatttacaacgaggacaaactgatggccaaggcgctcctgctgtatggcgccgatatcgaatccaaaaataagcacggcctcaccccgctgcttctgggggtgcatgagcaaaaacagcaggtcgttaagtttctcattaagaaaaaggctaacctgaatgcccttgaccgctacggaagaacggctctgatcctcgccgtgtgctgtggcagcgcctccatcgtgtctctgctgctcgagcagaacattgatgtcagctcccaagacctgagcgggcagaccgctcgggaatatgcggtgtcttcccaccaccatgttatctgccagcttctgagcgattacaaagagaagcagatgctcaaaatttctagcgaaaattccaaccccgagcaagacctgaaacttacatctgaagaggagagccagagattcaagggatccgaaaacagccagcctgagaagatgtctcaagaacccgagatcaataaggacggcgatcgcgaagtggaggaggaaatgaaaaagcacgagtccaacaatgtcgggctgctcgaaaacctgaccaatggagtgacagccggcaacggcgacaatgggctgattcctcagcggaaaagcagaacccccgagaaccagcagtttccggataatgaatctgaggagtaccatcgcatctgtgaactcctgtccgactataaggagaagcaaatgcctaaatacagctccgaaaactctaatcccgagcaggatcttaagctgacgagcgaggaagagtcccagcggctcaaaggatctgaaaacggccagcctgagaagagaagccaagaacccgagattaataaagacggggatcgcgagctggaaaacttcatggctatcgaggaaatgaagaaacaccggtccacacatgttggatttcccgagaatctgaccaacggcgccacagccgggaacggcgacgatggacttatccctccgagaaagagccgcacccccgaatctcagcagttccctgacaccgagaatgaggaatatcactccgatgagcagaacgacacacaaaagcagttttgcgaggaacagaatacgggcattctccacgatgaaatcctgattcatgaggagaaacagatcgaagtggtcgagaagatgaacagcgaactgtctctctcctgtaaaaaggagaaagacattctgcacgagaatagcacccttcgggaagagatcgctatgctgagactcgaactggacacaatgaagcatcaatctcagctgcgcgagaagaaataccttgaagatatcgagagcgtgaagaaacggaacgacaatctcctgaaggccctgcagctcaacgagctgaccatggatgacgatacagcggtccttgtgattgacaatgggtccggaatgtgcaaagctggcttcgccggggatgacgcccccagagctgtttttcctagcatcgtgggacggccccgccaacagggcatgatgggcgggatgcaccagaaggaatcttatgtcggaaaggaggcccagtccaaaagaggcattctgaccctcaagtacccgatggaacacgggatcattacgaactgggatgacatggagaaaatctggcatcacacattctataatgaactgcgggtggctcctgaggagcatcccgttctgcttaccgaagccaccctcaaccctaaggcgaatagagagaaaatgacacaaatcatgttcgaaacctttaacacacccgccatgtacgtggctattcaggccgtcctgagcctgtacacgtccggacgcaccacaggcatcgtgatggattctggggacggagtgacccacacagttcctatttatgagggcaatgctctcccccatgccaccctgcggcttgatctggcggggagagaactcccggactacctgatgaagatcctgacggagcacggctatcgcttcaccacaatggccgagagagaaattgtccgggacatcaaggagaaactttgttacgtggctctcgattttgaacaggagatggccaccgtggctagctcctctagcctggagaagtcctatgaactgcctgacggacaggtcattacaatcggcaacgagcgcttcagatgccccgaagccctctttcaaccctgcttcctggggatggagtcttgtggaatccacgaaaccacgtttaacagcattatgaaatccgatgtggacatccggaaggatctttacacaaataccgttctgagcggcgggacaaccatgtatcctggaatggcccatcgcatgcagaaagagattgctgcgctcgccccgtctatgatgaagatcagaattatcgctccccctaaacggaagtactccgtgtgggtcggcgggagcatcctggcctctctgtccaccttccagcagatgtggattagcaagcaagagtacgacgaatctggcccctccatcgtgcaccgcaaatgcctttga

SEQ ID NO: 3170 - protein, 584 aa, synthetic construct
  REGION 1..584: note = POTE__Homo_sapiens__Q86YR6
MVAEVCSMPTASTVKKPFDLRSKMGKWCHHRFPCCRGSGKSNMGTSGDHDDSFMKMLRSKMGKCCRHCFPCCRGSGTSNVGTSGDHENSFMKMLRSKMGKWCCHCFPCCRGSGKSNVGAWGDYDHSAFMEPRYHIRREDLDKLHRAAWWGKVPRKDLIVMLRDTDMNKRDKEKRTALHLASANGNSEVVQLLLDRRCQLNVLDNKKRTALIKAIQCQEDECVLMLLEHGADRNIPDEYGNTALHYAIYNEDKLMAKALLLYGADIESKNKCGLTPLLLGVHEQKQQVVKFLIKKKANLNVLDRYGRTALILAVCCGSASIVNLLLEQNVDVSSQDLSGQTAREYAVSSHHHVICELLSDYKEKQMLKISSENSNPEQDLKLTSEEESQRLKVSENSQPEKMSQEPEINKDCDREVEEEIKKHGSNPVGLPENLTNGASAGNGDDGLIPQRRSRKPENQQFPDTENEEYHSDEQNDTRKQLSEEQNTGISQDEILTNKQKQIEVAEQKMNSELSLSHKKEEDLLRENSVLQEEIAMLRLELDETKHQNQLRENKILEEIESVKEKTDKLLRAMQLNEEALTKTNI

SEQ ID NO: 3171 - RNA, 1755 nt, synthetic construct
  misc_feature 1..1755: note = POTE__Homo_sapiens__CCDS13562.1
  source 1..1755: mol_type = other RNA
atggtggctgaggtttgttcaatgcccactgcctctactgtgaagaagccatttgatctcaggagcaagatgggcaagtggtgccaccaccgcttcccctgctgcagggggagcggcaagagcaacatgggcacttctggagaccacgacgactcctttatgaagatgctcaggagcaagatgggcaagtgttgccgccactgcttcccctgctgcagggggagcggcacgagcaacgtgggcacttctggagaccatgaaaactcctttatgaagatgctcaggagcaagatgggcaagtggtgctgtcactgcttcccctgctgcagggggagcggcaagagcaacgtgggcgcttggggagactacgaccacagcgccttcatggagccgaggtaccacatccgtcgagaagatctggacaagctccacagagctgcctggtggggtaaagtccccagaaaggatctcatcgtcatgctcagggacactgacatgaacaagagggacaaggaaaagaggactgctctacatttggcctctgccaatggaaattcagaagtagtacaactcctgctggacagacgatgtcaacttaatgtccttgacaacaaaaaaaggacagctctgataaaggccatacaatgccaggaagatgaatgtgtgttaatgttgctggaacatggcgctgatcgaaatattccagatgagtatggaaataccgctctacactatgctatctacaatgaagataaattaatggccaaagcactgctcttatatggtgctgatattgaatcaaaaaacaagtgtggcctcacaccacttttgcttggcgtacatgaacaaaaacagcaagtggtgaaatttttaatcaagaaaaaagctaatttaaatgtacttgatagatatggaagaactgccctcatacttgctgtatgttgtggatcagcaagtatagtcaatcttctacttgagcaaaatgttgatgtatcttctcaagatctatctggacagacggccagagagtatgctgtttctagtcatcatcatgtaatttgtgaattactttctgactataaagaaaaacagatgctaaaaatctcttctgaaaacagcaatccagaacaagacttaaagctgacatcagaggaagagtcacaaaggcttaaagtcagtgaaaatagccagccagagaaaatgtctcaagaaccagaaataaataaggactgtgatagagaggttgaagaagaaataaagaagcatggaagtaatcctgtgggattaccagaaaacctgactaatggtgccagtgctggcaatggtgatgatggattaattccacaaaggaggagcagaaaacctgaaaatcagcaatttcctgacactgagaatgaagagtatcacagtgatgaacaaaatgatacccggaaacaactttctgaagaacagaacactggaatatcacaagatgagattctgactaataaacaaaagcagatagaagtggctgaacagaaaatgaattctgagctttctcttagtcataagaaagaagaagatctcttgcgtgaaaacagcgtgttgcaggaagaaattgccatgctaagactggaactagatgaaacaaaacatcagaaccagctaagggaaaataaaattttggaggaaattgaaagtgtgaaagaaaagactgataaacttctaagggctatgcaattgaatgaagaagcattaacgaaaaccaatatttaa

SEQ ID NO: 3172 - RNA, 1755 nt, synthetic construct
  misc_feature 1..1755: note = derived and/or modified sequence opt1 fromPOTE__Homo_sapiens__CCDS13562.1
  source 1..1755: mol_type = other RNA
atggtggccgaggtctgcagcatgcccaccgcctccaccgtgaagaagccgttcgacctgcgcagcaagatgggcaagtggtgccaccaccggttcccctgctgccgcgggtccggcaagagcaacatggggacgtccggcgaccacgacgacagcttcatgaagatgctccggtccaagatggggaagtgctgccgccactgcttcccctgctgccggggcagcggcacctccaacgtggggaccagcggcgaccacgagaactccttcatgaagatgctgcgcagcaagatggggaagtggtgctgccactgcttcccctgctgccggggctccggcaagagcaacgtcggggcgtggggcgactacgaccactccgccttcatggagccgcgctaccacatccggcgcgaggacctggacaagctccaccgggccgcctggtgggggaaggtgccccgcaaggacctgatcgtgatgctgcgggacaccgacatgaacaagcgcgacaaggagaagcggacggccctccacctggcgagcgccaacggcaactccgaggtcgtgcagctgctcctggaccgccggtgccagctgaacgtgctcgacaacaagaagcgcaccgccctgatcaaggccatccagtgccaggaggacgagtgcgtcctgatgctcctggagcacggggcggaccggaacatccccgacgagtacggcaacaccgccctgcactacgccatctacaacgaggacaagctcatggccaaggccctgctgctctacggcgcggacatcgagagcaagaacaagtgcgggctgacgcccctgctcctgggcgtgcacgagcagaagcagcaggtcgtgaagttcctgatcaagaagaaggccaacctcaacgtgctggaccgctacgggcggaccgccctgatcctcgccgtgtgctgcggctccgccagcatcgtcaacctgctgctcgagcagaacgtggacgtgagctcccaggacctgagcgggcagaccgcgcgcgagtacgccgtctccagccaccaccacgtgatctgcgagctgctctccgactacaaggagaagcagatgctgaagatcagctccgagaacagcaacccggagcaggacctgaagctcacctccgaggaggagagccagcgcctgaaggtgtccgagaacagccagcccgagaagatgtcccaggagcccgagatcaacaaggactgcgaccgggaggtcgaggaggagatcaagaagcacggcagcaaccccgtgggcctgccggagaacctcaccaacggggcctccgccggcaacggggacgacggcctgatcccccagcgccggagccgcaagcccgagaaccagcagttccccgacacggagaacgaggagtaccactccgacgagcagaacgacacccggaagcagctgagcgaggagcagaacaccgggatctcccaggacgagatcctcaccaacaagcagaagcagatcgaggtggccgagcagaagatgaacagcgagctgagcctgtcccacaagaaggaggaggacctcctgcgcgagaacagcgtcctgcaggaggagatcgcgatgctgcggctcgagctggacgagacgaagcaccagaaccagctgcgcgagaacaagatcctcgaggagatcgagtccgtgaaggagaagaccgacaagctgctgcgggccatgcagctcaacgaggaggccctgaccaagaccaacatctga

SEQ ID NO: 3173 - RNA, 1755 nt, synthetic construct
  misc_feature 1..1755: note = derived and/or modified sequence opt2 fromPOTE__Homo_sapiens__CCDS13562.1
  source 1..1755: mol_type = other RNA
atggtcgccgaggtctgctccatgcccaccgcctccaccgtcaagaagcccttcgacctccgctccaagatgggcaagtggtgccaccaccgcttcccctgctgccgcggctccggcaagtccaacatgggcacctccggcgaccacgacgactccttcatgaagatgctccgctccaagatgggcaagtgctgccgccactgcttcccctgctgccgcggctccggcacctccaacgtcggcacctccggcgaccacgagaactccttcatgaagatgctccgctccaagatgggcaagtggtgctgccactgcttcccctgctgccgcggctccggcaagtccaacgtcggcgcctggggcgactacgaccactccgccttcatggagccccgctaccacatccgccgcgaggacctcgacaagctccaccgcgccgcctggtggggcaaggtcccccgcaaggacctcatcgtcatgctccgcgacaccgacatgaacaagcgcgacaaggagaagcgcaccgccctccacctcgcctccgccaacggcaactccgaggtcgtccagctcctcctcgaccgccgctgccagctcaacgtcctcgacaacaagaagcgcaccgccctcatcaaggccatccagtgccaggaggacgagtgcgtcctcatgctcctcgagcacggcgccgaccgcaacatccccgacgagtacggcaacaccgccctccactacgccatctacaacgaggacaagctcatggccaaggccctcctcctctacggcgccgacatcgagtccaagaacaagtgcggcctcacccccctcctcctcggcgtccacgagcagaagcagcaggtcgtcaagttcctcatcaagaagaaggccaacctcaacgtcctcgaccgctacggccgcaccgccctcatcctcgccgtctgctgcggctccgcctccatcgtcaacctcctcctcgagcagaacgtcgacgtctcctcccaggacctctccggccagaccgcccgcgagtacgccgtctcctcccaccaccacgtcatctgcgagctcctctccgactacaaggagaagcagatgctcaagatctcctccgagaactccaaccccgagcaggacctcaagctcacctccgaggaggagtcccagcgcctcaaggtctccgagaactcccagcccgagaagatgtcccaggagcccgagatcaacaaggactgcgaccgcgaggtcgaggaggagatcaagaagcacggctccaaccccgtcggcctccccgagaacctcaccaacggcgcctccgccggcaacggcgacgacggcctcatcccccagcgccgctcccgcaagcccgagaaccagcagttccccgacaccgagaacgaggagtaccactccgacgagcagaacgacacccgcaagcagctctccgaggagcagaacaccggcatctcccaggacgagatcctcaccaacaagcagaagcagatcgaggtcgccgagcagaagatgaactccgagctctccctctcccacaagaaggaggaggacctcctccgcgagaactccgtcctccaggaggagatcgccatgctccgcctcgagctcgacgagaccaagcaccagaaccagctccgcgagaacaagatcctcgaggagatcgagtccgtcaaggagaagaccgacaagctcctccgcgccatgcagctcaacgaggaggccctcaccaagaccaacatctga

SEQ ID NO: 3174 - RNA, 1755 nt, synthetic construct
  misc_feature 1..1755: note = derived and/or modified sequence opt3 fromPOTE__Homo_sapiens__CCDS13562.1
  source 1..1755: mol_type = other RNA
atggtggccgaggtctgcagcatgcccaccgcttccacagttaagaaacctttcgacctgagatctaagatgggcaaatggtgtcaccataggtttccatgctgtcgggggtcaggaaagagtaacatgggtactagcggcgatcacgacgattccttcatgaaaatgctccgctctaagatggggaagtgctgtcgacattgctttccgtgttgccgtggatcgggcacgtcaaatgtgggtaccagcggggaccacgaaaacagtttcatgaaaatgcttagatccaagatgggaaaatggtgttgccattgttttccctgctgcaggggctctggcaagagcaatgtaggggcatggggagattacgaccactccgccttcatggagcctcggtatcacatccgcagagaagatctggacaaattgcatagggcggcttggtggggtaaggtgccacggaaggatttaattgtcatgctgcgcgacacagatatgaacaaacgagacaaggagaaaagaactgccctacacctcgcatcagccaatggcaacagtgaagtggttcagctgcttctggataggcggtgtcaattgaatgtgctcgacaacaagaaacgtaccgctctgataaaggcaatccagtgccaggaggacgagtgtgtcctgatgctcttagaacatggggccgatcgcaatattcccgacgagtacggaaacacagctctgcactatgccatctacaatgaagataaacttatggcgaaggcattgctgctatatggcgccgacattgagagcaagaacaaatgcggtctcacccctctgcttctgggggtgcacgagcagaagcaacaggtagttaaatttttgatcaagaaaaaggctaatctcaacgtgctggatagatacggaaggactgccttaatactggcagtctgttgcggctctgcttccatcgtgaatctccttctggaacagaacgtggacgtctcaagccaggatttgagtggccaaacagcccgggagtatgcggtttcttcccatcaccatgtgatttgtgaactactgagcgactacaaggagaaacagatgctcaagatctcgtctgaaaactccaatccagagcaggatctgaaacttacctcagaggaagagagtcagcgactgaaggtaagcgaaaactcccaacccgagaaaatgtctcaggaacctgagattaataaggactgcgatcgcgaggtggaagaggaaatcaagaaacacgggagcaacccagtcggattgccggagaatctcacgaacggtgcctcagcaggcaatggggacgacggactgataccccagagaaggagtcggaagcctgaaaaccaacagttcccagatactgagaatgaggaataccattccgacgagcagaacgatacccgcaaacagttaagcgaagaacaaaatacaggcatttctcaggacgagatcctgactaacaagcagaaacagattgaagtggctgagcaaaagatgaatagtgaactatcactcagccacaagaaagaggaagatctgcttagagagaactccgttttgcaggaggaaatcgccatgctgaggctcgagctggacgaaaccaagcaccagaatcagcttcgtgagaacaaaatcctggaagagattgagtctgtgaaggagaaaacagataagttgctccgggctatgcaactgaacgaggaagccttaaccaaaacgaatatatga

SEQ ID NO: 3175 - RNA, 1755 nt, synthetic construct
  misc_feature 1..1755: note = derived and/or modified sequence opt4 fromPOTE__Homo_sapiens__CCDS13562.1
  source 1..1755: mol_type = other RNA
atggtggccgaggtgtgcagcatgcccaccgccagcaccgtgaagaagcccttcgacctgagaagcaagatgggcaagtggtgccaccacagattcccctgctgcagaggcagcggcaagagcaacatgggcaccagcggcgaccacgacgacagcttcatgaagatgctgagaagcaagatgggcaagtgctgcagacactgcttcccctgctgcagaggcagcggcaccagcaacgtgggcaccagcggcgaccacgagaacagcttcatgaagatgctgagaagcaagatgggcaagtggtgctgccactgcttcccctgctgcagaggcagcggcaagagcaacgtgggcgcctggggcgactacgaccacagcgccttcatggagcccagataccacatcagaagagaggacctggacaagctgcacagagccgcctggtggggcaaggtgcccagaaaggacctgatcgtgatgctgagagacaccgacatgaacaagagagacaaggagaagagaaccgccctgcacctggccagcgccaacggcaacagcgaggtggtgcagctgctgctggacagaagatgccagctgaacgtgctggacaacaagaagagaaccgccctgatcaaggccatccagtgccaggaggacgagtgcgtgctgatgctgctggagcacggcgccgacagaaacatccccgacgagtacggcaacaccgccctgcactacgccatctacaacgaggacaagctgatggccaaggccctgctgctgtacggcgccgacatcgagagcaagaacaagtgcggcctgacccccctgctgctgggcgtgcacgagcagaagcagcaggtggtgaagttcctgatcaagaagaaggccaacctgaacgtgctggacagatacggcagaaccgccctgatcctggccgtgtgctgcggcagcgccagcatcgtgaacctgctgctggagcagaacgtggacgtgagcagccaggacctgagcggccagaccgccagagagtacgccgtgagcagccaccaccacgtgatctgcgagctgctgagcgactacaaggagaagcagatgctgaagatcagcagcgagaacagcaaccccgagcaggacctgaagctgaccagcgaggaggagagccagagactgaaggtgagcgagaacagccagcccgagaagatgagccaggagcccgagatcaacaaggactgcgacagagaggtggaggaggagatcaagaagcacggcagcaaccccgtgggcctgcccgagaacctgaccaacggcgccagcgccggcaacggcgacgacggcctgatcccccagagaagaagcagaaagcccgagaaccagcagttccccgacaccgagaacgaggagtaccacagcgacgagcagaacgacaccagaaagcagctgagcgaggagcagaacaccggcatcagccaggacgagatcctgaccaacaagcagaagcagatcgaggtggccgagcagaagatgaacagcgagctgagcctgagccacaagaaggaggaggacctgctgagagagaacagcgtgctgcaggaggagatcgccatgctgagactggagctggacgagaccaagcaccagaaccagctgagagagaacaagatcctggaggagatcgagagcgtgaaggagaagaccgacaagctgctgagagccatgcagctgaacgaggaggccctgaccaagaccaacatctga

SEQ ID NO: 3176 - RNA, 1755 nt, synthetic construct
  misc_feature 1..1755: note = derived and/or modified sequence opt5 fromPOTE__Homo_sapiens__CCDS13562.1
  source 1..1755: mol_type = other RNA
atggtggccgaggtctgcagcatgcccaccgcttccacagttaagaaacctttcgacctgagatctaagatgggcaaatggtgtcaccatcggtttccgtgctgtcgcgggagcggaaagtccaacatgggcacgtctggggatcacgacgatagcttcatgaaaatgctcagatccaagatgggaaagtgctgtcggcattgctttccctgttgccgcggctctgggaccagcaatgtgggaacatccggcgaccacgaaaacagcttcatgaaaatgctgagatctaagatgggcaaatggtgttgccattgttttccttgctgccgggggtccggaaagagcaatgtgggcgcctggggagattacgaccactctgcgttcatggagccccgctatcacatcagacgggaagatcttgacaaactgcatcgcgctgcctggtgggggaaggtccctagaaaggatctcattgtgatgctgcgggacaccgatatgaacaaacgcgacaaggagaaaagaacagcccttcacctggcttccgccaatggcaacagcgaagttgtgcagctcctgctggatcggcgctgtcaactcaatgtcctggacaacaagaaaagaaccgctcttatcaaggccattcagtgccaggaggacgagtgtgtgctgatgctcctggaacatggggcggatcggaatatccccgacgagtacggaaacacagcccttcactatgctatttacaatgaagataaactgatggccaaggctctcctgctgtatggcgccgacatcgagtctaagaacaaatgcggcctcacccctctgcttctgggggttcacgagcagaagcaacaggtggtcaaatttctcatcaagaaaaaggcgaatctgaacgtgcttgatagatacggacgcacggccctgattctcgctgtgtgttgcggctccgccagcatcgtcaatctgctgctcgaacagaacgttgacgtgtcctctcaggatctgagcgggcaaaccgctcgggagtatgccgtgtccagccatcaccatgtcatttgtgaacttctgtctgactacaaggagaaacagatgctcaagatctccagcgaaaactctaatccggagcaggatctgaaacttacaagcgaggaagagtcccagagactgaaggtgtctgaaaacagccaacccgagaaaatgtcccaggaacctgagattaataaggactgcgatcgcgaggttgaagaggaaatcaagaaacacggaagcaaccccgtgggcctccctgagaatctgaccaacggggcctctgctggaaatggcgacgacggcctgattccccagcggagatcccgcaagccggaaaaccaacagttccctgatacagagaatgaggaataccatagcgacgagcagaacgatacccggaaacagctctctgaagaacaaaatacggggatctcccaggacgagatcctgacaaacaagcagaaacagattgaagtcgcggagcaaaagatgaatagcgaactttccctgtctcacaagaaagaggaagatctcctgagagagaacagcgtgctgcaggaggaaatcgccatgcttcgcctcgagctggacgaaaccaagcaccagaatcagctgcgggagaacaaaattctcgaagagatcgagtccgttaaggagaaaacagataagctgcttagagctatgcaactgaacgaggaagccctcaccaaaaccaatatttga

SEQ ID NO: 3177 - protein, 509 aa, synthetic construct
  REGION 1..509: note = PRAME__Homo_sapiens__A0A024R1E6
MERRRLWGSIQSRYISMSVWTSPRRLVELAGQSLLKDEALAIAALELLPRELFPPLFMAAFDGRHSQTLKAMVQAWPFTCLPLGVLMKGQHLHLETFKAVLDGLDVLLAQEVRPRRWKLQVLDLRKNSHQDFWTVWSGNRASLYSFPEPEAAQPMTKKRKVDGLSTEAEQPFIPVEVLVDLFLKEGACDELFSYLIEKVKRKKNVLRLCCKKLKIFAMPMQDIKMILKMVQLDSIEDLEVTCTWKLPTLAKFSPYLGQMINLRRLLLSHIHASSYISPEKEEQYIAQFTSQFLSLQCLQALYVDSLFFLRGRLDQLLRHVMNPLETLSITNCRLSEGDVMHLSQSPSVSQLSVLSLSGVMLTDVSPEPLQALLERASATLQDLVFDECGITDDQLLALLPSLSHCSQLTTLSFYGNSISISALQSLLQHLIGLSNLTHVLYPVPLESYEDIHGTLHLERLAYLHARLRELLCELGRPSMVWLSANPCPHCGDRTFYDPEPILCPCFMPN

SEQ ID NO: 3178 - RNA, 1530 nt, synthetic construct
  misc_feature 1..1530: note = PRAME__Homo_sapiens__EAW59519
  source 1..1530: mol_type = other RNA
atggaacgaaggcgtttgtggggttccattcagagccgatacatcagcatgagtgtgtggacaagcccacggagacttgtggagctggcagggcagagcctgctgaaggatgaggccctggccattgccgccctggagttgctgcccagggagctcttcccgccactcttcatggcagcctttgacgggagacacagccagaccctgaaggcaatggtgcaggcctggcccttcacctgcctccctctgggagtgctgatgaagggacaacatcttcacctggagaccttcaaagctgtgcttgatggacttgatgtgctccttgcccaggaggttcgccccaggaggtggaaacttcaagtgctggatttacggaagaactctcatcaggacttctggactgtatggtctggaaacagggccagtctgtactcatttccagagccagaagcagctcagcccatgacaaagaagcgaaaagtagatggtttgagcacagaggcagagcagcccttcattccagtagaggtgctcgtagacctgttcctcaaggaaggtgcctgtgatgaattgttctcctacctcattgagaaagtgaagcgaaagaaaaatgtactacgcctgtgctgtaagaagctgaagatttttgcaatgcccatgcaggatatcaagatgatcctgaaaatggtgcagctggactctattgaagatttggaagtgacttgtacctggaagctacccaccttggcgaaattttctccttacctgggccagatgattaatctgcgtagactcctcctctcccacatccatgcatcttcctacatttccccggagaaggaagagcagtatatcgcccagttcacctctcagttcctcagtctgcagtgcctgcaggctctctatgtggactctttatttttccttagaggccgcctggatcagttgctcaggcacgtgatgaaccccttggaaaccctctcaataactaactgccggctttcggaaggggatgtgatgcatctgtcccagagtcccagcgtcagtcagctaagtgtcctgagtctaagtggggtcatgctgaccgatgtaagtcccgagcccctccaagctctgctggagagagcctctgccaccctccaggacctggtctttgatgagtgtgggatcacggatgatcagctccttgccctcctgccttccctgagccactgctcccagcttacaaccttaagcttctacgggaattccatctccatatctgccttgcagagtctcctgcagcacctcatcgggctgagcaatctgacccacgtgctgtatcctgtccccctggagagttatgaggacatccatggtaccctccacctggagaggcttgcctatctgcatgccaggctcagggagttgctgtgtgagttggggcggcccagcatggtctggcttagtgccaacccctgtcctcactgtggggacagaaccttctatgacccggagcccatcctgtgcccctgtttcatgcctaactag

SEQ ID NO: 3179 - RNA, 1530 nt, synthetic construct
  misc_feature 1..1530: note = derived and/or modified sequence opt1 fromPRAME__Homo_sapiens__EAW59519
  source 1..1530: mol_type = other RNA
atggagcgccggcgcctgtggggcagcatccagtcccggtacatcagcatgtccgtgtggaccagcccccgccggctcgtcgagctggccgggcagtccctgctcaaggacgaggccctggcgatcgccgccctggagctcctgccgcgcgagctgttcccgcccctcttcatggccgccttcgacggccggcacagccagaccctgaaggcgatggtgcaggcctggcccttcacgtgcctgcccctcggggtgctgatgaagggccagcacctccacctggagaccttcaaggccgtcctggacgggctggacgtgctcctggcccaggaggtgcgcccccggcgctggaagctgcaggtcctcgacctgcggaagaactcccaccaggacttctggaccgtgtggagcggcaaccgcgcgtccctgtacagcttccccgagcccgaggccgcccagccgatgaccaagaagcggaaggtggacggcctctccacggaggccgagcagcccttcatccccgtcgaggtgctggtggacctgttcctcaaggagggggcctgcgacgagctgttcagctacctgatcgagaaggtcaagcgcaagaagaacgtgctccggctgtgctgcaagaagctgaagatcttcgcgatgcccatgcaggacatcaagatgatcctcaagatggtgcagctggactccatcgaggacctggaggtgacctgcacctggaagctcccgaccctggccaagttcagcccctacctgggccagatgatcaacctccgccggctgctgctctcccacatccacgccagctcctacatcagccccgagaaggaggagcagtacatcgcccagttcacgtcccagttcctgagcctgcagtgcctccaggccctgtacgtcgacagcctgttcttcctccgcgggcggctggaccagctgctgcgccacgtgatgaaccccctcgagaccctgtccatcaccaactgccggctgagcgagggcgacgtcatgcacctctcccagagcccgtccgtgagccagctgtccgtgctgagcctctccggggtcatgctgaccgacgtgagccccgagcccctgcaggcgctcctggagcgcgcctccgccacgctgcaggacctcgtgttcgacgagtgcggcatcaccgacgaccagctgctggccctcctgcccagcctgtcccactgcagccagctcaccaccctgtccttctacggcaacagcatctccatcagcgccctgcagtccctcctgcagcacctgatcgggctcagcaacctgacgcacgtcctgtacccggtgcccctcgagagctacgaggacatccacggcaccctgcacctggagcgcctcgcgtacctgcacgcccggctgcgcgagctcctgtgcgagctggggcggccctccatggtctggctcagcgccaacccctgcccgcactgcggcgaccgcaccttctacgaccccgagcccatcctgtgcccctgcttcatgccgaactga

SEQ ID NO: 3180 - RNA, 1530 nt, synthetic construct
  misc_feature 1..1530: note = derived and/or modified sequence opt2 fromPRAME__Homo_sapiens__EAW59519
  source 1..1530: mol_type = other RNA
atggagcgccgccgcctctggggctccatccagtcccgctacatctccatgtccgtctggacctccccccgccgcctcgtcgagctcgccggccagtccctcctcaaggacgaggccctcgccatcgccgccctcgagctcctcccccgcgagctcttcccccccctcttcatggccgccttcgacggccgccactcccagaccctcaaggccatggtccaggcctggcccttcacctgcctccccctcggcgtcctcatgaagggccagcacctccacctcgagaccttcaaggccgtcctcgacggcctcgacgtcctcctcgcccaggaggtccgcccccgccgctggaagctccaggtcctcgacctccgcaagaactcccaccaggacttctggaccgtctggtccggcaaccgcgcctccctctactccttccccgagcccgaggccgcccagcccatgaccaagaagcgcaaggtcgacggcctctccaccgaggccgagcagcccttcatccccgtcgaggtcctcgtcgacctcttcctcaaggagggcgcctgcgacgagctcttctcctacctcatcgagaaggtcaagcgcaagaagaacgtcctccgcctctgctgcaagaagctcaagatcttcgccatgcccatgcaggacatcaagatgatcctcaagatggtccagctcgactccatcgaggacctcgaggtcacctgcacctggaagctccccaccctcgccaagttctccccctacctcggccagatgatcaacctccgccgcctcctcctctcccacatccacgcctcctcctacatctcccccgagaaggaggagcagtacatcgcccagttcacctcccagttcctctccctccagtgcctccaggccctctacgtcgactccctcttcttcctccgcggccgcctcgaccagctcctccgccacgtcatgaaccccctcgagaccctctccatcaccaactgccgcctctccgagggcgacgtcatgcacctctcccagtccccctccgtctcccagctctccgtcctctccctctccggcgtcatgctcaccgacgtctcccccgagcccctccaggccctcctcgagcgcgcctccgccaccctccaggacctcgtcttcgacgagtgcggcatcaccgacgaccagctcctcgccctcctcccctccctctcccactgctcccagctcaccaccctctccttctacggcaactccatctccatctccgccctccagtccctcctccagcacctcatcggcctctccaacctcacccacgtcctctaccccgtccccctcgagtcctacgaggacatccacggcaccctccacctcgagcgcctcgcctacctccacgcccgcctccgcgagctcctctgcgagctcggccgcccctccatggtctggctctccgccaacccctgcccccactgcggcgaccgcaccttctacgaccccgagcccatcctctgcccctgcttcatgcccaactga

SEQ ID NO: 3181 - RNA, 1530 nt, synthetic construct
  misc_feature 1..1530: note = derived and/or modified sequence opt3 fromPRAME__Homo_sapiens__EAW59519
  source 1..1530: mol_type = other RNA
atggagagaaggcggctgtggggcagcatccagtcccgctacatttctatgtcagtgtggaccagtccccgacgtctcgtcgaacttgccgggcaaagcctgttgaaggacgaggctttagcaatagccgcgctggaactactccctagagagctgttcccaccgctttttatggctgccttcgatggaaggcactcccagacactgaaagcaatggttcaggcctggccctttacttgcttgcctctcggtgtgctgatgaagggccagcatctgcacctcgaaacgttcaaagctgtattagacgggctggatgtgcttttggcacaagaggtccggccacgcagatggaagctacaggtgctggacctcaggaaaaactctcatcaggatttttggaccgtttggtcgggaaatcgggcctcactgtatagcttccccgagcctgaagctgcccagccaatgacaaagaagcgcaaagtggacggccttagtactgaggcggaacaaccctttatccctgtcgaggtgctggtagatttgttcctcaaggagggtgcatgtgacgaactgttttcctacttaattgagaaagttaagcgaaagaaaaacgtgctgagactctgctgtaagaaacttaagatcttcgccatgccaatgcaggatattaaaatgatcctgaagatggtccagttggactctatagaagatctagaggtgacctgcacatggaaactgccgaccctcgctaagtttagcccctatctggggcagatgatcaatcttaggcggctgttgctctcccacattcatgcctcaagttacatcagccctgaaaaagaggagcaatatattgcacagttcacttctcagtttctgtccttacaatgtctgcaggctctatacgtggactcactcttcttcctgcgtggacgccttgatcagttgctgagacacgtcatgaacccactcgaaacactgagcatcaccaattgcaggcttagtgagggcgacgttatgcacctgtctcagtcccccagcgtgtcgcaattgtctgtactctccctgtcaggcgtgatgttaacggacgtcagtcctgaaccactgcaggccctactcgagcgggcgagcgccactctgcaggatcttgtgtttgacgaatgtgggataaccgatgaccagttgctggcactcctgccctccttatctcattgcagccaactgacaactctttcattctatggaaacagtatttccatcagcgctttgcagtctctcctgcagcacctaattggtctgtcaaatctcacccatgttctgtacccggtgcctcttgagagttacgaggatatccacggcacattgcacctggaacgattagcctatctccatgctcgcctgagagagcttctgtgtgaattggggaggcccagcatggtctggctctccgccaacccatgccctcactgtggagaccggaccttttacgatcccgagccaatcctgtgcccctgcttcatgcctaattga

SEQ ID NO: 3182 - RNA, 1530 nt, synthetic construct
  misc_feature 1..1530: note = derived and/or modified sequence opt4 fromPRAME__Homo_sapiens__EAW59519
  source 1..1530: mol_type = other RNA
atggagagaagaagactgtggggcagcatccagagcagatacatcagcatgagcgtgtggaccagccccagaagactggtggagctggccggccagagcctgctgaaggacgaggccctggccatcgccgccctggagctgctgcccagagagctgttcccccccctgttcatggccgccttcgacggcagacacagccagaccctgaaggccatggtgcaggcctggcccttcacctgcctgcccctgggcgtgctgatgaagggccagcacctgcacctggagaccttcaaggccgtgctggacggcctggacgtgctgctggcccaggaggtgagacccagaagatggaagctgcaggtgctggacctgagaaagaacagccaccaggacttctggaccgtgtggagcggcaacagagccagcctgtacagcttccccgagcccgaggccgcccagcccatgaccaagaagagaaaggtggacggcctgagcaccgaggccgagcagcccttcatccccgtggaggtgctggtggacctgttcctgaaggagggcgcctgcgacgagctgttcagctacctgatcgagaaggtgaagagaaagaagaacgtgctgagactgtgctgcaagaagctgaagatcttcgccatgcccatgcaggacatcaagatgatcctgaagatggtgcagctggacagcatcgaggacctggaggtgacctgcacctggaagctgcccaccctggccaagttcagcccctacctgggccagatgatcaacctgagaagactgctgctgagccacatccacgccagcagctacatcagccccgagaaggaggagcagtacatcgcccagttcaccagccagttcctgagcctgcagtgcctgcaggccctgtacgtggacagcctgttcttcctgagaggcagactggaccagctgctgagacacgtgatgaaccccctggagaccctgagcatcaccaactgcagactgagcgagggcgacgtgatgcacctgagccagagccccagcgtgagccagctgagcgtgctgagcctgagcggcgtgatgctgaccgacgtgagccccgagcccctgcaggccctgctggagagagccagcgccaccctgcaggacctggtgttcgacgagtgcggcatcaccgacgaccagctgctggccctgctgcccagcctgagccactgcagccagctgaccaccctgagcttctacggcaacagcatcagcatcagcgccctgcagagcctgctgcagcacctgatcggcctgagcaacctgacccacgtgctgtaccccgtgcccctggagagctacgaggacatccacggcaccctgcacctggagagactggcctacctgcacgccagactgagagagctgctgtgcgagctgggcagacccagcatggtgtggctgagcgccaacccctgcccccactgcggcgacagaaccttctacgaccccgagcccatcctgtgcccctgcttcatgcccaactga

SEQ ID NO: 3183 - RNA, 1530 nt, synthetic construct
  misc_feature 1..1530: note = derived and/or modified sequence opt5 fromPRAME__Homo_sapiens__EAW59519
  source 1..1530: mol_type = other RNA
atggagagacggcgcctgtggggcagcatccagtccagatacatttctatgagcgtgtggacctctccccggcgcctcgtcgaactggccgggcaatcccttctgaaggacgaggctctcgccatcgcggctctggaacttctgcctagagagcttttcccgcccctgtttatggccgccttcgatggacggcacagccagacactgaaagctatggttcaggcctggccttttacgtgcctccccctgggcgtgcttatgaaggggcagcatctgcacctcgaaaccttcaaagctgtgctggacggacttgatgtcctgctcgcccaagaggtgcgccctagacggtggaagctgcaggttctggacctccgcaaaaactcccatcaggatttttggacagtgtggtctggcaatagagcgagcctgtattccttccccgagcctgaagccgctcagccgatgaccaagaagcggaaagtcgacgggcttagcacagaggccgaacaaccctttattcctgtggaggttctggtggatctcttcctgaaggagggagcttgtgacgaactcttttcttacctgatcgagaaagtcaagcgcaaaaagaacgtgctcagactgtgctgtaagaaactgaagattttcgccatgcccatgcaggatatcaaaatgatcctcaagatggtgcagctggactccattgaagatcttgaggttacctgcacatggaaactgcctaccctcgcgaagtttagcccctatctgggccagatgatcaatcttcggcgcctgctcctgtctcacattcatgcctccagctacatctctccggaaaaagaggagcaatatattgctcagttcacgtcccagtttctgagcctccaatgtctgcaggccctttacgtcgactccctgttcttcctcagaggccggctggatcagctgcttagacacgtgatgaaccctctcgaaaccctgtctatcacaaattgccgcctgagcgagggggacgtgatgcacctctcccagagcccctctgtctcccaactgagcgtgctttctctgagcggagttatgctcaccgacgtgtcccctgaacccctgcaggctctgcttgagcgggcctctgccacactccaggatctggtctttgacgaatgtggcattaccgatgaccagctgctcgctctgcttcccagcctgtcccattgcagccaactcacgacactgtctttctatgggaactccatcagcatctctgcgctgcagtcccttctccagcacctgattggactgagcaatctcacccatgtgctgtaccctgttccgcttgagtcctacgaggatatccacggcacactgcacctcgaaagactggcctatctgcatgctcgccttcgggagctcctgtgtgaactggggagaccctctatggtgtggctcagcgccaacccttgcccccactgtggagaccgcaccttttacgatcctgagcccattctgtgcccgtgcttcatgcctaattga

SEQ ID NO: 3184 - protein, 509 aa, synthetic construct; identical to SEQ ID NO: 3177
  REGION 1..509: note = PRAME__Homo_sapiens__P78395

SEQ ID NO: 3185 - RNA, 1530 nt, synthetic construct; identical to SEQ ID NO: 3178
  misc_feature 1..1530: note = PRAME__Homo_sapiens__AAC51160
  source 1..1530: mol_type = other RNA

SEQ ID NO: 3186 - RNA, 1530 nt, synthetic construct; identical to SEQ ID NO: 3179
  misc_feature 1..1530: note = derived and/or modified sequence opt1 fromPRAME__Homo_sapiens__AAC51160
  source 1..1530: mol_type = other RNA

SEQ ID NO: 3187 - RNA, 1530 nt, synthetic construct; identical to SEQ ID NO: 3180
  misc_feature 1..1530: note = derived and/or modified sequence opt2 fromPRAME__Homo_sapiens__AAC51160
  source 1..1530: mol_type = other RNA

SEQ ID NO: 3188 - RNA, 1530 nt, synthetic construct; identical to SEQ ID NO: 3181
  misc_feature 1..1530: note = derived and/or modified sequence opt3 fromPRAME__Homo_sapiens__AAC51160
  source 1..1530: mol_type = other RNA

SEQ ID NO: 3189 - RNA, 1530 nt, synthetic construct; identical to SEQ ID NO: 3182
  misc_feature 1..1530: note = derived and/or modified sequence opt4 fromPRAME__Homo_sapiens__AAC51160
  source 1..1530: mol_type = other RNA

SEQ ID NO: 3190 - RNA, 1530 nt, synthetic construct; identical to SEQ ID NO: 3183
  misc_feature 1..1530: note = derived and/or modified sequence opt5 fromPRAME__Homo_sapiens__AAC51160
  source 1..1530: mol_type = other RNA

SEQ ID NO: 3191 - protein, 214 aa, synthetic construct
  REGION 1..214: note = PRDX5/m__Homo_sapiens__P30044
MGLAGVCALRRSAGYILVGGAGGQSAAAAARRYSEGEWASGGVRSFSRAAAAMAPIKVGDAIPAVEVFEGEPGNKVNLAELFKGKKGVLFGVPGAFTPGCSKTHLPGFVEQAEALKAKGVQVVACLSVNDAFVTGEWGRAHKAEGKVRLLADPTGAFGKETDLLLDDSLVSIFGNRRLKRFSMVVQDGIVKALNVEPDGTGLTCSLAPNIISQL

SEQ ID NO: 3192 - RNA, 645 nt, synthetic construct
  misc_feature 1..645: note = PRDX5/m__Homo_sapiens__CCDS8069.1
  source 1..645: mol_type = other RNA
atgggactagctggcgtgtgcgccctgagacgctcagcgggctatatactcgtcggtggggccggcggtcagtctgcggcagcggcagcaagacggtacagtgaaggagagtgggcgtctggcggggtccgcagtttcagcagagccgctgcagccatggccccaatcaaggtgggagatgccatcccagcagtggaggtgtttgaaggggagccagggaacaaggtgaacctggcagagctgttcaagggcaagaagggtgtgctgtttggagttcctggggccttcacccctggatgttccaagacacacctgccagggtttgtggagcaggctgaggctctgaaggccaagggagtccaggtggtggcctgtctgagtgttaatgatgcctttgtgactggcgagtggggccgagcccacaaggcggaaggcaaggttcggctcctggctgatcccactggggcctttgggaaggagacagacttattactagatgattcgctggtgtccatctttgggaatcgacgtctcaagaggttctccatggtggtacaggatggcatagtgaaggccctgaatgtggaaccagatggcacaggcctcacctgcagcctggcacccaatatcatctcacagctctga

SEQ ID NO: 3193 - RNA, 645 nt, synthetic construct
  misc_feature 1..645: note = derived and/or modified sequence opt1 fromPRDX5/m__Homo_sapiens__CCDS8069.1
  source 1..645: mol_type = other RNA
atgggcctggccggggtgtgcgccctccgccggagcgcgggctacatcctggtcgggggcgccgggggccagtccgccgccgccgcggcccgccggtacagcgagggcgagtgggcctccgggggcgtgcgcagcttctcccgggccgcggccgccatggcccccatcaaggtgggggacgccatcccggcggtcgaggtgttcgagggcgagcccgggaacaaggtgaacctggccgagctgttcaagggcaagaagggcgtcctgttcggggtgcccggcgccttcacccccgggtgcagcaagacccacctcccgggcttcgtggagcaggccgaggccctcaaggcgaagggcgtccaggtggtggcctgcctgtccgtcaacgacgccttcgtgacgggggagtggggccgcgcccacaaggccgaggggaaggtgcggctgctcgcggaccccaccggcgccttcgggaaggagaccgacctgctgctcgacgacagcctggtctccatcttcggcaaccgccggctgaagcgcttcagcatggtggtgcaggacggcatcgtcaaggccctcaacgtggagcccgacgggaccggcctgacgtgctccctggcccccaacatcatcagccagctctga

SEQ ID NO: 3194 - RNA, 645 nt, synthetic construct
  misc_feature 1..645: note = derived and/or modified sequence opt2 fromPRDX5/m__Homo_sapiens__CCDS8069.1
  source 1..645: mol_type = other RNA
atgggcctcgccggcgtctgcgccctccgccgctccgccggctacatcctcgtcggcggcgccggcggccagtccgccgccgccgccgcccgccgctactccgagggcgagtgggcctccggcggcgtccgctccttctcccgcgccgccgccgccatggcccccatcaaggtcggcgacgccatccccgccgtcgaggtcttcgagggcgagcccggcaacaaggtcaacctcgccgagctcttcaagggcaagaagggcgtcctcttcggcgtccccggcgccttcacccccggctgctccaagacccacctccccggcttcgtcgagcaggccgaggccctcaaggccaagggcgtccaggtcgtcgcctgcctctccgtcaacgacgccttcgtcaccggcgagtggggccgcgcccacaaggccgagggcaaggtccgcctcctcgccgaccccaccggcgccttcggcaaggagaccgacctcctcctcgacgactccctcgtctccatcttcggcaaccgccgcctcaagcgcttctccatggtcgtccaggacggcatcgtcaaggccctcaacgtcgagcccgacggcaccggcctcacctgctccctcgcccccaacatcatctcccagctctga

SEQ ID NO: 3195 - RNA, 645 nt, synthetic construct
  misc_feature 1..645: note = derived and/or modified sequence opt3 fromPRDX5/m__Homo_sapiens__CCDS8069.1
  source 1..645: mol_type = other RNA
atgggcctggccggggtgtgcgctctcagaaggagcgcaggatacatccttgtcggtggcgccgggggacagtccgcggctgccgcagcccggcgctattctgagggcgaatgggcttcaggtggggttcgaagtttcagccgtgcagccgctgccatggcgcccattaaggtgggagacgcaatacctgccgtagaggtgtttgaaggcgagccaggcaacaaagtcaatctggctgaattgttcaaggggaaaaagggagtgttatttggtgttccgggcgccttcacccccgggtgttccaaaacacatctgcctggatttgtggagcaagcagaggctctaaaggccaagggcgtccaggtggtagcgtgcctctctgttaacgatgccttcgtgactggtgaatgggggagagcacacaaagctgagggaaaggtcaggctgcttgccgacccaacgggcgcttttggcaaagaaaccgatctgttgctcgacgattcgctggtgtcaatcttcgggaatcggcgcctgaagagatttagcatggtggtccaggacggaattgttaaagccctcaacgtggagcccgatggtacaggcttaacttgtagtctggcacctaatatcatttcccagctttga

SEQ ID NO: 3196 - RNA, 645 nt, synthetic construct
  misc_feature 1..645: note = derived and/or modified sequence opt4 fromPRDX5/m__Homo_sapiens__CCDS8069.1
  source 1..645: mol_type = other RNA
atgggcctggccggcgtgtgcgccctgagaagaagcgccggctacatcctggtgggcggcgccggcggccagagcgccgccgccgccgccagaagatacagcgagggcgagtgggccagcggcggcgtgagaagcttcagcagagccgccgccgccatggcccccatcaaggtgggcgacgccatccccgccgtggaggtgttcgagggcgagcccggcaacaaggtgaacctggccgagctgttcaagggcaagaagggcgtgctgttcggcgtgcccggcgccttcacccccggctgcagcaagacccacctgcccggcttcgtggagcaggccgaggccctgaaggccaagggcgtgcaggtggtggcctgcctgagcgtgaacgacgccttcgtgaccggcgagtggggcagagcccacaaggccgagggcaaggtgagactgctggccgaccccaccggcgccttcggcaaggagaccgacctgctgctggacgacagcctggtgagcatcttcggcaacagaagactgaagagattcagcatggtggtgcaggacggcatcgtgaaggccctgaacgtggagcccgacggcaccggcctgacctgcagcctggcccccaacatcatcagccagctgtga

SEQ ID NO: 3197 - RNA, 645 nt, synthetic construct
  misc_feature 1..645: note = derived and/or modified sequence opt5 fromPRDX5/m__Homo_sapiens__CCDS8069.1
  source 1..645: mol_type = other RNA
atgggcctggccggggtgtgcgctctcagacggagcgccggatacatcctggtcggcggggcgggaggccagtccgctgccgccgctgcccgcagatattctgagggggaatgggctagcggaggcgttcggtccttctctcgcgccgcggccgctatggcccccattaaggtgggcgacgctatccctgccgtggaggtctttgaaggggagccgggaaacaaagtgaatcttgcggaactgttcaagggcaaaaagggggttctctttggagtgcccggcgccttcacccctgggtgtagcaaaacacatctgcccggatttgtcgagcaagctgaggcccttaaggctaagggcgtgcaggttgtggcctgcctgtccgtcaacgatgccttcgtgacgggcgaatgggggagagctcacaaagcggagggaaaggtgcggctcctggccgaccctaccggcgcttttgggaaagaaacagatctgctcctggacgattctcttgtcagcattttcggaaatcgcagactgaagcggttttccatggttgtgcaggacggcatcgtgaaagccctcaacgtcgagcccgatgggaccggactgacatgtagccttgcccctaatattatctctcagctgtga

SEQ ID NO: 3198 - protein, 102 aa, synthetic construct
  REGION 1..102: note = PRM2__Homo_sapiens__P04554
MVRYRVRSLSERSHEVYRQQLHGQEQGHHGQEEQGLSPEHVEVYERTHGQSHYRRRHCSRRRLHRIHRRQHRSCRRRKRRSCRHRRRHRRGCRTRKRTCRRH

SEQ ID NO: 3199 - RNA, 309 nt, synthetic construct
  misc_feature 1..309: note = PRM2__Homo_sapiens__AAA63250
  source 1..309: mol_type = other RNA
atggtccgataccgcgtgaggagcctgagcgaacgctcgcacgaggtgtacaggcagcagttgcatgggcaagagcaaggacaccacggccaagaggagcaagggctgagcccggagcacgtcgaggtctacgagaggacccatggccagtctcactataggcgcagacactgctctcgaaggaggctgcaccggatccacaggcggcagcatcgctcctgcagaaggcgcaaaagacgctcctgcaggcaccggaggaggcatcgcagaggctgcagaaccaggaagagaacatgcagaaggcactaa

SEQ ID NO: 3200 - RNA, 309 nt, synthetic construct
  misc_feature 1..309: note = derived and/or modified sequence opt1 fromPRM2__Homo_sapiens__AAA63250
  source 1..309: mol_type = other RNA
atggtgcgctaccgggtccgcagcctgtccgagcggagccacgaggtgtaccgccagcagctccacggccaggagcaggggcaccacggccaggaggagcaggggctgtcccccgagcacgtggaggtctacgagcggacccacggccagagccactaccgccggcgccactgctcccggcgccggctgcaccgcatccaccggcgccagcaccggagctgccgccggcgcaagcggcgctcctgccggcaccgccgccggcaccgccgggggtgccgcacccggaagcgcacgtgccggcgccactga

SEQ ID NO: 3201 - RNA, 309 nt, synthetic construct
  misc_feature 1..309: note = derived and/or modified sequence opt2 fromPRM2__Homo_sapiens__AAA63250
  source 1..309: mol_type = other RNA
atggtccgctaccgcgtccgctccctctccgagcgctcccacgaggtctaccgccagcagctccacggccaggagcagggccaccacggccaggaggagcagggcctctcccccgagcacgtcgaggtctacgagcgcacccacggccagtcccactaccgccgccgccactgctcccgccgccgcctccaccgcatccaccgccgccagcaccgctcctgccgccgccgcaagcgccgctcctgccgccaccgccgccgccaccgccgcggctgccgcacccgcaagcgcacctgccgccgccactga

SEQ ID NO: 3202 - RNA, 309 nt, synthetic construct
  misc_feature 1..309: note = derived and/or modified sequence opt3 fromPRM2__Homo_sapiens__AAA63250
  source 1..309: mol_type = other RNA
atggtgagatacagggtccggagcctgtccgagcgctctcacgaagtttatcgacagcaactccatggccaggagcaggggcaccatggacaggaggaacaaggtctttcacccgaacacgtggaggtatacgagcgtacccatggccagagtcactatagaaggcggcactgcagccgcagaaggctgcatcggatccaccgccgacagcatagatcctgtaggcggcgtaagcgcagatcttgcaggcaccggcgacgccacagaagggggtgtcggacacgcaaaagaacttgcaggcgtcattga

SEQ ID NO: 3203 - RNA, 309 nt, synthetic construct
  misc_feature 1..309: note = derived and/or modified sequence opt4 fromPRM2__Homo_sapiens__AAA63250
  source 1..309: mol_type = other RNA
atggtgagatacagagtgagaagcctgagcgagagaagccacgaggtgtacagacagcagctgcacggccaggagcagggccaccacggccaggaggagcagggcctgagccccgagcacgtggaggtgtacgagagaacccacggccagagccactacagaagaagacactgcagcagaagaagactgcacagaatccacagaagacagcacagaagctgcagaagaagaaagagaagaagctgcagacacagaagaagacacagaagaggctgcagaaccagaaagagaacctgcagaagacactga

SEQ ID NO: 3204 - RNA, 309 nt, synthetic construct
  misc_feature 1..309: note = derived and/or modified sequence opt5 fromPRM2__Homo_sapiens__AAA63250
  source 1..309: mol_type = other RNA
atggtgagataccgggtccgcagcctgtccgagagatctcacgaagtttatcggcagcaactccatggccaggagcaggggcaccatggacaggaggaacaaggcctgagccccgaacacgtggaggtgtacgagcgcacccatgggcagtcccactatagacggcgccactgctctagacggcgccttcatagaatccaccggcgccagcatagaagctgtcggcgcagaaagcggagatcctgccgccaccggagacgccaccggagaggatgtcgcacacggaaaagaacgtgccgccggcattga

SEQ ID NO: 3205 - protein, 553 aa, synthetic construct
  REGION 1..553: note = prostein__Homo_sapiens__Q96JT2
MVQRLWVSRLLRHRKAQLLLVNLLTFGLEVCLAAGITYVPPLLLEVGVEEKFMTMVLGIGPVLGLVCVPLLGSASDHWRGRYGRRRPFIWALSLGILLSLFLIPRAGWLAGLLCPDPRPLELALLILGVGLLDFCGQVCFTPLEALLSDLFRDPDHCRQAYSVYAFMISLGGCLGYLLPAIDWDTSALAPYLGTQEECLFGLLTLIFLTCVAATLLVAEEAALGPTEPAEGLSAPSLSPHCCPCRARLAFRNLGALLPRLHQLCCRMPRTLRRLFVAELCSWMALMTFTLFYTDFVGEGLYQGVPRAEPGTEARRHYDEGVRMGSLGLFLQCAISLVFSLVMDRLVQRFGTRAVYLASVAAFPVAAGATCLSHSVAVVTASAALTGFTFSALQILPYTLASLYHREKQVFLPKYRGDTGGASSEDSLMTSFLPGPKPGAPFPNGHVGAGGSGLLPPPPALCGASACDVSVRVVVGEPTEARVVPGRGICLDLAILDSAFLLSQVAPSLFMGSIVQLSQSVTAYMVSAAGLGLVAIYFATQVVFDKSDLAKYSA

SEQ ID NO: 3206 - RNA, 1662 nt, synthetic construct
  misc_feature 1..1662: note = prostein__Homo_sapiens__AAH50416
  source 1..1662: mol_type = other RNA
atggtccagaggctgtgggtgagccgcctgctgcggcaccggaaagcccagctcttgctggtcaacctgctaacctttggcctggaggtgtgtttggccgcaggcatcacctatgtgccgcctctgctgctggaagtgggggtagaggagaagttcatgaccatggtgctgggcattggtccagtgctgggcctggtctgtgtcccgctcctaggctcagccagtgaccactggcgtggacgctatggccgccgccggcccttcatctgggcactgtccttgggcatcctgctgagcctctttctcatcccaagggccggctggctagcagggctgctgtgcccggatcccaggcccctggagctggcactgctcatcctgggcgtggggctgctggacttctgtggccaggtgtgcttcactccactggaggccctgctctctgacctcttccgggacccggaccactgtcgccaggcctactctgtctatgccttcatgatcagtcttgggggctgcctgggctacctcctgcctgccattgactgggacaccagtgccctggccccctacctgggcacccaggaggagtgcctctttggcctgctcaccctcatcttcctcacctgcgtagcagccacactgctggtggctgaggaggcagcgctgggccccaccgagccagcagaagggctgtcggccccctccttgtcgccccactgctgtccatgccgggcccgcttggctttccggaacctgggcgccctgcttccccggctgcaccagctgtgctgccgcatgccccgcaccctgcgccggctcttcgtggctgagctgtgcagctggatggcactcatgaccttcacgctgttttacacggatttcgtgggcgaggggctgtaccagggcgtgcccagagctgagccgggcaccgaggcccggagacactatgatgaaggcgttcggatgggcagcctggggctgttcctgcagtgcgccatctccctggtcttctctctggtcatggaccggctggtgcagcgattcggcactcgagcagtctatttggccagtgtggcagctttccctgtggctgccggtgccacatgcctgtcccacagtgtggccgtggtgacagcttcagccgccctcaccgggttcaccttctcagccctgcagatcctgccctacacactggcctccctctaccaccgggagaagcaggtgttcctgcccaaataccgaggggacactggaggtgctagcagtgaggacagcctgatgaccagcttcctgccaggccctaagcctggagctcccttccctaatggacacgtgggtgctggaggcagtggcctgctcccacctccacccgcgctctgcggggcctctgcctgtgatgtctccgtacgtgtggtggtgggtgagcccaccgaggccagggtggttccgggccggggcatctgcctggacctcgccatcctggatagtgccttcctgctgtcccaggtggccccatccctgtttatgggctccattgtccagctcagccagtctgtcactgcctatatggtgtctgccgcaggcctgggtctggtcgccatttactttgctacacaggtagtatttgacaagagcgacttggccaaatactcagcgtag

SEQ ID NO: 3207 - RNA, 1662 nt, synthetic construct
  misc_feature 1..1662: note = derived and/or modified sequence opt1 fromprostein__Homo_sapiens__AAH50416
  source 1..1662: mol_type = other RNA
atggtgcagcgcctgtgggtcagccggctcctgcgccaccggaaggcccagctgctcctggtgaacctgctcaccttcggcctggaggtgtgcctggccgcggggatcacctacgtgcccccgctcctgctggaggtgggcgtggaggagaagttcatgacgatggtcctcgggatcggccccgtgctggggctggtgtgcgtccccctcctgggctccgccagcgaccactggcgcggccggtacgggcgccggcgccccttcatctgggccctgtccctcggcatcctgctgagcctcttcctgatcccgcgggccgggtggctggccggcctcctgtgccccgacccccgccccctggagctcgcgctgctgatcctcggggtgggcctgctggacttctgcggccaggtgtgcttcaccccgctcgaggccctgctgtccgacctcttccgggaccccgaccactgccgccaggcctacagcgtctacgccttcatgatctccctcgggggctgcctggggtacctgctgcccgcgatcgactgggacaccagcgccctggccccctacctcggcacccaggaggagtgcctgttcggcctgctcacgctgatcttcctgacctgcgtggccgccaccctcctggtggcggaggaggccgccctggggcccaccgagcccgccgagggcctgtccgcccccagcctcagcccccactgctgcccgtgccgggcgcgcctggccttccggaacctgggggccctcctgccccgcctgcaccagctctgctgccggatgccccgcacgctgcggcgcctgttcgtcgccgagctctgctcctggatggccctgatgaccttcaccctgttctacaccgacttcgtgggcgaggggctctaccagggcgtgccccgggcggagccgggcacggaggcccgccgccactacgacgagggggtccggatgggctccctggggctgttcctccagtgcgccatcagcctggtgttctccctggtgatggaccgcctcgtccagcggttcggcacccgcgccgtgtacctggccagcgtggcggccttccccgtcgccgccggggcgacctgcctgtcccacagcgtggccgtcgtgaccgcctccgccgccctcacgggcttcaccttcagcgcgctgcagatcctgccctacaccctcgccagcctgtaccaccgggagaagcaggtcttcctgcccaagtaccgcggcgacaccgggggcgcctccagcgaggactccctcatgacgagcttcctgccggggcccaagcccggcgcccccttcccgaacgggcacgtcggcgccggcgggtccggcctgctcccgccgccgcccgcgctgtgcggggccagcgcctgcgacgtgtccgtgcgggtcgtggtgggcgagcccaccgaggcccgcgtcgtgcccggccgggggatctgcctggacctcgccatcctggacagcgcgttcctgctctcccaggtggcccccagcctgttcatgggctccatcgtccagctgagccagtccgtgaccgcctacatggtgagcgccgcggggctcggcctggtcgccatctacttcgccacccaggtggtgttcgacaagtccgacctggccaagtacagcgcctga

SEQ ID NO: 3208 - RNA, 1662 nt, synthetic construct
  misc_feature 1..1662: note = derived and/or modified sequence opt2 fromprostein__Homo_sapiens__AAH50416
  source 1..1662: mol_type = other RNA
atggtccagcgcctctgggtctcccgcctcctccgccaccgcaaggcccagctcctcctcgtcaacctcctcaccttcggcctcgaggtctgcctcgccgccggcatcacctacgtcccccccctcctcctcgaggtcggcgtcgaggagaagttcatgaccatggtcctcggcatcggccccgtcctcggcctcgtctgcgtccccctcctcggctccgcctccgaccactggcgcggccgctacggccgccgccgccccttcatctgggccctctccctcggcatcctcctctccctcttcctcatcccccgcgccggctggctcgccggcctcctctgccccgacccccgccccctcgagctcgccctcctcatcctcggcgtcggcctcctcgacttctgcggccaggtctgcttcacccccctcgaggccctcctctccgacctcttccgcgaccccgaccactgccgccaggcctactccgtctacgccttcatgatctccctcggcggctgcctcggctacctcctccccgccatcgactgggacacctccgccctcgccccctacctcggcacccaggaggagtgcctcttcggcctcctcaccctcatcttcctcacctgcgtcgccgccaccctcctcgtcgccgaggaggccgccctcggccccaccgagcccgccgagggcctctccgccccctccctctccccccactgctgcccctgccgcgcccgcctcgccttccgcaacctcggcgccctcctcccccgcctccaccagctctgctgccgcatgccccgcaccctccgccgcctcttcgtcgccgagctctgctcctggatggccctcatgaccttcaccctcttctacaccgacttcgtcggcgagggcctctaccagggcgtcccccgcgccgagcccggcaccgaggcccgccgccactacgacgagggcgtccgcatgggctccctcggcctcttcctccagtgcgccatctccctcgtcttctccctcgtcatggaccgcctcgtccagcgcttcggcacccgcgccgtctacctcgcctccgtcgccgccttccccgtcgccgccggcgccacctgcctctcccactccgtcgccgtcgtcaccgcctccgccgccctcaccggcttcaccttctccgccctccagatcctcccctacaccctcgcctccctctaccaccgcgagaagcaggtcttcctccccaagtaccgcggcgacaccggcggcgcctcctccgaggactccctcatgacctccttcctccccggccccaagcccggcgcccccttccccaacggccacgtcggcgccggcggctccggcctcctcccccccccccccgccctctgcggcgcctccgcctgcgacgtctccgtccgcgtcgtcgtcggcgagcccaccgaggcccgcgtcgtccccggccgcggcatctgcctcgacctcgccatcctcgactccgccttcctcctctcccaggtcgccccctccctcttcatgggctccatcgtccagctctcccagtccgtcaccgcctacatggtctccgccgccggcctcggcctcgtcgccatctacttcgccacccaggtcgtcttcgacaagtccgacctcgccaagtactccgcctga

SEQ ID NO: 3209 - RNA, 1662 nt, synthetic construct
  misc_feature 1..1662: note = derived and/or modified sequence opt3 fromprostein__Homo_sapiens__AAH50416
  source 1..1662: mol_type = other RNA
atggtgcagagactgtgggtcagcaggctccttcggcaccgcaaggcccaactgttgttagttaacctgctaaccttcggcctcgaggtgtgcctggctgcagggatcacatacgtaccccctcttctgttggaagtgggagtcgaggaaaaatttatgactatggtgctcggtattggcccagttctggggctggtgtgtgtcccgctcttaggatccgcctctgaccattggcgaggccgttatggtagaaggcggcccttcatatgggcgctgtcacttgggatcttgctgagtctatttctcattcctcgcgctggatggctggccggccttctgtgcccagatcccagacctttggagctcgcactgttaatcctgggcgtggggctccttgacttctgtggacaggtatgctttacgccactggaagccttgctaagcgatctgttcagggaccccgatcactgtcggcaggcttactccgtttatgcatttatgatttctctcggtggctgcctggggtaccttctgcctgccatcgactgggatacctcggctttggccccatatctcggaacacaggaggagtgtctgttcggcttactgactctaatatttttgacctgcgtggcggcaacactgcttgtcgccgaagaggctgccttgggtccgaccgaacccgcagaggggctgtcagctcctagcctcagtccacattgttgcccctgtcgcgcccgactggcgttcagaaatcttggagccctgttgcctaggctccaccaactgtgctgccggatgccacgtactttacgcagactgtttgtggcagagctatgttcctggatggctctcatgacattcaccctgttttacacggacttcgtgggcgaaggcctttatcagggggtccccagggccgagccgggaactgaagctcggcgacattacgatgagggtgttcgcatgggctctttggggctgttcctccagtgcgccatcagcctggtgttttccttagtaatggacagactggtgcagaggttcggaacccgggcagtctaccttgcctcagtggctgcgtttcctgttgcagccggcgctacatgtttgagtcacagcgtggccgtcgtgactgcatctgccgctctcaccggtttcacattttccgccctgcaaattctaccctataccctggcatcactctaccaccgcgaaaagcaggtattcctgccaaaatatagaggggatacgggcggagcgagcagtgaggactctcttatgacttcctttttgcctggccccaagccaggggctcccttccctaacggacatgttggtgccggcgggagcggactgttaccaccgccccctgcactctgcggcgcctcggcttgtgatgtgtctgtcagggtggtcgtgggtgagccaacagaagcccgtgttgtgcccgggcggggcatctgcctggaccttgcaattctggactccgcttttctcctctcacaggtagcccctagtctgttcatgggaagcatcgtccagctatcccaatctgtgaccgcgtacatggttagcgccgctggcctggggctcgtggcaatatattttgccactcaggtcgtgttcgataaatcagacctggctaagtacagtgcctga

SEQ ID NO: 3210 - RNA, 1662 nt, synthetic construct
  misc_feature 1..1662: note = derived and/or modified sequence opt4 fromprostein__Homo_sapiens__AAH50416
  source 1..1662: mol_type = other RNA
atggtgcagagactgtgggtgagcagactgctgagacacagaaaggcccagctgctgctggtgaacctgctgaccttcggcctggaggtgtgcctggccgccggcatcacctacgtgccccccctgctgctggaggtgggcgtggaggagaagttcatgaccatggtgctgggcatcggccccgtgctgggcctggtgtgcgtgcccctgctgggcagcgccagcgaccactggagaggcagatacggcagaagaagacccttcatctgggccctgagcctgggcatcctgctgagcctgttcctgatccccagagccggctggctggccggcctgctgtgccccgaccccagacccctggagctggccctgctgatcctgggcgtgggcctgctggacttctgcggccaggtgtgcttcacccccctggaggccctgctgagcgacctgttcagagaccccgaccactgcagacaggcctacagcgtgtacgccttcatgatcagcctgggcggctgcctgggctacctgctgcccgccatcgactgggacaccagcgccctggccccctacctgggcacccaggaggagtgcctgttcggcctgctgaccctgatcttcctgacctgcgtggccgccaccctgctggtggccgaggaggccgccctgggccccaccgagcccgccgagggcctgagcgcccccagcctgagcccccactgctgcccctgcagagccagactggccttcagaaacctgggcgccctgctgcccagactgcaccagctgtgctgcagaatgcccagaaccctgagaagactgttcgtggccgagctgtgcagctggatggccctgatgaccttcaccctgttctacaccgacttcgtgggcgagggcctgtaccagggcgtgcccagagccgagcccggcaccgaggccagaagacactacgacgagggcgtgagaatgggcagcctgggcctgttcctgcagtgcgccatcagcctggtgttcagcctggtgatggacagactggtgcagagattcggcaccagagccgtgtacctggccagcgtggccgccttccccgtggccgccggcgccacctgcctgagccacagcgtggccgtggtgaccgccagcgccgccctgaccggcttcaccttcagcgccctgcagatcctgccctacaccctggccagcctgtaccacagagagaagcaggtgttcctgcccaagtacagaggcgacaccggcggcgccagcagcgaggacagcctgatgaccagcttcctgcccggccccaagcccggcgcccccttccccaacggccacgtgggcgccggcggcagcggcctgctgccccccccccccgccctgtgcggcgccagcgcctgcgacgtgagcgtgagagtggtggtgggcgagcccaccgaggccagagtggtgcccggcagaggcatctgcctggacctggccatcctggacagcgccttcctgctgagccaggtggcccccagcctgttcatgggcagcatcgtgcagctgagccagagcgtgaccgcctacatggtgagcgccgccggcctgggcctggtggccatctacttcgccacccaggtggtgttcgacaagagcgacctggccaagtacagcgcctga

SEQ ID NO: 3211 - RNA, 1662 nt, synthetic construct
  misc_feature 1..1662: note = derived and/or modified sequence opt5 fromprostein__Homo_sapiens__AAH50416
  source 1..1662: mol_type = other RNA
atggtgcagagactgtgggtcagccggctcctgcgccacagaaaggcccaacttctgctcgttaacctgcttaccttcggcctggaggtgtgcctcgctgccgggatcacatacgtgccccctctgctgctcgaagtcggagtggaggaaaaatttatgacgatggttctgggcattgggccggtgcttggactggtctgtgtgcccctcctgggctccgcgtctgaccattggcgggggcgctatggaagacggcgccctttcatctgggctcttagcctgggcattctcctgtccctgtttctcatccccagagccggctggctggccgggcttctgtgccctgatccccggcctctcgagctggcccttctgattctcggagttggcctgctggacttctgtggacaggtgtgctttaccccgctcgaagctctgctttctgatctgttccgcgaccccgatcactgtagacaggcttacagcgtctatgcctttatgatctccctcgggggctgcctggggtaccttctgcctgcgatcgactgggatacatctgccctcgctccctatctgggaacccaggaggagtgtctgttcggcctcctgacacttatttttctgacctgcgtggccgctacactcctggtggccgaagaggcggccctgggccctaccgaacccgctgaggggcttagcgccccgtccctcagccctcattgttgcccctgtcgggctcgcctggccttcagaaatctgggagccctcctgcctcggcttcaccaactgtgctgccgcatgcccagaacgctccggagactgtttgtcgctgagctgtgttcttggatggcgcttatgaccttcacactcttttacaccgacttcgttggcgaagggctgtatcagggagtgccccgcgccgagcctggcacagaagctcggagacattacgatgagggggtgcgcatgggatccctgggcctcttcctgcagtgcgccatcagccttgtcttttctctggtgatggaccggctcgttcagagattcggcacccgcgccgtgtacctggcttccgtcgccgcgtttccggtggctgccggggccacgtgtctgagccactctgttgctgtggtcacagcctccgctgcccttaccggattcacatttagcgcgctccaaattctgccctataccctggcctccctctaccaccgggaaaaacaggtgttcctgcctaagtatagaggcgataccgggggagcttctagcgaggactcccttatgacgagctttctgcccggccctaagcccggggccccgttccctaacggccatgtcggagctggcgggtctggactcctgccccctccccctgccctgtgcggcgcgtccgcctgtgatgtgagcgttcgcgtggtcgtgggggagcccacagaagctcgggttgtgccgggaagaggcatctgccttgacctcgccattctggactctgcttttctgctcagccaggtcgccccttccctgttcatggggtctatcgtgcagcttagccaatccgtgaccgcctacatggttagcgctgcgggcctgggactcgtcgccatttattttgctacacaggtggtgttcgataaatctgacctggccaagtactccgcctga

SEQ ID NO: 3212 - protein, 215 aa, synthetic construct [sequence omitted]

SEQ ID NO: 3213 - RNA, 648 nt, synthetic construct
  misc_feature 1..648: note = proteinase-3__Homo_sapiens__CBI83574
  source 1..648: mol_type = other RNA
atggcctccctgcagatgcgggggaacccgggcagccacttctgcggaggcaccttgatccaccccagcttcgtgctgacggccgcgcactgcctgcgggacataccccagcgcctggtgaacgtggtgctcggagcccacaacgtgcggacgcaggagcccacccagcagcacttctcggtggctcaggtgtttctgaacaactacgacgcggagaacaaactgaacgacattctcctcatccagctgagcagcccagccaacctcagtgcctccgtcgccacagtccagctgccacagcaggaccagccagtgccccacggcacccagtgcctggccatgggctggggccgcgtgggtgcccacgaccccccagcccaggtcctgcaggagctcaatgtcaccgtggtgaccttcttctgccggccacataacatttgcactttcgtccctcgccgcaaggccggcatctgcttcggagactcaggtggccccctgatctgtgatggcatcatccaaggaatagactccttcgtgatctggggatgtgccacccgccttttccctgacttcttcacgcgggtagccctctacgtggactggatccgttccacgctgcgccgtgtggaggccaagggccgcccctga

SEQ ID NO: 3214 - RNA, 648 nt, synthetic construct
  misc_feature 1..648: note = derived and/or modified sequence opt1 fromproteinase-3__Homo_sapiens__CBI83574
  source 1..648: mol_type = other RNA
atggccagcctgcagatgcgcggcaaccccgggtcccacttctgcggcgggaccctcatccacccgagcttcgtgctgaccgccgcgcactgcctgcgggacatcccccagcgcctcgtcaacgtggtgctgggcgcccacaacgtccggacgcaggagcccacccagcagcacttctccgtggcccaggtgttcctgaacaactacgacgccgagaacaagctcaacgacatcctgctgatccagctcagctcccccgccaacctgagcgcgtccgtcgccaccgtgcagctgccgcagcaggaccagcccgtgccccacgggacccagtgcctcgccatgggctggggccgcgtcggggcccacgacccgcccgcccaggtgctgcaggagctgaacgtgacggtcgtgaccttcttctgccggccccacaacatctgcaccttcgtgccccgccggaaggcgggcatctgcttcggggacagcggcgggcccctcatctgcgacggcatcatccagggcatcgactccttcgtcatctgggggtgcgccacccgcctgttcccggacttcttcacgcgggtggccctgtacgtggactggatccgcagcaccctccggcgcgtcgaggccaagggccggccctga

SEQ ID NO: 3215 - RNA, 648 nt, synthetic construct
  misc_feature 1..648: note = derived and/or modified sequence opt2 fromproteinase-3__Homo_sapiens__CBI83574
  source 1..648: mol_type = other RNA
atggcctccctccagatgcgcggcaaccccggctcccacttctgcggcggcaccctcatccacccctccttcgtcctcaccgccgcccactgcctccgcgacatcccccagcgcctcgtcaacgtcgtcctcggcgcccacaacgtccgcacccaggagcccacccagcagcacttctccgtcgcccaggtcttcctcaacaactacgacgccgagaacaagctcaacgacatcctcctcatccagctctcctcccccgccaacctctccgcctccgtcgccaccgtccagctcccccagcaggaccagcccgtcccccacggcacccagtgcctcgccatgggctggggccgcgtcggcgcccacgacccccccgcccaggtcctccaggagctcaacgtcaccgtcgtcaccttcttctgccgcccccacaacatctgcaccttcgtcccccgccgcaaggccggcatctgcttcggcgactccggcggccccctcatctgcgacggcatcatccagggcatcgactccttcgtcatctggggctgcgccacccgcctcttccccgacttcttcacccgcgtcgccctctacgtcgactggatccgctccaccctccgccgcgtcgaggccaagggccgcccctga

SEQ ID NO: 3216 - RNA, 648 nt, synthetic construct
  misc_feature 1..648: note = derived and/or modified sequence opt3 fromproteinase-3__Homo_sapiens__CBI83574
  source 1..648: mol_type = other RNA
atggccagcctgcagatgagaggcaaccccgggtcccacttctgcggaggtaccctcatccatccttcttttgtgcttacagctgcacactgtctgagggacattccacaacggttggtcaatgttgtgttaggcgcccataacgtacgcactcaggagccgacgcagcagcacttctcagtggcgcaagtctttctgaataactacgatgctgaaaataagctaaacgacatactcctgatccagcttagtagccccgccaatctgtccgcatctgtggccaccgttcagttgcctcagcaagatcagccagtgccccatgggacacagtgcctcgctatgggatggggccgagtcggtgcacacgaccctccagcccaggtgctgcaagagctgaacgtaactgttgtgaccttcttttgtcgtccccacaatatttgcacattcgtccctagaaggaaagctgggatctgttttggagattcgggcggcccactcatttgcgacgggatcatacagggaatcgattcattcgtgatttggggttgtgccacccggttatttccggacttctttactcgcgtggcgctgtatgtcgattggatcagaagcacacttaggcgggttgaagcaaagggccgcccctga

SEQ ID NO: 3217 - RNA, 648 nt, synthetic construct
  misc_feature 1..648: note = derived and/or modified sequence opt4 fromproteinase-3__Homo_sapiens__CBI83574
  source 1..648: mol_type = other RNA
atggccagcctgcagatgagaggcaaccccggcagccacttctgcggcggcaccctgatccaccccagcttcgtgctgaccgccgcccactgcctgagagacatcccccagagactggtgaacgtggtgctgggcgcccacaacgtgagaacccaggagcccacccagcagcacttcagcgtggcccaggtgttcctgaacaactacgacgccgagaacaagctgaacgacatcctgctgatccagctgagcagccccgccaacctgagcgccagcgtggccaccgtgcagctgccccagcaggaccagcccgtgccccacggcacccagtgcctggccatgggctggggcagagtgggcgcccacgacccccccgcccaggtgctgcaggagctgaacgtgaccgtggtgaccttcttctgcagaccccacaacatctgcaccttcgtgcccagaagaaaggccggcatctgcttcggcgacagcggcggccccctgatctgcgacggcatcatccagggcatcgacagcttcgtgatctggggctgcgccaccagactgttccccgacttcttcaccagagtggccctgtacgtggactggatcagaagcaccctgagaagagtggaggccaagggcagaccctga

SEQ ID NO: 3218 - RNA, 648 nt, synthetic construct
  misc_feature 1..648: note = derived and/or modified sequence opt5 fromproteinase-3__Homo_sapiens__CBI83574
  source 1..648: mol_type = other RNA
atggccagcctgcagatgagaggcaaccccgggtcccacttctgcggaggcaccctcatccatccttcttttgtgctgacagctgcccactgtcttcgggacattccgcaacgcctggtcaatgttgtgctcggggcgcataacgtgagaacgcaggagcccacccagcagcacttcagcgtcgctcaagtgtttctgaataactacgatgccgaaaataaacttaacgacatcctgctcattcagctgtcctctcctgccaatctgagcgcttccgttgccacagtgcagctcccccagcaagatcagcctgtcccccatggaacccagtgcctggctatgggctgggggcgggtgggagcccacgaccctccggcgcaggttcttcaagagctgaacgtgacagtcgtgaccttcttttgtcgcccccacaatatctgcacattcgtgcctagacggaaggccggcatttgttttggcgattctgggggacccctcatctgcgacggcatcattcaggggatcgatagcttcgtcatttggggatgtgctacccgcctgtttcctgacttctttacgagagttgccctttatgtggattggatccggtccaccctgcgcagagtggaagctaagggccggccctga

SEQ ID NO: 3219 - protein, 256 aa, synthetic construct
  REGION 1..256: note = proteinase-3__Homo_sapiens__P24158
MAHRPPSPALASVLLALLLSGAARAAEIVGGHEAQPHSRPYMASLQMRGNPGSHFCGGTLIHPSFVLTAAHCLRDIPQRLVNVVLGAHNVRTQEPTQQHFSVAQVFLNNYDAENKLNDVLLIQLSSPANLSASVATVQLPQQDQPVPHGTQCLAMGWGRVGAHDPPAQVLQELNVTVVTFFCRPHNICTFVPRRKAGICFGDSGGPLICDGIIQGIDSFVIWGCATRLFPDFFTRVALYVDWIRSTLRRVEAKGRP

SEQ ID NO: 3220 - RNA, 771 nt, synthetic construct
  misc_feature 1..771: note = proteinase-3__Homo_sapiens__AAH96183
  source 1..771: mol_type = other RNA
atggctcaccggccccccagccctgccctggcgtccgtgctgctggccttgctgctgagcggtgctgcccgagctgcggagatcgtgggcgggcacgaggcgcagccacactcccggccctacatggcctccctgcagatgcgggggaacccgggcagccacttctgcggaggcaccttgatccaccccagcttcgtgctgacggccgcgcactgcctgcgggacataccccagcgcctggtgaacgtggtgctcggagcccacaacgtgcggacgcaggagcccacccagcagcacttctcggtggctcaggtgtttctgaacaactacgacgcggagaacaaactgaacgacgttctcctcatccagctgagcagcccagccaacctcagtgcctccgtcgccacagtccagctgccacagcaggaccagccagtgccccacggcacccagtgcctggccatgggctggggccgcgtgggtgcccacgaccccccagcccaggtcctgcaggagctcaatgtcaccgtggtcaccttcttctgccggccacataacatttgcactttcgtccctcgccgcaaggccggcatctgcttcggagactcaggtggccccctgatctgtgatggcatcatccaaggaatagactccttcgtgatctggggatgtgccacccgccttttccctgacttcttcacgcgggtagccctctacgtggactggatccgttccacgctgcgccgtgtggaggccaagggccgcccctga

SEQ ID NO: 3221 - RNA, 771 nt, synthetic construct
  misc_feature 1..771: note = derived and/or modified sequence opt1 fromproteinase-3__Homo_sapiens__AAH96183
  source 1..771: mol_type = other RNA
atggcccaccggcccccgagccccgccctggcgtccgtgctcctggccctgctcctgagcggcgccgcccgcgccgcggagatcgtcgggggccacgaggcccagccccactcccgcccctacatggccagcctgcagatgcgggggaacccgggctcccacttctgcgggggcaccctcatccaccccagcttcgtgctgaccgccgcgcactgcctgcgcgacatcccccagcggctcgtgaacgtcgtgctgggcgcccacaacgtgcgcacgcaggagcccacccagcagcacttctccgtcgcccaggtgttcctgaacaactacgacgccgagaacaagctcaacgacgtgctgctgatccagctcagctccccggccaacctgagcgcgtccgtcgccaccgtgcagctgccccagcaggaccagcccgtgccccacgggacccagtgcctcgccatgggctgggggcgggtcggcgcccacgacccgcccgcccaggtgctgcaggagctgaacgtgacggtcgtgaccttcttctgccgcccccacaacatctgcaccttcgtgccccggcgcaaggcggggatctgcttcggcgacagcggcgggccgctcatctgcgacggcatcatccaggggatcgactccttcgtcatctggggctgcgccacccggctgttccccgacttcttcacgcgcgtggccctgtacgtggactggatccggagcaccctccgccgggtcgaggccaagggccgcccctga

SEQ ID NO: 3222 - RNA, 771 nt, synthetic construct
  misc_feature 1..771: note = derived and/or modified sequence opt2 fromproteinase-3__Homo_sapiens__AAH96183
  source 1..771: mol_type = other RNA
atggcccaccgccccccctcccccgccctcgcctccgtcctcctcgccctcctcctctccggcgccgcccgcgccgccgagatcgtcggcggccacgaggcccagccccactcccgcccctacatggcctccctccagatgcgcggcaaccccggctcccacttctgcggcggcaccctcatccacccctccttcgtcctcaccgccgcccactgcctccgcgacatcccccagcgcctcgtcaacgtcgtcctcggcgcccacaacgtccgcacccaggagcccacccagcagcacttctccgtcgcccaggtcttcctcaacaactacgacgccgagaacaagctcaacgacgtcctcctcatccagctctcctcccccgccaacctctccgcctccgtcgccaccgtccagctcccccagcaggaccagcccgtcccccacggcacccagtgcctcgccatgggctggggccgcgtcggcgcccacgacccccccgcccaggtcctccaggagctcaacgtcaccgtcgtcaccttcttctgccgcccccacaacatctgcaccttcgtcccccgccgcaaggccggcatctgcttcggcgactccggcggccccctcatctgcgacggcatcatccagggcatcgactccttcgtcatctggggctgcgccacccgcctcttccccgacttcttcacccgcgtcgccctctacgtcgactggatccgctccaccctccgccgcgtcgaggccaagggccgcccctga

SEQ ID NO: 3223 - RNA, 771 nt, synthetic construct
  misc_feature 1..771: note = derived and/or modified sequence opt3 fromproteinase-3__Homo_sapiens__AAH96183
  source 1..771: mol_type = other RNA
atggcccacagaccccctagcccagctctggcatccgtgctccttgccctgttgttatctggcgcggctagggccgcagagatcgtcgggggacatgaagcccagccgcactcacggccctacatggctagtctgcaaatgcgcggtaaccctggcagccatttctgcgggggaaccctaattcacccatcctttgttctcacagcagcccattgtctgcgagacataccccagcgtcttgtgaatgtagtgctgggcgctcacaacgtcagaactcaggagcctacgcagcaacacttctctgtggcccaggtgtttttgaataactatgatgcggaaaataagctcaacgacgttctgctgatccagctctcgtcaccagcaaatttaagcgccagtgtcgctaccgtgcagctgccccaacaggatcagcctgtaccacatggtacacagtgccttgccatggggtggggaagggttggcgcacacgacccgcccgctcaagtgttgcaggagctgaacgtcactgtggtgaccttcttttgtcggcctcataatatttgcacattcgtcccacgcagaaaagccggcatctgttttggggattccggaggtcccctaatttgcgacggcatcatacaggggatcgattctttcgttatttggggatgtgcgaccaggctctttcctgacttctttactcgggtggccctgtacgtagattggatccgcagcacacttcgaagagtggaagcaaagggcaggccatga

SEQ ID NO: 3224 - RNA, 771 nt, synthetic construct
  misc_feature 1..771: note = derived and/or modified sequence opt4 fromproteinase-3__Homo_sapiens__AAH96183
  source 1..771: mol_type = other RNA
atggcccacagaccccccagccccgccctggccagcgtgctgctggccctgctgctgagcggcgccgccagagccgccgagatcgtgggcggccacgaggcccagccccacagcagaccctacatggccagcctgcagatgagaggcaaccccggcagccacttctgcggcggcaccctgatccaccccagcttcgtgctgaccgccgcccactgcctgagagacatcccccagagactggtgaacgtggtgctgggcgcccacaacgtgagaacccaggagcccacccagcagcacttcagcgtggcccaggtgttcctgaacaactacgacgccgagaacaagctgaacgacgtgctgctgatccagctgagcagccccgccaacctgagcgccagcgtggccaccgtgcagctgccccagcaggaccagcccgtgccccacggcacccagtgcctggccatgggctggggcagagtgggcgcccacgacccccccgcccaggtgctgcaggagctgaacgtgaccgtggtgaccttcttctgcagaccccacaacatctgcaccttcgtgcccagaagaaaggccggcatctgcttcggcgacagcggcggccccctgatctgcgacggcatcatccagggcatcgacagcttcgtgatctggggctgcgccaccagactgttccccgacttcttcaccagagtggccctgtacgtggactggatcagaagcaccctgagaagagtggaggccaagggcagaccctga

SEQ ID NO: 3225 - RNA, 771 nt, synthetic construct
  misc_feature 1..771: note = derived and/or modified sequence opt5 fromproteinase-3__Homo_sapiens__AAH96183
  source 1..771: mol_type = other RNA
atggcccacagaccccctagcccggctctggcctccgtgctcctggcgcttctgctctctggcgctgcccgggccgctgagatcgtcgggggacatgaagcccagccccacagccgcccttacatggcttccctgcaaatgagaggcaaccccgggtctcatttctgcggaggcacccttattcaccctagctttgttctgacagccgcgcattgtctccgggacatcccccagcgcctggtgaatgtggtcctgggggcccacaacgtgagaacgcaggagcctacccagcaacacttctccgttgctcaggtgtttctcaataactatgatgccgaaaataagctgaacgacgtccttctgattcagctctctagcccggctaatctgtccgccagcgtggcgacagttcagcttccccaacaggatcagcctgtgccccatggaacccagtgcctggccatgggctggggccgggtcggggctcacgaccctcccgcccaagtgctccaggagctgaacgtgacagtcgttaccttcttttgtcgcccgcataatatctgcacattcgtgcctagacggaaagctggaatttgttttggcgattctgggggacccctgatctgcgacggcatcattcaggggatcgattccttcgtgatttggggatgtgccacccgcctctttcctgacttctttacgagagtcgccctgtacgtggattggatccggagcacccttcgcagagttgaagctaagggccggccctga

SEQ ID NO: 3226 - protein, 919 aa, synthetic construct
  REGION 1..919: note = PSA__Homo_sapiens__P55786
MWLAAAAPSLARRLLFLGPPPPPLLLLVFSRSSRRRLHSLGLAAMPEKRPFERLPADVSPINYSLCLKPDLLDFTFEGKLEAAAQVRQATNQIVMNCADIDIITASYAPEGDEEIHATGFNYQNEDEKVTLSFPSTLQTGTGTLKIDFVGELNDKMKGFYRSKYTTPSGEVRYAAVTQFEATDARRAFPCWDEPAIKATFDISLVVPKDRVALSNMNVIDRKPYPDDENLVEVKFARTPVMSTYLVAFVVGEYDFVETRSKDGVCVRVYTPVGKAEQGKFALEVAAKTLPFYKDYFNVPYPLPKIDLIAIADFAAGAMENWGLVTYRETALLIDPKNSCSSSRQWVALVVGHELAHQWFGNLVTMEWWTHLWLNEGFASWIEYLCVDHCFPEYDIWTQFVSADYTRAQELDALDNSHPIEVSVGHPSEVDEIFDAISYSKGASVIRMLHDYIGDKDFKKGMNMYLTKFQQKNAATEDLWESLENASGKPIAAVMNTWTKQMGFPLIYVEAEQVEDDRLLRLSQKKFCAGGSYVGEDCPQWMVPITISTSEDPNQAKLKILMDKPEMNVVLKNVKPDQWVKLNLGTVGFYRTQYSSAMLESLLPGIRDLSLPPVDRLGLQNDLFSLARAGIISTVEVLKVMEAFVNEPNYTVWSDLSCNLGILSTLLSHTDFYEEIQEFVKDVFSPIGERLGWDPKPGEGHLDALLRGLVLGKLGKAGHKATLEEARRRFKDHVEGKQILSADLRSPVYLTVLKHGDGTTLDIMLKLHKQADMQEEKNRIERVLGATLLPDLIQKVLTFALSEEVRPQDTVSVIGGVAGGSKHGRKAAWKFIKDNWEELYNRYQGGFLISRLIKLSVEGFAVDKMAGEVKAFFESHPAPSAERTIQQCCENILLNAAWLKRDAESIHQYLLQRKASPPTV

SEQ ID NO: 3227 - RNA, 2760 nt, synthetic construct
  misc_feature 1..2760: note = PSA__Homo_sapiens__CCDS45721.1
  source 1..2760: mol_type = other RNA
atgtggctggcagctgccgccccctccctcgctcgccgcctgctcttcctcggccctccgcctcctcccctcctccttctcgtcttcagccgctcctctcgccgccgcctccacagcctgggcctcgccgcgatgccggagaagaggcccttcgagcggctgcctgccgatgtctcccccatcaactacagcctttgcctcaagcccgacttgctggacttcaccttcgagggcaagctggaggccgccgcccaggtgaggcaggcgactaatcagattgtgatgaattgtgctgatattgatattattacagcttcatatgcaccagaaggagatgaagaaatacatgctacaggatttaactatcagaatgaagatgaaaaagtcaccttgtctttccctagtactctgcaaacaggtacgggaaccttaaagatagattttgttggagagctgaatgacaaaatgaaaggtttctatagaagtaaatatactaccccttctggagaggtgcgctatgctgctgtaacacagtttgaggctactgatgcccgaagggcttttccttgctgggatgagcctgctatcaaagcaacttttgatatctcattggttgttcctaaagacagagtagctttatcaaacatgaatgtaattgaccggaaaccataccctgatgatgaaaatttagtggaagtgaagtttgcccgcacacctgttatgtctacatatctggtggcatttgttgtgggtgaatatgactttgtagaaacaaggtcaaaagatggtgtgtgtgtccgtgtttacactcctgttggcaaagcagagcaaggaaaatttgcgttagaggttgctgctaaaaccttgcctttttataaggactacttcaatgttccttatcctctacctaaaattgatctcattgctattgcagactttgcagctggtgccatggagaactggggccttgttacttatagggagactgcattgcttattgatccaaaaaattcctgttcttcatcccgccagtgggttgctctggttgtgggacatgaactcgcccatcaatggtttggaaatcttgttactatggaatggtggactcatctttggttaaatgaaggttttgcatcctggattgaatatctgtgtgtagaccactgcttcccagagtatgatatttggactcagtttgtttctgctgattacacccgtgcccaggagcttgacgccttagataacagccatcctattgaagtcagtgtgggccatccatctgaggttgatgagatatttgatgctatatcatatagcaaaggtgcatctgtcatccgaatgctgcatgactacattggggataaggactttaagaaaggaatgaacatgtatttaaccaagttccaacaaaagaatgctgccacagaggatctctgggaaagtttagaaaatgctagtggtaaacctatagcagctgtgatgaatacctggaccaaacaaatgggatttcccctcatttatgtggaagctgaacaggtagaagatgacagattattgaggttgtcccaaaagaagttctgtgctggtgggtcatatgttggtgaagattgtccccagtggatggtccctatcacaatctctactagtgaagaccccaaccaggccaaactaaaaattctaatggacaagccagagatgaatgtggttttgaaaaatgtcaaaccagaccaatgggtgaagttaaacttaggaacagttgggttttatcggacccagtacagctctgccatgctggaaagtttattaccaggcattcgtgacctttctctgccccctgtggatcgacttggattacagaatgacctcttctccttggctcgagctggaatcattagcactgtagaggttctaaaagtcatggaggcttttgtgaatgagcccaattatactgtatggagcgacctgagctgtaacctggggattctctcaactctcttgtcccacacagacttctatgaggaaatccaggagtttgtgaaagatgtcttttcacctataggggagagactgggctgggaccccaaacctggagaaggtcatctcgatgcactcctgaggggcttggttctgggaaaactaggaaaagcaggacataaggcaacgttagaagaagcccgtcgtcggtttaaggaccacgtggaaggaaaacagattctctccgctgatctgaggagtcctgtctatctgactgttttgaagcatggtgatggcactactttagatattatgttaaaacttcataaacaagcagatatgcaagaagagaaaaaccgaatcgaaagagtccttggcgctactcttttgcctgacctgattcaaaaagtcctcacgtttgcactttcagaagaggtacgtccacaggacactgtatcggtaattggtggagtagctggaggcagcaagcatggtaggaaagctgcttggaaattcataaaggacaactgggaagaactttataaccgataccagggaggattcttaatatccagactaataaagctatcagttgagggatttgcagttgataaaatggctggagaggttaaggctttcttcgagagtcacccagctccttcagctgagcgtaccatccagcagtgttgtgaaaatattctgctgaatgctgcctggctaaagcgagatgctgagagcatccaccagtacctccttcagcggaaggcctcaccacccacagtgtga

SEQ ID NO: 3228 - RNA, 2760 nt, synthetic construct
  misc_feature 1..2760: note = derived and/or modified sequence opt1 fromPSA__Homo_sapiens__CCDS45721.1
  source 1..2760: mol_type = other RNA
atgtggctggccgccgcggcccccagcctcgcccgccggctgctgttcctcggcccgcccccgccgcccctgctgctcctggtgttctcccgcagctcccggcgccggctgcacagcctcgggctggccgccatgcccgagaagcgccccttcgagcggctgcccgcggacgtctcccccatcaactacagcctctgcctgaagcccgacctgctcgacttcaccttcgagggcaagctggaggccgccgcccaggtgcgccaggcgaccaaccagatcgtgatgaactgcgccgacatcgacatcatcacggcctcctacgcccccgagggggacgaggagatccacgccaccggcttcaactaccagaacgaggacgagaaggtcaccctgagcttcccctccaccctccagacggggaccggcaccctgaagatcgacttcgtgggcgagctgaacgacaagatgaaggggttctaccggagcaagtacaccacgccgtccggcgaggtgcgctacgcggccgtcacccagttcgaggccaccgacgcccggcgcgccttcccctgctgggacgagcccgcgatcaaggccaccttcgacatcagcctcgtggtgcccaaggaccgggtcgccctgtccaacatgaacgtgatcgaccgcaagccgtaccccgacgacgagaacctggtggaggtcaagttcgcccggacgcccgtgatgagcacctacctcgtggccttcgtcgtgggggagtacgacttcgtggagacccgctccaaggacggcgtctgcgtgcgggtgtacacccccgtcgggaaggcggagcagggcaagttcgccctggaggtggccgccaagacgctgccgttctacaaggactacttcaacgtgccctaccccctccccaagatcgacctgatcgccatcgcggacttcgccgccggcgccatggagaactgggggctggtcacctaccgcgagaccgcgctcctgatcgacccgaagaacagctgctccagctcccggcagtgggtggccctggtcgtgggccacgagctcgcccaccagtggttcgggaacctggtgaccatggagtggtggacgcacctgtggctcaacgagggcttcgccagctggatcgagtacctgtgcgtcgaccactgcttccccgagtacgacatctggacccagttcgtgagcgccgactacacccgcgcgcaggagctggacgccctcgacaactcccaccccatcgaggtgagcgtcggccacccctccgaggtggacgagatcttcgacgccatcagctactccaagggggccagcgtgatccggatgctgcacgactacatcggcgacaaggacttcaagaaggggatgaacatgtacctgaccaagttccagcagaagaacgccgcgacggaggacctctgggagtccctggagaacgccagcggcaagccgatcgccgccgtcatgaacacctggaccaagcagatggggttccccctgatctacgtggaggccgagcaggtcgaggacgaccgcctcctgcgcctgtcccagaagaagttctgcgcgggcggcagctacgtgggggaggactgcccccagtggatggtgccgatcaccatctccacgagcgaggaccccaaccaggccaagctcaagatcctgatggacaagcccgagatgaacgtggtcctgaagaacgtgaagcccgaccagtgggtgaagctgaacctcggcaccgtcgggttctaccggacccagtactccagcgccatgctggagtccctgctcccgggcatccgcgacctgagcctgccgcccgtggaccggctcgggctgcagaacgacctgttctccctcgcccgcgcgggcatcatcagcaccgtggaggtcctgaaggtgatggaggccttcgtgaacgagcccaactacacggtctggtccgacctgagctgcaacctcggcatcctgagcaccctgctctcccacaccgacttctacgaggagatccaggagttcgtgaaggacgtgttcagccccatcggggagcggctgggctgggaccccaagcccggggagggccacctggacgccctcctgcgcgggctggtcctcggcaagctgggcaaggccgggcacaaggccaccctggaggaggcgcggcgccggttcaaggaccacgtggagggcaagcagatcctctccgccgacctgcgcagccccgtgtacctgacggtcctcaagcacggggacggcaccaccctggacatcatgctgaagctccacaagcaggccgacatgcaggaggagaagaaccggatcgagcgcgtgctgggcgccaccctgctcccggacctgatccagaaggtgctgaccttcgccctctccgaggaggtccggccccaggacacggtgagcgtgatcgggggcgtcgccgggggctccaagcacgggcgcaaggcggcctggaagttcatcaaggacaactgggaggagctgtacaaccggtaccagggcggcttcctgatcagccgcctcatcaagctgtccgtggaggggttcgccgtggacaagatggccggcgaggtcaaggcgttcttcgagagccaccccgccccctccgccgagcggaccatccagcagtgctgcgagaacatcctgctcaacgccgcgtggctgaagcgcgacgccgagagcatccaccagtacctgctccagcggaaggcctccccgcccaccgtgtga

SEQ ID NO: 3229 - RNA, 2760 nt, synthetic construct
  misc_feature 1..2760: note = derived and/or modified sequence opt2 fromPSA__Homo_sapiens__CCDS45721.1
  source 1..2760: mol_type = other RNA
atgtggctcgccgccgccgccccctccctcgcccgccgcctcctcttcctcggccccccccccccccccctcctcctcctcgtcttctcccgctcctcccgccgccgcctccactccctcggcctcgccgccatgcccgagaagcgccccttcgagcgcctccccgccgacgtctcccccatcaactactccctctgcctcaagcccgacctcctcgacttcaccttcgagggcaagctcgaggccgccgcccaggtccgccaggccaccaaccagatcgtcatgaactgcgccgacatcgacatcatcaccgcctcctacgcccccgagggcgacgaggagatccacgccaccggcttcaactaccagaacgaggacgagaaggtcaccctctccttcccctccaccctccagaccggcaccggcaccctcaagatcgacttcgtcggcgagctcaacgacaagatgaagggcttctaccgctccaagtacaccaccccctccggcgaggtccgctacgccgccgtcacccagttcgaggccaccgacgcccgccgcgccttcccctgctgggacgagcccgccatcaaggccaccttcgacatctccctcgtcgtccccaaggaccgcgtcgccctctccaacatgaacgtcatcgaccgcaagccctaccccgacgacgagaacctcgtcgaggtcaagttcgcccgcacccccgtcatgtccacctacctcgtcgccttcgtcgtcggcgagtacgacttcgtcgagacccgctccaaggacggcgtctgcgtccgcgtctacacccccgtcggcaaggccgagcagggcaagttcgccctcgaggtcgccgccaagaccctccccttctacaaggactacttcaacgtcccctaccccctccccaagatcgacctcatcgccatcgccgacttcgccgccggcgccatggagaactggggcctcgtcacctaccgcgagaccgccctcctcatcgaccccaagaactcctgctcctcctcccgccagtgggtcgccctcgtcgtcggccacgagctcgcccaccagtggttcggcaacctcgtcaccatggagtggtggacccacctctggctcaacgagggcttcgcctcctggatcgagtacctctgcgtcgaccactgcttccccgagtacgacatctggacccagttcgtctccgccgactacacccgcgcccaggagctcgacgccctcgacaactcccaccccatcgaggtctccgtcggccacccctccgaggtcgacgagatcttcgacgccatctcctactccaagggcgcctccgtcatccgcatgctccacgactacatcggcgacaaggacttcaagaagggcatgaacatgtacctcaccaagttccagcagaagaacgccgccaccgaggacctctgggagtccctcgagaacgcctccggcaagcccatcgccgccgtcatgaacacctggaccaagcagatgggcttccccctcatctacgtcgaggccgagcaggtcgaggacgaccgcctcctccgcctctcccagaagaagttctgcgccggcggctcctacgtcggcgaggactgcccccagtggatggtccccatcaccatctccacctccgaggaccccaaccaggccaagctcaagatcctcatggacaagcccgagatgaacgtcgtcctcaagaacgtcaagcccgaccagtgggtcaagctcaacctcggcaccgtcggcttctaccgcacccagtactcctccgccatgctcgagtccctcctccccggcatccgcgacctctccctcccccccgtcgaccgcctcggcctccagaacgacctcttctccctcgcccgcgccggcatcatctccaccgtcgaggtcctcaaggtcatggaggccttcgtcaacgagcccaactacaccgtctggtccgacctctcctgcaacctcggcatcctctccaccctcctctcccacaccgacttctacgaggagatccaggagttcgtcaaggacgtcttctcccccatcggcgagcgcctcggctgggaccccaagcccggcgagggccacctcgacgccctcctccgcggcctcgtcctcggcaagctcggcaaggccggccacaaggccaccctcgaggaggcccgccgccgcttcaaggaccacgtcgagggcaagcagatcctctccgccgacctccgctcccccgtctacctcaccgtcctcaagcacggcgacggcaccaccctcgacatcatgctcaagctccacaagcaggccgacatgcaggaggagaagaaccgcatcgagcgcgtcctcggcgccaccctcctccccgacctcatccagaaggtcctcaccttcgccctctccgaggaggtccgcccccaggacaccgtctccgtcatcggcggcgtcgccggcggctccaagcacggccgcaaggccgcctggaagttcatcaaggacaactgggaggagctctacaaccgctaccagggcggcttcctcatctcccgcctcatcaagctctccgtcgagggcttcgccgtcgacaagatggccggcgaggtcaaggccttcttcgagtcccaccccgccccctccgccgagcgcaccatccagcagtgctgcgagaacatcctcctcaacgccgcctggctcaagcgcgacgccgagtccatccaccagtacctcctccagcgcaaggcctccccccccaccgtctga

SEQ ID NO: 3230 - RNA, 2760 nt, synthetic construct
  misc_feature 1..2760: note = derived and/or modified sequence opt3 fromPSA__Homo_sapiens__CCDS45721.1
  source 1..2760: mol_type = other RNA
atgtggctggccgctgcagcccccagcctcgcgagaaggcttctgttcttgggccctccaccgccccctttactgctactcgtgttttcccggtcttcacgccgacgtctgcacagtcttgggctggctgccatgccagagaagagacccttcgaaaggttgcctgcagacgtcagcccaatcaactactccctctgcctgaaacccgatctgctcgactttaccttcgagggaaagttagaagccgctgcacaggttcggcaagccacaaatcagattgtgatgaactgtgctgatatagacatcattactgcctcttatgcgcctgagggtgatgaagagatccatgcaacgggctttaattaccagaacgaggacgaaaaagtaaccctgtcgttcccatcaacacttcagactgggaccggaacattgaagattgattttgtgggcgagctgaatgacaaaatgaagggtttctatcgcagcaagtacaccactccgagtggggaagtcagatatgccgctgtgacacaatttgaggccaccgatgcaaggcgggctttcccctgctgggacgagcctgccatcaaagcgacgtttgatatatccctagttgtgccaaaggaccgcgtcgccctctctaacatgaatgtgatcgatcgaaaaccctaccctgacgacgaaaacctggtagaggttaagttcgcaagaactccagtgatgagcacctatcttgtcgcttttgtggtgggagaatacgatttcgtcgagacaaggtccaaagacggcgtttgtgtgcgggtatacactcccgtgggcaaggccgaacaggggaagttcgctctggaggtcgccgcaaaaaccttgccgttttataaggattacttcaatgtgccttatcccctcccaaaaattgacctgatcgccattgctgattttgcggcaggagccatggagaactggggtttagttacataccgtgaaaccgctctgctcatcgaccctaaaaattcatgcagtagctctcgccagtgggtggcccttgtcgtgggccacgagctggcacatcagtggttcgggaacttggtaacgatggaatggtggactcacctatggctgaatgagggatttgcctcctggatagaatatctctgtgttgatcattgcttccccgagtacgacatttggacacaatttgtgtcagctgattataccagagcccaggagctggacgcacttgataacagccacccaatcgaagtcagtgtgggccacccctctgaggtcgacgaaattttcgacgcgatctcctacagcaagggtgcttcggtgatcaggatgctgcatgattacattggggacaaggattttaaaaagggaatgaatatgtatttgactaagttccagcagaaaaacgccgcaacagaggacctctgggaatctctggagaacgcctccggcaagcctatagctgccgttatgaatacctggacgaaacaaatgggctttccattaatctacgtggaggcagaacaggtagaggatgaccggctgctacgactctcacagaagaaattctgtgctgggggaagttatgtcggtgaagattgcccgcaatggatggtgcccattaccatcagcacatccgaggaccctaaccaggccaagctgaagatacttatggataaaccagagatgaatgttgtgttgaagaacgtcaaacccgaccagtgggtgaagctgaatctcggcactgtagggttttaccgcacccagtattctagcgcgatgctggaatcacttctgcctggaattagagatttgagtctcccacccgtggacaggctgggcttacaaaacgatctgttctccctagcccgggctggtatcatcagcacagttgaggtcctcaaagtgatggaagcattcgtgaatgagccgaactacactgtctggtctgacctgtcatgtaatcttgggattttgagtaccctgctcagccacacagacttttatgaagagatccaggagttcgttaaggatgtgttttcccctattggcgaacgcctgggatgggacccaaagcccggcgaggggcatttagatgccctgcttagaggattggtgctcggtaaactgggcaaggctgggcacaaagccaccctagaagaggcaaggcgtcggttcaaggaccacgtagaaggaaaacagatactgtctgcggatctccgatcgcctgtctacctgactgtgcttaagcatggcgacggtacgacattggatatcatgctgaagttacacaaacaggccgacatgcaagaggagaagaacagaattgaaagggttctcggggctaccctgcttcccgatctgatccagaaagtgttgacttttgccctcagcgaggaagtccgcccacaggacaccgtgtccgttatcggcggagtggcaggcgggtcaaagcatggacggaaagctgcctggaagttcattaaagataattgggaggaactgtacaacagatatcagggtggctttctaataagtaggctgatcaagctctctgtagaggggttcgcagtcgacaagatggccggagaggtgaaagcgtttttcgaaagccaccctgctccctccgccgagcgcacaattcaacagtgctgtgaaaatatcctgcttaacgcagcttggttgaagcgagatgccgagtcaattcatcagtacctgttacagcggaaagccagcccaccgaccgtgtga

SEQ ID NO: 3231 - RNA, 2760 nt, synthetic construct
  misc_feature 1..2760: note = derived and/or modified sequence opt4 fromPSA__Homo_sapiens__CCDS45721.1
  source 1..2760: mol_type = other RNA
atgtggctggccgccgccgcccccagcctggccagaagactgctgttcctgggccccccccccccccccctgctgctgctggtgttcagcagaagcagcagaagaagactgcacagcctgggcctggccgccatgcccgagaagagacccttcgagagactgcccgccgacgtgagccccatcaactacagcctgtgcctgaagcccgacctgctggacttcaccttcgagggcaagctggaggccgccgcccaggtgagacaggccaccaaccagatcgtgatgaactgcgccgacatcgacatcatcaccgccagctacgcccccgagggcgacgaggagatccacgccaccggcttcaactaccagaacgaggacgagaaggtgaccctgagcttccccagcaccctgcagaccggcaccggcaccctgaagatcgacttcgtgggcgagctgaacgacaagatgaagggcttctacagaagcaagtacaccacccccagcggcgaggtgagatacgccgccgtgacccagttcgaggccaccgacgccagaagagccttcccctgctgggacgagcccgccatcaaggccaccttcgacatcagcctggtggtgcccaaggacagagtggccctgagcaacatgaacgtgatcgacagaaagccctaccccgacgacgagaacctggtggaggtgaagttcgccagaacccccgtgatgagcacctacctggtggccttcgtggtgggcgagtacgacttcgtggagaccagaagcaaggacggcgtgtgcgtgagagtgtacacccccgtgggcaaggccgagcagggcaagttcgccctggaggtggccgccaagaccctgcccttctacaaggactacttcaacgtgccctaccccctgcccaagatcgacctgatcgccatcgccgacttcgccgccggcgccatggagaactggggcctggtgacctacagagagaccgccctgctgatcgaccccaagaacagctgcagcagcagcagacagtgggtggccctggtggtgggccacgagctggcccaccagtggttcggcaacctggtgaccatggagtggtggacccacctgtggctgaacgagggcttcgccagctggatcgagtacctgtgcgtggaccactgcttccccgagtacgacatctggacccagttcgtgagcgccgactacaccagagcccaggagctggacgccctggacaacagccaccccatcgaggtgagcgtgggccaccccagcgaggtggacgagatcttcgacgccatcagctacagcaagggcgccagcgtgatcagaatgctgcacgactacatcggcgacaaggacttcaagaagggcatgaacatgtacctgaccaagttccagcagaagaacgccgccaccgaggacctgtgggagagcctggagaacgccagcggcaagcccatcgccgccgtgatgaacacctggaccaagcagatgggcttccccctgatctacgtggaggccgagcaggtggaggacgacagactgctgagactgagccagaagaagttctgcgccggcggcagctacgtgggcgaggactgcccccagtggatggtgcccatcaccatcagcaccagcgaggaccccaaccaggccaagctgaagatcctgatggacaagcccgagatgaacgtggtgctgaagaacgtgaagcccgaccagtgggtgaagctgaacctgggcaccgtgggcttctacagaacccagtacagcagcgccatgctggagagcctgctgcccggcatcagagacctgagcctgccccccgtggacagactgggcctgcagaacgacctgttcagcctggccagagccggcatcatcagcaccgtggaggtgctgaaggtgatggaggccttcgtgaacgagcccaactacaccgtgtggagcgacctgagctgcaacctgggcatcctgagcaccctgctgagccacaccgacttctacgaggagatccaggagttcgtgaaggacgtgttcagccccatcggcgagagactgggctgggaccccaagcccggcgagggccacctggacgccctgctgagaggcctggtgctgggcaagctgggcaaggccggccacaaggccaccctggaggaggccagaagaagattcaaggaccacgtggagggcaagcagatcctgagcgccgacctgagaagccccgtgtacctgaccgtgctgaagcacggcgacggcaccaccctggacatcatgctgaagctgcacaagcaggccgacatgcaggaggagaagaacagaatcgagagagtgctgggcgccaccctgctgcccgacctgatccagaaggtgctgaccttcgccctgagcgaggaggtgagaccccaggacaccgtgagcgtgatcggcggcgtggccggcggcagcaagcacggcagaaaggccgcctggaagttcatcaaggacaactgggaggagctgtacaacagataccagggcggcttcctgatcagcagactgatcaagctgagcgtggagggcttcgccgtggacaagatggccggcgaggtgaaggccttcttcgagagccaccccgcccccagcgccgagagaaccatccagcagtgctgcgagaacatcctgctgaacgccgcctggctgaagagagacgccgagagcatccaccagtacctgctgcagagaaaggccagcccccccaccgtgtga

SEQ ID NO: 3232 - RNA, 2760 nt, synthetic construct
  misc_feature 1..2760: note = derived and/or modified sequence opt5 fromPSA__Homo_sapiens__CCDS45721.1
  source 1..2760: mol_type = other RNA
atgtggctggccgctgccgcgcccagcctcgctagacggctgcttttcctgggccctccgccccctcccctcctgcttctggtgttttcccgctctagcagacggcgcctccactccctggggctggccgccatgcctgagaagagacccttcgaacggctccctgctgacgtctctccgatcaactacagcctgtgccttaaacccgatctgctcgactttaccttcgagggaaagctggaagccgctgcccaggttcgccaagcgacaaatcagattgtgatgaactgtgccgatatcgacattatcacggcttcctatgcccctgagggcgatgaagagattcatgctaccgggtttaattaccagaacgaggacgaaaaagtgacactttctttccccagcaccctgcagacaggaaccggcacactcaagatcgattttgtcggggagctgaatgacaaaatgaagggattctatagatccaagtacaccacgcctagcggcgaagtgcggtatgccgcggttacccaatttgaggccacagatgctcgcagagccttcccctgctgggacgagccggctatcaaagccacctttgatatttctctggtggtccctaaggaccgggtggccctctccaacatgaatgttatcgatcgcaaaccctaccctgacgacgaaaacctggtggaggtcaagttcgctagaacacccgtgatgagcacctatcttgtggcgtttgtcgttggcgaatacgatttcgtggagacgcggtctaaagacggggtgtgtgtccgcgtgtacacacccgttggaaaggccgaacagggcaagttcgctctggaggtggccgccaaaaccctccctttttataaggattacttcaatgtcccgtatcccctgcctaaaattgaccttatcgctattgccgattttgcggctggggccatggagaactggggactggtgacatacagagaaaccgccctcctgatcgaccccaagaatagctgctcctcttcccggcagtgggttgctctggtggtcggccacgagctcgcccatcagtggttcgggaacctggtgaccatggaatggtggacacacctttggctgaatgagggatttgctagctggattgaatatctctgtgtcgatcattgcttccctgagtacgacatctggacgcaatttgtgtccgccgattataccagagcgcaggagctggacgcccttgataactctcaccccatcgaagttagcgtgggccacccgtccgaggtcgacgaaattttcgacgctatcagctactctaaaggcgcctccgtgattcgcatgctgcatgattacatcggggacaaggattttaaaaagggaatgaatatgtatctcacaaagttccagcagaaaaacgctgccaccgaggacctgtgggaaagcctggagaacgcgtctggcaagcctattgccgctgttatgaatacatggaccaaacaaatggggtttcccctcatctacgtggaggccgaacaggtcgaggatgaccggctgcttagactgagccagaagaaattctgtgctggaggctcctatgtgggggaagattgccctcaatggatggtgcccatcacgatttctacaagcgaggaccctaaccaggccaagctcaagatcctgatggataaacccgagatgaatgttgtcctgaagaacgtgaaaccggaccagtgggtgaaacttaatctcggaaccgtcggcttttaccgcacccagtattccagcgccatgctggaatctctgctccctggcattcgggatctgtcccttcctcccgtggacagactggggctccaaaacgatctgttcagcctggctcgcgcgggaatcatttctacagttgaggtgcttaaggtcatggaagccttcgtgaatgagcccaactacaccgtttggtccgacctcagctgtaatctgggcatcctgtccacactcctgtctcacacggacttttatgaagagatccaggagttcgtgaaggatgtctttagcccgattggggaacggcttggatgggaccccaagcctggcgaggggcatctggatgctctcctgagaggcctggtgcttggaaaactcggcaaggccgggcacaaagccaccctggaagaggctcgccggagattcaaggaccacgttgaaggaaaacagatcctgtccgccgatctccgctctcccgtgtacctgacagtccttaagcatggcgacgggaccacactggatattatgctcaagctgcacaaacaggcggacatgcaagaggagaagaaccggatcgaaagagtgctgggagctacccttctccctgatctgattcagaaagtgctgacgtttgccctcagcgaggaagtccggccccaggacaccgtttccgtgatcggcggggtggccggcggaagcaagcatggccgcaaagctgcctggaagttcattaaagataattgggaggaactgtacaacagatatcaagggggatttcttatctctcggctgatcaagctctccgtcgagggcttcgcggtggacaagatggctggggaggttaaagcctttttcgaaagccaccctgccccctctgctgagagaacaattcagcagtgctgtgaaaatatcctgctgaacgccgcttggcttaagcgcgatgccgagtccattcatcagtacctgctccagcggaaagcgagcccgcctaccgtgtga

SEQ ID NO: 3233 - protein, 219 aa, synthetic construct
  REGION 1..219: note = PSB9__Homo_sapiens__P28065
MLRAGAPTGDLPRAGEVHTGTTIMAVEFDGGVVMGSDSRVSAGEAVVNRVFDKLSPLHERIYCALSGSAADAQAVADMAAYQLELHGIELEEPPLVLAAANVVRNISYKYREDLSAHLMVAGWDQREGGQVYGTLGGMLTRQPFAIGGSGSTFIYGYVDAAYKPGMSPEECRRFTTDAIALAMSRDGSSGGVIYLVTITAAGVDHRVILGNELPKFYDE

SEQ ID NO: 3234 - RNA, 660 nt, synthetic construct
  misc_feature 1..660: note = PSB9__Homo_sapiens__AAH65513
  source 1..660: mol_type = other RNA
atgctgcgggcgggagcaccaaccggggacttaccccgggcgggagaagtccacaccgggaccaccatcatggcagtggagtttgacgggggcgttgtgatgggttctgattcccgagtgtctgcaggcgaggcggtggtgaaccgagtgtttgacaagctgtccccgctgcacgagcgcatctactgtgcactctctggttcagctgctgatgcccaagccgtggccgacatggccgcctaccagctggagctccatgggatagaactggaggaacctccacttgttttggctgctgcaaatgtggtgagaaatatcagctataaatatcgagaggacttgtctgcacatctcatggtagctggctgggaccaacgtgaaggaggtcaggtatatggaaccctgggaggaatgctgactcgacagccttttgccattggtggctccggcagcacctttatctatggttatgtggatgcagcatataagccaggcatgtctcccgaggagtgcaggcgcttcaccacagacgctattgctctggccatgagccgggatggctcaagcgggggtgtcatctacctggtcactattacagctgccggtgtggaccatcgagtcatcttgggcaatgaactgccaaaattctatgatgagtga

SEQ ID NO: 3235 - RNA, 660 nt, synthetic construct
  misc_feature 1..660: note = derived and/or modified sequence opt1 fromPSB9__Homo_sapiens__AAH65513
  source 1..660: mol_type = other RNA
atgctgcgcgccggcgcccccaccggggacctcccgcgggcgggcgaggtgcacaccgggacgaccatcatggccgtcgagttcgacggcggggtggtgatgggcagcgactcccgcgtcagcgccggcgaggccgtggtgaaccgggtcttcgacaagctgagccccctgcacgagcgcatctactgcgccctctccgggtccgcggccgacgcccaggccgtggcggacatggccgcctaccagctggagctgcacggcatcgagctcgaggagccgcccctggtgctggccgccgcgaacgtcgtgcggaacatcagctacaagtaccgcgaggacctctccgcccacctgatggtggccgggtgggaccagcgggagggcgggcaggtctacggcaccctgggcgggatgctcacccgccagcccttcgccatcggcgggagcggctccacgttcatctacggctacgtggacgccgcgtacaagcccgggatgagccccgaggagtgccggcgcttcaccaccgacgccatcgccctggccatgtcccgggacggcagctccgggggcgtgatctacctggtcaccatcacggccgcgggggtggaccaccgcgtgatcctcggcaacgagctgcccaagttctacgacgagtga

SEQ ID NO: 3236 - RNA, 660 nt, synthetic construct
  misc_feature 1..660: note = derived and/or modified sequence opt2 fromPSB9__Homo_sapiens__AAH65513
  source 1..660: mol_type = other RNA
atgctccgcgccggcgcccccaccggcgacctcccccgcgccggcgaggtccacaccggcaccaccatcatggccgtcgagttcgacggcggcgtcgtcatgggctccgactcccgcgtctccgccggcgaggccgtcgtcaaccgcgtcttcgacaagctctcccccctccacgagcgcatctactgcgccctctccggctccgccgccgacgcccaggccgtcgccgacatggccgcctaccagctcgagctccacggcatcgagctcgaggagccccccctcgtcctcgccgccgccaacgtcgtccgcaacatctcctacaagtaccgcgaggacctctccgcccacctcatggtcgccggctgggaccagcgcgagggcggccaggtctacggcaccctcggcggcatgctcacccgccagcccttcgccatcggcggctccggctccaccttcatctacggctacgtcgacgccgcctacaagcccggcatgtcccccgaggagtgccgccgcttcaccaccgacgccatcgccctcgccatgtcccgcgacggctcctccggcggcgtcatctacctcgtcaccatcaccgccgccggcgtcgaccaccgcgtcatcctcggcaacgagctccccaagttctacgacgagtga

SEQ ID NO: 3237 - RNA, 660 nt, synthetic construct
  misc_feature 1..660: note = derived and/or modified sequence opt3 fromPSB9__Homo_sapiens__AAH65513
  source 1..660: mol_type = other RNA
atgctgagagccggcgctcccaccggggacctccctagggcaggagaggtgcacacaggtactacgatcatggccgtcgagttcgatggcggggttgtgatgggaagcgactcccgggtatctgcgggcgaagctgtggtcaaccgcgtgtttgataaactttcaccactgcatgaacgaatttactgcgccttgagtggtagcgcagccgacgctcaggcagttgccgatatggctgcctatcaattagagctgcacgggatagaactagaggagccgcccctcgtgctggcggcagccaatgtcgtgcgtaacatctcctacaagtatagagaagacctttctgctcatctgatggtagccggatgggatcagagggagggcggccaggtttacgggaccttgggaggtatgctcacacggcagcctttcgcaattggcgggtcgggatcaacttttatctatggctacgtggacgctgcctataagccaggtatgagccccgaagagtgtcgcagattcaccacagatgcgattgccctggcaatgagtagggacgggtcctctggaggcgtcatctacctggtgaccataactgctgccggcgtggatcaccgggtcatcctcgggaatgagttacctaaattttacgacgaatga

SEQ ID NO: 3238 - RNA, 660 nt, synthetic construct
  misc_feature 1..660: note = derived and/or modified sequence opt4 fromPSB9__Homo_sapiens__AAH65513
  source 1..660: mol_type = other RNA
atgctgagagccggcgcccccaccggcgacctgcccagagccggcgaggtgcacaccggcaccaccatcatggccgtggagttcgacggcggcgtggtgatgggcagcgacagcagagtgagcgccggcgaggccgtggtgaacagagtgttcgacaagctgagccccctgcacgagagaatctactgcgccctgagcggcagcgccgccgacgcccaggccgtggccgacatggccgcctaccagctggagctgcacggcatcgagctggaggagccccccctggtgctggccgccgccaacgtggtgagaaacatcagctacaagtacagagaggacctgagcgcccacctgatggtggccggctgggaccagagagagggcggccaggtgtacggcaccctgggcggcatgctgaccagacagcccttcgccatcggcggcagcggcagcaccttcatctacggctacgtggacgccgcctacaagcccggcatgagccccgaggagtgcagaagattcaccaccgacgccatcgccctggccatgagcagagacggcagcagcggcggcgtgatctacctggtgaccatcaccgccgccggcgtggaccacagagtgatcctgggcaacgagctgcccaagttctacgacgagtga

SEQ ID NO: 3239 - RNA, 660 nt, synthetic construct
  misc_feature 1..660: note = derived and/or modified sequence opt5 fromPSB9__Homo_sapiens__AAH65513
  source 1..660: mol_type = other RNA
atgctgagagccggcgctcccaccggggacctccctcgggccggagaggtgcacacaggcacgaccatcatggcggtcgagttcgatgggggagttgtgatgggcagcgactcccgcgtgtctgctggggaggccgtcgtgaacagagtttttgataagctgagcccgcttcatgaacggatttactgcgccctgtccggatctgctgccgacgctcaggccgtggcggatatggccgcttatcaactcgagctgcacggcatcgaacttgaggagccccctctggtcctcgccgctgccaatgtggttcgcaacattagctacaaatatagagaagacctgtccgcgcatctgatggtggccggctgggatcagcgggaagggggacaggtctacggcacactcgggggaatgctgacccgccagcccttcgctatcggcgggtctggaagcacatttatttatggctacgtggacgccgcttataagcctggcatgtcccccgaagagtgtagacggttcaccacagatgccatcgcccttgctatgagccgcgacgggtcttccggaggcgtgatctacctggtcaccattacggcggccggggttgatcacagagtgatcctcggaaatgagctgcctaaattttacgacgaatga

SEQ ID NO: 3240 - protein, 114 aa, synthetic construct
  REGION 1..114: note = PSCA__Homo_sapiens__D3DWI6
MAGLALQPGTALLCYSCKAQVSNEDCLQVENCTQLGEQCWTARIRAVGLLTVISKGCSLNCVDDSQDYYVGKKNITCCDTDLCNASGAHALQPAAAILALLPALGLLLWGPGQL

SEQ ID NO: 3241 - RNA, 345 nt, synthetic construct
  misc_feature 1..345: note = PSCA__Homo_sapiens__EAW82312
  source 1..345: mol_type = other RNA
atggcaggcttggccctgcagccaggcactgccctgctgtgctactcctgcaaagcccaggtgagcaacgaggactgcctgcaggtggagaactgcacccagctgggggagcagtgctggaccgcgcgcatccgcgcagttggcctcctgaccgtcatcagcaaaggctgcagcttgaactgcgtggatgactcacaggactactacgtgggcaagaagaacatcacgtgctgtgacaccgacttgtgcaacgccagcggggcccatgccctgcagccggctgctgccatccttgcgctgctccctgcactcggcctgctgctctggggacccggccagctctag

SEQ ID NO: 3242 - RNA, 345 nt, synthetic construct
  misc_feature 1..345: note = derived and/or modified sequence opt1 fromPSCA__Homo_sapiens__EAW82312
  source 1..345: mol_type = other RNA
atggccggcctggccctccagcccgggaccgcgctgctgtgctacagctgcaaggcccaggtgtccaacgaggactgcctccaggtcgagaactgcacccagctgggcgagcagtgctggaccgcccgcatccgggccgtggggctgctcaccgtgatcagcaagggctgctccctgaactgcgtcgacgacagccaggactactacgtggggaagaagaacatcacgtgctgcgacaccgacctgtgcaacgcctccggcgcgcacgccctccagccggccgccgcgatcctggccctgctccccgccctgggcctgctcctgtgggggcccggccagctgtga

SEQ ID NO: 3243 - RNA, 345 nt, synthetic construct
  misc_feature 1..345: note = derived and/or modified sequence opt2 fromPSCA__Homo_sapiens__EAW82312
  source 1..345: mol_type = other RNA
atggccggcctcgccctccagcccggcaccgccctcctctgctactcctgcaaggcccaggtctccaacgaggactgcctccaggtcgagaactgcacccagctcggcgagcagtgctggaccgcccgcatccgcgccgtcggcctcctcaccgtcatctccaagggctgctccctcaactgcgtcgacgactcccaggactactacgtcggcaagaagaacatcacctgctgcgacaccgacctctgcaacgcctccggcgcccacgccctccagcccgccgccgccatcctcgccctcctccccgccctcggcctcctcctctggggccccggccagctctga

SEQ ID NO: 3244 - RNA, 345 nt, synthetic construct
  misc_feature 1..345: note = derived and/or modified sequence opt3 fromPSCA__Homo_sapiens__EAW82312
  source 1..345: mol_type = other RNA
atggccggcctggctctccagcccgggaccgcacttctgtgctacagctgtaaggcccaagtgtccaacgaggactgcttgcaggtcgaaaattgtacacagttaggagagcagtgctggactgcgagaatcagggctgttggtctgctaacggtgatttctaaaggctgttcactcaactgcgtagatgacagtcaagattattacgtggggaagaaaaatataacctgttgcgacacagatctgtgtaacgccagcggagcacacgcccttcagcctgctgcagccatcctggctttgctcccagccctgggcctgctcttatggggtccggggcagctgtga

SEQ ID NO: 3245 - RNA, 345 nt, synthetic construct
  misc_feature 1..345: note = derived and/or modified sequence opt4 fromPSCA__Homo_sapiens__EAW82312
  source 1..345: mol_type = other RNA
atggccggcctggccctgcagcccggcaccgccctgctgtgctacagctgcaaggcccaggtgagcaacgaggactgcctgcaggtggagaactgcacccagctgggcgagcagtgctggaccgccagaatcagagccgtgggcctgctgaccgtgatcagcaagggctgcagcctgaactgcgtggacgacagccaggactactacgtgggcaagaagaacatcacctgctgcgacaccgacctgtgcaacgccagcggcgcccacgccctgcagcccgccgccgccatcctggccctgctgcccgccctgggcctgctgctgtggggccccggccagctgtga

SEQ ID NO: 3246 - RNA, 345 nt, synthetic construct
  misc_feature 1..345: note = derived and/or modified sequence opt5 fromPSCA__Homo_sapiens__EAW82312
  source 1..345: mol_type = other RNA
atggccggcctggctctccagcccgggaccgccctgctttgctacagctgtaaggcgcaagtgtccaacgaggactgcctgcaggtcgaaaattgtacacagctcggagagcagtgctggacggctagaatccgggccgttggcctgcttaccgtgatttctaaagggtgtagcctgaactgcgtggatgactcccaagattattacgtcggaaagaaaaatatcacatgttgcgacaccgatctctgtaacgcctctggcgctcacgccctgcagcctgctgccgcgattctggccctcctgccggctcttgggctgctcctgtggggacccggccagctttga

SEQ ID NO: 3247 - protein, 123 aa, synthetic construct
  REGION 1..123: note = PSCA__Homo_sapiens__O43653
MKAVLLALLMAGLALQPGTALLCYSCKAQVSNEDCLQVENCTQLGEQCWTARIRAVGLLTVISKGCSLNCVDDSQDYYVGKKNITCCDTDLCNASGAHALQPAAAILALLPALGLLLWGPGQL

SEQ ID NO: 3248 - RNA, 372 nt, synthetic construct
  misc_feature 1..372: note = PSCA__Homo_sapiens__AAC39607
  source 1..372: mol_type = other RNA
atgaaggctgtgctgcttgccctgttgatggcaggcttggccctgcagccaggcactgccctgctgtgctactcctgcaaagcccaggtgagcaacgaggactgcctgcaggtggagaactgcacccagctgggggagcagtgctggaccgcgcgcatccgcgcagttggcctcctgaccgtcatcagcaaaggctgcagcttgaactgcgtggatgactcacaggactactacgtgggcaagaagaacatcacgtgctgtgacaccgacttgtgcaacgccagcggggcccatgccctgcagccggctgccgccatccttgcgctgctccctgcactcggcctgctgctctggggacccggccagctatag

SEQ ID NO: 3249 - RNA, 372 nt, synthetic construct
  misc_feature 1..372: note = derived and/or modified sequence opt1 fromPSCA__Homo_sapiens__AAC39607
  source 1..372: mol_type = other RNA
atgaaggccgtgctgctcgccctgctgatggcgggcctcgccctgcagcccgggaccgccctgctctgctacagctgcaaggcccaggtctccaacgaggactgcctccaggtggagaactgcacccagctgggcgagcagtgctggaccgcccgcatccgggcggtggggctgctgaccgtcatcagcaagggctgctccctgaactgcgtggacgacagccaggactactacgtggggaagaagaacatcacgtgctgcgacaccgacctctgcaacgcctccggcgcccacgccctgcagccggcggccgccatcctggccctcctgcccgccctgggcctcctgctgtgggggcccggccagctctga

SEQ ID NO: 3250 - RNA, 372 nt, synthetic construct
  misc_feature 1..372: note = derived and/or modified sequence opt2 fromPSCA__Homo_sapiens__AAC39607
  source 1..372: mol_type = other RNA
atgaaggccgtcctcctcgccctcctcatggccggcctcgccctccagcccggcaccgccctcctctgctactcctgcaaggcccaggtctccaacgaggactgcctccaggtcgagaactgcacccagctcggcgagcagtgctggaccgcccgcatccgcgccgtcggcctcctcaccgtcatctccaagggctgctccctcaactgcgtcgacgactcccaggactactacgtcggcaagaagaacatcacctgctgcgacaccgacctctgcaacgcctccggcgcccacgccctccagcccgccgccgccatcctcgccctcctccccgccctcggcctcctcctctggggccccggccagctctga

SEQ ID NO: 3251 - RNA, 372 nt, synthetic construct
  misc_feature 1..372: note = derived and/or modified sequence opt3 fromPSCA__Homo_sapiens__AAC39607
  source 1..372: mol_type = other RNA
atgaaggccgtgctgctcgcacttctgatggctggcttggccttacagcccgggaccgcgctgctatgctacagctgtaaagctcaagtctccaacgaggactgcctccaggttgaaaattgtacacagctgggagagcagtgctggactgccagaatcagggcagtgggtcttctgacggtaatttctaagggctgttcattgaactgcgtggatgacagtcaagattattacgtcgggaaaaagaatataacctgttgcgacacagatctctgtaacgccagcggagctcacgcactgcagcctgccgctgccatcctggcgctcttaccagcactgggccttttgctgtggggtccggggcagctatga

SEQ ID NO: 3252 - RNA, 372 nt, synthetic construct
  misc_feature 1..372: note = derived and/or modified sequence opt4 fromPSCA__Homo_sapiens__AAC39607
  source 1..372: mol_type = other RNA
atgaaggccgtgctgctggccctgctgatggccggcctggccctgcagcccggcaccgccctgctgtgctacagctgcaaggcccaggtgagcaacgaggactgcctgcaggtggagaactgcacccagctgggcgagcagtgctggaccgccagaatcagagccgtgggcctgctgaccgtgatcagcaagggctgcagcctgaactgcgtggacgacagccaggactactacgtgggcaagaagaacatcacctgctgcgacaccgacctgtgcaacgccagcggcgcccacgccctgcagcccgccgccgccatcctggccctgctgcccgccctgggcctgctgctgtggggccccggccagctgtga

SEQ ID NO: 3253 - RNA, 372 nt, synthetic construct
  misc_feature 1..372: note = derived and/or modified sequence opt5 fromPSCA__Homo_sapiens__AAC39607
  source 1..372: mol_type = other RNA
atgaaggccgtgctgctcgctctgcttatggccggcctggcgctccagcccgggaccgctctgctttgctacagctgtaaagcccaagtctccaacgaggactgcctgcaggttgaaaattgtacacagctcggagagcagtgctggacggccagaatccgggctgtgggcctgctgaccgtgatttctaaggggtgtagcctcaactgcgtcgatgactcccaagattattacgtgggcaaaaagaatatcacatgttgcgacaccgatctgtgtaacgcctctggagctcacgcccttcagcctgcggccgctattctggccctcctgccggctcttgggctgctcctgtggggacccggccagctgtga

SEQ ID NO: 3254 - protein, 320 aa, synthetic construct
  REGION 1..320: note = PSGR__Homo_sapiens__Q9H255
MSSCNFTHATFVLIGIPGLEKAHFWVGFPLLSMYVVAMFGNCIVVFIVRTERSLHAPMYLFLCMLAAIDLALSTSTMPKILALFWFDSREISFEACLTQMFFIHALSAIESTILLAMAFDRYVAICHPLRHAAVLNNTVTAQIGIVAVVRGSLFFFPLPLLIKRLAFCHSNVLSHSYCVHQDVMKLAYADTLPNVVYGLTAILLVMGVDVMFISLSYFLIIRTVLQLPSKSERAKAFGTCVSHIGVVLAFYVPLIGLSVVHRFGNSLHPIVRVVMGDIYLLLPPVINPIIYGAKTKQIRTRVLAMFKISCDKDLQAVGGK

SEQ ID NO: 3255 - RNA, 963 nt, synthetic construct
  misc_feature 1..963: note = PSGR__Homo_sapiens__AAG40776
  source 1..963: mol_type = other RNA
atgagttcctgcaacttcacacatgccacctttgtgcttattggtatcccaggattagagaaagcccatttctgggttggcttccccctcctttccatgtatgtagtggcaatgtttggaaactgcatcgtggtcttcatcgtaaggacggaacgcagcctgcacgctccgatgtacctctttctctgcatgcttgcagccattgacctggccttatccacatccaccatgcctaagatccttgcccttttctggtttgattcccgagagattagctttgaggcctgtcttacccagatgttctttattcatgccctctcagccattgaatccaccatcctgctggccatggcctttgaccgttatgtggccatctgccacccactgcgccatgctgcagtgctcaacaatacagtaacagcccagattggcatcgtggctgtggtccgcggatccctcttttttttcccactgcctctgctgatcaagcggctggccttctgccactccaatgtcctctcgcactcctattgtgtccaccaggatgtaatgaagttggcctatgcagacactttgcccaatgtggtatatggtcttactgccattctgctggtcatgggcgtggacgtaatgttcatctccttgtcctattttctgataatacgaacggttctgcaactgccttccaagtcagagcgggccaaggcctttggaacctgtgtgtcacacattggtgtggtactcgccttctatgtgccacttattggcctctcagttgtacaccgctttggaaacagccttcatcccattgtgcgtgttgtcatgggtgacatctacctgctgctgcctcctgtcatcaatcccatcatctatggtgccaaaaccaaacagatcagaacacgggtgctggctatgttcaagatcagctgtgacaaggacttgcaggctgtgggaggcaagtga

SEQ ID NO: 3256 - RNA, 963 nt, synthetic construct
  misc_feature 1..963: note = derived and/or modified sequence opt1 fromPSGR__Homo_sapiens__AAG40776
  source 1..963: mol_type = other RNA
atgagctcctgcaacttcacccacgccaccttcgtgctgatcggcatccccgggctcgagaaggcccacttctgggtcggcttcccgctgctgagcatgtacgtggtggcgatgttcgggaactgcatcgtcgtgttcatcgtgcgcacggagcggtccctccacgcccccatgtacctgttcctgtgcatgctcgccgccatcgacctggccctgagcacctccaccatgcccaagatcctcgcgctgttctggttcgacagccgcgagatctccttcgaggcctgcctgacccagatgttcttcatccacgccctcagcgccatcgagtccacgatcctgctggcgatggccttcgaccggtacgtcgccatctgccaccccctccgccacgccgccgtgctgaacaacaccgtgaccgcgcagatcggcatcgtcgccgtggtgcgggggagcctgttcttcttcccgctccccctgctgatcaagcgcctcgccttctgccactccaacgtcctgagccactcctactgcgtgcaccaggacgtgatgaagctggcctacgccgacaccctccccaacgtcgtgtacggcctgacggcgatcctgctcgtgatgggcgtcgacgtgatgttcatcagcctgtcctacttcctgatcatccggaccgtgctccagctgcccagcaagtccgagcgcgccaaggccttcgggacctgcgtcagccacatcggcgtggtgctggccttctacgtcccgctcatcgggctgtccgtggtccaccggttcggcaacagcctgcaccccatcgtgcgcgtggtcatgggggacatctacctcctgctgccgcccgtgatcaaccccatcatctacggcgccaagaccaagcagatccggacgcgcgtgctcgcgatgttcaagatcagctgcgacaaggacctgcaggccgtcggcgggaagtga

SEQ ID NO: 3257 - RNA, 963 nt, synthetic construct
  misc_feature 1..963: note = derived and/or modified sequence opt2 fromPSGR__Homo_sapiens__AAG40776
  source 1..963: mol_type = other RNA
atgtcctcctgcaacttcacccacgccaccttcgtcctcatcggcatccccggcctcgagaaggcccacttctgggtcggcttccccctcctctccatgtacgtcgtcgccatgttcggcaactgcatcgtcgtcttcatcgtccgcaccgagcgctccctccacgcccccatgtacctcttcctctgcatgctcgccgccatcgacctcgccctctccacctccaccatgcccaagatcctcgccctcttctggttcgactcccgcgagatctccttcgaggcctgcctcacccagatgttcttcatccacgccctctccgccatcgagtccaccatcctcctcgccatggccttcgaccgctacgtcgccatctgccaccccctccgccacgccgccgtcctcaacaacaccgtcaccgcccagatcggcatcgtcgccgtcgtccgcggctccctcttcttcttccccctccccctcctcatcaagcgcctcgccttctgccactccaacgtcctctcccactcctactgcgtccaccaggacgtcatgaagctcgcctacgccgacaccctccccaacgtcgtctacggcctcaccgccatcctcctcgtcatgggcgtcgacgtcatgttcatctccctctcctacttcctcatcatccgcaccgtcctccagctcccctccaagtccgagcgcgccaaggccttcggcacctgcgtctcccacatcggcgtcgtcctcgccttctacgtccccctcatcggcctctccgtcgtccaccgcttcggcaactccctccaccccatcgtccgcgtcgtcatgggcgacatctacctcctcctcccccccgtcatcaaccccatcatctacggcgccaagaccaagcagatccgcacccgcgtcctcgccatgttcaagatctcctgcgacaaggacctccaggccgtcggcggcaagtga

SEQ ID NO: 3258 - RNA, 963 nt, synthetic construct
  misc_feature 1..963: note = derived and/or modified sequence opt3 fromPSGR__Homo_sapiens__AAG40776
  source 1..963: mol_type = other RNA
atgagctcctgcaacttcacccacgccacatttgtgctgatcggcattcccgggctcgagaaggctcatttctgggtcggatttcctcttctgtctatgtacgttgtggcaatgttcggtaattgtatagtagtgtttatcgtcagaactgaaaggtcattgcacgccccaatgtatttattcctgtgcatgctagcggctattgacctcgccctgagtacgagcaccatgccgaaaatccttgcactgttttggttcgattcccgggagatttcttttgaagcctgtttgacacagatgttctttatccatgctctctcggcaatagagtcaactatcctgctggccatggctttcgaccgctacgtggccatttgccaccccctccgacatgcggcagttttaaacaataccgtgacagcccaaatcggcattgtcgctgtggtacgtgggagcctgtttttcttccctcttccattgctgatcaagagactagccttttgtcacagtaacgttctctcccactcttattgcgtgcatcaggatgtcatgaaactggcatacgctgacacccttcccaatgtggtgtatggactgactgccatattgctcgtcatgggcgttgatgtgatgttcattagcctgtcctactttttaatcattaggacagtactgcagctcccttcaaagagtgaacgggcgaaagccttcggtacctgtgtgagccacatcggggtcgtgcttgcattttatgttccactgatcggattgtctgtggtccatcgcttcggcaactccctacaccccattgtgagagtagttatgggcgacatatacctgctcctgcctccagtgatcaatccgattatctacggggctaagacgaagcagataaggactcgggtccttgccatgtttaaaatttcatgcgataaggacctgcaagctgtgggaggtaaatga

SEQ ID NO: 3259 - RNA, 963 nt, synthetic construct
  misc_feature 1..963: note = derived and/or modified sequence opt4 fromPSGR__Homo_sapiens__AAG40776
  source 1..963: mol_type = other RNA
atgagcagctgcaacttcacccacgccaccttcgtgctgatcggcatccccggcctggagaaggcccacttctgggtgggcttccccctgctgagcatgtacgtggtggccatgttcggcaactgcatcgtggtgttcatcgtgagaaccgagagaagcctgcacgcccccatgtacctgttcctgtgcatgctggccgccatcgacctggccctgagcaccagcaccatgcccaagatcctggccctgttctggttcgacagcagagagatcagcttcgaggcctgcctgacccagatgttcttcatccacgccctgagcgccatcgagagcaccatcctgctggccatggccttcgacagatacgtggccatctgccaccccctgagacacgccgccgtgctgaacaacaccgtgaccgcccagatcggcatcgtggccgtggtgagaggcagcctgttcttcttccccctgcccctgctgatcaagagactggccttctgccacagcaacgtgctgagccacagctactgcgtgcaccaggacgtgatgaagctggcctacgccgacaccctgcccaacgtggtgtacggcctgaccgccatcctgctggtgatgggcgtggacgtgatgttcatcagcctgagctacttcctgatcatcagaaccgtgctgcagctgcccagcaagagcgagagagccaaggccttcggcacctgcgtgagccacatcggcgtggtgctggccttctacgtgcccctgatcggcctgagcgtggtgcacagattcggcaacagcctgcaccccatcgtgagagtggtgatgggcgacatctacctgctgctgccccccgtgatcaaccccatcatctacggcgccaagaccaagcagatcagaaccagagtgctggccatgttcaagatcagctgcgacaaggacctgcaggccgtgggcggcaagtga

SEQ ID NO: 3260 - RNA, 963 nt, synthetic construct
  misc_feature 1..963: note = derived and/or modified sequence opt5 fromPSGR__Homo_sapiens__AAG40776
  source 1..963: mol_type = other RNA
atgagctcctgcaacttcacccacgccacatttgtgctgatcggcattcccgggctcgagaaggctcatttctgggtgggatttcctctgctttctatgtacgttgtggccatgttcggcaattgtatcgtggtctttattgtgagaacggaacggagcctgcacgcgccgatgtatctcttcctgtgcatgcttgctgccatcgacctggccctctccacctctacaatgcccaaaattctggctctgttttggttcgatagccgcgagatctcctttgaagcctgtctcacccagatgttctttatccatgctctgtctgccattgagagcacaatccttctggcgatggccttcgacagatacgttgctatttgccaccctctccggcatgccgctgtgctgaacaataccgtcacagcccaaatcgggattgtggcggttgtgcgcggatccctgtttttcttcccccttcctctcctgatcaagagactggccttttgtcacagcaacgtcctctctcactcctattgcgtgcatcaggatgtgatgaaactggcttacgccgacacccttcccaatgtcgtttatggcctgacggctattctcctggtgatgggggtggatgtcatgttcatcagcctttcttactttctgatcattcggaccgtgctccagctgccttccaagagcgaacgcgccaaagccttcggaacatgtgtttctcacatcggcgtggtcctggctttttatgtgccgctcattggcctgtccgttgtgcatagattcgggaacagccttcaccccatcgtccgggtggtcatgggagacatttacctgctcctgcctcccgtgatcaatcctatcatttacggcgcgaagaccaagcagatccgcacaagagttcttgccatgtttaaaatttcctgcgataaggacctgcaagctgtcgggggaaaatga

SEQ ID NO: 3261 - protein, 750 aa, synthetic construct
  REGION 1..750: note = PSM__Homo_sapiens__Q04609
MWNLLHETDSAVATARRPRWLCAGALVLAGGFFLLGFLFGWFIKSSNEATNITPKHNMKAFLDELKAENIKKFLYNFTQIPHLAGTEQNFQLAKQIQSQWKEFGLDSVELAHYDVLLSYPNKTHPNYISIINEDGNEIFNTSLFEPPPPGYENVSDIVPPFSAFSPQGMPEGDLVYVNYARTEDFFKLERDMKINCSGKIVIARYGKVFRGNKVKNAQLAGAKGVILYSDPADYFAPGVKSYPDGWNLPGGGVQRGNILNLNGAGDPLTPGYPANEYAYRRGIAEAVGLPSIPVHPIGYYDAQKLLEKMGGSAPPDSSWRGSLKVPYNVGPGFTGNFSTQKVKMHIHSTNEVTRIYNVIGTLRGAVEPDRYVILGGHRDSWVFGGIDPQSGAAVVHEIVRSFGTLKKEGWRPRRTILFASWDAEEFGLLGSTEWAEENSRLLQERGVAYINADSSIEGNYTLRVDCTPLMYSLVHNLTKELKSPDEGFEGKSLYESWTKKSPSPEFSGMPRISKLGSGNDFEVFFQRLGIASGRARYTKNWETNKFSGYPLYHSVYETYELVEKFYDPMFKYHLTVAQVRGGMVFELANSIVLPFDCRDYAVVLRKYADKIYSISMKHPQEMKTYSVSFDSLFSAVKNFTEIASKFSERLQDFDKSNPIVLRMMNDQLMFLERAFIDPLGLPDRPFYRHVIYAPSSHNKYAGESFPGIYDALFDIESKVDPSKAWGEVKRQIYVAAFTVQAAAETLSEVA

SEQ ID NO: 3262 - RNA, 2253 nt, synthetic construct
  misc_feature 1..2253: note = PSM__Homo_sapiens__AAA60209
  source 1..2253: mol_type = other RNA
atgtggaatctccttcacgaaaccgactcggctgtggccaccgcgcgccgcccgcgctggctgtgcgctggggcgctggtgctggcgggtggcttctttctcctcggcttcctcttcgggtggtttataaaatcctccaatgaagctactaacattactccaaagcataatatgaaagcatttttggatgaattgaaagctgagaacatcaagaagttcttatataattttacacagataccacatttagcaggaacagaacaaaactttcagcttgcaaagcaaattcaatcccagtggaaagaatttggcctggattctgttgagctagcacattatgatgtcctgttgtcctacccaaataagactcatcccaactacatctcaataattaatgaagatggaaatgagattttcaacacatcattatttgaaccacctcctccaggatatgaaaatgtttcggatattgtaccacctttcagtgctttctctcctcaaggaatgccagagggcgatctagtgtatgttaactatgcacgaactgaagacttctttaaattggaacgggacatgaaaatcaattgctctgggaaaattgtaattgccagatatgggaaagttttcagaggaaataaggttaaaaatgcccagctggcaggggccaaaggagtcattctctactccgaccctgctgactactttgctcctggggtgaagtcctatccagatggttggaatcttcctggaggtggtgtccagcgtggaaatatcctaaatctgaatggtgcaggagaccctctcacaccaggttacccagcaaatgaatatgcttataggcgtggaattgcagaggctgttggtcttccaagtattcctgttcatccaattggatactatgatgcacagaagctcctagaaaaaatgggtggctcagcaccaccagatagcagctggagaggaagtctcaaagtgccctacaatgttggacctggctttactggaaacttttctacacaaaaagtcaagatgcacatccactctaccaatgaagtgacaagaatttacaatgtgataggtactctcagaggagcagtggaaccagacagatatgtcattctgggaggtcaccgggactcatgggtgtttggtggtattgaccctcagagtggagcagctgttgttcatgaaattgtgaggagctttggaacactgaaaaaggaagggtggagacctagaagaacaattttgtttgcaagctgggatgcagaagaatttggtcttcttggttctactgagtgggcagaggagaattcaagactccttcaagagcgtggcgtggcttatattaatgctgactcatctatagaaggaaactacactctgagagttgattgtacaccgctgatgtacagcttggtacacaacctaacaaaagagctgaaaagccctgatgaaggctttgaaggcaaatctctttatgaaagttggactaaaaaaagtccttccccagagttcagtggcatgcccaggataagcaaattgggatctggaaatgattttgaggtgttcttccaacgacttggaattgcttcaggcagagcacggtatactaaaaattgggaaacaaacaaattcagcggctatccactgtatcacagtgtctatgaaacatatgagttggtggaaaagttttatgatccaatgtttaaatatcacctcactgtggcccaggttcgaggagggatggtgtttgagctagccaattccatagtgctcccttttgattgtcgagattatgctgtagttttaagaaagtatgctgacaaaatctacagtatttctatgaaacatccacaggaaatgaagacatacagtgtatcatttgattcacttttttctgcagtaaagaattttacagaaattgcttccaagttcagtgagagactccaggactttgacaaaagcaacccaatagtattaagaatgatgaatgatcaactcatgtttctggaaagagcatttattgatccattagggttaccagacaggcctttttataggcatgtcatctatgctccaagcagccacaacaagtatgcaggggagtcattcccaggaatttatgatgctctgtttgatattgaaagcaaagtggacccttccaaggcctggggagaagtgaagagacagatttatgttgcagccttcacagtgcaggcagctgcagagactttgagtgaagtagcctaa

SEQ ID NO: 3263 - RNA, 2253 nt, synthetic construct
  misc_feature 1..2253: note = derived and/or modified sequence opt1 fromPSM__Homo_sapiens__AAA60209
  source 1..2253: mol_type = other RNA
atgtggaacctgctccacgagaccgacagcgccgtggccaccgcgcgccggccccgctggctgtgcgccggggccctggtcctcgccgggggcttcttcctgctggggttcctcttcggctggttcatcaagtccagcaacgaggccacgaacatcaccccgaagcacaacatgaaggcgttcctggacgagctgaaggccgagaacatcaagaagttcctctacaacttcacccagatcccccacctggccgggaccgagcagaacttccagctggccaagcagatccagtcccagtggaaggagttcggcctcgacagcgtggagctggcgcactacgacgtgctgctctcctaccccaacaagacgcaccccaactacatcagcatcatcaacgaggacggcaacgagatcttcaacacctccctgttcgagccgcccccgcccgggtacgagaacgtcagcgacatcgtgccgcccttctccgccttcagcccccagggcatgcccgagggggacctggtgtacgtcaactacgcccggaccgaggacttcttcaagctcgagcgcgacatgaagatcaactgctccggcaagatcgtgatcgcccggtacgggaaggtgttccgcggcaacaaggtcaagaacgcccagctggcgggcgccaagggggtgatcctgtacagcgaccccgccgactacttcgcccccggcgtgaagtcctaccccgacgggtggaacctccccggcggcggggtccagcggggcaacatcctgaacctgaacggggccggcgacccgctcacccccgggtaccccgcgaacgagtacgcctaccgccggggcatcgccgaggccgtgggcctgcccagcatcccggtgcaccccatcgggtactacgacgcccagaagctgctcgagaagatgggcgggtccgcgccgcccgacagctcctggcgcggcagcctgaaggtcccctacaacgtggggcccggcttcacgggcaacttctccacccagaaggtgaagatgcacatccacagcaccaacgaggtcacccggatctacaacgtgatcgggacgctgcgcggcgccgtggagcccgaccggtacgtcatcctcgggggccaccgcgacagctgggtgttcgggggcatcgacccccagtccggcgccgccgtggtccacgagatcgtgcggagcttcgggaccctgaagaaggagggctggcgcccgcggcgcaccatcctgttcgcctcctgggacgcggaggagttcgggctcctgggcagcaccgagtgggccgaggagaactcccggctgctccaggagcgcggcgtcgcctacatcaacgccgacagctccatcgaggggaactacacgctgcgggtggactgcacgcccctgatgtacagcctcgtgcacaacctgaccaaggagctgaagtcccccgacgagggcttcgagggcaagagcctctacgagtcctggaccaagaagtccccgagccccgagttcagcgggatgccccgcatctccaagctggggagcggcaacgacttcgaggtcttcttccagcgcctgggcatcgcgtccgggcgggcccgctacaccaagaactgggagaccaacaagttcagcggctaccccctctaccactccgtgtacgagacctacgagctggtggagaagttctacgacccgatgttcaagtaccacctgaccgtcgcccaggtgcgcgggggcatggtgttcgagctcgccaacagcatcgtcctgcccttcgactgccgggactacgccgtggtgctgcggaagtacgcggacaagatctacagcatctccatgaagcacccccaggagatgaagacgtacagcgtctccttcgacagcctgttctccgccgtgaagaacttcaccgagatcgccagcaagttctccgagcgcctccaggacttcgacaagagcaaccccatcgtgctgcggatgatgaacgaccagctgatgttcctcgagcgcgccttcatcgacccgctggggctgcccgaccggcccttctaccgccacgtcatctacgccccctccagccacaacaagtacgcgggcgagtccttcccgggcatctacgacgccctcttcgacatcgagagcaaggtggacccctccaaggcctggggcgaggtgaagcggcagatctacgtcgccgccttcaccgtgcaggcggccgccgagaccctgagcgaggtggcctga

SEQ ID NO: 3264 - RNA, 2253 nt, synthetic construct
  misc_feature 1..2253: note = derived and/or modified sequence opt2 fromPSM__Homo_sapiens__AAA60209
  source 1..2253: mol_type = other RNA
atgtggaacctcctccacgagaccgactccgccgtcgccaccgcccgccgcccccgctggctctgcgccggcgccctcgtcctcgccggcggcttcttcctcctcggcttcctcttcggctggttcatcaagtcctccaacgaggccaccaacatcacccccaagcacaacatgaaggccttcctcgacgagctcaaggccgagaacatcaagaagttcctctacaacttcacccagatcccccacctcgccggcaccgagcagaacttccagctcgccaagcagatccagtcccagtggaaggagttcggcctcgactccgtcgagctcgcccactacgacgtcctcctctcctaccccaacaagacccaccccaactacatctccatcatcaacgaggacggcaacgagatcttcaacacctccctcttcgagccccccccccccggctacgagaacgtctccgacatcgtcccccccttctccgccttctccccccagggcatgcccgagggcgacctcgtctacgtcaactacgcccgcaccgaggacttcttcaagctcgagcgcgacatgaagatcaactgctccggcaagatcgtcatcgcccgctacggcaaggtcttccgcggcaacaaggtcaagaacgcccagctcgccggcgccaagggcgtcatcctctactccgaccccgccgactacttcgcccccggcgtcaagtcctaccccgacggctggaacctccccggcggcggcgtccagcgcggcaacatcctcaacctcaacggcgccggcgaccccctcacccccggctaccccgccaacgagtacgcctaccgccgcggcatcgccgaggccgtcggcctcccctccatccccgtccaccccatcggctactacgacgcccagaagctcctcgagaagatgggcggctccgccccccccgactcctcctggcgcggctccctcaaggtcccctacaacgtcggccccggcttcaccggcaacttctccacccagaaggtcaagatgcacatccactccaccaacgaggtcacccgcatctacaacgtcatcggcaccctccgcggcgccgtcgagcccgaccgctacgtcatcctcggcggccaccgcgactcctgggtcttcggcggcatcgacccccagtccggcgccgccgtcgtccacgagatcgtccgctccttcggcaccctcaagaaggagggctggcgcccccgccgcaccatcctcttcgcctcctgggacgccgaggagttcggcctcctcggctccaccgagtgggccgaggagaactcccgcctcctccaggagcgcggcgtcgcctacatcaacgccgactcctccatcgagggcaactacaccctccgcgtcgactgcacccccctcatgtactccctcgtccacaacctcaccaaggagctcaagtcccccgacgagggcttcgagggcaagtccctctacgagtcctggaccaagaagtccccctcccccgagttctccggcatgccccgcatctccaagctcggctccggcaacgacttcgaggtcttcttccagcgcctcggcatcgcctccggccgcgcccgctacaccaagaactgggagaccaacaagttctccggctaccccctctaccactccgtctacgagacctacgagctcgtcgagaagttctacgaccccatgttcaagtaccacctcaccgtcgcccaggtccgcggcggcatggtcttcgagctcgccaactccatcgtcctccccttcgactgccgcgactacgccgtcgtcctccgcaagtacgccgacaagatctactccatctccatgaagcacccccaggagatgaagacctactccgtctccttcgactccctcttctccgccgtcaagaacttcaccgagatcgcctccaagttctccgagcgcctccaggacttcgacaagtccaaccccatcgtcctccgcatgatgaacgaccagctcatgttcctcgagcgcgccttcatcgaccccctcggcctccccgaccgccccttctaccgccacgtcatctacgccccctcctcccacaacaagtacgccggcgagtccttccccggcatctacgacgccctcttcgacatcgagtccaaggtcgacccctccaaggcctggggcgaggtcaagcgccagatctacgtcgccgccttcaccgtccaggccgccgccgagaccctctccgaggtcgcctga

SEQ ID NO: 3265 - RNA, 2253 nt, synthetic construct
  misc_feature 1..2253: note = derived and/or modified sequence opt3 fromPSM__Homo_sapiens__AAA60209
  source 1..2253: mol_type = other RNA
atgtggaacctgctccacgagaccgacagcgccgtggctacagcaagaaggccccggtggctttgcgccggcgcgctggtcttggctgggggattctttttactgggtttcctatttggctggttcatcaagtcctctaatgaagccactaacattacgcctaaacataatatgaaggcatttctcgatgagctgaaagccgaaaacataaagaaattcctttacaattttacccagatcccacacctggctgggacagagcaaaacttccagttggcaaagcagattcagtcacaatggaaggaatttggactcgacagtgttgagctggcccattatgatgtgctgctcagctacccgaataaaactcaccccaactatatctccattatcaatgaggacggcaacgaaatattcaatacctctttatttgagcctccaccccctggttacgaaaacgtatcggatatcgtgccacccttctcagcttttagccctcaggggatgccagagggagacctggtctatgtgaattacgcccgcacagaggatttcttcaagctagaacgagacatgaaaattaactgtagtggcaagatcgttattgcgcgttatggcaaagtgtttagagggaataaggtcaagaacgcacagttggccggagctaaaggtgtgatcctgtactccgatccggccgactacttcgcacccggcgtaaagtcttatcctgatgggtggaacctaccaggaggcggtgttcagagggggaatatactcaacctgaatggagctggcgacccccttacccctggctacccagccaacgagtatgcgtaccggcgcgggattgccgaagcagtgggactgcccagcatcccggtccatcctattggttattacgatgctcaaaaattgctcgagaagatgggcgggtccgctcccccagactcaagttggagaggaagcctgaaagtgccttataatgtgggccccggttttactgggaacttctctacacagaaggtcaaaatgcacatccactccaccaatgaagttacgaggatctacaacgtgattggcactttacggggagccgtagagccagaccgctacgtgatactgggcgggcatcgagattcatgggtctttggaggtatcgacccccagagcggcgccgcagtggttcacgagattgtgagaagtttcgggaccctcaagaaggaaggatggaggcctcggcgtacaatcctttttgcctcttgggatgctgaggagttcggcctgttgggttccactgaatgggcggaagagaatagccgcctactgcaggagagaggggtcgcatatataaacgccgactcgtctattgaaggcaattacaccctcagggtggattgcacaccactgatgtattcccttgtacataacctgaccaaagagttgaagtcaccggacgaaggatttgagggcaaaagtctctacgaaagctggacgaagaaatccccctctcctgagttcagcgggatgccacggatctcaaagctgggaagtggtaatgattttgaggttttctttcaacgattaggcatcgcttccgggcgcgccagatatactaagaactgggaaacaaataaattcagcggataccccctgtatcactctgtgtacgagacctacgaacttgtcgagaagttctatgaccctatgtttaaataccacctcactgtggcacaggtcaggggcggtatggtgttcgagctggccaactcaattgttcttccatttgattgtcgggactatgctgtggtattgcgcaagtacgccgataaaatctatagtattagcatgaagcatccccaggaaatgaagacatactccgtctctttcgactcgctgtttagcgcagtgaaaaacttcaccgagatagcgtccaagttttcagaaagactccaagacttcgataaaagtaatccgatcgttctgaggatgatgaacgaccagcttatgtttctggagcgtgctttcattgatcctttggggctcccagaccggcccttttatcgacacgtgatctacgccccttctagccataataagtacgcaggcgaatccttccccggaatctatgatgccctgtttgacattgagtcaaaagtcgatccaagcaaggcttggggcgaggtgaagagacagatatacgtagccgcattcacggtgcaggctgccgcggaaaccttatctgaggttgcctga

SEQ ID NO: 3266 - RNA, 2253 nt, synthetic construct
  misc_feature 1..2253: note = derived and/or modified sequence opt4 fromPSM__Homo_sapiens__AAA60209
  source 1..2253: mol_type = other RNA
atgtggaacctgctgcacgagaccgacagcgccgtggccaccgccagaagacccagatggctgtgcgccggcgccctggtgctggccggcggcttcttcctgctgggcttcctgttcggctggttcatcaagagcagcaacgaggccaccaacatcacccccaagcacaacatgaaggccttcctggacgagctgaaggccgagaacatcaagaagttcctgtacaacttcacccagatcccccacctggccggcaccgagcagaacttccagctggccaagcagatccagagccagtggaaggagttcggcctggacagcgtggagctggcccactacgacgtgctgctgagctaccccaacaagacccaccccaactacatcagcatcatcaacgaggacggcaacgagatcttcaacaccagcctgttcgagccccccccccccggctacgagaacgtgagcgacatcgtgccccccttcagcgccttcagcccccagggcatgcccgagggcgacctggtgtacgtgaactacgccagaaccgaggacttcttcaagctggagagagacatgaagatcaactgcagcggcaagatcgtgatcgccagatacggcaaggtgttcagaggcaacaaggtgaagaacgcccagctggccggcgccaagggcgtgatcctgtacagcgaccccgccgactacttcgcccccggcgtgaagagctaccccgacggctggaacctgcccggcggcggcgtgcagagaggcaacatcctgaacctgaacggcgccggcgaccccctgacccccggctaccccgccaacgagtacgcctacagaagaggcatcgccgaggccgtgggcctgcccagcatccccgtgcaccccatcggctactacgacgcccagaagctgctggagaagatgggcggcagcgccccccccgacagcagctggagaggcagcctgaaggtgccctacaacgtgggccccggcttcaccggcaacttcagcacccagaaggtgaagatgcacatccacagcaccaacgaggtgaccagaatctacaacgtgatcggcaccctgagaggcgccgtggagcccgacagatacgtgatcctgggcggccacagagacagctgggtgttcggcggcatcgacccccagagcggcgccgccgtggtgcacgagatcgtgagaagcttcggcaccctgaagaaggagggctggagacccagaagaaccatcctgttcgccagctgggacgccgaggagttcggcctgctgggcagcaccgagtgggccgaggagaacagcagactgctgcaggagagaggcgtggcctacatcaacgccgacagcagcatcgagggcaactacaccctgagagtggactgcacccccctgatgtacagcctggtgcacaacctgaccaaggagctgaagagccccgacgagggcttcgagggcaagagcctgtacgagagctggaccaagaagagccccagccccgagttcagcggcatgcccagaatcagcaagctgggcagcggcaacgacttcgaggtgttcttccagagactgggcatcgccagcggcagagccagatacaccaagaactgggagaccaacaagttcagcggctaccccctgtaccacagcgtgtacgagacctacgagctggtggagaagttctacgaccccatgttcaagtaccacctgaccgtggcccaggtgagaggcggcatggtgttcgagctggccaacagcatcgtgctgcccttcgactgcagagactacgccgtggtgctgagaaagtacgccgacaagatctacagcatcagcatgaagcacccccaggagatgaagacctacagcgtgagcttcgacagcctgttcagcgccgtgaagaacttcaccgagatcgccagcaagttcagcgagagactgcaggacttcgacaagagcaaccccatcgtgctgagaatgatgaacgaccagctgatgttcctggagagagccttcatcgaccccctgggcctgcccgacagacccttctacagacacgtgatctacgcccccagcagccacaacaagtacgccggcgagagcttccccggcatctacgacgccctgttcgacatcgagagcaaggtggaccccagcaaggcctggggcgaggtgaagagacagatctacgtggccgccttcaccgtgcaggccgccgccgagaccctgagcgaggtggcctga

SEQ ID NO: 3267 - RNA, 2253 nt, synthetic construct
  misc_feature 1..2253: note = derived and/or modified sequence opt5 fromPSM__Homo_sapiens__AAA60209
  source 1..2253: mol_type = other RNA
atgtggaacctgctccacgagaccgacagcgccgtggctacagccagacggccccgctggctgtgcgcgggcgctcttgtcctggccgggggattctttctcctgggcttcctttttgggtggttcatcaagtcctctaatgaagccacgaacattacccctaaacataatatgaaggcttttctggatgagctcaaagccgaaaacatcaagaaattcctgtacaattttacacagattccgcacctggctggaaccgagcaaaacttccagctcgccaagcagatccagagccaatggaaggaatttggcctggactccgttgagcttgcgcattatgatgtgctgctctcttaccccaataaaacacaccctaactatattagcatcatcaatgaggacgggaacgaaattttcaatacctccctgtttgagccccctccccctggatacgaaaacgtgtctgatatcgtcccgcccttcagcgccttttcccctcagggcatgcccgagggcgaccttgtgtatgttaattacgctagaacagaggatttcttcaagctggaacgggacatgaaaattaactgtagcgggaagatcgtgattgcccgctatggaaaagtctttagaggcaataaggtgaagaacgctcagctcgccggggcgaaaggagttatcctgtactctgatcctgccgactacttcgctcccggcgtgaagtcctatccggatgggtggaacctgcctggaggcggcgtccagcgggggaatattctcaacctgaatggagccggcgacccccttacccctgggtaccccgctaacgagtatgcctaccgcagaggaatcgccgaagctgtgggcctgcccagcatccctgtgcatccgattgggtattacgatgcgcaaaaactcctggagaagatgggaggctctgctccccctgactccagctggcggggctctcttaaagtcccctataatgttgggcctggatttacgggcaacttctccacccagaaggtgaaaatgcacatccacagcacaaatgaagtgacccgcatttacaacgtcatcgggacactgagaggagccgtggagcccgaccggtacgttattctcggcgggcatcgcgattcctgggtgtttggcggaatcgacccgcagtctggcgccgccgtcgtgcacgagatcgttcggagcttcgggaccctgaagaaggaaggatggagacctcgcagaacgattctgtttgcttcctgggatgccgaggagttcggcctcctggggagcacagagtgggcggaagaaaattctcggcttctgcaggagagaggagtggcttatatcaacgccgactccagcattgaaggcaattacaccctccgcgtcgattgcacacccctgatgtattctcttgtgcataacctgaccaaagagctcaagagccctgacgaagggtttgagggcaaatccctgtacgaatcttggaccaagaaaagcccctcccctgagttcagcggaatgccccggatctctaagctgggctccgggaatgattttgaggtcttctttcaaagactcggaattgccagcggccgcgctcggtatacaaagaactgggaaacgaataaattctctgggtacccgctgtatcactccgtgtacgagacctacgaacttgttgagaagttctatgaccctatgtttaaataccacctgacagtggcccaggtcagaggaggcatggtgttcgagctcgctaacagcatcgttctgccctttgattgtcgcgactatgccgtggtcctgcggaagtacgcggataaaatctattccatttctatgaagcatccccaggaaatgaagacctacagcgtgtccttcgactctctttttagcgccgtgaaaaacttcacagagatcgcttccaagtttagcgaaagactccaagacttcgataaatctaatcctattgttctgcgcatgatgaacgaccagctgatgtttctcgagcgggccttcatcgatccgctggggcttcccgacagacctttttatcgccacgtcatttacgctccctccagccataataagtacgccggcgaatctttccctggaatctatgatgcgctgtttgacattgagtccaaagtggatcccagcaaggcctggggcgaggtgaagcggcagatctacgtcgctgccttcaccgtgcaggctgccgccgaaacgctctctgaggttgcttga

SEQ ID NO: 3268 - protein, 1306 aa, synthetic construct
  REGION 1..1306: note = PTPRC__Homo_sapiens__NP_002829
MTMYLWLKLLAFGFAFLDTEVFVTGQSPTPSPTGLTTAKMPSVPLSSDPLPTHTTAFSPASTFERENDFSETTTSLSPDNTSTQVSPDSLDNASAFNTTGVSSVQTPHLPTHADSQTPSAGTDTQTFSGSAANAKLNPTPGSNAISDVPGERSTASTFPTDPVSPLTTTLSLAHHSSAALPARTSNTTITANTSDAYLNASETTTLSPSGSAVISTTTIATTPSKPTCDEKYANITVDYLYNKETKLFTAKLNVNENVECGNNTCTNNEVHNLTECKNASVSISHNSCTAPDKTLILDVPPGVEKFQLHDCTQVEKADTTICLKWKNIETFTCDTQNITYRFQCGNMIFDNKEIKLENLEPEHEYKCDSEILYNNHKFTNASKIIKTDFGSPGEPQIIFCRSEAAHQGVITWNPPQRSFHNFTLCYIKETEKDCLNLDKNLIKYDLQNLKPYTKYVLSLHAYIIAKVQRNGSAAMCHFTTKSAPPSQVWNMTVSMTSDNSMHVKCRPPRDRNGPHERYHLEVEAGNTLVRNESHKNCDFRVKDLQYSTDYTFKAYFHNGDYPGEPFILHHSTSYNSKALIAFLAFLIIVTSIALLVVLYKIYDLHKKRSCNLDEQQELVERDDEKQLMNVEPIHADILLETYKRKIADEGRLFLAEFQSIPRVFSKFPIKEARKPFNQNKNRYVDILPYDYNRVELSEINGDAGSNYINASYIDGFKEPRKYIAAQGPRDETVDDFWRMIWEQKATVIVMVTRCEEGNRNKCAEYWPSMEEGTRAFGDVVVKINQHKRCPDYIIQKLNIVNKKEKATGREVTHIQFTSWPDHGVPEDPHLLLKLRRRVNAFSNFFSGPIVVHCSAGVGRTGTYIGIDAMLEGLEAENKVDVYGYVVKLRRQRCLMVQVEAQYILIHQALVEYNQFGETEVNLSELHPYLHNMKKRDPPSEPSPLEAEFQRLPSYRSWRTQHIGNQEENKSKNRNSNVIPYDYNRVPLKHELEMSKESEHDSDESSDDDSDSEEPSKYINASFIMSYWKPEVMIAAQGPLKETIGDFWQMIFQRKVKVIVMLTELKHGDQEICAQYWGEGKQTYGDIEVDLKDTDKSSTYTLRVFELRHSKRKDSRTVYQYQYTNWSVEQLPAEPKELISMIQVVKQKLPQKNSSEGNKHHKSTPLLIHCRDGSQQTGIFCALLNLLESAETEEVVDIFQVVKALRKARPGMVSTFEQYQFLYDVIASTYPAQNGQVKKNNHQEDKIEFDNEVDKVKQDANCVNPLGAPEKLPEAKEQAEGSEPTSGTEGPEHSVNGPASPALNQGS

SEQ ID NO: 3269 - RNA, 3921 nt, synthetic construct
  misc_feature 1..3921: note = PTPRC__Homo_sapiens__CCDS1397.2
  source 1..3921: mol_type = other RNA
atgaccatgtatttgtggcttaaactcttggcatttggctttgcctttctggacacagaagtatttgtgacagggcaaagcccaacaccttcccccactggattgactacagcaaagatgcccagtgttccactttcaagtgaccccttacctactcacaccactgcattctcacccgcaagcacctttgaaagagaaaatgacttctcagagaccacaacttctcttagtccagacaatacttccacccaagtatccccggactctttggataatgctagtgcttttaataccacaggtgtttcatcagtacagacgcctcaccttcccacgcacgcagactcgcagacgccctctgctggaactgacacgcagacattcagcggctccgccgccaatgcaaaactcaaccctaccccaggcagcaatgctatctcagatgtcccaggagagaggagtacagccagcacctttcctacagacccagtttccccattgacaaccaccctcagccttgcacaccacagctctgctgccttacctgcacgcacctccaacaccaccatcacagcgaacacctcagatgcctaccttaatgcctctgaaacaaccactctgagcccttctggaagcgctgtcatttcaaccacaacaatagctactactccatctaagccaacatgtgatgaaaaatatgcaaacatcactgtggattacttatataacaaggaaactaaattatttacagcaaagctaaatgttaatgagaatgtggaatgtggaaacaatacttgcacaaacaatgaggtgcataaccttacagaatgtaaaaatgcgtctgtttccatatctcataattcatgtactgctcctgataagacattaatattagatgtgccaccaggggttgaaaagtttcagttacatgattgtacacaagttgaaaaagcagatactactatttgtttaaaatggaaaaatattgaaacctttacttgtgatacacagaatattacctacagatttcagtgtggtaatatgatatttgataataaagaaattaaattagaaaaccttgaacccgaacatgagtataagtgtgactcagaaatactctataataaccacaagtttactaacgcaagtaaaattattaaaacagattttgggagtccaggagagcctcagattattttttgtagaagtgaagctgcacatcaaggagtaattacctggaatccccctcaaagatcatttcataattttaccctctgttatataaaagagacagaaaaagattgcctcaatctggataaaaacctgatcaaatatgatttgcaaaatttaaaaccttatacgaaatatgttttatcattacatgcctacatcattgcaaaagtgcaacgtaatggaagtgctgcaatgtgtcatttcacaactaaaagtgctcctccaagccaggtctggaacatgactgtctccatgacatcagataatagtatgcatgtcaagtgtaggcctcccagggaccgtaatggcccccatgaacgttaccatttggaagttgaagctggaaatactctggttagaaatgagtcgcataagaattgcgatttccgtgtaaaagatcttcaatattcaacagactacacttttaaggcctattttcacaatggagactatcctggagaaccctttattttacatcattcaacatcttataattctaaggcactgatagcatttctggcatttctgattattgtgacatcaatagccctgcttgttgttctctacaaaatctatgatctacataagaaaagatcctgcaatttagatgaacagcaggagcttgttgaaagggatgatgaaaaacaactgatgaatgtggagccaatccatgcagatattttgttggaaacttataagaggaagattgctgatgaaggaagactttttctggctgaatttcagagcatcccgcgggtgttcagcaagtttcctataaaggaagctcgaaagccctttaaccagaataaaaaccgttatgttgacattcttccttatgattataaccgtgttgaactctctgagataaacggagatgcagggtcaaactacataaatgccagctatattgatggtttcaaagaacccaggaaatacattgctgcacaaggtcccagggatgaaactgttgatgatttctggaggatgatttgggaacagaaagccacagttattgtcatggtcactcgatgtgaagaaggaaacaggaacaagtgtgcagaatactggccgtcaatggaagagggcactcgggcttttggagatgttgttgtaaagatcaaccagcacaaaagatgtccagattacatcattcagaaattgaacattgtaaataaaaaagaaaaagcaactggaagagaggtgactcacattcagttcaccagctggccagaccacggggtgcctgaggatcctcacttgctcctcaaactgagaaggagagtgaatgccttcagcaatttcttcagtggtcccattgtggtgcactgcagtgctggtgttgggcgcacaggaacctatatcggaattgatgccatgctagaaggcctggaagccgagaacaaagtggatgtttatggttatgttgtcaagctaaggcgacagagatgcctgatggttcaagtagaggcccagtacatcttgatccatcaggctttggtggaatacaatcagtttggagaaacagaagtgaatttgtctgaattacatccatatctacataacatgaagaaaagggatccacccagtgagccgtctccactagaggctgaattccagagacttccttcatataggagctggaggacacagcacattggaaatcaagaagaaaataaaagtaaaaacaggaattctaatgtcatcccatatgactataacagagtgccacttaaacatgagctggaaatgagtaaagagagtgagcatgattcagatgaatcctctgatgatgacagtgattcagaggaaccaagcaaatacatcaatgcatcttttataatgagctactggaaacctgaagtgatgattgctgctcagggaccactgaaggagaccattggtgacttttggcagatgatcttccaaagaaaagtcaaagttattgttatgctgacagaactgaaacatggagaccaggaaatctgtgctcagtactggggagaaggaaagcaaacatatggagatattgaagttgacctgaaagacacagacaaatcttcaacttatacccttcgtgtctttgaactgagacattccaagaggaaagactctcgaactgtgtaccagtaccaatatacaaactggagtgtggagcagcttcctgcagaacccaaggaattaatctctatgattcaggtcgtcaaacaaaaacttccccagaagaattcctctgaagggaacaagcatcacaagagtacacctctactcattcactgcagggatggatctcagcaaacgggaatattttgtgctttgttaaatctcttagaaagtgcggaaacagaagaggtagtggatatttttcaagtggtaaaagctctacgcaaagctaggccaggcatggtttccacattcgagcaatatcaattcctatatgacgtcattgccagcacctaccctgctcagaatggacaagtaaagaaaaacaaccatcaagaagataaaattgaatttgataatgaagtggacaaagtaaagcaggatgctaattgtgttaatccacttggtgccccagaaaagctccctgaagcaaaggaacaggctgaaggttctgaacccacgagtggcactgaggggccagaacattctgtcaatggtcctgcaagtccagctttaaatcaaggttcatag

SEQ ID NO: 3270 - RNA, 3921 nt, synthetic construct
  misc_feature 1..3921: note = derived and/or modified sequence opt1 fromPTPRC__Homo_sapiens__CCDS1397.2
  source 1..3921: mol_type = other RNA
atgaccatgtacctgtggctcaagctgctggccttcggcttcgccttcctcgacaccgaggtgttcgtcacggggcagagccccaccccgtcccccaccggcctgaccacggcgaagatgcccagcgtgcccctgtccagcgacccgctccccacccacaccaccgccttctcccccgccagcacgttcgagcgcgagaacgacttctccgagaccaccaccagcctgtcccccgacaacacgagcacccaggtgtccccggacagcctggacaacgcctccgccttcaacaccaccggggtcagctccgtgcagacgccccacctccccacccacgcggacagccagaccccctccgccggcaccgacacgcagaccttcagcgggtccgccgccaacgcgaagctgaacccgacccccggcagcaacgccatcagcgacgtgcccggcgagcggtccaccgccagcacgttccccaccgacccggtcagccccctgaccaccacgctctccctggcccaccactccagcgccgcgctgcccgcccgcacctccaacaccaccatcacggccaacaccagcgacgcctacctcaacgcctccgagaccaccacgctgagcccctccgggagcgcggtgatctccaccaccaccatcgccaccacgccgagcaagcccacgtgcgacgagaagtacgccaacatcaccgtggactacctgtacaacaaggagaccaagctgttcaccgccaagctgaacgtcaacgagaacgtggagtgcggcaacaacacgtgcaccaacaacgaggtgcacaacctgaccgagtgcaagaacgcctccgtcagcatctcccacaacagctgcaccgcgcccgacaagaccctcatcctggacgtgcccccgggggtggagaagttccagctgcacgactgcacccaggtcgagaaggccgacaccacgatctgcctcaagtggaagaacatcgagaccttcacgtgcgacacccagaacatcacctaccggttccagtgcggcaacatgatcttcgacaacaaggagatcaagctggagaacctggagcccgagcacgagtacaagtgcgactccgagatcctctacaacaaccacaagttcaccaacgccagcaagatcatcaagaccgacttcgggagccccggcgagccccagatcatcttctgccgctccgaggccgcccaccagggcgtgatcacctggaacccgccccagcggagcttccacaacttcacgctgtgctacatcaaggagaccgagaaggactgcctgaacctcgacaagaacctgatcaagtacgacctgcagaacctcaagccctacaccaagtacgtgctgtccctgcacgcgtacatcatcgccaaggtccagcgcaacgggagcgccgccatgtgccacttcaccacgaagtccgcgccgcccagccaggtgtggaacatgaccgtgtccatgaccagcgacaactccatgcacgtcaagtgccggccgccccgcgaccggaacggcccccacgagcgctaccacctcgaggtggaggccgggaacaccctggtgcggaacgagagccacaagaactgcgacttccgcgtcaaggacctgcagtactccacggactacaccttcaaggcctacttccacaacggcgactaccccggcgagcccttcatcctccaccacagcacctcctacaacagcaaggccctgatcgccttcctggcgttcctcatcatcgtgacctccatcgccctgctggtcgtgctctacaagatctacgacctgcacaagaagcggagctgcaacctggacgagcagcaggagctcgtggagcgcgacgacgagaagcagctgatgaacgtcgagcccatccacgccgacatcctgctggagacgtacaagcggaagatcgccgacgaggggcgcctcttcctggccgagttccagtccatcccgcgggtgttcagcaagttccccatcaaggaggcgcgcaagcccttcaaccagaacaagaaccggtacgtggacatcctgccctacgactacaaccgcgtcgagctcagcgagatcaacggcgacgccgggtccaactacatcaacgccagctacatcgacggcttcaaggagccgcggaagtacatcgccgcccaggggccccgcgacgagaccgtggacgacttctggcgcatgatctgggagcagaaggcgaccgtgatcgtcatggtgacccggtgcgaggagggcaaccgcaacaagtgcgccgagtactggccctccatggaggagggcacgcgggccttcggggacgtggtcgtgaagatcaaccagcacaagcgctgccccgactacatcatccagaagctgaacatcgtgaacaagaaggagaaggccaccggccgggaggtcacccacatccagttcaccagctggccggaccacggggtgcccgaggacccccacctcctcctgaagctgcgccggcgcgtgaacgcgttctccaacttcttcagcggccccatcgtcgtgcactgctccgccggggtgggccggaccggcacgtacatcgggatcgacgccatgctcgagggcctggaggccgagaacaaggtcgacgtgtacgggtacgtggtcaagctgcgccggcagcgctgcctcatggtccaggtggaggcccagtacatcctgatccaccaggcgctggtggagtacaaccagttcggcgagaccgaggtgaacctcagcgagctgcacccgtacctgcacaacatgaagaagcgggacccgccctccgagcccagccccctcgaggccgagttccagcgcctgccctcctaccggagctggcgcacccagcacatcgggaaccaggaggagaacaagtccaagaaccggaacagcaacgtgatcccctacgactacaaccgcgtcccgctgaagcacgagctcgagatgtccaaggagagcgagcacgactccgacgagagctccgacgacgacagcgacagcgaggagccctccaagtacatcaacgccagcttcatcatgtcctactggaagcccgaggtgatgatcgccgcccagggccccctgaaggagaccatcggcgacttctggcagatgatcttccagcggaaggtgaaggtcatcgtgatgctgacggagctcaagcacggggaccaggagatctgcgcgcagtactggggcgaggggaagcagacctacggcgacatcgaggtggacctgaaggacaccgacaagagctccacctacacgctgcgcgtcttcgagctccgccacagcaagcggaaggactcccgcaccgtgtaccagtaccagtacaccaactggagcgtggagcagctgccggccgagcccaaggagctgatctccatgatccaggtcgtgaagcagaagctcccccagaagaacagctccgagggcaacaagcaccacaagagcacgcccctgctgatccactgccgggacgggtcccagcagaccggcatcttctgcgccctcctgaacctgctcgagagcgccgagaccgaggaggtggtcgacatcttccaggtggtgaaggccctgcgcaaggcgcggccggggatggtctccaccttcgagcagtaccagttcctgtacgacgtgatcgccagcacctaccccgcccagaacggccaggtgaagaagaacaaccaccaggaggacaagatcgagttcgacaacgaggtcgacaaggtgaagcaggacgccaactgcgtgaaccccctcggggcgcccgagaagctgccggaggccaaggagcaggccgagggctccgagcccacgagcggcaccgaggggcccgagcactccgtcaacggccccgccagcccggccctgaaccaggggagctga

SEQ ID NO: 3271 - RNA, 3921 nt, synthetic construct
  misc_feature 1..3921: note = derived and/or modified sequence opt2 fromPTPRC__Homo_sapiens__CCDS1397.2
  source 1..3921: mol_type = other RNA
atgaccatgtacctctggctcaagctcctcgccttcggcttcgccttcctcgacaccgaggtcttcgtcaccggccagtcccccaccccctcccccaccggcctcaccaccgccaagatgccctccgtccccctctcctccgaccccctccccacccacaccaccgccttctcccccgcctccaccttcgagcgcgagaacgacttctccgagaccaccacctccctctcccccgacaacacctccacccaggtctcccccgactccctcgacaacgcctccgccttcaacaccaccggcgtctcctccgtccagaccccccacctccccacccacgccgactcccagaccccctccgccggcaccgacacccagaccttctccggctccgccgccaacgccaagctcaaccccacccccggctccaacgccatctccgacgtccccggcgagcgctccaccgcctccaccttccccaccgaccccgtctcccccctcaccaccaccctctccctcgcccaccactcctccgccgccctccccgcccgcacctccaacaccaccatcaccgccaacacctccgacgcctacctcaacgcctccgagaccaccaccctctccccctccggctccgccgtcatctccaccaccaccatcgccaccaccccctccaagcccacctgcgacgagaagtacgccaacatcaccgtcgactacctctacaacaaggagaccaagctcttcaccgccaagctcaacgtcaacgagaacgtcgagtgcggcaacaacacctgcaccaacaacgaggtccacaacctcaccgagtgcaagaacgcctccgtctccatctcccacaactcctgcaccgcccccgacaagaccctcatcctcgacgtcccccccggcgtcgagaagttccagctccacgactgcacccaggtcgagaaggccgacaccaccatctgcctcaagtggaagaacatcgagaccttcacctgcgacacccagaacatcacctaccgcttccagtgcggcaacatgatcttcgacaacaaggagatcaagctcgagaacctcgagcccgagcacgagtacaagtgcgactccgagatcctctacaacaaccacaagttcaccaacgcctccaagatcatcaagaccgacttcggctcccccggcgagccccagatcatcttctgccgctccgaggccgcccaccagggcgtcatcacctggaaccccccccagcgctccttccacaacttcaccctctgctacatcaaggagaccgagaaggactgcctcaacctcgacaagaacctcatcaagtacgacctccagaacctcaagccctacaccaagtacgtcctctccctccacgcctacatcatcgccaaggtccagcgcaacggctccgccgccatgtgccacttcaccaccaagtccgcccccccctcccaggtctggaacatgaccgtctccatgacctccgacaactccatgcacgtcaagtgccgccccccccgcgaccgcaacggcccccacgagcgctaccacctcgaggtcgaggccggcaacaccctcgtccgcaacgagtcccacaagaactgcgacttccgcgtcaaggacctccagtactccaccgactacaccttcaaggcctacttccacaacggcgactaccccggcgagcccttcatcctccaccactccacctcctacaactccaaggccctcatcgccttcctcgccttcctcatcatcgtcacctccatcgccctcctcgtcgtcctctacaagatctacgacctccacaagaagcgctcctgcaacctcgacgagcagcaggagctcgtcgagcgcgacgacgagaagcagctcatgaacgtcgagcccatccacgccgacatcctcctcgagacctacaagcgcaagatcgccgacgagggccgcctcttcctcgccgagttccagtccatcccccgcgtcttctccaagttccccatcaaggaggcccgcaagcccttcaaccagaacaagaaccgctacgtcgacatcctcccctacgactacaaccgcgtcgagctctccgagatcaacggcgacgccggctccaactacatcaacgcctcctacatcgacggcttcaaggagccccgcaagtacatcgccgcccagggcccccgcgacgagaccgtcgacgacttctggcgcatgatctgggagcagaaggccaccgtcatcgtcatggtcacccgctgcgaggagggcaaccgcaacaagtgcgccgagtactggccctccatggaggagggcacccgcgccttcggcgacgtcgtcgtcaagatcaaccagcacaagcgctgccccgactacatcatccagaagctcaacatcgtcaacaagaaggagaaggccaccggccgcgaggtcacccacatccagttcacctcctggcccgaccacggcgtccccgaggacccccacctcctcctcaagctccgccgccgcgtcaacgccttctccaacttcttctccggccccatcgtcgtccactgctccgccggcgtcggccgcaccggcacctacatcggcatcgacgccatgctcgagggcctcgaggccgagaacaaggtcgacgtctacggctacgtcgtcaagctccgccgccagcgctgcctcatggtccaggtcgaggcccagtacatcctcatccaccaggccctcgtcgagtacaaccagttcggcgagaccgaggtcaacctctccgagctccacccctacctccacaacatgaagaagcgcgaccccccctccgagccctcccccctcgaggccgagttccagcgcctcccctcctaccgctcctggcgcacccagcacatcggcaaccaggaggagaacaagtccaagaaccgcaactccaacgtcatcccctacgactacaaccgcgtccccctcaagcacgagctcgagatgtccaaggagtccgagcacgactccgacgagtcctccgacgacgactccgactccgaggagccctccaagtacatcaacgcctccttcatcatgtcctactggaagcccgaggtcatgatcgccgcccagggccccctcaaggagaccatcggcgacttctggcagatgatcttccagcgcaaggtcaaggtcatcgtcatgctcaccgagctcaagcacggcgaccaggagatctgcgcccagtactggggcgagggcaagcagacctacggcgacatcgaggtcgacctcaaggacaccgacaagtcctccacctacaccctccgcgtcttcgagctccgccactccaagcgcaaggactcccgcaccgtctaccagtaccagtacaccaactggtccgtcgagcagctccccgccgagcccaaggagctcatctccatgatccaggtcgtcaagcagaagctcccccagaagaactcctccgagggcaacaagcaccacaagtccacccccctcctcatccactgccgcgacggctcccagcagaccggcatcttctgcgccctcctcaacctcctcgagtccgccgagaccgaggaggtcgtcgacatcttccaggtcgtcaaggccctccgcaaggcccgccccggcatggtctccaccttcgagcagtaccagttcctctacgacgtcatcgcctccacctaccccgcccagaacggccaggtcaagaagaacaaccaccaggaggacaagatcgagttcgacaacgaggtcgacaaggtcaagcaggacgccaactgcgtcaaccccctcggcgcccccgagaagctccccgaggccaaggagcaggccgagggctccgagcccacctccggcaccgagggccccgagcactccgtcaacggccccgcctcccccgccctcaaccagggctcctga

SEQ ID NO: 3272 - RNA, 3921 nt, synthetic construct
  misc_feature 1..3921: note = derived and/or modified sequence opt3 fromPTPRC__Homo_sapiens__CCDS1397.2
  source 1..3921: mol_type = other RNA
atgaccatgtacctgtggctcaagctcctggccttcggctttgctttcttggacacagaggtgtttgtcactgggcagagccccacgccttccccaaccggattaacaactgcaaaaatgccgtctgttcccctgtcaagtgatcctctaccaacccacacaaccgccttcagccccgcgtccacttttgaaagagagaacgacttctctgaaacaaccacgtcgctctcacctgataatactagcacccaagtgagtccagactccctggataacgcttctgcctttaatacaactggtgtaagctccgtgcagacaccccatcttcctacccacgcagactcacagaccccaagtgccggcacggatactcagacattcagcgggtctgctgcaaacgccaagctgaatccgacccccggatccaacgctatctcagacgtccctggcgagaggagcactgccagtacatttccaaccgatcccgtgtctcctttgacgaccacactctccctggcgcatcacagctcggcagccctgccagctcggacttctaataccacaattactgccaacacctccgacgcatatctcaatgcttcagaaacaaccactttaagtcccagcggttccgccgttatatctacgacaaccatcgcgactaccccgagcaaacctacatgcgatgagaagtacgccaacattaccgtggactatctgtacaataaagagactaaacttttcacagcaaagttgaacgtcaatgaaaacgtggagtgtgggaataacacgtgcaccaacaatgaagtacataacctgactgagtgtaagaatgcttcagttagtatctcccacaacagctgcacagcccccgataagaccctaattctcgacgtgccacctggagtcgagaaatttcaactgcacgactgtacacaggtggaaaaggctgatactaccatctgccttaaatggaagaatatagagacgttcacctgtgacacacagaacatcacttatcgctttcagtgcggcaatatgattttcgataacaaggaaatcaaactggagaatttggaacccgagcatgagtacaagtgtgactctgaaattctctataacaatcacaaattcaccaacgcctcaaagatcataaaaacagattttggcagtccaggggagccccaaattatcttctgccgaagcgaagcagcccatcagggagtgattacttggaatcctccacagcgttcctttcacaacttcaccctgtgttacatcaaggagacggaaaaagactgcttaaatctggataagaacctcatcaagtacgaccttcagaacctgaaaccgtatacaaagtacgtcttgtctctacacgcttatattatagcgaaagttcaaagaaatggttcggcagccatgtgccattttaccactaagagcgctcccccttcccaggtgtggaacatgacagtatcaatgaccagtgataattctatgcacgtgaaatgtaggccaccccgggaccgcaacggccctcatgagagataccacctggaggtcgaagccgggaatactctcgtgaggaacgagagccataagaattgcgatttccgggttaaggacctgcagtattccaccgactacacatttaaagcatatttccacaacggagattacccaggcgaaccctttatccttcaccattcaacgagctacaattctaaggccctgattgctttcttggcctttctcatcatagtgacctccattgcactgttagtcgtgctgtataaaatctacgacctacacaagaaacgcagttgtaacctcgatgagcaacaggaactggtagagcgagacgatgagaagcagcttatgaatgttgaaccgatccatgcggacattttgctggagacttataagagaaaaatcgctgatgaaggtaggcttttcctggccgagtttcagagcattcctcgggtgttctctaagttcccaataaaagaggcacgtaagccctttaaccaaaataaaaaccgctacgtcgacatccttccttatgattacaatagagtggaactgtccgagattaacggggacgccggatcaaactatatcaatgctagttacatcgatggcttcaaggaacccaggaagtacattgccgcacagggcccacgggacgagacagtcgatgacttttggcgaatgatatgggaacagaaagctaccgtgatcgttatggtgacacgctgcgaggaggggaacagaaataagtgtgccgaatattggcctagcatggaggaaggaactagggcgttcggtgacgtagtcgtgaaaattaaccagcacaagcggtgccccgattacatcattcaaaaattgaatatcgttaacaagaaagagaaggccaccggccgcgaagtgacgcacatacagtttacatcgtggccagaccatggggtcccggaggatcctcacctcctgttaaagctgagaaggcgtgtgaatgctttctccaactttttctctggacccatcgtagtgcattgtagcgcaggcgttggtcggaccgggacttatattggcatcgacgccatgctagagggactcgaagctgagaataaagtcgatgtgtacggctatgtggtcaagctgcgaagacagaggtgccttatggttcaggtggaagcccaatacattttgatccaccaggcactggtggagtataaccagtttggggaaaccgaggtaaatctctcagagctgcatccatacttacacaacatgaaaaagcgcgatccccctagtgaaccatcacccctggaggcggagttccagcggcttccttcttacagaagctggaggacacaacacataggaaatcaggaagagaacaaatccaagaatcgcaactcaaacgtcattccgtatgactacaatcgagtgccattgaagcatgaactcgagatgagcaaagaaagtgagcacgactctgatgaatccagcgacgatgactcggattcagaggagccctctaagtatatcaacgccagttttattatgtcctactggaaacctgaagttatgatcgctgcccagggtccactgaaggagactataggcgacttctggcaaatgatctttcagcggaaagtgaaggtcattgtgatgctaaccgaactgaagcatggggaccaggagatctgtgcacagtattggggagaaggcaaacaaacatacggtgatattgaggttgacctcaaggatacggacaaaagctctacctatactctgcgtgtgttcgagcttagacacagcaagaggaaagattcccgcacagtataccagtaccagtataccaattggtcagtcgaacagttgcccgctgagcctaaggaactgatcagtatgatacaagtggtgaagcagaaattaccgcagaagaacagctctgaggggaataaacatcacaagtccactcccctcctgattcactgccgggacggctcacagcaaacaggaatcttctgtgcccttctgaacttgctcgaaagtgcagagaccgaggaagtcgttgatatctttcaggtggtaaaagccctgagaaaggctaggccaggcatggtgagcacgttcgagcagtaccaatttctatatgacgtcattgcgtccacttaccctgcccagaatggacaggtgaaaaagaacaatcatcaggaagataagatcgagttcgacaacgaggttgataaagtgaagcaagacgcaaattgcgtcaaccccctgggggctccagaaaaactccctgaggccaaggaacaggccgagggttctgaacccacctcgggcacagaggggccagagcacagcgtgaatggaccggcttcccctgcactgaaccagggctcctga

SEQ ID NO: 3273 - RNA, 3921 nt, synthetic construct
  misc_feature 1..3921: note = derived and/or modified sequence opt4 fromPTPRC__Homo_sapiens__CCDS1397.2
  source 1..3921: mol_type = other RNA
atgaccatgtacctgtggctgaagctgctggccttcggcttcgccttcctggacaccgaggtgttcgtgaccggccagagccccacccccagccccaccggcctgaccaccgccaagatgcccagcgtgcccctgagcagcgaccccctgcccacccacaccaccgccttcagccccgccagcaccttcgagagagagaacgacttcagcgagaccaccaccagcctgagccccgacaacaccagcacccaggtgagccccgacagcctggacaacgccagcgccttcaacaccaccggcgtgagcagcgtgcagaccccccacctgcccacccacgccgacagccagacccccagcgccggcaccgacacccagaccttcagcggcagcgccgccaacgccaagctgaaccccacccccggcagcaacgccatcagcgacgtgcccggcgagagaagcaccgccagcaccttccccaccgaccccgtgagccccctgaccaccaccctgagcctggcccaccacagcagcgccgccctgcccgccagaaccagcaacaccaccatcaccgccaacaccagcgacgcctacctgaacgccagcgagaccaccaccctgagccccagcggcagcgccgtgatcagcaccaccaccatcgccaccacccccagcaagcccacctgcgacgagaagtacgccaacatcaccgtggactacctgtacaacaaggagaccaagctgttcaccgccaagctgaacgtgaacgagaacgtggagtgcggcaacaacacctgcaccaacaacgaggtgcacaacctgaccgagtgcaagaacgccagcgtgagcatcagccacaacagctgcaccgcccccgacaagaccctgatcctggacgtgccccccggcgtggagaagttccagctgcacgactgcacccaggtggagaaggccgacaccaccatctgcctgaagtggaagaacatcgagaccttcacctgcgacacccagaacatcacctacagattccagtgcggcaacatgatcttcgacaacaaggagatcaagctggagaacctggagcccgagcacgagtacaagtgcgacagcgagatcctgtacaacaaccacaagttcaccaacgccagcaagatcatcaagaccgacttcggcagccccggcgagccccagatcatcttctgcagaagcgaggccgcccaccagggcgtgatcacctggaaccccccccagagaagcttccacaacttcaccctgtgctacatcaaggagaccgagaaggactgcctgaacctggacaagaacctgatcaagtacgacctgcagaacctgaagccctacaccaagtacgtgctgagcctgcacgcctacatcatcgccaaggtgcagagaaacggcagcgccgccatgtgccacttcaccaccaagagcgccccccccagccaggtgtggaacatgaccgtgagcatgaccagcgacaacagcatgcacgtgaagtgcagaccccccagagacagaaacggcccccacgagagataccacctggaggtggaggccggcaacaccctggtgagaaacgagagccacaagaactgcgacttcagagtgaaggacctgcagtacagcaccgactacaccttcaaggcctacttccacaacggcgactaccccggcgagcccttcatcctgcaccacagcaccagctacaacagcaaggccctgatcgccttcctggccttcctgatcatcgtgaccagcatcgccctgctggtggtgctgtacaagatctacgacctgcacaagaagagaagctgcaacctggacgagcagcaggagctggtggagagagacgacgagaagcagctgatgaacgtggagcccatccacgccgacatcctgctggagacctacaagagaaagatcgccgacgagggcagactgttcctggccgagttccagagcatccccagagtgttcagcaagttccccatcaaggaggccagaaagcccttcaaccagaacaagaacagatacgtggacatcctgccctacgactacaacagagtggagctgagcgagatcaacggcgacgccggcagcaactacatcaacgccagctacatcgacggcttcaaggagcccagaaagtacatcgccgcccagggccccagagacgagaccgtggacgacttctggagaatgatctgggagcagaaggccaccgtgatcgtgatggtgaccagatgcgaggagggcaacagaaacaagtgcgccgagtactggcccagcatggaggagggcaccagagccttcggcgacgtggtggtgaagatcaaccagcacaagagatgccccgactacatcatccagaagctgaacatcgtgaacaagaaggagaaggccaccggcagagaggtgacccacatccagttcaccagctggcccgaccacggcgtgcccgaggacccccacctgctgctgaagctgagaagaagagtgaacgccttcagcaacttcttcagcggccccatcgtggtgcactgcagcgccggcgtgggcagaaccggcacctacatcggcatcgacgccatgctggagggcctggaggccgagaacaaggtggacgtgtacggctacgtggtgaagctgagaagacagagatgcctgatggtgcaggtggaggcccagtacatcctgatccaccaggccctggtggagtacaaccagttcggcgagaccgaggtgaacctgagcgagctgcacccctacctgcacaacatgaagaagagagacccccccagcgagcccagccccctggaggccgagttccagagactgcccagctacagaagctggagaacccagcacatcggcaaccaggaggagaacaagagcaagaacagaaacagcaacgtgatcccctacgactacaacagagtgcccctgaagcacgagctggagatgagcaaggagagcgagcacgacagcgacgagagcagcgacgacgacagcgacagcgaggagcccagcaagtacatcaacgccagcttcatcatgagctactggaagcccgaggtgatgatcgccgcccagggccccctgaaggagaccatcggcgacttctggcagatgatcttccagagaaaggtgaaggtgatcgtgatgctgaccgagctgaagcacggcgaccaggagatctgcgcccagtactggggcgagggcaagcagacctacggcgacatcgaggtggacctgaaggacaccgacaagagcagcacctacaccctgagagtgttcgagctgagacacagcaagagaaaggacagcagaaccgtgtaccagtaccagtacaccaactggagcgtggagcagctgcccgccgagcccaaggagctgatcagcatgatccaggtggtgaagcagaagctgccccagaagaacagcagcgagggcaacaagcaccacaagagcacccccctgctgatccactgcagagacggcagccagcagaccggcatcttctgcgccctgctgaacctgctggagagcgccgagaccgaggaggtggtggacatcttccaggtggtgaaggccctgagaaaggccagacccggcatggtgagcaccttcgagcagtaccagttcctgtacgacgtgatcgccagcacctaccccgcccagaacggccaggtgaagaagaacaaccaccaggaggacaagatcgagttcgacaacgaggtggacaaggtgaagcaggacgccaactgcgtgaaccccctgggcgcccccgagaagctgcccgaggccaaggagcaggccgagggcagcgagcccaccagcggcaccgagggccccgagcacagcgtgaacggccccgccagccccgccctgaaccagggcagctga

SEQ ID NO: 3274 - RNA, 3921 nt, synthetic construct
  misc_feature 1..3921: note = derived and/or modified sequence opt5 fromPTPRC__Homo_sapiens__CCDS1397.2
  source 1..3921: mol_type = other RNA
atgaccatgtacctgtggctcaagctgcttgccttcggctttgctttcctggacacagaggtgtttgtcacggggcagagccccaccccttccccgacaggactcaccacagccaaaatgccctctgttcctctgagctccgatccccttcctacccacacaaccgcgttctctcccgctagcacgtttgaaagagagaacgacttctccgaaaccacaacctctctgagccctgataatacatccacccaagtgagcccggactctctcgataacgcctccgcctttaatacgacaggcgtgagctctgtccagacaccccatctgcctacccacgctgactcccagacccccagcgccgggaccgatacacagacgttctctggatccgctgccaacgcgaagctgaatcctacccccggcagcaacgccatctccgacgtgccgggggagcggtctacagctagcacctttcctacagatcccgtttcccctctcaccacgacactgagccttgcccatcactcttccgctgccctgcccgcgcgcaccagcaataccacaattaccgccaacacatctgacgcttatctcaatgccagcgaaacgaccacactgtccccctctggaagcgctgtgatctccaccacaaccattgccacgacccctagcaaaccgacatgcgatgagaagtacgccaacatcaccgtcgactatctttacaataaagagacaaagctgttcaccgctaagctcaacgtgaatgaaaacgttgagtgtggcaataacacgtgcacaaacaatgaagtgcataacctgaccgagtgtaaaaatgcgtctgtctccattagccacaactcttgcacagcccccgataagaccctgatcctcgacgtgcctcccggcgtggagaaatttcaactgcacgactgtacccaggtcgaaaaggctgatacaacgatctgccttaaatggaagaatattgagaccttcacatgtgacacccagaacatcacatatagatttcagtgcgggaatatgattttcgataacaaggaaatcaaactggagaatctcgaacctgagcatgagtacaagtgtgactccgaaattctgtataacaatcacaaattcaccaacgccagcaagatcattaaaacggattttggatcccccggcgagccgcaaatcatcttctgccggtctgaagccgctcatcagggggttattacatggaatcctccccagcgcagctttcacaacttcaccctttgttacatcaaggagaccgaaaaagactgcctgaatctcgataagaacctgattaagtacgacctgcagaacctcaaaccttatacaaagtacgtgctgtcccttcacgcctatatcattgcgaaagtgcaaagaaatggatctgctgccatgtgccattttaccacaaagagcgctcccccttcccaggtctggaacatgacggtgagcatgacctctgataattccatgcacgttaaatgtcggcccccgcgcgacagaaacggccctcatgagcggtaccacctggaggtggaagccgggaatacactcgtccgcaacgagagccataagaattgcgatttcagagtgaaggacctgcagtattctaccgactacacatttaaagcctatttccacaacggagattaccccggcgaaccctttatccttcaccattccaccagctacaattctaaggctctgatcgccttcctcgcgtttctgattatcgttacgagcattgccctgctcgtggtcctgtataaaatctacgaccttcacaagaaacggtcctgtaacctggatgagcaacaggaactcgtggagcgcgacgatgagaagcagctgatgaatgtcgaacctattcatgctgacatcctgcttgagacctataagagaaaaatcgccgatgaaggccgcctcttcctggctgagtttcagagcattccgcgggtgttctctaagttccccatcaaagaggccagaaagccttttaaccaaaataaaaaccggtacgttgacattctgccctatgattacaatagagtggaactctccgagatcaacggggacgcgggaagcaactatattaatgcctcctacatcgatggcttcaaggaacctcgcaagtacattgctgcccaggggccccgggacgagacagtcgatgacttttggagaatgatctgggaacagaaagctaccgtgatcgttatggtgacacgctgcgaggagggaaaccggaataagtgtgccgaatattggccttctatggaggaaggcaccagagccttcggggacgtcgtggtgaaaattaaccagcacaagcgctgccccgattacatcattcaaaaactgaatatcgttaacaagaaagagaaggctacaggacgggaagtcacccacattcagtttacgagctggccggaccatggcgtgcctgaggatccccaccttctgctcaagctgagacgccgggtgaatgcgttctccaactttttctctggccctatcgtcgtgcattgtagcgccggggttggaagaacaggcacctatatcgggattgacgctatgctggagggacttgaagccgagaataaagtggatgtctacggctatgtggttaagctccgccggcagagatgcctgatggtgcaggtcgaagcccaatacatcctgattcaccaggctctcgtggagtataaccagtttggggaaaccgaggttaatctgtccgagcttcatccctacctgcacaacatgaaaaagcgggacccgccttctgaacccagccctctcgaggccgagttccagcgcctgccctcctacagaagctggcggacacaacacatcggcaatcaggaagagaacaaatctaagaatagaaactccaacgtgattccctatgattacaatcgcgtccctctgaagcatgaacttgagatgagcaaagaatctgagcacgactccgatgaaagctctgacgatgactccgatagcgaggagccgtccaagtatatcaacgcgagctttatcatgtcttactggaaacccgaagtgatgattgctgcccagggacctctcaaggagaccatcggcgacttctggcaaatgatttttcagcggaaagtgaaggtcatcgttatgctgacggaactgaagcatggggaccaggagatttgtgcccagtattggggagaaggcaaacaaacatacggggatatcgaggtggacctcaaggataccgacaaaagctccacatataccctgagagtgttcgagcttcgccactctaagagaaaagatagccggacagtctaccagtaccagtataccaattggtccgtggaacagctgcccgctgagcctaaggaactcatctctatgattcaagttgtgaagcagaaactgccccagaagaacagctccgagggaaataaacatcacaagtctacgcctctgcttatccactgccgcgacggcagccagcaaaccgggattttctgtgccctcctgaacctgctcgaatccgcggagacagaggaagtcgtggatatctttcaggttgtgaaagctctgagaaaggcccggccgggcatggtcagcaccttcgagcagtaccaatttctttatgacgtgattgcctctacataccccgctcagaatggacaggttaaaaagaacaatcatcaggaagataagatcgagttcgacaacgaggtggataaagtcaagcaagacgccaattgcgtgaaccctctgggcgctcccgaaaaactccctgaggccaaggaacaggcggaggggtccgaacccaccagcggaacggagggcccggagcactctgtgaatgggcctgcctcccccgctctgaaccagggaagctga

SEQ ID NO: 3275 - protein, 207 aa, synthetic construct
  REGION 1..207: note = RAB8A__Homo_sapiens__P61006
MAKTYDYLFKLLLIGDSGVGKTCVLFRFSEDAFNSTFISTIGIDFKIRTIELDGKRIKLQIWDTAGQERFRTITTAYYRGAMGIMLVYDITNEKSFDNIRNWIRNIEEHASADVEKMILGNKCDVNDKRQVSKERGEKLALDYGIKFMETSAKANINVENAFFTLARDIKAKMDKKLEGNSPQGSNQGVKITPDQQKRSSFFRCVLL

SEQ ID NO: 3276 - RNA, 624 nt, synthetic construct
  misc_feature 1..624: note = RAB8A__Homo_sapiens__AAH02977
  source 1..624: mol_type = other RNA
atggcgaagacctacgattacctgttcaagctgctgctgatcggggactcgggggtggggaagacctgtgtcctgttccgcttctccgaggacgccttcaactccacttttatctccaccataggaattgactttaaaattaggaccatagagctcgatggcaagagaattaaactgcagatatgggacacagccggtcaggaacggtttcggacgatcacaacggcctactacaggggtgcaatgggcatcatgctggtctacgacatcaccaacgagaagtccttcgacaacatccggaactggattcgcaacattgaggagcacgcctctgcagacgtcgaaaagatgatactcgggaacaagtgtgatgtgaatgacaagagacaagtttccaaggaacggggagaaaagctggccctcgactatggaatcaagttcatggagaccagcgcgaaggccaacatcaatgtggaaaatgcatttttcactctcgccagagatatcaaagcaaaaatggacaaaaaattggaaggcaacagcccccaggggagcaaccagggagtcaaaatcacaccggaccagcagaagaggagcagctttttccgatgtgttcttctgtga

SEQ ID NO: 3277 - RNA, 624 nt, synthetic construct
  misc_feature 1..624: note = derived and/or modified sequence opt1 fromRAB8A__Homo_sapiens__AAH02977
  source 1..624: mol_type = other RNA
atggccaagacctacgactacctgttcaagctcctgctgatcggcgacagcggggtgggcaagacctgcgtcctcttccgcttctccgaggacgccttcaacagcacgttcatctccaccatcgggatcgacttcaagatccggaccatcgagctggacggcaagcgcatcaagctgcagatctgggacaccgcggggcaggagcggttccgcacgatcaccaccgcctactaccggggcgccatgggcatcatgctcgtgtacgacatcaccaacgagaagtccttcgacaacatccgcaactggatccggaacatcgaggagcacgccagcgccgacgtggagaagatgatcctggggaacaagtgcgacgtcaacgacaagcgccaggtgagcaaggagcggggcgagaagctggcgctcgactacgggatcaagttcatggagacgtccgccaaggccaacatcaacgtggagaacgccttcttcaccctggcgcgcgacatcaaggccaagatggacaagaagctggagggcaacagcccccaggggtccaaccagggcgtcaagatcaccccggaccagcagaagcggagctccttcttccgctgcgtgctcctgtga

SEQ ID NO: 3278 - RNA, 624 nt, synthetic construct
  misc_feature 1..624: note = derived and/or modified sequence opt2 fromRAB8A__Homo_sapiens__AAH02977
  source 1..624: mol_type = other RNA
atggccaagacctacgactacctcttcaagctcctcctcatcggcgactccggcgtcggcaagacctgcgtcctcttccgcttctccgaggacgccttcaactccaccttcatctccaccatcggcatcgacttcaagatccgcaccatcgagctcgacggcaagcgcatcaagctccagatctgggacaccgccggccaggagcgcttccgcaccatcaccaccgcctactaccgcggcgccatgggcatcatgctcgtctacgacatcaccaacgagaagtccttcgacaacatccgcaactggatccgcaacatcgaggagcacgcctccgccgacgtcgagaagatgatcctcggcaacaagtgcgacgtcaacgacaagcgccaggtctccaaggagcgcggcgagaagctcgccctcgactacggcatcaagttcatggagacctccgccaaggccaacatcaacgtcgagaacgccttcttcaccctcgcccgcgacatcaaggccaagatggacaagaagctcgagggcaactccccccagggctccaaccagggcgtcaagatcacccccgaccagcagaagcgctcctccttcttccgctgcgtcctcctctga

SEQ ID NO: 3279 - RNA, 624 nt, synthetic construct
  misc_feature 1..624: note = derived and/or modified sequence opt3 fromRAB8A__Homo_sapiens__AAH02977
  source 1..624: mol_type = other RNA
atggccaagacctacgactatctgttcaaactccttctgatcggcgatagtggggtgggaaagacatgcgtcttgtttagattctccgaggacgcttttaactctactttcatttcaacgataggtatcgattttaaaattaggaccatcgaattagacggcaagcggattaaactgcagatctgggatacagcagggcaagagcgcttccgaactataaccacagcctactatcgtggagcgatgggcatcatgctagtttacgacattaccaatgaaaagagttttgataacatcagaaattggattaggaacatcgaggaacacgctagcgccgacgtggagaagatgatactcggtaataaatgtgatgtaaacgacaagcggcaagtgtccaaagagcgcggggaaaagctggcacttgattatggaattaaattcatggagacttctgccaaggctaatatcaacgtcgaaaatgcatttttcacactggccagagacattaaggctaaaatggataagaaattggagggcaactcgccccagggctcaaatcagggggtgaagatcacccctgaccagcagaaaaggagcagctttttccggtgcgttctcctgtga

SEQ ID NO: 3280 - RNA, 624 nt, synthetic construct
  misc_feature 1..624: note = derived and/or modified sequence opt4 fromRAB8A__Homo_sapiens__AAH02977
  source 1..624: mol_type = other RNA
atggccaagacctacgactacctgttcaagctgctgctgatcggcgacagcggcgtgggcaagacctgcgtgctgttcagattcagcgaggacgccttcaacagcaccttcatcagcaccatcggcatcgacttcaagatcagaaccatcgagctggacggcaagagaatcaagctgcagatctgggacaccgccggccaggagagattcagaaccatcaccaccgcctactacagaggcgccatgggcatcatgctggtgtacgacatcaccaacgagaagagcttcgacaacatcagaaactggatcagaaacatcgaggagcacgccagcgccgacgtggagaagatgatcctgggcaacaagtgcgacgtgaacgacaagagacaggtgagcaaggagagaggcgagaagctggccctggactacggcatcaagttcatggagaccagcgccaaggccaacatcaacgtggagaacgccttcttcaccctggccagagacatcaaggccaagatggacaagaagctggagggcaacagcccccagggcagcaaccagggcgtgaagatcacccccgaccagcagaagagaagcagcttcttcagatgcgtgctgctgtga

SEQ ID NO: 3281 - RNA, 624 nt, synthetic construct
  misc_feature 1..624: note = derived and/or modified sequence opt5 fromRAB8A__Homo_sapiens__AAH02977
  source 1..624: mol_type = other RNA
atggccaagacctacgactatctgttcaaactcctgcttatcggcgatagcggggtgggaaagacatgcgtcctgtttagattctccgaggacgcttttaactctacgttcattagcaccatcggcattgattttaaaatccggacaattgaactcgacgggaagcgcatcaaactgcagatctgggataccgccggacaagagagattccggacaattaccacagcgtactatcgcggcgctatggggatcatgcttgtttacgacattaccaatgaaaagtcctttgataacatcagaaattggattcggaacatcgaggaacacgcctctgccgacgtggagaagatgattctgggaaataaatgtgatgtgaacgacaagcgccaggtcagcaaagagagaggcgaaaagctcgctctggattatggcatcaaattcatggagacgtccgccaaggctaatatcaacgtggaaaatgcctttttcaccctggcgcgggacattaaggccaaaatggataagaaactcgaggggaactctccccagggaagcaatcagggcgttaagatcacacctgaccaacagaaacgctccagctttttcagatgcgtgctgctttga

SEQ ID NO: 3282 - protein, 419 aa, synthetic construct
  REGION 1..419: note = RAGE-1__Homo_sapiens__Q9UQ07
MKNYKAIGKIGEGTFSEVMKMQSLRDGNYYACKQMKQRFESIEQVNNLREIQALRRLNPHPNILMLHEVVFDRKSGSLALICELMDMNIYELIRGRRYPLSEKKIMHYMYQLCKSLDHIHRNGIFHRDVKPENILIKQDVLKLGDFGSCRSVYSKQPYTEYISTRWYRAPECLLTDGFYTYKMDLWSAGCVFYEIASLQPLFPGVNELDQISKIHDVIGTPAQKILTKFKQSRAMNFDFPFKKGSGIPLLTTNLSPQCLSLLHAMVAYDPDERIAAHQALQHPYFQEQRKTEKRALGSHRKAGFPEHPVAPEPLSNSCQISKEGRKQKQSLKQEEDRPKRRGPAYVMELPKLKLSGVVRLSSYSSPTLQSVLGSGTNGRVPVLRPLKCIPASKKTDPQKDLKPAPQQCRLPTIVRKGGR

SEQ ID NO: 3283 - RNA, 1260 nt, synthetic construct
  misc_feature 1..1260: note = RAGE-1__Homo_sapiens__BAA81688
  source 1..1260: mol_type = other RNA
atgaagaactataaagcaattggcaaaataggagagggaacgttttctgaagttatgaagatgcaaagcctgagagatggaaactactatgcatgtaaacaaatgaagcagcgctttgaaagtattgagcaagtcaacaacctacgagagatccaagcactgaggcgcctgaatccgcacccaaacattcttatgttgcatgaagtggtttttgacagaaaatctggttctcttgcactaatatgtgaacttatggacatgaatatttatgagctaatacgagggagaagatacccattatcagaaaaaaaaattatgcactatatgtaccagttatgtaagtccctggatcatattcacagaaatggaatatttcacagagatgtaaaaccagaaaatatactaataaagcaggatgtcctgaaattaggggactttggctcctgccggagtgtctattccaagcagccgtacacggaatacatctccacccgctggtaccgggccccggagtgtctcctcactgatgggttctacacgtacaagatggacctgtggagcgccggctgtgtgttctacgagatcgccagtctgcagcccctctttcctggagtaaatgaactggaccaaatctcaaaaatccacgatgtcatcggcacacccgctcagaagatcctcaccaagttcaaacagtcgagagctatgaattttgattttccttttaaaaagggatcaggaatacctctactaacaaccaatttgtccccacaatgcctctccctcctgcacgcaatggtggcctatgatcccgatgagagaatcgccgcccaccaggccctgcagcacccctacttccaagaacagaggaaaacagagaagcgggctctgggcagccacagaaaagctggctttccggagcaccctgtggcaccggaaccactcagtaacagctgccagatttccaaggagggcagaaagcagaaacagtccctaaagcaagaggaggaccgtcccaagagacgaggaccggcctatgtcatggaactgcccaaactaaagctttcgggagtggtcagactgtcgtcttactccagccccacgctgcagtccgtgcttggatctggaacaaatggaagagtgccggtgctgagacccttgaagtgcatccctgcgagcaagaagacagatccgcagaaggaccttaagcctgccccgcagcagtgtcgcctgcccaccatagtgcggaaaggcggaagataa

SEQ ID NO: 3284 - RNA, 1260 nt, synthetic construct
  misc_feature 1..1260: note = derived and/or modified sequence opt1 fromRAGE-1__Homo_sapiens__BAA81688
  source 1..1260: mol_type = other RNA
atgaagaactacaaggccatcggcaagatcggggagggcaccttcagcgaggtgatgaagatgcagtccctgcgcgacgggaactactacgcctgcaagcagatgaagcagcggttcgagagcatcgagcaggtcaacaacctccgcgagatccaggccctgcggcgcctgaacccccacccgaacatcctcatgctgcacgaggtggtgttcgaccggaagtccggcagcctggccctcatctgcgagctgatggacatgaacatctacgagctgatccgcgggcggcgctaccccctctccgagaagaagatcatgcactacatgtaccagctgtgcaagagcctggaccacatccaccggaacggcatcttccaccgcgacgtcaagcccgagaacatcctcatcaagcaggacgtgctgaagctgggcgacttcgggtcctgccggagcgtgtactccaagcagccctacaccgagtacatcagcacgcgctggtaccgggccccggagtgcctcctgaccgacggcttctacacctacaagatggacctgtggtccgccgggtgcgtcttctacgagatcgccagcctccagcccctgttccccggcgtgaacgagctggaccagatctccaagatccacgacgtgatcgggacccccgcgcagaagatcctcacgaagttcaagcagagccgcgccatgaacttcgacttcccgttcaagaagggctccggcatccccctgctgaccaccaacctcagcccccagtgcctgtccctgctccacgccatggtcgcctacgaccccgacgagcggatcgcggcccaccaggccctgcagcacccgtacttccaggagcagcgcaagaccgagaagcgggccctggggagccaccgcaaggccggcttccccgagcaccccgtggcgcccgagccgctctccaacagctgccagatcagcaaggaggggcggaagcagaagcagtccctgaagcaggaggaggaccgccccaagcggcgcggccccgcctacgtgatggagctgcccaagctcaagctgagcggcgtcgtgcgcctgtccagctactccagcccgacgctccagtccgtgctggggagcggcaccaacgggcgggtccccgtgctgcgccccctcaagtgcatccccgcctccaagaagaccgacccgcagaaggacctgaagcccgcgccccagcagtgccggctgcccaccatcgtgcgcaagggcgggcggtga

SEQ ID NO: 3285 - RNA, 1260 nt, synthetic construct
  misc_feature 1..1260: note = derived and/or modified sequence opt2 fromRAGE-1__Homo_sapiens__BAA81688
  source 1..1260: mol_type = other RNA
atgaagaactacaaggccatcggcaagatcggcgagggcaccttctccgaggtcatgaagatgcagtccctccgcgacggcaactactacgcctgcaagcagatgaagcagcgcttcgagtccatcgagcaggtcaacaacctccgcgagatccaggccctccgccgcctcaacccccaccccaacatcctcatgctccacgaggtcgtcttcgaccgcaagtccggctccctcgccctcatctgcgagctcatggacatgaacatctacgagctcatccgcggccgccgctaccccctctccgagaagaagatcatgcactacatgtaccagctctgcaagtccctcgaccacatccaccgcaacggcatcttccaccgcgacgtcaagcccgagaacatcctcatcaagcaggacgtcctcaagctcggcgacttcggctcctgccgctccgtctactccaagcagccctacaccgagtacatctccacccgctggtaccgcgcccccgagtgcctcctcaccgacggcttctacacctacaagatggacctctggtccgccggctgcgtcttctacgagatcgcctccctccagcccctcttccccggcgtcaacgagctcgaccagatctccaagatccacgacgtcatcggcacccccgcccagaagatcctcaccaagttcaagcagtcccgcgccatgaacttcgacttccccttcaagaagggctccggcatccccctcctcaccaccaacctctccccccagtgcctctccctcctccacgccatggtcgcctacgaccccgacgagcgcatcgccgcccaccaggccctccagcacccctacttccaggagcagcgcaagaccgagaagcgcgccctcggctcccaccgcaaggccggcttccccgagcaccccgtcgcccccgagcccctctccaactcctgccagatctccaaggagggccgcaagcagaagcagtccctcaagcaggaggaggaccgccccaagcgccgcggccccgcctacgtcatggagctccccaagctcaagctctccggcgtcgtccgcctctcctcctactcctcccccaccctccagtccgtcctcggctccggcaccaacggccgcgtccccgtcctccgccccctcaagtgcatccccgcctccaagaagaccgacccccagaaggacctcaagcccgccccccagcagtgccgcctccccaccatcgtccgcaagggcggccgctga

SEQ ID NO: 3286 - RNA, 1260 nt, synthetic construct
  misc_feature 1..1260: note = derived and/or modified sequence opt3 fromRAGE-1__Homo_sapiens__BAA81688
  source 1..1260: mol_type = other RNA
atgaagaactacaaagccatcggcaagattggggagggaaccttcagcgaagtgatgaaaatgcagtccctgagagacggtaattattacgcttgcaagcaaatgaaacagaggtttgagtctatagaacaggtcaacaatctccgggagatccaggcacttcgccgactgaacccccaccctaatattttgatgttacatgaagttgtgttcgatcgtaagtcaggcagtctggccctaatctgtgagctcatggacatgaacatttatgagctgatcagagggaggcggtacccacttagcgaaaagaaaataatgcactatatgtaccaactgtgcaagtccttggatcatatccaccgcaatggaatttttcatagagacgtaaaaccggagaacatcctcattaagcaggatgtgctgaaactgggcgacttcggttcttgtaggtcggtctattcaaagcagccctacacagaatacatcagcactcggtggtatcgcgcgcctgagtgcctcttaacggatgggttttacacctataagatggacctgtggagtgctggatgtgtgttctacgagatagcctcccttcagccattgtttcccggcgttaatgaactggatcaaatttctaaaatccacgacgtgattggcactcctgcacagaagatcctaacaaaattcaagcagagccgagccatgaactttgatttcccatttaaaaaggggtccggaatccccctcctgaccacaaatctttcacctcagtgcctgagtttgctccacgctatggtcgcatatgacccagatgagagaattgccgctcatcaagccctgcagcacccgtacttccaggaacaaaggaaaaccgagaagcgggcgttaggtagccatcgtaaggcaggctttcccgaacaccctgtggccccagagcccctgtctaactcctgtcagatatcaaaagaggggcgcaagcagaaacagagcctcaagcaagaagaggacagacctaaaaggcggggaccagcttatgtaatggaacttcccaagctgaagttgagtggcgttgtgcgactatcttcctacagctcgccgactctgcagtctgtcctcggttccgggacaaatggacgcgtgcctgtgctgagaccccttaaatgcatcccagcctcaaagaaaaccgaccctcagaaggatctgaaacccgcaccacagcaatgtaggttgcccacgattgtccggaagggcggccgctga

SEQ ID NO: 3287 - RNA, 1260 nt, synthetic construct
  misc_feature 1..1260: note = derived and/or modified sequence opt4 fromRAGE-1__Homo_sapiens__BAA81688
  source 1..1260: mol_type = other RNA
atgaagaactacaaggccatcggcaagatcggcgagggcaccttcagcgaggtgatgaagatgcagagcctgagagacggcaactactacgcctgcaagcagatgaagcagagattcgagagcatcgagcaggtgaacaacctgagagagatccaggccctgagaagactgaacccccaccccaacatcctgatgctgcacgaggtggtgttcgacagaaagagcggcagcctggccctgatctgcgagctgatggacatgaacatctacgagctgatcagaggcagaagataccccctgagcgagaagaagatcatgcactacatgtaccagctgtgcaagagcctggaccacatccacagaaacggcatcttccacagagacgtgaagcccgagaacatcctgatcaagcaggacgtgctgaagctgggcgacttcggcagctgcagaagcgtgtacagcaagcagccctacaccgagtacatcagcaccagatggtacagagcccccgagtgcctgctgaccgacggcttctacacctacaagatggacctgtggagcgccggctgcgtgttctacgagatcgccagcctgcagcccctgttccccggcgtgaacgagctggaccagatcagcaagatccacgacgtgatcggcacccccgcccagaagatcctgaccaagttcaagcagagcagagccatgaacttcgacttccccttcaagaagggcagcggcatccccctgctgaccaccaacctgagcccccagtgcctgagcctgctgcacgccatggtggcctacgaccccgacgagagaatcgccgcccaccaggccctgcagcacccctacttccaggagcagagaaagaccgagaagagagccctgggcagccacagaaaggccggcttccccgagcaccccgtggcccccgagcccctgagcaacagctgccagatcagcaaggagggcagaaagcagaagcagagcctgaagcaggaggaggacagacccaagagaagaggccccgcctacgtgatggagctgcccaagctgaagctgagcggcgtggtgagactgagcagctacagcagccccaccctgcagagcgtgctgggcagcggcaccaacggcagagtgcccgtgctgagacccctgaagtgcatccccgccagcaagaagaccgacccccagaaggacctgaagcccgccccccagcagtgcagactgcccaccatcgtgagaaagggcggcagatga

SEQ ID NO: 3288 - RNA, 1260 nt, synthetic construct
  misc_feature 1..1260: note = derived and/or modified sequence opt5 fromRAGE-1__Homo_sapiens__BAA81688
  source 1..1260: mol_type = other RNA
atgaagaactacaaagccatcggcaagattggggagggaaccttcagcgaagtgatgaaaatgcagtccctgagagacggcaattattacgcttgcaagcaaatgaaacagcggtttgagtctatcgaacaggtcaacaatctccgcgagattcaggccctgagacggcttaacccccaccctaatatcctgatgctccatgaagttgtgttcgatcgcaagagcgggtccctggcgcttatttgtgagctgatggacatgaacatctatgagctcatcagaggacggcgctacccgctgtctgaaaagaaaattatgcactatatgtaccaactgtgcaagagcctcgatcatatccacagaaatggcatttttcatcgggacgtgaaacccgagaacatcctgattaagcaggatgtccttaaactgggggacttcggatcctgtcgctctgtgtatagcaagcagccttacacagaatacatctccacgagatggtatcgggctcccgagtgcctcctgaccgatggcttttacacatataagatggacctttggagcgccggctgtgttttctacgagattgcctctctgcagcctctctttcccggggtgaatgaactggatcaaatctccaaaatccacgacgtcattggaacccctgctcagaagatcctgacaaaattcaagcagagccgcgccatgaactttgatttcccgtttaaaaagggctctgggattcccctcctgaccacaaatctttcccctcagtgcctgagcctcctgcacgctatggtggcctatgaccccgatgagagaatcgcggcccatcaagcccttcagcacccttacttccaggaacaacggaaaaccgagaagcgcgctctgggatctcatagaaaggctggctttcccgaacacccggttgcccctgagcccctctccaacagctgtcagatttccaaagaggggcggaagcagaaacagtctctgaagcaagaagaggacagacctaaacgccggggacccgcgtatgtgatggaactgcccaagctcaagctgagcggcgtcgtgagactttccagctactcttcccctacgctgcagagcgtgctcggctctgggaccaatggacgcgtcccggttctgcggccccttaaatgcatccctgccagcaagaaaacagacccccagaaggatctgaaacctgctccccagcaatgtagactcccgaccatcgtgcgcaagggcgggcggtga

SEQ ID NO: 3289 - protein, 462 aa, synthetic construct
  REGION 1..462: note = RARA__Homo_sapiens__P10276
MASNSSSCPTPGGGHLNGYPVPPYAFFFPPMLGGLSPPGALTTLQHQLPVSGYSTPSPATIETQSSSSEEIVPSPPSPPPLPRIYKPCFVCQDKSSGYHYGVSACEGCKGFFRRSIQKNMVYTCHRDKNCIINKVTRNRCQYCRLQKCFEVGMSKESVRNDRNKKKKEVPKPECSESYTLTPEVGELIEKVRKAHQETFPALCQLGKYTTNNSSEQRVSLDIDLWDKFSELSTKCIIKTVEFAKQLPGFTTLTIADQITLLKAACLDILILRICTRYTPEQDTMTFSDGLTLNRTQMHNAGFGPLTDLVFAFANQLLPLEMDDAETGLLSAICLICGDRQDLEQPDRVDMLQEPLLEALKVYVRKRRPSRPHMFPKMLMKITDLRSISAKGAERVITLKMEIPGSMPPLIQEMLENSEGLDTLSGQPGGGGRDGGGLAPPPGSCSPSLSPSSNRSSPATHSP

SEQ ID NO: 3290 - RNA, 1389 nt, synthetic construct
  misc_feature 1..1389: note = RARA__Homo_sapiens__AAH08727
  source 1..1389: mol_type = other RNA
atggccagcaacagcagctcctgcccgacacctgggggcgggcacctcaatgggtacccggtgcctccctacgccttcttcttcccccctatgctgggtggactctccccgccaggcgctctgaccactctccagcaccagcttccagttagtggatatagcacaccatccccagccaccattgagacccagagcagcagttctgaagagatagtgcccagccctccctcgccaccccctctaccccgcatctacaagccttgctttgtctgtcaggacaagtcctcaggctaccactatggggtcagcgcctgtgagggctgcaagggcttcttccgccgcagcatccagaagaacatggtgtacacgtgtcaccgggacaagaactgcatcatcaacaaggtgacccggaaccgctgccagtactgccgactgcagaagtgctttgaagtgggcatgtccaaggagtctgtgagaaacgaccgaaacaagaagaagaaggaggtgcccaagcccgagtgctctgagagctacacgctgacgccggaggtgggggagctcattgagaaggtgcgcaaagcgcaccaggaaaccttccctgccctctgccagctgggcaaatacactacgaacaacagctcagaacaacgtgtctctctggacattgacctctgggacaagttcagtgaactctccaccaagtgcatcattaagactgtggagttcgccaagcagctgcccggcttcaccaccctcaccatcgccgaccagatcaccctcctcaaggctgcctgcctggacatcctgatcctgcggatctgcacgcggtacacgcccgagcaggacaccatgaccttctcggacgggctgaccctgaaccggacccagatgcacaacgctggcttcggccccctcaccgacctggtctttgccttcgccaaccagctgctgcccctggagatggatgatgcggagacggggctgctcagcgccatctgcctcatctgcggagaccgccaggacctggagcagccggaccgggtggacatgctgcaggagccgctgctggaggcgctaaaggtctacgtgcggaagcggaggcccagccgcccccacatgttccccaagatgctaatgaagattactgacctgcgaagcatcagcgccaagggggctgagcgggtgatcacgctgaagatggagatcccgggctccatgccgcctctcatccaggaaatgttggagaactcagagggcctggacactctgagcggacagccggggggtggggggcgggacgggggtggcctggcccccccgccaggcagctgtagccccagcctcagccccagctccaacagaagcagcccggccacccactccccgtga

SEQ ID NO: 3291 - RNA, 1389 nt, synthetic construct
  misc_feature 1..1389: note = derived and/or modified sequence opt1 fromRARA__Homo_sapiens__AAH08727
  source 1..1389: mol_type = other RNA
atggccagcaactccagctcctgccccacccccggcgggggccacctgaacgggtaccccgtgccgccctacgccttcttcttcccgcccatgctcggcgggctgagcccgcccggcgcgctgaccacgctccagcaccagctgcccgtctccggctacagcaccccctcccccgccaccatcgagacccagagctccagctccgaggagatcgtgcccagcccgccctccccgccgcccctgccccgcatctacaagccctgcttcgtgtgccaggacaagagctccgggtaccactacggcgtcagcgcctgcgaggggtgcaagggcttcttccggcgctccatccagaagaacatggtgtacacgtgccaccgggacaagaactgcatcatcaacaaggtgacccgcaaccggtgccagtactgccgcctccagaagtgcttcgaggtcgggatgagcaaggagtccgtgcggaacgaccgcaacaagaagaagaaggaggtgcccaagcccgagtgcagcgagagctacaccctgacccccgaggtcggcgagctgatcgagaaggtgcggaaggcccaccaggagacgttccccgccctctgccagctgggcaagtacaccaccaacaactccagcgagcagcgcgtgtccctggacatcgacctctgggacaagttcagcgagctgtccaccaagtgcatcatcaagacggtcgagttcgcgaagcagctgcccgggttcaccaccctcaccatcgccgaccagatcacgctgctgaaggccgcctgcctcgacatcctgatcctgcggatctgcacccgctacacccccgagcaggacaccatgacgttcagcgacggcctcaccctgaaccggacccagatgcacaacgcggggttcggccccctgaccgacctcgtgttcgccttcgccaaccagctgctgcccctcgagatggacgacgccgagacgggcctgctgtccgccatctgcctcatctgcggggaccgccaggacctggagcagcccgaccgggtggacatgctgcaggagccgctcctggaggcgctgaaggtctacgtgcgcaagcggcgccccagccggccccacatgttcccgaagatgctcatgaagatcaccgacctgcgctccatcagcgccaagggcgccgagcgggtgatcaccctgaagatggagatccccgggtccatgccgcccctcatccaggagatgctggagaacagcgagggcctggacaccctctccgggcagcccggcggcgggggccgcgacgggggcgggctggccccgccgcccggcagctgctcccccagcctgtcccccagctccaaccgcagcagccccgccacgcactccccctga

SEQ ID NO: 3292 - RNA, 1389 nt, synthetic construct
  misc_feature 1..1389: note = derived and/or modified sequence opt2 fromRARA__Homo_sapiens__AAH08727
  source 1..1389: mol_type = other RNA
atggcctccaactcctcctcctgccccacccccggcggcggccacctcaacggctaccccgtccccccctacgccttcttcttcccccccatgctcggcggcctctccccccccggcgccctcaccaccctccagcaccagctccccgtctccggctactccaccccctcccccgccaccatcgagacccagtcctcctcctccgaggagatcgtcccctcccccccctcccccccccccctcccccgcatctacaagccctgcttcgtctgccaggacaagtcctccggctaccactacggcgtctccgcctgcgagggctgcaagggcttcttccgccgctccatccagaagaacatggtctacacctgccaccgcgacaagaactgcatcatcaacaaggtcacccgcaaccgctgccagtactgccgcctccagaagtgcttcgaggtcggcatgtccaaggagtccgtccgcaacgaccgcaacaagaagaagaaggaggtccccaagcccgagtgctccgagtcctacaccctcacccccgaggtcggcgagctcatcgagaaggtccgcaaggcccaccaggagaccttccccgccctctgccagctcggcaagtacaccaccaacaactcctccgagcagcgcgtctccctcgacatcgacctctgggacaagttctccgagctctccaccaagtgcatcatcaagaccgtcgagttcgccaagcagctccccggcttcaccaccctcaccatcgccgaccagatcaccctcctcaaggccgcctgcctcgacatcctcatcctccgcatctgcacccgctacacccccgagcaggacaccatgaccttctccgacggcctcaccctcaaccgcacccagatgcacaacgccggcttcggccccctcaccgacctcgtcttcgccttcgccaaccagctcctccccctcgagatggacgacgccgagaccggcctcctctccgccatctgcctcatctgcggcgaccgccaggacctcgagcagcccgaccgcgtcgacatgctccaggagcccctcctcgaggccctcaaggtctacgtccgcaagcgccgcccctcccgcccccacatgttccccaagatgctcatgaagatcaccgacctccgctccatctccgccaagggcgccgagcgcgtcatcaccctcaagatggagatccccggctccatgccccccctcatccaggagatgctcgagaactccgagggcctcgacaccctctccggccagcccggcggcggcggccgcgacggcggcggcctcgcccccccccccggctcctgctccccctccctctccccctcctccaaccgctcctcccccgccacccactccccctga

SEQ ID NO: 3293 - RNA, 1389 nt, synthetic construct
  misc_feature 1..1389: note = derived and/or modified sequence opt3 fromRARA__Homo_sapiens__AAH08727
  source 1..1389: mol_type = other RNA
atggccagcaactcctcttcatgccccacccctggcgggggacacctgaatggttacccagtgccgccctatgctttctttttccctccaatgctcggcgggcttagtccccctggagcactgacaactttgcagcatcaattaccagtcagcggctactccacgccctctcctgccaccatcgagacacagtcgtcaagcagtgaggagattgttccatccccgccctctcctccacccctgcctagaatatataagccatgttttgtgtgccaggacaaaagctccggttaccactatggggtatcagcgtgtgaaggatgcaagggcttctttaggcggagtatccagaaaaacatggtgtacacttgtcatcgcgataagaattgcattatcaacaaagtcacccgaaatcgttgtcaatattgcagactacagaagtgtttcgaggtgggcatgagcaaggaatctgttaggaacgaccggaataaaaagaaaaaggaggtgcccaaaccggagtgctccgaatcatacacactcacccctgaggtcggggaactgattgagaaggtgcgcaaggctcaccaggagacttttcccgccctttgtcagctgggaaaatacacaaccaacaatagcagtgaacaaagagtatctttggatatcgacctctgggataagttctccgagctgagcacgaaatgcataatcaagactgttgaatttgcaaaacagctgccaggtttcaccacactcactattgccgaccagatcaccttactgaaggctgcatgccttgatattttgatcctgaggatatgtacacggtatacccctgagcaggacacgatgactttttcggatggcctaacactcaaccgcacccaaatgcataatgccgggttcggacccctgactgaccttgtgtttgctttcgccaaccagctgttgccactcgaaatggatgacgcggagacaggcctgttatctgcaatttgcctgatctgtggtgatcgacaggacctcgagcaacccgacagagtcgatatgcttcaggaacctctgttggaggccctaaaagtgtacgtgaggaagcggcgtccatcccgcccgcacatgttccccaagatgctgatgaaaattaccgacctcagatcaatcagtgctaagggggccgaaagggtcatcacgctgaaaatggagattcctggaagcatgccaccccttatacaggaaatgctggaaaattccgagggcttggataccctctctggccagcctgggggaggtggccgggacgggggaggcctggcaccacccccgggtagctgctcacctagtttatccccaagctctaaccgatcaagtcccgctacacacagcccttga

SEQ ID NO: 3294 - RNA, 1389 nt, synthetic construct
  misc_feature 1..1389: note = derived and/or modified sequence opt4 fromRARA__Homo_sapiens__AAH08727
  source 1..1389: mol_type = other RNA
atggccagcaacagcagcagctgccccacccccggcggcggccacctgaacggctaccccgtgcccccctacgccttcttcttcccccccatgctgggcggcctgagcccccccggcgccctgaccaccctgcagcaccagctgcccgtgagcggctacagcacccccagccccgccaccatcgagacccagagcagcagcagcgaggagatcgtgcccagcccccccagccccccccccctgcccagaatctacaagccctgcttcgtgtgccaggacaagagcagcggctaccactacggcgtgagcgcctgcgagggctgcaagggcttcttcagaagaagcatccagaagaacatggtgtacacctgccacagagacaagaactgcatcatcaacaaggtgaccagaaacagatgccagtactgcagactgcagaagtgcttcgaggtgggcatgagcaaggagagcgtgagaaacgacagaaacaagaagaagaaggaggtgcccaagcccgagtgcagcgagagctacaccctgacccccgaggtgggcgagctgatcgagaaggtgagaaaggcccaccaggagaccttccccgccctgtgccagctgggcaagtacaccaccaacaacagcagcgagcagagagtgagcctggacatcgacctgtgggacaagttcagcgagctgagcaccaagtgcatcatcaagaccgtggagttcgccaagcagctgcccggcttcaccaccctgaccatcgccgaccagatcaccctgctgaaggccgcctgcctggacatcctgatcctgagaatctgcaccagatacacccccgagcaggacaccatgaccttcagcgacggcctgaccctgaacagaacccagatgcacaacgccggcttcggccccctgaccgacctggtgttcgccttcgccaaccagctgctgcccctggagatggacgacgccgagaccggcctgctgagcgccatctgcctgatctgcggcgacagacaggacctggagcagcccgacagagtggacatgctgcaggagcccctgctggaggccctgaaggtgtacgtgagaaagagaagacccagcagaccccacatgttccccaagatgctgatgaagatcaccgacctgagaagcatcagcgccaagggcgccgagagagtgatcaccctgaagatggagatccccggcagcatgccccccctgatccaggagatgctggagaacagcgagggcctggacaccctgagcggccagcccggcggcggcggcagagacggcggcggcctggcccccccccccggcagctgcagccccagcctgagccccagcagcaacagaagcagccccgccacccacagcccctga

SEQ ID NO: 3295 - RNA, 1389 nt, synthetic construct
  misc_feature 1..1389: note = derived and/or modified sequence opt5 fromRARA__Homo_sapiens__AAH08727
  source 1..1389: mol_type = other RNA
atggccagcaactcctctagctgccccacccctggcgggggacacctgaatggctacccggtgcccccttatgctttctttttccctcccatgctcgggggactgtctccccctggcgcccttacaacgctgcagcatcaactcccggtctccgggtacagcaccccctcccctgcgacaatcgagacccagtctagctccagcgaagagattgttccctctcctccctccccgcctcccctgcctagaatctataagccctgttttgtgtgccaggacaaaagctctggataccactatggcgtgtccgcttgtgaaggctgcaaggggttctttcggcgcagcattcagaaaaacatggtctacacatgtcatagagataagaattgcatcattaacaaagtgacccggaatcgctgtcaatattgcagacttcagaagtgtttcgaggttggaatgtctaaggaatccgtgcggaacgaccgcaataaaaagaaaaaggaggtccccaaacctgagtgcagcgaatcctacacactgaccccggaggtgggcgaactcatcgagaaggttagaaaggcccaccaggagacgtttcccgccctgtgtcagctggggaaatacaccacaaacaattctagcgaacaacgggtgtccctcgatatcgacctgtgggataagttcagcgagctttctaccaaatgcattatcaagacagtcgaatttgctaaacagctgcctggattcaccacgctcacaattgccgaccagatcaccctgcttaaggctgcctgcctggatattctcatcctgcgcatttgtacaagatatacccccgagcaggacaccatgacattttccgatggcctgacgctcaaccggacccaaatgcataatgcggggttcggacctctgacagaccttgtgtttgccttcgctaaccagctgctccccctggaaatggatgacgccgagaccggccttctgagcgctatctgcctcatctgtggcgatcgccaggacctggagcaaccggacagagtggatatgctgcaggaacctctcctggaggcccttaaagtctacgttcggaagcgcagaccctctcggcctcacatgttccccaagatgctgatgaaaattacagacctcagaagcatctccgcgaagggggccgaacgcgtgattaccctgaaaatggagatccctggatctatgcccccgcttattcaggaaatgctggagaatagcgagggcctcgatacgctgtccgggcagcctggaggcgggggacgggacggcggcgggctggctccccctcccggaagctgctctccgtccctcagcccctcttccaacagaagctcccctgccacacactctccctga

SEQ ID NO: 3296 - protein, 189 aa, synthetic construct
  REGION 1..189: note = RASH__Homo_sapiens__P01112
MTEYKLVVVGAGGVGKSALTIQLIQNHFVDEYDPTIEDSYRKQVVIDGETCLLDILDTAGQEEYSAMRDQYMRTGEGFLCVFAINNTKSFEDIHQYREQIKRVKDSDDVPMVLVGNKCDLAARTVESRQAQDLARSYGIPYIETSAKTRQGVEDAFYTLVREIRQHKLRKLNPPDESGPGCMSCKCVLS

SEQ ID NO: 3297 - RNA, 570 nt, synthetic construct
  misc_feature 1..570: note = RASH__Homo_sapiens__AAB02605
  source 1..570: mol_type = other RNA
atgacggaatataagctggtggtggtgggcgccggcggtgtgggcaagagtgcgctgaccatccagctgatccagaaccattttgtggacgaatacgaccccactatagaggattcctaccggaagcaggtggtcattgatggggagacgtgcctgttggacatcctggataccgccggccaggaggagtacagcgccatgcgggaccagtacatgcgcaccggggagggcttcctgtgtgtgtttgccatcaacaacaccaagtcttttgaggacatccaccagtacagggagcagatcaaacgggtgaaggactcggatgacgtgcccatggtgctggtggggaacaagtgtgacctggctgcacgcactgtggaatctcggcaggctcaggacctcgcccgaagctacggcatcccctacatcgagacctcggccaagacccggcagggagtggaggatgccttctacacgttggtgcgtgagatccggcagcacaagctgcggaagctgaaccctcctgatgagagtggccccggctgcatgagctgcaagtgtgtgctctcctga

SEQ ID NO: 3298 - RNA, 570 nt, synthetic construct
  misc_feature 1..570: note = derived and/or modified sequence opt1 fromRASH__Homo_sapiens__AAB02605
  source 1..570: mol_type = other RNA
atgaccgagtacaagctggtggtcgtgggcgccgggggcgtgggcaagagcgccctcaccatccagctgatccagaaccacttcgtcgacgagtacgaccccacgatcgaggactcctaccgcaagcaggtcgtgatcgacggggagacctgcctgctcgacatcctggacaccgcggggcaggaggagtacagcgccatgcgggaccagtacatgcgcaccggcgagggcttcctgtgcgtgttcgccatcaacaacacgaagtccttcgaggacatccaccagtaccgggagcagatcaagcgcgtgaaggacagcgacgacgtgccgatggtcctcgtggggaacaagtgcgacctggccgcccggaccgtggagtcccgccaggcgcaggacctggcccggagctacggcatcccctacatcgagacctccgccaagacccgccagggggtcgaggacgccttctacacgctcgtgcgggagatccgccagcacaagctgcggaagctgaacccgcccgacgagagcggccccgggtgcatgtcctgcaagtgcgtgctcagctga

SEQ ID NO: 3299 - RNA, 570 nt, synthetic construct
  misc_feature 1..570: note = derived and/or modified sequence opt2 fromRASH__Homo_sapiens__AAB02605
  source 1..570: mol_type = other RNA
atgaccgagtacaagctcgtcgtcgtcggcgccggcggcgtcggcaagtccgccctcaccatccagctcatccagaaccacttcgtcgacgagtacgaccccaccatcgaggactcctaccgcaagcaggtcgtcatcgacggcgagacctgcctcctcgacatcctcgacaccgccggccaggaggagtactccgccatgcgcgaccagtacatgcgcaccggcgagggcttcctctgcgtcttcgccatcaacaacaccaagtccttcgaggacatccaccagtaccgcgagcagatcaagcgcgtcaaggactccgacgacgtccccatggtcctcgtcggcaacaagtgcgacctcgccgcccgcaccgtcgagtcccgccaggcccaggacctcgcccgctcctacggcatcccctacatcgagacctccgccaagacccgccagggcgtcgaggacgccttctacaccctcgtccgcgagatccgccagcacaagctccgcaagctcaacccccccgacgagtccggccccggctgcatgtcctgcaagtgcgtcctctcctga

SEQ ID NO: 3300 - RNA, 570 nt, synthetic construct
  misc_feature 1..570: note = derived and/or modified sequence opt3 fromRASH__Homo_sapiens__AAB02605
  source 1..570: mol_type = other RNA
atgaccgagtacaagctggtggtcgttggcgccgggggagtgggtaaaagcgctctcacaatccagcttattcaaaaccacttcgtagacgaatatgatcccactatagaggactcctacagaaaacaggtggtcatcgatggcgaaacgtgcctgttggacattttagataccgcagggcaggaggaatattctgccatgagggaccagtacatgcggacaggagagggctttctgtgtgtgttcgcgatcaataacactaagtcatttgaggatattcatcaatatcgcgaacagatcaagcgagttaaagacagtgatgacgtgcctatggtcctagtgggtaataagtgcgatctcgctgcccgtaccgtagagagcagacaggcacaggacctggccaggtcctacgggataccatatatcgaaacatctgctaagacccggcaaggagttgaggatgcattctacactcttgtgcgcgagattagacagcacaaactgaggaagttgaacccgcccgacgaatcgggccctggctgtatgtcatgcaaatgtgtcctcagctga

SEQ ID NO: 3301 - RNA, 570 nt, synthetic construct
  misc_feature 1..570: note = derived and/or modified sequence opt4 fromRASH__Homo_sapiens__AAB02605
  source 1..570: mol_type = other RNA
atgaccgagtacaagctggtggtggtgggcgccggcggcgtgggcaagagcgccctgaccatccagctgatccagaaccacttcgtggacgagtacgaccccaccatcgaggacagctacagaaagcaggtggtgatcgacggcgagacctgcctgctggacatcctggacaccgccggccaggaggagtacagcgccatgagagaccagtacatgagaaccggcgagggcttcctgtgcgtgttcgccatcaacaacaccaagagcttcgaggacatccaccagtacagagagcagatcaagagagtgaaggacagcgacgacgtgcccatggtgctggtgggcaacaagtgcgacctggccgccagaaccgtggagagcagacaggcccaggacctggccagaagctacggcatcccctacatcgagaccagcgccaagaccagacagggcgtggaggacgccttctacaccctggtgagagagatcagacagcacaagctgagaaagctgaacccccccgacgagagcggccccggctgcatgagctgcaagtgcgtgctgagctga

SEQ ID NO: 3302 - RNA, 570 nt, synthetic construct
  misc_feature 1..570: note = derived and/or modified sequence opt5 fromRASH__Homo_sapiens__AAB02605
  source 1..570: mol_type = other RNA
atgaccgagtacaagctggtggtcgttggcgccgggggagtgggcaaaagcgctctcacaatccagctgattcaaaaccacttcgtggacgaatatgatcccacgatcgaggactcctacagaaagcaggtcgtgattgatggggaaacctgccttctggacatcctcgatacagccggacaggaggaatattctgcgatgcgggaccagtacatgcgcaccggcgaggggtttctgtgtgttttcgctattaacaacacaaagagctttgaggatatccatcaatatagagaacagatcaaacgggtgaaagactccgatgacgtccctatggtgcttgttggaaataagtgcgatctggccgcccgcaccgtggagtctagacaggctcaggacctcgcccggagctacggcattccgtatatcgaaacatccgctaagacccgccaaggcgtcgaggatgccttctacacgctggtgagagagattcggcagcacaaactgcgcaagctcaatccccctgacgaatctgggcccggatgtatgagctgcaaatgtgtgctgtcctga

SEQ ID NO: 3303 - protein, 189 aa, synthetic construct [sequence omitted]

SEQ ID NO: 3304 - RNA, 570 nt, synthetic construct
  misc_feature 1..570: note = RASK__Homo_sapiens__AAB59445
  source 1..570: mol_type = other RNA
atgactgaatataaacttgtggtagttggagctggtggcgtaggcaagagtgccttgacgatacagctaattcagaatcattttgtggacgaatatgatccaacaatagaggattcctacaggaagcaagtagtaattgatggagaaacctgtctcttggatattctcgacacagcaggtcaagaggagtacagtgcaatgagggaccagtacatgaggactggggagggctttctttgtgtatttgccataaataatactaaatcatttgaagatattcaccattatagagaacaaattaaaagagttaaggactctgaagatgtacctatggtcctagtaggaaataaatgtgatttgccttctagaacagtagacacaaaacaggctcaggacttagcaagaagttatggaattccttttattgaaacatcagcaaagacaagacagagagtggaggatgctttttatacattggtgagagagatccgacaatacagattgaaaaaaatcagcaaagaagaaaagactcctggctgtgtgaaaattaaaaaatgcattataatgtaa

SEQ ID NO: 3305 - RNA, 570 nt, synthetic construct
  misc_feature 1..570: note = derived and/or modified sequence opt1 fromRASK__Homo_sapiens__AAB59445
  source 1..570: mol_type = other RNA
atgaccgagtacaagctggtggtcgtgggcgccgggggcgtgggcaagagcgccctcaccatccagctgatccagaaccacttcgtcgacgagtacgaccccacgatcgaggactcctaccgcaagcaggtcgtgatcgacggggagacctgcctgctcgacatcctggacaccgcggggcaggaggagtacagcgccatgcgggaccagtacatgcgcaccggcgagggcttcctgtgcgtgttcgccatcaacaacacgaagtccttcgaggacatccaccactaccgggagcagatcaagcgcgtgaaggacagcgaggacgtgccgatggtcctcgtggggaacaagtgcgacctgccctcccggaccgtggacaccaagcaggcccaggacctggcccgcagctacggcatccccttcatcgagacctccgcgaagacgcggcagcgcgtcgaggacgccttctacaccctcgtgcgggagatccgccagtaccggctgaagaagatcagcaaggaggagaagacccccgggtgcgtgaagatcaagaagtgcatcatcatgtga

SEQ ID NO: 3306 - RNA, 570 nt, synthetic construct
  misc_feature 1..570: note = derived and/or modified sequence opt2 fromRASK__Homo_sapiens__AAB59445
  source 1..570: mol_type = other RNA
atgaccgagtacaagctcgtcgtcgtcggcgccggcggcgtcggcaagtccgccctcaccatccagctcatccagaaccacttcgtcgacgagtacgaccccaccatcgaggactcctaccgcaagcaggtcgtcatcgacggcgagacctgcctcctcgacatcctcgacaccgccggccaggaggagtactccgccatgcgcgaccagtacatgcgcaccggcgagggcttcctctgcgtcttcgccatcaacaacaccaagtccttcgaggacatccaccactaccgcgagcagatcaagcgcgtcaaggactccgaggacgtccccatggtcctcgtcggcaacaagtgcgacctcccctcccgcaccgtcgacaccaagcaggcccaggacctcgcccgctcctacggcatccccttcatcgagacctccgccaagacccgccagcgcgtcgaggacgccttctacaccctcgtccgcgagatccgccagtaccgcctcaagaagatctccaaggaggagaagacccccggctgcgtcaagatcaagaagtgcatcatcatgtga

SEQ ID NO: 3307 - RNA, 570 nt, synthetic construct
  misc_feature 1..570: note = derived and/or modified sequence opt3 fromRASK__Homo_sapiens__AAB59445
  source 1..570: mol_type = other RNA
atgaccgagtacaagctggtggtcgttggcgccgggggagtgggtaaaagcgctctcacaatccagcttattcaaaaccacttcgtagacgaatatgatcccactatagaggactcctacagaaaacaggtggtcatcgatggcgaaacgtgcctgttggacattttagataccgcagggcaggaggaatattctgccatgagggaccagtacatgcggacaggagagggctttctgtgtgtgttcgcgatcaataacactaagtcatttgaggatattcatcactatcgcgaacaaatcaagcgagttaaagacagtgaggatgtgcctatggtcctagtgggtaataagtgcgacctcccaagccgtaccgtagatacaaagcaggctcaggacctggccagatcctacgggataccgttcatcgaaacctctgcaaaaactaggcagcgggttgaggatgccttttatacacttgtgcgcgagattagacaatacaggctgaagaaaatctcgaaggaagagaaaacccccggatgtgtcaagattaagaaatgcatcataatgtga

SEQ ID NO: 3308 - RNA, 570 nt, synthetic construct
  misc_feature 1..570: note = derived and/or modified sequence opt4 fromRASK__Homo_sapiens__AAB59445
  source 1..570: mol_type = other RNA
atgaccgagtacaagctggtggtggtgggcgccggcggcgtgggcaagagcgccctgaccatccagctgatccagaaccacttcgtggacgagtacgaccccaccatcgaggacagctacagaaagcaggtggtgatcgacggcgagacctgcctgctggacatcctggacaccgccggccaggaggagtacagcgccatgagagaccagtacatgagaaccggcgagggcttcctgtgcgtgttcgccatcaacaacaccaagagcttcgaggacatccaccactacagagagcagatcaagagagtgaaggacagcgaggacgtgcccatggtgctggtgggcaacaagtgcgacctgcccagcagaaccgtggacaccaagcaggcccaggacctggccagaagctacggcatccccttcatcgagaccagcgccaagaccagacagagagtggaggacgccttctacaccctggtgagagagatcagacagtacagactgaagaagatcagcaaggaggagaagacccccggctgcgtgaagatcaagaagtgcatcatcatgtga

SEQ ID NO: 3309 - RNA, 570 nt, synthetic construct
  misc_feature 1..570: note = derived and/or modified sequence opt5 fromRASK__Homo_sapiens__AAB59445
  source 1..570: mol_type = other RNA
atgaccgagtacaagctggtggtcgttggcgccgggggagtgggcaaaagcgctctcacaatccagctgattcaaaaccacttcgtggacgaatatgatcccacgatcgaggactcctacagaaagcaggtcgtgattgatggggaaacctgccttctggacatcctcgatacagccggacaggaggaatattctgcgatgcgggaccagtacatgcgcaccggcgaggggtttctgtgtgttttcgctattaataacacaaagagctttgaggatatccatcactatagagaacaaatcaaacgggtgaaagactccgaggatgtccctatggtgcttgttggaaataagtgcgacctgccgtctcgcaccgtggatacaaagcaggcccaggacctcgccagaagctacggcattcccttcatcgaaacctccgctaaaacgcggcagcgcgtcgaggatgccttttataccctggtgagagagattcggcaataccgcctgaagaaaatctctaaggaagagaaaacacctggctgtgtgaagattaagaaatgcatcattatgtga

SEQ ID NO: 3310 - protein, 189 aa, synthetic construct
  REGION 1..189: note = RASN__Homo_sapiens__P01111
MTEYKLVVVGAGGVGKSALTIQLIQNHFVDEYDPTIEDSYRKQVVIDGETCLLDILDTAGQEEYSAMRDQYMRTGEGFLCVFAINNSKSFADINLYREQIKRVKDSDDVPMVLVGNKCDLPTRTVDTKQAHELAKSYGIPFIETSAKTRQGVEDAFYTLVREIRQYRMKKLNSSDDGTQGCMGLPCVVM

SEQ ID NO: 3311 - RNA, 570 nt, synthetic construct
  misc_feature 1..570: note = RASN__Homo_sapiens__AAA60255
  source 1..570: mol_type = other RNA
atgactgagtacaaactggtggtggttggagcaggtggtgttgggaaaagcgcactgacaatccagctaatccagaaccactttgtagatgaatatgatcccaccatagaggattcttacagaaaacaagtggttatagatggtgaaacctgtttgttggacatactggatacagctggacaagaagagtacagtgccatgagagaccaatacatgaggacaggcgaaggcttcctctgtgtatttgccatcaataatagcaagtcatttgcggatattaacctctacagggagcagattaagcgagtaaaagactcggatgatgtacctatggtgctagtgggaaacaagtgtgatttgccaacaaggacagttgatacaaaacaagcccacgaactggccaagagttacgggattccattcattgaaacctcagccaagaccagacagggtgttgaagatgctttttacacactggtaagagaaatacgccagtaccgaatgaaaaaactcaacagcagtgatgatgggactcagggttgtatgggattgccatgtgtggtgatgtaa

SEQ ID NO: 3312 - RNA, 570 nt, synthetic construct
  misc_feature 1..570: note = derived and/or modified sequence opt1 fromRASN__Homo_sapiens__AAA60255
  source 1..570: mol_type = other RNA
atgaccgagtacaagctggtggtcgtgggcgccgggggcgtgggcaagagcgccctcaccatccagctgatccagaaccacttcgtcgacgagtacgaccccacgatcgaggactcctaccgcaagcaggtcgtgatcgacggggagacctgcctgctcgacatcctggacaccgcggggcaggaggagtacagcgccatgcgggaccagtacatgcgcaccggcgagggcttcctgtgcgtgttcgccatcaacaactccaagagcttcgccgacatcaacctctaccgggagcagatcaagcgcgtgaaggactccgacgacgtgccgatggtcctggtggggaacaagtgcgacctgcccacgcggaccgtggacaccaagcaggcccacgagctcgccaagagctacggcatccccttcatcgagacctccgcgaagacgcgccagggggtcgaggacgccttctacaccctggtgcgggagatccgccagtaccggatgaagaagctgaacagctccgacgacggcacccaggggtgcatgggcctcccctgcgtggtcatgtga

SEQ ID NO: 3313 - RNA, 570 nt, synthetic construct
  misc_feature 1..570: note = derived and/or modified sequence opt2 fromRASN__Homo_sapiens__AAA60255
  source 1..570: mol_type = other RNA
atgaccgagtacaagctcgtcgtcgtcggcgccggcggcgtcggcaagtccgccctcaccatccagctcatccagaaccacttcgtcgacgagtacgaccccaccatcgaggactcctaccgcaagcaggtcgtcatcgacggcgagacctgcctcctcgacatcctcgacaccgccggccaggaggagtactccgccatgcgcgaccagtacatgcgcaccggcgagggcttcctctgcgtcttcgccatcaacaactccaagtccttcgccgacatcaacctctaccgcgagcagatcaagcgcgtcaaggactccgacgacgtccccatggtcctcgtcggcaacaagtgcgacctccccacccgcaccgtcgacaccaagcaggcccacgagctcgccaagtcctacggcatccccttcatcgagacctccgccaagacccgccagggcgtcgaggacgccttctacaccctcgtccgcgagatccgccagtaccgcatgaagaagctcaactcctccgacgacggcacccagggctgcatgggcctcccctgcgtcgtcatgtga

SEQ ID NO: 3314 - RNA, 570 nt, synthetic construct
  misc_feature 1..570: note = derived and/or modified sequence opt3 fromRASN__Homo_sapiens__AAA60255
  source 1..570: mol_type = other RNA
atgaccgagtacaagctggtggtcgttggcgccgggggagtgggtaaaagcgctctcacaatccagcttattcaaaaccacttcgtagacgaatatgatcccactatagaggactcctacagaaaacaggtggtcatcgatggcgaaacgtgcctgttggacattttagataccgcagggcaggaggaatattctgccatgagggaccagtacatgcggacaggagagggctttctgtgtgtgttcgcgatcaataactcaaagagttttgctgatattaatctatatcgcgagcaaatcaagcgagttaaagacagcgatgacgtgcctatggtcctcgtgggtaacaagtgcgatctgccaactcgtaccgtagacacaaagcaggcccatgaacttgcaaaatcctacgggataccgttcatcgagacctctgccaagactagacagggagttgaagatgctttttatacactggtgagggagattcggcagtaccgcatgaaaaagctcaattcgtcagacgacggcacccaaggctgtatggggttgccctgcgtcgtgatgtga

SEQ ID NO: 3315 - RNA, 570 nt, synthetic construct
  misc_feature 1..570: note = derived and/or modified sequence opt4 fromRASN__Homo_sapiens__AAA60255
  source 1..570: mol_type = other RNA
atgaccgagtacaagctggtggtggtgggcgccggcggcgtgggcaagagcgccctgaccatccagctgatccagaaccacttcgtggacgagtacgaccccaccatcgaggacagctacagaaagcaggtggtgatcgacggcgagacctgcctgctggacatcctggacaccgccggccaggaggagtacagcgccatgagagaccagtacatgagaaccggcgagggcttcctgtgcgtgttcgccatcaacaacagcaagagcttcgccgacatcaacctgtacagagagcagatcaagagagtgaaggacagcgacgacgtgcccatggtgctggtgggcaacaagtgcgacctgcccaccagaaccgtggacaccaagcaggcccacgagctggccaagagctacggcatccccttcatcgagaccagcgccaagaccagacagggcgtggaggacgccttctacaccctggtgagagagatcagacagtacagaatgaagaagctgaacagcagcgacgacggcacccagggctgcatgggcctgccctgcgtggtgatgtga

SEQ ID NO: 3316 - RNA, 570 nt, synthetic construct
  misc_feature 1..570: note = derived and/or modified sequence opt5 fromRASN__Homo_sapiens__AAA60255
  source 1..570: mol_type = other RNA
atgaccgagtacaagctggtggtcgttggcgccgggggagtgggcaaaagcgctctcacaatccagctgattcaaaaccacttcgtggacgaatatgatcccacgatcgaggactcctacagaaagcaggtcgtgattgatggggaaacctgccttctggacatcctcgatacagccggacaggaggaatattctgcgatgcgggaccagtacatgcgcaccggcgaggggtttctgtgtgttttcgctattaataacagcaaatcctttgccgatatcaatctttatagagagcaaatcaagcgggtgaaagactctgatgacgtccctatggtgctggttggaaacaagtgcgatctcccgacacgcaccgtggacacaaagcaggcccatgaactggctaaaagctacggcattcccttcatcgagacctccgccaagacgagacagggcgtcgaagatgctttttataccctggtgcgggagattcgccagtacagaatgaaaaagctcaattctagcgacgacgggacacaaggatgtatgggcctgccttgcgtggtcatgtga

SEQ ID NO: 3317 - protein, 181 aa, synthetic construct
  REGION 1..181: note = RGS5__Homo_sapiens__O15539
MCKGLAALPHSCLERAKEIKIKLGILLQKPDSVGDLVIPYNEKPEKPAKTQKTSLDEALQWRDSLDKLLQNNYGLASFKSFLKSEFSEENLEFWIACEDYKKIKSPAKMAEKAKQIYEEFIQTEAPKEVNIDHFTKDITMKNLVEPSLSSFDMAQKRIHALMEKDSLPRFVRSEFYQELIK

SEQ ID NO: 3318 - RNA, 546 nt, synthetic construct
  misc_feature 1..546: note = RGS5__Homo_sapiens__AAB84001
  source 1..546: mol_type = other RNA
atgtgcaaaggacttgcagctttgccccactcatgcctggaaagggccaaggagattaagatcaagttgggaattctcctccagaagccagactcagttggtgaccttgtcattccgtacaatgagaagccagagaaaccagccaagacccagaaaacctcgctggacgaggccctgcagtggcgtgattccctggacaaactcctgcagaacaactatggacttgccagtttcaaaagtttcctgaagtctgaattcagtgaggaaaaccttgagttctggattgcctgtgaggattacaagaagatcaagtcccctgccaagatggctgagaaggcaaagcaaatttatgaagaattcattcaaacggaggctcctaaagaggtgaatattgaccacttcactaaggacatcacaatgaagaacctggtggaaccttccctgagcagctttgacatggcccagaaaagaatccatgccctgatggaaaaggattctctgcctcgctttgtgcgctctgagttttatcaggagttaatcaagtag

SEQ ID NO: 3319 - RNA, 546 nt, synthetic construct
  misc_feature 1..546: note = derived and/or modified sequence opt1 fromRGS5__Homo_sapiens__AAB84001
  source 1..546: mol_type = other RNA
atgtgcaagggcctggccgccctcccccacagctgcctggagcgcgcgaaggagatcaagatcaagctggggatcctcctgcagaagccggactccgtgggcgacctggtcatcccctacaacgagaagcccgagaagcccgccaagacccagaagaccagcctcgacgaggccctgcagtggcgggactccctggacaagctcctgcagaacaactacgggctggccagcttcaagtccttcctcaagagcgagttctccgaggagaacctggagttctggatcgcctgcgaggactacaagaagatcaagagcccggcgaagatggccgagaaggccaagcagatctacgaggagttcatccagacggaggcccccaaggaggtgaacatcgaccacttcaccaaggacatcaccatgaagaacctggtggagccctccctcagctccttcgacatggcgcagaagcgcatccacgccctgatggagaaggacagcctgccccggttcgtccgctccgagttctaccaggagctcatcaagtga

SEQ ID NO: 3320 - RNA, 546 nt, synthetic construct
  misc_feature 1..546: note = derived and/or modified sequence opt2 fromRGS5__Homo_sapiens__AAB84001
  source 1..546: mol_type = other RNA
atgtgcaagggcctcgccgccctcccccactcctgcctcgagcgcgccaaggagatcaagatcaagctcggcatcctcctccagaagcccgactccgtcggcgacctcgtcatcccctacaacgagaagcccgagaagcccgccaagacccagaagacctccctcgacgaggccctccagtggcgcgactccctcgacaagctcctccagaacaactacggcctcgcctccttcaagtccttcctcaagtccgagttctccgaggagaacctcgagttctggatcgcctgcgaggactacaagaagatcaagtcccccgccaagatggccgagaaggccaagcagatctacgaggagttcatccagaccgaggcccccaaggaggtcaacatcgaccacttcaccaaggacatcaccatgaagaacctcgtcgagccctccctctcctccttcgacatggcccagaagcgcatccacgccctcatggagaaggactccctcccccgcttcgtccgctccgagttctaccaggagctcatcaagtga

SEQ ID NO: 3321 - RNA, 546 nt, synthetic construct
  misc_feature 1..546: note = derived and/or modified sequence opt3 fromRGS5__Homo_sapiens__AAB84001
  source 1..546: mol_type = other RNA
atgtgcaagggcctggccgctctcccccacagctgtcttgagagagcaaaagaaatcaagattaaactggggatattgttacagaagcctgactccgtgggagatctggtcatcccatacaacgagaaaccggaaaagcccgccaagacccagaaaacatctctagacgaggcgctccaatggagggattcactggacaaacttctgcagaataactatggtttggctagtttcaagagctttctcaagtccgagttctctgaagagaatctggaattttggattgcctgcgaggattacaaaaagatcaagtcgcctgcaaaaatggccgaaaaggctaaacagatttatgaggagttcatccaaactgaagcaccaaaggaggttaacatagaccattttacgaaagatatcaccatgaagaatctggtggaaccctcactcagcagtttcgacatggcccagaaacggattcacgctttaatggagaaggattccctgcctcgctttgtacgatctgagttctaccaggaacttatcaagtga

SEQ ID NO: 3322 - RNA, 546 nt, synthetic construct
  misc_feature 1..546: note = derived and/or modified sequence opt4 fromRGS5__Homo_sapiens__AAB84001
  source 1..546: mol_type = other RNA
atgtgcaagggcctggccgccctgccccacagctgcctggagagagccaaggagatcaagatcaagctgggcatcctgctgcagaagcccgacagcgtgggcgacctggtgatcccctacaacgagaagcccgagaagcccgccaagacccagaagaccagcctggacgaggccctgcagtggagagacagcctggacaagctgctgcagaacaactacggcctggccagcttcaagagcttcctgaagagcgagttcagcgaggagaacctggagttctggatcgcctgcgaggactacaagaagatcaagagccccgccaagatggccgagaaggccaagcagatctacgaggagttcatccagaccgaggcccccaaggaggtgaacatcgaccacttcaccaaggacatcaccatgaagaacctggtggagcccagcctgagcagcttcgacatggcccagaagagaatccacgccctgatggagaaggacagcctgcccagattcgtgagaagcgagttctaccaggagctgatcaagtga

SEQ ID NO: 3323 - RNA, 546 nt, synthetic construct
  misc_feature 1..546: note = derived and/or modified sequence opt5 fromRGS5__Homo_sapiens__AAB84001
  source 1..546: mol_type = other RNA
atgtgcaagggcctggccgctctcccccacagctgtctggagagagccaaagaaatcaagattaaacttgggatcctgctccagaagcctgactccgtgggagatctggtcattccgtacaacgagaaacccgaaaagcctgcgaagacccaaaagacatctcttgacgaggctctgcagtggcgggatagcctcgacaagctgctgcagaataactatggcctcgcctccttcaaatcttttctgaaaagcgagttctccgaagagaatcttgaattttggatcgcctgcgaggattacaaaaagattaagtctcccgctaaaatggccgaaaaggctaaacagatctatgaggagttcatccaaacggaagcccctaaggaggttaacattgaccattttaccaaagatatcacaatgaagaatctggtggaacccagcctctccagcttcgacatggcgcagaaacgcattcacgccctgatggagaaggattctcttcctagatttgtgcggtccgagttctaccaggaactgatcaagtga

SEQ ID NO: 3324 - protein, 724 aa, synthetic construct
  REGION 1..724: note = RHAMM/CD168__Homo_sapiens__O75330
MSFPKAPLKRFNDPSGCAPSPGAYDVKTLEVLKGPVSFQKSQRFKQQKESKQNLNVDKDTTLPASARKVKSSESKESQKNDKDLKILEKEIRVLLQERGAQDRRIQDLETELEKMEARLNAALREKTSLSANNATLEKQLIELTRTNELLKSKFSENGNQKNLRILSLELMKLRNKRETKMRGMMAKQEGMEMKLQVTQRSLEESQGKIAQLEGKLVSIEKEKIDEKSETEKLLEYIEEISCASDQVEKYKLDIAQLEENLKEKNDEILSLKQSLEENIVILSKQVEDLNVKCQLLEKEKEDHVNRNREHNENLNAEMQNLKQKFILEQQEREKLQQKELQIDSLLQQEKELSSSLHQKLCSFQEEMVKEKNLFEEELKQTLDELDKLQQKEEQAERLVKQLEEEAKSRAEELKLLEEKLKGKEAELEKSSAAHTQATLLLQEKYDSMVQSLEDVTAQFESYKALTASEIEDLKLENSSLQEKAAKAGKNAEDVQHQILATESSNQEYVRMLLDLQTKSALKETEIKEITVSFLQKITDLQNQLKQQEEDFRKQLEDEEGRKAEKENTTAELTEEINKWRLLYEELYNKTKPFQLQLDAFEVEKQALLNEHGAAQEQLNKIRDSYAKLLGHQNLKQKIKHVVKLKDENSQLKSEVSKLRCQLAKKKQSETKLQEELNKVLGIKHFDPSKAFHHESKENFALKTPLKEGNTNCYRAPMECQESWK

SEQ ID NO: 3325 - RNA, 2175 nt, synthetic construct
  misc_feature 1..2175: note = RHAMM/CD168__Homo_sapiens__CCDS4362.1
  source 1..2175: mol_type = other RNA
atgtcctttcctaaggcgcccttgaaacgattcaatgacccttctggttgtgcaccatctccaggtgcttatgatgttaaaactttagaagtattgaaaggaccagtatcctttcagaaatcacaaagatttaaacaacaaaaagaatctaaacaaaatcttaatgttgacaaagatactaccttgcctgcttcagctagaaaagttaagtcttcggaatcaaaggaatctcaaaagaatgataaagatttgaagatattagagaaagagattcgtgttcttctacaggaacgtggtgcccaggacaggcggatccaggatctggaaactgagttggaaaagatggaagcaaggctaaatgctgcactaagggaaaaaacatctctctctgcaaataatgctacactggaaaaacaacttattgaattgaccaggactaatgaactactaaaatctaagttttctgaaaatggtaaccagaagaatttgagaattctaagcttggagttgatgaaacttagaaacaaaagagaaacaaagatgaggggtatgatggctaagcaagaaggcatggagatgaagctgcaggtcacccaaaggagtctcgaagagtctcaagggaaaatagcccaactggagggaaaacttgtttcaatagagaaagaaaagattgatgaaaaatctgaaacagaaaaactcttggaatacatcgaagaaattagttgtgcttcagatcaagtggaaaaatacaagctagatattgcccagttagaagaaaatttgaaagagaagaatgatgaaattttaagccttaagcagtctcttgaggagaatattgttatattatctaaacaagtagaagatctaaatgtgaaatgtcagctgcttgaaaaagaaaaagaagaccatgtcaacaggaatagagaacacaacgaaaatctaaatgcagagatgcaaaacttaaaacagaagtttattcttgaacaacaggaacgtgaaaagcttcaacaaaaagaattacaaattgattcacttctgcaacaagagaaagaattatcttcgagtcttcatcagaagctctgttcttttcaagaggaaatggttaaagagaagaatctgtttgaggaagaattaaagcaaacactggatgagcttgataaattacagcaaaaggaggaacaagctgaaaggctggtcaagcaattggaagaggaagcaaaatctagagctgaagaattaaaactcctagaagaaaagctgaaagggaaggaggctgaactggagaaaagtagtgctgctcatacccaggccaccctgcttttgcaggaaaagtatgacagtatggtgcaaagccttgaagatgttactgctcaatttgaaagctataaagcgttaacagccagtgagatagaagatcttaagctggagaactcatcattacaggaaaaagcggccaaggctgggaaaaatgcagaggatgttcagcatcagattttggcaactgagagctcaaatcaagaatatgtaaggatgcttctagatctgcagaccaagtcagcactaaaggaaacagaaattaaagaaatcacagtttcttttcttcaaaaaataactgatttgcagaaccaactcaagcaacaggaggaagactttagaaaacagctggaagatgaagaaggaagaaaagctgaaaaagaaaatacaacagcagaattaactgaagaaattaacaagtggcgtctcctctatgaagaactatataataaaacaaaaccttttcagctacaactagatgcttttgaagtagaaaaacaggcattgttgaatgaacatggtgcagctcaggaacagctaaataaaataagagattcatatgctaaattattgggtcatcagaatttgaaacaaaaaatcaagcatgttgtgaagttgaaagatgaaaatagccaactcaaatcggaagtatcaaaactccgctgtcagcttgctaaaaaaaaacaaagtgagacaaaacttcaagaggaattgaataaagttctaggtatcaaacactttgatccttcaaaggcttttcatcatgaaagtaaagaaaattttgccctgaagaccccattaaaagaaggcaatacaaactgttaccgagctcctatggagtgtcaagaatcatggaagtaa

SEQ ID NO: 3326 - RNA, 2175 nt, synthetic construct
  misc_feature 1..2175: note = derived and/or modified sequence opt1 fromRHAMM/CD168__Homo_sapiens__CCDS4362.1
  source 1..2175: mol_type = other RNA
atgagcttccccaaggccccgctgaagcgcttcaacgacccctccggctgcgcccccagccccggggcgtacgacgtgaagaccctcgaggtcctgaagggcccggtgtccttccagaagtcccagcggttcaagcagcagaaggagagcaagcagaacctgaacgtggacaaggacaccacgctccccgccagcgcccgcaaggtcaagtccagcgagtccaaggagagccagaagaacgacaaggacctgaagatcctggagaaggagatccgggtgctcctgcaggagcgcggggcccaggaccggcgcatccaggacctggagaccgagctcgagaagatggaggcccggctgaacgcggccctgcgcgagaagacctccctcagcgccaacaacgccaccctggagaagcagctgatcgagctcacgcggaccaacgagctgctgaagtccaagttcagcgagaacggcaaccagaagaacctccgcatcctgtccctggagctcatgaagctgcggaacaagcgcgagaccaagatgcgggggatgatggcgaagcaggagggcatggagatgaagctccaggtgacccagcgcagcctggaggagtcccagggcaagatcgcccagctggaggggaagctggtcagcatcgagaaggagaagatcgacgagaagtccgagacggagaagctcctggagtacatcgaggagatcagctgcgccagcgaccaggtggagaagtacaagctggacatcgcccagctcgaggagaacctgaaggagaagaacgacgagatcctgtccctcaagcagagcctggaggagaacatcgtgatcctgtccaagcaggtcgaggacctcaacgtgaagtgccagctgctggagaaggagaaggaggaccacgtgaaccggaaccgcgagcacaacgagaacctcaacgccgagatgcagaacctgaagcagaagttcatcctggagcagcaggagcgggagaagctccagcagaaggagctgcagatcgacagcctgctccagcaggagaaggagctgtccagctccctgcaccagaagctctgcagcttccaggaggagatggtcaaggagaagaacctgttcgaggaggagctgaagcagaccctggacgagctcgacaagctgcagcagaaggaggagcaggcggagcgcctggtgaagcagctcgaggaggaggccaagtcccgggccgaggagctgaagctgctcgaggagaagctgaagggcaaggaggccgagctggagaagtccagcgccgcgcacacccaggccaccctcctgctgcaggagaagtacgacagcatggtgcagtccctcgaggacgtcacggcccagttcgagagctacaaggccctgaccgcctccgagatcgaggacctgaagctcgagaacagctccctgcaggagaaggcggccaaggccgggaagaacgccgaggacgtgcagcaccagatcctggccaccgagagctccaaccaggagtacgtgcgcatgctcctggacctgcagaccaagagcgcgctcaaggagacggagatcaaggagatcaccgtcagcttcctgcagaagatcaccgacctgcagaaccagctcaagcagcaggaggaggacttccggaagcagctggaggacgaggagggccgcaaggccgagaaggagaacaccacggccgagctgaccgaggagatcaacaagtggcgcctcctgtacgaggagctgtacaacaagaccaagcccttccagctccagctggacgccttcgaggtggagaagcaggcgctgctcaacgagcacggggccgcccaggagcagctgaacaagatccgggactcctacgccaagctgctcggccaccagaacctgaagcagaagatcaagcacgtggtcaagctgaaggacgagaacagccagctcaagtccgaggtgagcaagctgcgctgccagctggccaagaagaagcagtccgagaccaagctccaggaggagctgaacaaggtgctgggcatcaagcacttcgaccccagcaaggcgttccaccacgagtccaaggagaacttcgccctcaagacgccgctgaaggaggggaacaccaactgctaccgggcccccatggagtgccaggagagctggaagtga

SEQ ID NO: 3327 - RNA, 2175 nt, synthetic construct
  misc_feature 1..2175: note = derived and/or modified sequence opt2 fromRHAMM/CD168__Homo_sapiens__CCDS4362.1
  source 1..2175: mol_type = other RNA
atgtccttccccaaggcccccctcaagcgcttcaacgacccctccggctgcgccccctcccccggcgcctacgacgtcaagaccctcgaggtcctcaagggccccgtctccttccagaagtcccagcgcttcaagcagcagaaggagtccaagcagaacctcaacgtcgacaaggacaccaccctccccgcctccgcccgcaaggtcaagtcctccgagtccaaggagtcccagaagaacgacaaggacctcaagatcctcgagaaggagatccgcgtcctcctccaggagcgcggcgcccaggaccgccgcatccaggacctcgagaccgagctcgagaagatggaggcccgcctcaacgccgccctccgcgagaagacctccctctccgccaacaacgccaccctcgagaagcagctcatcgagctcacccgcaccaacgagctcctcaagtccaagttctccgagaacggcaaccagaagaacctccgcatcctctccctcgagctcatgaagctccgcaacaagcgcgagaccaagatgcgcggcatgatggccaagcaggagggcatggagatgaagctccaggtcacccagcgctccctcgaggagtcccagggcaagatcgcccagctcgagggcaagctcgtctccatcgagaaggagaagatcgacgagaagtccgagaccgagaagctcctcgagtacatcgaggagatctcctgcgcctccgaccaggtcgagaagtacaagctcgacatcgcccagctcgaggagaacctcaaggagaagaacgacgagatcctctccctcaagcagtccctcgaggagaacatcgtcatcctctccaagcaggtcgaggacctcaacgtcaagtgccagctcctcgagaaggagaaggaggaccacgtcaaccgcaaccgcgagcacaacgagaacctcaacgccgagatgcagaacctcaagcagaagttcatcctcgagcagcaggagcgcgagaagctccagcagaaggagctccagatcgactccctcctccagcaggagaaggagctctcctcctccctccaccagaagctctgctccttccaggaggagatggtcaaggagaagaacctcttcgaggaggagctcaagcagaccctcgacgagctcgacaagctccagcagaaggaggagcaggccgagcgcctcgtcaagcagctcgaggaggaggccaagtcccgcgccgaggagctcaagctcctcgaggagaagctcaagggcaaggaggccgagctcgagaagtcctccgccgcccacacccaggccaccctcctcctccaggagaagtacgactccatggtccagtccctcgaggacgtcaccgcccagttcgagtcctacaaggccctcaccgcctccgagatcgaggacctcaagctcgagaactcctccctccaggagaaggccgccaaggccggcaagaacgccgaggacgtccagcaccagatcctcgccaccgagtcctccaaccaggagtacgtccgcatgctcctcgacctccagaccaagtccgccctcaaggagaccgagatcaaggagatcaccgtctccttcctccagaagatcaccgacctccagaaccagctcaagcagcaggaggaggacttccgcaagcagctcgaggacgaggagggccgcaaggccgagaaggagaacaccaccgccgagctcaccgaggagatcaacaagtggcgcctcctctacgaggagctctacaacaagaccaagcccttccagctccagctcgacgccttcgaggtcgagaagcaggccctcctcaacgagcacggcgccgcccaggagcagctcaacaagatccgcgactcctacgccaagctcctcggccaccagaacctcaagcagaagatcaagcacgtcgtcaagctcaaggacgagaactcccagctcaagtccgaggtctccaagctccgctgccagctcgccaagaagaagcagtccgagaccaagctccaggaggagctcaacaaggtcctcggcatcaagcacttcgacccctccaaggccttccaccacgagtccaaggagaacttcgccctcaagacccccctcaaggagggcaacaccaactgctaccgcgcccccatggagtgccaggagtcctggaagtga

SEQ ID NO: 3328 - RNA, 2175 nt, synthetic construct
  misc_feature 1..2175: note = derived and/or modified sequence opt3 fromRHAMM/CD168__Homo_sapiens__CCDS4362.1
  source 1..2175: mol_type = other RNA
atgagcttccccaaggcccctctgaaaagatttaacgacccatccggctgcgctccgtctcccggggcatacgatgtgaagaccctcgaggtccttaaaggacctgtttcattccagaagagtcaaaggtttaaacagcagaaggaaagcaagcagaatctgaacgtggacaaagatacaactttgccagcctccgcgcggaaggtaaaatcttcggagtcaaaggaaagccaaaagaatgacaaggatttaaagatcctggagaaagaaattcgcgtgctactccaggagcgaggtgctcaggaccgtagaatacaggatctggagacggaacttgagaagatggaagccaggctgaacgcagccttgcgggagaaaaccagtctctccgctaataacgcaacactggagaagcaactgatcgaactcactcgcaccaatgagttactgaaatctaagttcagcgaaaacggcaatcagaaaaaccttagaattttgtccctggagctaatgaagctcaggaataagcgggaaacaaaaatgcgcgggatgatggccaagcaggagggaatggagatgaaactgcaggtcacccaacgatcacttgaagagagtcagggcaagatcgctcagctggaaggtaaattggtgagcattgagaaggaaaagatcgacgagaaatctgagactgaaaagctcctggagtatatagaagagatctcctgtgcctcagatcaagttgaaaaatacaagttagacattgcgcagctggaggagaacctcaaagaaaagaatgatgagatccttagcctgaagcagagtttggaagagaacattgtgatcctatctaaacaggtcgaggacctgaatgtgaagtgccaactcctggaaaaagagaaggaagatcacgtaaacagaaacagggagcataatgaaaaccttaatgcagagatgcagaacctgaaacagaagtttatattggagcagcaagaacgggagaagctccagcagaaagaactgcagattgactccttactgcaacaggagaaggaactaagctcgtctctccaccagaaactgtgttccttccaggaggagatggttaaggagaaaaatctttttgaagaagagttgaagcaaacactggacgaactcgataaactgcagcagaaggaggagcaagccgaacgtcttgtgaagcagctggaggaagaggctaaatcacgcgccgaggaattgaagctcctggaggaaaaattaaaggggaaagaggcagaactggagaagagtagcgctgcccatacccaggcgacgctactcctgcaggagaagtatgactccatggtccaatctcttgaagatgtgactgcccagttcgagagctacaaagcattgaccgcttcagaaatcgaggacctgaagctcgaaaacagttccctgcaggagaaagccgctaaggccggcaaaaatgcagaggatgtgcagcaccaaattttagccacagaaagctctaaccaggagtatgtcagaatgctgcttgacttgcagactaagtcagctctcaaggaaaccgagatcaaagaaatcacagttagttttctgcagaagattaccgatctacaaaatcagctgaaacagcaagaggaggacttcaggaagcagctcgaagatgaggaaggacggaaagcggagaaggagaacacgactgcagaactgacagaggaaataaataagtggcgacttttgtacgaggaactgtataacaaaaccaagccctttcagttacagctcgacgccttcgaggtggagaaacaagctctgcttaatgaacatggcgccgcacaggagcagctgaacaagatccgcgatagctacgccaaattgctcgggcaccagaatctgaagcagaaaattaagcacgtagtgaagctaaaagacgaaaactcccaactgaagtctgaggtctcgaaactcagatgccagctggctaagaaaaagcagagcgaaactaaacttcaagaggagttgaacaaagtgctgggaatcaagcattttgacccttccaaagccttccaccatgaatcaaaggagaatttcgcattaaaaacaccactcaaggaaggtaacaccaattgttacagggcgcccatggagtgccaggaaagttggaagtga

SEQ ID NO: 3329 - RNA, 2175 nt, synthetic construct
  misc_feature 1..2175: note = derived and/or modified sequence opt4 fromRHAMM/CD168__Homo_sapiens__CCDS4362.1
  source 1..2175: mol_type = other RNA
atgagcttccccaaggcccccctgaagagattcaacgaccccagcggctgcgcccccagccccggcgcctacgacgtgaagaccctggaggtgctgaagggccccgtgagcttccagaagagccagagattcaagcagcagaaggagagcaagcagaacctgaacgtggacaaggacaccaccctgcccgccagcgccagaaaggtgaagagcagcgagagcaaggagagccagaagaacgacaaggacctgaagatcctggagaaggagatcagagtgctgctgcaggagagaggcgcccaggacagaagaatccaggacctggagaccgagctggagaagatggaggccagactgaacgccgccctgagagagaagaccagcctgagcgccaacaacgccaccctggagaagcagctgatcgagctgaccagaaccaacgagctgctgaagagcaagttcagcgagaacggcaaccagaagaacctgagaatcctgagcctggagctgatgaagctgagaaacaagagagagaccaagatgagaggcatgatggccaagcaggagggcatggagatgaagctgcaggtgacccagagaagcctggaggagagccagggcaagatcgcccagctggagggcaagctggtgagcatcgagaaggagaagatcgacgagaagagcgagaccgagaagctgctggagtacatcgaggagatcagctgcgccagcgaccaggtggagaagtacaagctggacatcgcccagctggaggagaacctgaaggagaagaacgacgagatcctgagcctgaagcagagcctggaggagaacatcgtgatcctgagcaagcaggtggaggacctgaacgtgaagtgccagctgctggagaaggagaaggaggaccacgtgaacagaaacagagagcacaacgagaacctgaacgccgagatgcagaacctgaagcagaagttcatcctggagcagcaggagagagagaagctgcagcagaaggagctgcagatcgacagcctgctgcagcaggagaaggagctgagcagcagcctgcaccagaagctgtgcagcttccaggaggagatggtgaaggagaagaacctgttcgaggaggagctgaagcagaccctggacgagctggacaagctgcagcagaaggaggagcaggccgagagactggtgaagcagctggaggaggaggccaagagcagagccgaggagctgaagctgctggaggagaagctgaagggcaaggaggccgagctggagaagagcagcgccgcccacacccaggccaccctgctgctgcaggagaagtacgacagcatggtgcagagcctggaggacgtgaccgcccagttcgagagctacaaggccctgaccgccagcgagatcgaggacctgaagctggagaacagcagcctgcaggagaaggccgccaaggccggcaagaacgccgaggacgtgcagcaccagatcctggccaccgagagcagcaaccaggagtacgtgagaatgctgctggacctgcagaccaagagcgccctgaaggagaccgagatcaaggagatcaccgtgagcttcctgcagaagatcaccgacctgcagaaccagctgaagcagcaggaggaggacttcagaaagcagctggaggacgaggagggcagaaaggccgagaaggagaacaccaccgccgagctgaccgaggagatcaacaagtggagactgctgtacgaggagctgtacaacaagaccaagcccttccagctgcagctggacgccttcgaggtggagaagcaggccctgctgaacgagcacggcgccgcccaggagcagctgaacaagatcagagacagctacgccaagctgctgggccaccagaacctgaagcagaagatcaagcacgtggtgaagctgaaggacgagaacagccagctgaagagcgaggtgagcaagctgagatgccagctggccaagaagaagcagagcgagaccaagctgcaggaggagctgaacaaggtgctgggcatcaagcacttcgaccccagcaaggccttccaccacgagagcaaggagaacttcgccctgaagacccccctgaaggagggcaacaccaactgctacagagcccccatggagtgccaggagagctggaagtga

SEQ ID NO: 3330 - RNA, 2175 nt, synthetic construct
  misc_feature 1..2175: note = derived and/or modified sequence opt5 fromRHAMM/CD168__Homo_sapiens__CCDS4362.1
  source 1..2175: mol_type = other RNA
atgagcttccccaaggcccctctgaaaagatttaacgacccgtccggctgcgctccctctcctggggcctacgatgtgaagaccctcgaggtcctgaaaggacccgttagcttccagaagtcccaacggtttaaacagcagaaggaatctaagcagaatcttaacgtggacaaagatacaacgctgcctgcgagcgctcgcaaggtgaaatcctctgagagcaaggaatcccaaaagaatgacaaggatctcaagatcctggagaaagaaattagagtccttctgcaggagcggggcgcccaggaccgcagaatccaggatctcgagaccgaactggagaagatggaagcccggctgaacgctgccctccgcgagaaaacaagcctgtctgctaataacgccacccttgagaagcaactgattgaactcacaagaaccaatgagctgcttaaatccaagttcagcgaaaacgggaatcagaaaaacctgcggatcctctctctggagctgatgaagctccgcaataagagagaaacaaaaatgcggggaatgatggcgaagcaggagggcatggagatgaaacttcaggtgacccaacgctccctggaagagagccaggggaagattgcccagctggaaggaaaactcgtttctatcgagaaggaaaagatcgacgagaaatccgagacggaaaagctgcttgagtatattgaagagatcagctgtgcttccgatcaagtggaaaaatacaagctggacattgcccagctcgaggagaacctgaaagaaaagaatgatgagatcctgtctctcaagcagagcctggaagagaacattgtcatcctttccaaacaggtggaggacctgaatgttaagtgccaactcctggaaaaagagaaggaagatcacgtgaacagaaaccgggagcataatgaaaaccttaatgctgagatgcagaacctgaaacagaagtttattctcgagcagcaagaacgcgagaagctgcagcagaaagaactgcagatcgacagcctcctgcaacaggagaaggaactttcttccagcctgcaccagaaactctgttctttccaggaggagatggtcaaggaaaagaatctgtttgaggaggaactgaagcaaacccttgacgaactcgataaactgcagcagaaggaggagcaagccgaaagactggtgaagcagctcgaggaagaggcgaaaagccgggccgaggaactgaaacttctggaggaaaaactcaagggcaaagaggctgaactggagaagtcctctgccgctcatacacaggccaccctgcttctccaggagaagtatgacagcatggtgcaatccctggaagatgtcacagcccagttcgagagctacaaagctctgaccgcgtctgaaatcgaggacctcaagctggaaaactccagccttcaggagaaagccgctaaggccggcaaaaatgccgaggatgttcagcaccaaattctggctacggaatcttccaaccaggagtatgtgagaatgctcctggacctgcagacaaagagcgcccttaaggaaaccgagatcaaagaaattacagtgtcctttctccagaagatcaccgatctgcaaaatcagctgaaacagcaagaggaggacttccgcaagcagctcgaagatgaggaagggcggaaagcggagaaggagaacaccacagctgaactgacggaggaaattaataagtggagacttctgtacgaggaactctataacaaaaccaagccctttcagctgcagctggacgccttcgaggtcgagaaacaagcccttctcaatgaacatggagctgcccaggagcagctgaacaagatccgcgattcttacgctaaactgctcggccaccagaatctgaagcagaaaatcaagcacgtggttaaacttaaagacgaaaacagccaactgaagtccgaggtgtctaaactccggtgccagctggccaagaaaaagcagagcgaaacaaagctgcaagaggagcttaacaaagtcctggggattaagcattttgacccttccaaagcgttccaccatgaaagcaaggagaatttcgccctcaaaaccccgctgaaggaaggaaacacaaattgttacagagctcccatggagtgccaggaatcttggaagtga

SEQ ID NO: 3331 - protein, 193 aa, synthetic construct
  REGION 1..193: note = RHOC__Homo_sapiens__P08134
MAAIRKKLVIVGDGACGKTCLLIVFSKDQFPEVYVPTVFENYIADIEVDGKQVELALWDTAGQEDYDRLRPLSYPDTDVILMCFSIDSPDSLENIPEKWTPEVKHFCPNVPIILVGNKKDLRQDEHTRRELAKMKQEPVRSEEGRDMANRISAFGYLECSAKTKEGVREVFEMATRAGLQVRKNKRRRGCPIL

SEQ ID NO: 3332 - RNA, 582 nt, synthetic construct
  misc_feature 1..582: note = RHOC__Homo_sapiens__AAC33179
  source 1..582: mol_type = other RNA
atggctgcaatccgaaagaagctggtgatcgttggggatggtgcctgtgggaagacctgcctcctcatcgtcttcagcaaggatcagtttccggaggtctacgtccctactgtctttgagaactatattgcggacattgaggtggacggcaagcaggtggagctggctctgtgggacacagcagggcaggaagactatgatcgactgcggcctctctcctacccggacactgatgtcatcctcatgtgcttctccatcgacagccctgacagcctggaaaacattcctgagaagtggaccccagaggtgaagcacttctgccccaacgtgcccatcatcctggtggggaataagaaggacctgaggcaagacgagcacaccaggagagagctggccaagatgaagcaggagcccgttcggtctgaggaaggccgggacatggcgaaccggatcagtgcctttggctaccttgagtgctcagccaagaccaaggagggagtgcgggaggtgtttgagatggccactcgggctggcctccaggtccgcaagaacaagcgtcggaggggctgtcccattctctga

SEQ ID NO: 3333 - RNA, 582 nt, synthetic construct
  misc_feature 1..582: note = derived and/or modified sequence opt1 fromRHOC__Homo_sapiens__AAC33179
  source 1..582: mol_type = other RNA
atggccgccatccgcaagaagctggtgatcgtcggcgacggggcgtgcggcaagacctgcctcctgatcgtgttcagcaaggaccagttccccgaggtgtacgtcccgaccgtgttcgagaactacatcgccgacatcgaggtggacgggaagcaggtcgagctggccctctgggacacggccggccaggaggactacgaccggctgcgccccctgtcctaccccgacaccgacgtgatcctcatgtgcttcagcatcgactcccccgacagcctggagaacatcccggagaagtggacccccgaggtgaagcacttctgccccaacgtccccatcatcctggtggggaacaagaaggacctccggcaggacgagcacacccgccgggagctggccaagatgaagcaggagccggtgcgctccgaggagggccgggacatggcgaaccgcatcagcgccttcggctacctggagtgctccgccaagacgaaggagggggtccgggaggtgttcgagatggccacccgcgcgggcctccaggtgcggaagaacaagcgccggcgcgggtgccccatcctgtga

SEQ ID NO: 3334 - RNA, 582 nt, synthetic construct
  misc_feature 1..582: note = derived and/or modified sequence opt2 fromRHOC__Homo_sapiens__AAC33179
  source 1..582: mol_type = other RNA
atggccgccatccgcaagaagctcgtcatcgtcggcgacggcgcctgcggcaagacctgcctcctcatcgtcttctccaaggaccagttccccgaggtctacgtccccaccgtcttcgagaactacatcgccgacatcgaggtcgacggcaagcaggtcgagctcgccctctgggacaccgccggccaggaggactacgaccgcctccgccccctctcctaccccgacaccgacgtcatcctcatgtgcttctccatcgactcccccgactccctcgagaacatccccgagaagtggacccccgaggtcaagcacttctgccccaacgtccccatcatcctcgtcggcaacaagaaggacctccgccaggacgagcacacccgccgcgagctcgccaagatgaagcaggagcccgtccgctccgaggagggccgcgacatggccaaccgcatctccgccttcggctacctcgagtgctccgccaagaccaaggagggcgtccgcgaggtcttcgagatggccacccgcgccggcctccaggtccgcaagaacaagcgccgccgcggctgccccatcctctga

SEQ ID NO: 3335 - RNA, 582 nt, synthetic construct
  misc_feature 1..582: note = derived and/or modified sequence opt3 fromRHOC__Homo_sapiens__AAC33179
  source 1..582: mol_type = other RNA
atggccgctatcagaaagaaactggtgattgtcggcgacggggcatgcggaaagacctgtctccttatagttttcagcaaagatcagtttcccgaggtgtacgtacctacagtgttcgaaaactatatcgccgacattgaggtcgatggtaagcaagtggaactggcgttgtgggacactgctggccaggaggattacgacaggttacggccactgtcctatccggatacggacgttatcctaatgtgcttttctattgattcacccgacagtctcgaaaatatccctgagaaatggaccccagaggtgaagcacttctgtcccaacgtccctataatcctggtggggaataagaaagatcttcgccaggacgaacatacacgacgtgagctggccaagatgaaacaggaaccagtaagaagcgaggagggaagggatatggcaaaccggatttccgcctttggctacttggaatgctctgctaagactaaagagggtgttcgcgaagtgttcgagatggcaaccagagccgggctccaagtcaggaagaataagcggcgccgaggatgtcccatcctgtga

SEQ ID NO: 3336 - RNA, 582 nt, synthetic construct
  misc_feature 1..582: note = derived and/or modified sequence opt4 fromRHOC__Homo_sapiens__AAC33179
  source 1..582: mol_type = other RNA
atggccgccatcagaaagaagctggtgatcgtgggcgacggcgcctgcggcaagacctgcctgctgatcgtgttcagcaaggaccagttccccgaggtgtacgtgcccaccgtgttcgagaactacatcgccgacatcgaggtggacggcaagcaggtggagctggccctgtgggacaccgccggccaggaggactacgacagactgagacccctgagctaccccgacaccgacgtgatcctgatgtgcttcagcatcgacagccccgacagcctggagaacatccccgagaagtggacccccgaggtgaagcacttctgccccaacgtgcccatcatcctggtgggcaacaagaaggacctgagacaggacgagcacaccagaagagagctggccaagatgaagcaggagcccgtgagaagcgaggagggcagagacatggccaacagaatcagcgccttcggctacctggagtgcagcgccaagaccaaggagggcgtgagagaggtgttcgagatggccaccagagccggcctgcaggtgagaaagaacaagagaagaagaggctgccccatcctgtga

SEQ ID NO: 3337 - RNA, 582 nt, synthetic construct
  misc_feature 1..582: note = derived and/or modified sequence opt5 fromRHOC__Homo_sapiens__AAC33179
  source 1..582: mol_type = other RNA
atggccgctatcagaaagaaactggtgattgtcggcgacggggcctgcggaaagacctgtctcctgatcgttttcagcaaagatcagtttcccgaggtgtacgtgcctacagtcttcgaaaactatattgcggacatcgaggtggatggcaagcaagttgaacttgctctgtgggacacggccgggcaggaggattacgaccggctccgcccgctgtcctatcccgataccgacgtgattcttatgtgcttttctatcgatagccctgactccctggaaaatatccccgagaaatggacacctgaggtcaagcacttctgtcccaacgtgcctattatcctcgttggaaataagaaagatctgagacaggacgaacatacccggcgcgagctggccaagatgaaacaggaaccggtgagatctgaggagggccgggatatggctaaccgcattagcgcctttgggtacctcgaatgctccgctaagacaaaagagggagtcagagaagtgttcgagatggccacccgggcgggcctgcaagtgcgcaagaataagagacggcgcggctgtcccatcctttga

SEQ ID NO: 3338 - protein, 295 aa, synthetic construct [sequence omitted]

SEQ ID NO: 3339 - RNA, 888 nt, synthetic construct
  misc_feature 1..888: note = RSSA__Homo_sapiens__AAA36161
  source 1..888: mol_type = other RNA
atgtccggagcccttgatgtcctgcaaatgaaggaggaggatgtccttaagttccttgcagcaggaacccacttaggtggcaccaatcttgacttccagatggaacagtacatctataaaaggaaaagtgatggcatctatatcataaatctcaagaggacctgggagaagcttctgctggcagctcgtgcaattgttgccattgaaaaccctgctgatgtcagtgttatatcctccaggaatactggccagagggctgtgctgaagtttgctgctgccactggagccactccaattgctggccgcttcactcctggaaccttcactaaccagatccaggcagccttccgggagccacggcttcttgtggttactgaccccagggctgaccaccagcctctcacggaggcatcttatgttaacctacctaccattgcgctgtgtaacacagattctcctctgcgctatgtggacattgccatcccatgcaacaacaagggagctcactcagtgggtttgatgtggtggatgctggctcgggaagttctgcgcatgcgtggcaccatttcccgtgaacacccatgggaggtcatgcctgatctgtacttctacagagatcctgaagagattgaaaaagaagagcaggctgctgctgagaaggcagtgaccaaggaggaatttcagggtgaatggactgctcccgctcctgagttcactgctactcagcctgaggttgcagactggtctgaaggtgtacaggtgccctctgtgcctattcagcaattccctactgaagactggagcgctcagcctgccacggaagactggtctgcagctcccactgctcaggccactgaatgggtaggagcaaccactgactggtcttaa

SEQ ID NO: 3340 - RNA, 888 nt, synthetic construct
  misc_feature 1..888: note = derived and/or modified sequence opt1 fromRSSA__Homo_sapiens__AAA36161
  source 1..888: mol_type = other RNA
atgagcggcgccctggacgtgctccagatgaaggaggaggacgtcctgaagttcctggccgcggggacccacctcggcgggaccaacctggacttccagatggagcagtacatctacaagcgcaagtccgacggcatctacatcatcaacctgaagcggacgtgggagaagctcctgctggccgcccgcgccatcgtggccatcgagaaccccgcggacgtgagcgtcatctccagccggaacaccgggcagcgcgccgtgctcaagttcgccgccgcgaccggcgccaccccgatcgccggccggttcacgcccgggaccttcaccaaccagatccaggccgccttccgcgagccccggctgctggtggtcaccgacccccgcgcggaccaccagccgctcacggaggcctcctacgtgaacctgcccaccatcgccctgtgcaacaccgacagccccctccggtacgtggacatcgccatcccctgcaacaacaagggcgcccactccgtcgggctgatgtggtggatgctggcgcgcgaggtgctccggatgcgcggcaccatcagccgggagcacccgtgggaggtgatgcccgacctgtacttctaccgcgaccccgaggagatcgagaaggaggagcaggccgccgccgagaaggccgtcacgaaggaggagttccagggggagtggaccgcgcccgccccggagttcaccgccacccagcccgaggtggccgactggtccgagggcgtgcaggtccccagcgtgcccatccagcagttcccgacggaggactggtccgcccagcccgcgaccgaggactggagcgccgcccccaccgcccaggcgaccgagtgggtgggcgccacgaccgactggtcctga

SEQ ID NO: 3341 - RNA, 888 nt, synthetic construct
  misc_feature 1..888: note = derived and/or modified sequence opt2 fromRSSA__Homo_sapiens__AAA36161
  source 1..888: mol_type = other RNA
atgtccggcgccctcgacgtcctccagatgaaggaggaggacgtcctcaagttcctcgccgccggcacccacctcggcggcaccaacctcgacttccagatggagcagtacatctacaagcgcaagtccgacggcatctacatcatcaacctcaagcgcacctgggagaagctcctcctcgccgcccgcgccatcgtcgccatcgagaaccccgccgacgtctccgtcatctcctcccgcaacaccggccagcgcgccgtcctcaagttcgccgccgccaccggcgccacccccatcgccggccgcttcacccccggcaccttcaccaaccagatccaggccgccttccgcgagccccgcctcctcgtcgtcaccgacccccgcgccgaccaccagcccctcaccgaggcctcctacgtcaacctccccaccatcgccctctgcaacaccgactcccccctccgctacgtcgacatcgccatcccctgcaacaacaagggcgcccactccgtcggcctcatgtggtggatgctcgcccgcgaggtcctccgcatgcgcggcaccatctcccgcgagcacccctgggaggtcatgcccgacctctacttctaccgcgaccccgaggagatcgagaaggaggagcaggccgccgccgagaaggccgtcaccaaggaggagttccagggcgagtggaccgcccccgcccccgagttcaccgccacccagcccgaggtcgccgactggtccgagggcgtccaggtcccctccgtccccatccagcagttccccaccgaggactggtccgcccagcccgccaccgaggactggtccgccgcccccaccgcccaggccaccgagtgggtcggcgccaccaccgactggtcctga

SEQ ID NO: 3342 - RNA, 888 nt, synthetic construct
  misc_feature 1..888: note = derived and/or modified sequence opt3 fromRSSA__Homo_sapiens__AAA36161
  source 1..888: mol_type = other RNA
atgagcggcgccctggacgtgctccagatgaaggaggaagatgtccttaaattcctggctgcagggacccacttgggaggtacaaacttagactttcaaatggagcagtacatctataagagaaaatccgatggcatttacataatcaatctgaagaggacttgggaaaaactactcctggccgcgcgggctattgttgccatcgagaaccccgcagacgtgtctgtaatttcaagtcgcaatacggggcagcgagccgtgcttaagttcgctgcagccaccggagctacacctatcgccggccgttttactccaggtaccttcacaaaccagatacaagcggcatttagagaaccgaggctgttggtcgtgaccgatccccgggccgaccatcagcctctcactgaggctagctatgttaatctgccaacaatcgccctgtgcaacaccgattctcccctccgctacgtggacattgcaatcccttgtaataacaagggggctcactccgtcggattaatgtggtggatgctggccagagaggtgcttaggatgcggggcacgatttcgcgcgaacatccatgggaggtaatgcccgatttgtatttctaccgagaccctgaagagatcgagaaagaggaacaggcggccgcagaaaaggctgttactaaagaggaatttcagggcgagtggaccgccccagctccggagttcacagccactcaacccgaagtggcagattggtcagagggggtccaggtgcctagcgtgccaatacagcagtttcccaccgaagactggagtgcccaacctgctacagaggattggtccgcggcaccaaccgcccaggctacggaatgggtcggagccactacagactggtcttga

SEQ ID NO: 3343 - RNA, 888 nt, synthetic construct
  misc_feature 1..888: note = derived and/or modified sequence opt4 fromRSSA__Homo_sapiens__AAA36161
  source 1..888: mol_type = other RNA
atgagcggcgccctggacgtgctgcagatgaaggaggaggacgtgctgaagttcctggccgccggcacccacctgggcggcaccaacctggacttccagatggagcagtacatctacaagagaaagagcgacggcatctacatcatcaacctgaagagaacctgggagaagctgctgctggccgccagagccatcgtggccatcgagaaccccgccgacgtgagcgtgatcagcagcagaaacaccggccagagagccgtgctgaagttcgccgccgccaccggcgccacccccatcgccggcagattcacccccggcaccttcaccaaccagatccaggccgccttcagagagcccagactgctggtggtgaccgaccccagagccgaccaccagcccctgaccgaggccagctacgtgaacctgcccaccatcgccctgtgcaacaccgacagccccctgagatacgtggacatcgccatcccctgcaacaacaagggcgcccacagcgtgggcctgatgtggtggatgctggccagagaggtgctgagaatgagaggcaccatcagcagagagcacccctgggaggtgatgcccgacctgtacttctacagagaccccgaggagatcgagaaggaggagcaggccgccgccgagaaggccgtgaccaaggaggagttccagggcgagtggaccgcccccgcccccgagttcaccgccacccagcccgaggtggccgactggagcgagggcgtgcaggtgcccagcgtgcccatccagcagttccccaccgaggactggagcgcccagcccgccaccgaggactggagcgccgcccccaccgcccaggccaccgagtgggtgggcgccaccaccgactggagctga

SEQ ID NO: 3344 - RNA, 888 nt, synthetic construct
  misc_feature 1..888: note = derived and/or modified sequence opt5 fromRSSA__Homo_sapiens__AAA36161
  source 1..888: mol_type = other RNA
atgagcggcgccctggacgtgctccagatgaaggaggaagatgtcctgaaattccttgctgccgggacccacctgggaggcacaaacctcgactttcaaatggagcagtacatctataagagaaaatccgatgggatttacatcattaatctgaagcggacgtgggaaaaacttctgctcgcggctcgcgccatcgttgccattgagaaccccgctgacgtgtctgtgatcagctccagaaataccggacagcgggccgtcctgaagttcgctgccgcgacaggcgccacccctatcgctgggcgctttacaccgggaaccttcacaaaccagattcaagccgcttttagagaaccccggctgctcgtggttaccgatcctcgcgccgaccatcagcccctgacggaggcgtcttatgtgaatcttcctaccatcgccctgtgcaacacagatagccccctcagatacgtcgacattgctatcccttgtaataacaagggcgcccactccgtgggcctgatgtggtggatgcttgctcgggaggttctgcgcatgagagggaccatttctcgggaacatccgtgggaggtgatgcccgatctctatttctaccgcgaccctgaagagatcgagaaagaggaacaggccgccgctgaaaaggcggtcacaaaagaggaatttcagggagagtggaccgcccccgctcctgagttcacggccacacaacccgaagtggccgattggagcgagggcgtgcaggtcccgtccgttcctattcagcagtttcccaccgaagactggagcgctcaacctgccacagaggattggtctgcggctcccaccgcccaggccaccgaatgggtgggggctacaacggactggtcctga

SEQ ID NO: 3345 - protein, 866 aa, synthetic construct
  REGION 1..866: note = RU1__Homo_sapiens__Q9UHJ3
MNGEQQLDADAGSGMEEVELSWEDYLEETGSTAVPYGSFKHVDTRLQNGFAPGMKLEVAVRTDPETYWVATVITTCEQLLLLRYDGYGEDRRADFWCDIRKADLYPIGWCEQNKKTLEAPEGIRDKVSDWDEFLRQTLIGACSPPVPLLEGLRNGRNPLDLIAPGSRLECQAFQDSLSTWIVTVVENIGGRLKLRYEGLESSDNYEHWLYYLDPFLHHVGWAAQQGYELQPPSAIRHLKNEAEWQEILAKVKEEEEEPLPSYLFKDKQVIGIHTFSVNMKLEAVDPWSPFGISPATVVKVFDEKYFLVEMDDLRPENHARRSFVCHADSPGIFPVQWSLKNGLHISPPPGYPSQDFDWADYLKQCGAEAAPQRCFPPLISEHEFKENMKLEAVNPILPEEVCVATITAVRGSYLWLQLEGSKKPIPECIVSVESMDIFPLGWCETNGHPLSTPRRARVYKQRKIAVVQPEKQVPSSRTVHEGLRNQELNSTESVMINGKYCCPKIYFNHRCFSGPYLNKGRIAELPQCVGPGNCVLVLREVLTLLINAAYKPSRVLRELQLDKDSVWHGCGEVLKAKYKGKSYRATVEIVKTADRVTEFCRQTCIKLECCPNLFGPRMVLDKCSENCSVLTKTKYTHYYGKKKNKRIGRPPGGHSNLACALKKASKRRKRRKNVFVHKKKRSSASVDNTPAGSPQGSGGEDEDDPDEGDDDSLSEGSTSEQQDELQEESEMSEKKSCSSSPTQSEISTSLPPDRQRRKRELRTFSFSDDENKPPSPKEIRIEVAERLHLDSNPLKWSVADVVRFIRSTDCAPLARIFLDQEIDGQALLLLTLPTVQECMDLKLGPAIKLCHHIERIKFAFYEQFAN

SEQ ID NO: 3346 - RNA, 2601 nt, synthetic construct
  misc_feature 1..2601: note = RU1__Homo_sapiens__AAH14614
  source 1..2601: mol_type = other RNA
atgaacggggagcagcagcttgatgcagatgccggctctggtatggaagaggtagaattaagctgggaagattatctagaagaaacagggtccacagcagttccctatgggtcttttaaacatgtggacacacgtctgcaaaatggatttgctcctgggatgaagctggaggtggctgtgagaacagatcctgagacctactgggttgccaccgttatcactacctgtgagcagttgctccttctccgctatgatggctatggggaggatcggagagcagatttctggtgtgacatcaggaaggctgatctctaccccattgggtggtgtgagcagaataagaagacccttgaagccccagaaggcatcagagataaagtatctgactgggatgagtttctgcggcagaccctgataggagcatgtagtcctcctgttccgctgctagagggcctccgtaatgggaggaatcctttagatctcattgctccaggatccagactagaatgtcaagctttccaggactctttaagcacttggattgttactgtagtagaaaacattggaggaaggctgaagctacgttatgaaggacttgaaagttctgacaattatgaacattggttgtattacttggatccatttcttcatcacgttggttgggctgctcaacagggatatgagcttcagcccccttcagccattagacatctaaaaaatgaagctgagtggcaagagattttggccaaagtgaaagaggaagaggaagagccattaccatcttacttatttaaggacaaacaagttattggcattcatacattctctgtaaacatgaaattggaagctgtagacccctggtctccttttgggatctctcctgctacagttgttaaggtttttgatgagaagtactttctggtggaaatggatgacttgcgtcctgagaaccacgcacggcgatcctttgtgtgccacgccgacagtcctggcatcttccctgtgcagtggagtctgaagaatggcctacacatcagcccccctccaggctacccaagccaggactttgactgggctgactacctcaaacagtgtggtgctgaagctgctccccagaggtgcttccctccgttaatttctgaacatgaatttaaggagaacatgaagctcgaggcggtgaaccccattctccctgaagaagtgtgtgttgctaccatcactgcagtgagaggctcctacctgtggctccagctggagggttctaagaagcctatacctgaatgtattgtgagtgtggaatccatggatatatttcctttgggctggtgtgaaaccaacggccaccccctcagcactcctcgccgagcacgagtatataaacagaggaaaattgcagtggttcagccagaaaaacaagtaccatcctcgaggactgtccacgagggcctgaggaatcaggagctgaactccacagagtcagttatgattaatggaaaatattgctgtccaaagatatacttcaaccaccgttgcttctcagggccatatcttaacaaaggaagaattgctgagctgcctcaatgtgtaggacctgggaactgtgttctggtccttagagaggtcctcactttacttatcaatgcagcctacaaacccagccgtgtccttcgggagctccagctggacaaagactctgtgtggcacggatgtggggaagtcctaaaagccaaatataaaggaaagagttatcgggctactgttgagatagtgaaaacagcagatcgggtgactgaattctgccggcaaacctgtatcaaactggaatgctgtcctaacctcttcggtccacggatggttctggataagtgttctgagaactgttctgtacttacaaagaccaaatacacacactattacggaaagaagaaaaataaaagaattgggaggccacctggtgggcatagtaacttagcttgtgccctgaaaaaagccagtaagaggagaaagaggcggaaaaatgtttttgttcataagaagaaacgctcctctgcatctgttgataataccccagcgggctctccccagggaagtgggggtgaagatgaggatgacccagatgaaggggatgatgattccctaagtgaaggcagtacatccgagcagcaggatgagctacaggaagaatcagaaatgtcagaaaaaaagtcatgctcctcttctcccacccaaagtgagatatccacatcgctgcctccagatagacaaaggagaaaaagggagcttcgcaccttttcattttctgacgatgaaaataaacctccttcaccaaaggaaataaggatcgaagttgctgaaaggcttcacctggacagtaaccccttgaagtggagtgtggcagacgttgtgcggttcatcagatccactgactgtgctccattagcaagaatattcctagaccaggaaattgatgggcaggccctgttgctccttacccttcccactgttcaagaatgcatggacttaaaattgggccctgccatcaaactttgccatcacatagagaggatcaagtttgctttttatgagcagtttgccaactga

SEQ ID NO: 3347 - RNA, 2601 nt, synthetic construct
  misc_feature 1..2601: note = derived and/or modified sequence opt1 fromRU1__Homo_sapiens__AAH14614
  source 1..2601: mol_type = other RNA
atgaacggcgagcagcagctggacgccgacgccgggagcggcatggaggaggtggagctctcctgggaggactacctggaggagaccgggagcaccgcggtcccctacggctccttcaagcacgtggacacgcgcctgcagaacgggttcgccccgggcatgaagctcgaggtggccgtccggaccgaccccgagacctactgggtggccaccgtgatcacgacctgcgagcagctgctgctcctgcgctacgacggctacggggaggaccggcgcgccgacttctggtgcgacatccggaaggcggacctgtaccccatcggctggtgcgagcagaacaagaagaccctcgaggcccccgaggggatccgcgacaaggtcagcgactgggacgagttcctgcggcagaccctgatcggcgcctgctccccgcccgtgcccctcctggaggggctgcgcaacggccggaaccccctcgacctgatcgccccgggcagccgcctggagtgccaggcgttccaggactccctcagcacgtggatcgtgaccgtcgtggagaacatcgggggccggctgaagctgcgctacgaggggctcgagtccagcgacaactacgagcactggctgtactacctggaccccttcctccaccacgtgggctgggccgcccagcagggctacgagctgcagccgccctccgccatccggcacctgaagaacgaggccgagtggcaggagatcctcgcgaaggtcaaggaggaggaggaggagcccctgcccagctacctgttcaaggacaagcaggtcatcgggatccacaccttctccgtgaacatgaagctcgaggccgtggacccctggagccccttcggcatctccccggccaccgtggtgaaggtcttcgacgagaagtacttcctggtggagatggacgacctgcgccccgagaaccacgcccggcgcagcttcgtgtgccacgccgactcccccgggatcttccccgtccagtggagcctcaagaacggcctgcacatctccccgccgcccgggtaccccagccaggacttcgactgggcggactacctgaagcagtgcggcgccgaggccgcgccccagcggtgcttcccgcccctcatcagcgagcacgagttcaaggagaacatgaagctggaggccgtgaaccccatcctgcccgaggaggtgtgcgtcgccacgatcaccgccgtgcgcggctcctacctctggctgcagctggaggggagcaagaagcccatccccgagtgcatcgtctccgtggagagcatggacatcttcccgctcggctggtgcgagaccaacgggcaccccctgtccacgccccggcgcgcccgggtgtacaagcagcgcaagatcgccgtcgtgcagcccgagaagcaggtcccgagctcccgcaccgtgcacgagggcctgcggaaccaggagctcaacagcaccgagtccgtgatgatcaacgggaagtactgctgccccaagatctacttcaaccaccgctgcttcagcggcccctacctgaacaagggccggatcgccgagctgccccagtgcgtggggccgggcaactgcgtcctcgtgctgcgcgaggtgctgaccctgctcatcaacgcggcctacaagccctcccgggtcctgcgcgagctgcagctcgacaaggacagcgtgtggcacgggtgcggcgaggtgctgaaggccaagtacaaggggaagtcctaccgggccaccgtcgagatcgtgaagacggcggaccgcgtgaccgagttctgccggcagacctgcatcaagctggagtgctgccccaacctcttcggcccccgcatggtcctggacaagtgcagcgagaactgctccgtgctgaccaagacgaagtacacccactactacggcaagaagaagaacaagcggatcgggcgcccgcccggcgggcacagcaacctcgcctgcgccctgaagaaggcctccaagcggcgcaagcggcgcaagaacgtgttcgtccacaagaagaagcggagctccgccagcgtggacaacacccccgcgggcagcccccagggctccgggggcgaggacgaggacgacccggacgagggggacgacgacagcctgtccgagggcagcacctccgagcagcaggacgagctccaggaggagagcgagatgtccgagaagaagtcctgcagcagctcccccacgcagagcgagatctccaccagcctgccgcccgaccgccagcggcgcaagcgcgagctgcggaccttctccttcagcgacgacgagaacaagccgccctcccccaaggagatccgcatcgaggtggccgagcggctccacctggacagcaaccccctgaagtggagcgtcgccgacgtggtgcgcttcatccggtccaccgactgcgcgcccctcgcccgcatcttcctggaccaggagatcgacgggcaggccctgctcctgctgacgctccccaccgtccaggagtgcatggacctgaagctgggccccgccatcaagctctgccaccacatcgagcggatcaagttcgccttctacgagcagttcgccaactga

SEQ ID NO: 3348 - RNA, 2601 nt, synthetic construct
  misc_feature 1..2601: note = derived and/or modified sequence opt2 fromRU1__Homo_sapiens__AAH14614
  source 1..2601: mol_type = other RNA
atgaacggcgagcagcagctcgacgccgacgccggctccggcatggaggaggtcgagctctcctgggaggactacctcgaggagaccggctccaccgccgtcccctacggctccttcaagcacgtcgacacccgcctccagaacggcttcgcccccggcatgaagctcgaggtcgccgtccgcaccgaccccgagacctactgggtcgccaccgtcatcaccacctgcgagcagctcctcctcctccgctacgacggctacggcgaggaccgccgcgccgacttctggtgcgacatccgcaaggccgacctctaccccatcggctggtgcgagcagaacaagaagaccctcgaggcccccgagggcatccgcgacaaggtctccgactgggacgagttcctccgccagaccctcatcggcgcctgctccccccccgtccccctcctcgagggcctccgcaacggccgcaaccccctcgacctcatcgcccccggctcccgcctcgagtgccaggccttccaggactccctctccacctggatcgtcaccgtcgtcgagaacatcggcggccgcctcaagctccgctacgagggcctcgagtcctccgacaactacgagcactggctctactacctcgaccccttcctccaccacgtcggctgggccgcccagcagggctacgagctccagcccccctccgccatccgccacctcaagaacgaggccgagtggcaggagatcctcgccaaggtcaaggaggaggaggaggagcccctcccctcctacctcttcaaggacaagcaggtcatcggcatccacaccttctccgtcaacatgaagctcgaggccgtcgacccctggtcccccttcggcatctcccccgccaccgtcgtcaaggtcttcgacgagaagtacttcctcgtcgagatggacgacctccgccccgagaaccacgcccgccgctccttcgtctgccacgccgactcccccggcatcttccccgtccagtggtccctcaagaacggcctccacatctcccccccccccggctacccctcccaggacttcgactgggccgactacctcaagcagtgcggcgccgaggccgccccccagcgctgcttcccccccctcatctccgagcacgagttcaaggagaacatgaagctcgaggccgtcaaccccatcctccccgaggaggtctgcgtcgccaccatcaccgccgtccgcggctcctacctctggctccagctcgagggctccaagaagcccatccccgagtgcatcgtctccgtcgagtccatggacatcttccccctcggctggtgcgagaccaacggccaccccctctccaccccccgccgcgcccgcgtctacaagcagcgcaagatcgccgtcgtccagcccgagaagcaggtcccctcctcccgcaccgtccacgagggcctccgcaaccaggagctcaactccaccgagtccgtcatgatcaacggcaagtactgctgccccaagatctacttcaaccaccgctgcttctccggcccctacctcaacaagggccgcatcgccgagctcccccagtgcgtcggccccggcaactgcgtcctcgtcctccgcgaggtcctcaccctcctcatcaacgccgcctacaagccctcccgcgtcctccgcgagctccagctcgacaaggactccgtctggcacggctgcggcgaggtcctcaaggccaagtacaagggcaagtcctaccgcgccaccgtcgagatcgtcaagaccgccgaccgcgtcaccgagttctgccgccagacctgcatcaagctcgagtgctgccccaacctcttcggcccccgcatggtcctcgacaagtgctccgagaactgctccgtcctcaccaagaccaagtacacccactactacggcaagaagaagaacaagcgcatcggccgcccccccggcggccactccaacctcgcctgcgccctcaagaaggcctccaagcgccgcaagcgccgcaagaacgtcttcgtccacaagaagaagcgctcctccgcctccgtcgacaacacccccgccggctccccccagggctccggcggcgaggacgaggacgaccccgacgagggcgacgacgactccctctccgagggctccacctccgagcagcaggacgagctccaggaggagtccgagatgtccgagaagaagtcctgctcctcctcccccacccagtccgagatctccacctccctcccccccgaccgccagcgccgcaagcgcgagctccgcaccttctccttctccgacgacgagaacaagcccccctcccccaaggagatccgcatcgaggtcgccgagcgcctccacctcgactccaaccccctcaagtggtccgtcgccgacgtcgtccgcttcatccgctccaccgactgcgcccccctcgcccgcatcttcctcgaccaggagatcgacggccaggccctcctcctcctcaccctccccaccgtccaggagtgcatggacctcaagctcggccccgccatcaagctctgccaccacatcgagcgcatcaagttcgccttctacgagcagttcgccaactga

SEQ ID NO: 3349 - RNA, 2601 nt, synthetic construct
  misc_feature 1..2601: note = derived and/or modified sequence opt3 fromRU1__Homo_sapiens__AAH14614
  source 1..2601: mol_type = other RNA
atgaacggcgagcagcaactggacgccgatgctgggagcggaatggaagaggtggaactctcctgggaggactaccttgaagagaccggttctacagcagtcccctatggctcattcaagcacgttgatactagactgcagaatgggtttgcccctggaatgaaattggaggtggcggtaaggacggacccagaaacctactgggtggctacagtcatcactacctgcgagcagttactgctactccggtatgatggctacggtgaagaccgccgagccgatttctggtgtgacattcgtaaggcagatctgtatccgatagggtggtgcgagcagaacaaaaagacacttgaggcccccgaaggaatcagagacaaagtgagtgattgggacgagtttctgaggcaaaccttgattggcgcttgtagccctccagttcccctcctggaaggcctgcggaatgggcgcaaccctctcgatttaatcgcaccaggatccagactggagtgccaggccttccaggactctctttcgacttggattgtgacagtcgtggaaaatatcggtggcaggttgaagctgcggtacgaggggctagagtcaagcgacaactatgaacattggctctactacctggatccctttcttcaccatgtaggatgggctgcccagcaaggctatgagctgcagcctccaagtgcgatacgccacttgaagaatgaagcagagtggcaggaaatcctcgccaaagttaaggaggaggaagaggaaccgctgccctcctacttattcaaagacaaacaggtgattggtatccataccttttctgtcaacatgaagctggaggctgtggatccttggagcccattcgggatttcccccgccacggtggtcaaggtttttgacgaaaagtatttcctcgtggagatggatgaccttcgacctgagaatcacgcaagaaggtcatttgtatgtcacgctgatagtccaggaatcttccccgtgcaatggagcctgaaaaacggcttgcatatatctccgcctcccggctacccatcccaggactttgattgggccgactatctaaagcagtgcggggcggaagccgcacctcaacggtgttttcccccactgatttcagagcacgagttcaaagaaaatatgaagctcgaggctgtcaaccccatcctgcctgaagaggtgtgcgttgccactattaccgctgtgcgtggaagctacctttggctgcagttggaaggtagtaaaaagccaatcccggagtgtatcgtctctgtggaatccatggatattttccccctcggctggtgcgagacaaatgggcatcctctgagcactccacgcagagccagggtatataaacagcggaagatagcagttgtgcagcccgagaagcaagtcccttcgtctcgaaccgtgcacgaaggattacgcaaccaggagcttaattccacagaatcagtcatgatcaacggcaaatactgttgcccaaagatttacttcaaccacagatgctttagtggtccctatctaaataaagggaggatcgccgagctcccgcagtgtgtgggccctggaaactgcgttctggtgcttcgggaagtattgaccctgctcataaatgctgcgtacaagccaagccgcgtcctgagagagcttcagctggacaaagactccgtgtggcatggctgtggggaggttttgaaggcaaagtataaaggaaagtcttacagggccacggtggaaattgtcaaaactgctgatcgtgtgacagagttctgccggcaaacctgtatcaagctcgaatgctgtcccaacctgtttggtcctcgaatggtattagacaaatgcagcgagaattgttcagtgctgactaagacaaagtatacccactactatggcaaaaagaaaaacaagagaatcgggaggcccccaggaggccatagtaatctagcctgcgcactcaaaaaggcctccaagcgccggaaaagaaggaagaacgttttcgtccacaaaaagaaacgcagctctgcttcagtggataatacgcctgccggtagtccccaggggagcggcggagaagacgaggatgacccagatgagggcgacgatgactccctgtctgaagggtcgaccagcgagcagcaggatgaacttcaagaggagtccgaaatgtcagagaagaaaagttgttctagctccccgacacagtcagaaattagcacttctttgcctcccgaccgacagcggcgtaagagagagctgaggaccttttccttcagtgatgacgaaaacaagccacccagccctaaagagatccgcattgaggtggcagaacggctccatctggactctaatccattaaagtggtccgtcgcggatgttgtgagatttataaggtcaacagactgcgctcccctggcccgaatcttccttgatcaggagattgacggacaagcattgctcctgctaactctgcctaccgtgcaggaatgcatggatctcaaactgggtccggccatcaagctgtgtcaccacatcgagcgcattaaatttgctttctacgaacagtttgccaactga

SEQ ID NO: 3350 - RNA, 2601 nt, synthetic construct
  misc_feature 1..2601: note = derived and/or modified sequence opt4 fromRU1__Homo_sapiens__AAH14614
  source 1..2601: mol_type = other RNA
atgaacggcgagcagcagctggacgccgacgccggcagcggcatggaggaggtggagctgagctgggaggactacctggaggagaccggcagcaccgccgtgccctacggcagcttcaagcacgtggacaccagactgcagaacggcttcgcccccggcatgaagctggaggtggccgtgagaaccgaccccgagacctactgggtggccaccgtgatcaccacctgcgagcagctgctgctgctgagatacgacggctacggcgaggacagaagagccgacttctggtgcgacatcagaaaggccgacctgtaccccatcggctggtgcgagcagaacaagaagaccctggaggcccccgagggcatcagagacaaggtgagcgactgggacgagttcctgagacagaccctgatcggcgcctgcagcccccccgtgcccctgctggagggcctgagaaacggcagaaaccccctggacctgatcgcccccggcagcagactggagtgccaggccttccaggacagcctgagcacctggatcgtgaccgtggtggagaacatcggcggcagactgaagctgagatacgagggcctggagagcagcgacaactacgagcactggctgtactacctggaccccttcctgcaccacgtgggctgggccgcccagcagggctacgagctgcagccccccagcgccatcagacacctgaagaacgaggccgagtggcaggagatcctggccaaggtgaaggaggaggaggaggagcccctgcccagctacctgttcaaggacaagcaggtgatcggcatccacaccttcagcgtgaacatgaagctggaggccgtggacccctggagccccttcggcatcagccccgccaccgtggtgaaggtgttcgacgagaagtacttcctggtggagatggacgacctgagacccgagaaccacgccagaagaagcttcgtgtgccacgccgacagccccggcatcttccccgtgcagtggagcctgaagaacggcctgcacatcagccccccccccggctaccccagccaggacttcgactgggccgactacctgaagcagtgcggcgccgaggccgccccccagagatgcttcccccccctgatcagcgagcacgagttcaaggagaacatgaagctggaggccgtgaaccccatcctgcccgaggaggtgtgcgtggccaccatcaccgccgtgagaggcagctacctgtggctgcagctggagggcagcaagaagcccatccccgagtgcatcgtgagcgtggagagcatggacatcttccccctgggctggtgcgagaccaacggccaccccctgagcacccccagaagagccagagtgtacaagcagagaaagatcgccgtggtgcagcccgagaagcaggtgcccagcagcagaaccgtgcacgagggcctgagaaaccaggagctgaacagcaccgagagcgtgatgatcaacggcaagtactgctgccccaagatctacttcaaccacagatgcttcagcggcccctacctgaacaagggcagaatcgccgagctgccccagtgcgtgggccccggcaactgcgtgctggtgctgagagaggtgctgaccctgctgatcaacgccgcctacaagcccagcagagtgctgagagagctgcagctggacaaggacagcgtgtggcacggctgcggcgaggtgctgaaggccaagtacaagggcaagagctacagagccaccgtggagatcgtgaagaccgccgacagagtgaccgagttctgcagacagacctgcatcaagctggagtgctgccccaacctgttcggccccagaatggtgctggacaagtgcagcgagaactgcagcgtgctgaccaagaccaagtacacccactactacggcaagaagaagaacaagagaatcggcagaccccccggcggccacagcaacctggcctgcgccctgaagaaggccagcaagagaagaaagagaagaaagaacgtgttcgtgcacaagaagaagagaagcagcgccagcgtggacaacacccccgccggcagcccccagggcagcggcggcgaggacgaggacgaccccgacgagggcgacgacgacagcctgagcgagggcagcaccagcgagcagcaggacgagctgcaggaggagagcgagatgagcgagaagaagagctgcagcagcagccccacccagagcgagatcagcaccagcctgccccccgacagacagagaagaaagagagagctgagaaccttcagcttcagcgacgacgagaacaagccccccagccccaaggagatcagaatcgaggtggccgagagactgcacctggacagcaaccccctgaagtggagcgtggccgacgtggtgagattcatcagaagcaccgactgcgcccccctggccagaatcttcctggaccaggagatcgacggccaggccctgctgctgctgaccctgcccaccgtgcaggagtgcatggacctgaagctgggccccgccatcaagctgtgccaccacatcgagagaatcaagttcgccttctacgagcagttcgccaactga

SEQ ID NO: 3351 - RNA, 2601 nt, synthetic construct
  misc_feature 1..2601: note = derived and/or modified sequence opt5 fromRU1__Homo_sapiens__AAH14614
  source 1..2601: mol_type = other RNA
atgaacggcgagcagcaactggacgccgatgctgggagcggaatggaagaggtggaactctcctgggaggactacctggaagagaccggctctacagccgtcccctatgggagcttcaagcacgttgatacgagacttcagaatggatttgcgcctggcatgaaactggaggtggctgtgcggaccgacccggaaacatactgggtcgccaccgtgatcacaacctgcgagcagctcctgcttctgcgctatgatgggtacggagaagacagacgggccgatttctggtgtgacattcgcaaggctgatctctatcccatcggctggtgcgagcagaacaaaaagacactggaggcccctgaaggcattagagacaaagtttccgattgggacgagtttctgcggcaaaccctcatcggggcttgttctccccctgtgcccctgcttgaaggactgcgcaatggcagaaaccctctcgatctgattgccccggggagccggcttgagtgccaggcgttccaggactccctgtctacgtggatcgtcaccgtggttgaaaatatcggaggccgcctcaagctgagatacgaggggctggagagctccgacaactatgaacattggctctactacctggatccctttcttcaccatgtgggatgggccgctcagcaaggctatgagctgcagcctcccagcgccattcggcacctcaagaatgaagctgagtggcaggaaatcctggccaaagtcaaggaggaggaagaggaacctcttccctcttacctgttcaaagacaaacaggtgattggcatccatacattttccgtgaacatgaagctcgaggcggtcgatccgtggagccctttcgggatttctcccgccaccgttgtgaaggtgtttgacgaaaagtatttcctggtcgagatggatgacctgcgccctgagaatcacgctagacggtcctttgtgtgtcacgccgatagccccggaatcttccccgttcaatggtctctcaaaaacggcctgcatatttcccctccgcccgggtaccctagccaggactttgattgggctgactatcttaagcagtgcggagccgaagccgctccccaacgctgtttccctcccctgatctccgagcacgagttcaaagaaaatatgaagctcgaggcggtgaacccgatcctgcctgaagaggtctgcgtggccacaattaccgctgttagaggctcttacctttggctgcagctcgaagggagcaaaaagcccatccctgagtgtattgtgtccgtcgaaagcatggatatctttcccctgggatggtgcgagacgaatggccatcctctgtctacaccccggagagcccgcgtgtataaacagcggaagattgccgtcgtgcagccggagaagcaagttccttccagcagaaccgtgcacgaaggcctccgcaaccaggagcttaattctacagaaagcgtcatgatcaacgggaaatactgttgccccaagatctacttcaaccaccggtgcttttccggaccctatcttaataaaggcagaattgctgagctgcctcagtgtgtggggccgggaaactgcgttctcgtgctgcgcgaagtcctgacccttctcatcaatgccgcgtacaagccctctcgggtgctgagagagctgcagctcgacaaagacagcgtgtggcatggctgtggggaggttctgaaggctaagtataaaggcaagtcctaccgcgccaccgtcgaaattgtgaaaacagccgatcgggtgacggagttctgcagacaaacctgtatcaagctggaatgctgtcctaacctgtttggaccccgcatggtcctcgacaaatgcagcgagaattgttctgtgctgacaaagaccaagtatacacactactatggcaaaaagaaaaacaagcggattgggagacctcccggaggccattccaatctggcttgcgcccttaaaaaggctagcaagcggcgcaaaagacggaagaacgttttcgtgcacaaaaagaaaagatcttccgccagcgtcgataatacccctgcggggtctccccagggatccggcggggaagacgaggatgacccggatgagggcgacgatgacagcctctccgaaggatctacgagcgagcagcaggatgaactgcaagaggagtccgaaatgagcgagaagaaatcttgttccagctctcctacacagtccgaaatcagcacctctctgccccctgaccgccagcggagaaagcgcgagctcagaacctttagcttctccgatgacgaaaacaagcccccgagccctaaagagatccggattgaggtggccgaacgcctgcatcttgactctaatcccctgaagtggtccgttgctgatgtggtcagatttatccggagcacagactgcgcccctctcgctcgcattttcctggatcaggagatcgacggccaagccctgcttctcctgaccctgcccacagtgcaggaatgcatggatctcaaactggggcccgcgattaaactttgtcaccacatcgagagaattaagtttgccttctacgaacagtttgctaactga

SEQ ID NO: 3352 - protein, 476 aa, synthetic construct
  REGION 1..476: note = RU2__Homo_sapiens__Q9UHG0
MSGSSARSSHLSQPVVKSVLVYRNGDPFYAGRRVVIHEKKVSSFEVFLKEVTGGVQAPFGAVRNIYTPRTGHRIRKLDQIQSGGNYVAGGQEAFKKLNYLDIGEIKKRPMEVVNTEVKPVIHSRINVSARFRKPLQEPCTIFLIANGDLINPASRLLIPRKTLNQWDHVLQMVTEKITLRSGAVHRLYTLEGKLVESGAELENGQFYVAVGRDKFKKLPYSELLFDKSTMRRPFGQKASSLPPIVGSRKSKGSGNDRHSKSTVGSSDNSSPQPLKRKGKKEDVNSEKLTKLKQNVKLKNSQETIPNSDEGIFKAGAERSETRGAAEVQEDEDTQVEVPVDQRPAEIVDEEEDGEKANKDAEQKEDFSGMNGDLEEEGGREATDAPEQVEEILDHSEQQARPARVNGGTDEENGEELQQVNNELQLVLDKERKSQGAGSGQDEADVDPQRPPRPEVKITSPEENENNQQNKDYAAVA

SEQ ID NO: 3353 - RNA, 1431 nt, synthetic construct
  misc_feature 1..1431: note = RU2__Homo_sapiens__CCDS4550.1
  source 1..1431: mol_type = other RNA
atgagcggcagcagcgccaggtccagccacctgtctcagcccgtcgtgaagagcgtgcttgtgtaccgcaacggggaccccttctacgcggggcgccgcgtcgtcatccatgagaagaaggtgtccagcttcgaagtcttcctgaaggaggtgaccggcggcgttcaggcaccctttggggccgtcaggaacatctacaccccgcggactggccaccgaatccggaagctagaccagatccagagcgggggcaattacgtggctggaggccaggaagccttcaagaaactcaattacttggacataggagaaatcaagaaaagaccaatggaagttgttaatacagaggtaaaaccagtaatccatagcaggatcaacgtgtcagctcgctttagaaaaccgcttcaggagccgtgcactatcttcttgattgcaaatggagacctcataaacccagcttctcgcctccttatccccagaaaaaccttgaatcagtgggatcatgtactacaaatggtcacagaaaaaatcactctgaggagcggggctgttcacaggctttatactttagaaggaaaacttgttgagagtggagcagagttggagaatgggcagttttatgtggctgttggcagagataagtttaagaaactgccttacagtgagttactttttgacaagtcaacgatgagaaggccttttggtcagaaagcttcttcactacctcctattgtaggatccagaaagtctaaagggagtggaaatgatcgccactctaagtcaacagttggatccagtgacaactcatctcctcagcccctgaagaggaaagggaaaaaagaagacgtgaattcagaaaaactgacgaaattgaaacaaaatgtaaaattaaagaattcacaagaaaccattccaaatagtgatgaaggcattttcaaagctggagcagagaggtctgaaacacggggggcagcagaagtccaagaagatgaagatactcaggttgaggttccagtcgatcagaggccagcagaaatagtagacgaggaagaagatggagagaaggcaaacaaggatgcagaacagaaagaagacttttcaggaatgaatggtgaccttgaagaggaaggaggtagggaggctacagatgcccctgagcaagtcgaggagattctggatcacagtgagcagcaggcacgccctgctcgtgtaaatggaggcaccgatgaggagaatggtgaggagctgcagcaggttaataatgagcttcaactggtcctagacaaggaaagaaagtctcaaggagctggcagtggacaagatgaggctgatgtagaccctcaaagaccaccaaggccagaagtaaaaattaccagtccagaagaaaatgaaaacaaccaacaaaacaaggactatgctgccgtggcttag

SEQ ID NO: 3354 - RNA, 1431 nt, synthetic construct
  misc_feature 1..1431: note = derived and/or modified sequence opt1 fromRU2__Homo_sapiens__CCDS4550.1
  source 1..1431: mol_type = other RNA
atgagcggctccagcgcccgctccagccacctgtcccagcccgtggtcaagagcgtgctcgtgtaccggaacggggacccgttctacgccggccgccgggtcgtgatccacgagaagaaggtgtccagcttcgaggtcttcctgaaggaggtgaccgggggcgtgcaggcgcccttcggggccgtccgcaacatctacacgccccggacgggccaccgcatccggaagctggaccagatccagtccggcgggaactacgtggccggcgggcaggaggccttcaagaagctcaactacctggacatcggcgagatcaagaagcgccccatggaggtggtcaacaccgaggtgaagccggtgatccacagccggatcaacgtctccgcccgcttccggaagcccctgcaggagccctgcaccatcttcctcatcgcgaacggggacctgatcaaccccgccagccgcctgctcatcccgcggaagaccctgaaccagtgggaccacgtgctgcagatggtgacggagaagatcaccctccgctccggcgccgtccaccggctgtacaccctggagggcaagctcgtggagagcggggccgagctggagaacggccagttctacgtggcggtcgggcgcgacaagttcaagaagctgccctactccgagctcctgttcgacaagagcaccatgcggcgccccttcggccagaaggcctccagcctgcccccgatcgtgggctcccgcaagagcaaggggagcggcaacgaccggcactccaagagcacggtggggtccagcgacaactccagcccccagcccctcaagcggaagggcaagaaggaggacgtcaactccgagaagctgaccaagctgaagcagaacgtgaagctcaagaacagccaggagaccatccccaactccgacgaggggatcttcaaggccggcgccgagcgcagcgagacccgcggcgccgcggaggtccaggaggacgaggacacccaggtggaggtgccggtcgaccagcggcccgccgagatcgtggacgaggaggaggacggggagaaggccaacaaggacgccgagcagaaggaggacttctccggcatgaacggggacctggaggaggagggcgggcgcgaggccaccgacgcgcccgagcaggtcgaggagatcctggaccacagcgagcagcaggcccggcccgcccgcgtgaacggcggcaccgacgaggagaacggggaggagctccagcaggtcaacaacgagctgcagctggtgctcgacaaggagcggaagtcccagggcgccgggagcggccaggacgaggccgacgtggacccgcagcgcccgccccggcccgaggtgaagatcacctcccccgaggagaacgagaacaaccagcagaacaaggactacgcggccgtggcctga

SEQ ID NO: 3355 - RNA, 1431 nt, synthetic construct
  misc_feature 1..1431: note = derived and/or modified sequence opt2 fromRU2__Homo_sapiens__CCDS4550.1
  source 1..1431: mol_type = other RNA
atgtccggctcctccgcccgctcctcccacctctcccagcccgtcgtcaagtccgtcctcgtctaccgcaacggcgaccccttctacgccggccgccgcgtcgtcatccacgagaagaaggtctcctccttcgaggtcttcctcaaggaggtcaccggcggcgtccaggcccccttcggcgccgtccgcaacatctacaccccccgcaccggccaccgcatccgcaagctcgaccagatccagtccggcggcaactacgtcgccggcggccaggaggccttcaagaagctcaactacctcgacatcggcgagatcaagaagcgccccatggaggtcgtcaacaccgaggtcaagcccgtcatccactcccgcatcaacgtctccgcccgcttccgcaagcccctccaggagccctgcaccatcttcctcatcgccaacggcgacctcatcaaccccgcctcccgcctcctcatcccccgcaagaccctcaaccagtgggaccacgtcctccagatggtcaccgagaagatcaccctccgctccggcgccgtccaccgcctctacaccctcgagggcaagctcgtcgagtccggcgccgagctcgagaacggccagttctacgtcgccgtcggccgcgacaagttcaagaagctcccctactccgagctcctcttcgacaagtccaccatgcgccgccccttcggccagaaggcctcctccctcccccccatcgtcggctcccgcaagtccaagggctccggcaacgaccgccactccaagtccaccgtcggctcctccgacaactcctccccccagcccctcaagcgcaagggcaagaaggaggacgtcaactccgagaagctcaccaagctcaagcagaacgtcaagctcaagaactcccaggagaccatccccaactccgacgagggcatcttcaaggccggcgccgagcgctccgagacccgcggcgccgccgaggtccaggaggacgaggacacccaggtcgaggtccccgtcgaccagcgccccgccgagatcgtcgacgaggaggaggacggcgagaaggccaacaaggacgccgagcagaaggaggacttctccggcatgaacggcgacctcgaggaggagggcggccgcgaggccaccgacgcccccgagcaggtcgaggagatcctcgaccactccgagcagcaggcccgccccgcccgcgtcaacggcggcaccgacgaggagaacggcgaggagctccagcaggtcaacaacgagctccagctcgtcctcgacaaggagcgcaagtcccagggcgccggctccggccaggacgaggccgacgtcgacccccagcgccccccccgccccgaggtcaagatcacctcccccgaggagaacgagaacaaccagcagaacaaggactacgccgccgtcgcctga

SEQ ID NO: 3356 - RNA, 1431 nt, synthetic construct
  misc_feature 1..1431: note = derived and/or modified sequence opt3 fromRU2__Homo_sapiens__CCDS4550.1
  source 1..1431: mol_type = other RNA
atgagcggctcctctgccagatcaagtcacctgagccagcccgtggtcaagtccgttctcgtgtacaggaacggggaccctttctatgctggacggcgcgtagtgatccatgagaaaaaggtctcttcgtttgaagtgttccttaaagaggttaccggtggcgtgcaagcaccatttggggccgtccgaaatatttacacaccgcgtactggacacagaataaggaagctggatcagatccagtcaggcggtaactatgtggctgggggacaggaagcgttcaaaaagttgaattacttagacattggcgagatcaagaaacggcccatggaagtagttaacacggaggtgaagcctgtcattcatagccgcatcaatgtgagtgccagatttaggaaaccactgcaagagccctgcaccatattcctaatcgcaaacggcgatctcattaatcctgcctcccggctgcttatcccacgcaagacactgaaccagtgggaccacgtgttgcagatggtcactgaaaagattaccctccgatctggggctgttcatagactgtatacactggagggaaagctcgtggaaagcggtgcagagttagagaatggccagttttacgtagccgtggggagggataagttcaaaaagctgccctattccgaacttttgtttgacaaatcaaccatgcggcgtcctttcggacaaaaggctagtagcctgccaccgatcgtcggctctcgcaaatccaagggttcagggaacgatagacacagcaaaagtactgtgggatcttccgacaatagctcgccccagcctctaaagaggaagggcaaaaaggaggatgttaactctgaaaaactcacaaagctgaaacagaatgtgaaacttaagaactcccaggagaccataccaaattcagacgaaggcatttttaaagccggggcggagcggagtgagacgcgaggagcagccgaagtccaagaggatgaagacactcaggtggaggtacccgttgatcagcgccctgctgaaatcgtggacgaggaggaagacggtgagaaggccaacaaagatgcagaacaaaaggaggacttcagcggcatgaacggggatctggaagaggagggaggcagagaagctaccgacgccccagagcaggtcgaagagattttggatcactccgagcagcaggcgaggcccgcccgggtgaatggtgggacagacgaagagaacggcgaggaactccaacaggtcaataacgaactgcagttagtgctggataaagagcgcaagtctcagggagcaggcagcgggcaagacgaggctgatgttgacccgcagagacctcccaggccagaagtgaagatcacttcacctgaggaaaatgagaacaatcagcagaacaaagattacgccgctgtagcctga

SEQ ID NO: 3357 - RNA, 1431 nt, synthetic construct
  misc_feature 1..1431: note = derived and/or modified sequence opt4 fromRU2__Homo_sapiens__CCDS4550.1
  source 1..1431: mol_type = other RNA
atgagcggcagcagcgccagaagcagccacctgagccagcccgtggtgaagagcgtgctggtgtacagaaacggcgaccccttctacgccggcagaagagtggtgatccacgagaagaaggtgagcagcttcgaggtgttcctgaaggaggtgaccggcggcgtgcaggcccccttcggcgccgtgagaaacatctacacccccagaaccggccacagaatcagaaagctggaccagatccagagcggcggcaactacgtggccggcggccaggaggccttcaagaagctgaactacctggacatcggcgagatcaagaagagacccatggaggtggtgaacaccgaggtgaagcccgtgatccacagcagaatcaacgtgagcgccagattcagaaagcccctgcaggagccctgcaccatcttcctgatcgccaacggcgacctgatcaaccccgccagcagactgctgatccccagaaagaccctgaaccagtgggaccacgtgctgcagatggtgaccgagaagatcaccctgagaagcggcgccgtgcacagactgtacaccctggagggcaagctggtggagagcggcgccgagctggagaacggccagttctacgtggccgtgggcagagacaagttcaagaagctgccctacagcgagctgctgttcgacaagagcaccatgagaagacccttcggccagaaggccagcagcctgccccccatcgtgggcagcagaaagagcaagggcagcggcaacgacagacacagcaagagcaccgtgggcagcagcgacaacagcagcccccagcccctgaagagaaagggcaagaaggaggacgtgaacagcgagaagctgaccaagctgaagcagaacgtgaagctgaagaacagccaggagaccatccccaacagcgacgagggcatcttcaaggccggcgccgagagaagcgagaccagaggcgccgccgaggtgcaggaggacgaggacacccaggtggaggtgcccgtggaccagagacccgccgagatcgtggacgaggaggaggacggcgagaaggccaacaaggacgccgagcagaaggaggacttcagcggcatgaacggcgacctggaggaggagggcggcagagaggccaccgacgcccccgagcaggtggaggagatcctggaccacagcgagcagcaggccagacccgccagagtgaacggcggcaccgacgaggagaacggcgaggagctgcagcaggtgaacaacgagctgcagctggtgctggacaaggagagaaagagccagggcgccggcagcggccaggacgaggccgacgtggacccccagagaccccccagacccgaggtgaagatcaccagccccgaggagaacgagaacaaccagcagaacaaggactacgccgccgtggcctga

SEQ ID NO: 3358 - RNA, 1431 nt, synthetic construct
  misc_feature 1..1431: note = derived and/or modified sequence opt5 fromRU2__Homo_sapiens__CCDS4550.1
  source 1..1431: mol_type = other RNA
atgagcggctcctctgccagaagctcccacctgtctcagcccgtggtcaagagcgttctcgtgtaccggaacggggaccctttctatgctggacgcagagtggtcatccatgagaaaaaggtgtcctcttttgaagttttcctgaaagaggtgaccggcggggtccaagccccgtttggagcggtgcggaatatttacacaccccgcacgggccacagaatccggaaacttgatcagattcagagcgggggaaactatgttgctggcggccaggaagccttcaaaaagctgaattacctcgacatcggggagattaagaaacgccctatggaagtggtcaacaccgaggtgaagcccgtgatccattccagaatcaatgtcagcgcccggtttcgcaaacctctgcaagagccctgcacaattttccttatcgctaacggagatctgattaatcctgcctctagactcctgatcccgcggaagaccctgaaccagtgggaccacgttctccagatggtgacagaaaagattaccctgcgctccggcgctgtgcatagactttatacactggaggggaagctcgtcgaaagcggagccgagctggagaatggccagttttacgtggcggttgggcgggataagttcaaaaagctgccctattctgaacttctctttgacaaatccaccatgcgcagacctttcggacaaaaggccagctctctgccccctatcgtgggctcccggaaaagcaagggctccgggaacgatagacactctaaaagcacggtcggatccagcgacaattctagcccccagccgctgaagcgcaagggcaaaaaggaggatgtgaactccgaaaaactcaccaagctgaaacagaatgttaaacttaagaactctcaggagacaattcctaatagcgacgaagggatctttaaggctggagccgagcggtccgagaccagaggcgctgccgaagtgcaagaggatgaagacacacaggtcgaggtgcccgtcgatcagcgccctgcggaaatcgtggacgaggaggaagacggggagaaggccaacaaagatgctgaacaaaaggaggacttctctggaatgaacggcgatctggaagaggagggcgggcgggaagccaccgacgctcccgagcaggttgaagagattctcgatcacagcgagcagcaggccagacccgcccgcgtgaatggaggcacggacgaagagaacggggaggaactgcaacaggtcaataacgaacttcagctggtgctcgataaagagcggaagtcccagggagctggcagcgggcaagacgaggcggatgttgaccctcagagaccgccccgccctgaagtgaagatcacatctcccgaggaaaatgagaacaatcagcagaacaaagattacgccgctgtcgcctga

SEQ ID NO: 3359 - protein, 453 aa, synthetic construct
  REGION 1..453: note = RUNX1__Homo_sapiens__Q01196
MRIPVDASTSRRFTPPSTALSPGKMSEALPLGAPDAGAALAGKLRSGDRSMVEVLADHPGELVRTDSPNFLCSVLPTHWRCNKTLPIAFKVVALGDVPDGTLVTVMAGNDENYSAELRNATAAMKNQVARFNDLRFVGRSGRGKSFTLTITVFTNPPQVATYHRAIKITVDGPREPRRHRQKLDDQTKPGSLSFSERLSELEQLRRTAMRVSPHHPAPTPNPRASLNHSTAFNPQPQSQMQDTRQIQPSPPWSYDQSYQYLGSIASPSVHPATPISPGRASGMTTLSAELSSRLSTAPDLTAFSDPRQFPALPSISDPRMHYPGAFTYSPTPVTSGIGIGMSAMGSATRYHTYLPPPYPGSSQAQGGPFQASSPSYHLYYGASAGSYQFSMVGGERSPPRILPPCTNASTGSALLNPSLPNQSDVVEAEGSHSNSPTNMAPSARLEEAVWRPY

SEQ ID NO: 3360 - RNA, 1362 nt, synthetic construct
  misc_feature 1..1362: note = RUNX1__Homo_sapiens__BAA07903
  source 1..1362: mol_type = other RNA
atgcgtatccccgtagatgccagcacgagccgccgcttcacgccgccttccaccgcgctgagcccaggcaagatgagcgaggcgttgccgctgggcgccccggacgccggcgctgccctggccggcaagctgaggagcggcgaccgcagcatggtggaggtgctggccgaccacccgggcgagctggtgcgcaccgacagccccaacttcctctgctccgtgctgcctacgcactggcgctgcaacaagaccctgcccatcgctttcaaggtggtggccctaggggatgttccagatggcactctggtcactgtgatggctggcaatgatgaaaactactcggctgagctgagaaatgctaccgcagccatgaagaaccaggttgcaagatttaatgacctcaggtttgtcggtcgaagtggaagagggaaaagcttcactctgaccatcactgtcttcacaaacccaccgcaagtcgccacctaccacagagccatcaaaatcacagtggatgggccccgagaacctcgaagacatcggcagaaactagatgatcagaccaagcccgggagcttgtccttttccgagcggctcagtgaactggagcagctgcggcgcacagccatgagggtcagcccacaccacccagcccccacgcccaaccctcgtgcctccctgaaccactccactgcctttaaccctcagcctcagagtcagatgcaggatacaaggcagatccaaccatccccaccgtggtcctacgatcagtcctaccaatacctgggatccattgcctctccttctgtgcacccagcaacgcccatttcacctggacgtgccagcggcatgacaaccctctctgcagaactttccagtcgactctcaacggcacccgacctgacagcgttcagcgacccgcgccagttccccgcgctgccctccatctccgacccccgcatgcactatccaggcgccttcacctactccccgacgccggtcacctcgggcatcggcatcggcatgtcggccatgggctcggccacgcgctaccacacctacctgccgccgccctaccccggctcgtcgcaagcgcagggaggcccgttccaagccagctcgccctcctaccacctgtactacggcgcctcggccggctcctaccagttctccatggtgggcggcgagcgctcgccgccgcgcatcctgccgccctgcaccaacgcctccaccggctccgcgctgctcaaccccagcctcccgaaccagagcgacgtggtggaggccgagggcagccacagcaactcccccaccaacatggcgccctccgcgcgcctggaggaggccgtgtggaggccctactga

SEQ ID NO: 3361 - RNA, 1362 nt, synthetic construct
  misc_feature 1..1362: note = derived and/or modified sequence opt1 fromRUNX1__Homo_sapiens__BAA07903
  source 1..1362: mol_type = other RNA
atgcgcatccccgtggacgccagcacctcccggcgcttcaccccgcccagcacggccctgtcccccggcaagatgagcgaggcgctccccctgggggccccggacgccggcgccgccctggcggggaagctccggtccggcgaccgcagcatggtcgaggtgctggccgaccaccccggggagctggtgcggaccgactcccccaacttcctctgcagcgtcctgcccacccactggcgctgcaacaagaccctgccgatcgccttcaaggtggtggccctcggcgacgtccccgacggcacgctggtgaccgtgatggcggggaacgacgagaactactccgccgagctgcggaacgccaccgccgccatgaagaaccaggtcgcgcgcttcaacgacctccggttcgtgggccgcagcgggcggggcaagtccttcaccctgacgatcaccgtgttcaccaacccgccccaggtcgccacctaccaccgcgccatcaagatcacggtggacgggccccgggagccccgccggcaccgccagaagctggacgaccagaccaagcccggcagcctctccttcagcgagcggctgtccgagctggagcagctccgccggaccgccatgcgcgtgagcccccaccacccggcccccacccccaacccccgggcgtccctgaaccacagcacggccttcaacccgcagccccagtcccagatgcaggacacccgccagatccagcccagcccgccctggagctacgaccagtcctaccagtacctgggcagcatcgcctcccccagcgtccaccccgccacccccatctccccggggcgcgccagcggcatgaccacgctctccgcggagctgagctcccggctgagcaccgcccccgacctcaccgccttctccgacccccgccagttcccggccctgcccagcatctccgacccccggatgcactaccccggggccttcacctacagcccgacgcccgtgacctccggcatcggcatcgggatgagcgcgatgggctccgccacccgctaccacacctacctgcccccgccctaccccgggagctcccaggcccagggcgggcccttccaggccagcagcccctcctaccacctctactacggcgcgagcgccggctcctaccagttcagcatggtcgggggcgagcggtccccgccccgcatcctgccgccctgcacgaacgccagcaccgggtccgccctgctcaaccccagcctgcccaaccagtccgacgtggtggaggccgagggcagccactccaacagccccaccaacatggcgccctccgcccggctggaggaggccgtgtggcgcccgtactga

SEQ ID NO: 3362 - RNA, 1362 nt, synthetic construct
  misc_feature 1..1362: note = derived and/or modified sequence opt2 fromRUNX1__Homo_sapiens__BAA07903
  source 1..1362: mol_type = other RNA
atgcgcatccccgtcgacgcctccacctcccgccgcttcacccccccctccaccgccctctcccccggcaagatgtccgaggccctccccctcggcgcccccgacgccggcgccgccctcgccggcaagctccgctccggcgaccgctccatggtcgaggtcctcgccgaccaccccggcgagctcgtccgcaccgactcccccaacttcctctgctccgtcctccccacccactggcgctgcaacaagaccctccccatcgccttcaaggtcgtcgccctcggcgacgtccccgacggcaccctcgtcaccgtcatggccggcaacgacgagaactactccgccgagctccgcaacgccaccgccgccatgaagaaccaggtcgcccgcttcaacgacctccgcttcgtcggccgctccggccgcggcaagtccttcaccctcaccatcaccgtcttcaccaaccccccccaggtcgccacctaccaccgcgccatcaagatcaccgtcgacggcccccgcgagccccgccgccaccgccagaagctcgacgaccagaccaagcccggctccctctccttctccgagcgcctctccgagctcgagcagctccgccgcaccgccatgcgcgtctccccccaccaccccgcccccacccccaacccccgcgcctccctcaaccactccaccgccttcaacccccagccccagtcccagatgcaggacacccgccagatccagccctcccccccctggtcctacgaccagtcctaccagtacctcggctccatcgcctccccctccgtccaccccgccacccccatctcccccggccgcgcctccggcatgaccaccctctccgccgagctctcctcccgcctctccaccgcccccgacctcaccgccttctccgacccccgccagttccccgccctcccctccatctccgacccccgcatgcactaccccggcgccttcacctactcccccacccccgtcacctccggcatcggcatcggcatgtccgccatgggctccgccacccgctaccacacctacctcccccccccctaccccggctcctcccaggcccagggcggccccttccaggcctcctccccctcctaccacctctactacggcgcctccgccggctcctaccagttctccatggtcggcggcgagcgctcccccccccgcatcctccccccctgcaccaacgcctccaccggctccgccctcctcaacccctccctccccaaccagtccgacgtcgtcgaggccgagggctcccactccaactcccccaccaacatggccccctccgcccgcctcgaggaggccgtctggcgcccctactga

SEQ ID NO: 3363 - RNA, 1362 nt, synthetic construct
  misc_feature 1..1362: note = derived and/or modified sequence opt3 fromRUNX1__Homo_sapiens__BAA07903
  source 1..1362: mol_type = other RNA
atgagaatccccgtggacgccagcacctccaggcggttcacacctccatctactgctctgtcaccgggcaagatgagtgaggcactcccccttggggcccctgatgcgggagctgccctggcaggtaaattgcgcagcggcgaccgatccatggtcgaagttttagccgatcacccaggggagctggtgcgtacggactctcccaactttctatgctcggtactccctacccattggagatgtaataagacactgccaattgctttcaaagtggtcgcacttggagatgtgcccgacggcactctggttaccgtgatggccggtaacgatgaaaattactcagctgagttgaggaacgccacagcggcaatgaagaatcaggtcgcccggtttaacgacctccgcttcgtggggagaagcggaaggggcaaaagttttaccctgactataacagtattcaccaatcctccacaagttgctacgtatcaccgggccatcaagattactgtggatggcccgcgcgaaccccgaagacataggcagaagctggacgatcagaccaaacctgggtccctctcttttagcgagcggttatccgagctggaacagcttcgtcgcacagcaatgagagtctcaccacaccatcccgctcctactccaaaccccagggccagtttgaatcacagcaccgcgttcaacccgcaacctcagtctcagatgcaggacacacggcaaatccagccctccccaccttggtcatacgatcagagctatcagtacctgggaagtattgcctctccctccgtgcacccagcaacccccatcagccctggtcgagcttcgggcatgacgactctatctgccgagctctcctcacgcctgagtacagctccagaccttaccgcctttagcgacccgagacaattccccgcactgccttccatatctgatccaaggatgcattatcccggggcctttacttacagccctacaccagtgacctcaggaatcggcattggtatgagtgctatggggtccgcgacgcggtatcacacctacttgcccccgccttacccaggaagctctcaggcacagggcggccccttccaagcctcaagtcctagctatcatctctactatggggcttccgccggatcttaccagttttcgatggtcggtggcgaacgcagcccacccagaatcctgcctccctgcacaaatgcatccactgggtcagccttactgaacccaagtctcccgaatcagtctgacgttgtggaggctgagggaagccactccaactcacctaccaatatggcccccagcgcaaggcttgaagaggcggtatggcgtccatattga

SEQ ID NO: 3364 - RNA, 1362 nt, synthetic construct
  misc_feature 1..1362: note = derived and/or modified sequence opt4 fromRUNX1__Homo_sapiens__BAA07903
  source 1..1362: mol_type = other RNA
atgagaatccccgtggacgccagcaccagcagaagattcaccccccccagcaccgccctgagccccggcaagatgagcgaggccctgcccctgggcgcccccgacgccggcgccgccctggccggcaagctgagaagcggcgacagaagcatggtggaggtgctggccgaccaccccggcgagctggtgagaaccgacagccccaacttcctgtgcagcgtgctgcccacccactggagatgcaacaagaccctgcccatcgccttcaaggtggtggccctgggcgacgtgcccgacggcaccctggtgaccgtgatggccggcaacgacgagaactacagcgccgagctgagaaacgccaccgccgccatgaagaaccaggtggccagattcaacgacctgagattcgtgggcagaagcggcagaggcaagagcttcaccctgaccatcaccgtgttcaccaaccccccccaggtggccacctaccacagagccatcaagatcaccgtggacggccccagagagcccagaagacacagacagaagctggacgaccagaccaagcccggcagcctgagcttcagcgagagactgagcgagctggagcagctgagaagaaccgccatgagagtgagcccccaccaccccgcccccacccccaaccccagagccagcctgaaccacagcaccgccttcaacccccagccccagagccagatgcaggacaccagacagatccagcccagccccccctggagctacgaccagagctaccagtacctgggcagcatcgccagccccagcgtgcaccccgccacccccatcagccccggcagagccagcggcatgaccaccctgagcgccgagctgagcagcagactgagcaccgcccccgacctgaccgccttcagcgaccccagacagttccccgccctgcccagcatcagcgaccccagaatgcactaccccggcgccttcacctacagccccacccccgtgaccagcggcatcggcatcggcatgagcgccatgggcagcgccaccagataccacacctacctgccccccccctaccccggcagcagccaggcccagggcggccccttccaggccagcagccccagctaccacctgtactacggcgccagcgccggcagctaccagttcagcatggtgggcggcgagagaagcccccccagaatcctgcccccctgcaccaacgccagcaccggcagcgccctgctgaaccccagcctgcccaaccagagcgacgtggtggaggccgagggcagccacagcaacagccccaccaacatggcccccagcgccagactggaggaggccgtgtggagaccctactga

SEQ ID NO: 3365 - RNA, 1362 nt, synthetic construct
  misc_feature 1..1362: note = derived and/or modified sequence opt5 fromRUNX1__Homo_sapiens__BAA07903
  source 1..1362: mol_type = other RNA
atgagaatccccgtggacgccagcacctcccggcgcttcacacctccgtctacggctctgagccccggcaagatgtccgaggccctccctctgggggcgcccgatgctggagccgcccttgctggcaaactgagatctggggaccggagcatggtcgaagttctcgccgatcaccctggagagctggtgcgcaccgactcccccaactttctttgctctgtgctgcctacacattggagatgtaataagaccctcccgattgctttcaaagtcgtggccctgggcgatgttcccgacgggacactggtgaccgtcatggcgggaaacgatgaaaattacagcgccgagctccggaacgctacagccgctatgaagaatcaggtggcccgctttaacgacctgagattcgttggccggtccggccgcgggaaatcttttacccttacgatcaccgtgttcacaaatcctccccaagtcgcgacctatcacagagccattaagatcacagtggatggacctcgggaaccccgcagacatcggcagaagctggacgatcagaccaaaccgggcagcctctcctttagcgagcgcctgtctgagcttgaacagctgagacggacggctatgagagtgtcccctcaccatcccgcccctacacccaacccccgcgctagcctcaatcactctaccgccttcaaccctcaaccgcagtcccagatgcaggacacacggcaaattcagcccagccctccctggtcctacgatcagtcttatcagtacctggggagcatcgcctcccctagcgtccaccccgctaccccgatctctcctgggagagcgtccggcatgaccacactgagcgccgagctctctagccgcctgtccacggctcccgaccttaccgccttttctgaccctcggcaattccccgccctgcctagcatttccgatcccagaatgcattatccgggggcttttacatacagccctacccccgttacatctggaatcggcattggcatgtccgccatggggagcgcgacccgctatcacacgtacctgccccctccgtaccccggatcttcccaggctcagggcgggcctttccaagccagctccccctcttatcatctctactatggagccagcgctggctcctaccagttttctatggtgggaggagaacggagccctcccagaatccttcctccctgcacaaatgcctccaccggcagcgctctgctcaacccgtctctgcctaatcagtccgacgtggtcgaggccgagggcagccactctaactcccccaccaatatggcgcctagcgcccgcctggaagaggctgtgtggcggccctattga

SEQ ID NO: 3366 - protein, 359 aa, synthetic construct [sequence omitted]

SEQ ID NO: 3367 - RNA, 1080 nt, synthetic construct
  misc_feature 1..1080: note = S-100__Homo_sapiens__ACI46041
  source 1..1080: mol_type = other RNA
atgccgctggagctggagctgtgtcccgggcgctgggtgggcgggcaacacccgtgcttcatcattgccgagatcggccagaaccaccagggcgacctggacgtagccaagcgcatgatccgcatggccaaggagtgtggggctgattgtgccaagttccagaagagtgagctagaattcaagtttaatcggaaagccttggagaggccatacacctcgaagcattcctgggggaagacgtacggggagcacaaacgacatctggagttcagccatgaccagtacagggagctgcagaggtacgccgaggaggttgggatcttcttcactgcctctggcatggatgagatggcagttgaattcctgcatgaactgaatgttccatttttcaaagttggatctggagacactaataattttccttatctggaaaagacagccaaaaaaggtcgcccaatggtgatctccagtgggatgcagtcaatggacaccatgaagcaagtttatcagatcgtgaagcccctcaaccccaacttctgcttcttgcagtgtaccagcgcatacccgctccagcctgaggacgtcaacctgcgggtcatctcggaatatcagaagctctttcctgacattcccatagggtattctgggcatgaaacaggcatagcgatatctgtggccgcagtggctctgggggccaaggtgttggaacgtcacataactttggacaagacctggaaggggagtgaccactcggcctcgctggagcctggagaactggccgagctggtgcggtcagtgcgtcttgtggagcgtgccctgggctccccaaccaagcagctgctgccctgtgagatggcctgcaatgagaagctgggcaagtctgtggtggccaaagtgaaaattccggaaggcaccattctaacaatggacatgctcaccgtgaaggtgggtgagcccaaagcctatcctcctgaagacatctttaatctagtgggcaagaaggtcctggtcactgttgaagaggatgacaccatcatggaagaattggtagataatcatggcaaaaaaatcaagtcttaa

SEQ ID NO: 3368 - RNA, 1080 nt, synthetic construct
  misc_feature 1..1080: note = derived and/or modified sequence opt1 fromS-100__Homo_sapiens__ACI46041
  source 1..1080: mol_type = other RNA
atgcccctggagctcgagctgtgccccggccgctgggtcgggggccagcacccctgcttcatcatcgccgagatcgggcagaaccaccagggcgacctggacgtggccaagcggatgatccgcatggcgaaggagtgcggggccgactgcgccaagttccagaagtccgagctcgagttcaagttcaaccggaaggccctggagcgcccctacaccagcaagcacagctggggcaagacctacggcgagcacaagcggcacctggagttctcccacgaccagtaccgcgagctccagcggtacgccgaggaggtggggatcttcttcacggcgagcggcatggacgagatggccgtggagttcctgcacgagctgaacgtccccttcttcaaggtggggtccggcgacaccaacaacttcccgtacctcgagaagaccgccaagaaggggcgccccatggtgatcagctccggcatgcagagcatggacaccatgaagcaggtctaccagatcgtgaagcccctgaaccccaacttctgcttcctgcagtgcacgtccgcctacccgctccagcccgaggacgtgaacctgcgggtcatcagcgagtaccagaagctgttccccgacatccccatcggctactccgggcacgagaccggcatcgcgatcagcgtggccgccgtggccctcggggccaaggtcctggagcgccacatcaccctggacaagacctggaagggctccgaccacagcgcgtccctcgagccgggcgagctggccgagctggtgcggagcgtgcgcctcgtcgagcgggccctggggtcccccacgaagcagctgctcccctgcgagatggcctgcaacgagaagctgggcaagagcgtggtggccaaggtcaagatccccgaggggaccatcctgaccatggacatgctcaccgtgaaggtgggcgagccgaaggcgtacccgcccgaggacatcttcaacctggtcgggaagaaggtgctggtgacggtcgaggaggacgacaccatcatggaggagctcgtggacaaccacggcaagaagatcaagtcctga

SEQ ID NO: 3369 - RNA, 1080 nt, synthetic construct
  misc_feature 1..1080: note = derived and/or modified sequence opt2 fromS-100__Homo_sapiens__ACI46041
  source 1..1080: mol_type = other RNA
atgcccctcgagctcgagctctgccccggccgctgggtcggcggccagcacccctgcttcatcatcgccgagatcggccagaaccaccagggcgacctcgacgtcgccaagcgcatgatccgcatggccaaggagtgcggcgccgactgcgccaagttccagaagtccgagctcgagttcaagttcaaccgcaaggccctcgagcgcccctacacctccaagcactcctggggcaagacctacggcgagcacaagcgccacctcgagttctcccacgaccagtaccgcgagctccagcgctacgccgaggaggtcggcatcttcttcaccgcctccggcatggacgagatggccgtcgagttcctccacgagctcaacgtccccttcttcaaggtcggctccggcgacaccaacaacttcccctacctcgagaagaccgccaagaagggccgccccatggtcatctcctccggcatgcagtccatggacaccatgaagcaggtctaccagatcgtcaagcccctcaaccccaacttctgcttcctccagtgcacctccgcctaccccctccagcccgaggacgtcaacctccgcgtcatctccgagtaccagaagctcttccccgacatccccatcggctactccggccacgagaccggcatcgccatctccgtcgccgccgtcgccctcggcgccaaggtcctcgagcgccacatcaccctcgacaagacctggaagggctccgaccactccgcctccctcgagcccggcgagctcgccgagctcgtccgctccgtccgcctcgtcgagcgcgccctcggctcccccaccaagcagctcctcccctgcgagatggcctgcaacgagaagctcggcaagtccgtcgtcgccaaggtcaagatccccgagggcaccatcctcaccatggacatgctcaccgtcaaggtcggcgagcccaaggcctacccccccgaggacatcttcaacctcgtcggcaagaaggtcctcgtcaccgtcgaggaggacgacaccatcatggaggagctcgtcgacaaccacggcaagaagatcaagtcctga

SEQ ID NO: 3370 - RNA, 1080 nt, synthetic construct
  misc_feature 1..1080: note = derived and/or modified sequence opt3 fromS-100__Homo_sapiens__ACI46041
  source 1..1080: mol_type = other RNA
atgcccctggagctcgaactttgccctggcagatgggtcgggggacagcacccatgtttcatcattgccgagataggtcaaaaccatcagggcgacctggatgtggctaagaggatgatccggatggcaaaagaatgcggggccgactgtgcgaagtttcagaaaagcgagttggaatttaagtttaatcgcaaggctttagagcgaccgtacacctccaagcactcttggggaaagacatatggcgagcataaacgtcacctggagttctcacatgatcagtacagagagctacaaaggtatgccgaagaggttggtattttcttcactgcaagtgggatggacgagatggccgtggaatttctccacgagctgaacgtacccttctttaaggtgggaagcggcgatacgaataacttcccttaccttgagaaaaccgctaagaaaggccggccaatggtcatctcctctgggatgcagtcgatggacacaatgaaacaggtgtatcagattgttaagcccctgaatcctaacttttgcttcttgcaatgtacttcagcatacccactccagcccgaagatgtgaatctgcgcgtcatcagcgaatatcagaaactgtttcctgacataccaatcggatacagtggtcacgagaccggcattgccatctccgtggctgccgtagcgctcggggcaaaggttttagagagacatattacactggataaaacctggaagggatctgaccacagcgcctcccttgaaccgggcgagttggctgaactggtgaggtcagtccggctagtggagcgcgccctcggtagtcccactaaacagctgcttccttgcgaaatggcatgtaacgagaagctggggaaaagcgtggtcgctaaggttaagatcccagagggaacaatattgaccatggatatgctcacggtgaaagtaggcgaacccaaggcctaccctccagaggacattttcaatctggtgggcaaaaaggtcttagtgactgttgaagaggatgacaccatcatggaagaactggtggacaaccatgggaaaaagattaagtcttga

SEQ ID NO: 3371 - RNA, 1080 nt, synthetic construct
  misc_feature 1..1080: note = derived and/or modified sequence opt4 fromS-100__Homo_sapiens__ACI46041
  source 1..1080: mol_type = other RNA
atgcccctggagctggagctgtgccccggcagatgggtgggcggccagcacccctgcttcatcatcgccgagatcggccagaaccaccagggcgacctggacgtggccaagagaatgatcagaatggccaaggagtgcggcgccgactgcgccaagttccagaagagcgagctggagttcaagttcaacagaaaggccctggagagaccctacaccagcaagcacagctggggcaagacctacggcgagcacaagagacacctggagttcagccacgaccagtacagagagctgcagagatacgccgaggaggtgggcatcttcttcaccgccagcggcatggacgagatggccgtggagttcctgcacgagctgaacgtgcccttcttcaaggtgggcagcggcgacaccaacaacttcccctacctggagaagaccgccaagaagggcagacccatggtgatcagcagcggcatgcagagcatggacaccatgaagcaggtgtaccagatcgtgaagcccctgaaccccaacttctgcttcctgcagtgcaccagcgcctaccccctgcagcccgaggacgtgaacctgagagtgatcagcgagtaccagaagctgttccccgacatccccatcggctacagcggccacgagaccggcatcgccatcagcgtggccgccgtggccctgggcgccaaggtgctggagagacacatcaccctggacaagacctggaagggcagcgaccacagcgccagcctggagcccggcgagctggccgagctggtgagaagcgtgagactggtggagagagccctgggcagccccaccaagcagctgctgccctgcgagatggcctgcaacgagaagctgggcaagagcgtggtggccaaggtgaagatccccgagggcaccatcctgaccatggacatgctgaccgtgaaggtgggcgagcccaaggcctacccccccgaggacatcttcaacctggtgggcaagaaggtgctggtgaccgtggaggaggacgacaccatcatggaggagctggtggacaaccacggcaagaagatcaagagctga

SEQ ID NO: 3372 - RNA, 1080 nt, synthetic construct
  misc_feature 1..1080: note = derived and/or modified sequence opt5 fromS-100__Homo_sapiens__ACI46041
  source 1..1080: mol_type = other RNA
atgcccctggagctcgaactgtgccctggcagatgggtgggaggacagcacccgtgtttcatcattgccgagatcggccaaaaccatcagggggaccttgatgtcgctaagcggatgattcgcatggccaaagaatgcggagcggactgtgctaagtttcagaaaagcgagctggagttcaagtttaatagaaaagccctcgagcggccctacacctccaagcactcttggggcaagacatatggggagcataaacgccacctggagttcagccatgatcagtacagagaacttcaacggtatgccgaagaggttggaatctttttcacggcttccggcatggacgagatggccgtggaatttctgcacgagctcaacgtgcctttctttaaggtcggctctggggataccaataacttcccctacctggagaaaacagctaagaaaggacgccctatggtgattagctccggcatgcagtctatggacaccatgaagcaggtttatcagatcgtgaagcccctgaatcctaacttttgcttcctccaatgtacaagcgcctacccgctgcagcccgaagatgtcaatcttagagtgatctccgaatatcagaaactgtttcctgacattcccatcgggtacagcggacacgagaccggcattgcgatctctgttgccgctgtggccctcggggctaaggtcctggagcggcatattacacttgataaaacctggaagggatccgaccacagcgcctctctggaacctggcgagctcgcggaactggtgcgctccgtgagactggtcgagcgggccctcggcagccccacgaaacagctgcttccgtgcgaaatggcttgtaacgagaagctggggaaatctgttgtggccaaggtgaagatccctgagggaaccattctcacaatggatatgctgaccgtcaaagtgggcgaacccaaggcttaccctcccgaggacatcttcaatcttgttgggaaaaaggtgctggtcacagtggaagaggatgacaccatcatggaagaactcgttgacaaccatgggaaaaagattaagtcctga

SEQ ID NO: 3373 - protein, 904 aa, synthetic construct
  REGION 1..904: note = SAGE__Homo_sapiens__Q9NXZ1
MQASPLQTSQPTPPEELHAAAYVFTNDGQQMRSDEVNLVATGHQSKKKHSRKSKRHSSSKRRKSMSSWLDKQEDAAVTHSICEERINNGQPVADNVLSTAPPWPDATIAHNIREERMENGQSRTDKVLSTAPPQLVHMAAAGIPSMSTRDLHSTVTHNIREERMENGQPQPDNVLSTGPTGLINMAATPIPAMSARDLYATVTHNVCEQKMENVQPAPDNVLLTLRPRRINMTDTGISPMSTRDPYATITYNVPEEKMEKGQPQPDNILSTASTGLINVAGAGTPAISTNGLYSTVPHNVCEEKMENDQPQPNNVLSTVQPVIIYLTATGIPGMNTRDQYATITHNVCEERVVNNQPLPSNALSTVLPGLAYLATADMPAMSTRDQHATIIHNLREEKKDNSQPTPDNVLSAVTPELINLAGAGIPPMSTRDQYATVNHHVHEARMENGQRKQDNVLSNVLSGLINMAGASIPAMSSRDLYATITHSVREEKMESGKPQTDKVISNDAPQLGHMAAGGIPSMSTKDLYATVTQNVHEERMENNQPQPSYDLSTVLPGLTYLTVAGIPAMSTRDQYATVTHNVHEEKIKNGQAASDNVFSTVPPAFINMAATGVSSMSTRDQYAAVTHNIREEKINNSQPAPGNILSTAPPWLRHMAAAGISSTITRDLYVTATHSVHEEKMTNGQQAPDNSLSTVPPGCINLSGAGISCRSTRDLYATVIHDIQEEEMENDQTPPDGFLSNSDSPELINMTGHCMPPNALDSFSHDFTSLSKDELLYKPDSNEFAVGTKNYSVSAGDPPVTVMSLVETVPNTPQISPAMAKKINDDIKYQLMKEVRRFGQNYERIFILLEEVQGSMKVKRQFVEFTIKEAARFKKVVLIQQLEKALKEIDSHCHLRKVKHMRKR

SEQ ID NO: 3374 - RNA, 2715 nt, synthetic construct
  misc_feature 1..2715: note = SAGE__Homo_sapiens__CCDS14652.1
  source 1..2715: mol_type = other RNA
atgcaggcttctccacttcaaacgagtcaaccaactccacctgaagaacttcatgctgctgcctatgtgtttacaaatgatgggcagcaaatgaggagtgatgaagtaaatctggttgcaacagggcatcaaagcaaaaagaaacattccagaaaatccaagagacactcttcatctaagagaaggaagagtatgtcctcgtggttagacaaacaggaagatgctgcagtcactcacagcatttgtgaagagaggataaataacggccaaccagtagctgataatgtcttgtcaactgctccaccatggcctgatgctaccatcgctcacaatatccgtgaagagaggatggaaaatggccaatctcgaactgacaaagtcttgtcaactgctccaccacagcttgttcatatggctgcagctggtattccatccatgagtaccagggatctgcattctaccgtcactcacaatatccgtgaagagagaatggaaaatggccaaccccaacctgataacgtcttgtcaactggtcccacagggcttattaatatggcagcaactcctattccagccatgagtgccagagatctctatgctacagtcactcacaatgtctgtgaacagaagatggaaaatgtccaaccagcacctgataacgtgttgttgactcttcgaccacggcgtattaatatgacagacactggtatttcacccatgagtaccagggatccatatgctaccatcacttacaatgtccctgaggagaagatggaaaagggccaaccccaacctgataacatcttgtcaactgcttcaacagggcttattaatgtggcaggagctggtactccagccatcagcaccaatggcctgtattccaccgtccctcacaatgtctgtgaagagaagatggaaaatgaccaaccgcaacctaataacgtattgtcaactgttcaaccagtgattatttatttgacagcaactggtattccgggcatgaataccagggatcagtatgctaccatcactcacaatgtctgtgaagagagagtggtaaataaccaaccactacctagtaacgccttgtcaactgttctaccagggcttgcttatttggcaacagctgatatgccagccatgagtaccagggatcagcatgctaccatcattcacaatctgcgtgaagagaagaaagataacagccaaccaacccctgataacgtcttgtcagctgttacaccagagcttattaacttggcaggagctggtattccacccatgagtaccagggatcagtatgctaccgtcaatcaccatgtccatgaagcaaggatggaaaatggccaacgaaaacaggataacgtcttgtcaaatgttctatccgggcttattaatatggcaggagctagtattccagcaatgagttccagggatctgtatgctaccattactcacagtgttcgtgaagagaagatggaaagtggcaaaccccaaactgataaggtcatatcaaatgatgcaccacagcttggtcatatggctgcaggtggtattccatccatgagtaccaaggatctgtatgctaccgtcactcaaaatgtccatgaagagaggatggaaaataaccaaccacaacctagttatgacttgtcaactgttctaccaggacttacttatttgacagtagctggtattccggccatgagtaccagggatcagtatgctaccgtcactcacaatgtccatgaagagaagattaaaaatggccaagcagcatccgataatgtcttctcgactgttccaccagcatttattaatatggcagcaactggtgtttcatccatgagtaccagggatcagtatgctgcagtcactcacaacatccgtgaagagaagataaataacagccaaccagcacctggtaacatcttgtcaactgctcctccatggcttcgtcatatggcagcagctggaatttcatccacgattaccagggatctgtatgtcaccgccactcacagtgtccatgaggagaagatgacaaatggccaacaggcacctgataactccttgtcaacggttccacctggttgtattaatctgtcaggagctggtatttcatgcagaagtaccagggatctgtatgctactgtcattcacgatatccaggaggaggagatggaaaatgatcaaacccctcctgatggcttcctgtcaaattctgattcaccagagctgataaatatgacaggacattgtatgccacccaatgcattggattctttctctcacgacttcacaagtctcagcaaagatgagctgctttacaaacctgatagtaatgaatttgcggtaggcaccaaaaactacagtgtctctgcaggtgacccaccagttacagtaatgtctttggtggaaactgtgccaaatacaccacaaatatctcctgccatggcaaagaaaattaatgatgatataaaatatcaattaatgaaagaagttcgaaggtttgggcaaaattatgaaagaattttcattttgcttgaagaggtacaaggatctatgaaagtcaagagacaatttgttgaatttaccatcaaggaagcagcaaggtttaaaaaagttgtcttaattcagcaactcgagaaggcgcttaaagaaatagattcccactgccatctcagaaaagttaagcacatgagaaaaagataa

SEQ ID NO: 3375 - RNA, 2715 nt, synthetic construct
  misc_feature 1..2715: note = derived and/or modified sequence opt1 fromSAGE__Homo_sapiens__CCDS14652.1
  source 1..2715: mol_type = other RNA
atgcaggccagccccctgcagacctcccagcccaccccgcccgaggagctgcacgccgcggcctacgtgttcaccaacgacggccagcagatgcgcagcgacgaggtcaacctggtggccaccgggcaccagtccaagaagaagcacagccggaagtccaagcgccacagctccagcaagcggcgcaagtccatgagctcctggctggacaagcaggaggacgccgccgtgacccacagcatctgcgaggagcggatcaacaacggccagcccgtcgcggacaacgtgctctccaccgccccgccctggcccgacgccacgatcgcccacaacatccgcgaggagcggatggagaacgggcagagccgcaccgacaaggtgctgtccaccgcgcccccgcagctggtccacatggccgccgccggcatccccagcatgtccacccgggacctccacagcacggtgacccacaacatccgcgaggagcggatggagaacgggcagccccagcccgacaacgtgctgtccaccggcccgaccggcctgatcaacatggccgcgacgcccatccccgccatgagcgcccgcgacctctacgccaccgtcacccacaacgtgtgcgagcagaagatggagaacgtgcagcccgccccggacaacgtcctgctgaccctccggccccgccggatcaacatgacggacaccgggatcagccccatgtccacccgcgacccctacgcgaccatcacgtacaacgtgccggaggagaagatggagaagggccagccccagcccgacaacatcctgagcaccgcctccaccgggctgatcaacgtggccggcgccgggacccccgccatcagcacgaacggcctctactccaccgtcccgcacaacgtgtgcgaggagaagatggagaacgaccagccccagcccaacaacgtgctgagcaccgtccagcccgtgatcatctacctgaccgcgacgggcatccccgggatgaacacccgggaccagtacgccaccatcacccacaacgtgtgcgaggagcgcgtcgtgaacaaccagcccctcccctccaacgccctgagcacggtgctgccgggcctcgcctacctggccaccgcggacatgcccgccatgtccacccgggaccagcacgccaccatcatccacaacctgcgcgaggagaagaaggacaacagccagcccacgcccgacaacgtcctctccgccgtgaccccggagctgatcaacctggcgggggccggcatcccgcccatgagcacccgggaccagtacgccaccgtcaaccaccacgtgcacgaggcccgcatggagaacggccagcgcaagcaggacaacgtgctctccaacgtcctgagcgggctgatcaacatggccggcgcgtccatccccgccatgagctcccgggacctctacgccaccatcacgcacagcgtgcgcgaggagaagatggagtccgggaagccccagaccgacaaggtgatcagcaacgacgcgccccagctgggccacatggccgccgggggcatccccagcatgtccaccaaggacctgtacgccaccgtcacgcagaacgtgcacgaggagcggatggagaacaaccagccccagccgagctacgacctctccaccgtgctgcccggcctgacctacctcaccgtcgccgggatccccgccatgagcacgcgcgaccagtacgccaccgtgacccacaacgtgcacgaggagaagatcaagaacggccaggcggcctccgacaacgtcttcagcaccgtgcccccggccttcatcaacatggccgcgacgggggtgtccagcatgtccacccgggaccagtacgccgccgtcacccacaacatccgcgaggagaagatcaacaacagccagcccgcccccggcaacatcctgtccaccgcgccgccctggctgcggcacatggccgccgccgggatcagctccacgatcacccgcgacctctacgtgaccgccacccacagcgtgcacgaggagaagatgacgaacggccagcaggcccccgacaactccctgagcaccgtcccgcccggctgcatcaacctgtccggggcgggcatcagctgccggagcacccgcgacctctacgccaccgtgatccacgacatccaggaggaggagatggagaacgaccagacgccgcccgacgggttcctgtccaacagcgactcccccgagctgatcaacatgaccggccactgcatgccgcccaacgccctcgacagcttctcccacgacttcaccagcctgtccaaggacgagctgctctacaagcccgacagcaacgagttcgccgtggggaccaagaactactccgtcagcgccggcgacccgcccgtgacggtgatgtccctggtcgagaccgtgcccaacacgccccagatcagccccgcgatggccaagaagatcaacgacgacatcaagtaccagctgatgaaggaggtgcggcgcttcggccagaactacgagcggatcttcatcctgctcgaggaggtccaggggtccatgaaggtgaagcgccagttcgtggagttcaccatcaaggaggccgcccggttcaagaaggtcgtgctgatccagcagctggagaaggcgctcaaggagatcgacagccactgccacctccgcaaggtgaagcacatgcggaagcgctga

SEQ ID NO: 3376 - RNA, 2715 nt, synthetic construct
  misc_feature 1..2715: note = derived and/or modified sequence opt2 fromSAGE__Homo_sapiens__CCDS14652.1
  source 1..2715: mol_type = other RNA
atgcaggcctcccccctccagacctcccagcccaccccccccgaggagctccacgccgccgcctacgtcttcaccaacgacggccagcagatgcgctccgacgaggtcaacctcgtcgccaccggccaccagtccaagaagaagcactcccgcaagtccaagcgccactcctcctccaagcgccgcaagtccatgtcctcctggctcgacaagcaggaggacgccgccgtcacccactccatctgcgaggagcgcatcaacaacggccagcccgtcgccgacaacgtcctctccaccgcccccccctggcccgacgccaccatcgcccacaacatccgcgaggagcgcatggagaacggccagtcccgcaccgacaaggtcctctccaccgcccccccccagctcgtccacatggccgccgccggcatcccctccatgtccacccgcgacctccactccaccgtcacccacaacatccgcgaggagcgcatggagaacggccagccccagcccgacaacgtcctctccaccggccccaccggcctcatcaacatggccgccacccccatccccgccatgtccgcccgcgacctctacgccaccgtcacccacaacgtctgcgagcagaagatggagaacgtccagcccgcccccgacaacgtcctcctcaccctccgcccccgccgcatcaacatgaccgacaccggcatctcccccatgtccacccgcgacccctacgccaccatcacctacaacgtccccgaggagaagatggagaagggccagccccagcccgacaacatcctctccaccgcctccaccggcctcatcaacgtcgccggcgccggcacccccgccatctccaccaacggcctctactccaccgtcccccacaacgtctgcgaggagaagatggagaacgaccagccccagcccaacaacgtcctctccaccgtccagcccgtcatcatctacctcaccgccaccggcatccccggcatgaacacccgcgaccagtacgccaccatcacccacaacgtctgcgaggagcgcgtcgtcaacaaccagcccctcccctccaacgccctctccaccgtcctccccggcctcgcctacctcgccaccgccgacatgcccgccatgtccacccgcgaccagcacgccaccatcatccacaacctccgcgaggagaagaaggacaactcccagcccacccccgacaacgtcctctccgccgtcacccccgagctcatcaacctcgccggcgccggcatcccccccatgtccacccgcgaccagtacgccaccgtcaaccaccacgtccacgaggcccgcatggagaacggccagcgcaagcaggacaacgtcctctccaacgtcctctccggcctcatcaacatggccggcgcctccatccccgccatgtcctcccgcgacctctacgccaccatcacccactccgtccgcgaggagaagatggagtccggcaagccccagaccgacaaggtcatctccaacgacgccccccagctcggccacatggccgccggcggcatcccctccatgtccaccaaggacctctacgccaccgtcacccagaacgtccacgaggagcgcatggagaacaaccagccccagccctcctacgacctctccaccgtcctccccggcctcacctacctcaccgtcgccggcatccccgccatgtccacccgcgaccagtacgccaccgtcacccacaacgtccacgaggagaagatcaagaacggccaggccgcctccgacaacgtcttctccaccgtcccccccgccttcatcaacatggccgccaccggcgtctcctccatgtccacccgcgaccagtacgccgccgtcacccacaacatccgcgaggagaagatcaacaactcccagcccgcccccggcaacatcctctccaccgcccccccctggctccgccacatggccgccgccggcatctcctccaccatcacccgcgacctctacgtcaccgccacccactccgtccacgaggagaagatgaccaacggccagcaggcccccgacaactccctctccaccgtcccccccggctgcatcaacctctccggcgccggcatctcctgccgctccacccgcgacctctacgccaccgtcatccacgacatccaggaggaggagatggagaacgaccagaccccccccgacggcttcctctccaactccgactcccccgagctcatcaacatgaccggccactgcatgccccccaacgccctcgactccttctcccacgacttcacctccctctccaaggacgagctcctctacaagcccgactccaacgagttcgccgtcggcaccaagaactactccgtctccgccggcgacccccccgtcaccgtcatgtccctcgtcgagaccgtccccaacaccccccagatctcccccgccatggccaagaagatcaacgacgacatcaagtaccagctcatgaaggaggtccgccgcttcggccagaactacgagcgcatcttcatcctcctcgaggaggtccagggctccatgaaggtcaagcgccagttcgtcgagttcaccatcaaggaggccgcccgcttcaagaaggtcgtcctcatccagcagctcgagaaggccctcaaggagatcgactcccactgccacctccgcaaggtcaagcacatgcgcaagcgctga

SEQ ID NO: 3377 - RNA, 2715 nt, synthetic construct
  misc_feature 1..2715: note = derived and/or modified sequence opt3 fromSAGE__Homo_sapiens__CCDS14652.1
  source 1..2715: mol_type = other RNA
atgcaggccagccccctgcaaacctcccagcctacaccaccggaggaactccacgctgcagcctacgtgttcactaacgacggccagcagatgagatctgatgaggtcaatcttgttgcgacggggcatcaatcaaagaaaaagcacagtaggaaaagcaagcggcattcctcttcgaaacgccgaaagtcaatgagcagttggctggacaagcaggaagatgctgccgtgacccactccatctgcgaggaacgtattaacaatggacagcccgtagcagacaacgtgttgtctacagcccctccatggcccgatgctactatagcacataatatcagagaggagaggatggaaaacggtcagagccggaccgacaaagtcttatccacagcccctccacaactggtgcacatggctgccgcgggcattccctcaatgagtacccgcgatctacacagcactgttacacataatatcagagaggaaaggatggagaacgggcagcctcagccagacaatgtgctctctaccggaccgacgggcctgattaacatggcagccactcccatccctgctatgtccgcccgggatctttatgcaaccgtcacacacaatgtgtgtgagcagaagatggaaaacgtacaaccagctcccgacaatgttctgttgactctccgccctcgaagaataaacatgaccgatacaggtatctcaccaatgagcaccagggacccctacgccacgattacttataatgtgccggaggagaaaatggagaaggggcagcctcagcccgataacatcctgagtacagcgtctaccggactgattaacgtcgccggcgcaggcactccagctatctccacaaatgggctctacagcaccgtgcctcataacgtgtgcgaagagaaaatggagaatgaccaaccccagccaaacaatgtcttatcgacggttcagcccgtgataatttatctgaccgccacaggaatccctggtatgaacactcgggaccagtacgctaccattacacacaatgtatgtgaagaacgtgtggtcaacaatcaaccacttccgtctaacgccttgtccactgtgctgcccggcctagcatatctcgccaccgctgatatgcctgcgatgtcaacacgcgaccagcacgcaaccatcatccataatctgagagaagagaagaaggataacagtcagccaactcccgacaatgttcttagcgccgtgacgcctgaactgattaacttggctggggccggaataccacccatgtccacaagggatcagtacgcaaccgtcaatcaccatgtgcacgaggcccggatggagaacggccaacgaaaacaggacaacgtactctctaatgttctgagcggtttaatcaacatggctggggcctcaattccggcaatgagttcccgcgatctgtacgcgactatcacccatagcgtgagagaagagaagatggaatctggaaaacctcagacagacaaggtcatatcaaatgatgctccacagctcggccacatggccgcaggcgggattcccagtatgagcaccaaagacctttatgccactgtgacacaaaacgtccacgaggaaaggatggagaataaccagcctcagccctcctacgatctgtctacggtgttgccaggactaacctatctgactgttgctggtatccctgccatgtcgacacgggaccagtacgcaaccgtgacacataatgtacacgaggaaaagatcaaaaacggccaagctgccagcgacaatgtcttttccactgtgcccccagcgttcattaacatggccgctaccggggtttcaagtatgtctacgcgcgatcagtatgcagccgtgacccataatatcagagaggaaaagattaacaatagccagccggctcctggaaacatactctccacagcacccccatggctgaggcacatggccgcggccggcatctcaagcactattacccgtgacctttacgtcacagctactcactctgtgcatgaggagaagatgaccaatggtcaacaggcccccgataactccctgagtacggtacctccagggtgcatcaacttgagcggcgcaggaatctcttgtcggtccacacgagacctctatgctaccgtgattcacgatatacaggaagaggaaatggagaatgaccagactccccctgatggctttctgtcaaacagtgacagcccggaattaatcaatatgacagggcattgcatgccacccaacgccctggattcgttctcccacgactttacctctctaagcaaagatgagctcctgtacaagcctgactcaaatgagttcgcagttggaactaaaaactacagtgtctccgccggtgatccacccgtgaccgtgatgtctcttgtcgaaacagttcctaatacgccgcaaattagccccgctatggcgaagaaaatcaacgacgacattaagtatcagttgatgaaggaggtgagaaggtttggccagaattacgaacgcatcttcatactgctcgaggaagtgcaggggtccatgaaagtaaagcggcaatttgtcgagttcaccatcaaagaggccgcaagatttaagaaagtggttctgattcagcagcttgaaaaggctctgaaggagatcgattcacattgtcacttgaggaaagtgaagcacatgcgcaaacgatga

SEQ ID NO: 3378 - RNA, 2715 nt, synthetic construct
  misc_feature 1..2715: note = derived and/or modified sequence opt4 fromSAGE__Homo_sapiens__CCDS14652.1
  source 1..2715: mol_type = other RNA
atgcaggccagccccctgcagaccagccagcccaccccccccgaggagctgcacgccgccgcctacgtgttcaccaacgacggccagcagatgagaagcgacgaggtgaacctggtggccaccggccaccagagcaagaagaagcacagcagaaagagcaagagacacagcagcagcaagagaagaaagagcatgagcagctggctggacaagcaggaggacgccgccgtgacccacagcatctgcgaggagagaatcaacaacggccagcccgtggccgacaacgtgctgagcaccgcccccccctggcccgacgccaccatcgcccacaacatcagagaggagagaatggagaacggccagagcagaaccgacaaggtgctgagcaccgcccccccccagctggtgcacatggccgccgccggcatccccagcatgagcaccagagacctgcacagcaccgtgacccacaacatcagagaggagagaatggagaacggccagccccagcccgacaacgtgctgagcaccggccccaccggcctgatcaacatggccgccacccccatccccgccatgagcgccagagacctgtacgccaccgtgacccacaacgtgtgcgagcagaagatggagaacgtgcagcccgcccccgacaacgtgctgctgaccctgagacccagaagaatcaacatgaccgacaccggcatcagccccatgagcaccagagacccctacgccaccatcacctacaacgtgcccgaggagaagatggagaagggccagccccagcccgacaacatcctgagcaccgccagcaccggcctgatcaacgtggccggcgccggcacccccgccatcagcaccaacggcctgtacagcaccgtgccccacaacgtgtgcgaggagaagatggagaacgaccagccccagcccaacaacgtgctgagcaccgtgcagcccgtgatcatctacctgaccgccaccggcatccccggcatgaacaccagagaccagtacgccaccatcacccacaacgtgtgcgaggagagagtggtgaacaaccagcccctgcccagcaacgccctgagcaccgtgctgcccggcctggcctacctggccaccgccgacatgcccgccatgagcaccagagaccagcacgccaccatcatccacaacctgagagaggagaagaaggacaacagccagcccacccccgacaacgtgctgagcgccgtgacccccgagctgatcaacctggccggcgccggcatcccccccatgagcaccagagaccagtacgccaccgtgaaccaccacgtgcacgaggccagaatggagaacggccagagaaagcaggacaacgtgctgagcaacgtgctgagcggcctgatcaacatggccggcgccagcatccccgccatgagcagcagagacctgtacgccaccatcacccacagcgtgagagaggagaagatggagagcggcaagccccagaccgacaaggtgatcagcaacgacgccccccagctgggccacatggccgccggcggcatccccagcatgagcaccaaggacctgtacgccaccgtgacccagaacgtgcacgaggagagaatggagaacaaccagccccagcccagctacgacctgagcaccgtgctgcccggcctgacctacctgaccgtggccggcatccccgccatgagcaccagagaccagtacgccaccgtgacccacaacgtgcacgaggagaagatcaagaacggccaggccgccagcgacaacgtgttcagcaccgtgccccccgccttcatcaacatggccgccaccggcgtgagcagcatgagcaccagagaccagtacgccgccgtgacccacaacatcagagaggagaagatcaacaacagccagcccgcccccggcaacatcctgagcaccgcccccccctggctgagacacatggccgccgccggcatcagcagcaccatcaccagagacctgtacgtgaccgccacccacagcgtgcacgaggagaagatgaccaacggccagcaggcccccgacaacagcctgagcaccgtgccccccggctgcatcaacctgagcggcgccggcatcagctgcagaagcaccagagacctgtacgccaccgtgatccacgacatccaggaggaggagatggagaacgaccagaccccccccgacggcttcctgagcaacagcgacagccccgagctgatcaacatgaccggccactgcatgccccccaacgccctggacagcttcagccacgacttcaccagcctgagcaaggacgagctgctgtacaagcccgacagcaacgagttcgccgtgggcaccaagaactacagcgtgagcgccggcgacccccccgtgaccgtgatgagcctggtggagaccgtgcccaacaccccccagatcagccccgccatggccaagaagatcaacgacgacatcaagtaccagctgatgaaggaggtgagaagattcggccagaactacgagagaatcttcatcctgctggaggaggtgcagggcagcatgaaggtgaagagacagttcgtggagttcaccatcaaggaggccgccagattcaagaaggtggtgctgatccagcagctggagaaggccctgaaggagatcgacagccactgccacctgagaaaggtgaagcacatgagaaagagatga

SEQ ID NO: 3379 - RNA, 2715 nt, synthetic construct
  misc_feature 1..2715: note = derived and/or modified sequence opt5 fromSAGE__Homo_sapiens__CCDS14652.1
  source 1..2715: mol_type = other RNA
atgcaggccagccccctgcaaacctcccagcctacaccgcccgaggaactccacgctgccgcgtacgtgttcacgaacgacggccagcagatgagatctgatgaggtcaatctggttgctaccgggcaccaaagcaagaaaaagcactcccggaaatctaagcgccatagctcctctaaaagacggaaaagcatgtccagctggcttgacaagcaggaagatgccgccgtgacacactctatctgcgaggaacgcattaacaatggacagcctgtggctgacaacgtcctgtccaccgctcccccttggcccgatgccacaatcgcccataatattagagaggagcggatggaaaacggccagagccgcaccgacaaagtgctctctacagcgcctccgcaactggttcacatggccgctgccgggatcccctccatgagcaccagagatcttcactctacggtgacccataatattcgggaggaacgcatggagaacggacagcctcagcccgacaatgtcctgtccacaggccctaccgggctcatcaacatggctgccacacccatcccggcgatgagcgccagagatctgtatgctaccgtgacgcacaatgtttgtgagcagaagatggaaaacgtgcaacctgcccccgacaatgtcctgctcacactgcggcctcgcagaattaacatgaccgatacaggaatctcccccatgtctacccgggacccctacgctaccattacatataatgtgcctgaggaaaagatggagaagggccagccgcagcccgataacatccttagcacggcctccaccggcctgattaacgtggccggggctggaacccctgcgatcagcaccaatggcctctactctacagtcccccataacgtttgcgaagagaaaatggagaatgaccaacctcagcccaacaatgtgctgtccaccgtgcagccggtcattatctatcttacggccacagggatccctggaatgaacacccgcgaccagtacgctaccattacacacaatgtgtgtgaagagagagttgtgaacaatcaacccctgcctagcaacgccctctctaccgtcctgcccggcctggcctatctcgctacagccgatatgcctgcgatgagcacgcgggaccagcacgctaccatcattcataatctgagagaagagaagaaggataactcccagcccacaccggacaatgtgctttctgccgttacccctgaactgatcaacctcgccggggctggcattcctcccatgagcacacgcgatcagtacgccaccgtgaatcaccatgtccacgaggctcggatggagaacggacaaagaaaacaggacaacgtgctgtccaatgtccttagcggcctgatcaacatggccggggcgtctatccccgccatgtccagccgcgatctctacgctacgattacccattctgtgcgggaagagaagatggaatccggaaaaccgcagacagacaaggttatcagcaatgatgctccccagctgggccacatggccgccgggggcattccttccatgtctaccaaagacctgtatgcgacagtgacccaaaacgtccacgaggaaagaatggagaataaccagccccagcctagctacgatctctccacggtgctgcccggacttacatatctgaccgttgccgggatccctgctatgtctacacgcgaccagtacgccaccgtgacccataatgtccacgaggaaaagattaaaaacggacaagctgccagcgacaatgtgttttccacagtgcccccggccttcatcaacatggctgcgacgggcgttagctctatgtccacccgggatcagtatgccgctgtcacacataatatcagagaggaaaagattaacaatagccagcctgcccccggcaacatcctctctaccgcccctccctggctgcgccacatggctgccgcggggatttccagcacaatcacccgggacctttacgtgacggctacacactctgtgcatgaggagaagatgaccaatggacaacaggccccggataacagcctgtccaccgtccctcccggctgcattaacctcagcggggccggaatctcttgtagatccacacgcgacctgtatgctaccgtgattcacgatatccaggaagaggaaatggagaatgaccagacacctcccgatggctttctgagcaactccgactctcccgaactcatcaatatgacggggcattgcatgcctccgaacgccctggatagcttctcccacgactttacctctcttagcaaagatgagctgctctacaagcccgactccaatgagttcgcggttggcaccaaaaactactctgtgagcgctggagatcctcccgtcacagtgatgtccctggttgaaacagtgcctaatacaccccaaattagccctgccatggccaagaaaatcaacgacgacattaagtatcagctgatgaaggaggtccggagatttggccagaattacgaacggatcttcattcttctcgaggaagtgcaggggtctatgaaagttaagcgccaatttgtggagttcacgatcaaagaggctgccagatttaagaaagtcgtgctgatccagcagctggaaaaggctctcaaggagattgattcccattgtcatctgcggaaagtgaagcacatgagaaaacgctga

SEQ ID NO: 3380 - protein, 800 aa, synthetic construct
  REGION 1..800: note = SART-_1__Homo_sapiens__O43290
MGSSKKHRGEKEAAGTTAAAGTGGATEQPPRHREHKKHKHRSGGSGGSGGERRKRSRERGGERGSGRRGAEAEARSSTHGRERSQAEPSERRVKREKRDDGYEAAASSKTSSGDASSLSIEETNKLRAKLGLKPLEVNAIKKEAGTKEEPVTADVINPMALRQREELREKLAAAKEKRLLNQKLGKIKTLGEDDPWLDDTAAWIERSRQLQKEKDLAEKRAKLLEEMDQEFGVSTLVEEEFGQRRQDLYSARDLQGLTVEHAIDSFREGETMILTLKDKGVLQEEEDVLVNVNLVDKERAEKNVELRKKKPDYLPYAEDESVDDLAQQKPRSILSKYDEELEGERPHSFRLEQGGTADGLRERELEEIRAKLRLQAQSLSTVGPRLASEYLTPEEMVTFKKTKRRVKKIRKKEKEVVVRADDLLPLGDQTQDGDFGSRLRGRGRRRVSEVEEEKEPVPQPLPSDDTRVENMDISDEEEGGAPPPGSPQVLEEDEAELELQKQLEKGRRLRQLQQLQQLRDSGEKVVEIVKKLESRQRGWEEDEDPERKGAIVFNATSEFCRTLGEIPTYGLAGNREEQEELMDFERDEERSANGGSESDGEENIGWSTVNLDEEKQQQDFSASSTTILDEEPIVNRGLAAALLLCQNKGLLETTVQKVARVKAPNKSLPSAVYCIEDKMAIDDKYSRREEYRGFTQDFKEKDGYKPDVKIEYVDETGRKLTPKEAFRQLSHRFHGKGSGKMKTERRMKKLDEEALLKKMSSSDTPLGTVALLQEKQKAQKTPYIVLSGSGKSMNANTITK

SEQ ID NO: 3381 - RNA, 2403 nt, synthetic construct
  misc_feature 1..2403: note = SART-_1__Homo_sapiens__AAH01058
  source 1..2403: mol_type = other RNA
atggggtcgtccaagaagcatcgcggagagaaggaggcggccgggacgacggcggcggccggcaccgggggtgccaccgagcagccgccgcggcaccgggaacacaaaaaacacaagcaccggagtggcggcagtggcggtagcggtggcgaacgacggaagcggagccgggaacgtgggggcgagcgcgggagcgggcggcgcggggccgaagctgaggcccggagcagcacgcacgggcgggagcgcagccaggcagagccctccgagcggcgcgtgaagcgggagaagcgcgatgacggctacgaggccgctgccagctccaaaactagctcaggcgatgcctcctcactcagcatcgaggagactaacaaactccgggcaaagttggggctgaaacccttggaggttaatgccatcaagaaggaggcgggcaccaaggaggagcccgtgacagctgatgtcatcaaccctatggccttgcgacagcgagaggagctgcgggagaagctggcagctgccaaggagaagcgcctgctgaaccaaaagctggggaagataaagaccctaggagaggatgacccctggctggacgacactgcagcctggatcgagaggagccggcagctgcagaaggagaaggacctggcagagaagagggccaagttactggaggagatggaccaagagtttggtgtcagcactctggtggaggaggagttcgggcagaggcggcaggacctgtacagtgcccgggacctgcagggcctcaccgtggagcatgccattgattccttccgagaaggggagacaatgattcttaccctcaaggacaaaggcgtgctgcaggaggaggaggacgtgctggtgaacgtgaacctggtggataaggagcgggcagagaaaaatgtggagctgcggaagaagaagcctgactacctgccctatgccgaggacgagagcgtggacgacctggcgcagcaaaaacctcgctctatcctgtccaagtatgacgaagagcttgaaggggagcggccacattccttccgcttggagcagggcggcacggctgatggcctgcgggagcgggagctggaggagatccgggccaagctgcggctgcaggctcagtccctgagcacagtggggccccggctggcctccgaatacctcacgcctgaggagatggtgacctttaaaaagaccaagcggagggtgaagaaaatccgcaagaaggagaaggaggtagtagtgcgggcagatgacttgctgcctctcggggaccagactcaggatggggactttggttccagactgcggggacggggtcgccgccgagtgtccgaagtggaggaggagaaggagcctgtgcctcagcccctgccgtcggacgacacccgagtggagaacatggacatcagtgatgaggaggaaggtggagctccaccgccggggtccccgcaggtgctggaggaggacgaggcggagctggagctgcagaagcagctggagaagggacgccggctgcgacagttacagcagctacagcagctgcgagacagtggcgagaaggtggtggagattgtgaagaagctggagtctcgccagcggggctgggaggaggatgaggatcccgagcggaagggggccatcgtgttcaacgccacgtccgagttctgccgcaccttgggggagatccccacctacgggctggctggcaatcgcgaggagcaggaggagctcatggactttgaacgggatgaggagcgctcagccaacggtggctccgaatctgacggggaggagaacatcggctggagcacggtgaacctggacgaggagaagcagcagcaggatttctctgcttcctccaccaccatcctggacgaggaaccgatcgtgaatagggggctggcagctgccctgctcctgtgtcagaacaaagggctgctggagaccacagtgcagaaggtggcccgggtgaaggcccccaacaagtcgctgccctcagccgtgtactgcatcgaggataagatggccatcgatgacaagtacagccggagggaggaataccgaggcttcacacaggacttcaaggagaaggacggctacaaacccgacgttaagatcgaatacgtggatgagacgggccggaaactcacacccaaggaggctttccggcagctgtcgcaccgcttccatggcaagggctcaggcaagatgaagacagagcggcggatgaagaagctggacgaggaggcgctcctgaagaagatgagctccagcgacacgcccctgggcaccgtggccctgctccaggagaagcagaaggctcagaagaccccctacatcgtgctcagcggcagcggcaagagcatgaacgcgaacaccatcaccaagtga

SEQ ID NO: 3382 - RNA, 2403 nt, synthetic construct
  misc_feature 1..2403: note = derived and/or modified sequence opt1 fromSART-_1__Homo_sapiens__AAH01058
  source 1..2403: mol_type = other RNA
atgggcagctccaagaagcaccgcggggagaaggaggccgccggcaccaccgcggccgccgggacgggcggggccaccgagcagcccccgcggcaccgcgagcacaagaagcacaagcaccggagcggcggctccgggggcagcgggggcgagcgccggaagcgctcccgggagcgcgggggcgagcggggcagcgggcgccggggcgccgaggcggaggcccgctccagcacccacgggcgggagcgctcccaggccgagcccagcgagcggcgcgtgaagcgggagaagcgcgacgacggctacgaggccgcggcctccagcaagacctccagcggcgacgcctccagcctgtccatcgaggagacgaacaagctccgggccaagctggggctgaagcccctcgaggtcaacgccatcaagaaggaggcgggcaccaaggaggagcccgtgaccgccgacgtgatcaacccgatggccctgcgccagcgggaggagctgcgcgagaagctcgccgccgcgaaggagaagcgcctgctgaaccagaagctcgggaagatcaagaccctgggcgaggacgacccctggctggacgacacggccgcctggatcgagcggagccgccagctccagaaggagaaggacctggccgagaagcgggccaagctgctcgaggagatggaccaggagttcggggtctccaccctggtggaggaggagttcggccagcgccggcaggacctgtacagcgcgcgcgacctccagggcctgaccgtggagcacgccatcgacagcttccgggagggggagaccatgatcctgacgctcaaggacaagggcgtcctgcaggaggaggaggacgtgctggtgaacgtcaacctcgtggacaaggagcgcgccgagaagaacgtggagctgcggaagaagaagcccgactacctgccctacgccgaggacgagtccgtcgacgacctcgcccagcagaagccgcgcagcatcctgtccaagtacgacgaggagctggagggggagcggccccacagcttccgcctcgagcagggcgggaccgcggacggcctgcgggagcgcgagctggaggagatccgggccaagctccgcctgcaggcccagtccctgagcaccgtgggcccccggctcgcctccgagtacctgacccccgaggagatggtgacgttcaagaagaccaagcgccgggtcaagaagatccgcaagaaggagaaggaggtggtggtccgcgcggacgacctgctcccgctgggggaccagacccaggacggcgacttcgggagccggctgcgcggccgggggcgccggcgcgtgtccgaggtggaggaggagaaggagcccgtcccccagcccctcccgagcgacgacacccgggtggagaacatggacatctccgacgaggaggagggcggcgccccgccgcccgggagcccccaggtgctggaggaggacgaggccgagctggagctccagaagcagctggagaagggccgccggctgcgccagctccagcagctgcagcagctgcgggactccggggagaaggtcgtggagatcgtcaagaagctggagagccgccagcggggctgggaggaggacgaggaccccgagcgcaagggcgccatcgtgttcaacgccacgtccgagttctgccggaccctcggggagatccccacctacggcctggcggggaaccgcgaggagcaggaggagctgatggacttcgagcgggacgaggagcgcagcgccaacggcgggtccgagagcgacggcgaggagaacatcggctggtccaccgtgaacctcgacgaggagaagcagcagcaggacttcagcgccagctccacgaccatcctggacgaggagcccatcgtcaaccgggggctggccgccgcgctcctgctgtgccagaacaagggcctcctggagaccaccgtgcagaaggtggcccgcgtcaaggcccccaacaagagcctgccctccgccgtgtactgcatcgaggacaagatggccatcgacgacaagtacagccggcgcgaggagtaccgcgggttcacgcaggacttcaaggagaaggacggctacaagcccgacgtgaagatcgagtacgtcgacgagaccgggcggaagctcacccccaaggaggcgttccgccagctgtcccaccggttccacggcaagggcagcgggaagatgaagaccgagcgccggatgaagaagctggacgaggaggccctcctgaagaagatgtccagctccgacacgccgctgggcaccgtggccctcctgcaggagaagcagaaggcccagaagaccccctacatcgtgctgagcgggtccggcaagagcatgaacgcgaacaccatcacgaagtga

SEQ ID NO: 3383 - RNA, 2403 nt, synthetic construct
  misc_feature 1..2403: note = derived and/or modified sequence opt2 fromSART-_1__Homo_sapiens__AAH01058
  source 1..2403: mol_type = other RNA
atgggctcctccaagaagcaccgcggcgagaaggaggccgccggcaccaccgccgccgccggcaccggcggcgccaccgagcagcccccccgccaccgcgagcacaagaagcacaagcaccgctccggcggctccggcggctccggcggcgagcgccgcaagcgctcccgcgagcgcggcggcgagcgcggctccggccgccgcggcgccgaggccgaggcccgctcctccacccacggccgcgagcgctcccaggccgagccctccgagcgccgcgtcaagcgcgagaagcgcgacgacggctacgaggccgccgcctcctccaagacctcctccggcgacgcctcctccctctccatcgaggagaccaacaagctccgcgccaagctcggcctcaagcccctcgaggtcaacgccatcaagaaggaggccggcaccaaggaggagcccgtcaccgccgacgtcatcaaccccatggccctccgccagcgcgaggagctccgcgagaagctcgccgccgccaaggagaagcgcctcctcaaccagaagctcggcaagatcaagaccctcggcgaggacgacccctggctcgacgacaccgccgcctggatcgagcgctcccgccagctccagaaggagaaggacctcgccgagaagcgcgccaagctcctcgaggagatggaccaggagttcggcgtctccaccctcgtcgaggaggagttcggccagcgccgccaggacctctactccgcccgcgacctccagggcctcaccgtcgagcacgccatcgactccttccgcgagggcgagaccatgatcctcaccctcaaggacaagggcgtcctccaggaggaggaggacgtcctcgtcaacgtcaacctcgtcgacaaggagcgcgccgagaagaacgtcgagctccgcaagaagaagcccgactacctcccctacgccgaggacgagtccgtcgacgacctcgcccagcagaagccccgctccatcctctccaagtacgacgaggagctcgagggcgagcgcccccactccttccgcctcgagcagggcggcaccgccgacggcctccgcgagcgcgagctcgaggagatccgcgccaagctccgcctccaggcccagtccctctccaccgtcggcccccgcctcgcctccgagtacctcacccccgaggagatggtcaccttcaagaagaccaagcgccgcgtcaagaagatccgcaagaaggagaaggaggtcgtcgtccgcgccgacgacctcctccccctcggcgaccagacccaggacggcgacttcggctcccgcctccgcggccgcggccgccgccgcgtctccgaggtcgaggaggagaaggagcccgtcccccagcccctcccctccgacgacacccgcgtcgagaacatggacatctccgacgaggaggagggcggcgcccccccccccggctccccccaggtcctcgaggaggacgaggccgagctcgagctccagaagcagctcgagaagggccgccgcctccgccagctccagcagctccagcagctccgcgactccggcgagaaggtcgtcgagatcgtcaagaagctcgagtcccgccagcgcggctgggaggaggacgaggaccccgagcgcaagggcgccatcgtcttcaacgccacctccgagttctgccgcaccctcggcgagatccccacctacggcctcgccggcaaccgcgaggagcaggaggagctcatggacttcgagcgcgacgaggagcgctccgccaacggcggctccgagtccgacggcgaggagaacatcggctggtccaccgtcaacctcgacgaggagaagcagcagcaggacttctccgcctcctccaccaccatcctcgacgaggagcccatcgtcaaccgcggcctcgccgccgccctcctcctctgccagaacaagggcctcctcgagaccaccgtccagaaggtcgcccgcgtcaaggcccccaacaagtccctcccctccgccgtctactgcatcgaggacaagatggccatcgacgacaagtactcccgccgcgaggagtaccgcggcttcacccaggacttcaaggagaaggacggctacaagcccgacgtcaagatcgagtacgtcgacgagaccggccgcaagctcacccccaaggaggccttccgccagctctcccaccgcttccacggcaagggctccggcaagatgaagaccgagcgccgcatgaagaagctcgacgaggaggccctcctcaagaagatgtcctcctccgacacccccctcggcaccgtcgccctcctccaggagaagcagaaggcccagaagaccccctacatcgtcctctccggctccggcaagtccatgaacgccaacaccatcaccaagtga

SEQ ID NO: 3384 - RNA, 2403 nt, synthetic construct
  misc_feature 1..2403: note = derived and/or modified sequence opt3 fromSART-_1__Homo_sapiens__AAH01058
  source 1..2403: mol_type = other RNA
atgggcagctccaagaaacacagaggggagaaggaagccgctggaaccacagcagccgcgggtactggcggggctacggagcagccccctaggcatcgggaacacaaaaagcataaacaccgctctggaggctcaggtgggagtggaggcgagcgacgtaagagaagcagggaacggggcggggagcgcggatccggtagaaggggcgccgaggcagaagcccggtcttcgacccatgggcgcgagcgatcacaagctgaaccaagcgagagaagggtgaagcgggagaaacgtgacgatggatacgaagcagccgctagttccaagacatctagcggcgacgcctcctcactgagtatcgaggaaactaacaaactccgcgcgaaacttggtctgaaaccgttggaggtcaatgcaattaagaaggaagccgggaccaaagaggagcccgttacagctgatgtgataaaccctatggccttaagacagagggaagaactgcgggaaaagctagcagctgccaaagagaagcgactcctgaatcagaaacttggaaagatcaaaaccctgggcgaagacgatccatggttggacgatactgcggcctggattgagcgcagcagacagctccaaaaggagaaggacctggcagaaaagagggctaagctgctcgaggaaatggatcaggagttcggcgtatctacattagtggaagaggagtttgggcagcggcgccaggacctgtattccgccagagatcttcaaggattgaccgtcgaacacgctatcgactcattcagggagggtgaaacgatgattctgactctaaaagataagggcgtgctccaggaggaggaagacgttctggtgaacgtcaatcttgtggacaaagagcgtgccgaaaagaacgtagagctgcggaagaaaaagcccgattacttgccttatgcagaagacgagagcgttgatgacctcgcccagcagaaaccacgaagtatcctgtctaagtacgatgaggaattagagggggaaagaccccactcctttaggctggagcaaggaggcaccgctgacggtctccgcgaacgggagcttgaggaaataagagcgaaactgaggttgcaggcacagagcctatcgacagtggggcctcgcctggcctctgagtatctcactccagaagagatggtcaccttcaagaagacaaaacgacgggtgaagaaaatccgtaagaaagaaaaggaggtggtcgttagagctgatgacctgcttccgctgggcgatcaaacccaggacggagattttggctccaggttgcgcgggcggggaagaaggcgagtgtcagaggtagaagaggaaaaggagcccgtgcctcagccactccccagtgacgacacgcgcgtcgagaatatggatattagcgacgaagaggaaggtggcgcccctccacccgggtcccctcaggtgctggaggaagatgaggcagagttagaactgcaaaaacagctagagaagggacggagactcaggcagctgcagcaacttcagcagttgcgtgactctggcgaaaaagttgtggagatcgtcaagaaactggaaagccgccagcggggttgggaggaggatgaagacccggagagaaagggggccattgtgttcaacgctacttcagaattttgcaggacactcggcgagatccccacctacggactggccggcaatcgagaagaacaagaggaacttatggatttcgagcgggacgaggagcgcagtgcaaacgggggatccgagagcgatggtgaagagaatataggctggtctactgtaaacctggacgaagagaaacagcagcaggatttttcagcgagtagcacaaccattttggacgaggagccaatcgttaatagagggctcgctgccgcactgttactgtgtcaaaacaagggactactcgagacgaccgtgcagaaggtcgccagggtgaaagctcctaataagtccctgccctctgccgtctattgcattgaagataaaatggcaatcgacgacaagtactcgcggcgagaggaatacagaggcttcacacaggattttaaagagaaggacggttataagccagatgtgaaaatcgaatacgttgacgagactgggcgcaaacttacccccaaggaggctttcaggcaattgagccatcgttttcacggcaagggatccggcaaaatgaagacagaacggagaatgaagaaactggatgaggaagccctcctgaagaaaatgtcaagttctgacactcctttagggaccgtggcgctgcttcaggagaagcagaaagcccagaagacaccatatattgtattgagcggatccggcaagtcaatgaacgctaacaccataactaaatga

SEQ ID NO: 3385 - RNA, 2403 nt, synthetic construct
  misc_feature 1..2403: note = derived and/or modified sequence opt4 fromSART-_1__Homo_sapiens__AAH01058
  source 1..2403: mol_type = other RNA
atgggcagcagcaagaagcacagaggcgagaaggaggccgccggcaccaccgccgccgccggcaccggcggcgccaccgagcagccccccagacacagagagcacaagaagcacaagcacagaagcggcggcagcggcggcagcggcggcgagagaagaaagagaagcagagagagaggcggcgagagaggcagcggcagaagaggcgccgaggccgaggccagaagcagcacccacggcagagagagaagccaggccgagcccagcgagagaagagtgaagagagagaagagagacgacggctacgaggccgccgccagcagcaagaccagcagcggcgacgccagcagcctgagcatcgaggagaccaacaagctgagagccaagctgggcctgaagcccctggaggtgaacgccatcaagaaggaggccggcaccaaggaggagcccgtgaccgccgacgtgatcaaccccatggccctgagacagagagaggagctgagagagaagctggccgccgccaaggagaagagactgctgaaccagaagctgggcaagatcaagaccctgggcgaggacgacccctggctggacgacaccgccgcctggatcgagagaagcagacagctgcagaaggagaaggacctggccgagaagagagccaagctgctggaggagatggaccaggagttcggcgtgagcaccctggtggaggaggagttcggccagagaagacaggacctgtacagcgccagagacctgcagggcctgaccgtggagcacgccatcgacagcttcagagagggcgagaccatgatcctgaccctgaaggacaagggcgtgctgcaggaggaggaggacgtgctggtgaacgtgaacctggtggacaaggagagagccgagaagaacgtggagctgagaaagaagaagcccgactacctgccctacgccgaggacgagagcgtggacgacctggcccagcagaagcccagaagcatcctgagcaagtacgacgaggagctggagggcgagagaccccacagcttcagactggagcagggcggcaccgccgacggcctgagagagagagagctggaggagatcagagccaagctgagactgcaggcccagagcctgagcaccgtgggccccagactggccagcgagtacctgacccccgaggagatggtgaccttcaagaagaccaagagaagagtgaagaagatcagaaagaaggagaaggaggtggtggtgagagccgacgacctgctgcccctgggcgaccagacccaggacggcgacttcggcagcagactgagaggcagaggcagaagaagagtgagcgaggtggaggaggagaaggagcccgtgccccagcccctgcccagcgacgacaccagagtggagaacatggacatcagcgacgaggaggagggcggcgcccccccccccggcagcccccaggtgctggaggaggacgaggccgagctggagctgcagaagcagctggagaagggcagaagactgagacagctgcagcagctgcagcagctgagagacagcggcgagaaggtggtggagatcgtgaagaagctggagagcagacagagaggctgggaggaggacgaggaccccgagagaaagggcgccatcgtgttcaacgccaccagcgagttctgcagaaccctgggcgagatccccacctacggcctggccggcaacagagaggagcaggaggagctgatggacttcgagagagacgaggagagaagcgccaacggcggcagcgagagcgacggcgaggagaacatcggctggagcaccgtgaacctggacgaggagaagcagcagcaggacttcagcgccagcagcaccaccatcctggacgaggagcccatcgtgaacagaggcctggccgccgccctgctgctgtgccagaacaagggcctgctggagaccaccgtgcagaaggtggccagagtgaaggcccccaacaagagcctgcccagcgccgtgtactgcatcgaggacaagatggccatcgacgacaagtacagcagaagagaggagtacagaggcttcacccaggacttcaaggagaaggacggctacaagcccgacgtgaagatcgagtacgtggacgagaccggcagaaagctgacccccaaggaggccttcagacagctgagccacagattccacggcaagggcagcggcaagatgaagaccgagagaagaatgaagaagctggacgaggaggccctgctgaagaagatgagcagcagcgacacccccctgggcaccgtggccctgctgcaggagaagcagaaggcccagaagaccccctacatcgtgctgagcggcagcggcaagagcatgaacgccaacaccatcaccaagtga

SEQ ID NO: 3386 - RNA, 2403 nt, synthetic construct
  misc_feature 1..2403: note = derived and/or modified sequence opt5 fromSART-_1__Homo_sapiens__AAH01058
  source 1..2403: mol_type = other RNA
atgggcagctccaagaaacacagaggggagaaggaagccgctggaaccacagccgcggctggcaccgggggagccacggagcagccccctcggcatcgcgaacacaaaaagcataaacacagatctggcgggagcggaggctccggcggggagcggcgcaagagatctcgggaacgcggaggcgagagagggagcggacggcgcggcgccgaggctgaagccagatcctctacacatgggcgggagcgcagccaagctgaaccgtccgagagacgggtgaagcgcgagaaaagagacgatggatacgaagccgcggccagctctaagacctccagcggcgacgcttcttccctgagcatcgaggaaacaaacaaactccgggccaagctgggccttaaacccctggaggtcaatgctattaagaaggaagccgggaccaaagaggagcctgttacagcggatgtgatcaaccccatggccctcagacagcgcgaagaactgcgggaaaaacttgctgccgctaaagagaagagactgctcaatcagaaactgggaaagattaaaaccctgggcgaagacgatccttggctcgacgatacggccgcctggatcgagcgctctcggcagctgcaaaaggagaaggaccttgctgaaaagagagcgaagctgctcgaggaaatggatcaggagttcggggtgtccaccctggtcgaagaggagtttggacagcgccggcaggacctttatagcgccagagatctgcaaggcctcacagtggaacacgctattgactccttccgcgagggggaaaccatgatcctgacactgaaagataagggagttctccaggaggaggaagacgtgctggtcaacgtgaatcttgttgacaaagagcgggccgaaaagaacgtggagctgagaaagaaaaagcccgattacctcccttatgccgaagacgagtctgtcgatgacctggctcagcagaaaccgcgcagcatcctttccaagtacgatgaggaactggagggcgaacggccccacagctttagactcgagcaaggcgggaccgccgacggactgcgggaacgcgagctggaggaaattagagcgaaactccggctgcaggctcagtctctttccacggtgggccctagactggccagcgagtatctcacacccgaagagatggtgaccttcaagaagacaaaacgccgggtcaagaaaatcagaaagaaagaaaaggaggttgtggtgcgcgccgatgacctgcttcctctgggggatcaaacccaggacggagattttggctctagactccgggggcgcggcagacggcgcgtcagcgaggtggaagaggaaaaggagcccgttccgcagcctctgccctccgacgacaccagagtggagaatatggatatttctgacgaagaggaaggaggcgctcctcctcccgggagcccccaggtcctggaggaagatgaggccgagctcgaactgcaaaaacagcttgagaagggacggcgcctgagacagctccagcaactgcagcagctgcgggactccggcgaaaaagtggttgagatcgtgaagaaacttgaaagccgccagagagggtgggaggaggatgaagacccggagcggaagggagctattgtcttcaacgccacatctgaattttgcagaacgctcggcgagatccccacctacgggctggcgggcaatcgcgaggagcaagaggaactgatggatttcgagcgggacgaagagagatccgccaacggaggcagcgagtctgatggggaagagaatattggatggtccacagtgaacctcgacgaagagaaacagcagcaggattttagcgcttcctctaccacaatcctggacgaggaacctatcgtcaatcgcggccttgccgctgccctgctcctgtgtcaaaacaaggggctgcttgagaccacggtgcagaaggttgcgcgggtgaaagcccccaataagagcctcccttccgctgtctattgcattgaagataaaatggccatcgacgacaagtactctagacgcgaggaataccggggattcacacaggattttaaagagaaggacggctataagcccgatgtgaaaattgaatacgttgacgagaccgggagaaagctgaccccgaaagaggctttccgccaactgagccatcggtttcacggcaagggatccggcaaaatgaagacagaaagacggatgaagaaactcgatgaggaagccctgcttaagaaaatgtctagctccgacacccctctggggacagtggccctcctgcaggagaagcagaaagctcagaagacgccctatatcgtcctgagcggatctggcaagtccatgaacgcgaacaccattacaaaatga

SEQ ID NO: 3387 - protein, 958 aa, synthetic construct [sequence omitted]

SEQ ID NO: 3388 - RNA, 2877 nt, synthetic construct
  misc_feature 1..2877: note = SART-2__Homo_sapiens__AAF00087
  source 1..2877: mol_type = other RNA
atgaggactcacacacggggggctcccagtgtgtttttcatatatttgctttgctttgtgtcagcctacatcaccgacgagaacccagaagttatgattcccttcaccaatgccaactacgacagccatcccatgctgtacttctccagggcagaagtggcggagctgcagctcagggctgccagctcgcacgagcacattgcagcccgcctcacggaggctgtgcacacgatgctgtccagccccttggaatacctccctccctgggatcccaaggactacagtgcccgctggaatgaaatttttggaaacaacttgggtgccttggcaatgttctgtgtgctgtatcctgagaacattgaagcccgagacatggccaaagactacatggagaggatggcagcgcagcctagttggttggtgaaagatgctccttgggatgaggtcccgcttgctcactccctggttggttttgccactgcttatgacttcttgtacaactacctgagcaagacacaacaggagaagtttcttgaagtgattgccaatgcctcagggtatatgtatgaaacttcatacaggagaggatggggatttcaatacctgcacaatcatcagcccaccaactgtatggctttgctcacgggaagcctagtcctgatgaatcaaggatatcttcaagaagcctacttatggaccaaacaagttctgaccatcatggagaaatctctggtcttgctcagggaggtgacggatggctccctctatgaaggagttgcgtatggcagctacaccactagatcactcttccaatacatgtttctcgtccagaggcacttcaacatcaaccactttggccatccgtggcttaaacaacactttgcatttatgtatagaaccatcctgccagggtttcaaaggactgtggctattgcggactcaaattacaactggttttatggtccagaaagccaattagtgttccttgataaatttgtcatgcgtaatggcagtggtaactggctagctgaccaaatcagaaggaaccgtgtggtggaaggtccaggaacaccatccaaagggcagcgctggtgcactctgcacacagaatttctctggtatgatggcagcttgaaatcggttcctcctccagactttggcacccctacactgcattattttgaagactggggtgtcgtgacttatggaagtgcactacctgcagaaatcaatagatctttcctttccttcaagtctggaaaactggggggacgtgcaatatatgacattgtccacagaaacaaatacaaagattggatcaaaggatggagaaattttaatgcagggcatgaacatcctgatcaaaactcatttacttttgctcccaatggtgtgcctttcattactgaggctctgtacgggccaaagtacaccttcttcaacaatgttttgatgttttccccagctgtgtcaaagagctgcttttctccctgggtgggtcaggtcacagaagactgctcatcaaaatggtctaaatacaagcatgacctggcagctagttgtcaggggagggtggttgcagcagaggagaaaaatggggtggttttcatccgaggagaaggtgtgggagcttataacccccagctcaacctgaagaatgttcagaggaatctcatcctcctacatccacagctgcttctccttgtagaccaaatacacctgggagaggagagtcccttggagacagcagcgagcttcttccataatgtggatgttccttttgaggagactgtggtagatggtgtccatggggctttcatcaggcagagagatggtctctataaaatgtactggatggacgatactggctacagcgagaaagcaacctttgcctcagtgacatatcctcggggctatccctacaacgggacaaactatgtgaatgtcaccatgcacctccgaagtcccatcaccagggcagcttacctcttcatagggccatctatagatgttcagagcttcactgtccacggagactctcagcaactggatgtgttcatagccaccagcaaacatgcctacgccacatacctgtggacaggtgaggccacaggacagtctgcctttgcacaggtcattgctgatcgtcacaaaattctgtttgaccggaattcagccatcaagagcagcattgtccctgaggtgaaggactatgctgctattgtggaacagaacttgcagcattttaaaccagtgtttcagctgctggagaagcagatactgtcccgagtccggaacacagctagctttaggaagactgctgaacgcctgctgagattttcagataagagacagactgaggaggccattgacaggatttttgccatatcacagcaacagcagcagcaaagcaagtcaaagaaaaaccgaagggcaggcaaacgctataaatttgtggatgctgtccctgatatttttgcacagattgaagtcaatgagaaaaagattagacagaaagctcagattttggcacagaaagaactacccatagatgaagatgaagaaatgaaagaccttttagattttgcagatgtaacatacgagaaacataaaaatgggggcttgattaaaggccggtttggacaggcacggatggtgacaactacacacagcagggccccatcactgtctgcttcctataccaggttgttcctgattctgaacattgctattttctttgtcatgttggcaatgcaactgacttatttccagagggcccagagcctacatggccaaagatgtctttatgcagttcttctcatagatagctgtattttattatggttgtactcttcttgttcccaatcacagtgttag

SEQ ID NO: 3389 - RNA, 2877 nt, synthetic construct
  misc_feature 1..2877: note = derived and/or modified sequence opt1 fromSART-2__Homo_sapiens__AAF00087
  source 1..2877: mol_type = other RNA
atgcgcacccacacccggggcgcccccagcgtgttcttcatctacctgctctgcttcgtctccgcctacatcacggacgagaacccggaggtgatgatccccttcaccaacgcgaactacgacagccaccccatgctgtacttctcccgcgccgaggtggccgagctgcagctccgggccgccagctcccacgagcacatcgcggcccgcctgaccgaggccgtccacaccatgctgagcagccccctcgagtacctgccgccctgggaccccaaggactactccgcccggtggaacgagatcttcgggaacaacctgggcgcgctcgccatgttctgcgtgctgtaccccgagaacatcgaggcccgcgacatggccaaggactacatggagcggatggccgcgcagccgtcctggctggtgaaggacgccccctgggacgaggtccccctcgcccacagcctggtggggttcgccacggcctacgacttcctgtacaactacctctccaagacccagcaggagaagttcctggaggtgatcgcgaacgccagcggctacatgtacgagacctcctaccgccgggggtggggcttccagtacctgcacaaccaccagcccaccaactgcatggccctcctgacgggcagcctggtcctcatgaaccaggggtacctgcaggaggcctacctgtggaccaagcaggtcctcaccatcatggagaagtccctggtgctgctccgcgaggtgaccgacggcagcctgtacgagggggtggcctacggctcctacacgacccggagcctgttccagtacatgttcctcgtgcagcgccacttcaacatcaaccacttcgggcacccgtggctgaagcagcacttcgcgttcatgtaccggaccatcctgcccggcttccagcgcaccgtcgccatcgccgactccaactacaactggttctacggccccgagagccagctcgtgttcctggacaagttcgtgatgcggaacgggagcggcaactggctggccgaccagatccgccggaaccgcgtcgtggaggggcccggcacgccgtccaagggccagcggtggtgcaccctccacaccgagttcctgtggtacgacgggagcctgaagtccgtgcccccgcccgacttcggcacccccacgctccactacttcgaggactggggcgtcgtgacctacgggagcgccctgcccgcggagatcaaccgctccttcctgagcttcaagtccgggaagctcggcggccgggccatctacgacatcgtgcaccgcaacaagtacaaggactggatcaaggggtggcgcaacttcaacgccggccacgagcaccccgaccagaacagcttcaccttcgcccccaacggggtcccgttcatcaccgaggcgctgtacggccccaagtacacgttcttcaacaacgtgctgatgttctcccccgccgtcagcaagtcctgcttcagcccctgggtgggccaggtgaccgaggactgctccagcaagtggtccaagtacaagcacgacctcgccgccagctgccaggggcgggtcgtggccgcggaggagaagaacggcgtggtcttcatccgcggggagggcgtgggggcctacaacccgcagctgaacctgaagaacgtgcagcggaacctcatcctgctgcacccccagctgctcctgctggtcgaccagatccacctcggcgaggagagccccctggagaccgccgcctccttcttccacaacgtggacgtgccgttcgaggagaccgtcgtggacggggtgcacggcgccttcatccgccagcgggacggcctgtacaagatgtactggatggacgacacggggtactccgagaaggcgaccttcgccagcgtcacctacccccgcggctacccctacaacgggaccaactacgtgaacgtgacgatgcacctccggagccccatcacccgcgccgcctacctgttcatcggcccgtccatcgacgtccagagcttcaccgtgcacggcgactcccagcagctggacgtgttcatcgccaccagcaagcacgcgtacgccacgtacctctggaccggggaggccaccggccagtccgccttcgcgcaggtcatcgccgaccggcacaagatcctgttcgaccgcaacagcgccatcaagtccagcatcgtgcccgaggtgaaggactacgccgccatcgtcgagcagaacctgcagcacttcaagcccgtgttccagctcctggagaagcagatcctgtcccgggtgcgcaacaccgcgagcttccggaagaccgccgagcgcctcctgcggttctccgacaagcgccagacggaggaggccatcgaccggatcttcgccatcagccagcagcagcagcagcagtccaagagcaagaagaaccgccgggccgggaagcgctacaagttcgtcgacgcggtgcccgacatcttcgcccagatcgaggtgaacgagaagaagatccgccagaaggcccagatcctggcccagaaggagctcccgatcgacgaggacgaggagatgaaggacctgctggacttcgccgacgtcacctacgagaagcacaagaacggcgggctcatcaagggccggttcggccaggcgcgcatggtgaccaccacgcactcccgggcccccagcctgtccgccagctacacccgcctgttcctcatcctgaacatcgccatcttcttcgtgatgctggcgatgcagctcacctacttccagcgggcccagagcctgcacgggcagcgctgcctgtacgccgtcctcctgatcgactcctgcatcctgctctggctgtacagctcctgcagccagtcccagtgctga

SEQ ID NO: 3390 - RNA, 2877 nt, synthetic construct
  misc_feature 1..2877: note = derived and/or modified sequence opt2 fromSART-2__Homo_sapiens__AAF00087
  source 1..2877: mol_type = other RNA
atgcgcacccacacccgcggcgccccctccgtcttcttcatctacctcctctgcttcgtctccgcctacatcaccgacgagaaccccgaggtcatgatccccttcaccaacgccaactacgactcccaccccatgctctacttctcccgcgccgaggtcgccgagctccagctccgcgccgcctcctcccacgagcacatcgccgcccgcctcaccgaggccgtccacaccatgctctcctcccccctcgagtacctccccccctgggaccccaaggactactccgcccgctggaacgagatcttcggcaacaacctcggcgccctcgccatgttctgcgtcctctaccccgagaacatcgaggcccgcgacatggccaaggactacatggagcgcatggccgcccagccctcctggctcgtcaaggacgccccctgggacgaggtccccctcgcccactccctcgtcggcttcgccaccgcctacgacttcctctacaactacctctccaagacccagcaggagaagttcctcgaggtcatcgccaacgcctccggctacatgtacgagacctcctaccgccgcggctggggcttccagtacctccacaaccaccagcccaccaactgcatggccctcctcaccggctccctcgtcctcatgaaccagggctacctccaggaggcctacctctggaccaagcaggtcctcaccatcatggagaagtccctcgtcctcctccgcgaggtcaccgacggctccctctacgagggcgtcgcctacggctcctacaccacccgctccctcttccagtacatgttcctcgtccagcgccacttcaacatcaaccacttcggccacccctggctcaagcagcacttcgccttcatgtaccgcaccatcctccccggcttccagcgcaccgtcgccatcgccgactccaactacaactggttctacggccccgagtcccagctcgtcttcctcgacaagttcgtcatgcgcaacggctccggcaactggctcgccgaccagatccgccgcaaccgcgtcgtcgagggccccggcaccccctccaagggccagcgctggtgcaccctccacaccgagttcctctggtacgacggctccctcaagtccgtccccccccccgacttcggcacccccaccctccactacttcgaggactggggcgtcgtcacctacggctccgccctccccgccgagatcaaccgctccttcctctccttcaagtccggcaagctcggcggccgcgccatctacgacatcgtccaccgcaacaagtacaaggactggatcaagggctggcgcaacttcaacgccggccacgagcaccccgaccagaactccttcaccttcgcccccaacggcgtccccttcatcaccgaggccctctacggccccaagtacaccttcttcaacaacgtcctcatgttctcccccgccgtctccaagtcctgcttctccccctgggtcggccaggtcaccgaggactgctcctccaagtggtccaagtacaagcacgacctcgccgcctcctgccagggccgcgtcgtcgccgccgaggagaagaacggcgtcgtcttcatccgcggcgagggcgtcggcgcctacaacccccagctcaacctcaagaacgtccagcgcaacctcatcctcctccacccccagctcctcctcctcgtcgaccagatccacctcggcgaggagtcccccctcgagaccgccgcctccttcttccacaacgtcgacgtccccttcgaggagaccgtcgtcgacggcgtccacggcgccttcatccgccagcgcgacggcctctacaagatgtactggatggacgacaccggctactccgagaaggccaccttcgcctccgtcacctacccccgcggctacccctacaacggcaccaactacgtcaacgtcaccatgcacctccgctcccccatcacccgcgccgcctacctcttcatcggcccctccatcgacgtccagtccttcaccgtccacggcgactcccagcagctcgacgtcttcatcgccacctccaagcacgcctacgccacctacctctggaccggcgaggccaccggccagtccgccttcgcccaggtcatcgccgaccgccacaagatcctcttcgaccgcaactccgccatcaagtcctccatcgtccccgaggtcaaggactacgccgccatcgtcgagcagaacctccagcacttcaagcccgtcttccagctcctcgagaagcagatcctctcccgcgtccgcaacaccgcctccttccgcaagaccgccgagcgcctcctccgcttctccgacaagcgccagaccgaggaggccatcgaccgcatcttcgccatctcccagcagcagcagcagcagtccaagtccaagaagaaccgccgcgccggcaagcgctacaagttcgtcgacgccgtccccgacatcttcgcccagatcgaggtcaacgagaagaagatccgccagaaggcccagatcctcgcccagaaggagctccccatcgacgaggacgaggagatgaaggacctcctcgacttcgccgacgtcacctacgagaagcacaagaacggcggcctcatcaagggccgcttcggccaggcccgcatggtcaccaccacccactcccgcgccccctccctctccgcctcctacacccgcctcttcctcatcctcaacatcgccatcttcttcgtcatgctcgccatgcagctcacctacttccagcgcgcccagtccctccacggccagcgctgcctctacgccgtcctcctcatcgactcctgcatcctcctctggctctactcctcctgctcccagtcccagtgctga

SEQ ID NO: 3391 - RNA, 2877 nt, synthetic construct
  misc_feature 1..2877: note = derived and/or modified sequence opt3 fromSART-2__Homo_sapiens__AAF00087
  source 1..2877: mol_type = other RNA
atgagaacccacacaaggggcgcccccagcgtgttctttatctacctgctctgcttcgtctccgcttatattactgacgagaaccctgaagttatgataccatttacgaatgcaaactacgattctcatccgatgctttatttctcacgggccgaggtggcggaactgcagttgcgcgctgccagtagccacgagcatatcgcagcccgattaaccgaagctgtacacacaatgctgtcctctcccctagagtacctccctccatgggaccccaaggattattcggcacgttggaatgagatttttgggaacaatctgggagcccttgctatgttctgtgtgctgtaccctgaaaacatcgaggccagagacatggcgaaagattatatggaaaggatggcagcccaaccatcatggttggtcaaggacgctccctgggatgaggtgcctctcgcccatagcctggttggttttgcaactgcttacgacttcctgtacaattatctcagtaaaacccagcaggagaagtttttagaagtgattgccaacgcgtccggctacatgtatgagacatcttaccggcgcgggtggggattccagtatctgcacaatcaccaaccaaccaactgcatggcccttttgactggcagcctggtcctaatgaatcagggttacctccaggaagcatatctgtggacaaaacaggtgcttaccatcatggagaagtccctggtattgctcagagaagttacggatgggtcactgtacgagggagtggcttacggcagttatactaccaggagcttatttcaatacatgttcctggtccagcggcattttaacataaatcacttcggccatccgtggctcaagcagcacttcgcctttatgtatcgcacaatccttcccgggttccagcgaactgtggctattgccgactctaactacaattggttttatggacctgagtcccaactggtgttcttggataaatttgtcatgagaaacggttcaggcaactggctagcagaccagatcaggcggaatcgtgttgtggaagggccaggaacccccagcaagggccagcgctggtgtacactgcacaccgagttcctctggtacgatggtagtctgaaatctgtacctccacccgactttgggacgccgactcttcattatttcgaagactggggagtggtcacatacggctccgccctgcctgctgagattaacagatcgtttttgagcttcaagtctggcaaactcgggggaagggcgatctacgatatagtgcaccggaataagtataaggactggattaaaggttggcgaaactttaatgcaggccatgaacaccccgatcaaaactccttcacctttgccccaaatggggttcctttcatcactgaggctctgtacggacccaagtatacattctttaacaatgtgttaatgttctcaccagccgtcagtaaaagctgcttttccccctgggtgggccaggtaaccgaggactgttctagcaagtggtcaaaatacaagcatgatctggcagccagttgccagggtcgcgttgtggctgccgaagagaaaaacggggtcgtgttcattagaggcgaaggagtcggcgcatataatcctcagctaaacctcaagaatgtgcaaaggaacctgatccttttgcacccacagctgctcctgcttgttgaccagatccacctgggggaggaatccccgttggagacggcggctagctttttccataatgtggatgtaccctttgaggaaaccgtcgtggacggagttcacggtgccttcattcggcagcgcgatggcctctacaagatgtattggatggacgatacagggtactctgagaaagcaacttttgcctcagtgacctaccctagaggatatccatacaacggcacaaactatgtcaatgtgactatgcatctgaggagtcccataacccgtgctgcctacttattcatcggtcctagcattgacgtacaatcctttacagtgcacggggactctcagcagctggatgttttcatcgcaacctcgaagcacgcttatgccacttacctatggacgggcgaagcgacaggacagagcgcctttgctcaagtcatagcagaccggcataaaattctcttcgatcgaaactccgccatcaagtcaagtatcgtgccagaggtgaaagactatgctgccattgtcgagcagaatctgcagcacttcaagcccgtttttcagcttttggaaaagcaaatcctgtctagagtgaggaacaccgcgagcttccgcaaaactgcagagcggctcctgagattttccgataagaggcagaccgaagaggccattgaccgcatattcgctatctcacagcaacagcagcagcaaagcaaatctaagaaaaatcgacgggccggcaagcgttacaagtttgtggatgcagtaccggacattttcgctcagatcgaagtcaacgagaaaaagatcagacagaaagcccagattttagcacaaaaggagctgcctatagatgaagacgaggaaatgaaagatcttttggactttgccgatgtgacatacgagaagcataagaatgggggactcatcaaaggtaggttcggccaggctcgcatggttaccactacacactcccgggcgccaagtctgagcgcctcttatacgagactatttctgattctcaacatcgcaattttctttgtgatgctggctatgcagcttacctacttccagagggcccaatccttgcatgggcagcgatgtctgtatgccgtcttactcatcgactcatgcatactgctttggctgtacagtagctgttcgcagtcccaatgctga

SEQ ID NO: 3392 - RNA, 2877 nt, synthetic construct
  misc_feature 1..2877: note = derived and/or modified sequence opt4 fromSART-2__Homo_sapiens__AAF00087
  source 1..2877: mol_type = other RNA
atgagaacccacaccagaggcgcccccagcgtgttcttcatctacctgctgtgcttcgtgagcgcctacatcaccgacgagaaccccgaggtgatgatccccttcaccaacgccaactacgacagccaccccatgctgtacttcagcagagccgaggtggccgagctgcagctgagagccgccagcagccacgagcacatcgccgccagactgaccgaggccgtgcacaccatgctgagcagccccctggagtacctgcccccctgggaccccaaggactacagcgccagatggaacgagatcttcggcaacaacctgggcgccctggccatgttctgcgtgctgtaccccgagaacatcgaggccagagacatggccaaggactacatggagagaatggccgcccagcccagctggctggtgaaggacgccccctgggacgaggtgcccctggcccacagcctggtgggcttcgccaccgcctacgacttcctgtacaactacctgagcaagacccagcaggagaagttcctggaggtgatcgccaacgccagcggctacatgtacgagaccagctacagaagaggctggggcttccagtacctgcacaaccaccagcccaccaactgcatggccctgctgaccggcagcctggtgctgatgaaccagggctacctgcaggaggcctacctgtggaccaagcaggtgctgaccatcatggagaagagcctggtgctgctgagagaggtgaccgacggcagcctgtacgagggcgtggcctacggcagctacaccaccagaagcctgttccagtacatgttcctggtgcagagacacttcaacatcaaccacttcggccacccctggctgaagcagcacttcgccttcatgtacagaaccatcctgcccggcttccagagaaccgtggccatcgccgacagcaactacaactggttctacggccccgagagccagctggtgttcctggacaagttcgtgatgagaaacggcagcggcaactggctggccgaccagatcagaagaaacagagtggtggagggccccggcacccccagcaagggccagagatggtgcaccctgcacaccgagttcctgtggtacgacggcagcctgaagagcgtgcccccccccgacttcggcacccccaccctgcactacttcgaggactggggcgtggtgacctacggcagcgccctgcccgccgagatcaacagaagcttcctgagcttcaagagcggcaagctgggcggcagagccatctacgacatcgtgcacagaaacaagtacaaggactggatcaagggctggagaaacttcaacgccggccacgagcaccccgaccagaacagcttcaccttcgcccccaacggcgtgcccttcatcaccgaggccctgtacggccccaagtacaccttcttcaacaacgtgctgatgttcagccccgccgtgagcaagagctgcttcagcccctgggtgggccaggtgaccgaggactgcagcagcaagtggagcaagtacaagcacgacctggccgccagctgccagggcagagtggtggccgccgaggagaagaacggcgtggtgttcatcagaggcgagggcgtgggcgcctacaacccccagctgaacctgaagaacgtgcagagaaacctgatcctgctgcacccccagctgctgctgctggtggaccagatccacctgggcgaggagagccccctggagaccgccgccagcttcttccacaacgtggacgtgcccttcgaggagaccgtggtggacggcgtgcacggcgccttcatcagacagagagacggcctgtacaagatgtactggatggacgacaccggctacagcgagaaggccaccttcgccagcgtgacctaccccagaggctacccctacaacggcaccaactacgtgaacgtgaccatgcacctgagaagccccatcaccagagccgcctacctgttcatcggccccagcatcgacgtgcagagcttcaccgtgcacggcgacagccagcagctggacgtgttcatcgccaccagcaagcacgcctacgccacctacctgtggaccggcgaggccaccggccagagcgccttcgcccaggtgatcgccgacagacacaagatcctgttcgacagaaacagcgccatcaagagcagcatcgtgcccgaggtgaaggactacgccgccatcgtggagcagaacctgcagcacttcaagcccgtgttccagctgctggagaagcagatcctgagcagagtgagaaacaccgccagcttcagaaagaccgccgagagactgctgagattcagcgacaagagacagaccgaggaggccatcgacagaatcttcgccatcagccagcagcagcagcagcagagcaagagcaagaagaacagaagagccggcaagagatacaagttcgtggacgccgtgcccgacatcttcgcccagatcgaggtgaacgagaagaagatcagacagaaggcccagatcctggcccagaaggagctgcccatcgacgaggacgaggagatgaaggacctgctggacttcgccgacgtgacctacgagaagcacaagaacggcggcctgatcaagggcagattcggccaggccagaatggtgaccaccacccacagcagagcccccagcctgagcgccagctacaccagactgttcctgatcctgaacatcgccatcttcttcgtgatgctggccatgcagctgacctacttccagagagcccagagcctgcacggccagagatgcctgtacgccgtgctgctgatcgacagctgcatcctgctgtggctgtacagcagctgcagccagagccagtgctga

SEQ ID NO: 3393 - RNA, 2877 nt, synthetic construct
  misc_feature 1..2877: note = derived and/or modified sequence opt5 fromSART-2__Homo_sapiens__AAF00087
  source 1..2877: mol_type = other RNA
atgagaacccacacacggggcgcccccagcgtgttctttatctacctgctctgcttcgtctccgcttatattacggacgagaaccctgaagttatgatcccgtttaccaatgccaactacgattctcatcccatgctgtatttcagccgcgcggaggtggctgaacttcagctgagagccgcctcctctcacgagcatattgctgcccggctcacagaagctgtgcacaccatgctgagctcccctcttgagtacctgcccccttgggaccccaaggattattctgcccgctggaatgagatctttgggaacaatctcggagcgctggccatgttctgtgtcctgtaccctgaaaacattgaggctagagacatggccaaagattatatggaacggatggctgcccaaccgagctggctcgtgaaggacgcgccctgggatgaggttcctctggcccattcccttgtgggctttgctacagcctacgacttcctgtacaattatctcagcaaaacccagcaggagaagtttctggaagtcatcgctaacgcctctgggtacatgtatgagacatcctaccgcagaggatggggcttccagtatcttcacaatcaccaacccaccaactgcatggccctgctcacggggagcctggtgctgatgaatcagggatacctccaggaggcttatctgtggaccaaacaggttcttacaatcatggaaaagtctctggtgctcctgcgggaagtcaccgatggctccctttacgagggcgtggcgtacgggagctatacaacccgctctctgtttcaatacatgttcctcgtgcagagacattttaacattaatcacttcggacatccttggctgaagcagcacttcgcctttatgtatcggacgatcctgcccggcttccagcgcacagtcgctattgccgactccaactacaattggttttatgggccggagagccaactcgttttcctggataaatttgtgatgagaaacggatccggcaactggcttgccgaccagatccggcgcaatagagtggtcgaagggcctggaaccccctctaagggccagcggtggtgtacactgcacaccgagttcctctggtacgatggcagcctgaaatccgtgcctcctcccgactttgggacccccacacttcattatttcgaagactggggagttgtgacgtacggcagcgctctgccggccgagattaacagatcttttctctccttcaagagcgggaaactgggaggccgcgcgatctacgatattgtccaccggaataagtataaggactggatcaaagggtggagaaactttaatgctggacatgaacaccccgatcaaaactctttcacctttgcccctaatggcgtgcccttcatcacagaggccctgtacggccctaagtataccttctttaacaatgttctcatgttcagccccgctgtgtccaaatcttgctttagcccgtgggtcggacaggtgacagaggactgttccagcaagtggtctaaatacaagcatgatctggccgcttcctgccaggggcgcgtcgtggccgcggaagagaaaaacggcgttgtgttcattagaggggaaggagtcggcgcctataatcctcagcttaacctgaagaatgtgcaacggaacctcatcctgctgcacccccagcttctcctgctggttgaccagattcacctcggggaggaaagccctctggagaccgctgccagctttttccataatgtggatgtcccctttgaggaaacggtggtggacggcgttcacggagctttcatccgccagcgggatggcctttacaagatgtattggatggacgatacagggtactccgagaaagccacctttgcgagcgtcacctaccctagaggatatccctacaacggcacaaactatgtgaatgtgaccatgcatctgcgctccccgattacacgggccgcttacctcttcatcgggccttctatcgacgtccaatcttttacggtgcacggagactcccagcagctggatgttttcattgccacctctaagcacgcttatgccacatacctgtggaccggcgaagccacagggcagagcgcttttgcgcaagtgatcgccgacagacataaaattcttttcgatcgcaactccgctatcaagagctctattgtccccgaggtgaaagactatgccgccatcgttgagcagaatctccagcacttcaagcccgtgtttcagctgctggaaaagcaaatcctctcccgggtcagaaacaccgctagcttccggaaaacggccgagcgcctgcttagattttctgataagcggcagaccgaagaggcgattgacagaatcttcgctatttcccagcaacagcagcagcaaagcaaatctaagaaaaatcgccgggccggcaagagatacaagtttgtggatgccgttcctgacatcttcgctcagattgaagtgaacgagaaaaagatccgccagaaagcccagattctggcgcaaaaggagctcccgatcgatgaagacgaggaaatgaaagatctgctggactttgctgatgtcacatacgagaagcataagaatggaggccttatcaaagggagattcggacaggcccggatggtgaccacaacccacagccgcgccccctccctcagcgcttcttatacgagactgtttctgattctcaacatcgccattttctttgtgatgctggctatgcagcttacatacttccagcgggcccaatccctgcatggccagcgctgtctctatgcggtcctgctgatcgacagctgcattcttctctggctgtactcctcttgtagccagtcccaatgctga

SEQ ID NO: 3394 - protein, 963 aa, synthetic construct
  REGION 1..963: note = SART-3__Homo_sapiens__Q15020
MATAAETSASEPEAESKAGPKADGEEDEVKAARTRRKVLSRAVAAATYKTMGPAWDQQEEGVSESDGDEYAMASSAESSPGEYEWEYDEEEEKNQLEIERLEEQLSINVYDYNCHVDLIRLLRLEGELTKVRMARQKMSEIFPLTEELWLEWLHDEISMAQDGLDREHVYDLFEKAVKDYICPNIWLEYGQYSVGGIGQKGGLEKVRSVFERALSSVGLHMTKGLALWEAYREFESAIVEAARLEKVHSLFRRQLAIPLYDMEATFAEYEEWSEDPIPESVIQNYNKALQQLEKYKPYEEALLQAEAPRLAEYQAYIDFEMKIGDPARIQLIFERALVENCLVPDLWIRYSQYLDRQLKVKDLVLSVHNRAIRNCPWTVALWSRYLLAMERHGVDHQVISVTFEKALNAGFIQATDYVEIWQAYLDYLRRRVDFKQDSSKELEELRAAFTRALEYLKQEVEERFNESGDPSCVIMQNWARIEARLCNNMQKARELWDSIMTRGNAKYANMWLEYYNLERAHGDTQHCRKALHRAVQCTSDYPEHVCEVLLTMERTEGSLEDWDIAVQKTETRLARVNEQRMKAAEKEAALVQQEEEKAEQRKRARAEKKALKKKKKIRGPEKRGADEDDEKEWGDDEEEQPSKRRRVENSIPAAGETQNVEVAAGPAGKCAAVDVEPPSKQKEKAASLKRDMPKVLHDSSKDSITVFVSNLPYSMQEPDTKLRPLFEACGEVVQIRPIFSNRGDFRGYCYVEFKEEKSALQALEMDRKSVEGRPMFVSPCVDKSKNPDFKVFRYSTSLEKHKLFISGLPFSCTKEELEEICKAHGTVKDLRLVTNRAGKPKGLAYVEYENESQASQAVMKMDGMTIKENIIKVAISNPPQRKVPEKPETRKAPGGPMLLPQTYGARGKGRTQLSLLPRALQRPSAAAPQAENGPAAAPAVAAPAATEAPKMSNADFAKLFLRK

SEQ ID NO: 3395 - RNA, 2892 nt, synthetic construct
  misc_feature 1..2892: note = SART-3__Homo_sapiens__AAH93784
  source 1..2892: mol_type = other RNA
atggcgactgcggccgaaacctcggcttcagaacccgaggctgagtccaaggctgggcccaaggctgacggagaggaggatgaggttaaggcggctaggacaaggagaaaggtgttatcgcgggctgtggccgctgcgacatacaagaccatggggccagcgtgggatcagcaggaggaaggcgtgagcgagagcgatggggatgagtacgccatggcttcctccgcggagagctcccccggggagtacgagtgggaatatgacgaagaggaggagaaaaaccagctggagattgagagactggaggagcagttgtctatcaacgtctatgactacaactgccatgtggacttgatcagactgctcaggctggaaggggagcttaccaaggtgaggatggcccgccagaagatgagtgaaatctttcccttgactgaagagctctggctggagtggctgcatgacgagatcagcatggcccaggatggcctggacagagagcacgtgtatgacctctttgagaaagccgtgaaggattacatttgtcctaacatttggctagagtatggccagtactcagttggtgggattggtcagaaaggtggccttgagaaagttcgctccgtgtttgaaagggctctctcgtctgttggtttacatatgaccaaaggactcgccctctgggaggcttaccgagagtttgaaagtgcgattgtggaagctgctcggcttgagaaagtccacagtcttttccggcgacagttggcgatcccactctatgatatggaggccacatttgcagagtatgaagaatggtcagaagacccaataccagagtcagtaattcagaactataacaaagcactacagcagctggagaaatataaaccctatgaagaagcactgttgcaggcagaggcaccaaggctggcagaatatcaagcatatatcgattttgagatgaaaattggcgatcctgctcgcattcagttgatctttgagcgcgccctggtcgagaactgccttgtcccagacttatggatccgttacagtcagtacctagatcgacaactgaaagtaaaggatttggttttatctgtacataaccgcgctattagaaactgcccctggacagttgccttatggagtcggtacctcttggccatggagagacatggagttgatcatcaagtaatttctgtaaccttcgagaaagctttgaatgccggcttcatccaggccactgattatgtggagatttggcaggcataccttgattacctgaggagaagggttgatttcaaacaagactccagtaaagagctggaggagttgagggccgcctttactcgtgccttggagtatctgaagcaggaggtggaagagcgtttcaatgagagtggtgatccaagctgcgtgattatgcagaactgggctaggattgaggctcgactgtgcaataacatgcagaaagctcgggaactctgggatagcatcatgaccagaggaaatgccaagtacgccaacatgtggctagagtattacaacctggaaagagctcatggtgacacccagcactgccggaaggctctgcaccgggccgtccagtgcaccagtgactacccagagcacgtctgcgaagtgttactcaccatggagaggacagaaggttctttagaagattgggatatagctgttcagaaaactgaaacccgattagctcgtgtcaatgagcagagaatgaaggctgcagagaaggaagcagcccttgtgcagcaagaagaagaaaaggctgaacaacggaaaagagctcgggctgagaagaaagcgttaaaaaagaagaaaaagatcagaggcccagagaagcgcggagcagatgaggacgatgagaaagagtggggcgatgatgaagaagagcagccttccaaacgcagaagggtcgagaacagcatccctgcagctggagaaacacaaaatgtagaagtagcagcagggcccgctgggaaatgtgctgccgtagatgtggagcccccttcgaagcagaaggagaaggcagcctccctgaagagggacatgcccaaggtgctgcacgacagcagcaaggacagcatcaccgtctttgtcagcaacctgccctacagcatgcaggagccggacacgaagctcaggccactcttcgaggcctgtggggaggtggtccagatccgacccatcttcagcaaccgtggggatttccgaggttactgctacgtggagtttaaagaagagaaatcagcccttcaggcactggagatggaccggaaaagtgtagaagggaggccaatgtttgtttccccctgtgtggataagagcaaaaaccccgattttaaggtgttcaggtacagcacttccctagagaaacacaagctgttcatctcaggcctgcctttctcctgtactaaagaggaactagaagaaatctgtaaggctcatggcaccgtgaaggacctcaggctggtcaccaaccgggctggcaaaccaaagggcctggcctacgtggagtatgaaaatgaatcccaggcgtcgcaggctgtgatgaagatggacggcatgactatcaaagagaacatcatcaaagtggcaatcagcaaccctcctcagaggaaagttccagagaagccagagaccaggaaggcaccaggtggccccatgcttttgccgcagacatacggagcgagggggaagggaaggacgcagctgtctctactgcctcgtgccctgcagcgcccaagtgctgcagctcctcaggctgagaacggccctgccgcggctcctgcagttgccgccccagcagccaccgaggcacccaagatgtccaatgccgattttgccaagctgtttctgagaaagtga

SEQ ID NO: 3396 - RNA, 2892 nt, synthetic construct
  misc_feature 1..2892: note = derived and/or modified sequence opt1 fromSART-3__Homo_sapiens__AAH93784
  source 1..2892: mol_type = other RNA
atggccaccgccgcggagaccagcgcctccgagcccgaggccgagagcaaggccggcccgaaggccgacggggaggaggacgaggtgaaggcggcccgcacgcggcgcaaggtcctgtcccgggccgtggccgcggccacctacaagaccatgggccccgcctgggaccagcaggaggagggggtgagcgagtccgacggcgacgagtacgccatggccagctccgcggagagctcccccggggagtacgagtgggagtacgacgaggaggaggagaagaaccagctcgagatcgagcgcctggaggagcagctgagcatcaacgtctacgactacaactgccacgtggacctcatccggctgctgcgcctcgagggcgagctgaccaaggtgcggatggcccgccagaagatgtccgagatcttccccctgacggaggagctctggctggagtggctgcacgacgagatcagcatggcccaggacggcctcgaccgggagcacgtctacgacctgttcgagaaggccgtgaaggactacatctgcccgaacatctggctggagtacgggcagtactccgtgggcgggatcggccagaagggcgggctcgagaaggtccgcagcgtgttcgagcgggccctgtccagcgtgggcctgcacatgaccaaggggctcgcgctgtgggaggcctaccgcgagttcgagtccgccatcgtcgaggccgcccggctggagaaggtgcacagcctcttccgccggcagctggcgatccccctgtacgacatggaggccaccttcgccgagtacgaggagtggtccgaggaccccatccccgagagcgtgatccagaactacaacaaggccctccagcagctggagaagtacaagccgtacgaggaggccctgctccaggcggaggcgccccgcctggccgagtaccaggcctacatcgacttcgagatgaagatcggcgaccccgcccggatccagctgatcttcgagcgcgccctcgtcgagaactgcctggtgcccgacctgtggatccggtacagccagtacctcgaccgccagctgaaggtgaaggacctggtcctctccgtgcacaaccgggccatccgcaactgcccgtggaccgtggccctgtggagccgctacctgctcgccatggagcggcacggggtcgaccaccaggtgatctccgtgacgttcgagaaggcgctgaacgccggcttcatccaggccaccgactacgtcgagatctggcaggcctacctggactacctccgccggcgcgtggacttcaagcaggacagctccaaggagctggaggagctgcgggccgcgttcacccgcgccctcgagtacctgaagcaggaggtcgaggagcggttcaacgagagcggcgacccctcctgcgtgatcatgcagaactgggcccgcatcgaggcccggctgtgcaacaacatgcagaaggcccgcgagctctgggacagcatcatgacccgggggaacgcgaagtacgccaacatgtggctggagtactacaacctggagcgcgcccacggcgacacgcagcactgccggaaggccctgcaccgcgcggtgcagtgcacctccgactaccccgagcacgtctgcgaggtgctcctgaccatggagcggaccgaggggagcctggaggactgggacatcgccgtgcagaagacggagacccgcctcgcccgggtcaacgagcagcgcatgaaggccgccgagaaggaggcggccctggtgcagcaggaggaggagaaggccgagcagcggaagcgcgcccgcgccgagaagaaggcgctgaagaagaagaagaagatccggggccccgagaagcgcggggccgacgaggacgacgagaaggagtggggcgacgacgaggaggagcagccgtccaagcggcgccgggtggagaacagcatccccgccgccggcgagacccagaacgtcgaggtggccgcggggcccgccggcaagtgcgccgccgtggacgtcgagcccccgtccaagcagaaggagaaggcggccagcctcaagcgcgacatgcccaaggtgctgcacgactccagcaaggactccatcaccgtgttcgtcagcaacctgccctactccatgcaggagcccgacacgaagctccggccgctgttcgaggcctgcggggaggtggtgcagatccgccccatcttcagcaaccggggcgacttccgcgggtactgctacgtcgagttcaaggaggagaagtccgccctgcaggccctcgagatggaccgcaagagcgtggagggccggcccatgttcgtgagcccctgcgtcgacaagtccaagaacccggacttcaaggtgttccggtacagcacctccctggagaagcacaagctgttcatcagcggcctccccttctcctgcaccaaggaggagctggaggagatctgcaaggcgcacgggaccgtgaaggacctgcgcctcgtcacgaaccgggccggcaagcccaaggggctggcctacgtggagtacgagaacgagagccaggcctcccaggccgtgatgaagatggacggcatgaccatcaaggagaacatcatcaaggtcgcgatcagcaacccgccccagcgcaaggtgcccgagaagcccgagacccggaaggcccccgggggcccgatgctgctcccccagacctacggcgcccgcgggaagggccggacgcagctgtccctgctcccccgcgccctgcagcggccgagcgccgcggcgccccaggccgagaacgggcccgccgccgcccccgccgtggccgccccggcggccaccgaggcccccaagatgtccaacgccgacttcgccaagctgttcctccgcaagtga

SEQ ID NO: 3397 - RNA, 2892 nt, synthetic construct
  misc_feature 1..2892: note = derived and/or modified sequence opt2 fromSART-3__Homo_sapiens__AAH93784
  source 1..2892: mol_type = other RNA
atggccaccgccgccgagacctccgcctccgagcccgaggccgagtccaaggccggccccaaggccgacggcgaggaggacgaggtcaaggccgcccgcacccgccgcaaggtcctctcccgcgccgtcgccgccgccacctacaagaccatgggccccgcctgggaccagcaggaggagggcgtctccgagtccgacggcgacgagtacgccatggcctcctccgccgagtcctcccccggcgagtacgagtgggagtacgacgaggaggaggagaagaaccagctcgagatcgagcgcctcgaggagcagctctccatcaacgtctacgactacaactgccacgtcgacctcatccgcctcctccgcctcgagggcgagctcaccaaggtccgcatggcccgccagaagatgtccgagatcttccccctcaccgaggagctctggctcgagtggctccacgacgagatctccatggcccaggacggcctcgaccgcgagcacgtctacgacctcttcgagaaggccgtcaaggactacatctgccccaacatctggctcgagtacggccagtactccgtcggcggcatcggccagaagggcggcctcgagaaggtccgctccgtcttcgagcgcgccctctcctccgtcggcctccacatgaccaagggcctcgccctctgggaggcctaccgcgagttcgagtccgccatcgtcgaggccgcccgcctcgagaaggtccactccctcttccgccgccagctcgccatccccctctacgacatggaggccaccttcgccgagtacgaggagtggtccgaggaccccatccccgagtccgtcatccagaactacaacaaggccctccagcagctcgagaagtacaagccctacgaggaggccctcctccaggccgaggccccccgcctcgccgagtaccaggcctacatcgacttcgagatgaagatcggcgaccccgcccgcatccagctcatcttcgagcgcgccctcgtcgagaactgcctcgtccccgacctctggatccgctactcccagtacctcgaccgccagctcaaggtcaaggacctcgtcctctccgtccacaaccgcgccatccgcaactgcccctggaccgtcgccctctggtcccgctacctcctcgccatggagcgccacggcgtcgaccaccaggtcatctccgtcaccttcgagaaggccctcaacgccggcttcatccaggccaccgactacgtcgagatctggcaggcctacctcgactacctccgccgccgcgtcgacttcaagcaggactcctccaaggagctcgaggagctccgcgccgccttcacccgcgccctcgagtacctcaagcaggaggtcgaggagcgcttcaacgagtccggcgacccctcctgcgtcatcatgcagaactgggcccgcatcgaggcccgcctctgcaacaacatgcagaaggcccgcgagctctgggactccatcatgacccgcggcaacgccaagtacgccaacatgtggctcgagtactacaacctcgagcgcgcccacggcgacacccagcactgccgcaaggccctccaccgcgccgtccagtgcacctccgactaccccgagcacgtctgcgaggtcctcctcaccatggagcgcaccgagggctccctcgaggactgggacatcgccgtccagaagaccgagacccgcctcgcccgcgtcaacgagcagcgcatgaaggccgccgagaaggaggccgccctcgtccagcaggaggaggagaaggccgagcagcgcaagcgcgcccgcgccgagaagaaggccctcaagaagaagaagaagatccgcggccccgagaagcgcggcgccgacgaggacgacgagaaggagtggggcgacgacgaggaggagcagccctccaagcgccgccgcgtcgagaactccatccccgccgccggcgagacccagaacgtcgaggtcgccgccggccccgccggcaagtgcgccgccgtcgacgtcgagcccccctccaagcagaaggagaaggccgcctccctcaagcgcgacatgcccaaggtcctccacgactcctccaaggactccatcaccgtcttcgtctccaacctcccctactccatgcaggagcccgacaccaagctccgccccctcttcgaggcctgcggcgaggtcgtccagatccgccccatcttctccaaccgcggcgacttccgcggctactgctacgtcgagttcaaggaggagaagtccgccctccaggccctcgagatggaccgcaagtccgtcgagggccgccccatgttcgtctccccctgcgtcgacaagtccaagaaccccgacttcaaggtcttccgctactccacctccctcgagaagcacaagctcttcatctccggcctccccttctcctgcaccaaggaggagctcgaggagatctgcaaggcccacggcaccgtcaaggacctccgcctcgtcaccaaccgcgccggcaagcccaagggcctcgcctacgtcgagtacgagaacgagtcccaggcctcccaggccgtcatgaagatggacggcatgaccatcaaggagaacatcatcaaggtcgccatctccaaccccccccagcgcaaggtccccgagaagcccgagacccgcaaggcccccggcggccccatgctcctcccccagacctacggcgcccgcggcaagggccgcacccagctctccctcctcccccgcgccctccagcgcccctccgccgccgccccccaggccgagaacggccccgccgccgcccccgccgtcgccgcccccgccgccaccgaggcccccaagatgtccaacgccgacttcgccaagctcttcctccgcaagtga

SEQ ID NO: 3398 - RNA, 2892 nt, synthetic construct
  misc_feature 1..2892: note = derived and/or modified sequence opt3 fromSART-3__Homo_sapiens__AAH93784
  source 1..2892: mol_type = other RNA
atggccaccgctgcagagacaagcgcctccgaacccgaggcggaatctaaggctggccctaaagccgacggggaggaagatgaggtgaaggcagccagaactaggcggaaagtcctgtcacgcgctgttgcagccgctacgtacaagaccatgggaccagcctgggaccagcaagaggaaggtgtgagtgagagcgatggcgacgaatatgcgatggcatcctctgccgagtcgtcaccgggggagtacgaatgggagtatgatgaagaggaagagaaaaaccagctcgagatcgaacgacttgaggaacagctgagcattaatgtatacgactataactgccacgtggatttgatacgtttactgagactagagggagaactcacaaaggtcaggatggctcggcagaagatgagtgagatcttccccctgactgaggaactttggctggagtggttgcatgacgaaatttccatggcccaagatggcctcgaccgcgagcacgtgtacgatctgtttgaaaaagcagttaaggactatatctgtcctaatatttggctggagtacggtcagtactctgtcgggggaatcggccagaaaggcgggctcgagaaggtgagaagcgtgttcgaaagggctttatcctcagtaggactgcatatgaccaaaggtcttgccttgtgggaggcgtatcgggaatttgagagtgccatagttgaggcagctcgcctggaaaaggtgcacagcctattccgaagacagctcgccatcccactgtacgatatggaggctacatttgccgaatatgaggaatggtctgaggaccccattcctgagtccgtcatccaaaactacaataaggcacttcagcagctggaaaaatataagccatacgaggaagccttgctccaggctgaggcgcccaggctggcagaatatcaagcctacattgacttcgagatgaaaatcggcgatcctgctcggatacagttaatttttgagcgtgccctggtggaaaactgcctcgtgccagacctttggatccgctactcacagtatctggatagacaattgaaggtcaaagacctagttctgagcgtgcataatagggcaattcggaactgtccgtggaccgtagccctctggagtcgatacctgcttgctatggagcgccacggggtggatcaccaggtcatctctgtgactttcgaaaaggccctgaatgcaggatttatccaggcgacagactatgttgagatttggcaggcttacttggattatctcagaaggcgggtggacttcaaacaagattccagcaaggaactggaggagttacgcgccgcatttaccagagccctggaatacctaaagcaggaggtcgaagagaggttcaacgagtcgggcgacccctcttgcgtgataatgcagaattgggctcgtatcgaagcccggctctgtaacaatatgcagaaagcacgagagctgtgggattccattatgacgagaggtaacgctaagtatgccaatatgtggcttgaatactacaacttggagagggcgcatggggacactcaacactgccgcaaagccctgcatcgggctgtacagtgtacctcagactatcctgaacacgtttgcgaggtgctcctgacaatggagagaactgaaggaagtcttgaggattgggacatcgcagtccagaagaccgaaacaaggctggcccgcgtgaacgagcagcgaatgaaagctgccgaaaaggaggcagcgttggtccaacaggaggaagagaaggccgaacagcggaaacgtgctagagccgagaagaaagcactcaagaaaaagaagaaaataaggggcccagaaaagcgcggcgctgatgaggacgatgagaaagaatggggagacgatgaggaagaacagcccagcaagcggagaagggtggaaaattccattcctgccgcaggggaaacccaaaacgttgaggtggccgctggtccagcgggcaaatgtgccgcagtagacgtcgaacccccgtctaagcagaaggagaaagctgccagcctgaagcgagatatgcctaaagtgttacacgactcaagtaaggattccatcacggtttttgtgagcaatctgccctactctatgcaggaaccagacactaaactacgccctctcttcgaggcctgcggggaggtcgtgcaaatccggcccattttctcaaacagaggagattttaggggctattgttacgtagagttcaaggaggagaaaagtgctctgcaggcacttgagatggaccgtaagagcgtggaaggtcgcccaatgtttgtttccccctgcgtcgacaagtctaaaaatcctgatttcaaggtgtttcggtattcgaccagcttggagaaacataagctgttcatctccgggctcccattttcatgcacaaaagaggaactggaggaaatttgtaaggcccacggcactgtgaaggacttaagactggtcacaaacagggcgggaaaaccgaagggccttgcttacgttgagtatgaaaatgagagtcaggcctctcaggcagtgatgaaaatggatgggatgaccataaaggagaacatcattaaagtggccatcagcaatccccctcaacgaaaggtaccagaaaagcccgagacgcggaaagctcctggaggtccaatgttgctcccccagacctacggcgcacgcgggaagggaagaacacagctgtccctactgccgagggccctccagcggccttcagcggctgccccacaagcagaaaacggccccgccgctgcccctgcagtcgctgcccccgcggccactgaggcaccaaaaatgagcaatgctgacttcgccaagctgtttcttcgaaaatga

SEQ ID NO: 3399 - RNA, 2892 nt, synthetic construct
  misc_feature 1..2892: note = derived and/or modified sequence opt4 fromSART-3__Homo_sapiens__AAH93784
  source 1..2892: mol_type = other RNA
atggccaccgccgccgagaccagcgccagcgagcccgaggccgagagcaaggccggccccaaggccgacggcgaggaggacgaggtgaaggccgccagaaccagaagaaaggtgctgagcagagccgtggccgccgccacctacaagaccatgggccccgcctgggaccagcaggaggagggcgtgagcgagagcgacggcgacgagtacgccatggccagcagcgccgagagcagccccggcgagtacgagtgggagtacgacgaggaggaggagaagaaccagctggagatcgagagactggaggagcagctgagcatcaacgtgtacgactacaactgccacgtggacctgatcagactgctgagactggagggcgagctgaccaaggtgagaatggccagacagaagatgagcgagatcttccccctgaccgaggagctgtggctggagtggctgcacgacgagatcagcatggcccaggacggcctggacagagagcacgtgtacgacctgttcgagaaggccgtgaaggactacatctgccccaacatctggctggagtacggccagtacagcgtgggcggcatcggccagaagggcggcctggagaaggtgagaagcgtgttcgagagagccctgagcagcgtgggcctgcacatgaccaagggcctggccctgtgggaggcctacagagagttcgagagcgccatcgtggaggccgccagactggagaaggtgcacagcctgttcagaagacagctggccatccccctgtacgacatggaggccaccttcgccgagtacgaggagtggagcgaggaccccatccccgagagcgtgatccagaactacaacaaggccctgcagcagctggagaagtacaagccctacgaggaggccctgctgcaggccgaggcccccagactggccgagtaccaggcctacatcgacttcgagatgaagatcggcgaccccgccagaatccagctgatcttcgagagagccctggtggagaactgcctggtgcccgacctgtggatcagatacagccagtacctggacagacagctgaaggtgaaggacctggtgctgagcgtgcacaacagagccatcagaaactgcccctggaccgtggccctgtggagcagatacctgctggccatggagagacacggcgtggaccaccaggtgatcagcgtgaccttcgagaaggccctgaacgccggcttcatccaggccaccgactacgtggagatctggcaggcctacctggactacctgagaagaagagtggacttcaagcaggacagcagcaaggagctggaggagctgagagccgccttcaccagagccctggagtacctgaagcaggaggtggaggagagattcaacgagagcggcgaccccagctgcgtgatcatgcagaactgggccagaatcgaggccagactgtgcaacaacatgcagaaggccagagagctgtgggacagcatcatgaccagaggcaacgccaagtacgccaacatgtggctggagtactacaacctggagagagcccacggcgacacccagcactgcagaaaggccctgcacagagccgtgcagtgcaccagcgactaccccgagcacgtgtgcgaggtgctgctgaccatggagagaaccgagggcagcctggaggactgggacatcgccgtgcagaagaccgagaccagactggccagagtgaacgagcagagaatgaaggccgccgagaaggaggccgccctggtgcagcaggaggaggagaaggccgagcagagaaagagagccagagccgagaagaaggccctgaagaagaagaagaagatcagaggccccgagaagagaggcgccgacgaggacgacgagaaggagtggggcgacgacgaggaggagcagcccagcaagagaagaagagtggagaacagcatccccgccgccggcgagacccagaacgtggaggtggccgccggccccgccggcaagtgcgccgccgtggacgtggagccccccagcaagcagaaggagaaggccgccagcctgaagagagacatgcccaaggtgctgcacgacagcagcaaggacagcatcaccgtgttcgtgagcaacctgccctacagcatgcaggagcccgacaccaagctgagacccctgttcgaggcctgcggcgaggtggtgcagatcagacccatcttcagcaacagaggcgacttcagaggctactgctacgtggagttcaaggaggagaagagcgccctgcaggccctggagatggacagaaagagcgtggagggcagacccatgttcgtgagcccctgcgtggacaagagcaagaaccccgacttcaaggtgttcagatacagcaccagcctggagaagcacaagctgttcatcagcggcctgcccttcagctgcaccaaggaggagctggaggagatctgcaaggcccacggcaccgtgaaggacctgagactggtgaccaacagagccggcaagcccaagggcctggcctacgtggagtacgagaacgagagccaggccagccaggccgtgatgaagatggacggcatgaccatcaaggagaacatcatcaaggtggccatcagcaaccccccccagagaaaggtgcccgagaagcccgagaccagaaaggcccccggcggccccatgctgctgccccagacctacggcgccagaggcaagggcagaacccagctgagcctgctgcccagagccctgcagagacccagcgccgccgccccccaggccgagaacggccccgccgccgcccccgccgtggccgcccccgccgccaccgaggcccccaagatgagcaacgccgacttcgccaagctgttcctgagaaagtga

SEQ ID NO: 3400 - RNA, 2892 nt, synthetic construct
  misc_feature 1..2892: note = derived and/or modified sequence opt5 fromSART-3__Homo_sapiens__AAH93784
  source 1..2892: mol_type = other RNA
atggccaccgctgccgagacaagcgcgtccgaacccgaggctgaatctaaggccggccctaaagccgacggggaggaagatgaggtgaaggctgccagaacgcggcgcaaagtcctgagcagagctgttgccgcggccacctacaagacaatgggaccggcttgggaccagcaagaggaaggcgtgtccgagtctgatggggacgaatatgccatggctagctccgccgagtctagccccggagagtacgaatgggagtatgatgaagaggaagagaaaaaccagctcgagatcgaacggctggaggaacagctttccattaatgtgtacgactataactgccacgtcgatctgatccgcctcctgagacttgagggcgaactgaccaaggtgcggatggcgcgccagaagatgagcgagattttccctctcacagaggaactgtggctggagtggctccatgacgaaatctctatggcccaagatgggctggacagagagcacgtttacgatctttttgaaaaagctgtgaaggactatatttgtcccaatatctggctggagtacggacagtactccgtcggcggcatcgggcagaaaggaggcctcgagaaggtgcggagcgttttcgaacgcgccctgtcttccgtggggcttcatatgaccaaaggactggctctctgggaggcctatagagaatttgagagcgccattgtcgaggctgcgcggctggaaaaggtgcactctctgttccgcagacagctcgccatccctctgtacgatatggaggctacatttgccgaatatgaggaatggtccgaggaccccattcctgagagcgtgatccaaaactacaataaggcccttcagcagctggaaaaatataagccgtacgaggaagctctcctgcaggccgaggcgccccggcttgctgaatatcaagcctacattgacttcgagatgaaaatcggcgatcctgcccgcattcagctgatctttgagagagctctcgtcgaaaactgcctggttcccgacctgtggatccggtactcccagtatctcgatagacaactgaaggtgaaagaccttgtgctgtctgtccataatcgcgccattcggaactgtccttggaccgtggctctctggagcagatacctgcttgccatggagcgccacggggttgatcaccaggtgatctccgtcacgttcgaaaaggcgctgaatgccggatttattcaggctaccgactatgtggagatctggcaggcctacctcgattatctgcggagacgcgttgacttcaaacaagatagctctaaggaactggaggagctccgggctgcctttacaagagcgctggaataccttaagcaggaggtggaagaacgcttcaacgagtccggcgaccccagctgcgtcattatgcagaattgggcccggatcgaagctagactgtgtaacaatatgcagaaagcccgcgagctctgggattctatcatgacccggggcaacgctaagtatgccaatatgtggctggaatactacaacctggagagagcccatggggacacacaacactgccggaaagcccttcatcgcgcggtgcagtgtaccagcgactatccggaacacgtctgcgaggtgctcctgacgatggagagaacagaaggatccctggaggattgggacattgccgttcagaagaccgaaacacggctcgctagagtgaacgagcagcgcatgaaagccgccgaaaaggaggctgccctggtccaacaggaggaagagaaggcggaacagcggaaaagagctcgcgccgagaagaaagcccttaagaaaaagaagaaaatcagaggccctgaaaagcgcggggctgatgaggacgatgagaaagaatggggagacgatgaggaggagcagccctctaagcggagacgggtggagaatagcattcctgccgcgggcgaaacccaaaacgttgaggtggctgccgggcccgccggaaaatgtgctgccgtcgacgtggaacccccttccaagcagaaggagaaagctgccagcctgaagcgcgatatgccgaaagtgctccacgactcttccaaggatagcatcaccgtttttgtctctaatctgccctactccatgcaggaacctgacacaaaactgagaccccttttcgaggcgtgcggcgaggtggtgcaaattcggcctatcttcagcaaccgcggcgattttagagggtattgttacgtcgagttcaaggaagaaaaatccgccctccaggctctggagatggaccggaagtctgtggaaggacgccccatgtttgttagcccgtgcgtggacaagtccaaaaatcctgatttcaaggtctttagatattctacgagcctggagaaacataaactcttcatctccggcctgccctttagctgcaccaaggaggaacttgaggaaatttgtaaggcccacgggacagtgaaggacctgcggctcgttaccaacagagctggaaaacctaagggcctggcctacgtggagtatgaaaatgagtctcaggcctcccaggctgtcatgaaaatggatgggatgacaatcaaggagaacattatcaaagtggcgattagcaatccccctcaacgcaaggttcccgaaaagccggagacccggaaagcccctggcggacccatgctgcttccccagacgtacggcgctagagggaagggacgcacacagctctctctgctgcctcgggccctccagagaccgtccgccgctgctccccaagcggaaaacggccctgctgccgcccccgctgtggccgcgcctgctgccaccgaggcccccaaaatgagcaatgctgacttcgccaagctgtttcttcgcaaatga

SEQ ID NO: 3401 - protein, 760 aa, synthetic construct
  REGION 1..760: note = SEPR__Homo_sapiens__Q12884
MKTWVKIVFGVATSAVLALLVMCIVLRPSRVHNSEENTMRALTLKDILNGTFSYKTFFPNWISGQEYLHQSADNNIVLYNIETGQSYTILSNRTMKSVNASNYGLSPDRQFVYLESDYSKLWRYSYTATYYIYDLSNGEFVRGNELPRPIQYLCWSPVGSKLAYVYQNNIYLKQRPGDPPFQITFNGRENKIFNGIPDWVYEEEMLATKYALWWSPNGKFLAYAEFNDTDIPVIAYSYYGDEQYPRTINIPYPKAGAKNPVVRIFIIDTTYPAYVGPQEVPVPAMIASSDYYFSWLTWVTDERVCLQWLKRVQNVSVLSICDFREDWQTWDCPKTQEHIEESRTGWAGGFFVSTPVFSYDAISYYKIFSDKDGYKHIHYIKDTVENAIQITSGKWEAINIFRVTQDSLFYSSNEFEEYPGRRNIYRISIGSYPPSKKCVTCHLRKERCQYYTASFSDYAKYYALVCYGPGIPISTLHDGRTDQEIKILEENKELENALKNIQLPKEEIKKLEVDEITLWYKMILPPQFDRSKKYPLLIQVYGGPCSQSVRSVFAVNWISYLASKEGMVIALVDGRGTAFQGDKLLYAVYRKLGVYEVEDQITAVRKFIEMGFIDEKRIAIWGWSYGGYVSSLALASGTGLFKCGIAVAPVSSWEYYASVYTERFMGLPTKDDNLEHYKNSTVMARAEYFRNVDYLLIHGTADDNVHFQNSAQIAKALVNAQVDFQAMWYSDQNHGLSGLSTNHLYTHMTHFLKQCFSLSD

SEQ ID NO: 3402 - RNA, 2283 nt, synthetic construct
  misc_feature 1..2283: note = SEPR__Homo_sapiens__AAC51668
  source 1..2283: mol_type = other RNA
atgaagacttgggtaaaaatcgtatttggagttgccacctctgctgtgcttgccttattggtgatgtgcattgtcttacgcccttcaagagttcataactctgaagaaaatacaatgagagcactcacactgaaggatattttaaatggaacattttcttataaaacattttttccaaactggatttcaggacaagaatatcttcatcaatctgcagataacaatatagtactttataatattgaaacagggcaatcatataccattttgagtaatagaaccatgaaaagtgtgaatgcttcaaattacggcttatcacctgatcggcaatttgtatatctagaaagtgattattcaaagctttggagatactcttacacagcaacatattacatctatgaccttagcaatggagaatttgtaagaggaaatgagcttcctcgtccaattcagtatttatgctggtcgcctgttgggagtaaattagcatatgtctatcaaaacaatatctatttgaaacaaagaccaggagatccaccttttcaaataacatttaatggaagagaaaataaaatatttaatggaatcccagactgggtttatgaagaggaaatgcttgctacaaaatatgctctctggtggtctcctaatggaaaatttttggcatatgcggaatttaatgatacggatataccagttattgcctattcctattatggcgatgaacaatatcctagaacaataaatattccatacccaaaggctggagctaagaatcccgttgttcggatatttattatcgataccacttaccctgcgtatgtaggtccccaggaagtgcctgttccagcaatgatagcctcaagtgattattatttcagttggctcacgtgggttactgatgaacgagtatgtttgcagtggctaaaaagagtccagaatgtttcggtcctgtctatatgtgacttcagggaagactggcagacatgggattgtccaaagacccaggagcatatagaagaaagcagaactggatgggctggtggattctttgtttcaacaccagttttcagctatgatgccatttcgtactacaaaatatttagtgacaaggatggctacaaacatattcactatatcaaagacactgtggaaaatgctattcaaattacaagtggcaagtgggaggccataaatatattcagagtaacacaggattcactgttttattctagcaatgaatttgaagaataccctggaagaagaaacatctacagaattagcattggaagctatcctccaagcaagaagtgtgttacttgccatctaaggaaagaaaggtgccaatattacacagcaagtttcagcgactacgccaagtactatgcacttgtctgctacggcccaggcatccccatttccacccttcatgatggacgcactgatcaagaaattaaaatcctggaagaaaacaaggaattggaaaatgctttgaaaaatatccagctgcctaaagaggaaattaagaaacttgaagtagatgaaattactttatggtacaagatgattcttcctcctcaatttgacagatcaaagaagtatcccttgctaattcaagtgtatggtggtccctgcagtcagagtgtaaggtctgtatttgctgttaattggatatcttatcttgcaagtaaggaagggatggtcattgccttggtggatggtcgaggaacagctttccaaggtgacaaactcctctatgcagtgtatcgaaagctgggtgtttatgaagttgaagaccagattacagctgtcagaaaattcatagaaatgggtttcattgatgaaaaaagaatagccatatggggctggtcctatggaggatacgtttcatcactggcccttgcatctggaactggtcttttcaaatgtggtatagcagtggctccagtctccagctgggaatattacgcgtctgtctacacagagagattcatgggtctcccaacaaaggatgataatcttgagcactataagaattcaactgtgatggcaagagcagaatatttcagaaatgtagactatcttctcatccacggaacagcagatgataatgtgcactttcagaactcagcacagattgctaaagctctggttaatgcacaagtggatttccaggcaatgtggtactctgaccagaaccacggcttatccggcctgtccacgaaccacttatacacccacatgacccacttcctaaagcagtgtttctctttgtcagactaa

SEQ ID NO: 3403 - RNA, 2283 nt, synthetic construct
  misc_feature 1..2283: note = derived and/or modified sequence opt1 fromSEPR__Homo_sapiens__AAC51668
  source 1..2283: mol_type = other RNA
atgaagacctgggtgaagatcgtcttcggcgtggccaccagcgccgtgctggcgctcctggtcatgtgcatcgtgctgcgcccctcccgggtgcacaacagcgaggagaacacgatgcgcgccctcaccctgaaggacatcctgaacgggaccttctcctacaagaccttcttcccgaactggatcagcggccaggagtacctccaccagtccgccgacaacaacatcgtcctgtacaacatcgagacggggcagagctacaccatcctgtccaaccggaccatgaagtccgtgaacgccagcaactacggcctcagccccgaccgccagttcgtgtacctggagtccgactacagcaagctgtggcggtactcctacaccgccacgtactacatctacgacctcagcaacggggagttcgtccgcggcaacgagctgccccggcccatccagtacctgtgctggtccccggtgggcagcaagctcgcgtacgtgtaccagaacaacatctacctgaagcagcgccccggggacccgcccttccagatcaccttcaacggccgggagaacaagatcttcaacgggatccccgactgggtctacgaggaggagatgctggccaccaagtacgccctctggtggtcccccaacggcaagttcctggcctacgcggagttcaacgacaccgacatccccgtgatcgcctacagctactacggggacgagcagtacccccgcacgatcaacatcccgtaccccaaggccggcgccaagaaccccgtggtccggatcttcatcatcgacaccacctaccccgcctacgtgggcccgcaggaggtgcccgtccccgcgatgatcgcctccagcgactactacttcagctggctgacctgggtgacggacgagcgcgtgtgcctccagtggctgaagcgggtccagaacgtgtccgtgctgagcatctgcgacttccgcgaggactggcagacctgggactgccccaagacccaggagcacatcgaggagtcccggaccgggtgggccggcgggttcttcgtcagcacgccggtgttctcctacgacgccatcagctactacaagatcttctccgacaaggacggctacaagcacatccactacatcaaggacaccgtcgagaacgccatccagatcaccagcggcaagtgggaggcgatcaacatcttccgcgtgacccaggactccctcttctacagctccaacgagttcgaggagtaccccgggcggcgcaacatctaccggatcagcatcggctcctacccgcccagcaagaagtgcgtgacgtgccacctccgcaaggagcggtgccagtactacaccgcctccttcagcgactacgccaagtactacgccctggtctgctacgggcccggcatccccatctccaccctgcacgacgggcgcaccgaccaggagatcaagatcctggaggagaacaaggagctggagaacgccctcaagaacatccagctgcccaaggaggagatcaagaagctggaggtggacgagatcacgctctggtacaagatgatcctgcccccgcagttcgaccgcagcaagaagtaccccctgctcatccaggtgtacggcggcccctgctcccagagcgtccggagcgtgttcgcggtgaactggatctcctacctggccagcaaggaggggatggtcatcgccctggtggacggccgcgggaccgccttccagggcgacaagctcctgtacgccgtgtaccggaagctgggggtctacgaggtggaggaccagatcaccgcggtgcgcaagttcatcgagatgggcttcatcgacgagaagcggatcgccatctggggctggtcctacgggggctacgtcagctccctcgccctggccagcgggaccggcctgttcaagtgcgggatcgcggtggccccggtgtccagctgggagtactacgcctccgtctacacggagcgcttcatgggcctccccaccaaggacgacaacctggagcactacaagaacagcaccgtgatggcccgggccgagtacttccgcaacgtggactacctgctcatccacggcaccgcggacgacaacgtccacttccagaactccgcccagatcgccaaggccctggtgaacgcccaggtggacttccaggcgatgtggtacagcgaccagaaccacgggctgtccggcctgagcacgaaccacctctacacccacatgacccacttcctgaagcagtgcttctccctgagcgactga

SEQ ID NO: 3404 - RNA, 2283 nt, synthetic construct
  misc_feature 1..2283: note = derived and/or modified sequence opt2 fromSEPR__Homo_sapiens__AAC51668
  source 1..2283: mol_type = other RNA
atgaagacctgggtcaagatcgtcttcggcgtcgccacctccgccgtcctcgccctcctcgtcatgtgcatcgtcctccgcccctcccgcgtccacaactccgaggagaacaccatgcgcgccctcaccctcaaggacatcctcaacggcaccttctcctacaagaccttcttccccaactggatctccggccaggagtacctccaccagtccgccgacaacaacatcgtcctctacaacatcgagaccggccagtcctacaccatcctctccaaccgcaccatgaagtccgtcaacgcctccaactacggcctctcccccgaccgccagttcgtctacctcgagtccgactactccaagctctggcgctactcctacaccgccacctactacatctacgacctctccaacggcgagttcgtccgcggcaacgagctcccccgccccatccagtacctctgctggtcccccgtcggctccaagctcgcctacgtctaccagaacaacatctacctcaagcagcgccccggcgacccccccttccagatcaccttcaacggccgcgagaacaagatcttcaacggcatccccgactgggtctacgaggaggagatgctcgccaccaagtacgccctctggtggtcccccaacggcaagttcctcgcctacgccgagttcaacgacaccgacatccccgtcatcgcctactcctactacggcgacgagcagtacccccgcaccatcaacatcccctaccccaaggccggcgccaagaaccccgtcgtccgcatcttcatcatcgacaccacctaccccgcctacgtcggcccccaggaggtccccgtccccgccatgatcgcctcctccgactactacttctcctggctcacctgggtcaccgacgagcgcgtctgcctccagtggctcaagcgcgtccagaacgtctccgtcctctccatctgcgacttccgcgaggactggcagacctgggactgccccaagacccaggagcacatcgaggagtcccgcaccggctgggccggcggcttcttcgtctccacccccgtcttctcctacgacgccatctcctactacaagatcttctccgacaaggacggctacaagcacatccactacatcaaggacaccgtcgagaacgccatccagatcacctccggcaagtgggaggccatcaacatcttccgcgtcacccaggactccctcttctactcctccaacgagttcgaggagtaccccggccgccgcaacatctaccgcatctccatcggctcctaccccccctccaagaagtgcgtcacctgccacctccgcaaggagcgctgccagtactacaccgcctccttctccgactacgccaagtactacgccctcgtctgctacggccccggcatccccatctccaccctccacgacggccgcaccgaccaggagatcaagatcctcgaggagaacaaggagctcgagaacgccctcaagaacatccagctccccaaggaggagatcaagaagctcgaggtcgacgagatcaccctctggtacaagatgatcctccccccccagttcgaccgctccaagaagtaccccctcctcatccaggtctacggcggcccctgctcccagtccgtccgctccgtcttcgccgtcaactggatctcctacctcgcctccaaggagggcatggtcatcgccctcgtcgacggccgcggcaccgccttccagggcgacaagctcctctacgccgtctaccgcaagctcggcgtctacgaggtcgaggaccagatcaccgccgtccgcaagttcatcgagatgggcttcatcgacgagaagcgcatcgccatctggggctggtcctacggcggctacgtctcctccctcgccctcgcctccggcaccggcctcttcaagtgcggcatcgccgtcgcccccgtctcctcctgggagtactacgcctccgtctacaccgagcgcttcatgggcctccccaccaaggacgacaacctcgagcactacaagaactccaccgtcatggcccgcgccgagtacttccgcaacgtcgactacctcctcatccacggcaccgccgacgacaacgtccacttccagaactccgcccagatcgccaaggccctcgtcaacgcccaggtcgacttccaggccatgtggtactccgaccagaaccacggcctctccggcctctccaccaaccacctctacacccacatgacccacttcctcaagcagtgcttctccctctccgactga

SEQ ID NO: 3405 - RNA, 2283 nt, synthetic construct
  misc_feature 1..2283: note = derived and/or modified sequence opt3 fromSEPR__Homo_sapiens__AAC51668
  source 1..2283: mol_type = other RNA
atgaagacctgggtgaaaatcgtcttcggcgttgccacaagcgctgtgctggcactccttgtaatgtgcattgtgctgagaccctccagggtccacaactctgaggaaaatactatgcgggccttgacgttaaaggacatactgaacgggaccttttcatacaaaacattctttcctaattggatcagtggacaggagtatctacatcaaagcgcggataacaatattgtgctctacaacatcgaaactggtcagtcctataccattctgtctaatcgcacaatgaagtcggttaacgcttcaaattacggccttagcccagaccgacagttcgtgtatctggagagtgattactccaaattgtggcgttattcttacaccgccacttactatatctacgacctcagcaacggggaatttgtcagaggaaatgagctgccgaggcccatacagtatctgtgttggtcccctgtgggctcaaagctcgcatacgtatatcaaaacaatatctacttaaagcagcggccaggtgatccccctttccagattacatttaacgggcgcgagaataaaatcttcaacggcattccagactgggtttatgaagaggaaatgctggccaccaagtacgctctttggtggagtcccaacggaaaatttttggcatacgccgagttcaatgatacggacatccctgtgatagcttatagctactatggcgatgagcagtacccaagaactattaacatcccgtatcccaaggccggggcgaaaaatcctgtcgtgaggatttttatcatcgacaccacatacccagcatatgtgggaccccaagaagtccctgttccagccatgattgcttcttccgattactacttctcatggctgacttgggtgaccgacgagcgggtatgcctacagtggctcaagcgcgtgcagaacgtcagcgtgctgagtatatgtgattttcgagaagactggcagacatgggactgccccaagacccaagagcacatcgaagagtctagaacgggttgggccggcgggttcttcgtttccactccggtgtttagctatgatgcaatttcgtactataaaatcttctctgacaaggatggatacaaacatatacactatattaaggacacagtcgagaatgctatccagatcacctccggcaaatgggaagccattaacatctttagggtgactcaggattcacttttctacagtagcaatgagtttgaagagtatcctggtcggcgtaacatttaccgcatatccatcgggtcttatcccccaagcaagaaatgtgtaacatgccatctgagaaaggaaaggtgtcaatactacaccgcgtcattcagtgactatgccaagtactatgcattggtttgctacggacctggcattcccatctccacgctccacgatggccggaccgaccaggagatcaaaattctggaggaaaataaggagttagaaaacgctctgaaaaatatacagctcccaaaggaggaaatcaaaaagctggaggtggatgagattacactttggtataagatgatcttgccccctcagtttgaccgaagcaaaaagtacccactactgattcaagtctacgggggaccgtgttctcagtcagtgcgcagtgtcttcgccgtgaactggatcagctatctcgcttccaaagaaggtatggttatagccctggtggatggcagagggactgcatttcagggagacaaacttctgtacgccgtatataggaagttgggcgtctacgaggtggaagaccagatcaccgctgttcggaagttcattgagatgggttttatcgatgagaagcgcattgcgatctgggggtggtcttatggcggatacgtgtcgagcctcgcactggcctccggcacagggttattcaaatgcggaatagctgtcgcccccgtgtcaagttgggaatattacgcatctgtatacactgagagatttatgggtctgcctaccaaggacgataatctagaacactataaaaacagcacagtgatggccagggctgagtacttccgtaatgttgactatctcctgattcatggcaccgccgatgacaacgtccacttccaaaactccgcacagatcgcgaaggctcttgtgaatgcccaggtggattttcaggcaatgtggtactcagaccaaaaccatgggttgagcggactgtctactaatcacctctatacgcacatgacacatttcctgaaacagtgtttttcccttagtgattga

SEQ ID NO: 3406 - RNA, 2283 nt, synthetic construct
  misc_feature 1..2283: note = derived and/or modified sequence opt4 fromSEPR__Homo_sapiens__AAC51668
  source 1..2283: mol_type = other RNA
atgaagacctgggtgaagatcgtgttcggcgtggccaccagcgccgtgctggccctgctggtgatgtgcatcgtgctgagacccagcagagtgcacaacagcgaggagaacaccatgagagccctgaccctgaaggacatcctgaacggcaccttcagctacaagaccttcttccccaactggatcagcggccaggagtacctgcaccagagcgccgacaacaacatcgtgctgtacaacatcgagaccggccagagctacaccatcctgagcaacagaaccatgaagagcgtgaacgccagcaactacggcctgagccccgacagacagttcgtgtacctggagagcgactacagcaagctgtggagatacagctacaccgccacctactacatctacgacctgagcaacggcgagttcgtgagaggcaacgagctgcccagacccatccagtacctgtgctggagccccgtgggcagcaagctggcctacgtgtaccagaacaacatctacctgaagcagagacccggcgacccccccttccagatcaccttcaacggcagagagaacaagatcttcaacggcatccccgactgggtgtacgaggaggagatgctggccaccaagtacgccctgtggtggagccccaacggcaagttcctggcctacgccgagttcaacgacaccgacatccccgtgatcgcctacagctactacggcgacgagcagtaccccagaaccatcaacatcccctaccccaaggccggcgccaagaaccccgtggtgagaatcttcatcatcgacaccacctaccccgcctacgtgggcccccaggaggtgcccgtgcccgccatgatcgccagcagcgactactacttcagctggctgacctgggtgaccgacgagagagtgtgcctgcagtggctgaagagagtgcagaacgtgagcgtgctgagcatctgcgacttcagagaggactggcagacctgggactgccccaagacccaggagcacatcgaggagagcagaaccggctgggccggcggcttcttcgtgagcacccccgtgttcagctacgacgccatcagctactacaagatcttcagcgacaaggacggctacaagcacatccactacatcaaggacaccgtggagaacgccatccagatcaccagcggcaagtgggaggccatcaacatcttcagagtgacccaggacagcctgttctacagcagcaacgagttcgaggagtaccccggcagaagaaacatctacagaatcagcatcggcagctacccccccagcaagaagtgcgtgacctgccacctgagaaaggagagatgccagtactacaccgccagcttcagcgactacgccaagtactacgccctggtgtgctacggccccggcatccccatcagcaccctgcacgacggcagaaccgaccaggagatcaagatcctggaggagaacaaggagctggagaacgccctgaagaacatccagctgcccaaggaggagatcaagaagctggaggtggacgagatcaccctgtggtacaagatgatcctgcccccccagttcgacagaagcaagaagtaccccctgctgatccaggtgtacggcggcccctgcagccagagcgtgagaagcgtgttcgccgtgaactggatcagctacctggccagcaaggagggcatggtgatcgccctggtggacggcagaggcaccgccttccagggcgacaagctgctgtacgccgtgtacagaaagctgggcgtgtacgaggtggaggaccagatcaccgccgtgagaaagttcatcgagatgggcttcatcgacgagaagagaatcgccatctggggctggagctacggcggctacgtgagcagcctggccctggccagcggcaccggcctgttcaagtgcggcatcgccgtggcccccgtgagcagctgggagtactacgccagcgtgtacaccgagagattcatgggcctgcccaccaaggacgacaacctggagcactacaagaacagcaccgtgatggccagagccgagtacttcagaaacgtggactacctgctgatccacggcaccgccgacgacaacgtgcacttccagaacagcgcccagatcgccaaggccctggtgaacgcccaggtggacttccaggccatgtggtacagcgaccagaaccacggcctgagcggcctgagcaccaaccacctgtacacccacatgacccacttcctgaagcagtgcttcagcctgagcgactga

SEQ ID NO: 3407 - RNA, 2283 nt, synthetic construct
  misc_feature 1..2283: note = derived and/or modified sequence opt5 fromSEPR__Homo_sapiens__AAC51668
  source 1..2283: mol_type = other RNA
atgaagacctgggtgaaaatcgtcttcggcgttgccacaagcgctgtgctggccctcctggtgatgtgcattgtccttagaccctcccgggtgcacaactctgaggaaaatacgatgcgcgcgctgaccctcaaggacatcctgaacgggacatttagctacaaaaccttctttcctaattggatttccggacaggagtatcttcatcaatctgctgataacaatatcgttctgtacaacattgaaacaggccagagctataccatcctctccaatagaacaatgaagtctgtgaacgccagcaattacgggctgtccccggaccggcagttcgtctatctggagagcgattactctaaactctggcgctattcctacaccgccacgtactatatctacgacctgagcaacggagaatttgtgagaggcaatgagcttccccggcctattcagtatctgtgttggtctcccgttgggtccaagctcgcttacgtgtatcaaaacaatatctacctgaagcagcgccctggagatccccctttccagattacctttaacggcagagagaataaaatcttcaacggcattccggactgggtctatgaagaggaaatgcttgccacaaagtacgctctgtggtggagccccaacgggaaatttctcgcctacgcggagttcaatgataccgacatccctgtgattgcctattcttactatggagatgagcagtacccccggacaatcaacatcccttatcccaaggctggcgccaaaaatccggtggtccgcatttttatcattgacaccacgtaccctgcttatgttgggccccaagaagtgcctgtgcccgccatgatcgcgtccagcgattactacttctcctggctgacatgggtcaccgacgagagagtgtgcctgcagtggctcaagcgggttcagaacgtgtctgtcctgagcatttgtgattttcgcgaagactggcagacatgggactgccccaagacccaagagcacatcgaagagtccagaaccggatgggccggcgggttcttcgtgagcacacctgtgttttcttatgatgctatctcctactataaaattttcagcgacaaggatggatacaaacatatccactatattaaggacacggttgagaatgccatccagattacctctggcaaatgggaagctatcaacatctttcgggtcacacaggatagccttttctactcctctaatgagtttgaagagtatccgggccgcagaaacatttaccggatcagcattgggtcctatccccctagcaagaaatgtgtgacctgccatctgagaaaggaacgctgtcaatactacacagcctctttctccgactatgccaagtactatgctctcgtctgctacggacccggcatccctattagcaccctgcacgatgggcggacggaccaggagatcaaaattcttgaggaaaataaggagctggaaaacgcgctcaaaaatatccagctgcccaaggaggaaatcaaaaagctggaggtggatgagattacactctggtataagatgatcctgccgcctcagtttgacagatctaaaaagtacccccttctgattcaagtttacggaggcccttgttcccagagcgtgcgctccgtcttcgccgtgaactggatctcttatctcgctagcaaagaagggatggttattgccctggtggatggacggggcaccgcctttcagggcgacaagctcctgtacgctgtctatagaaaactcggggtgtacgaggtggaagaccagatcaccgccgttcgcaagttcatcgagatgggatttattgatgagaagcggatcgcgatttggggctggtcctatgggggatacgtctctagcctggctctggcctccggcacagggcttttcaaatgcggcatcgccgtggctcccgtgagctcttgggaatattacgcctccgtctacaccgagagatttatgggactgcctacaaaggacgataatcttgaacactataaaaacagcacggtgatggctcgcgccgagtacttccggaatgttgactatctgctcattcatggcaccgcggatgacaacgtgcacttccaaaactctgcccagatcgctaaggccctggtcaatgctcaggtggattttcaggccatgtggtactccgaccaaaaccatgggctgagcggactttctacaaatcacctctatacccacatgacacatttcctgaaacagtgttttagcctgtccgattga

SEQ ID NO: 3408 - protein, 333 aa, synthetic construct
  REGION 1..333: note = SIA7F__Homo_sapiens__Q969X2
MACSRPPSQCEPTSLPPGPPAGRRHLPLSRRRREMSSNKEQRSAVFVILFALITILILYSSNSANEVFHYGSLRGRSRRPVNLKKWSITDGYVPILGNKTLPSRCHQCVIVSSSSHLLGTKLGPEIERAECTIRMNDAPTTGYSADVGNKTTYRVVAHSSVFRVLRRPQEFVNRTPETVFIFWGPPSKMQKPQGSLVRVIQRAGLVFPNMEAYAVSPGRMRQFDDLFRGETGKDREKSHSWLSTGWFTMVIAVELCDHVHVYGMVPPNYCSQRPRLQRMPYHYYEPKGPDECVTYIQNEHSRKGNHHRFITEKRVFSSWAQLYGITFSHPSWT

SEQ ID NO: 3409 - RNA, 1002 nt, synthetic construct
  misc_feature 1..1002: note = SIA7F__Homo_sapiens__AAH06564
  source 1..1002: mol_type = other RNA
atggcttgctcgaggccccccagccagtgtgaacccacatccctgcccccagggccacctgcaggacgccgacacctacccctcagcagacgccggagagaaatgagtagcaacaaagagcagcggtcagcagtgttcgtgatcctctttgccctcatcaccatcctcatcctctacagctccaacagtgccaatgaggtcttccattacggctccctgcggggccgtagccgccgacctgtcaacctcaagaagtggagcatcactgacggctatgtccccattctcggcaacaagacactgccctctcggtgccaccagtgtgtgattgtcagcagctccagccacctgctgggcaccaagctgggccctgagatcgagcgggctgagtgtacaatccgcatgaatgatgcacccaccactggctactcagctgatgtgggcaacaagaccacctaccgcgtcgtggcccattccagtgtgttccgcgtgctgaggaggccccaggagtttgtcaaccggacccctgaaaccgtgttcatcttctgggggcccccgagcaagatgcagaagccccagggcagcctcgtgcgtgtgatccagcgagcgggcctggtgttccccaacatggaagcatatgccgtctctcccggccgcatgcggcaatttgacgacctcttccggggtgagacgggcaaggacagggagaagtctcattcgtggttgagcacaggctggtttaccatggtgatcgcggtggagttgtgtgaccacgtgcatgtctatggcatggtcccccccaactactgcagccagcggccccgcctccagcgcatgccctaccactactacgagcccaaggggccggacgaatgtgtcacctacatccagaatgagcacagtcgcaagggcaaccaccaccgcttcatcaccgagaaaagggtcttctcatcgtgggcccagctgtatggcatcaccttctcccacccctcctggacctag

SEQ ID NO: 3410 - RNA, 1002 nt, synthetic construct
  misc_feature 1..1002: note = derived and/or modified sequence opt1 fromSIA7F__Homo_sapiens__AAH06564
  source 1..1002: mol_type = other RNA
atggcctgcagccggcccccgtcccagtgcgagcccaccagcctgccgcccggcccgcccgccgggcgccgccacctccccctgtcccggcgccggcgcgagatgagctccaacaaggagcagcggagcgcggtgttcgtcatcctgttcgccctcatcaccatcctgatcctgtactccagcaactccgccaacgaggtgttccactacggcagcctccgcgggcggtcccgccggcccgtgaacctgaagaagtggagcatcacggacggctacgtccccatcctggggaacaagaccctcccctcccgctgccaccagtgcgtgatcgtgagctccagctcccacctcctgggcaccaagctgggccccgagatcgagcgggccgagtgcaccatccgcatgaacgacgcccccacgaccgggtacagcgcggacgtcggcaacaagaccacctaccgggtggtggcccactccagcgtcttccgcgtgctgcggcgcccgcaggagttcgtgaaccggacgcccgagaccgtcttcatcttctgggggccgcccagcaagatgcagaagccccagggctccctggtgcgcgtgatccagcgggccgggctcgtcttccccaacatggaggcctacgcggtgagccccggccgcatgcgccagttcgacgacctgttccggggcgagaccgggaaggaccgcgagaagtcccacagctggctgtccaccggctggttcacgatggtgatcgccgtcgagctctgcgaccacgtgcacgtgtacgggatggtgcccccgaactactgcagccagcggccccgcctgcagcggatgccctaccactactacgagcccaagggcccggacgagtgcgtcacctacatccagaacgagcactcccgcaagggcaaccaccaccggttcatcaccgagaagcgcgtgttcagctcctgggcccagctgtacgggatcaccttcagccacccctcctggacgtga

SEQ ID NO: 3411 - RNA, 1002 nt, synthetic construct
  misc_feature 1..1002: note = derived and/or modified sequence opt2 fromSIA7F__Homo_sapiens__AAH06564
  source 1..1002: mol_type = other RNA
atggcctgctcccgccccccctcccagtgcgagcccacctccctcccccccggcccccccgccggccgccgccacctccccctctcccgccgccgccgcgagatgtcctccaacaaggagcagcgctccgccgtcttcgtcatcctcttcgccctcatcaccatcctcatcctctactcctccaactccgccaacgaggtcttccactacggctccctccgcggccgctcccgccgccccgtcaacctcaagaagtggtccatcaccgacggctacgtccccatcctcggcaacaagaccctcccctcccgctgccaccagtgcgtcatcgtctcctcctcctcccacctcctcggcaccaagctcggccccgagatcgagcgcgccgagtgcaccatccgcatgaacgacgcccccaccaccggctactccgccgacgtcggcaacaagaccacctaccgcgtcgtcgcccactcctccgtcttccgcgtcctccgccgcccccaggagttcgtcaaccgcacccccgagaccgtcttcatcttctggggccccccctccaagatgcagaagccccagggctccctcgtccgcgtcatccagcgcgccggcctcgtcttccccaacatggaggcctacgccgtctcccccggccgcatgcgccagttcgacgacctcttccgcggcgagaccggcaaggaccgcgagaagtcccactcctggctctccaccggctggttcaccatggtcatcgccgtcgagctctgcgaccacgtccacgtctacggcatggtcccccccaactactgctcccagcgcccccgcctccagcgcatgccctaccactactacgagcccaagggccccgacgagtgcgtcacctacatccagaacgagcactcccgcaagggcaaccaccaccgcttcatcaccgagaagcgcgtcttctcctcctgggcccagctctacggcatcaccttctcccacccctcctggacctga

SEQ ID NO: 3412 - RNA, 1002 nt, synthetic construct
  misc_feature 1..1002: note = derived and/or modified sequence opt3 fromSIA7F__Homo_sapiens__AAH06564
  source 1..1002: mol_type = other RNA
atggcctgcagcagacccccttcccagtgtgagccaacctctctgccgcccggccctccagctgggaggcggcacctccccctttcacgccgacgtagagaaatgagtagcaacaaggagcaaaggtccgcagtgttcgtcatcctgtttgccttgattacaatattaatcctgtactcttcaaattcggcgaacgaagttttccattatggaagcctacggggtcgcagtagaaggcctgtgaatctcaaaaagtggtccattactgacggctacgtaccaatcctggggaacaaaacgcttccctctcggtgccaccagtgtgtgattgtcagctcctcaagtcatctgttgggaaccaagctcggccctgagatcgaacgcgctgagtgcacaatacgaatgaatgatgccccaactaccggttatagcgcagacgtggggaacaaaacaacctacagagttgtggcccactcttccgtctttagggtgctgcggcgtccgcaggagttcgtaaatcgcactcccgaaacagtttttatcttctggggacctccatcaaagatgcagaagccccaaggcagcctggtgagagtcattcagagggctggcctcgtgtttcctaacatggaggcatatgccgtgagtccagggcggatgcgacagttcgatgacttatttcgcggagaaaccggtaaagatagagagaagtctcattcctggctgagcacgggctggttcactatggtcatcgctgttgagctttgtgaccacgtgcacgtatacgggatggtgcccccgaattattgctcgcagaggcctcggttgcaacgcatgccctaccattactatgaaccaaaaggacctgatgagtgtgtcacctacattcagaacgaacactctagaaagggcaatcatcacaggtttatcacagagaaacgtgtgttctcctcatgggcccagctgtatggtataacttttagtcaccccagctggacctga

SEQ ID NO: 3413 - RNA, 1002 nt, synthetic construct
  misc_feature 1..1002: note = derived and/or modified sequence opt4 fromSIA7F__Homo_sapiens__AAH06564
  source 1..1002: mol_type = other RNA
atggcctgcagcagaccccccagccagtgcgagcccaccagcctgccccccggcccccccgccggcagaagacacctgcccctgagcagaagaagaagagagatgagcagcaacaaggagcagagaagcgccgtgttcgtgatcctgttcgccctgatcaccatcctgatcctgtacagcagcaacagcgccaacgaggtgttccactacggcagcctgagaggcagaagcagaagacccgtgaacctgaagaagtggagcatcaccgacggctacgtgcccatcctgggcaacaagaccctgcccagcagatgccaccagtgcgtgatcgtgagcagcagcagccacctgctgggcaccaagctgggccccgagatcgagagagccgagtgcaccatcagaatgaacgacgcccccaccaccggctacagcgccgacgtgggcaacaagaccacctacagagtggtggcccacagcagcgtgttcagagtgctgagaagaccccaggagttcgtgaacagaacccccgagaccgtgttcatcttctggggcccccccagcaagatgcagaagccccagggcagcctggtgagagtgatccagagagccggcctggtgttccccaacatggaggcctacgccgtgagccccggcagaatgagacagttcgacgacctgttcagaggcgagaccggcaaggacagagagaagagccacagctggctgagcaccggctggttcaccatggtgatcgccgtggagctgtgcgaccacgtgcacgtgtacggcatggtgccccccaactactgcagccagagacccagactgcagagaatgccctaccactactacgagcccaagggccccgacgagtgcgtgacctacatccagaacgagcacagcagaaagggcaaccaccacagattcatcaccgagaagagagtgttcagcagctgggcccagctgtacggcatcaccttcagccaccccagctggacctga

SEQ ID NO: 3414 - RNA, 1002 nt, synthetic construct
  misc_feature 1..1002: note = derived and/or modified sequence opt5 fromSIA7F__Homo_sapiens__AAH06564
  source 1..1002: mol_type = other RNA
atggcctgcagcagacccccttcccagtgtgagccgacctctctgccccctgggccccctgctggccggcgccacctccccctgagcagacggcgcagagaaatgtcctctaacaaggagcaacggagcgccgtgttcgtcatcctttttgcgctgattacaatcctcattctgtactcctctaatagcgctaacgaagttttccattatggatcccttcgcggcagaagccggcgccctgtgaatctgaaaaagtggtctatcacggacgggtacgtgccgattctcggaaacaaaaccctgccctccagatgccaccagtgtgtcatcgtgtctagctccagccatctgctcggcacaaagctggggcctgagatcgaacgggccgagtgcaccattcgcatgaatgatgcccccacaaccggatattctgctgacgttggcaacaaaacaacctacagagtggtcgcccactccagcgtgtttcgggttcttcgcagacctcaggagttcgtgaatcggacgcccgaaaccgtctttatcttctggggcccgccttccaagatgcagaagccccaagggtctctggtgagagtgattcagcgcgctggactcgtctttcctaacatggaggcctatgcggttagccccggccggatgagacagttcgatgacctgtttcgcggggaaacaggaaaagatcgggagaagtcccatagctggctttctaccggctggttcacaatggtgatcgccgtggagctgtgtgaccacgtccacgtgtacgggatggttccccctaattattgctcccagagaccgcgcctccaacggatgccctaccattactatgaacctaaaggacccgatgagtgtgtgacctacattcagaacgaacacagcagaaagggcaatcatcaccgctttatcacggagaaacgggtcttctctagctgggctcagctgtatggcattacattttcccacccttcttggacctga

SEQ ID NO: 3415 - protein, 356 aa, synthetic construct
  REGION 1..356: note = SIA8A__Homo_sapiens__Q92185
MSPCGRARRQTSRGAMAVLAWKFPRTRLPMGASALCVVVLCWLYIFPVYRLPNEKEIVQGVLQQGTAWRRNQTAARAFRKQMEDCCDPAHLFAMTKMNSPMGKSMWYDGEFLYSFTIDNSTYSLFPQATPFQLPLKKCAVVGNGGILKKSGCGRQIDEANFVMRCNLPPLSSEYTKDVGSKSQLVTANPSIIRQRFQNLLWSRKTFVDNMKIYNHSYIYMPAFSMKTGTEPSLRVYYTLSDVGANQTVLFANPNFLRSIGKFWKSRGIHAKRLSTGLFLVSAALGLCEEVAIYGFWPFSVNMHEQPISHHYYDNVLPFSGFHAMPEEFLQLWYLHKIGALRMQLDPCEDTSLQPTS

SEQ ID NO: 3416 - RNA, 1071 nt, synthetic construct
  misc_feature 1..1071: note = SIA8A__Homo_sapiens__AAC37586
  source 1..1071: mol_type = other RNA
atgagcccctgcgggcgggcccggcgacaaacgtccagaggggccatggctgtactggcgtggaagttcccgcggacccggctgcccatgggagccagtgccctctgtgtcgtggtcctctgttggctctacatcttccccgtctaccggctgcccaacgagaaagagatcgtgcagggggtgctgcaacagggcacggcgtggaggaggaaccagaccgcggccagagcgttcaggaaacaaatggaagactgctgcgaccctgcccatctctttgctatgactaaaatgaattcccctatggggaagagcatgtggtatgacggggagtttttatactcattcaccattgacaattcaacttactctctcttcccacaggcaaccccattccagctgccattgaagaaatgcgcggtggtgggaaatggtgggattctgaagaagagtggctgtggccgtcaaatagatgaagcaaattttgtcatgcgatgcaatctccctcctttgtcaagtgaatacactaaggatgttggatccaaaagtcagttagtgacagctaatcccagcataattcggcaaaggtttcagaaccttctgtggtccagaaagacatttgtggacaacatgaaaatctataaccacagttacatctacatgcctgccttttctatgaagacaggaacagagccatctttgagggtttattatacactgtcagatgttggtgccaatcaaacagtgctgtttgccaaccccaactttctgcgtagcattggaaagttctggaaaagtagaggaatccatgccaagcgcctgtccacaggactttttctggtgagcgcagctctgggtctctgtgaagaggtggccatctatggcttctggcccttctctgtgaatatgcatgagcagcccatcagccaccactactatgacaacgtcttacccttttctggcttccatgccatgcccgaggaatttctccaactctggtatcttcataaaatcggtgcactgagaatgcagctggacccatgtgaagatacctcactccagcccacttcctag

SEQ ID NO: 3417 - RNA, 1071 nt, synthetic construct
  misc_feature 1..1071: note = derived and/or modified sequence opt1 fromSIA8A__Homo_sapiens__AAC37586
  source 1..1071: mol_type = other RNA
atgagcccctgcggccgcgcccggcgccagacctcccgcggggccatggcggtgctggcctggaagttcccgcggacccggctccccatgggcgccagcgccctgtgcgtcgtggtgctgtgctggctctacatcttccccgtctaccgcctgcccaacgagaaggagatcgtgcagggggtgctgcagcagggcacggcctggcggcgcaaccagaccgcggcccgggccttccgcaagcagatggaggactgctgcgacccggcccacctcttcgcgatgaccaagatgaactcccccatgggcaagagcatgtggtacgacggggagttcctgtactccttcaccatcgacaacagcacgtactccctgttcccccaggccacccccttccagctcccgctgaagaagtgcgccgtcgtgggcaacgggggcatcctgaagaagtccgggtgcggccggcagatcgacgaggccaacttcgtgatgcgctgcaacctcccgcccctgagcagcgagtacaccaaggacgtcgggtccaagagccagctggtgaccgccaacccctccatcatccggcagcgcttccagaacctcctgtggagccggaagacgttcgtggacaacatgaagatctacaaccactcctacatctacatgcccgcgttcagcatgaagaccggcaccgagccctccctgcgcgtctactacaccctcagcgacgtgggcgccaaccagacggtgctgttcgccaaccccaacttcctgcggtccatcgggaagttctggaagtcccgcggcatccacgccaagcggctcagcaccgggctgttcctggtcagcgccgcgctcggcctgtgcgaggaggtggccatctacggcttctggcccttcagcgtgaacatgcacgagcagccgatctcccaccactactacgacaacgtcctgcccttcagcgggttccacgccatgcccgaggagttcctccagctgtggtacctgcacaagatcggcgccctccgcatgcagctggacccctgcgaggacacctccctgcagccgaccagctga

SEQ ID NO: 3418 - RNA, 1071 nt, synthetic construct
  misc_feature 1..1071: note = derived and/or modified sequence opt2 fromSIA8A__Homo_sapiens__AAC37586
  source 1..1071: mol_type = other RNA
atgtccccctgcggccgcgcccgccgccagacctcccgcggcgccatggccgtcctcgcctggaagttcccccgcacccgcctccccatgggcgcctccgccctctgcgtcgtcgtcctctgctggctctacatcttccccgtctaccgcctccccaacgagaaggagatcgtccagggcgtcctccagcagggcaccgcctggcgccgcaaccagaccgccgcccgcgccttccgcaagcagatggaggactgctgcgaccccgcccacctcttcgccatgaccaagatgaactcccccatgggcaagtccatgtggtacgacggcgagttcctctactccttcaccatcgacaactccacctactccctcttcccccaggccacccccttccagctccccctcaagaagtgcgccgtcgtcggcaacggcggcatcctcaagaagtccggctgcggccgccagatcgacgaggccaacttcgtcatgcgctgcaacctcccccccctctcctccgagtacaccaaggacgtcggctccaagtcccagctcgtcaccgccaacccctccatcatccgccagcgcttccagaacctcctctggtcccgcaagaccttcgtcgacaacatgaagatctacaaccactcctacatctacatgcccgccttctccatgaagaccggcaccgagccctccctccgcgtctactacaccctctccgacgtcggcgccaaccagaccgtcctcttcgccaaccccaacttcctccgctccatcggcaagttctggaagtcccgcggcatccacgccaagcgcctctccaccggcctcttcctcgtctccgccgccctcggcctctgcgaggaggtcgccatctacggcttctggcccttctccgtcaacatgcacgagcagcccatctcccaccactactacgacaacgtcctccccttctccggcttccacgccatgcccgaggagttcctccagctctggtacctccacaagatcggcgccctccgcatgcagctcgacccctgcgaggacacctccctccagcccacctcctga

SEQ ID NO: 3419 - RNA, 1071 nt, synthetic construct
  misc_feature 1..1071: note = derived and/or modified sequence opt3 fromSIA8A__Homo_sapiens__AAC37586
  source 1..1071: mol_type = other RNA
atgagcccctgcggcagagccaggcggcagacctcccgcggggctatggcagtgctggcctggaagttccctcgaacacgtctcccaatgggagcgtctgctctttgtgtcgttgtgctgtgctggttgtacatctttccggtatatagattacccaacgagaaagaaattgtgcaaggtgtcctgcagcagggcactgcctggaggcggaatcagacggcagcccgcgctttcagaaagcaaatggaggactgttgcgatcctgcacacctatttgccatgaccaaaatgaactcaccaatggggaagagtatgtggtacgacggagagttcctctatagctttacaatagataattccacttactctctgttcccccaggctaccccttttcagcttccactgaaaaagtgtgccgtggttggcaacggtgggatcttgaagaaatcgggatgcggcaggcagattgacgaagcgaatttcgtgatgcggtgtaacctgccccctctctcaagcgaatatacaaaggatgtcggcagtaaatcccaactggtgaccgcaaatccatctatcattcgccagcgatttcagaacctcttatggagcagaaagactttcgtagacaatatgaaaatctacaaccattcctatatatacatgccggccttttcaatgaagacagggaccgagcccagtctgagggtttactatacgcttagcgatgtgggagctaatcagactgtcttgttcgccaaccctaattttctgcggtctatcggtaagttctggaaatcccgtggcattcacgcaaagcgcctatcaaccggactcttcctggtgagcgctgcccttgggctgtgcgaggaagtggcgatctacggcttttggccattcagtgtcaacatgcatgagcaacccatttctcaccattattacgacaatgttttgcctttttccggtttccacgccatgccagaagagtttctccagctgtggtatttacacaaaatcggggcactgagaatgcagctcgatccctgtgaggacacaagccttcaaccgacttcgtga

SEQ ID NO: 3420 - RNA, 1071 nt, synthetic construct
  misc_feature 1..1071: note = derived and/or modified sequence opt4 fromSIA8A__Homo_sapiens__AAC37586
  source 1..1071: mol_type = other RNA
atgagcccctgcggcagagccagaagacagaccagcagaggcgccatggccgtgctggcctggaagttccccagaaccagactgcccatgggcgccagcgccctgtgcgtggtggtgctgtgctggctgtacatcttccccgtgtacagactgcccaacgagaaggagatcgtgcagggcgtgctgcagcagggcaccgcctggagaagaaaccagaccgccgccagagccttcagaaagcagatggaggactgctgcgaccccgcccacctgttcgccatgaccaagatgaacagccccatgggcaagagcatgtggtacgacggcgagttcctgtacagcttcaccatcgacaacagcacctacagcctgttcccccaggccacccccttccagctgcccctgaagaagtgcgccgtggtgggcaacggcggcatcctgaagaagagcggctgcggcagacagatcgacgaggccaacttcgtgatgagatgcaacctgccccccctgagcagcgagtacaccaaggacgtgggcagcaagagccagctggtgaccgccaaccccagcatcatcagacagagattccagaacctgctgtggagcagaaagaccttcgtggacaacatgaagatctacaaccacagctacatctacatgcccgccttcagcatgaagaccggcaccgagcccagcctgagagtgtactacaccctgagcgacgtgggcgccaaccagaccgtgctgttcgccaaccccaacttcctgagaagcatcggcaagttctggaagagcagaggcatccacgccaagagactgagcaccggcctgttcctggtgagcgccgccctgggcctgtgcgaggaggtggccatctacggcttctggcccttcagcgtgaacatgcacgagcagcccatcagccaccactactacgacaacgtgctgcccttcagcggcttccacgccatgcccgaggagttcctgcagctgtggtacctgcacaagatcggcgccctgagaatgcagctggacccctgcgaggacaccagcctgcagcccaccagctga

SEQ ID NO: 3421 - RNA, 1071 nt, synthetic construct
  misc_feature 1..1071: note = derived and/or modified sequence opt5 fromSIA8A__Homo_sapiens__AAC37586
  source 1..1071: mol_type = other RNA
atgagcccctgcggcagagcccggcgccagacctccagaggggctatggccgtgctggcgtggaagttccctcggacacgcctcccgatgggagcttctgccctgtgtgtcgttgtgctttgctggctgtacatctttcccgtgtatagactccctaacgagaaagaaattgtccaaggcgtgctgcagcaggggacggcctggcggcgcaatcagaccgctgccagagctttccggaagcaaatggaggactgttgcgatcccgcccacctttttgcgatgacaaaaatgaacagccctatgggaaagtccatgtggtacgacggcgagttcctgtattcttttaccatcgataatagcacatactccctcttcccccaggccaccccttttcagctgccgctgaaaaagtgtgctgttgtggggaacggaggcattctcaagaaatctggctgcgggcgccagatcgacgaagccaatttcgtcatgagatgtaacctgccccctcttagctccgaatatacaaaggatgtgggaagcaaatctcaactggttaccgctaatccctccattatccggcagcgctttcagaacctcctgtggagcagaaagacgttcgtggacaatatgaaaatctacaaccattcttatatttacatgcctgccttttccatgaagaccggcacagagcccagccttcgggtctactataccctgtctgatgtgggggcgaatcagacagtcctcttcgccaacccgaattttctgcgctccatcggaaagttctggaaaagcagaggcattcacgctaagcggctgtccaccggactcttcctggtgtctgccgctcttgggctgtgcgaggaagttgccatctacggcttttggcctttcagcgtgaacatgcatgagcaacccatttcccaccattattacgacaatgtgctcccttttagcggcttccacgccatgcccgaagagtttctgcagctttggtatctgcacaaaatcggggctctcagaatgcagctggatccctgtgaggacacgtctctgcaacctacatcctga

SEQ ID NO: 3422 - protein, 418 aa, synthetic construct
  REGION 1..418: note = SIAT9__Homo_sapiens__Q9UNP4
MRTKAAGCAERRPLQPRTEAAAAPAGRAMPSEYTYVKLRSDCSRPSLQWYTRAQSKMRRPSLLLKDILKCTLLVFGVWILYILKLNYTTEECDMKKMHYVDPDHVKRAQKYAQQVLQKECRPKFAKTSMALLFEHRYSVDLLPFVQKAPKDSEAESKYDPPFGFRKFSSKVQTLLELLPEHDLPEHLKAKTCRRCVVIGSGGILHGLELGHTLNQFDVVIRLNSAPVEGYSEHVGNKTTIRMTYPEGAPLSDLEYYSNDLFVAVLFKSVDFNWLQAMVKKETLPFWVRLFFWKQVAEKIPLQPKHFRILNPVIIKETAFDILQYSEPQSRFWGRDKNVPTIGVIAVVLATHLCDEVSLAGFGYDLNQPRTPLHYFDSQCMAAMNFQTMHNVTTETKFLLKLVKEGVVKDLSGGIDREF

SEQ ID NO: 3423 - RNA, 1257 nt, synthetic construct
  misc_feature 1..1257: note = SIAT9__Homo_sapiens__BAG50894
  source 1..1257: mol_type = other RNA
atgcggacgaaggcggcgggctgcgcggagcggcgtcccctgcagccgcggaccgaggcagcggcggcacctgccggccgagcaatgccaagtgagtacacctatgtgaaactgagaagtgattgctcgaggccttccctgcaatggtacacccgagctcaaagcaagatgagaaggcccagcttgttattaaaagacatcctcaaatgtacattgcttgtgtttggagtgtggatcctttatatcctcaagttaaattatactactgaagaatgtgacatgaaaaaaatgcattatgtggaccctgaccatgtaaagagagctcagaaatatgctcagcaagtcttgcagaaggaatgtcgtcccaagtttgccaagacatcaatggcgctgttatttgagcacaggtatagcgtggacttactcccttttgtgcagaaggcccccaaagacagtgaagctgagtccaagtacgatcctccttttgggttccggaagttctccagtaaagtccagaccctcttggaactcttgccagagcacgacctccctgaacacttgaaagccaagacctgtcggcgctgtgtggttattggaagcggaggaatactgcacggattagaactgggccacaccctgaaccagttcgatgttgtgataaggttaaacagtgcaccagttgagggatattcagaacatgttggaaataaaactactataaggatgacttatccagagggcgcaccactgtctgaccttgaatattattccaatgacttatttgttgctgttttatttaagagtgttgatttcaactggcttcaagcaatggtaaaaaaggaaaccctgccattctgggtacgactcttcttttggaagcaggtggcagaaaaaatcccactgcagccaaaacatttcaggattttgaatccagttatcatcaaagagactgcctttgacatccttcagtactcagagcctcagtcaaggttctggggccgagataagaacgtccccacaatcggtgtcattgccgttgtcttagccacacatctgtgcgatgaagtcagtttggcgggttttggatatgacctcaatcaacccagaacacctttgcactacttcgacagtcaatgcatggctgctatgaactttcagaccatgcataatgtgacaacggaaaccaagttcctcttaaagctggtcaaagagggagtggtgaaagatctcagtggaggcattgatcgtgaattttga

SEQ ID NO: 3424 - RNA, 1257 nt, synthetic construct
  misc_feature 1..1257: note = derived and/or modified sequence opt1 fromSIAT9__Homo_sapiens__BAG50894
  source 1..1257: mol_type = other RNA
atgcgcaccaaggccgccggctgcgcggagcggcgccccctgcagccgcggaccgaggccgccgccgcccccgcggggcgcgccatgcccagcgagtacacgtacgtgaagctccggtccgactgcagccgcccctccctgcagtggtacacccgggcccagagcaagatgcgccggccgtccctgctcctgaaggacatcctgaagtgcaccctcctggtcttcggcgtgtggatcctgtacatcctcaagctgaactacaccacggaggagtgcgacatgaagaagatgcactacgtggaccccgaccacgtcaagcgcgcccagaagtacgcgcagcaggtcctgcagaaggagtgccggcccaagttcgccaagaccagcatggccctcctgttcgagcaccgctactccgtggacctgctccccttcgtgcagaaggccccgaaggacagcgaggccgagtccaagtacgacccgcccttcgggttccggaagttcagctccaaggtgcagaccctgctggagctcctgcccgagcacgacctgcccgagcacctcaaggcgaagacctgccgccggtgcgtggtcatcggcagcgggggcatcctgcacggcctggagctcgggcacacgctgaaccagttcgacgtggtgatccgcctgaactccgcccccgtcgagggctacagcgagcacgtggggaacaagaccaccatccggatgacctaccccgagggcgcgcccctctccgacctggagtactacagcaacgacctgttcgtggccgtcctcttcaagtccgtggacttcaactggctgcaggccatggtgaagaaggagacgctgccgttctgggtccgcctcttcttctggaagcaggtcgccgagaagatccccctgcagcccaagcacttccggatcctgaaccccgtgatcatcaaggagaccgccttcgacatcctccagtacagcgagccgcagtcccgcttctgggggcgggacaagaacgtgcccaccatcggcgtgatcgccgtggtcctggccacccacctgtgcgacgaggtgagcctcgccggcttcgggtacgacctgaaccagccccgcacgcccctgcactacttcgacagccagtgcatggcggccatgaacttccagaccatgcacaacgtcaccaccgagacgaagttcctcctgaagctggtgaaggagggcgtggtcaaggacctctccgggggcatcgaccgcgagttctga

SEQ ID NO: 3425 - RNA, 1257 nt, synthetic construct
  misc_feature 1..1257: note = derived and/or modified sequence opt2 fromSIAT9__Homo_sapiens__BAG50894
  source 1..1257: mol_type = other RNA
atgcgcaccaaggccgccggctgcgccgagcgccgccccctccagccccgcaccgaggccgccgccgcccccgccggccgcgccatgccctccgagtacacctacgtcaagctccgctccgactgctcccgcccctccctccagtggtacacccgcgcccagtccaagatgcgccgcccctccctcctcctcaaggacatcctcaagtgcaccctcctcgtcttcggcgtctggatcctctacatcctcaagctcaactacaccaccgaggagtgcgacatgaagaagatgcactacgtcgaccccgaccacgtcaagcgcgcccagaagtacgcccagcaggtcctccagaaggagtgccgccccaagttcgccaagacctccatggccctcctcttcgagcaccgctactccgtcgacctcctccccttcgtccagaaggcccccaaggactccgaggccgagtccaagtacgacccccccttcggcttccgcaagttctcctccaaggtccagaccctcctcgagctcctccccgagcacgacctccccgagcacctcaaggccaagacctgccgccgctgcgtcgtcatcggctccggcggcatcctccacggcctcgagctcggccacaccctcaaccagttcgacgtcgtcatccgcctcaactccgcccccgtcgagggctactccgagcacgtcggcaacaagaccaccatccgcatgacctaccccgagggcgcccccctctccgacctcgagtactactccaacgacctcttcgtcgccgtcctcttcaagtccgtcgacttcaactggctccaggccatggtcaagaaggagaccctccccttctgggtccgcctcttcttctggaagcaggtcgccgagaagatccccctccagcccaagcacttccgcatcctcaaccccgtcatcatcaaggagaccgccttcgacatcctccagtactccgagccccagtcccgcttctggggccgcgacaagaacgtccccaccatcggcgtcatcgccgtcgtcctcgccacccacctctgcgacgaggtctccctcgccggcttcggctacgacctcaaccagccccgcacccccctccactacttcgactcccagtgcatggccgccatgaacttccagaccatgcacaacgtcaccaccgagaccaagttcctcctcaagctcgtcaaggagggcgtcgtcaaggacctctccggcggcatcgaccgcgagttctga

SEQ ID NO: 3426 - RNA, 1257 nt, synthetic construct
  misc_feature 1..1257: note = derived and/or modified sequence opt3 fromSIAT9__Homo_sapiens__BAG50894
  source 1..1257: mol_type = other RNA
atgagaaccaaggccgctggctgcgcagaaaggcggcccctgcagcctcgcacagaagccgcggctgccccagcagggcgagccatgccgagcgagtacacttatgtgaaactccgttccgactgttctagaccctcacttcaatggtacacgagggctcagagtaagatgcggcgccctagcctgttgttaaaagatatcctgaagtgcaccctactcgtcttcggagtttggattctgtatatacttaaactgaactacacaactgaagagtgtgacatgaagaagatgcactatgtggatccagaccatgtaaaaagagcacagaagtacgcccagcaagtgttgcagaaagaatgcaggcccaagtttgctaaaacctccatggccctcctgttcgagcaccggtattctgtcgatctgctcccttttgtgcagaaggcgccaaaggactcggaggcagaatcaaaatacgatccccctttcggttttcgcaagttcagcagtaaagttcagacattactggagcttttgccagaacatgacctgccggagcacctaaaggccaaaacctgtcgaagatgcgtggtcatcggctccgggggcattctccatggactggagcttggtcacactctgaatcaatttgatgtggtaatcaggttgaactctgctcccgttgaagggtacagcgagcacgtgggaaataagacaaccattcggatgacgtatcctgaaggcgccccactctccgacctggagtactattcaaacgatttattcgtcgcagtgctgtttaaaagtgtggacttcaattggctccaggctatggtcaagaaggaaactcttcccttttgggttcgtctgttcttttggaaacaggtggccgagaagatccctttgcagccaaaacatttccgcatactaaaccccgtaatcattaaggagaccgcgttcgatatcctgcaatacagcgaaccgcagtctagattttggggcagggacaaaaatgtgcctacaattggggtcatcgccgtggttctcgcaactcacctgtgtgacgaggtgtcccttgctggattcggttatgatctgaaccagccccggaccccattgcattactttgactcacaatgcatggccgctatgaatttccagacaatgcacaacgtcaccacggaaactaagtttctcctgaagttagtgaaagagggcgtagttaaggatctgagcgggggaatagaccgagagttctga

SEQ ID NO: 3427 - RNA, 1257 nt, synthetic construct
  misc_feature 1..1257: note = derived and/or modified sequence opt4 fromSIAT9__Homo_sapiens__BAG50894
  source 1..1257: mol_type = other RNA
atgagaaccaaggccgccggctgcgccgagagaagacccctgcagcccagaaccgaggccgccgccgcccccgccggcagagccatgcccagcgagtacacctacgtgaagctgagaagcgactgcagcagacccagcctgcagtggtacaccagagcccagagcaagatgagaagacccagcctgctgctgaaggacatcctgaagtgcaccctgctggtgttcggcgtgtggatcctgtacatcctgaagctgaactacaccaccgaggagtgcgacatgaagaagatgcactacgtggaccccgaccacgtgaagagagcccagaagtacgcccagcaggtgctgcagaaggagtgcagacccaagttcgccaagaccagcatggccctgctgttcgagcacagatacagcgtggacctgctgcccttcgtgcagaaggcccccaaggacagcgaggccgagagcaagtacgacccccccttcggcttcagaaagttcagcagcaaggtgcagaccctgctggagctgctgcccgagcacgacctgcccgagcacctgaaggccaagacctgcagaagatgcgtggtgatcggcagcggcggcatcctgcacggcctggagctgggccacaccctgaaccagttcgacgtggtgatcagactgaacagcgcccccgtggagggctacagcgagcacgtgggcaacaagaccaccatcagaatgacctaccccgagggcgcccccctgagcgacctggagtactacagcaacgacctgttcgtggccgtgctgttcaagagcgtggacttcaactggctgcaggccatggtgaagaaggagaccctgcccttctgggtgagactgttcttctggaagcaggtggccgagaagatccccctgcagcccaagcacttcagaatcctgaaccccgtgatcatcaaggagaccgccttcgacatcctgcagtacagcgagccccagagcagattctggggcagagacaagaacgtgcccaccatcggcgtgatcgccgtggtgctggccacccacctgtgcgacgaggtgagcctggccggcttcggctacgacctgaaccagcccagaacccccctgcactacttcgacagccagtgcatggccgccatgaacttccagaccatgcacaacgtgaccaccgagaccaagttcctgctgaagctggtgaaggagggcgtggtgaaggacctgagcggcggcatcgacagagagttctga

SEQ ID NO: 3428 - RNA, 1257 nt, synthetic construct
  misc_feature 1..1257: note = derived and/or modified sequence opt5 fromSIAT9__Homo_sapiens__BAG50894
  source 1..1257: mol_type = other RNA
atgagaaccaaggccgctggctgcgccgaacggcgccccctgcagcctagaacagaagcggctgccgccccggctgggcgggccatgcccagcgagtacacgtatgtgaaactccgctccgactgttctagacctagcctgcaatggtacacccgggctcagtccaagatgcgcagaccctctcttctgctcaaagatatcctgaagtgcacacttctggtcttcggagtttggattctctatatcctgaaactgaactacaccacagaagagtgtgacatgaagaagatgcactatgtggatcctgaccatgtgaaacgggcccagaagtacgcgcagcaagtcctccagaaagaatgccgccccaagtttgccaaaaccagcatggctctgcttttcgagcacagatattccgtggatctgctcccttttgttcagaaggccccgaaggactctgaggctgaaagcaaatacgatccccctttcggctttcggaagttctccagcaaagtgcagacactgcttgagctgctccccgaacatgacctgcctgagcacctgaaggccaaaacctgtcgcagatgcgtcgtgattgggtctggaggcatcctccatgggctggagcttggacacacgctgaatcaatttgatgttgtgattcggctcaactccgcgcccgtcgaaggctacagcgagcacgtgggcaataagaccacaatccgcatgacctatccggaaggggcccctctgtctgaccttgagtactattccaacgatctgttcgtggctgtcctctttaaaagcgttgacttcaattggctgcaggccatggtgaagaaggaaacactgcccttttgggtgagactcttcttttggaaacaggtcgctgagaagatccctctgcagcccaaacatttccggattcttaaccccgtgatcattaaggagaccgccttcgatatcctgcaatactctgaacctcagtccagattttggggacgcgacaaaaatgttccgacgattggcgtgatcgccgtcgtgctcgctacacacctgtgtgacgaggttagccttgcggggttcggatatgatctgaaccagccccggacccctctccattactttgactcccaatgcatggccgctatgaatttccagacaatgcacaacgtgaccaccgaaacaaagtttctgctgaagctcgtcaaagagggcgtggtcaaggatctgtctgggggaattgacagagagttctga

SEQ ID NO: 3429 - protein, 352 aa, synthetic construct
  REGION 1..352: note = SIRT2/m__Homo_sapiens__A0A024R0G8
MDFLRNLFSQTLSLGSQKERLLDELTLEGVARYMQSERCRRVICLVGAGISTSAGIPDFRSPSTGLYDNLEKYHLPYPEAIFEISYFKKHPEPFFALAKELYPGQFKPTICHYFMRLLKDKGLLLRCYTQNIDTLERIAGLEQEDLVEAHGTFYTSHCVSASCRHEYPLSWMKEKIFSEVTPKCEDCQSLVKPDIVFFGESLPARFFSCMQSDFLKVDLLLVMGTSLQVQPFASLISKAPLSTPRLLINKEKAGQSDPFLGMIMGLGGGMDFDSKKAYRDVAWLGECDQGCLALAELLGWKKELEDLVRREHASIDAQSGAGVPNPSTSASPKKSPPPAKDEARTTEREKPQ

SEQ ID NO: 3430 - RNA, 1059 nt, synthetic construct
  misc_feature 1..1059: note = SIRT2/m__Homo_sapiens__EAW56837
  source 1..1059: mol_type = other RNA
atggacttcctgcggaacttattctcccagacgctcagcctgggcagccagaaggagcgtctgctggacgagctgaccttggaaggggtggcccggtacatgcagagcgaacgctgtcgcagagtcatctgtttggtgggagctggaatctccacatccgcaggcatccccgactttcgctctccatccaccggcctctatgacaacctagagaagtaccatcttccctacccagaggccatctttgagatcagctatttcaagaaacatccggaacccttcttcgccctcgccaaggaactctatcctgggcagttcaagccaaccatctgtcactacttcatgcgcctgctgaaggacaaggggctactcctgcgctgctacacgcagaacatagataccctggagcgaatagccgggctggaacaggaggacttggtggaggcgcacggcaccttctacacatcacactgcgtcagcgccagctgccggcacgaatacccgctaagctggatgaaagagaagatcttctctgaggtgacgcccaagtgtgaagactgtcagagcctggtgaagcctgatatcgtcttttttggtgagagcctcccagcgcgtttcttctcctgtatgcagtcagacttcctgaaggtggacctcctcctggtcatgggtacctccttgcaggtgcagccctttgcctccctcatcagcaaggcacccctctccacccctcgcctgctcatcaacaaggagaaagctggccagtcggaccctttcctggggatgattatgggcctcggaggaggcatggactttgactccaagaaggcctacagggacgtggcctggctgggtgaatgcgaccagggctgcctggcccttgctgagctccttggatggaagaaggagctggaggaccttgtccggagggagcacgccagcatagatgcccagtcgggggcgggggtccccaaccccagcacttcagcttcccccaagaagtccccgccacctgccaaggacgaggccaggacaacagagagggagaaaccccagtga

SEQ ID NO: 3431 - RNA, 1059 nt, synthetic construct
  misc_feature 1..1059: note = derived and/or modified sequence opt1 fromSIRT2/m__Homo_sapiens__EAW56837
  source 1..1059: mol_type = other RNA
atggacttcctgcgcaacctcttcagccagaccctgagcctgggcagccagaaggagcggctcctggacgagctgaccctcgagggggtggcccgctacatgcagtccgagcggtgccgccgggtcatctgcctggtgggcgccgggatcagcacgtccgcgggcatccccgacttccgcagcccctccaccgggctgtacgacaacctcgagaagtaccacctcccctaccccgaggccatcttcgagatcagctacttcaagaagcaccccgagccgttcttcgccctggccaaggagctgtaccccggccagttcaagcccaccatctgccactacttcatgcggctgctgaaggacaagggcctcctgctgcgctgctacacccagaacatcgacacgctcgagcggatcgccgggctggagcaggaggacctggtggaggcgcacggcaccttctacacctcccactgcgtcagcgcctcctgccgccacgagtaccccctcagctggatgaaggagaagatcttctccgaggtgaccccgaagtgcgaggactgccagagcctggtgaagcccgacatcgtcttcttcggggagtccctgcccgcccggttcttcagctgcatgcagtccgacttcctcaaggtggacctgctgctcgtgatgggcacgagcctgcaggtccagcccttcgcctccctgatcagcaaggcgccgctcagcacgccccgcctgctgatcaacaaggagaaggccgggcagtccgaccccttcctcggcatgatcatgggcctcgggggcgggatggacttcgacagcaagaaggcctaccgggacgtggcctggctgggcgagtgcgaccagggctgcctggccctggcggagctgctcgggtggaagaaggagctggaggacctggtgcgccgggagcacgcctccatcgacgcccagagcggcgccggggtccccaacccgtccaccagcgcctcccccaagaagtccccgccgcccgcgaaggacgaggcccgcaccaccgagcgggagaagccccagtga

SEQ ID NO: 3432 - RNA, 1059 nt, synthetic construct
  misc_feature 1..1059: note = derived and/or modified sequence opt2 fromSIRT2/m__Homo_sapiens__EAW56837
  source 1..1059: mol_type = other RNA
atggacttcctccgcaacctcttctcccagaccctctccctcggctcccagaaggagcgcctcctcgacgagctcaccctcgagggcgtcgcccgctacatgcagtccgagcgctgccgccgcgtcatctgcctcgtcggcgccggcatctccacctccgccggcatccccgacttccgctccccctccaccggcctctacgacaacctcgagaagtaccacctcccctaccccgaggccatcttcgagatctcctacttcaagaagcaccccgagcccttcttcgccctcgccaaggagctctaccccggccagttcaagcccaccatctgccactacttcatgcgcctcctcaaggacaagggcctcctcctccgctgctacacccagaacatcgacaccctcgagcgcatcgccggcctcgagcaggaggacctcgtcgaggcccacggcaccttctacacctcccactgcgtctccgcctcctgccgccacgagtaccccctctcctggatgaaggagaagatcttctccgaggtcacccccaagtgcgaggactgccagtccctcgtcaagcccgacatcgtcttcttcggcgagtccctccccgcccgcttcttctcctgcatgcagtccgacttcctcaaggtcgacctcctcctcgtcatgggcacctccctccaggtccagcccttcgcctccctcatctccaaggcccccctctccaccccccgcctcctcatcaacaaggagaaggccggccagtccgaccccttcctcggcatgatcatgggcctcggcggcggcatggacttcgactccaagaaggcctaccgcgacgtcgcctggctcggcgagtgcgaccagggctgcctcgccctcgccgagctcctcggctggaagaaggagctcgaggacctcgtccgccgcgagcacgcctccatcgacgcccagtccggcgccggcgtccccaacccctccacctccgcctcccccaagaagtcccccccccccgccaaggacgaggcccgcaccaccgagcgcgagaagccccagtga

SEQ ID NO: 3433 - RNA, 1059 nt, synthetic construct
  misc_feature 1..1059: note = derived and/or modified sequence opt3 fromSIRT2/m__Homo_sapiens__EAW56837
  source 1..1059: mol_type = other RNA
atggacttcctgagaaacctctttagccagaccctttccctgggctctcaaaaggagaggttgttagatgaactgacactagagggggtggcccggtacatgcagtcagaacgctgccgacgtgtcatctgtctcgttggagctggtattagtactagcgcaggcatacccgacttcagatccccttctacggggctgtatgataatcttgagaaataccatctgccatatccggaagccatctttgagatttcgtacttcaagaaacaccccgagccatttttcgcgttggctaaggaactctatcctggacagtttaaacccaccatctgccactacttcatgaggctgctgaaggacaagggcctcttactgcggtgttatacacagaacattgatactcttgagcgcatcgccggtttggaacaagaggacctggtggaggcacatgggaccttttacacatcacactgcgtaagcgccagttgtagacatgaataccctctatcctggatgaaagagaagatattctctgaagtgaccccaaaatgcgaggattgtcagagcctcgtcaagcccgacatcgtgtttttcggagaatccctgcctgctaggtttttctcatgcatgcagagtgatttccttaaagttgacctgttgctcgtgatgggcactagcctgcaggtccaaccatttgcatctttaatttccaaggccccgctgtcaacaccccggctccttatcaataaggagaaagctggccagagcgatcctttcctggggatgattatgggattgggtggcgggatggactttgatagtaagaaagcctatcgcgacgtggcgtggctaggagagtgtgaccagggctgcctggcactcgccgaactgcttggttggaagaaagagctggaagatttggtacgaagagagcacgcttctatcgacgcccagtccggggcaggagttccaaaccccagcacctcggcttctcctaagaaatccccacccccggccaaggatgaagcgaggacgactgagcgggagaagcctcaatga

SEQ ID NO: 3434 - RNA, 1059 nt, synthetic construct
  misc_feature 1..1059: note = derived and/or modified sequence opt4 fromSIRT2/m__Homo_sapiens__EAW56837
  source 1..1059: mol_type = other RNA
atggacttcctgagaaacctgttcagccagaccctgagcctgggcagccagaaggagagactgctggacgagctgaccctggagggcgtggccagatacatgcagagcgagagatgcagaagagtgatctgcctggtgggcgccggcatcagcaccagcgccggcatccccgacttcagaagccccagcaccggcctgtacgacaacctggagaagtaccacctgccctaccccgaggccatcttcgagatcagctacttcaagaagcaccccgagcccttcttcgccctggccaaggagctgtaccccggccagttcaagcccaccatctgccactacttcatgagactgctgaaggacaagggcctgctgctgagatgctacacccagaacatcgacaccctggagagaatcgccggcctggagcaggaggacctggtggaggcccacggcaccttctacaccagccactgcgtgagcgccagctgcagacacgagtaccccctgagctggatgaaggagaagatcttcagcgaggtgacccccaagtgcgaggactgccagagcctggtgaagcccgacatcgtgttcttcggcgagagcctgcccgccagattcttcagctgcatgcagagcgacttcctgaaggtggacctgctgctggtgatgggcaccagcctgcaggtgcagcccttcgccagcctgatcagcaaggcccccctgagcacccccagactgctgatcaacaaggagaaggccggccagagcgaccccttcctgggcatgatcatgggcctgggcggcggcatggacttcgacagcaagaaggcctacagagacgtggcctggctgggcgagtgcgaccagggctgcctggccctggccgagctgctgggctggaagaaggagctggaggacctggtgagaagagagcacgccagcatcgacgcccagagcggcgccggcgtgcccaaccccagcaccagcgccagccccaagaagagccccccccccgccaaggacgaggccagaaccaccgagagagagaagccccagtga

SEQ ID NO: 3435 - RNA, 1059 nt, synthetic construct
  misc_feature 1..1059: note = derived and/or modified sequence opt5 fromSIRT2/m__Homo_sapiens__EAW56837
  source 1..1059: mol_type = other RNA
atggacttcctgagaaacctctttagccagaccctgtcccttggctctcaaaaggagcggctgctcgatgaactgacacttgagggggtggcccgctacatgcagagcgaaagatgccggcgcgtcatctgtctggttggagctggcatttccacgtctgccgggatccccgacttcagaagcccttccaccggactctatgataatctggagaaataccatctgccgtatcccgaagcgatttttgagatctcttacttcaagaaacaccctgagccctttttcgctctcgccaaggaactgtatcctggccagtttaaacccacaatttgccactacttcatgcggcttctgaaggacaaggggctcctgcttcgctgttatacccagaacatcgatacactggagagaatcgccggactcgaacaagaggacctggtggaggctcatggcaccttttacacaagccactgcgtgtccgccagctgtcggcatgaataccctctgtcttggatgaaagagaagattttctccgaagtcaccccgaaatgcgaggattgtcagagcctcgtgaagcccgacatcgtgtttttcggcgaatctctgcctgctcgctttttctcctgcatgcagagcgatttccttaaagttgacctgctcctggtcatggggacgtctcttcaggtgcaaccctttgcctccctgattagcaaggcgcctctctccacccccagactgctgatcaataaggagaaagccggacagtctgatccgttcctcggcatgattatggggctgggaggcgggatggactttgatagcaagaaagcctatcgggacgttgcttggcttggagagtgtgaccagggctgcctggctctcgccgaactgcttggctggaagaaagagctggaagatctcgtgcgcagagagcacgcgtccatcgacgcccagagcggggctggagtccctaacccctctacatccgccagccctaagaaatctccccctcccgctaaggatgaagcccggaccacagagcgcgagaagccgcaatga

SEQ ID NO: 3436 - protein, 389 aa, synthetic construct
  REGION 1..389: note = SIRT2/m__Homo_sapiens__Q8IXJ6
MAEPDPSHPLETQAGKVQEAQDSDSDSEGGAAGGEADMDFLRNLFSQTLSLGSQKERLLDELTLEGVARYMQSERCRRVICLVGAGISTSAGIPDFRSPSTGLYDNLEKYHLPYPEAIFEISYFKKHPEPFFALAKELYPGQFKPTICHYFMRLLKDKGLLLRCYTQNIDTLERIAGLEQEDLVEAHGTFYTSHCVSASCRHEYPLSWMKEKIFSEVTPKCEDCQSLVKPDIVFFGESLPARFFSCMQSDFLKVDLLLVMGTSLQVQPFASLISKAPLSTPRLLINKEKAGQSDPFLGMIMGLGGGMDFDSKKAYRDVAWLGECDQGCLALAELLGWKKELEDLVRREHASIDAQSGAGVPNPSTSASPKKSPPPAKDEARTTEREKPQ

SEQ ID NO: 3437 - RNA, 1170 nt, synthetic construct
  misc_feature 1..1170: note = SIRT2/m__Homo_sapiens__AAD40850
  source 1..1170: mol_type = other RNA
atggcagagccagacccctctcaccctctggagacccaggcagggaaggtgcaggaggctcaggactcagattcagactctgagggaggagccgctggtggagaagcagacatggacttcctgcggaacttattctcccagacgctcagcctgggcagccagaaggagcgtctgctggacgagctgaccttggaaggggtggcccggtacatgcagagcgaacgctgtcgcagagtcatctgtttggtgggagctggaatctccacatccgcaggcatccccgactttcgctctccatccaccggcctctatgacaacctagagaagtaccatcttccctacccagaggccatctttgagatcagctatttcaagaaacatccggaacccttcttcgccctcgccaaggaactctatcctgggcagttcaagccaaccatctgtcactacttcatgcgcctgctgaaggacaaggggctactcctgcgctgctacacgcagaacatagataccctggagcgaatagccgggctggaacaggaggacttggtggaggcgcacggcaccttctacacatcacactgcgtcagcgccagctgccggcacgaatacccgctaagctggatgaaagagaagatcttctctgaggtgacgcccaagtgtgaagactgtcagagcctggtgaagcctgatatcgtcttttttggtgagagcctcccagcgcgtttcttctcctgtatgcagtcagacttcctgaaggtggacctcctcctggtcatgggtacctccttgcaggtgcagccctttgcctccctcatcagcaaggcacccctctccacccctcgcctgctcatcaacaaggagaaagctggccagtcggaccctttcctggggatgattatgggcctcggaggaggcatggactttgactccaagaaggcctacagggacgtggcctggctgggtgaatgcgaccagggctgcctggcccttgctgagctccttggatggaagaaggagctggaggaccttgtccggagggagcacgccagcatagatgcccagtcgggggcgggggtccccaaccccagcacttcagcttcccccaagaagtccccgccacctgccaaggacgaggccaggacaacagagagggagaaaccccagtga

SEQ ID NO: 3438 - RNA, 1170 nt, synthetic construct
  misc_feature 1..1170: note = derived and/or modified sequence opt1 fromSIRT2/m__Homo_sapiens__AAD40850
  source 1..1170: mol_type = other RNA
atggccgagcccgaccccagccaccccctggagacccaggccggcaaggtgcaggaggcgcaggacagcgacagcgactccgagggcggggccgccgggggcgaggccgacatggacttcctccgcaacctgttcagccagaccctgtccctcgggagccagaaggagcggctgctggacgagctcacgctggagggcgtcgcccgctacatgcagtccgagcggtgccgccgggtgatctgcctggtgggcgcggggatcagcacctccgccggcatccccgacttccgcagcccctccaccgggctctacgacaacctggagaagtaccacctcccgtaccccgaggccatcttcgagatcagctacttcaagaagcaccccgagcccttcttcgccctggcgaaggagctgtacccgggccagttcaagcccaccatctgccactacttcatgcggctgctcaaggacaaggggctgctgctccgctgctacacgcagaacatcgacaccctggagcggatcgccggcctggagcaggaggacctcgtcgaggcccacggcaccttctacacctcccactgcgtgagcgcctcctgccgccacgagtaccccctgagctggatgaaggagaagatcttctccgaggtgacgcccaagtgcgaggactgccagagcctggtcaagccggacatcgtgttcttcggggagtccctccccgcccggttcttcagctgcatgcagagcgacttcctgaaggtggacctgctcctggtcatgggcacctccctccaggtgcagcccttcgcgagcctgatctccaaggcgcccctgagcaccccgcgcctgctcatcaacaaggagaaggccgggcagtccgaccccttcctgggcatgatcatgggcctcgggggcgggatggacttcgacagcaagaaggcctaccgggacgtggcctggctgggcgagtgcgaccaggggtgcctggccctggccgagctcctgggctggaagaaggagctggaggacctcgtccgccgggagcacgcctccatcgacgcccagagcggcgccggggtgcccaacccctccaccagcgcgtccccgaagaagtccccgccgcccgccaaggacgaggcccgcacgaccgagcgggagaagccccagtga

SEQ ID NO: 3439 - RNA, 1170 nt, synthetic construct
  misc_feature 1..1170: note = derived and/or modified sequence opt2 fromSIRT2/m__Homo_sapiens__AAD40850
  source 1..1170: mol_type = other RNA
atggccgagcccgacccctcccaccccctcgagacccaggccggcaaggtccaggaggcccaggactccgactccgactccgagggcggcgccgccggcggcgaggccgacatggacttcctccgcaacctcttctcccagaccctctccctcggctcccagaaggagcgcctcctcgacgagctcaccctcgagggcgtcgcccgctacatgcagtccgagcgctgccgccgcgtcatctgcctcgtcggcgccggcatctccacctccgccggcatccccgacttccgctccccctccaccggcctctacgacaacctcgagaagtaccacctcccctaccccgaggccatcttcgagatctcctacttcaagaagcaccccgagcccttcttcgccctcgccaaggagctctaccccggccagttcaagcccaccatctgccactacttcatgcgcctcctcaaggacaagggcctcctcctccgctgctacacccagaacatcgacaccctcgagcgcatcgccggcctcgagcaggaggacctcgtcgaggcccacggcaccttctacacctcccactgcgtctccgcctcctgccgccacgagtaccccctctcctggatgaaggagaagatcttctccgaggtcacccccaagtgcgaggactgccagtccctcgtcaagcccgacatcgtcttcttcggcgagtccctccccgcccgcttcttctcctgcatgcagtccgacttcctcaaggtcgacctcctcctcgtcatgggcacctccctccaggtccagcccttcgcctccctcatctccaaggcccccctctccaccccccgcctcctcatcaacaaggagaaggccggccagtccgaccccttcctcggcatgatcatgggcctcggcggcggcatggacttcgactccaagaaggcctaccgcgacgtcgcctggctcggcgagtgcgaccagggctgcctcgccctcgccgagctcctcggctggaagaaggagctcgaggacctcgtccgccgcgagcacgcctccatcgacgcccagtccggcgccggcgtccccaacccctccacctccgcctcccccaagaagtcccccccccccgccaaggacgaggcccgcaccaccgagcgcgagaagccccagtga

SEQ ID NO: 3440 - RNA, 1170 nt, synthetic construct
  misc_feature 1..1170: note = derived and/or modified sequence opt3 fromSIRT2/m__Homo_sapiens__AAD40850
  source 1..1170: mol_type = other RNA
atggccgagcccgaccctagccacccactggaaacccaggctggcaaggtgcaagaggcacaggattccgactctgattcagaagggggagccgcgggtggcgaggctgacatggatttcctcagaaacctttttagtcagacactgagcttggggtcccagaaagaaaggttactggacgagctaactctcgagggagtcgcccggtacatgcaatctgaacgctgccgacgtgttatctgtctggtgggcgcaggtatttcgacgtcagccgggataccggatttcagaagccccagtaccggactttatgacaatctggagaagtaccatttgccttatccagaagctatctttgagatttcctacttcaaaaagcaccccgagccatttttcgcactcgccaaagaactgtatcctggccagtttaagcccacaatctgccattacttcatgaggctgctcaaggataaaggcttactgcttcggtgttatactcagaacattgacaccttggagcgcatcgctgggctggaacaggaggatctagtagaagcccacggaacattttacacctctcattgcgtgagcgcgtcctgtagacacgagtaccctctctcatggatgaaggagaaaatattcagtgaagtcactccaaagtgcgaggactgtcaaagcctggtgaaaccggatatcgtgtttttcggtgaatctcttcccgcaaggtttttctcctgcatgcagtcagacttcctgaaggttgacttgctcctggtcatgggcaccagcttacaggtgcagccttttgccagtctgatttctaaggctccactctccacaccccggcttctgatcaataaagagaaggccgggcaaagcgatcctttcttgggaatgattatgggcctaggtgggggaatggactttgattcgaaaaaggcatatcgcgacgtagcttggctgggcgaatgtgatcagggctgcctcgccctggcggagcttctggggtggaaaaaggagttggaagacctcgttcgaagagagcacgcctctatcgatgcacagtccggagctggtgtgccaaacccctcaacgagtgccagcccgaaaaagtcccctcccccagctaaggacgaagccaggactaccgagcgggaaaaacctcaatga

SEQ ID NO: 3441 - RNA, 1170 nt, synthetic construct
  misc_feature 1..1170: note = derived and/or modified sequence opt4 fromSIRT2/m__Homo_sapiens__AAD40850
  source 1..1170: mol_type = other RNA
atggccgagcccgaccccagccaccccctggagacccaggccggcaaggtgcaggaggcccaggacagcgacagcgacagcgagggcggcgccgccggcggcgaggccgacatggacttcctgagaaacctgttcagccagaccctgagcctgggcagccagaaggagagactgctggacgagctgaccctggagggcgtggccagatacatgcagagcgagagatgcagaagagtgatctgcctggtgggcgccggcatcagcaccagcgccggcatccccgacttcagaagccccagcaccggcctgtacgacaacctggagaagtaccacctgccctaccccgaggccatcttcgagatcagctacttcaagaagcaccccgagcccttcttcgccctggccaaggagctgtaccccggccagttcaagcccaccatctgccactacttcatgagactgctgaaggacaagggcctgctgctgagatgctacacccagaacatcgacaccctggagagaatcgccggcctggagcaggaggacctggtggaggcccacggcaccttctacaccagccactgcgtgagcgccagctgcagacacgagtaccccctgagctggatgaaggagaagatcttcagcgaggtgacccccaagtgcgaggactgccagagcctggtgaagcccgacatcgtgttcttcggcgagagcctgcccgccagattcttcagctgcatgcagagcgacttcctgaaggtggacctgctgctggtgatgggcaccagcctgcaggtgcagcccttcgccagcctgatcagcaaggcccccctgagcacccccagactgctgatcaacaaggagaaggccggccagagcgaccccttcctgggcatgatcatgggcctgggcggcggcatggacttcgacagcaagaaggcctacagagacgtggcctggctgggcgagtgcgaccagggctgcctggccctggccgagctgctgggctggaagaaggagctggaggacctggtgagaagagagcacgccagcatcgacgcccagagcggcgccggcgtgcccaaccccagcaccagcgccagccccaagaagagccccccccccgccaaggacgaggccagaaccaccgagagagagaagccccagtga

SEQ ID NO: 3442 - RNA, 1170 nt, synthetic construct
  misc_feature 1..1170: note = derived and/or modified sequence opt5 fromSIRT2/m__Homo_sapiens__AAD40850
  source 1..1170: mol_type = other RNA
atggccgagcccgaccctagccacccgctggaaacccaggctggcaaggtgcaagaggcccaggattccgactctgatagcgaagggggagcggctggcggggaggccgacatggatttcctcagaaacctgttttcccagacactttctctgggaagccagaaagaacggctcctggacgagcttacgctggagggcgtcgcccgctacatgcaatccgaaagatgccggcgcgttatctgtctcgtgggggctggaatttctaccagcgccggcatccccgatttcagatcccctagcacaggcctgtatgacaatctggagaagtaccatctcccctatcctgaagctatttttgagatctcttacttcaaaaagcaccccgagccgtttttcgccctggcgaaagaactttatcctgggcagtttaagcccaccatttgccattacttcatgcggctgctcaaggataaaggactgcttctgcgctgttatacacagaacatcgacaccctcgagagaatcgccggcctggaacaggaggatctggtggaagctcacgggacattttacacctcccattgcgtcagcgcctcttgtcggcacgagtaccctctctcctggatgaaggagaaaattttcagcgaagtgacgcccaagtgcgaggactgtcaatctctggttaaacctgatatcgtgtttttcggagaatcccttcccgctcgctttttcagctgcatgcagtccgacttcctgaaggtcgacctcctgcttgtgatgggcacctctctgcaggttcagccgtttgccagcctcatttccaaggcgcctctgagcacacccagactgctcatcaataaagagaaggccgggcaatctgatcctttcctgggaatgattatgggccttggcgggggaatggactttgattccaaaaaggcttatcgggacgtggcctggctgggcgaatgtgatcaggggtgcctcgctctggccgagcttctgggatggaaaaaggagctcgaagacctggtccgcagagagcacgccagcatcgatgctcagtctggcgcgggggtgcccaaccccagcacctccgcctctcctaaaaagagcccgccccctgctaaggacgaagcccggacaaccgagcgcgaaaaaccccaatga

SEQ ID NO: 3443 - protein, 466 aa, synthetic construct
  REGION 1..466: note = SOX10__Homo_sapiens__P56693
MAEEQDLSEVELSPVGSEEPRCLSPGSAPSLGPDGGGGGSGLRASPGPGELGKVKKEQQDGEADDDKFPVCIREAVSQVLSGYDWTLVPMPVRVNGASKSKPHVKRPMNAFMVWAQAARRKLADQYPHLHNAELSKTLGKLWRLLNESDKRPFIEEAERLRMQHKKDHPDYKYQPRRRKNGKAAQGEAECPGGEAEQGGTAAIQAHYKSAHLDHRHPGEGSPMSDGNPEHPSGQSHGPPTPPTTPKTELQSGKADPKRDGRSMGEGGKPHIDFGNVDIGEISHEVMSNMETFDVAELDQYLPPNGHPGHVSSYSAAGYGLGSALAVASGHSAWISKPPGVALPTVSPPGVDAKAQVKTETAGPQGPPHYTDQPSTSQIAYTSLSLPHYGSAFPSISRPQFDYSDHQPSGPYYGHSGQASGLYSAFSYMGPSQRPLYTAISDPSPSGPQSHSPTHWEQPVYTTLSRP

SEQ ID NO: 3444 - RNA, 1401 nt, synthetic construct
  misc_feature 1..1401: note = SOX10__Homo_sapiens__AAH02824
  source 1..1401: mol_type = other RNA
atggcggaggagcaggacctatcggaggtggagctgagccccgtgggctcggaggagccccgctgcctgtccccggggagcgcgccctcgctagggcccgacggcggcggcggcggatcgggcctgcgagccagcccggggccaggcgagctgggcaaggtcaagaaggagcagcaggacggcgaggcggacgatgacaagttccccgtgtgcatccgcgaggccgtcagccaggtgctcagcggctacgactggacgctggtgcccatgcccgtgcgcgtcaacggcgccagcaaaagcaagccgcacgtcaagcggcccatgaacgccttcatggtgtgggctcaggcagcgcgcaggaagctcgcggaccagtacccgcacctgcacaacgctgagctcagcaagacgctgggcaagctctggaggctgctgaacgaaagtgacaagcgccccttcatcgaggaggctgagcggctccgtatgcagcacaagaaagaccacccggactacaagtaccagcccaggcggcggaagaacgggaaggccgcccagggcgaggcggagtgccccggtggggaggccgagcaaggtgggaccgccgccatccaggcccactacaagagcgcccacttggaccaccggcacccaggagagggctcccccatgtcagatgggaaccccgagcacccctcaggccagagccatggcccacccacccctccaaccaccccgaagacagagctgcagtcgggcaaggcagacccgaagcgggacgggcgctccatgggggagggcgggaagcctcacatcgacttcggcaacgtggacattggtgagatcagccacgaggtaatgtccaacatggagacctttgatgtggctgagttggaccagtacctgccgcccaatgggcacccaggccatgtgagcagctactcagcagccggctatgggctgggcagtgccctggccgtggccagtggacactccgcctggatctccaagccaccaggcgtggctctgcccacggtctcaccacctggtgtggatgccaaagcccaggtgaagacagagaccgcggggccccaggggcccccacactacaccgaccagccatccacctcacagatcgcctacacctccctcagcctgccccactatggctcagccttcccctccatctcccgcccccagtttgactactctgaccatcagccctcaggaccctattatggccactcgggccaggcctctggcctctactcggccttctcctatatggggccctcgcagcggcccctctacacggccatctctgaccccagcccctcagggccccagtcccacagccccacacactgggagcagccagtatatacgacactgtcccggccctaa

SEQ ID NO: 3445 - RNA, 1401 nt, synthetic construct
  misc_feature 1..1401: note = derived and/or modified sequence opt1 fromSOX10__Homo_sapiens__AAH02824
  source 1..1401: mol_type = other RNA
atggccgaggagcaggacctgagcgaggtggagctctcccccgtcggcagcgaggagccgcgctgcctgtcccccgggagcgccccctccctgggccccgacgggggcgggggcggcagcgggctccgggcgtccccgggccccggggagctgggcaaggtgaagaaggagcagcaggacggggaggccgacgacgacaagttccccgtgtgcatccgcgaggccgtcagccaggtgctgtccggctacgactggaccctcgtgcccatgccggtccgggtgaacggcgccagcaagtccaagccccacgtgaagcgccccatgaacgccttcatggtctgggcgcaggccgcccggcgcaagctggccgaccagtacccccacctccacaacgcggagctcagcaagaccctggggaagctgtggcggctcctgaacgagtccgacaagcgcccgttcatcgaggaggccgagcggctgcgcatgcagcacaagaaggaccaccccgactacaagtaccagccccggcgccggaagaacggcaaggccgcccagggggaggccgagtgccccggcggcgaggcggagcagggcgggacggccgccatccaggcccactacaagagcgcccacctcgaccaccgccacccgggggagggctcccccatgagcgacgggaaccccgagcacccctccggccagagccacggcccgcccaccccgcccaccacccccaagacggagctgcagtccgggaaggcggaccccaagcgggacggccgcagcatgggggagggcgggaagccccacatcgacttcggcaacgtggacatcggcgagatcagccacgaggtgatgtccaacatggagaccttcgacgtcgccgagctggaccagtacctgcccccgaacgggcaccccggccacgtgagctcctacagcgccgccgggtacggcctggggtccgccctggcggtggccagcggccactccgcctggatcagcaagcccccgggcgtcgccctccccaccgtgtccccgcccggggtggacgccaaggcgcaggtcaagaccgagacggccggcccccaggggccgccccactacaccgaccagcccagcacctcccagatcgcctacaccagcctgtccctgccccactacggcagcgccttcccctccatcagccggccccagttcgactactccgaccaccagcccagcggcccgtactacgggcactccggccaggcgagcgggctctacagcgccttctcctacatgggccccagccagcgccccctgtacacggccatctccgaccccagcccgtccgggccccagagccactcccccacccactgggagcagcccgtgtacaccaccctgagccggccgtga

SEQ ID NO: 3446 - RNA, 1401 nt, synthetic construct
  misc_feature 1..1401: note = derived and/or modified sequence opt2 fromSOX10__Homo_sapiens__AAH02824
  source 1..1401: mol_type = other RNA
atggccgaggagcaggacctctccgaggtcgagctctcccccgtcggctccgaggagccccgctgcctctcccccggctccgccccctccctcggccccgacggcggcggcggcggctccggcctccgcgcctcccccggccccggcgagctcggcaaggtcaagaaggagcagcaggacggcgaggccgacgacgacaagttccccgtctgcatccgcgaggccgtctcccaggtcctctccggctacgactggaccctcgtccccatgcccgtccgcgtcaacggcgcctccaagtccaagccccacgtcaagcgccccatgaacgccttcatggtctgggcccaggccgcccgccgcaagctcgccgaccagtacccccacctccacaacgccgagctctccaagaccctcggcaagctctggcgcctcctcaacgagtccgacaagcgccccttcatcgaggaggccgagcgcctccgcatgcagcacaagaaggaccaccccgactacaagtaccagccccgccgccgcaagaacggcaaggccgcccagggcgaggccgagtgccccggcggcgaggccgagcagggcggcaccgccgccatccaggcccactacaagtccgcccacctcgaccaccgccaccccggcgagggctcccccatgtccgacggcaaccccgagcacccctccggccagtcccacggcccccccaccccccccaccacccccaagaccgagctccagtccggcaaggccgaccccaagcgcgacggccgctccatgggcgagggcggcaagccccacatcgacttcggcaacgtcgacatcggcgagatctcccacgaggtcatgtccaacatggagaccttcgacgtcgccgagctcgaccagtacctcccccccaacggccaccccggccacgtctcctcctactccgccgccggctacggcctcggctccgccctcgccgtcgcctccggccactccgcctggatctccaagccccccggcgtcgccctccccaccgtctccccccccggcgtcgacgccaaggcccaggtcaagaccgagaccgccggcccccagggccccccccactacaccgaccagccctccacctcccagatcgcctacacctccctctccctcccccactacggctccgccttcccctccatctcccgcccccagttcgactactccgaccaccagccctccggcccctactacggccactccggccaggcctccggcctctactccgccttctcctacatgggcccctcccagcgccccctctacaccgccatctccgacccctccccctccggcccccagtcccactcccccacccactgggagcagcccgtctacaccaccctctcccgcccctga

SEQ ID NO: 3447 - RNA, 1401 nt, synthetic construct
  misc_feature 1..1401: note = derived and/or modified sequence opt3 fromSOX10__Homo_sapiens__AAH02824
  source 1..1401: mol_type = other RNA
atggccgaggaacaggacctgagcgaggtggaactctcccccgtcggctctgaggaacctagatgcctttcaccagggagtgctccgagcctgggacccgatggtggcgggggaggctccggtttgagggcatctcctgggccaggagagttaggcaaggttaaaaaggagcaacaggacggcgaagccgatgacgataaattccccgtgtgtatccgggaggcggtatcgcaagtgctgtcagggtacgactggaccctagtccctatgccagtgcgcgttaacggagctagcaagagtaaaccccacgtgaagcgacctatgaatgcctttatggtctgggcacaggccgctcgtagaaagctcgcagatcaatatccacatctgcacaacgccgaactttccaaaacactgggtaagttgtggaggctcctgaatgagtctgacaaacggccgttcattgaggaagctgagcgcctgagaatgcagcataagaaagatcaccccgactacaagtatcagcctaggcggcgcaagaacggcaaagccgcgcagggggaagcagagtgcccaggaggcgaagccgagcaaggtgggactgctgccatacaggcacattacaagagcgctcacctcgatcaccgacatcccggagagggctcccctatgtcagacggcaatccagaacaccccagtgggcagagccatggaccgcctacgcccccaaccacacctaaaactgagttacagtctggtaaggccgatcccaaaagagacggcaggtccatgggggaaggaggcaagccacacatcgactttggtaacgtggatattggggagatctcacacgaagtaatgagcaatatggagaccttcgacgttgcggagctggatcaatatcttccccctaacggccatccaggacacgtgagttcttactccgccgcaggctatgggttgggaagcgctctggccgtcgcttcgggtcattctgcctggatttccaaaccgcccggcgtggcactacctacagtgtcaccacccggggtcgacgccaaggctcaggttaagaccgaaactgcgggacctcagggcccaccccactacacagatcaaccgagtaccagccagatcgcatacacgtccctctctctgcctcattatggtagcgcctttccatcaataagtcggccccagttcgactactccgatcaccagcctagcgggccctattacggccactctggacaggcttcaggcctttatagtgcctttagctacatggggccatcccagcgtcctctgtatactgcaatctctgacccctcgccaagcggaccgcagtcccattcacctacccactgggagcagcccgtgtacacaactttgagtcgcccatga

SEQ ID NO: 3448 - RNA, 1401 nt, synthetic construct
  misc_feature 1..1401: note = derived and/or modified sequence opt4 fromSOX10__Homo_sapiens__AAH02824
  source 1..1401: mol_type = other RNA
atggccgaggagcaggacctgagcgaggtggagctgagccccgtgggcagcgaggagcccagatgcctgagccccggcagcgcccccagcctgggccccgacggcggcggcggcggcagcggcctgagagccagccccggccccggcgagctgggcaaggtgaagaaggagcagcaggacggcgaggccgacgacgacaagttccccgtgtgcatcagagaggccgtgagccaggtgctgagcggctacgactggaccctggtgcccatgcccgtgagagtgaacggcgccagcaagagcaagccccacgtgaagagacccatgaacgccttcatggtgtgggcccaggccgccagaagaaagctggccgaccagtacccccacctgcacaacgccgagctgagcaagaccctgggcaagctgtggagactgctgaacgagagcgacaagagacccttcatcgaggaggccgagagactgagaatgcagcacaagaaggaccaccccgactacaagtaccagcccagaagaagaaagaacggcaaggccgcccagggcgaggccgagtgccccggcggcgaggccgagcagggcggcaccgccgccatccaggcccactacaagagcgcccacctggaccacagacaccccggcgagggcagccccatgagcgacggcaaccccgagcaccccagcggccagagccacggcccccccaccccccccaccacccccaagaccgagctgcagagcggcaaggccgaccccaagagagacggcagaagcatgggcgagggcggcaagccccacatcgacttcggcaacgtggacatcggcgagatcagccacgaggtgatgagcaacatggagaccttcgacgtggccgagctggaccagtacctgccccccaacggccaccccggccacgtgagcagctacagcgccgccggctacggcctgggcagcgccctggccgtggccagcggccacagcgcctggatcagcaagccccccggcgtggccctgcccaccgtgagcccccccggcgtggacgccaaggcccaggtgaagaccgagaccgccggcccccagggccccccccactacaccgaccagcccagcaccagccagatcgcctacaccagcctgagcctgccccactacggcagcgccttccccagcatcagcagaccccagttcgactacagcgaccaccagcccagcggcccctactacggccacagcggccaggccagcggcctgtacagcgccttcagctacatgggccccagccagagacccctgtacaccgccatcagcgaccccagccccagcggcccccagagccacagccccacccactgggagcagcccgtgtacaccaccctgagcagaccctga

SEQ ID NO: 3449 - RNA, 1401 nt, synthetic construct
  misc_feature 1..1401: note = derived and/or modified sequence opt5 fromSOX10__Homo_sapiens__AAH02824
  source 1..1401: mol_type = other RNA
atggccgaggaacaggacctgagcgaggtggaactctcccccgtcggctctgaggaacctagatgcctgagcccggggtccgctccctctcttggacctgatggcgggggaggcgggagcggactgcgggcctcccccggccctggcgagctcgggaaggttaaaaaggagcaacaggacggagaagcggatgacgataaattccccgtgtgtatccgcgaggctgtgtctcaggtcctgagcggctacgactggacccttgtgcctatgccggttagagtgaacggggcctccaagagcaaaccccacgtcaagcggcctatgaatgcctttatggtgtgggctcaggccgctcgcagaaagctggccgatcaatatccccatctccacaacgcggaactgtctaaaacactgggaaagctctggcggctgcttaatgagtccgacaaacgccctttcattgaggaagccgagagactgcggatgcagcataagaaagatcaccccgactacaagtatcagccgcgcagacggaagaacggcaaagctgcccagggggaagctgagtgccctggaggcgaagccgagcaaggcgggacggcggccatccaggctcattacaagagcgcccacctcgatcaccgccatcccggagagggctctcctatgtccgacgggaatcccgaacaccccagcggacagtctcatggccctccgacaccccctaccacccccaaaacagagctgcagtccgggaaggctgatcctaaaagagacggacggagcatgggcgaaggcgggaagccccacattgactttggaaacgttgatatcggcgagatttcccacgaagtgatgtctaatatggagaccttcgacgtcgccgagcttgatcaatatctgccgcctaacgggcatcccggacacgtgagctcctacagcgccgctggctatgggctcggctctgcgctggccgtggcttccggacatagcgcctggatctctaaacctcccggcgtcgccctgcctacagttagcccgcccggggtggacgctaaggcccaggtgaagaccgaaacggcgggacctcagggccctccccactacaccgatcaaccctccacatctcagatcgcttacaccagcctctccctgccgcattatgggagcgcctttccctctatttcccgccctcagttcgactacagcgatcaccagccctctggaccttattacggccactccgggcaagccagcggcctttattccgctttttcttacatgggacccagccagagacctctgtatacagccatctccgacccctctccgagcggccctcagtcccatagccccacccactgggagcagcctgtctacacgacactctctcggccctga

SEQ ID NO: 3450 - protein, 151 aa, synthetic construct
  REGION 1..151: note = SP17__Homo_sapiens__Q15506
MSIPFSNTHYRIPQGFGNLLEGLTREILREQPDNIPAFAAAYFESLLEKREKTNFDPAEWGSKVEDRFYNNHAFEEQEPPEKSDPKQEESQISGKEEETSVTILDSSEEDKEKEEVAAVKIQAAFRGHIAREEAKKMKTNSLQNEEKEENK

SEQ ID NO: 3451 - RNA, 456 nt, synthetic construct
  misc_feature 1..456: note = SP17__Homo_sapiens__AAH32457
  source 1..456: mol_type = other RNA
atgtcgattccattctccaacacccactaccgaattccacaaggatttgggaatcttcttgaagggctgacacgcgagattctgagagagcaaccggacaatataccagcttttgcagcagcctattttgagagccttctagagaaaagagagaaaaccaactttgatccagcagaatgggggagtaaggtagaagaccgcttctataacaatcatgcattcgaggagcaagaaccacctgagaaaagtgatcctaaacaagaagagtctcagatatctgggaaggaggaagagacatcagtcaccatcttagactcttctgaggaagataaggaaaaagaagaggttgctgctgtcaaaatccaagctgccttccggggacacatagccagagaggaggcaaagaaaatgaaaacaaatagtcttcaaaatgaggaaaaagaggaaaacaagtga

SEQ ID NO: 3452 - RNA, 456 nt, synthetic construct
  misc_feature 1..456: note = derived and/or modified sequence opt1 fromSP17__Homo_sapiens__AAH32457
  source 1..456: mol_type = other RNA
atgagcatccccttctccaacacccactaccgcatcccgcagggcttcgggaacctgctcgagggcctgacccgggagatcctgcgcgagcagcccgacaacatccccgccttcgccgcggcctacttcgagagcctcctggagaagcgggagaagacgaacttcgaccccgccgagtgggggtccaaggtggaggaccgcttctacaacaaccacgccttcgaggagcaggagccgcccgagaagtccgaccccaagcaggaggagagccagatcagcggcaaggaggaggagacctccgtcaccatcctggacagctccgaggaggacaaggagaaggaggaggtggccgcggtgaagatccaggccgccttccgggggcacatcgcccgcgaggaggcgaagaagatgaagaccaacagcctccagaacgaggagaaggaggagaacaagtga

SEQ ID NO: 3453 - RNA, 456 nt, synthetic construct
  misc_feature 1..456: note = derived and/or modified sequence opt2 fromSP17__Homo_sapiens__AAH32457
  source 1..456: mol_type = other RNA
atgtccatccccttctccaacacccactaccgcatcccccagggcttcggcaacctcctcgagggcctcacccgcgagatcctccgcgagcagcccgacaacatccccgccttcgccgccgcctacttcgagtccctcctcgagaagcgcgagaagaccaacttcgaccccgccgagtggggctccaaggtcgaggaccgcttctacaacaaccacgccttcgaggagcaggagccccccgagaagtccgaccccaagcaggaggagtcccagatctccggcaaggaggaggagacctccgtcaccatcctcgactcctccgaggaggacaaggagaaggaggaggtcgccgccgtcaagatccaggccgccttccgcggccacatcgcccgcgaggaggccaagaagatgaagaccaactccctccagaacgaggagaaggaggagaacaagtga

SEQ ID NO: 3454 - RNA, 456 nt, synthetic construct
  misc_feature 1..456: note = derived and/or modified sequence opt3 fromSP17__Homo_sapiens__AAH32457
  source 1..456: mol_type = other RNA
atgagcatccccttctccaacacccactacaggattcctcagggctttgggaatctgctcgagggacttacaagagaaatactgcgggagcaaccagacaacatcccggccttcgctgcagcctattttgaatctttgttagagaagcgcgagaaaactaatttcgatcccgcggagtggggttcaaaggtggaggaccgattttacaacaatcatgctttcgaagaacaggaacctccagagaaaagtgatcccaagcaggaggaaagccagatttccggcaaagaggaagagacgtctgtcaccatcctggactcgtcagaagaggataaggagaaggaagaggttgccgcagtgaaaattcaagccgcttttcgtgggcacatcgcaagagaagaggccaagaaaatgaagacaaacagcctacagaatgaagagaaagaggaaaacaagtga

SEQ ID NO: 3455 - RNA, 456 nt, synthetic construct
  misc_feature 1..456: note = derived and/or modified sequence opt4 fromSP17__Homo_sapiens__AAH32457
  source 1..456: mol_type = other RNA
atgagcatccccttcagcaacacccactacagaatcccccagggcttcggcaacctgctggagggcctgaccagagagatcctgagagagcagcccgacaacatccccgccttcgccgccgcctacttcgagagcctgctggagaagagagagaagaccaacttcgaccccgccgagtggggcagcaaggtggaggacagattctacaacaaccacgccttcgaggagcaggagccccccgagaagagcgaccccaagcaggaggagagccagatcagcggcaaggaggaggagaccagcgtgaccatcctggacagcagcgaggaggacaaggagaaggaggaggtggccgccgtgaagatccaggccgccttcagaggccacatcgccagagaggaggccaagaagatgaagaccaacagcctgcagaacgaggagaaggaggagaacaagtga

SEQ ID NO: 3456 - RNA, 456 nt, synthetic construct
  misc_feature 1..456: note = derived and/or modified sequence opt5 fromSP17__Homo_sapiens__AAH32457
  source 1..456: mol_type = other RNA
atgagcatccccttctccaacacccactaccggattcctcagggctttgggaatctgctcgagggactgacaagagaaatccttcgcgagcaaccggacaacattcccgccttcgctgccgcgtattttgaatctctgctcgagaagagagagaaaacgaatttcgatcctgctgagtggggcagcaaggtggaggaccggttttacaacaatcatgccttcgaagaacaggaaccccctgagaaatccgatcccaagcaggaggaatctcagatcagcgggaaagaggaagagacctccgtcacaattctggactctagcgaagaggataaggagaaggaagaggttgccgctgtgaaaatccaagccgcttttcgcggacacatcgccagagaagaggcgaagaaaatgaagaccaactcccttcagaatgaagagaaagaggaaaacaagtga

SEQ ID NO: 3457 - protein, 97 aa, synthetic construct
  REGION 1..97: note = SPNXA__Homo_sapiens__Q9NS26
MDKQSSAGGVKRSVPCDSNEANEMMPETPTGDSDPQPAPKKMKTSESSTILVVRYRRNFKRTSPEELLNDHARENRINPLQMEEEEFMEIMVEIPAK

SEQ ID NO: 3458 - RNA, 294 nt, synthetic construct
  misc_feature 1..294: note = SPNXA__Homo_sapiens__AAF28420
  source 1..294: mol_type = other RNA
atggacaaacaatccagtgccggcggggtgaagaggagcgtcccctgtgattccaacgaggccaacgagatgatgccggagaccccaactggggactcagacccgcaacctgctcctaaaaaaatgaaaacatctgagtcctcgaccatactagtggttcgctacaggaggaactttaaaagaacatctccagaggaactgctgaatgaccacgcccgagagaacagaatcaaccccctccaaatggaggaggaggaattcatggaaataatggttgaaatacctgcaaagtag

SEQ ID NO: 3459 - RNA, 294 nt, synthetic construct
  misc_feature 1..294: note = derived and/or modified sequence opt1 fromSPNXA__Homo_sapiens__AAF28420
  source 1..294: mol_type = other RNA
atggacaagcagagctccgccggcggggtgaagcgcagcgtcccctgcgactccaacgaggccaacgagatgatgccggagacccccaccggcgacagcgacccccagcccgcgccgaagaagatgaagacgtccgagagctccaccatcctggtggtgcggtaccgccggaacttcaagcgcaccagccccgaggagctcctgaacgaccacgcccgggagaaccgcatcaaccccctgcagatggaggaggaggagttcatggagatcatggtcgagatccccgccaagtga

SEQ ID NO: 3460 - RNA, 294 nt, synthetic construct
  misc_feature 1..294: note = derived and/or modified sequence opt2 fromSPNXA__Homo_sapiens__AAF28420
  source 1..294: mol_type = other RNA
atggacaagcagtcctccgccggcggcgtcaagcgctccgtcccctgcgactccaacgaggccaacgagatgatgcccgagacccccaccggcgactccgacccccagcccgcccccaagaagatgaagacctccgagtcctccaccatcctcgtcgtccgctaccgccgcaacttcaagcgcacctcccccgaggagctcctcaacgaccacgcccgcgagaaccgcatcaaccccctccagatggaggaggaggagttcatggagatcatggtcgagatccccgccaagtga

SEQ ID NO: 3461 - RNA, 294 nt, synthetic construct
  misc_feature 1..294: note = derived and/or modified sequence opt3 fromSPNXA__Homo_sapiens__AAF28420
  source 1..294: mol_type = other RNA
atggacaagcagagctccgccggcggggtgaaaagatctgtcccctgcgattcaaacgaggctaatgaaatgatgcctgagaccccaacaggagacagtgatccgcaacccgcacctaagaaaatgaagactagcgaatcctctacgatcctggttgtgaggtaccggcgcaacttcaaacgaacctcgccagaggaactccttaatgaccacgcccgtgagaacagaattaatcccctgcagatggaggaagaggaatttatggagataatggtagagatccctgcgaagtga

SEQ ID NO: 3462 - RNA, 294 nt, synthetic construct
  misc_feature 1..294: note = derived and/or modified sequence opt4 fromSPNXA__Homo_sapiens__AAF28420
  source 1..294: mol_type = other RNA
atggacaagcagagcagcgccggcggcgtgaagagaagcgtgccctgcgacagcaacgaggccaacgagatgatgcccgagacccccaccggcgacagcgacccccagcccgcccccaagaagatgaagaccagcgagagcagcaccatcctggtggtgagatacagaagaaacttcaagagaaccagccccgaggagctgctgaacgaccacgccagagagaacagaatcaaccccctgcagatggaggaggaggagttcatggagatcatggtggagatccccgccaagtga

SEQ ID NO: 3463 - RNA, 294 nt, synthetic construct
  misc_feature 1..294: note = derived and/or modified sequence opt5 fromSPNXA__Homo_sapiens__AAF28420
  source 1..294: mol_type = other RNA
atggacaagcagagctccgccggcggggtgaaaagatctgtcccctgcgatagcaacgaggctaatgaaatgatgcctgagaccccgacaggagactccgatccccaacctgcccccaagaaaatgaagacgtctgaaagctccaccatcctggttgtgcggtaccgcagaaacttcaaacggacatctcctgaggaactcctgaatgaccacgcgcgcgagaacagaattaatccccttcagatggaggaagaggaatttatggagatcatggtggagattcctgctaagtga

SEQ ID NO: 3464 - protein, 141 aa, synthetic construct
  REGION 1..141: note = SPXN3__Homo_sapiens__Q5MJ09
MEQPTSSTNGEKTKSPCESNNKKNDEMQEVPNRVLAPEQSLKKTKTSEYPIIFVYYLRKGKKINSNQLENEQSQENSINPIQKEEDEGVDLSEGSSNEDEDLGPCEGPSKEDKDLDSSEGSSQEDEDLGLSEGSSQDSGED

SEQ ID NO: 3465 - RNA, 426 nt, synthetic construct
  misc_feature 1..426: note = SPXN3__Homo_sapiens__AAH62750
  source 1..426: mol_type = other RNA
atggaacagccaacttccagtaccaatggggagaagacgaagagcccctgtgaatccaataacaaaaaaaatgatgagatgcaagaggtaccaaacagagtcttagcccccgaacagagtttgaagaagacaaaaacatcagaatatccaataatatttgtgtattacctcaggaagggtaagaaaataaattcaaatcaactggagaatgaacagtcccaagagaactccatcaatccaatccaaaaggaggaggacgaaggcgtagacttatctgaaggatcttcaaatgaggatgaagacctaggcccatgtgaaggaccttcaaaggaggacaaagatctagactcatctgaaggatcctcacaggaggatgaagacctaggcttatctgaaggatcttcacaggacagtggggaggattag

SEQ ID NO: 3466 - RNA, 426 nt, synthetic construct
  misc_feature 1..426: note = derived and/or modified sequence opt1 fromSPXN3__Homo_sapiens__AAH62750
  source 1..426: mol_type = other RNA
atggagcagcccaccagctccaccaacggcgagaagaccaagagcccgtgcgagtccaacaacaagaagaacgacgagatgcaggaggtgcccaaccgcgtcctggcccccgagcagagcctcaagaagacgaagacctccgagtaccccatcatcttcgtgtactacctgcggaaggggaagaagatcaacagcaaccagctggagaacgagcagtcccaggagaacagcatcaacccgatccagaaggaggaggacgagggcgtggacctctccgaggggagctccaacgaggacgaggacctgggcccctgcgaggggcccagcaaggaggacaaggacctggactccagcgagggctccagccaggaggacgaggacctcggcctgtccgaggggagctcccaggacagcggcgaggactga

SEQ ID NO: 3467 - RNA, 426 nt, synthetic construct
  misc_feature 1..426: note = derived and/or modified sequence opt2 fromSPXN3__Homo_sapiens__AAH62750
  source 1..426: mol_type = other RNA
atggagcagcccacctcctccaccaacggcgagaagaccaagtccccctgcgagtccaacaacaagaagaacgacgagatgcaggaggtccccaaccgcgtcctcgcccccgagcagtccctcaagaagaccaagacctccgagtaccccatcatcttcgtctactacctccgcaagggcaagaagatcaactccaaccagctcgagaacgagcagtcccaggagaactccatcaaccccatccagaaggaggaggacgagggcgtcgacctctccgagggctcctccaacgaggacgaggacctcggcccctgcgagggcccctccaaggaggacaaggacctcgactcctccgagggctcctcccaggaggacgaggacctcggcctctccgagggctcctcccaggactccggcgaggactga

SEQ ID NO: 3468 - RNA, 426 nt, synthetic construct
  misc_feature 1..426: note = derived and/or modified sequence opt3 fromSPXN3__Homo_sapiens__AAH62750
  source 1..426: mol_type = other RNA
atggagcagcccaccagctccacaaacggcgaaaagactaaatctccttgcgagtcaaataacaagaaaaatgacgaaatgcaagaggtgccaaacagagtcctggccccggaacagagtctcaagaaaacgaagaccagcgagtaccccatcattttcgtttattaccttaggaaggggaaaaagataaattccaaccagctggagaatgaacagtctcaagagaactcgatcaatcctattcagaaagaagaggatgagggagtggacttgtcagaaggtagcagtaacgaggatgaagacttaggcccatgtgaggggccctccaaggaagataaagacctggattctagcgagggatcctcacaggaggacgaagatctaggcctcagtgagggtagctctcaggactccggggaagattga

SEQ ID NO: 3469 - RNA, 426 nt, synthetic construct
  misc_feature 1..426: note = derived and/or modified sequence opt4 fromSPXN3__Homo_sapiens__AAH62750
  source 1..426: mol_type = other RNA
atggagcagcccaccagcagcaccaacggcgagaagaccaagagcccctgcgagagcaacaacaagaagaacgacgagatgcaggaggtgcccaacagagtgctggcccccgagcagagcctgaagaagaccaagaccagcgagtaccccatcatcttcgtgtactacctgagaaagggcaagaagatcaacagcaaccagctggagaacgagcagagccaggagaacagcatcaaccccatccagaaggaggaggacgagggcgtggacctgagcgagggcagcagcaacgaggacgaggacctgggcccctgcgagggccccagcaaggaggacaaggacctggacagcagcgagggcagcagccaggaggacgaggacctgggcctgagcgagggcagcagccaggacagcggcgaggactga

SEQ ID NO: 3470 - RNA, 426 nt, synthetic construct
  misc_feature 1..426: note = derived and/or modified sequence opt5 fromSPXN3__Homo_sapiens__AAH62750
  source 1..426: mol_type = other RNA
atggagcagcccaccagctccacaaacggcgaaaagacgaaatctccttgcgagagcaataacaagaaaaatgacgaaatgcaagaggtgccgaacagagtcctggcccccgaacagtccctcaagaaaaccaagacatctgagtaccctatcattttcgtttattacctgcggaaggggaaaaagatcaatagcaaccagcttgagaatgaacagtcccaagagaactctattaatcccatccagaaagaagaggatgagggagtggacctgagcgaaggctccagcaacgaggatgaagacctcgggccttgtgagggaccctctaaggaagataaagacctggattccagcgaggggtcttcccaggaggacgaagatcttggcctgagcgagggatcttcccaggacagcggcgaagattga

SEQ ID NO: 3471 - protein, 188 aa, synthetic construct
  REGION 1..188: note = SSX-1__Homo_sapiens__Q16384
MNGDDTFAKRPRDDAKASEKRSKAFDDIATYFSKKEWKKMKYSEKISYVYMKRNYKAMTKLGFKVTLPPFMCNKQATDFQGNDFDNDHNRRIQVEHPQMTFGRLHRIIPKIMPKKPAEDENDSKGVSEASGPQNDGKQLHPPGKANISEKINKRSGPKRGKHAWTHRLRERKQLVIYEEISDPEEDDE

SEQ ID NO: 3472 - RNA, 567 nt, synthetic construct
  misc_feature 1..567: note = SSX-1__Homo_sapiens__AAH01003
  source 1..567: mol_type = other RNA
atgaacggagacgacacctttgcaaagagacccagggatgatgctaaagcatcagagaagagaagcaaggcctttgatgatattgccacatacttctctaagaaagagtggaaaaagatgaaatactcggagaaaatcagctatgtgtatatgaagagaaactataaggccatgactaaactaggtttcaaagtcaccctcccacctttcatgtgtaataaacaggccacagacttccaggggaatgattttgataatgaccataaccgcaggattcaggttgaacatcctcagatgactttcggcaggctccacagaatcatcccgaagatcatgcccaagaagccagcagaggacgaaaatgattcgaagggagtgtcagaagcatctggcccacaaaacgatgggaaacaactgcaccccccaggaaaagcaaatatttctgagaagattaataagagatctggacccaaaagggggaaacatgcctggacccacagactgcgtgagagaaagcagctggtgatttatgaagagatcagcgaccctgaggaagatgacgagtaa

SEQ ID NO: 3473 - RNA, 567 nt, synthetic construct
  misc_feature 1..567: note = derived and/or modified sequence opt1 fromSSX-1__Homo_sapiens__AAH01003
  source 1..567: mol_type = other RNA
atgaacggcgacgacaccttcgccaagcgcccccgggacgacgccaaggcgagcgagaagcgctccaaggccttcgacgacatcgccacctacttcagcaagaaggagtggaagaagatgaagtactccgagaagatcagctacgtgtacatgaagcggaactacaaggccatgacgaagctggggttcaaggtcaccctcccgcccttcatgtgcaacaagcaggccaccgacttccagggcaacgacttcgacaacgaccacaaccgccggatccaggtggagcacccccagatgaccttcgggcgcctgcaccggatcatccccaagatcatgccgaagaagcccgcggaggacgagaacgactccaagggcgtgagcgaggcctccgggccccagaacgacggcaagcagctgcacccgcccggcaaggccaacatcagcgagaagatcaacaagcgctccgggcccaagcggggcaagcacgcctggacgcaccgcctccgggagcgcaagcagctggtcatctacgaggagatcagcgaccccgaggaggacgacgagtga

SEQ ID NO: 3474 - RNA, 567 nt, synthetic construct
  misc_feature 1..567: note = derived and/or modified sequence opt2 fromSSX-1__Homo_sapiens__AAH01003
  source 1..567: mol_type = other RNA
atgaacggcgacgacaccttcgccaagcgcccccgcgacgacgccaaggcctccgagaagcgctccaaggccttcgacgacatcgccacctacttctccaagaaggagtggaagaagatgaagtactccgagaagatctcctacgtctacatgaagcgcaactacaaggccatgaccaagctcggcttcaaggtcaccctcccccccttcatgtgcaacaagcaggccaccgacttccagggcaacgacttcgacaacgaccacaaccgccgcatccaggtcgagcacccccagatgaccttcggccgcctccaccgcatcatccccaagatcatgcccaagaagcccgccgaggacgagaacgactccaagggcgtctccgaggcctccggcccccagaacgacggcaagcagctccacccccccggcaaggccaacatctccgagaagatcaacaagcgctccggccccaagcgcggcaagcacgcctggacccaccgcctccgcgagcgcaagcagctcgtcatctacgaggagatctccgaccccgaggaggacgacgagtga

SEQ ID NO: 3475 - RNA, 567 nt, synthetic construct
  misc_feature 1..567: note = derived and/or modified sequence opt3 fromSSX-1__Homo_sapiens__AAH01003
  source 1..567: mol_type = other RNA
atgaacggcgacgataccttcgccaagagacccagggacgatgctaaagcaagcgagaagcggtccaaagcctttgacgatatcgcgacatacttctctaagaaagaatggaagaagatgaaatattcagagaagattagttacgtgtatatgaaacgcaattacaaggctatgactaaactggggtttaaggtcacgctccctccattcatgtgcaacaagcaggccaccgactttcaaggaaatgatttcgacaacgatcacaatcgacgtatacaggttgaacatccgcagatgacatttggtagacttcacaggatcattcccaaaatcatgcctaagaaaccagcagaggacgaaaacgatagcaagggcgtgtccgaggcctctgggccccagaatgacggaaaacaactgcatcctccaggcaaggctaacatttcggagaaaatcaataagcggtcaggtcccaagcgcgggaaacacgcatggactcatagattgagggaacggaagcagttagtaatatatgaggaaatcagcgatcctgaggaggacgacgaatga

SEQ ID NO: 3476 - RNA, 567 nt, synthetic construct
  misc_feature 1..567: note = derived and/or modified sequence opt4 fromSSX-1__Homo_sapiens__AAH01003
  source 1..567: mol_type = other RNA
atgaacggcgacgacaccttcgccaagagacccagagacgacgccaaggccagcgagaagagaagcaaggccttcgacgacatcgccacctacttcagcaagaaggagtggaagaagatgaagtacagcgagaagatcagctacgtgtacatgaagagaaactacaaggccatgaccaagctgggcttcaaggtgaccctgccccccttcatgtgcaacaagcaggccaccgacttccagggcaacgacttcgacaacgaccacaacagaagaatccaggtggagcacccccagatgaccttcggcagactgcacagaatcatccccaagatcatgcccaagaagcccgccgaggacgagaacgacagcaagggcgtgagcgaggccagcggcccccagaacgacggcaagcagctgcacccccccggcaaggccaacatcagcgagaagatcaacaagagaagcggccccaagagaggcaagcacgcctggacccacagactgagagagagaaagcagctggtgatctacgaggagatcagcgaccccgaggaggacgacgagtga

SEQ ID NO: 3477 - RNA, 567 nt, synthetic construct
  misc_feature 1..567: note = derived and/or modified sequence opt5 fromSSX-1__Homo_sapiens__AAH01003
  source 1..567: mol_type = other RNA
atgaacggcgacgataccttcgccaagagaccccgggacgatgctaaagccagcgagaagcgctccaaagcgtttgacgatatcgctacatacttctctaagaaagaatggaagaagatgaaatatagcgagaagatttcctacgtgtatatgaaaagaaattacaaggccatgacgaaactggggtttaaggtcaccctccctccgttcatgtgcaacaagcaggccacagactttcaaggaaatgatttcgacaacgatcacaatcggcgcatccaggttgaacatccccagatgacctttggcagactgcaccggattatccctaaaattatgcccaagaaacctgctgaggacgaaaacgattctaagggggtgagcgaggcctccggaccccagaatgacggcaaacaacttcatcctccggggaaggctaacatctctgagaaaatcaataagcgcagcggacccaagagaggcaaacacgcctggacacatcggctgcgcgaaagaaagcagctcgtgatttatgaggaaatctccgatcctgaggaggacgacgaatga

SEQ ID NO: 3478 - protein, 188 aa, synthetic construct
  REGION 1..188: note = SSX-2__Homo_sapiens__Q16385
MNGDDAFARRPTVGAQIPEKIQKAFDDIAKYFSKEEWEKMKASEKIFYVYMKRKYEAMTKLGFKATLPPFMCNKRAEDFQGNDLDNDPNRGNQVERPQMTFGRLQGISPKIMPKKPAEEGNDSEEVPEASGPQNDGKELCPPGKPTTSEKIHERSGPKRGEHAWTHRLRERKQLVIYEEISDPEEDDE

SEQ ID NO: 3479 - RNA, 567 nt, synthetic construct
  misc_feature 1..567: note = SSX-2__Homo_sapiens__AAH16957
  source 1..567: mol_type = other RNA
atgaacggagacgacgcctttgcaaggagacccacggttggtgctcaaataccagagaagatccaaaaggccttcgatgatattgccaaatacttctctaaggaagagtgggaaaagatgaaagcctcagagaaaatcttctatgtgtatatgaagagaaagtatgaggctatgactaaactaggtttcaaggccaccctcccacctttcatgtgtaataaacgggccgaagacttccaggggaatgatttggataatgaccctaaccgtgggaatcaggttgaacgtcctcagatgactttcggcaggctccagggaatctccccgaagatcatgcccaagaagccagcagaggaaggaaatgattcggaggaagtgccagaagcatctggcccacaaaatgatgggaaagagctgtgccccccgggaaaaccaactacctctgagaagattcacgagagatctggacccaaaaggggggaacatgcctggacccacagactgcgtgagagaaaacagctggtgatttatgaagagatcagcgaccctgaggaagatgacgagtaa

SEQ ID NO: 3480 - RNA, 567 nt, synthetic construct
  misc_feature 1..567: note = derived and/or modified sequence opt1 fromSSX-2__Homo_sapiens__AAH16957
  source 1..567: mol_type = other RNA
atgaacggcgacgacgccttcgcccgccggcccaccgtgggggcgcagatcccggagaagatccagaaggccttcgacgacatcgccaagtacttcagcaaggaggagtgggagaagatgaaggcctccgagaagatcttctacgtctacatgaagcgcaagtacgaggccatgaccaagctgggcttcaaggcgacgctcccgcccttcatgtgcaacaagcgggccgaggacttccaggggaacgacctggacaacgaccccaaccgcggcaaccaggtggagcggccccagatgaccttcgggcgcctgcagggcatcagccccaagatcatgcccaagaagcccgccgaggagggcaacgactccgaggaggtgccggaggccagcgggccccagaacgacggcaaggagctctgcccgcccgggaagcccaccacctccgagaagatccacgagcggagcggccccaagcgcggggagcacgcgtggacgcaccggctgcgcgagcggaagcagctggtcatctacgaggagatctccgaccccgaggaggacgacgagtga

SEQ ID NO: 3481 - RNA, 567 nt, synthetic construct
  misc_feature 1..567: note = derived and/or modified sequence opt2 fromSSX-2__Homo_sapiens__AAH16957
  source 1..567: mol_type = other RNA
atgaacggcgacgacgccttcgcccgccgccccaccgtcggcgcccagatccccgagaagatccagaaggccttcgacgacatcgccaagtacttctccaaggaggagtgggagaagatgaaggcctccgagaagatcttctacgtctacatgaagcgcaagtacgaggccatgaccaagctcggcttcaaggccaccctcccccccttcatgtgcaacaagcgcgccgaggacttccagggcaacgacctcgacaacgaccccaaccgcggcaaccaggtcgagcgcccccagatgaccttcggccgcctccagggcatctcccccaagatcatgcccaagaagcccgccgaggagggcaacgactccgaggaggtccccgaggcctccggcccccagaacgacggcaaggagctctgcccccccggcaagcccaccacctccgagaagatccacgagcgctccggccccaagcgcggcgagcacgcctggacccaccgcctccgcgagcgcaagcagctcgtcatctacgaggagatctccgaccccgaggaggacgacgagtga

SEQ ID NO: 3482 - RNA, 567 nt, synthetic construct
  misc_feature 1..567: note = derived and/or modified sequence opt3 fromSSX-2__Homo_sapiens__AAH16957
  source 1..567: mol_type = other RNA
atgaacggcgacgatgccttcgctagaaggcccaccgtgggggcacagatccctgagaagattcaaaaagcctttgacgatatagcgaagtacttcagcaaagaagagtgggaaaagatgaaggcttccgagaaaatcttttatgtctacatgaagcggaaatatgaagccatgacaaagctgggattcaaagcaactctcccaccgtttatgtgcaataagcgcgccgaggacttccagggtaacgatcttgacaatgatcccaaccgaggcaatcaggttgagcgtcctcagatgacgtttgggagactgcaaggaatttctccaaaaatcatgcccaagaagcctgctgaagagggcaacgactcagaagaggtgccagaggcaagtggtccccagaatgatgggaaagaattgtgtcctccaggaaagccgaccacaagcgagaaaattcacgaaaggtccggccccaagcggggcgagcatgcctggactcaccgcttaagagaaaggaaacagctggtaatctacgaggagatatctgaccctgaagaggatgacgaatga

SEQ ID NO: 3483 - RNA, 567 nt, synthetic construct
  misc_feature 1..567: note = derived and/or modified sequence opt4 fromSSX-2__Homo_sapiens__AAH16957
  source 1..567: mol_type = other RNA
atgaacggcgacgacgccttcgccagaagacccaccgtgggcgcccagatccccgagaagatccagaaggccttcgacgacatcgccaagtacttcagcaaggaggagtgggagaagatgaaggccagcgagaagatcttctacgtgtacatgaagagaaagtacgaggccatgaccaagctgggcttcaaggccaccctgccccccttcatgtgcaacaagagagccgaggacttccagggcaacgacctggacaacgaccccaacagaggcaaccaggtggagagaccccagatgaccttcggcagactgcagggcatcagccccaagatcatgcccaagaagcccgccgaggagggcaacgacagcgaggaggtgcccgaggccagcggcccccagaacgacggcaaggagctgtgcccccccggcaagcccaccaccagcgagaagatccacgagagaagcggccccaagagaggcgagcacgcctggacccacagactgagagagagaaagcagctggtgatctacgaggagatcagcgaccccgaggaggacgacgagtga

SEQ ID NO: 3484 - RNA, 567 nt, synthetic construct
  misc_feature 1..567: note = derived and/or modified sequence opt5 fromSSX-2__Homo_sapiens__AAH16957
  source 1..567: mol_type = other RNA
atgaacggcgacgatgccttcgctagacggcccaccgtgggggcccagatccctgagaagattcaaaaagcgtttgacgatatcgctaagtacttcagcaaagaagagtgggaaaagatgaaagcctccgagaagatcttttatgtctacatgaagcgcaaatatgaagccatgacaaagctgggattcaaagctacgctcccgccctttatgtgcaataagagagccgaggacttccagggcaacgatctggacaatgatcctaaccgggggaatcaggttgagcgcccccagatgacctttggaagacttcaaggcatttctcctaaaattatgcccaagaagcctgctgaagaggggaacgacagcgaagaggtgccggaggcctccggaccccagaatgatggcaaagaactgtgtcctcccggcaagcctacaacctctgagaaaatccacgaacggagcgggcccaagcgcggagagcatgcgtggacacacagactccgggaacgcaaacagctggtgatctacgaggagatttccgacccggaagaggatgacgaatga

SEQ ID NO: 3485 - protein, 188 aa, synthetic construct
  REGION 1..188: note = SSX3__Homo_sapiens__Q99909
MNGDDTFARRPTVGAQIPEKIQKAFDDIAKYFSKEEWEKMKVSEKIVYVYMKRKYEAMTKLGFKAILPSFMRNKRVTDFQGNDFDNDPNRGNQVQRPQMTFGRLQGIFPKIMPKKPAEEGNVSKEVPEASGPQNDGKQLCPPGKPTTSEKINMISGPKRGEHAWTHRLRERKQLVIYEEISDPEEDDE

SEQ ID NO: 3486 - RNA, 567 nt, synthetic construct
  misc_feature 1..567: note = SSX3__Homo_sapiens__AAC05819
  source 1..567: mol_type = other RNA
atgaacggagatgacacctttgcaaggagacccacggttggtgctcaaataccagagaagatacaaaaggccttcgatgatattgccaaatacttctctaaggaagagtgggaaaagatgaaagtctcggagaaaatcgtctatgtgtatatgaagagaaagtatgaggccatgactaaactaggtttcaaggccatcctcccatctttcatgcgtaataaacgggtcacagacttccaggggaatgattttgataatgaccctaaccgtgggaatcaggttcaacgtcctcagatgactttcggcaggctccagggaatcttcccgaagatcatgcccaagaagccagcagaggaaggaaatgtttcgaaggaagtgccagaagcatctggcccacaaaacgatgggaaacagctgtgccccccgggaaaaccaactacctctgagaagattaacatgatatctggacccaaaaggggggaacatgcctggacccacagactgcgtgagagaaagcagctggtgatttatgaagagatcagcgatcctgaggaagatgatgagtaa

SEQ ID NO: 3487 - RNA, 567 nt, synthetic construct
  misc_feature 1..567: note = derived and/or modified sequence opt1 fromSSX3__Homo_sapiens__AAC05819
  source 1..567: mol_type = other RNA
atgaacggcgacgacaccttcgcccgccggcccaccgtgggggcccagatcccggagaagatccagaaggcgttcgacgacatcgccaagtacttcagcaaggaggagtgggagaagatgaaggtctccgagaagatcgtgtacgtgtacatgaagcgcaagtacgaggccatgacgaagctgggcttcaaggccatcctccccagcttcatgcggaacaagcgcgtcaccgacttccaggggaacgacttcgacaacgaccccaaccggggcaaccaggtgcagcgcccccagatgaccttcgggcggctgcagggcatcttcccgaagatcatgcccaagaagcccgccgaggagggcaacgtgtccaaggaggtccccgaggcgagcgggccgcagaacgacggcaagcagctgtgcccgcccgggaagcccaccacgtccgagaagatcaacatgatcagcggccccaagcgcggggagcacgcctggacccaccggctccgcgagcggaagcagctggtgatctacgaggagatctccgaccccgaggaggacgacgagtga

SEQ ID NO: 3488 - RNA, 567 nt, synthetic construct
  misc_feature 1..567: note = derived and/or modified sequence opt2 fromSSX3__Homo_sapiens__AAC05819
  source 1..567: mol_type = other RNA
atgaacggcgacgacaccttcgcccgccgccccaccgtcggcgcccagatccccgagaagatccagaaggccttcgacgacatcgccaagtacttctccaaggaggagtgggagaagatgaaggtctccgagaagatcgtctacgtctacatgaagcgcaagtacgaggccatgaccaagctcggcttcaaggccatcctcccctccttcatgcgcaacaagcgcgtcaccgacttccagggcaacgacttcgacaacgaccccaaccgcggcaaccaggtccagcgcccccagatgaccttcggccgcctccagggcatcttccccaagatcatgcccaagaagcccgccgaggagggcaacgtctccaaggaggtccccgaggcctccggcccccagaacgacggcaagcagctctgcccccccggcaagcccaccacctccgagaagatcaacatgatctccggccccaagcgcggcgagcacgcctggacccaccgcctccgcgagcgcaagcagctcgtcatctacgaggagatctccgaccccgaggaggacgacgagtga

SEQ ID NO: 3489 - RNA, 567 nt, synthetic construct
  misc_feature 1..567: note = derived and/or modified sequence opt3 fromSSX3__Homo_sapiens__AAC05819
  source 1..567: mol_type = other RNA
atgaacggcgacgataccttcgccagaaggcccacagtgggggctcagatccctgagaagattcaaaaagcatttgacgatatagccaagtacttcagcaaagaagagtgggaaaagatgaaagtctccgagaagatcgtttatgtgtacatgaagcggaaatatgaagcgatgactaagctgggatttaaagctattctcccatctttcatgcgcaataagcgagtaacggactttcagggtaacgatttcgacaatgatccgaaccgtggcaatcaggtgcagagaccccaaatgacctttgggaggcttcagggaatcttccctaaaattatgccaaagaagcccgccgaggagggcaacgtctcaaaagaagtgcctgaggcaagtggtccacagaatgacgggaagcagctgtgccctcccggaaaaccaacaactagcgaaaagatcaacatgatatccggcccgaaacggggcgagcacgcctggacccatcgcttgagagagaggaagcaattagttatctacgaagagatttctgatcccgaagaggacgatgaatga

SEQ ID NO: 3490 - RNA, 567 nt, synthetic construct
  misc_feature 1..567: note = derived and/or modified sequence opt4 fromSSX3__Homo_sapiens__AAC05819
  source 1..567: mol_type = other RNA
atgaacggcgacgacaccttcgccagaagacccaccgtgggcgcccagatccccgagaagatccagaaggccttcgacgacatcgccaagtacttcagcaaggaggagtgggagaagatgaaggtgagcgagaagatcgtgtacgtgtacatgaagagaaagtacgaggccatgaccaagctgggcttcaaggccatcctgcccagcttcatgagaaacaagagagtgaccgacttccagggcaacgacttcgacaacgaccccaacagaggcaaccaggtgcagagaccccagatgaccttcggcagactgcagggcatcttccccaagatcatgcccaagaagcccgccgaggagggcaacgtgagcaaggaggtgcccgaggccagcggcccccagaacgacggcaagcagctgtgcccccccggcaagcccaccaccagcgagaagatcaacatgatcagcggccccaagagaggcgagcacgcctggacccacagactgagagagagaaagcagctggtgatctacgaggagatcagcgaccccgaggaggacgacgagtga

SEQ ID NO: 3491 - RNA, 567 nt, synthetic construct
  misc_feature 1..567: note = derived and/or modified sequence opt5 fromSSX3__Homo_sapiens__AAC05819
  source 1..567: mol_type = other RNA
atgaacggcgacgataccttcgccagacggcccacagtgggggctcagatccctgagaagattcaaaaagcctttgacgatatcgcgaagtacttcagcaaagaagagtgggaaaagatgaaagtctccgagaagattgtttatgtgtacatgaagcgcaaatatgaagctatgacgaagctgggatttaaagccatcctcccgtctttcatgagaaataagcgggtgaccgactttcagggcaacgatttcgacaatgatcccaaccgcgggaatcaggtccagagacctcaaatgacatttggacggctgcagggcattttccccaaaatcatgcctaagaagcccgccgaggaggggaacgtgagcaaagaagttcctgaggcttccggaccgcagaatgacggcaagcagctttgccctcccggcaaacccaccacatctgaaaagatcaacatgattagcgggcctaaacgcggagagcacgcctggacccatagactgcgggagcgcaagcaactcgtgatctacgaagagatttccgatcccgaagaggacgatgaatga

SEQ ID NO: 3492 - protein, 188 aa, synthetic construct
  REGION 1..188: note = SSX-4__Homo_sapiens__O60224
MNGDDAFARRPRDDAQISEKLRKAFDDIAKYFSKKEWEKMKSSEKIVYVYMKLNYEVMTKLGFKVTLPPFMRSKRAADFHGNDFGNDRNHRNQVERPQMTFGSLQRIFPKIMPKKPAEEENGLKEVPEASGPQNDGKQLCPPGNPSTLEKINKTSGPKRGKHAWTHRLRERKQLVVYEEISDPEEDDE

SEQ ID NO: 3493 - RNA, 567 nt, synthetic construct
  misc_feature 1..567: note = SSX-4__Homo_sapiens__AAC05820
  source 1..567: mol_type = other RNA
atgaacggagacgacgcctttgcaaggagacccagggatgatgctcaaatatcagagaagttacgaaaggccttcgatgatattgccaaatacttctctaagaaagagtgggaaaagatgaaatcctcggagaaaatcgtctatgtgtatatgaagctaaactatgaggtcatgactaaactaggtttcaaggtcaccctcccacctttcatgcgtagtaaacgggctgcagacttccacgggaatgattttggtaacgatcgaaaccacaggaatcaggttgaacgtcctcagatgactttcggcagcctccagagaatcttcccgaagatcatgcccaagaagccagcagaggaagaaaatggtttgaaggaagtgccagaggcatctggcccacaaaatgatgggaaacagctgtgccccccgggaaatccaagtaccttggagaagattaacaagacatctggacccaaaagggggaaacatgcctggacccacagactgcgtgagagaaagcagctggtggtttatgaagagatcagcgaccctgaggaagatgacgagtaa

SEQ ID NO: 3494 - RNA, 567 nt, synthetic construct
  misc_feature 1..567: note = derived and/or modified sequence opt1 fromSSX-4__Homo_sapiens__AAC05820
  source 1..567: mol_type = other RNA
atgaacggcgacgacgccttcgcccgccggccccgcgacgacgcgcagatcagcgagaagctgcggaaggccttcgacgacatcgccaagtacttctccaagaaggagtgggagaagatgaagtccagcgagaagatcgtgtacgtctacatgaagctcaactacgaggtgatgaccaagctggggttcaaggtgaccctgccgcccttcatgcgcagcaagcgggccgccgacttccacggcaacgacttcgggaacgaccgcaaccaccggaaccaggtcgagcgcccccagatgacgttcggctccctccagcggatcttccccaagatcatgccgaagaagcccgcggaggaggagaacgggctgaaggaggtgcccgaggccagcggcccccagaacgacggcaagcagctgtgcccgcccgggaacccctccaccctcgagaagatcaacaagaccagcggccccaagcgcgggaagcacgcctggacccaccggctgcgcgagcggaagcagctggtggtctacgaggagatctccgacccggaggaggacgacgagtga

SEQ ID NO: 3495 - RNA, 567 nt, synthetic construct
  misc_feature 1..567: note = derived and/or modified sequence opt2 fromSSX-4__Homo_sapiens__AAC05820
  source 1..567: mol_type = other RNA
atgaacggcgacgacgccttcgcccgccgcccccgcgacgacgcccagatctccgagaagctccgcaaggccttcgacgacatcgccaagtacttctccaagaaggagtgggagaagatgaagtcctccgagaagatcgtctacgtctacatgaagctcaactacgaggtcatgaccaagctcggcttcaaggtcaccctcccccccttcatgcgctccaagcgcgccgccgacttccacggcaacgacttcggcaacgaccgcaaccaccgcaaccaggtcgagcgcccccagatgaccttcggctccctccagcgcatcttccccaagatcatgcccaagaagcccgccgaggaggagaacggcctcaaggaggtccccgaggcctccggcccccagaacgacggcaagcagctctgcccccccggcaacccctccaccctcgagaagatcaacaagacctccggccccaagcgcggcaagcacgcctggacccaccgcctccgcgagcgcaagcagctcgtcgtctacgaggagatctccgaccccgaggaggacgacgagtga

SEQ ID NO: 3496 - RNA, 567 nt, synthetic construct
  misc_feature 1..567: note = derived and/or modified sequence opt3 fromSSX-4__Homo_sapiens__AAC05820
  source 1..567: mol_type = other RNA
atgaacggcgacgatgccttcgctagaaggccccgggacgatgcacagatcagcgagaagctgcgcaaagcctttgacgatattgcgaagtacttctccaaaaaggaatgggagaaaatgaagtcttcagaaaagatagtgtatgtctacatgaaactcaattatgaggttatgaccaaacttgggtttaaggtgacactgcctccattcatgcgaagtaagcgtgctgccgactttcacggaaacgatttcggtaatgacagaaaccataggaatcaagtagaacggccgcagatgacttttggcagcttgcagcgcatcttccccaaaattatgcctaagaagccagcagaggaggaaaacgggttaaaagaggtgcccgaagcctccggacctcagaatgatggcaagcaactgtgcccacccggtaacccttctacgctagagaaaatcaataagacctcggggccaaaaagaggaaagcacgcttggacacataggctccgggagcgcaaacagctggtcgtgtacgaagagatttcagacccggaagaggatgacgaatga

SEQ ID NO: 3497 - RNA, 567 nt, synthetic construct
  misc_feature 1..567: note = derived and/or modified sequence opt4 fromSSX-4__Homo_sapiens__AAC05820
  source 1..567: mol_type = other RNA
atgaacggcgacgacgccttcgccagaagacccagagacgacgcccagatcagcgagaagctgagaaaggccttcgacgacatcgccaagtacttcagcaagaaggagtgggagaagatgaagagcagcgagaagatcgtgtacgtgtacatgaagctgaactacgaggtgatgaccaagctgggcttcaaggtgaccctgccccccttcatgagaagcaagagagccgccgacttccacggcaacgacttcggcaacgacagaaaccacagaaaccaggtggagagaccccagatgaccttcggcagcctgcagagaatcttccccaagatcatgcccaagaagcccgccgaggaggagaacggcctgaaggaggtgcccgaggccagcggcccccagaacgacggcaagcagctgtgcccccccggcaaccccagcaccctggagaagatcaacaagaccagcggccccaagagaggcaagcacgcctggacccacagactgagagagagaaagcagctggtggtgtacgaggagatcagcgaccccgaggaggacgacgagtga

SEQ ID NO: 3498 - RNA, 567 nt, synthetic construct
  misc_feature 1..567: note = derived and/or modified sequence opt5 fromSSX-4__Homo_sapiens__AAC05820
  source 1..567: mol_type = other RNA
atgaacggcgacgatgccttcgctagacggccccgcgacgatgcccagatcagcgagaagctgagaaaagcgtttgacgatattgctaagtacttctccaaaaaggaatgggagaaaatgaagtctagcgaaaagatcgtgtatgtctacatgaaactcaattatgaggttatgaccaagctggggtttaaagtgacacttcctccgttcatgcggtccaagcgcgccgccgactttcacggaaacgatttcggcaatgacagaaaccatcggaatcaagtggaacgcccccagatgacgtttgggtctctgcagagaattttccctaaaatcatgcccaagaagcctgctgaggaggaaaacggactcaaagaggtccccgaagccagcggccctcagaatgatgggaagcaactgtgcccgcccggaaacccttccacccttgagaaaattaataagacatctggccccaaacggggcaagcacgcttggacccatcgcctgagagagcggaaacagctcgtggtttacgaagagatcagcgaccctgaagaggatgacgaatga

SEQ ID NO: 3499 - protein, 295 aa, synthetic construct
  REGION 1..295: note = ST1A1__Homo_sapiens__P50225
MELIQDTSRPPLEYVKGVPLIKYFAEALGPLQSFQARPDDLLISTYPKSGTTWVSQILDMIYQGGDLEKCHRAPIFMRVPFLEFKAPGIPSGMETLKDTPAPRLLKTHLPLALLPQTLLDQKVKVVYVARNAKDVAVSYYHFYHMAKVHPEPGTWDSFLEKFMVGEVSYGSWYQHVQEWWELSRTHPVLYLFYEDMKENPKREIQKILEFVGRSLPEETVDFVVQHTSFKEMKKNPMTNYTTVPQEFMDHSISPFMRKGMAGDWKTTFTVAQNERFDADYAEKMAGCSLSFRSEL

SEQ ID NO: 3500 - RNA, 888 nt, synthetic construct
  misc_feature 1..888: note = ST1A1__Homo_sapiens__CCDS32420.1
  source 1..888: mol_type = other RNA
atggagctgatccaggacacctcccgcccgccactggagtacgtgaagggggtcccgctcatcaagtactttgcagaggcactggggcccctgcagagcttccaggcccggcctgatgacctgctcatcagcacctaccccaagtccggcactacctgggtaagccagattctggacatgatctaccagggtggtgacctggagaagtgtcaccgagctcccatcttcatgcgggtgcccttccttgagttcaaagccccagggattccctcagggatggagactctgaaagacacaccggccccacgactcctgaagacacacctgcccctggctctgctcccccagactctgttggatcagaaggtcaaggtggtctatgttgcccgcaacgcaaaggatgtggcagtttcctactaccacttctaccacatggccaaggtgcaccctgagcctgggacctgggacagcttcctggagaagttcatggtcggagaagtgtcctacggatcctggtaccagcacgtgcaggagtggtgggagctgagccgcacccaccctgttctctacctcttctatgaagacatgaaggagaacccgaaaagggagattcaaaagatcctggagtttgtggggcgctccctgccagaggagaccgtggacttcgtggttcagcacacgtcgttcaaggagatgaagaagaaccctatgaccaactacaccaccgtcccccaggagttcatggaccacagcatctcccccttcatgaggaaaggcatggctggggactggaagaccaccttcaccgtggcgcagaatgagcgcttcgatgcggactatgcggagaagatggcaggctgcagcctcagcttccgctctgagctgtga

SEQ ID NO: 3501 - RNA, 888 nt, synthetic construct
  misc_feature 1..888: note = derived and/or modified sequence opt1 fromST1A1__Homo_sapiens__CCDS32420.1
  source 1..888: mol_type = other RNA
atggagctgatccaggacaccagccggcccccgctcgagtacgtgaagggcgtccccctgatcaagtacttcgccgaggccctggggcccctccagtccttccaggcgcgccccgacgacctgctgatcagcacctacccgaagtccggcacgacctgggtgagccagatcctcgacatgatctaccagggcggggacctggagaagtgccaccgcgcccccatcttcatgcgggtgcccttcctggagttcaaggcccccgggatcccgtccggcatggagaccctcaaggacacccccgcgccccgcctgctgaagacgcacctccccctggccctgctcccgcagaccctgctggaccagaaggtcaaggtggtgtacgtcgcccggaacgccaaggacgtggccgtgagctactaccacttctaccacatggccaaggtccaccccgagcccggcacctgggactccttcctcgagaagttcatggtgggggaggtgagctacggctcctggtaccagcacgtccaggagtggtgggagctgagccgcacccaccccgtgctgtacctcttctacgaggacatgaaggagaacccgaagcgggagatccagaagatcctggagttcgtggggcgctccctgcccgaggagacggtcgacttcgtggtgcagcacaccagcttcaaggagatgaagaagaaccccatgaccaactacaccacggtcccccaggagttcatggaccactccatcagcccgttcatgcggaagggcatggcgggggactggaagaccaccttcaccgtggcccagaacgagcgcttcgacgccgactacgccgagaagatggccggctgctccctcagcttccggtccgagctgtga

SEQ ID NO: 3502 - RNA, 888 nt, synthetic construct
  misc_feature 1..888: note = derived and/or modified sequence opt2 fromST1A1__Homo_sapiens__CCDS32420.1
  source 1..888: mol_type = other RNA
atggagctcatccaggacacctcccgcccccccctcgagtacgtcaagggcgtccccctcatcaagtacttcgccgaggccctcggccccctccagtccttccaggcccgccccgacgacctcctcatctccacctaccccaagtccggcaccacctgggtctcccagatcctcgacatgatctaccagggcggcgacctcgagaagtgccaccgcgcccccatcttcatgcgcgtccccttcctcgagttcaaggcccccggcatcccctccggcatggagaccctcaaggacacccccgccccccgcctcctcaagacccacctccccctcgccctcctcccccagaccctcctcgaccagaaggtcaaggtcgtctacgtcgcccgcaacgccaaggacgtcgccgtctcctactaccacttctaccacatggccaaggtccaccccgagcccggcacctgggactccttcctcgagaagttcatggtcggcgaggtctcctacggctcctggtaccagcacgtccaggagtggtgggagctctcccgcacccaccccgtcctctacctcttctacgaggacatgaaggagaaccccaagcgcgagatccagaagatcctcgagttcgtcggccgctccctccccgaggagaccgtcgacttcgtcgtccagcacacctccttcaaggagatgaagaagaaccccatgaccaactacaccaccgtcccccaggagttcatggaccactccatctcccccttcatgcgcaagggcatggccggcgactggaagaccaccttcaccgtcgcccagaacgagcgcttcgacgccgactacgccgagaagatggccggctgctccctctccttccgctccgagctctga

SEQ ID NO: 3503 - RNA, 888 nt, synthetic construct
  misc_feature 1..888: note = derived and/or modified sequence opt3 fromST1A1__Homo_sapiens__CCDS32420.1
  source 1..888: mol_type = other RNA
atggagctgatccaggacaccagcagaccccctctcgaatacgtgaagggcgtcccacttattaaatatttcgccgaggctctggggccgttgcaatcctttcaggcaaggcccgatgacttactgatatctacataccctaagtcaggaactacgtgggttagtcagatcctagatatgatttatcagggtggcgacctcgaaaaatgccaccgggccccaatcttcatgcgcgtgccctttctggagttcaaggcgcctgggattccaagcggaatggaaacccttaaagatacacccgctcctcgactgttgaagactcatctcccactggccctgctcccgcaaaccttactggaccagaaggtaaaagtggtctacgtggcacgtaacgccaaggatgttgctgtgtcctattaccacttttatcatatggcaaaagtccaccccgagcctggcacatgggactctttccttgagaagtttatggtgggtgaagtatcgtacgggtcatggtaccagcatgttcaggagtggtgggaattgagcagaacccacccagtgctgtatctattctacgaggatatgaaagagaatcccaagagggaaatccaaaagatactcgagtttgtcggacggagtctgcctgaagagactgtggacttcgtggtccagcacacatcctttaaagaaatgaagaaaaacccaatgaccaattatacgactgttccccaggagttcatggatcattctatcagcccgtttatgcgcaagggcatggccggcgactggaaaaccacattcactgtggctcagaacgagagattcgatgccgactacgcggaaaagatggcagggtgttccctttcatttaggagtgagctgtga

SEQ ID NO: 3504 - RNA, 888 nt, synthetic construct
  misc_feature 1..888: note = derived and/or modified sequence opt4 fromST1A1__Homo_sapiens__CCDS32420.1
  source 1..888: mol_type = other RNA
atggagctgatccaggacaccagcagaccccccctggagtacgtgaagggcgtgcccctgatcaagtacttcgccgaggccctgggccccctgcagagcttccaggccagacccgacgacctgctgatcagcacctaccccaagagcggcaccacctgggtgagccagatcctggacatgatctaccagggcggcgacctggagaagtgccacagagcccccatcttcatgagagtgcccttcctggagttcaaggcccccggcatccccagcggcatggagaccctgaaggacacccccgcccccagactgctgaagacccacctgcccctggccctgctgccccagaccctgctggaccagaaggtgaaggtggtgtacgtggccagaaacgccaaggacgtggccgtgagctactaccacttctaccacatggccaaggtgcaccccgagcccggcacctgggacagcttcctggagaagttcatggtgggcgaggtgagctacggcagctggtaccagcacgtgcaggagtggtgggagctgagcagaacccaccccgtgctgtacctgttctacgaggacatgaaggagaaccccaagagagagatccagaagatcctggagttcgtgggcagaagcctgcccgaggagaccgtggacttcgtggtgcagcacaccagcttcaaggagatgaagaagaaccccatgaccaactacaccaccgtgccccaggagttcatggaccacagcatcagccccttcatgagaaagggcatggccggcgactggaagaccaccttcaccgtggcccagaacgagagattcgacgccgactacgccgagaagatggccggctgcagcctgagcttcagaagcgagctgtga

SEQ ID NO: 3505 - RNA, 888 nt, synthetic construct
  misc_feature 1..888: note = derived and/or modified sequence opt5 fromST1A1__Homo_sapiens__CCDS32420.1
  source 1..888: mol_type = other RNA
atggagctgatccaggacaccagcagaccccctctcgaatacgtgaagggcgtcccgctgattaaatatttcgccgaggctcttgggcccctgcaatcctttcaggcccggcctgatgacctcctgatctctacataccccaagagcggaacgacctgggtttcccagattcttgatatgatctatcagggcggggacctggaaaaatgccaccgcgcgcctattttcatgagagtgccctttctcgagttcaaggctcctggaatcccgtctggcatggaaacactgaaagatacccccgcccctcggctgctcaagacacatctgccccttgccctgctccctcaaaccctgcttgaccagaaggtgaaagtcgtgtacgttgctcgcaacgccaaggatgtggctgtcagctattaccacttttatcatatggccaaagtgcaccccgagccggggacatgggactccttcctggagaagtttatggttggagaagtgtcttacggcagctggtaccagcatgtccaggagtggtgggaactctccagaacccaccctgtgctgtatctgttctacgaggatatgaaagagaatcccaagcgggaaatccaaaagattctcgagtttgtgggccgcagcctgcctgaagagacggtcgacttcgttgtgcagcacacctcttttaaagaaatgaagaaaaaccccatgacaaattataccacagtgccccaggagttcatggatcattccatcagcccttttatgagaaaggggatggcgggagactggaaaaccacgttcacagtcgcccagaacgagcggttcgatgctgactacgccgaaaagatggctggctgttctctttcctttcgcagcgagctgtga

SEQ ID NO: 3506 - protein, 1268 aa, synthetic construct
  REGION 1..1268: note = STAG2__Homo_sapiens__Q8N3U4-2
MIAAPEIPTDFNLLQESETHFSSDTDFEDIEGKNQKQGKGKTCKKGKKGPAEKGKGGNGGGKPPSGPNRMNGHHQQNGVENMMLFEVVKMGKSAMQSVVDDWIESYKHDRDIALLDLINFFIQCSGCKGVVTAEMFRHMQNSEIIRKMTEEFDEDSGDYPLTMAGPQWKKFKSSFCEFIGVLVRQCQYSIIYDEYMMDTVISLLTGLSDSQVRAFRHTSTLAAMKLMTALVNVALNLSINMDNTQRQYEAERNKMIGKRANERLELLLQKRKELQENQDEIENMMNAIFKGVFVHRYRDAIAEIRAICIEEIGIWMKMYSDAFLNDSYLKYVGWTMHDKQGEVRLKCLTALQGLYYNKELNSKLELFTSRFKDRIVSMTLDKEYDVAVQAIKLLTLVLQSSEEVLTAEDCENVYHLVYSAHRPVAVAAGEFLYKKLFSRRDPEEDGMMKRRGRQGPNANLVKTLVFFFLESELHEHAAYLVDSMWDCATELLKDWECMNSLLLEEPLSGEEALTDRQESALIEIMLCTIRQAAECHPPVGRGTGKRVLTAKEKKTQLDDRTKITELFAVALPQLLAKYSVDAEKVTNLLQLPQYFDLEIYTTGRLEKHLDALLRQIRNIVEKHTDTDVLEACSKTYHALCNEEFTIFNRVDISRSQLIDELADKFNRLLEDFLQEGEEPDEDDAYQVLSTLKRITAFHNAHDLSKWDLFACNYKLLKTGIENGDMPEQIVIHALQCTHYVILWQLAKITESSSTKEDLLRLKKQMRVFCQICQHYLTNVNTTVKEQAFTILCDILMIFSHQIMSGGRDMLEPLVYTPDSSLQSELLSFILDHVFIEQDDDNNSADGQQEDEASKIEALHKRRNLLAAFCKLIVYTVVEMNTAADIFKQYMKYYNDYGDIIKETMSKTRQIDKIQCAKTLILSLQQLFNEMIQENGYNFDRSSSTFSGIKELARRFALTFGLDQLKTREAIAMLHKDGIEFAFKEPNPQGESHPPLNLAFLDILSEFSSKLLRQDKRTVYVYLEKFMTFQMSLRREDVWLPLMSYRNSLLAGGDDDTMSVISGISSRGSTVRSKKSKPSTGKRKVVEGMQLSLTEESSSSDSMWLSREQTLHTPVMMQTPQLTSTIMREPKRLRPEDSFMSVYPMQTEHHQTPLDYNTQVTWMLAQRQQEEARQQQERAAMSYVKLRTNLQHAIRRGTSLMEDDEEPIVEDVMMSSEGRIEDLNEGMDFDTMDIDLPPSKNRRERTELKPDFFDPASIMDESVLGVSMF

SEQ ID NO: 3507 - RNA, 3807 nt, synthetic construct
  misc_feature 1..3807: note = STAG2__Homo_sapiens__CCDS43990.1
  source 1..3807: mol_type = other RNA
atgatagcagctccagaaataccaactgattttaatctactacaggagtcagaaacacatttttcttctgacacagattttgaagatatcgaaggaaaaaaccaaaagcaaggcaaaggcaaaacttgtaaaaaaggcaaaaagggcccagcagaaaagggcaaaggtggaaatggaggaggaaaacctccttctggtccaaaccgaatgaatggtcatcaccaacagaatggagtggaaaacatgatgttgtttgaagttgttaaaatgggcaagagtgctatgcagtcggtggtagatgattggatagaatcatacaagcatgaccgagatatagcacttcttgaccttatcaacttttttattcagtgttcaggctgtaaaggagttgtcacagcagaaatgtttagacatatgcagaactctgagataattcgaaaaatgactgaagaattcgatgaggatagtggagattatccacttaccatggctggtcctcagtggaagaagttcaaatccagtttttgtgaattcattggcgtgttagtacggcaatgtcaatatagtatcatatatgatgagtatatgatggatacagtcatttcacttcttacaggattgtctgactcacaagtcagagcatttcgacatacaagcaccctggcagctatgaagttgatgacagctttggtgaatgtggcactaaatcttagcattaatatggataatacacaaagacaatatgaagcagaacggaataaaatgattggaaaacgagccaatgagaggctagaactcctgctacaaaagcggaaagagcttcaggaaaatcaagatgaaatagaaaatatgatgaatgcaatatttaaaggagtgtttgtacatagataccgtgatgcgatagctgaaattcgagctatttgcattgaagagattggcatttggatgaagatgtatagtgatgcctttcttaatgacagttatttaaaatatgttggttggactatgcatgataagcaaggtgaagtaagactcaaatgtcttactgctctacaagggctttattataacaaagagcttaattccaaactggaactttttaccagtcggttcaaggatagaattgtgtctatgacccttgacaaagaatatgatgttgcagtacaagcaataaaattactcactcttgttttacagagtagtgaagaagttctcactgcagaagattgtgaaaatgtctatcatctggtttattcagctcaccggccagtagcagtagcagctggagaatttctctacaaaaagctcttcagtcgtagagatccagaggaggatggaatgatgaaaagaagaggaagacaaggtccaaatgccaaccttgttaagacattggtttttttctttctagaaagtgagttacatgagcatgcagcataccttgtggatagcatgtgggactgtgctactgagctgctgaaagactgggaatgtatgaatagcttgttactggaagagccacttagtggagaggaagcactaacagataggcaagagagtgctctgattgaaataatgctttgtaccattagacaagcggctgaatgtcatcctcccgtgggaagagggacaggaaaaagggtgcttacagcaaaggagaagaagacacagttggatgataggacaaaaatcactgagctttttgccgtggcccttcctcagttattagcaaaatactctgtagatgcagaaaaggtgactaacttgttgcagttgcctcagtactttgatttggaaatatataccactggacgattagaaaagcatttggatgccttattgcgacagatccggaatattgtagagaagcacacagatacagatgttttggaagcatgttctaaaacttaccatgcactctgtaatgaagagttcacaatcttcaacagagtagatatttcaagaagtcaactgatagatgaattggcagataaatttaaccggcttcttgaagattttctgcaagagggtgaagaacctgatgaagatgatgcatatcaggtattgtcaacattgaagaggatcactgcttttcataatgcccatgacctttcaaagtgggatttatttgcttgtaattacaaactcttgaaaactggaatcgaaaatggagacatgcctgagcagattgttattcacgcactgcagtgtactcactatgtaatcctttggcaacttgctaagataactgaaagcagctctacaaaggaggacttgctgcgtttaaagaaacaaatgagagtattttgtcagatatgtcaacattacctgaccaacgtgaatactactgttaaggaacaggccttcactattctgtgtgatattttgatgatcttcagccatcagattatgtcaggagggcgtgacatgttagagccattagtgtatacccctgattcttcattgcagtctgagttgctcagctttattttggatcatgtcttcattgaacaggatgatgataataatagtgcagatggtcagcaagaggatgaagccagtaaaattgaagctctgcacaagagaagaaatttacttgcagcattttgtaagctaattgtatatactgtggtggagatgaatacagctgcagatatcttcaaacagtatatgaagtattataatgactatggagatatcatcaaagaaacaatgagtaaaacaaggcagatagacaaaattcagtgtgctaagacccttattctcagtctgcaacagctttttaatgaaatgatacaagaaaatggctataattttgatagatcatcctctacatttagtggcataaaagaacttgctcgacgttttgctttaacttttggacttgatcagttgaaaacaagagaagccattgccatgctacacaaagatggcatagaatttgcttttaaagagcctaatccgcaaggggagagccatccacctttaaatttggcatttcttgatattctgagtgaattttcttctaaactacttcgacaagacaaaagaacagtgtatgtttacttggaaaagttcatgacctttcagatgtcactccgaagagaggatgtgtggcttccactgatgtcttaccgaaattctttgctagctggtggtgatgatgacaccatgtcagtcattagtggaatcagcagccgggggtcaacagtacggagtaaaaaatcaaaaccatctacaggaaaacggaaagtggttgagggcatgcagctttcactcactgaagaaagtagtagtagtgacagtatgtggttaagcagagaacaaacactgcacacccctgttatgatgcagacaccacaactcacctccactattatgagagagcccaaaagattacggcctgaggatagcttcatgagtgtttatccaatgcagactgaacatcatcaaacacctcttgattataacacgcaggtaacatggatgttagctcaaagacaacaagaggaagcaaggcaacagcaggagagagcagcaatgagctatgttaaactgcgaactaatcttcagcatgccattcggcgtggcacaagcctaatggaagatgatgaagagccaattgtggaagatgttatgatgtcctcagaagggaggattgaggatcttaatgagggaatggattttgacaccatggatatagatttgccaccatcaaagaacagacgagagagaacagaactgaagcctgatttctttgatccagcttcaattatggatgaatcagttcttggagtgtcaatgttttaa

SEQ ID NO: 3508 - RNA, 3807 nt, synthetic construct
  misc_feature 1..3807: note = derived and/or modified sequence opt1 fromSTAG2__Homo_sapiens__CCDS43990.1
  source 1..3807: mol_type = other RNA
atgatcgccgcccccgagatcccgaccgacttcaacctgctccaggagagcgagacccacttctccagcgacacggacttcgaggacatcgagggcaagaaccagaagcaggggaagggcaagacctgcaagaaggggaagaagggccccgcggagaaggggaagggcggcaacgggggcgggaagccgccctccggccccaaccgcatgaacgggcaccaccagcagaacggcgtggagaacatgatgctgttcgaggtcgtgaagatgggcaagagcgccatgcagtccgtggtcgacgactggatcgagagctacaagcacgaccgggacatcgccctgctcgacctgatcaacttcttcatccagtgctccgggtgcaagggcgtggtgaccgccgagatgttccgccacatgcagaacagcgagatcatccggaagatgaccgaggagttcgacgaggactccggggactaccccctgacgatggccggcccccagtggaagaagttcaagagctccttctgcgagttcatcggcgtcctcgtgcgccagtgccagtacagcatcatctacgacgagtacatgatggacaccgtgatctccctgctgaccgggctcagcgactcccaggtccgggcgttccgccacaccagcacgctggccgccatgaagctgatgaccgccctcgtgaacgtggcgctgaacctgtccatcaacatggacaacacccagcggcagtacgaggccgagcgcaacaagatgatcggcaagcgggccaacgagcgcctcgagctgctgctccagaagcggaaggagctgcaggagaaccaggacgagatcgagaacatgatgaacgccatcttcaagggggtcttcgtgcaccgctaccgggacgccatcgcggagatccgcgccatctgcatcgaggagatcggcatctggatgaagatgtacagcgacgccttcctgaacgactcctacctcaagtacgtggggtggaccatgcacgacaagcagggcgaggtccggctgaagtgcctgacggccctccagggcctgtactacaacaaggagctgaacagcaagctcgagctgttcaccagccgcttcaaggaccggatcgtgtccatgaccctggacaaggagtacgacgtggccgtccaggcgatcaagctcctgaccctggtgctccagagctccgaggaggtgctgacggccgaggactgcgagaacgtctaccacctggtgtacagcgcccaccgccccgtggccgtcgccgcgggggagttcctctacaagaagctgttctcccggcgcgacccggaggaggacggcatgatgaagcggcgcgggcgccagggccccaacgccaacctggtgaagaccctcgtcttcttcttcctggagagcgagctgcacgagcacgccgcctacctcgtggactccatgtgggactgcgccaccgagctgctgaaggactgggagtgcatgaacagcctcctgctggaggagcccctctccggggaggaggcgctgaccgaccggcaggagagcgccctgatcgagatcatgctgtgcacgatccgccaggccgccgagtgccacccgcccgtgggccggggcaccgggaagcgcgtcctcaccgcgaaggagaagaagacccagctggacgaccggacgaagatcaccgagctgttcgccgtggccctcccccagctgctggccaagtactccgtggacgccgagaaggtcaccaacctcctgcagctgccccagtacttcgacctcgagatctacaccacgggccgcctggagaagcacctggacgcgctcctgcggcagatccgcaacatcgtggagaagcacaccgacaccgacgtgctggaggcctgcagcaagacctaccacgccctctgcaacgaggagttcacgatcttcaaccgggtcgacatctcccgcagccagctgatcgacgagctggccgacaagttcaaccggctcctggaggacttcctgcaggagggggaggagcccgacgaggacgacgcctaccaggtgctctccaccctgaagcgcatcaccgcgttccacaacgcccacgacctgagcaagtgggacctcttcgcctgcaactacaagctgctgaagaccggcatcgagaacggggacatgccggagcagatcgtgatccacgccctccagtgcacgcactacgtcatcctgtggcagctggccaagatcaccgagtccagctccaccaaggaggacctcctgcggctgaagaagcagatgcgcgtgttctgccagatctgccagcactacctcaccaacgtgaacaccacggtcaaggagcaggcgttcaccatcctgtgcgacatcctgatgatcttcagccaccagatcatgagcggcggccgggacatgctcgagcccctggtgtacacccccgactccagcctgcagtccgagctcctgagcttcatcctggaccacgtgttcatcgagcaggacgacgacaacaactccgccgacgggcagcaggaggacgaggccagcaagatcgaggccctccacaagcgccggaacctgctggcggccttctgcaagctcatcgtctacaccgtggtggagatgaacacggccgccgacatcttcaagcagtacatgaagtactacaacgactacggcgacatcatcaaggagaccatgtccaagacccgccagatcgacaagatccagtgcgccaagaccctgatcctgagcctccagcagctgttcaacgagatgatccaggagaacgggtacaacttcgaccggtccagctccacgttcagcggcatcaaggagctggcgcgccgcttcgccctcaccttcggcctggaccagctgaagacccgggaggccatcgccatgctccacaaggacgggatcgagttcgccttcaaggagcccaacccgcagggcgagtcccacccgcccctgaacctggcgttcctcgacatcctgagcgagttctccagcaagctgctccgccaggacaagcggaccgtctacgtgtacctggagaagttcatgacgttccagatgtccctgcgccgggaggacgtgtggctccccctgatgagctaccgcaacagcctgctcgccgggggcgacgacgacaccatgtccgtcatcagcgggatctccagccggggctccaccgtgcgcagcaagaagtccaagcccagcaccggcaagcggaaggtggtcgaggggatgcagctgtccctgacggaggagagctccagctccgacagcatgtggctctcccgcgagcagaccctgcacacccccgtgatgatgcagacgccccagctgaccagcaccatcatgcgggagcccaagcgcctccggccggaggactccttcatgagcgtgtaccccatgcagaccgagcaccaccagacgcccctggactacaacacccaggtcacctggatgctggcccagcgccagcaggaggaggcccggcagcagcaggagcgcgccgcgatgtcctacgtgaagctccggaccaacctgcagcacgccatccgccggggcaccagcctgatggaggacgacgaggagccgatcgtggaggacgtcatgatgagctccgaggggcgcatcgaggacctcaacgagggcatggacttcgacacgatggacatcgacctgccgcccagcaagaaccggcgcgagcgcaccgagctgaagcccgacttcttcgaccccgcctccatcatggacgagagcgtgctcggggtgtccatgttctga

SEQ ID NO: 3509 - RNA, 3807 nt, synthetic construct
  misc_feature 1..3807: note = derived and/or modified sequence opt2 fromSTAG2__Homo_sapiens__CCDS43990.1
  source 1..3807: mol_type = other RNA
atgatcgccgcccccgagatccccaccgacttcaacctcctccaggagtccgagacccacttctcctccgacaccgacttcgaggacatcgagggcaagaaccagaagcagggcaagggcaagacctgcaagaagggcaagaagggccccgccgagaagggcaagggcggcaacggcggcggcaagcccccctccggccccaaccgcatgaacggccaccaccagcagaacggcgtcgagaacatgatgctcttcgaggtcgtcaagatgggcaagtccgccatgcagtccgtcgtcgacgactggatcgagtcctacaagcacgaccgcgacatcgccctcctcgacctcatcaacttcttcatccagtgctccggctgcaagggcgtcgtcaccgccgagatgttccgccacatgcagaactccgagatcatccgcaagatgaccgaggagttcgacgaggactccggcgactaccccctcaccatggccggcccccagtggaagaagttcaagtcctccttctgcgagttcatcggcgtcctcgtccgccagtgccagtactccatcatctacgacgagtacatgatggacaccgtcatctccctcctcaccggcctctccgactcccaggtccgcgccttccgccacacctccaccctcgccgccatgaagctcatgaccgccctcgtcaacgtcgccctcaacctctccatcaacatggacaacacccagcgccagtacgaggccgagcgcaacaagatgatcggcaagcgcgccaacgagcgcctcgagctcctcctccagaagcgcaaggagctccaggagaaccaggacgagatcgagaacatgatgaacgccatcttcaagggcgtcttcgtccaccgctaccgcgacgccatcgccgagatccgcgccatctgcatcgaggagatcggcatctggatgaagatgtactccgacgccttcctcaacgactcctacctcaagtacgtcggctggaccatgcacgacaagcagggcgaggtccgcctcaagtgcctcaccgccctccagggcctctactacaacaaggagctcaactccaagctcgagctcttcacctcccgcttcaaggaccgcatcgtctccatgaccctcgacaaggagtacgacgtcgccgtccaggccatcaagctcctcaccctcgtcctccagtcctccgaggaggtcctcaccgccgaggactgcgagaacgtctaccacctcgtctactccgcccaccgccccgtcgccgtcgccgccggcgagttcctctacaagaagctcttctcccgccgcgaccccgaggaggacggcatgatgaagcgccgcggccgccagggccccaacgccaacctcgtcaagaccctcgtcttcttcttcctcgagtccgagctccacgagcacgccgcctacctcgtcgactccatgtgggactgcgccaccgagctcctcaaggactgggagtgcatgaactccctcctcctcgaggagcccctctccggcgaggaggccctcaccgaccgccaggagtccgccctcatcgagatcatgctctgcaccatccgccaggccgccgagtgccacccccccgtcggccgcggcaccggcaagcgcgtcctcaccgccaaggagaagaagacccagctcgacgaccgcaccaagatcaccgagctcttcgccgtcgccctcccccagctcctcgccaagtactccgtcgacgccgagaaggtcaccaacctcctccagctcccccagtacttcgacctcgagatctacaccaccggccgcctcgagaagcacctcgacgccctcctccgccagatccgcaacatcgtcgagaagcacaccgacaccgacgtcctcgaggcctgctccaagacctaccacgccctctgcaacgaggagttcaccatcttcaaccgcgtcgacatctcccgctcccagctcatcgacgagctcgccgacaagttcaaccgcctcctcgaggacttcctccaggagggcgaggagcccgacgaggacgacgcctaccaggtcctctccaccctcaagcgcatcaccgccttccacaacgcccacgacctctccaagtgggacctcttcgcctgcaactacaagctcctcaagaccggcatcgagaacggcgacatgcccgagcagatcgtcatccacgccctccagtgcacccactacgtcatcctctggcagctcgccaagatcaccgagtcctcctccaccaaggaggacctcctccgcctcaagaagcagatgcgcgtcttctgccagatctgccagcactacctcaccaacgtcaacaccaccgtcaaggagcaggccttcaccatcctctgcgacatcctcatgatcttctcccaccagatcatgtccggcggccgcgacatgctcgagcccctcgtctacacccccgactcctccctccagtccgagctcctctccttcatcctcgaccacgtcttcatcgagcaggacgacgacaacaactccgccgacggccagcaggaggacgaggcctccaagatcgaggccctccacaagcgccgcaacctcctcgccgccttctgcaagctcatcgtctacaccgtcgtcgagatgaacaccgccgccgacatcttcaagcagtacatgaagtactacaacgactacggcgacatcatcaaggagaccatgtccaagacccgccagatcgacaagatccagtgcgccaagaccctcatcctctccctccagcagctcttcaacgagatgatccaggagaacggctacaacttcgaccgctcctcctccaccttctccggcatcaaggagctcgcccgccgcttcgccctcaccttcggcctcgaccagctcaagacccgcgaggccatcgccatgctccacaaggacggcatcgagttcgccttcaaggagcccaacccccagggcgagtcccacccccccctcaacctcgccttcctcgacatcctctccgagttctcctccaagctcctccgccaggacaagcgcaccgtctacgtctacctcgagaagttcatgaccttccagatgtccctccgccgcgaggacgtctggctccccctcatgtcctaccgcaactccctcctcgccggcggcgacgacgacaccatgtccgtcatctccggcatctcctcccgcggctccaccgtccgctccaagaagtccaagccctccaccggcaagcgcaaggtcgtcgagggcatgcagctctccctcaccgaggagtcctcctcctccgactccatgtggctctcccgcgagcagaccctccacacccccgtcatgatgcagaccccccagctcacctccaccatcatgcgcgagcccaagcgcctccgccccgaggactccttcatgtccgtctaccccatgcagaccgagcaccaccagacccccctcgactacaacacccaggtcacctggatgctcgcccagcgccagcaggaggaggcccgccagcagcaggagcgcgccgccatgtcctacgtcaagctccgcaccaacctccagcacgccatccgccgcggcacctccctcatggaggacgacgaggagcccatcgtcgaggacgtcatgatgtcctccgagggccgcatcgaggacctcaacgagggcatggacttcgacaccatggacatcgacctccccccctccaagaaccgccgcgagcgcaccgagctcaagcccgacttcttcgaccccgcctccatcatggacgagtccgtcctcggcgtctccatgttctga

SEQ ID NO: 3510 - RNA, 3807 nt, synthetic construct
  misc_feature 1..3807: note = derived and/or modified sequence opt3 fromSTAG2__Homo_sapiens__CCDS43990.1
  source 1..3807: mol_type = other RNA
atgatcgccgctcccgagattcctaccgacttcaacctgctccaggaaagcgagacacacttttcctctgatactgacttcgaagatatagagggcaagaatcaaaaacaggggaagggaaaaacgtgcaagaaaggtaagaagggcccagcagaaaaagggaagggaggcaacggtgggggaaaaccgccctcaggccctaatagaatgaacggccatcaccagcagaatggggtggagaacatgatgctttttgaggtcgttaagatgggaaaaagtgccatgcaaagcgtggtagacgattggatcgaatcctacaagcatgacagggatattgcgctgttggacttaatcaatttctttattcagtgttctggttgcaagggcgtggtcaccgctgagatgttccggcacatgcagaactcggaaatcatacgcaaaatgacagaggagtttgatgaagactcaggggattatccactgactatggccggaccccagtggaagaaattcaagagcagtttttgtgagttcatcggcgtgctagttcgacaatgccagtactccattatctatgacgaatacatgatggataccgtgatttctctcctgacaggtcttagcgactcccaggtccgtgcatttagacatacctcaactctggccgctatgaaattgatgacagcactcgtgaatgtagccctgaacctgagtatcaatatggacaacacccagaggcaatatgaggctgaacggaataagatgatagggaaacgcgccaacgagagactcgagttactgcttcagaagaggaaggaattgcaggagaatcaagatgaaattgagaacatgatgaacgcgatcttcaaaggagtttttgtgcaccggtaccgcgacgcaattgccgaaatccgagctatctgtattgaggagataggcatctggatgaagatgtatagcgatgccttcctgaatgactcttacctaaaatacgtcggctggacgatgcacgataagcagggggaagtgagactcaaatgcctgactgcacttcagggactgtattacaacaaggagctcaattccaagttggaactgttcacctcaaggtttaaagaccggattgtgagcatgacattagataaggagtatgacgtcgctgttcaggccatcaaactgctcactcttgtgctgcaaagttctgaagaggtattgaccgcggaggattgtgaaaacgtgtaccatctagtctattccgcccaccgtcctgtggcagttgctgccggtgagttcctgtacaagaaactctttagccgcagagacccagaagaggatggcatgatgaagaggcgggggcgacagggacccaatgctaacctggtgaagacacttgtcttctttttcctggagtcggaattgcatgagcacgccgcatatctcgtggactctatgtgggactgcgccaccgaactgttaaaagattgggagtgtatgaactccctgctactcgaagaacctctgtcaggcgaggaagctcttacggaccgccaggagagtgcgttgatagaaattatgctgtgcactatcagacaggcagccgagtgtcacccaccggtaggtagggggacaggcaagcgggttctcaccgctaaagaaaagaaaactcaactggatgaccgcacaaagatcaccgagctttttgccgtggcactgccccagttgctcgccaagtacagcgtcgatgctgagaaagtgacgaatctgttacagctgcctcagtacttcgacctagaaatttataccacaggaagactcgagaagcatctggatgcccttttgaggcaaatccgtaatattgtcgaaaaacacactgacaccgatgtgctggaggcatgctccaagacataccatgcgctctgcaacgaagagtttactatattcaatcgggttgacatctctcgaagccagctgattgatgagttagctgacaaatttaacagactgcttgaagatttcttgcaggagggcgaggagccagacgaggacgatgcctatcaggtgctctcaaccctgaagaggatcacagcatttcacaatgcccatgacctaagtaaatgggatctgttcgcttgtaactacaagctcctgaagaccgggatcgaaaatggagacatgcccgagcaaattgtaatacacgcccttcagtgcactcactatgtcatcttgtggcagctggcaaaaattacggaatccagctctacaaaggaggatttactccgcctgaaaaagcaaatgcgggtgttctgtcagatctgccagcattaccttaccaacgttaacactaccgtgaaagaacaggcttttacaattctgtgtgacatcttgatgatattctcacaccaaatcatgagtggtggcagagatatgctcgagcctctggtctataccccagacagctccctacagtctgagctgctctcgtttattctggatcatgtgttcatcgaacaggacgatgacaataacagcgccgatgggcagcaagaggacgaagcgtccaagattgaggcccttcacaagaggcgcaatttgctggctgcattttgcaaattaatcgtatacactgtggttgaaatgaacacagccgctgacatattcaagcagtacatgaaatattacaatgattatggagacattatcaaggagacgatgtcaaaaacccgacagattgataagatccagtgtgccaagactctcatactgagtcttcaacagctgtttaacgagatgatccaggaaaatggctacaacttcgaccggtctagctccacattttcaggtattaaagagctagcacgtagattcgcgctcacctttgggctggatcaattgaagacaagggaagccatcgctatgctgcacaaagacggcattgagttcgcctttaaggaacccaatccgcagggagagagccatcctcccttaaacctcgcattcctggatatcctttctgagttctccagtaaactgttgcgccaggacaagcggactgtctatgtgtacctcgaaaagtttatgaccttccagatgagcctgagaagggaggatgtgtggctaccactgatgtcttatcgaaattcccttctcgctggcggggacgatgacacgatgtcagtcataagtggaattagctcgcgcggttccaccgttcggtctaaaaagagcaaaccttcaacaggcaagagaaaagtggtggaagggatgcaactgagtttgactgaggagtcctctagctccgactcaatgtggctgagcagggaacagaccttacacacacccgtaatgatgcagactccacagctcaccagtacgatcatgcgtgagcccaagcgcctgcggcctgaagattcttttatgtccgtctacccaatgcaaacagagcatcaccagaccccgcttgactacaacactcaggtgacatggatgctggcccagagacaacaggaagaggcaaggcagcagcaagagcgagccgctatgagctatgttaaattgcggaccaatctccagcatgcgatccgcagaggaacttcgctgatggaagatgacgaggaacccattgtggaggatgtcatgatgtcatctgaaggcaggatcgaggacctaaacgagggtatggatttcgacaccatggatattgacctgcctccaagtaagaatcggcgagaaagaacagagcttaagcccgactttttcgatcctgcctccataatggatgaaagcgtgctcggggtttctatgttttga

SEQ ID NO: 3511 - RNA, 3807 nt, synthetic construct
  misc_feature 1..3807: note = derived and/or modified sequence opt4 fromSTAG2__Homo_sapiens__CCDS43990.1
  source 1..3807: mol_type = other RNA
atgatcgccgcccccgagatccccaccgacttcaacctgctgcaggagagcgagacccacttcagcagcgacaccgacttcgaggacatcgagggcaagaaccagaagcagggcaagggcaagacctgcaagaagggcaagaagggccccgccgagaagggcaagggcggcaacggcggcggcaagccccccagcggccccaacagaatgaacggccaccaccagcagaacggcgtggagaacatgatgctgttcgaggtggtgaagatgggcaagagcgccatgcagagcgtggtggacgactggatcgagagctacaagcacgacagagacatcgccctgctggacctgatcaacttcttcatccagtgcagcggctgcaagggcgtggtgaccgccgagatgttcagacacatgcagaacagcgagatcatcagaaagatgaccgaggagttcgacgaggacagcggcgactaccccctgaccatggccggcccccagtggaagaagttcaagagcagcttctgcgagttcatcggcgtgctggtgagacagtgccagtacagcatcatctacgacgagtacatgatggacaccgtgatcagcctgctgaccggcctgagcgacagccaggtgagagccttcagacacaccagcaccctggccgccatgaagctgatgaccgccctggtgaacgtggccctgaacctgagcatcaacatggacaacacccagagacagtacgaggccgagagaaacaagatgatcggcaagagagccaacgagagactggagctgctgctgcagaagagaaaggagctgcaggagaaccaggacgagatcgagaacatgatgaacgccatcttcaagggcgtgttcgtgcacagatacagagacgccatcgccgagatcagagccatctgcatcgaggagatcggcatctggatgaagatgtacagcgacgccttcctgaacgacagctacctgaagtacgtgggctggaccatgcacgacaagcagggcgaggtgagactgaagtgcctgaccgccctgcagggcctgtactacaacaaggagctgaacagcaagctggagctgttcaccagcagattcaaggacagaatcgtgagcatgaccctggacaaggagtacgacgtggccgtgcaggccatcaagctgctgaccctggtgctgcagagcagcgaggaggtgctgaccgccgaggactgcgagaacgtgtaccacctggtgtacagcgcccacagacccgtggccgtggccgccggcgagttcctgtacaagaagctgttcagcagaagagaccccgaggaggacggcatgatgaagagaagaggcagacagggccccaacgccaacctggtgaagaccctggtgttcttcttcctggagagcgagctgcacgagcacgccgcctacctggtggacagcatgtgggactgcgccaccgagctgctgaaggactgggagtgcatgaacagcctgctgctggaggagcccctgagcggcgaggaggccctgaccgacagacaggagagcgccctgatcgagatcatgctgtgcaccatcagacaggccgccgagtgccacccccccgtgggcagaggcaccggcaagagagtgctgaccgccaaggagaagaagacccagctggacgacagaaccaagatcaccgagctgttcgccgtggccctgccccagctgctggccaagtacagcgtggacgccgagaaggtgaccaacctgctgcagctgccccagtacttcgacctggagatctacaccaccggcagactggagaagcacctggacgccctgctgagacagatcagaaacatcgtggagaagcacaccgacaccgacgtgctggaggcctgcagcaagacctaccacgccctgtgcaacgaggagttcaccatcttcaacagagtggacatcagcagaagccagctgatcgacgagctggccgacaagttcaacagactgctggaggacttcctgcaggagggcgaggagcccgacgaggacgacgcctaccaggtgctgagcaccctgaagagaatcaccgccttccacaacgcccacgacctgagcaagtgggacctgttcgcctgcaactacaagctgctgaagaccggcatcgagaacggcgacatgcccgagcagatcgtgatccacgccctgcagtgcacccactacgtgatcctgtggcagctggccaagatcaccgagagcagcagcaccaaggaggacctgctgagactgaagaagcagatgagagtgttctgccagatctgccagcactacctgaccaacgtgaacaccaccgtgaaggagcaggccttcaccatcctgtgcgacatcctgatgatcttcagccaccagatcatgagcggcggcagagacatgctggagcccctggtgtacacccccgacagcagcctgcagagcgagctgctgagcttcatcctggaccacgtgttcatcgagcaggacgacgacaacaacagcgccgacggccagcaggaggacgaggccagcaagatcgaggccctgcacaagagaagaaacctgctggccgccttctgcaagctgatcgtgtacaccgtggtggagatgaacaccgccgccgacatcttcaagcagtacatgaagtactacaacgactacggcgacatcatcaaggagaccatgagcaagaccagacagatcgacaagatccagtgcgccaagaccctgatcctgagcctgcagcagctgttcaacgagatgatccaggagaacggctacaacttcgacagaagcagcagcaccttcagcggcatcaaggagctggccagaagattcgccctgaccttcggcctggaccagctgaagaccagagaggccatcgccatgctgcacaaggacggcatcgagttcgccttcaaggagcccaacccccagggcgagagccacccccccctgaacctggccttcctggacatcctgagcgagttcagcagcaagctgctgagacaggacaagagaaccgtgtacgtgtacctggagaagttcatgaccttccagatgagcctgagaagagaggacgtgtggctgcccctgatgagctacagaaacagcctgctggccggcggcgacgacgacaccatgagcgtgatcagcggcatcagcagcagaggcagcaccgtgagaagcaagaagagcaagcccagcaccggcaagagaaaggtggtggagggcatgcagctgagcctgaccgaggagagcagcagcagcgacagcatgtggctgagcagagagcagaccctgcacacccccgtgatgatgcagaccccccagctgaccagcaccatcatgagagagcccaagagactgagacccgaggacagcttcatgagcgtgtaccccatgcagaccgagcaccaccagacccccctggactacaacacccaggtgacctggatgctggcccagagacagcaggaggaggccagacagcagcaggagagagccgccatgagctacgtgaagctgagaaccaacctgcagcacgccatcagaagaggcaccagcctgatggaggacgacgaggagcccatcgtggaggacgtgatgatgagcagcgagggcagaatcgaggacctgaacgagggcatggacttcgacaccatggacatcgacctgccccccagcaagaacagaagagagagaaccgagctgaagcccgacttcttcgaccccgccagcatcatggacgagagcgtgctgggcgtgagcatgttctga

SEQ ID NO: 3512 - RNA, 3807 nt, synthetic construct
  misc_feature 1..3807: note = derived and/or modified sequence opt5 fromSTAG2__Homo_sapiens__CCDS43990.1
  source 1..3807: mol_type = other RNA
atgatcgccgctcccgagattcctaccgacttcaacctgctccaggaaagcgagacacacttttcctctgatacggacttcgaagatatcgagggcaagaatcaaaaacaggggaagggaaaaacctgcaagaaaggcaagaaggggccggccgaaaaaggaaagggcgggaacggaggcggcaaaccccctagcgggcccaatagaatgaacggacatcaccagcagaatggcgtggagaacatgatgctgtttgaggtcgttaagatggggaaatccgcgatgcaatctgtggtggacgattggattgaaagctacaagcatgaccgggatatcgcccttctggacctcattaatttctttatccagtgttccggatgcaagggcgtcgtgacagctgagatgttccgccacatgcagaactctgaaatcattagaaaaatgaccgaggagtttgatgaagacagcggggattatcctctgacaatggccggaccccagtggaagaaattcaagtccagcttttgtgagttcatcggcgttcttgtgcggcaatgccagtactctattatctatgacgaatacatgatggataccgtcatttccctgctcacaggcctgagcgactctcaggtgcgcgcttttagacatacctccacgctggccgctatgaaactcatgaccgccctggttaatgtggcgcttaacctgagcatcaatatggacaacacacagcggcaatatgaggccgaacgcaataagatgattgggaaaagagctaacgagcggctcgagctgcttctgcagaagcgcaaggaactccaggagaatcaagatgaaatcgagaacatgatgaacgccatcttcaaaggagtctttgtgcacagataccgggacgctattgccgaaatccgcgcgatttgtatcgaggagattggcatctggatgaagatgtattctgatgccttcctgaatgactcctacctgaaatacgtggggtggaccatgcacgataagcagggagaagtcagactcaaatgcctgacagcccttcagggcctgtattacaacaaggagctcaatagcaagctggaacttttcacctcccggtttaaagaccgcatcgtttctatgacgctggataaggagtatgacgtggctgtgcaggctattaaactcctgacactggtcctccaaagctccgaagaggtgctgaccgccgaggattgtgaaaacgtttaccatcttgtgtatagcgcccacagacctgtcgctgtggcggccggggagttcctgtacaagaaactcttttctcggagagacccggaagaggatggaatgatgaagcgccggggcagacagggccccaatgctaacctggttaagacacttgtgttctttttcctggagtccgaactccatgagcacgccgcctatctggtcgacagcatgtgggactgcgctaccgaactgctcaaagattgggagtgtatgaatagcctgcttctggaagaacctctcagcggggaggaagccctgaccgaccgccaggagtccgcgctgatcgaaattatgctttgcacaatccggcaggctgccgagtgtcatccccctgtgggaagaggcacggggaagcgcgtcctcaccgccaaagaaaagaaaacacaactggatgaccggaccaagattacagagctgtttgctgtggccctcccccagctgcttgctaagtactctgttgatgccgagaaagtgaccaacctgctccagctgccgcagtacttcgacctggaaatctatacgacaggaagacttgagaagcacctcgatgcgctgctgcgccaaatccggaatattgtcgaaaaacacaccgacaccgatgtgctcgaggcctgcagcaagacataccatgctctgtgcaacgaagagtttaccatcttcaatagagttgacatttcccgcagccagcttatcgatgagctggccgacaaatttaaccggctcctggaagatttcctgcaggagggcgaggagcctgacgaggacgatgcttatcaggtgctttctacactcaagagaattacggcctttcacaatgcgcatgacctgtccaaatgggatctgttcgcctgtaactacaagctcctgaagaccgggatcgaaaatggcgacatgcccgagcaaattgtcatccacgcccttcagtgcacacactatgtgatcctgtggcagctcgctaaaattaccgaatcttcttccacaaaggaggatctgctgcggcttaaaaagcaaatgcgcgtgttctgtcagatctgccagcattacctcaccaacgttaacacgaccgtcaaagaacaggcttttacaattctgtgtgacatcctgatgattttcagccaccaaatcatgtccggaggcagagatatgctcgagcctctggtgtatacccccgactctagccttcagtccgagctgctctcttttatcctggatcatgtgttcattgaacaggacgatgacaataacagcgccgatgggcagcaagaggacgaagcctccaagatcgaggctctgcacaagcggagaaatcttctggcggccttttgcaaactcattgtctacacagtggttgaaatgaacaccgctgccgacatcttcaagcagtacatgaaatattacaatgattatggagacattatcaaggagacgatgagcaaaacacgccagatcgataagattcagtgtgccaagaccctgatcctctctctgcaacagctttttaacgagatgattcaggaaaatggctacaacttcgaccggtccagctctacattttccgggatcaaagagctggctagacgcttcgccctcacctttggactggatcaactgaagaccagagaagcgattgctatgcttcacaaagacggcatcgagttcgcctttaaggaacccaatcctcagggggagagccatccgcccctgaacctcgccttcctggatatcctctctgagttcagctccaaactgcttcggcaggacaagcgcacagtgtatgtctacctggaaaagtttatgacgttccagatgagcctcagacgggaggatgtgtggctgcctctgatgtcttatcgcaattcccttctggctggcggagacgatgacaccatgagcgttatttccggcatctctagcagagggtccacagtgcggtctaaaaagagcaaaccctccaccggaaagcgcaaagtcgtggaaggcatgcaactctctctgacagaggagagctccagctctgactccatgtggctcagcagagaacagaccctgcacacgcctgttatgatgcagacaccccagcttacctctaccattatgcgggagccgaagcgcctgagacctgaagattcctttatgagcgtgtaccccatgcaaacagagcatcaccagacccctctggactacaacacacaggtcacgtggatgctcgcccagcggcaacaggaagaggcgagacagcagcaagagcgcgctgccatgtcttatgtgaaactgcggaccaatcttcagcatgccatcagacgcgggacatccctgatggaagatgacgaggaacccattgtggaggatgtcatgatgagctccgaaggacggatcgaggacctcaacgagggcatggatttcgacaccatggatattgacctgcctcccagcaagaatagacgcgaacggacagagctcaagccggactttttcgatcctgcttctatcatggatgaaagcgttctgggggtgtccatgttttga

SEQ ID NO: 3513 - protein, 490 aa, synthetic construct
  REGION 1..490: note = STAMP-1__Homo_sapiens__Q8NFT2
MESISMMGSPKSLSETFLPNGINGIKDARKVTVGVIGSGDFAKSLTIRLIRCGYHVVIGSRNPKFASEFFPHVVDVTHHEDALTKTNIIFVAIHREHYTSLWDLRHLLVGKILIDVSNNMRINQYPESNAEYLASLFPDSLIVKGFNVVSAWALQLGPKDASRQVYICSNNIQARQQVIELARQLNFIPIDLGSLSSAREIENLPLRLFTLWRGPVVVAISLATFFFLYSFVRDVIHPYARNQQSDFYKIPIEIVNKTLPIVAITLLSLVYLAGLLAAAYQLYYGTKYRRFPPWLETWLQCRKQLGLLSFFFAMVHVAYSLCLPMRRSERYLFLNMAYQQVHANIENSWNEEEVWRIEMYISFGIMSLGLLSLLAVTSIPSVSNALNWREFSFIQSTLGYVALLISTFHVLIYGWKRAFEEEYYRFYTPPNFVLALVLPSIVILGKIILFLPCISRKLKRIKKGWEKSQFLEEGMGGTIPHVSPERVTVM

SEQ ID NO: 3514 - RNA, 1473 nt, synthetic construct
  misc_feature 1..1473: note = STAMP-1__Homo_sapiens__CCDS5615.1
  source 1..1473: mol_type = other RNA
atggaatcaatctctatgatgggaagccctaagagccttagtgaaacttttttacctaatggcataaatggtatcaaagatgcaaggaaggtcactgtaggtgtgattggaagtggagattttgccaaatccttgaccattcgacttattagatgcggctatcatgtggtcataggaagtagaaatcctaagtttgcttctgaattttttcctcatgtggtagatgtcactcatcatgaagatgctctcacaaaaacaaatataatatttgttgctatacacagagaacattatacctccctgtgggacctgagacatctgcttgtgggtaaaatcctgattgatgtgagcaataacatgaggataaaccagtacccagaatccaatgctgaatatttggcttcattattcccagattctttgattgtcaaaggatttaatgttgtctcagcttgggcacttcagttaggacctaaggatgccagccggcaggtttatatatgcagcaacaatattcaagcgcgacaacaggttattgaacttgcccgccagttgaatttcattcccattgacttgggatccttatcatcagccagagagattgaaaatttacccctacgactctttactctctggagagggccagtggtggtagctataagcttggccacattttttttcctttattcctttgtcagagatgtgattcatccatatgctagaaaccaacagagtgacttttacaaaattcctatagagattgtgaataaaaccttacctatagttgccattactttgctctccctagtatacctcgcaggtcttctggcagctgcttatcaactttattacggcaccaagtataggagatttccaccttggttggaaacctggttacagtgtagaaaacagcttggattactaagttttttcttcgctatggtccatgttgcctacagcctctgcttaccgatgagaaggtcagagagatatttgtttctcaacatggcttatcagcaggttcatgcaaatattgaaaactcttggaatgaggaagaagtttggagaattgaaatgtatatctcctttggcataatgagccttggcttactttccctcctggcagtcacttctatcccttcagtgagcaatgctttaaactggagagaattcagttttattcagtctacacttggatatgtcgctctgctcataagtactttccatgttttaatttatggatggaaacgagcttttgaggaagagtactacagattttatacaccaccaaactttgttcttgctcttgttttgccctcaattgtaattctgggtaagattattttattccttccatgtataagccgaaagctaaaacgaattaaaaaaggctgggaaaagagccaatttctggaagaaggtatgggaggaacaattcctcatgtctccccggagagggtcacagtaatgtga

SEQ ID NO: 3515 - RNA, 1473 nt, synthetic construct
  misc_feature 1..1473: note = derived and/or modified sequence opt1 fromSTAMP-1__Homo_sapiens__CCDS5615.1
  source 1..1473: mol_type = other RNA
atggagagcatctccatgatgggcagccccaagtccctgagcgagaccttcctcccgaacgggatcaacggcatcaaggacgcccgcaaggtgaccgtcggggtgatcggctccggggacttcgccaagagcctgacgatccggctgatccgctgcggctaccacgtggtcatcggctcccggaaccccaagttcgcgagcgagttcttcccccacgtggtggacgtcacccaccacgaggacgccctcaccaagaccaacatcatcttcgtggccatccaccgcgagcactacacgtccctgtgggacctgcggcacctcctggtggggaagatcctgatcgacgtcagcaacaacatgcgcatcaaccagtaccccgagtccaacgccgagtacctcgccagcctgttcccggactccctgatcgtgaagggcttcaacgtggtcagcgcgtgggccctccagctggggcccaaggacgcctcccgccaggtgtacatctgcagcaacaacatccaggcccggcagcaggtcatcgagctggcgcggcagctcaacttcatccccatcgacctgggctccctgagctccgcccgcgagatcgagaacctccccctgcggctgttcaccctctggcgcgggccggtggtggtggccatcagcctggccaccttcttcttcctgtacagcttcgtccgggacgtgatccacccctacgcccgcaaccagcagtccgacttctacaagatccccatcgagatcgtgaacaagaccctccccatcgtcgcgatcacgctgctgagcctcgtgtacctggccggcctgctcgccgccgcctaccagctgtactacggcaccaagtaccggcgcttcccgccctggctggagacctggctccagtgccggaagcagctggggctgctctccttcttcttcgcgatggtgcacgtcgcctacagcctgtgcctgcccatgcgccggtccgagcgctacctcttcctgaacatggcctaccagcaggtccacgccaacatcgagaacagctggaacgaggaggaggtgtggcggatcgagatgtacatctccttcggcatcatgagcctggggctcctgtccctgctcgccgtgaccagcatcccctccgtgagcaacgcgctgaactggcgcgagttctccttcatccagagcacgctgggctacgtcgccctcctgatctccaccttccacgtgctgatctacggctggaagcgcgccttcgaggaggagtactaccggttctacaccccgcccaacttcgtgctggccctcgtcctgcccagcatcgtgatcctggggaagatcatcctcttcctgccctgcatctcccgcaagctgaagcggatcaagaagggctgggagaagtcccagttcctcgaggaggggatgggcgggaccatcccgcacgtgagccccgagcgcgtcacggtgatgtga

SEQ ID NO: 3516 - RNA, 1473 nt, synthetic construct
  misc_feature 1..1473: note = derived and/or modified sequence opt2 fromSTAMP-1__Homo_sapiens__CCDS5615.1
  source 1..1473: mol_type = other RNA
atggagtccatctccatgatgggctcccccaagtccctctccgagaccttcctccccaacggcatcaacggcatcaaggacgcccgcaaggtcaccgtcggcgtcatcggctccggcgacttcgccaagtccctcaccatccgcctcatccgctgcggctaccacgtcgtcatcggctcccgcaaccccaagttcgcctccgagttcttcccccacgtcgtcgacgtcacccaccacgaggacgccctcaccaagaccaacatcatcttcgtcgccatccaccgcgagcactacacctccctctgggacctccgccacctcctcgtcggcaagatcctcatcgacgtctccaacaacatgcgcatcaaccagtaccccgagtccaacgccgagtacctcgcctccctcttccccgactccctcatcgtcaagggcttcaacgtcgtctccgcctgggccctccagctcggccccaaggacgcctcccgccaggtctacatctgctccaacaacatccaggcccgccagcaggtcatcgagctcgcccgccagctcaacttcatccccatcgacctcggctccctctcctccgcccgcgagatcgagaacctccccctccgcctcttcaccctctggcgcggccccgtcgtcgtcgccatctccctcgccaccttcttcttcctctactccttcgtccgcgacgtcatccacccctacgcccgcaaccagcagtccgacttctacaagatccccatcgagatcgtcaacaagaccctccccatcgtcgccatcaccctcctctccctcgtctacctcgccggcctcctcgccgccgcctaccagctctactacggcaccaagtaccgccgcttccccccctggctcgagacctggctccagtgccgcaagcagctcggcctcctctccttcttcttcgccatggtccacgtcgcctactccctctgcctccccatgcgccgctccgagcgctacctcttcctcaacatggcctaccagcaggtccacgccaacatcgagaactcctggaacgaggaggaggtctggcgcatcgagatgtacatctccttcggcatcatgtccctcggcctcctctccctcctcgccgtcacctccatcccctccgtctccaacgccctcaactggcgcgagttctccttcatccagtccaccctcggctacgtcgccctcctcatctccaccttccacgtcctcatctacggctggaagcgcgccttcgaggaggagtactaccgcttctacaccccccccaacttcgtcctcgccctcgtcctcccctccatcgtcatcctcggcaagatcatcctcttcctcccctgcatctcccgcaagctcaagcgcatcaagaagggctgggagaagtcccagttcctcgaggagggcatgggcggcaccatcccccacgtctcccccgagcgcgtcaccgtcatgtga

SEQ ID NO: 3517 - RNA, 1473 nt, synthetic construct
  misc_feature 1..1473: note = derived and/or modified sequence opt3 fromSTAMP-1__Homo_sapiens__CCDS5615.1
  source 1..1473: mol_type = other RNA
atggagagcatctccatgatgggctctcccaagtcactgagtgaaaccttcctccctaacgggattaatggaataaaagacgccagaaaggtgacagtcggtgttatcggcagcggggattttgctaaatcccttactattaggctgatccggtgcggataccacgtggtaattggctctcgcaacccaaagttcgcatcggagtttttcccgcatgtggtcgacgtgacgcaccatgaagatgccttgaccaaaacaaatatcatatttgttgcgatccaccgagagcattatacttcattatgggacctgcgtcacctactcgtgggtaagattctgatcgatgtcagcaacaatatgagaattaaccagtaccccgaaagtaatgctgagtatcttgcctccctgttccctgactctttgatcgtgaaggggtttaacgtagttagcgcatgggccctccaactgggaccaaaagatgcttccaggcaagtgtacatatgttcaaataacattcaggcacggcagcaggtcatcgagctggcccgccagctcaatttcattcccatcgacttaggcagtctgagctctgctagagaaatcgagaaccttcctttgaggctgtttaccctatggcggggcccagtggtggtcgccatttccctcgcgacattctttttcctgtattcatttgttcgcgatgtgatacacccctacgcacgaaatcagcagagcgacttctataagatccctattgaaatcgtaaacaaaacccttccaatagtggccattactctgttgagtctcgtctacctggctgggttactggccgcagcttaccaactctattacggaacaaagtatagaaggttcccgccctggcttgagacctggctgcagtgccggaaacagttgggtctactgagctttttctttgccatggtgcatgttgcgtactccctctgtctgcctatgcgtcgcagcgagagatatcttttcctgaatatggcctaccagcaagtgcacgcaaacatcgaaaactcgtggaatgaggaagaggtctggaggatcgaaatgtatatttcttttggcatcatgtccttggggctcctgtcattactggctgtgacgagtattccaagcgtatccaacgccctaaattggcgggagttctcttttatacagagcactctcggatacgttgctctgcttatctcaaccttccatgtgttgatttacggctggaagcgagcctttgaggaagagtattaccgcttctatacaccccctaactttgtcctggcactcgtgctgccaagtatcgtcatccttggtaagattatactgttcttgccctgcatctccagaaaactcaagaggattaaaaaggggtgggaaaaatctcagtttctggaggaaggaatgggcggcactatcccgcacgtgtctcctgagcgggttaccgtgatgtga

SEQ ID NO: 3518 - RNA, 1473 nt, synthetic construct
  misc_feature 1..1473: note = derived and/or modified sequence opt4 fromSTAMP-1__Homo_sapiens__CCDS5615.1
  source 1..1473: mol_type = other RNA
atggagagcatcagcatgatgggcagccccaagagcctgagcgagaccttcctgcccaacggcatcaacggcatcaaggacgccagaaaggtgaccgtgggcgtgatcggcagcggcgacttcgccaagagcctgaccatcagactgatcagatgcggctaccacgtggtgatcggcagcagaaaccccaagttcgccagcgagttcttcccccacgtggtggacgtgacccaccacgaggacgccctgaccaagaccaacatcatcttcgtggccatccacagagagcactacaccagcctgtgggacctgagacacctgctggtgggcaagatcctgatcgacgtgagcaacaacatgagaatcaaccagtaccccgagagcaacgccgagtacctggccagcctgttccccgacagcctgatcgtgaagggcttcaacgtggtgagcgcctgggccctgcagctgggccccaaggacgccagcagacaggtgtacatctgcagcaacaacatccaggccagacagcaggtgatcgagctggccagacagctgaacttcatccccatcgacctgggcagcctgagcagcgccagagagatcgagaacctgcccctgagactgttcaccctgtggagaggccccgtggtggtggccatcagcctggccaccttcttcttcctgtacagcttcgtgagagacgtgatccacccctacgccagaaaccagcagagcgacttctacaagatccccatcgagatcgtgaacaagaccctgcccatcgtggccatcaccctgctgagcctggtgtacctggccggcctgctggccgccgcctaccagctgtactacggcaccaagtacagaagattccccccctggctggagacctggctgcagtgcagaaagcagctgggcctgctgagcttcttcttcgccatggtgcacgtggcctacagcctgtgcctgcccatgagaagaagcgagagatacctgttcctgaacatggcctaccagcaggtgcacgccaacatcgagaacagctggaacgaggaggaggtgtggagaatcgagatgtacatcagcttcggcatcatgagcctgggcctgctgagcctgctggccgtgaccagcatccccagcgtgagcaacgccctgaactggagagagttcagcttcatccagagcaccctgggctacgtggccctgctgatcagcaccttccacgtgctgatctacggctggaagagagccttcgaggaggagtactacagattctacaccccccccaacttcgtgctggccctggtgctgcccagcatcgtgatcctgggcaagatcatcctgttcctgccctgcatcagcagaaagctgaagagaatcaagaagggctgggagaagagccagttcctggaggagggcatgggcggcaccatcccccacgtgagccccgagagagtgaccgtgatgtga

SEQ ID NO: 3519 - RNA, 1473 nt, synthetic construct
  misc_feature 1..1473: note = derived and/or modified sequence opt5 fromSTAMP-1__Homo_sapiens__CCDS5615.1
  source 1..1473: mol_type = other RNA
atggagagcatctccatgatgggctctcccaagagcctgtccgaaaccttcctccctaacgggattaatggaatcaaagacgccagaaaggtgacagtcggcgttattgggtctggagattttgctaaaagcctgacgatccggcttattcgctgcggctaccacgtggtgatcgggtccagaaacccgaagttcgcctctgagtttttcccccatgtcgtggacgttacccaccatgaagatgcgctgacaaaaaccaatatcatttttgtggctatccaccgggagcattatacaagcctctgggacctgcgccaccttctggtcggaaagattctcatcgatgtgtccaacaatatgagaattaaccagtaccctgaaagcaatgccgagtatctggcctctctgttccccgactccctcatcgttaagggctttaacgtggtcagcgcttgggccctgcaacttggccctaaagatgcttctcgccaggtgtacatttgttccaataacatccaggcccggcagcaagtgatcgagctggcgagacagctcaatttcattcccatcgacctggggagcctttcttccgcccgggaaattgagaacctgcctctccgcctgtttaccctgtggagaggaccggtcgttgtggctatcagcctcgccacattctttttcctgtattcctttgtgcgggatgtcattcacccctacgctcgcaatcagcagtctgacttctataagatccctatcgaaattgtgaacaaaacccttcccatcgttgccattacgctgctcagcctggtgtaccttgcgggcctgctcgccgctgcctaccaactgtattacgggaccaagtatagacggttccctccctggctggagacatggctccagtgccgcaaacagctgggacttctgtcctttttctttgctatggtccatgtggcctacagcctctgtctgccgatgagacggtctgagagatatcttttcctgaatatggcctaccagcaagttcacgctaacatcgaaaactcctggaatgaggaagaggtgtggcgcattgaaatgtatatcagctttggcatcatgtctctcgggctgctgagcctcctggcggtcacctccattccttctgtgagcaacgcccttaattggcgggagttctcctttatccagagcacactgggatacgtcgctctcctgatttctaccttccatgtgctgatctacggctggaagagagcctttgaggaagagtattaccgcttctatacgccccctaactttgttcttgccctcgtgctgccctccattgtcatcctgggcaagattatcctcttcctgccctgcatcagccggaaacttaagagaattaaaaaggggtgggaaaaatctcagtttctggaggaaggaatgggcgggacaatccctcacgtgtccccggagcgcgttaccgtgatgtga

SEQ ID NO: 3520 - protein, 258 aa, synthetic construct [sequence omitted]

SEQ ID NO: 3521 - RNA, 777 nt, synthetic construct
  misc_feature 1..777: note = STEAP-1__Homo_sapiens__EAW93749
  source 1..777: mol_type = other RNA
atggaaagcagaaaagacatcacaaaccaagaagaaatttggaaaatgaagcctaggagaaatttagaagacaacgattatttgcataaggacacgggagagaccagcatgctaaaaagacctgtgcttttgcatttgcagcaaacagcccatgctgatgaatttgactgcccttcagaacttcagcacgcacaggaactctttccacagtggcacttgccaattaaaatagctgctgttatggcatctctgacttttctttacactcttctgagggaagtaattcaccctttagcaacttcccatcaacaatatttttataaaattccaatcctggtcatcaacaaagtcttgccaatggtttccatcactctcttggcattggtttacctaccaggtgtgatagcagcaattgtccaagttcataatggaaccaagtataagaagtttccacattggttggataagtggatgttaacaagaaagcagtttgggcttctcagtttgttttttgctgtactgcatgcaatttatactctgtcttacgcaatgaggcgatcctacagatacaagttgctaaactgggcatatcaacaggtccaacaaaataaagaagatgcctggattgagcatgatgtttggagaatggagatttatgtgtctctgggaattgtgggactggcaatactggctctgttggctgtgacatctattccatctgtgagtgactctttgacatggagagaatttcactatattcaggtaaataatatataa

SEQ ID NO: 3522 - RNA, 777 nt, synthetic construct
  misc_feature 1..777: note = derived and/or modified sequence opt1 fromSTEAP-1__Homo_sapiens__EAW93749
  source 1..777: mol_type = other RNA
atggagagccgcaaggacatcaccaaccaggaggagatctggaagatgaagccccggcgcaacctggaggacaacgactacctccacaaggacaccggcgagacgtccatgctgaagcggccggtgctgctccacctccagcagaccgcccacgccgacgagttcgactgccccagcgagctgcagcacgcgcaggagctgttcccccagtggcacctccccatcaagatcgccgccgtcatggcctccctgaccttcctgtacaccctgctgcgcgaggtgatccacccgctcgccacgagccaccagcagtacttctacaagatccccatcctggtgatcaacaaggtcctgcccatggtgtccatcaccctcctggcgctggtgtacctccccggggtcatcgccgccatcgtccaggtgcacaacggcaccaagtacaagaagttcccgcactggctggacaagtggatgctgacccggaagcagttcgggctcctgagcctgttcttcgccgtgctccacgcgatctacacgctgtcctacgccatgcgccggagctaccgctacaagctgctcaactgggcctaccagcaggtccagcagaacaaggaggacgcctggatcgagcacgacgtgtggcggatggagatctacgtgtccctgggcatcgtggggctggccatcctcgcgctgctggccgtgaccagcatcccctccgtcagcgactccctcacctggcgcgagttccactacatccaggtgaacaacatctga

SEQ ID NO: 3523 - RNA, 777 nt, synthetic construct
  misc_feature 1..777: note = derived and/or modified sequence opt2 fromSTEAP-1__Homo_sapiens__EAW93749
  source 1..777: mol_type = other RNA
atggagtcccgcaaggacatcaccaaccaggaggagatctggaagatgaagccccgccgcaacctcgaggacaacgactacctccacaaggacaccggcgagacctccatgctcaagcgccccgtcctcctccacctccagcagaccgcccacgccgacgagttcgactgcccctccgagctccagcacgcccaggagctcttcccccagtggcacctccccatcaagatcgccgccgtcatggcctccctcaccttcctctacaccctcctccgcgaggtcatccaccccctcgccacctcccaccagcagtacttctacaagatccccatcctcgtcatcaacaaggtcctccccatggtctccatcaccctcctcgccctcgtctacctccccggcgtcatcgccgccatcgtccaggtccacaacggcaccaagtacaagaagttcccccactggctcgacaagtggatgctcacccgcaagcagttcggcctcctctccctcttcttcgccgtcctccacgccatctacaccctctcctacgccatgcgccgctcctaccgctacaagctcctcaactgggcctaccagcaggtccagcagaacaaggaggacgcctggatcgagcacgacgtctggcgcatggagatctacgtctccctcggcatcgtcggcctcgccatcctcgccctcctcgccgtcacctccatcccctccgtctccgactccctcacctggcgcgagttccactacatccaggtcaacaacatctga

SEQ ID NO: 3524 - RNA, 777 nt, synthetic construct
  misc_feature 1..777: note = derived and/or modified sequence opt3 fromSTEAP-1__Homo_sapiens__EAW93749
  source 1..777: mol_type = other RNA
atggagagcagaaaggacatcaccaaccaggaagagatttggaaaatgaagcccaggcggaatctggaagataacgactacctccacaaagatacaggcgagacttccatgcttaagcgccctgtgctgttgcatttacaacagacggcccacgctgacgagttcgattgcccatctgaactgcagcatgcacaggagctatttccgcaatggcacctccccataaaaatcgccgcggtcatggcttcactgaccttcctttatacactgttgcgagaagttattcatcctctcgccaccagtcaccagcagtacttttataagatcccaattctggtgatcaataaggtactgcccatggtgagcataactctcttagcactggtctaccttcctggggtgatcgccgctattgttcaggtgcacaacggaacaaaatataagaaattcccacattggttggacaagtggatgctgacccgtaaacaatttggtctactctccctgttctttgcagtccttcacgccatctacactctgtcttatgctatgagaaggtcgtaccggtacaagttgctcaattgggcctatcaacaggtgcagcagaacaaggaggatgcgtggattgaacatgacgtatggcgcatggagatctacgtttcactgggcatagtggggttagcaattctggccctccttgctgtcacaagcatccccagtgtgtccgattctctgacctggagagagttccactatattcaggtgaataacatctga

SEQ ID NO: 3525 - RNA, 777 nt, synthetic construct
  misc_feature 1..777: note = derived and/or modified sequence opt4 fromSTEAP-1__Homo_sapiens__EAW93749
  source 1..777: mol_type = other RNA
atggagagcagaaaggacatcaccaaccaggaggagatctggaagatgaagcccagaagaaacctggaggacaacgactacctgcacaaggacaccggcgagaccagcatgctgaagagacccgtgctgctgcacctgcagcagaccgcccacgccgacgagttcgactgccccagcgagctgcagcacgcccaggagctgttcccccagtggcacctgcccatcaagatcgccgccgtgatggccagcctgaccttcctgtacaccctgctgagagaggtgatccaccccctggccaccagccaccagcagtacttctacaagatccccatcctggtgatcaacaaggtgctgcccatggtgagcatcaccctgctggccctggtgtacctgcccggcgtgatcgccgccatcgtgcaggtgcacaacggcaccaagtacaagaagttcccccactggctggacaagtggatgctgaccagaaagcagttcggcctgctgagcctgttcttcgccgtgctgcacgccatctacaccctgagctacgccatgagaagaagctacagatacaagctgctgaactgggcctaccagcaggtgcagcagaacaaggaggacgcctggatcgagcacgacgtgtggagaatggagatctacgtgagcctgggcatcgtgggcctggccatcctggccctgctggccgtgaccagcatccccagcgtgagcgacagcctgacctggagagagttccactacatccaggtgaacaacatctga

SEQ ID NO: 3526 - RNA, 777 nt, synthetic construct
  misc_feature 1..777: note = derived and/or modified sequence opt5 fromSTEAP-1__Homo_sapiens__EAW93749
  source 1..777: mol_type = other RNA
atggagagcagaaaggacatcaccaaccaggaagagatttggaaaatgaagccccggcgcaatctggaagataacgactacctccacaaagatacaggcgagacgtccatgctgaagagacctgtgcttctgcatctccaacagaccgcccacgctgacgagttcgattgcccgtctgaactgcagcatgcccaggagctttttccccaatggcatctgcctatcaaaattgcggctgtcatggccagcctcacattcctgtataccctgctccgggaagttatccaccccctggccacatcccaccagcagtacttttataagattcctatccttgtgatcaataaggtgctgcccatggtctctattaccctcctggctcttgtgtacctgcctggggttatcgccgctattgtgcaggtccacaacggaacaaaatataagaaattcccgcattggctcgacaagtggatgctgacccgcaaacaatttggcctgctcagcctgttctttgccgtgcttcacgcgatctacacgctgtcctatgccatgagacggtcttaccgctacaagctcctgaattgggcttatcagcaggttcagcaaaacaaggaggatgcctggattgaacatgacgtgtggagaatggagatctacgtcagccttgggattgtgggactggctatcctcgccctgctggcggtgacctccatccccagcgtctctgattccctcacatggcgggagttccactatattcaggttaataacatctga

SEQ ID NO: 3527 - protein, 339 aa, synthetic construct
  REGION 1..339: note = STEAP-1__Homo_sapiens__Q9UHE8
MESRKDITNQEELWKMKPRRNLEEDDYLHKDTGETSMLKRPVLLHLHQTAHADEFDCPSELQHTQELFPQWHLPIKIAAIIASLTFLYTLLREVIHPLATSHQQYFYKIPILVINKVLPMVSITLLALVYLPGVIAAIVQLHNGTKYKKFPHWLDKWMLTRKQFGLLSFFFAVLHAIYSLSYPMRRSYRYKLLNWAYQQVQQNKEDAWIEHDVWRMEIYVSLGIVGLAILALLAVTSIPSVSDSLTWREFHYIQSKLGIVSLLLGTIHALIFAWNKWIDIKQFVWYTPPTFMIAVFLPIVVLIFKSILFLPCLRKKILKIRHGWEDVTKINKTEICSQL

SEQ ID NO: 3528 - RNA, 1020 nt, synthetic construct
  misc_feature 1..1020: note = STEAP-1__Homo_sapiens__AAD15620
  source 1..1020: mol_type = other RNA
atggaaagcagaaaagacatcacaaaccaagaagaactttggaaaatgaagcctaggagaaatttagaagaagacgattatttgcataaggacacgggagagaccagcatgctaaaaagacctgtgcttttgcatttgcaccaaacagcccatgctgatgaatttgactgcccttcagaacttcagcacacacaggaactctttccacagtggcacttgccaattaaaatagctgctattatagcatctctgacttttctttacactcttctgagggaagtaattcaccctttagcaacttcccatcaacaatatttttataaaattccaatcctggtcatcaacaaagtcttgccaatggtttccatcactctcttggcattggtttacctgccaggtgtgatagcagcaattgtccaacttcataatggaaccaagtataagaagtttccacattggttggataagtggatgttaacaagaaagcagtttgggcttctcagtttcttttttgctgtactgcatgcaatttatagtctgtcttacccaatgaggcgatcctacagatacaagttgctaaactgggcatatcaacaggtccaacaaaataaagaagatgcctggattgagcatgatgtttggagaatggagatttatgtgtctctgggaattgtgggattggcaatactggctctgttggctgtgacatctattccatctgtgagtgactctttgacatggagagaatttcactatattcagagcaagctaggaattgtttcccttctactgggcacaatacacgcattgatttttgcctggaataagtggatagatataaaacaatttgtatggtatacacctccaacttttatgatagctgttttccttccaattgttgtcctgatatttaaaagcatactattcctgccatgcttgaggaagaagatactgaagattagacatggttgggaagacgtcaccaaaattaacaaaactgagatatgttcccagttgtag

SEQ ID NO: 3529 - RNA, 1020 nt, synthetic construct
  misc_feature 1..1020: note = derived and/or modified sequence opt1 fromSTEAP-1__Homo_sapiens__AAD15620
  source 1..1020: mol_type = other RNA
atggagagccgcaaggacatcaccaaccaggaggagctgtggaagatgaagccccggcgcaacctcgaggaggacgactacctgcacaaggacaccggcgagacgtccatgctgaagcggccggtgctcctgcacctccaccagaccgcccacgccgacgagttcgactgccccagcgagctgcagcacacccaggagctgttcccccagtggcacctccccatcaagatcgcggccatcatcgcctccctgaccttcctgtacacgctgctccgcgaggtcatccacccgctggccaccagccaccagcagtacttctacaagatccccatcctggtgatcaacaaggtgctccccatggtctccatcaccctgctggccctcgtgtacctgcccggggtgatcgcggccatcgtccagctgcacaacggcaccaagtacaagaagttcccgcactggctcgacaagtggatgctgacgcggaagcagttcgggctgctcagcttcttcttcgccgtgctgcacgccatctactccctgagctaccccatgcgccggtcctaccgctacaagctcctgaactgggcgtaccagcaggtccagcagaacaaggaggacgcctggatcgagcacgacgtgtggcggatggagatctacgtgagcctgggcatcgtggggctcgccatcctggccctgctcgccgtcacctccatccccagcgtgtccgacagcctgacctggcgcgagttccactacatccagtccaagctgggcatcgtgagcctcctgctgggcaccatccacgcgctcatcttcgcctggaacaagtggatcgacatcaagcagttcgtctggtacacgcccccgaccttcatgatcgccgtgttcctgcccatcgtggtcctgatcttcaagtccatcctcttcctgccctgcctgcggaagaagatcctcaagatccgccacgggtgggaggacgtgaccaagatcaacaagaccgagatctgcagccagctgtga

SEQ ID NO: 3530 - RNA, 1020 nt, synthetic construct
  misc_feature 1..1020: note = derived and/or modified sequence opt2 fromSTEAP-1__Homo_sapiens__AAD15620
  source 1..1020: mol_type = other RNA
atggagtcccgcaaggacatcaccaaccaggaggagctctggaagatgaagccccgccgcaacctcgaggaggacgactacctccacaaggacaccggcgagacctccatgctcaagcgccccgtcctcctccacctccaccagaccgcccacgccgacgagttcgactgcccctccgagctccagcacacccaggagctcttcccccagtggcacctccccatcaagatcgccgccatcatcgcctccctcaccttcctctacaccctcctccgcgaggtcatccaccccctcgccacctcccaccagcagtacttctacaagatccccatcctcgtcatcaacaaggtcctccccatggtctccatcaccctcctcgccctcgtctacctccccggcgtcatcgccgccatcgtccagctccacaacggcaccaagtacaagaagttcccccactggctcgacaagtggatgctcacccgcaagcagttcggcctcctctccttcttcttcgccgtcctccacgccatctactccctctcctaccccatgcgccgctcctaccgctacaagctcctcaactgggcctaccagcaggtccagcagaacaaggaggacgcctggatcgagcacgacgtctggcgcatggagatctacgtctccctcggcatcgtcggcctcgccatcctcgccctcctcgccgtcacctccatcccctccgtctccgactccctcacctggcgcgagttccactacatccagtccaagctcggcatcgtctccctcctcctcggcaccatccacgccctcatcttcgcctggaacaagtggatcgacatcaagcagttcgtctggtacaccccccccaccttcatgatcgccgtcttcctccccatcgtcgtcctcatcttcaagtccatcctcttcctcccctgcctccgcaagaagatcctcaagatccgccacggctgggaggacgtcaccaagatcaacaagaccgagatctgctcccagctctga

SEQ ID NO: 3531 - RNA, 1020 nt, synthetic construct
  misc_feature 1..1020: note = derived and/or modified sequence opt3 fromSTEAP-1__Homo_sapiens__AAD15620
  source 1..1020: mol_type = other RNA
atggagagcagaaaggacatcaccaaccaggaggaactgtggaaaatgaagcccaggcggaatctcgaagaggatgactaccttcacaaagatacaggcgaaacttccatgctgaagcgccctgtgttgttacatctgcaccaaacggcccatgctgacgagttcgattgcccatctgagctacagcacacccaggaactctttccgcagtggcatctgcccattaaaatagcagccatcattgcgtcacttacattcctgtatactttgctccgagaggtcatccaccctctggctaccagtcaccaacagtacttttataagattccaatcctggttataaacaaggtgctccccatggtaagcatcacattactggcccttgtgtacttgcctggggtcattgcagccatcgtgcagctgcataatggaaccaaatataagaaattcccacactggctagacaagtggatgctcactcgtaaacagtttggtctgctttccttctttttcgctgttctgcatgcaatttactctttgtcgtatcccatgagaaggtcataccggtacaagctcctgaactgggcctatcaacaggtgcagcagaataaggaagatgcttggatcgagcacgacgtctggcgcatggagatatacgtgagcttaggcattgtagggctggccatcctcgcgcttctggcagttacaagtattccttccgtgtctgatagcttgacctggagagaatttcactatatccaatccaaactaggaatcgtctcactgctcctgggcacgattcatgcccttatattcgcttggaacaagtggatcgacattaaacagtttgtgtggtacactccaccgaccttcatgatcgccgtgtttctgcccatagtcgttttgattttcaagagtatcctcttcctgccttgtttaaggaaaaagatcctgaaaattcggcacggttgggaggatgtgacaaagatcaataagactgaaatttgcagccagctatga

SEQ ID NO: 3532 - RNA, 1020 nt, synthetic construct
  misc_feature 1..1020: note = derived and/or modified sequence opt4 fromSTEAP-1__Homo_sapiens__AAD15620
  source 1..1020: mol_type = other RNA
atggagagcagaaaggacatcaccaaccaggaggagctgtggaagatgaagcccagaagaaacctggaggaggacgactacctgcacaaggacaccggcgagaccagcatgctgaagagacccgtgctgctgcacctgcaccagaccgcccacgccgacgagttcgactgccccagcgagctgcagcacacccaggagctgttcccccagtggcacctgcccatcaagatcgccgccatcatcgccagcctgaccttcctgtacaccctgctgagagaggtgatccaccccctggccaccagccaccagcagtacttctacaagatccccatcctggtgatcaacaaggtgctgcccatggtgagcatcaccctgctggccctggtgtacctgcccggcgtgatcgccgccatcgtgcagctgcacaacggcaccaagtacaagaagttcccccactggctggacaagtggatgctgaccagaaagcagttcggcctgctgagcttcttcttcgccgtgctgcacgccatctacagcctgagctaccccatgagaagaagctacagatacaagctgctgaactgggcctaccagcaggtgcagcagaacaaggaggacgcctggatcgagcacgacgtgtggagaatggagatctacgtgagcctgggcatcgtgggcctggccatcctggccctgctggccgtgaccagcatccccagcgtgagcgacagcctgacctggagagagttccactacatccagagcaagctgggcatcgtgagcctgctgctgggcaccatccacgccctgatcttcgcctggaacaagtggatcgacatcaagcagttcgtgtggtacaccccccccaccttcatgatcgccgtgttcctgcccatcgtggtgctgatcttcaagagcatcctgttcctgccctgcctgagaaagaagatcctgaagatcagacacggctgggaggacgtgaccaagatcaacaagaccgagatctgcagccagctgtga

SEQ ID NO: 3533 - RNA, 1020 nt, synthetic construct
  misc_feature 1..1020: note = derived and/or modified sequence opt5 fromSTEAP-1__Homo_sapiens__AAD15620
  source 1..1020: mol_type = other RNA
atggagagcagaaaggacatcaccaaccaggaggaactgtggaaaatgaagccccggcgcaatctcgaagaggatgactacctgcacaaagatacaggcgaaacgtccatgcttaagagacctgtgctgctccatctgcaccaaaccgcccatgctgacgagttcgattgcccgtctgagcttcagcacacacaggaactgtttccccagtggcatctccctattaaaatcgccgcgattatcgctagcctgaccttcctgtatacactcctgcgggaggtcattcacccccttgccacctcccaccaacagtacttttataagatccctatcctggttattaacaaggtgctccccatggtgtctatcacactgcttgccctggtctacctccctggggtgattgctgccatcgttcagctgcataatggaaccaaatataagaaattcccgcactggctggacaagtggatgctcacgcgcaaacagtttggcctgcttagcttctttttcgctgtgctgcatgccatttactccctctcttatcccatgagacggagctaccgctacaagctgcttaactgggcgtatcaacaggtccagcagaataaggaagatgcctggatcgagcacgacgtgtggagaatggagatttacgtttccctggggatcgtgggactcgctatcctggccctgctcgctgtcaccagcattccttctgtgtccgatagcctgacatggcgggaatttcactatatccaatctaaacttggcattgtgtccctgctcctggggaccatccatgcccttattttcgcgtggaacaagtggatcgacatcaaacagtttgtctggtacacaccccctaccttcatgattgccgtttttctgcccatcgtggtgctcattttcaagagcatcctgttcctgccgtgtctccgcaaaaagattctgaaaatcagacacggatgggaggatgtcacgaagatcaataagacagaaatttgctctcagctttga

SEQ ID NO: 3534 - protein, 165 aa, synthetic construct
  REGION 1..165: note = Survivin-2B__Homo_sapiens__O15392-2
MGAPTLPPAWQPFLKDHRISTFKNWPFLEGCACTPERMAEAGFIHCPTENEPDLAQCFFCFKELEGWEPDDDPIGPGTVAYACNTSTLGGRGGRITREEHKKHSSGCAFLSVKKQFEELTLGEFLKLDRERAKNKIAKETNNKKKEFEETAEKVRRAIEQLAAMD

SEQ ID NO: 3535 - RNA, 498 nt, synthetic construct
  misc_feature 1..498: note = Survivin-2B__Homo_sapiens__CCDS32752.1
  source 1..498: mol_type = other RNA
atgggtgccccgacgttgccccctgcctggcagccctttctcaaggaccaccgcatctctacattcaagaactggcccttcttggagggctgcgcctgcaccccggagcggatggccgaggctggcttcatccactgccccactgagaacgagccagacttggcccagtgtttcttctgcttcaaggagctggaaggctgggagccagatgacgaccccattgggccgggcacggtggcttacgcctgtaataccagcactttgggaggccgaggcgggcggatcacgagagaggaacataaaaagcattcgtccggttgcgctttcctttctgtcaagaagcagtttgaagaattaacccttggtgaatttttgaaactggacagagaaagagccaagaacaaaattgcaaaggaaaccaacaataagaagaaagaatttgaggaaactgcggagaaagtgcgccgtgccatcgagcagctggctgccatggattga

SEQ ID NO: 3536 - RNA, 498 nt, synthetic construct
  misc_feature 1..498: note = derived and/or modified sequence opt1 fromSurvivin-2B__Homo_sapiens__CCDS32752.1
  source 1..498: mol_type = other RNA
atgggcgcccccaccctgccgcccgcctggcagcccttcctcaaggaccaccgcatcagcaccttcaagaactggcccttcctggaggggtgcgcgtgcacgccggagcggatggccgaggccggcttcatccactgccccaccgagaacgagcccgacctggcccagtgcttcttctgcttcaaggagctcgaggggtgggagcccgacgacgacccgatcggccccgggaccgtggcctacgcgtgcaacacctccacgctgggcggccgcgggggccggatcacccgcgaggagcacaagaagcacagctccgggtgcgccttcctgagcgtcaagaagcagttcgaggagctcaccctgggcgagttcctgaagctcgaccgggagcgcgccaagaacaagatcgccaaggagaccaacaacaagaagaaggagttcgaggagacggcggagaaggtgcggcgcgccatcgagcagctggccgccatggactga

SEQ ID NO: 3537 - RNA, 498 nt, synthetic construct
  misc_feature 1..498: note = derived and/or modified sequence opt2 fromSurvivin-2B__Homo_sapiens__CCDS32752.1
  source 1..498: mol_type = other RNA
atgggcgcccccaccctcccccccgcctggcagcccttcctcaaggaccaccgcatctccaccttcaagaactggcccttcctcgagggctgcgcctgcacccccgagcgcatggccgaggccggcttcatccactgccccaccgagaacgagcccgacctcgcccagtgcttcttctgcttcaaggagctcgagggctgggagcccgacgacgaccccatcggccccggcaccgtcgcctacgcctgcaacacctccaccctcggcggccgcggcggccgcatcacccgcgaggagcacaagaagcactcctccggctgcgccttcctctccgtcaagaagcagttcgaggagctcaccctcggcgagttcctcaagctcgaccgcgagcgcgccaagaacaagatcgccaaggagaccaacaacaagaagaaggagttcgaggagaccgccgagaaggtccgccgcgccatcgagcagctcgccgccatggactga

SEQ ID NO: 3538 - RNA, 498 nt, synthetic construct
  misc_feature 1..498: note = derived and/or modified sequence opt3 fromSurvivin-2B__Homo_sapiens__CCDS32752.1
  source 1..498: mol_type = other RNA
atgggcgcccccaccctgcctccagcttggcagccgttcctcaaggaccacagaatcagcacatttaaaaactggcccttccttgaggggtgcgcatgtactcctgaaaggatggccgaggcgggatttattcattgcccaacggaaaatgagcccgatctggctcaatgtttcttttgcttcaaggaattggagggttgggagcctgacgatgacccaataggccccgggaccgtggcctacgcatgtaacacatccactttaggaggccggggtgggcgcatcacccgagaagaacacaaaaagcattcttcaggatgcgcctttctgagtgtcaaaaagcagttcgaggagctaacactcggcgagtttctgaaacttgatcgtgaaagagctaagaataagattgcaaaagagaccaacaataagaaaaaggagttcgaagaaactgccgagaaggttaggcgggctatcgagcagctggccgcgatggactga

SEQ ID NO: 3539 - RNA, 498 nt, synthetic construct
  misc_feature 1..498: note = derived and/or modified sequence opt4 fromSurvivin-2B__Homo_sapiens__CCDS32752.1
  source 1..498: mol_type = other RNA
atgggcgcccccaccctgccccccgcctggcagcccttcctgaaggaccacagaatcagcaccttcaagaactggcccttcctggagggctgcgcctgcacccccgagagaatggccgaggccggcttcatccactgccccaccgagaacgagcccgacctggcccagtgcttcttctgcttcaaggagctggagggctgggagcccgacgacgaccccatcggccccggcaccgtggcctacgcctgcaacaccagcaccctgggcggcagaggcggcagaatcaccagagaggagcacaagaagcacagcagcggctgcgccttcctgagcgtgaagaagcagttcgaggagctgaccctgggcgagttcctgaagctggacagagagagagccaagaacaagatcgccaaggagaccaacaacaagaagaaggagttcgaggagaccgccgagaaggtgagaagagccatcgagcagctggccgccatggactga

SEQ ID NO: 3540 - RNA, 498 nt, synthetic construct
  misc_feature 1..498: note = derived and/or modified sequence opt5 fromSurvivin-2B__Homo_sapiens__CCDS32752.1
  source 1..498: mol_type = other RNA
atgggcgcccccaccctgcctccggcttggcagcccttcctcaaggaccacagaatcagcacatttaaaaactggcctttcctggaggggtgcgcctgtacgcccgaacggatggcggaggctggatttattcattgccctaccgaaaatgagcccgatcttgcccaatgtttcttttgcttcaaggaactggagggctgggagcctgacgatgacccgatcgggcccggaacagtggcctacgcttgtaacacctccacactcggcgggcgcggaggcagaattacccgggaagaacacaaaaagcattctagcggctgcgcctttctgtccgtcaaaaagcagttcgaggagcttacactgggggagtttctcaagctggatcgcgaaagagctaaaaataagatcgccaaagagaccaacaataagaaaaaggagttcgaagaaacggcggagaaggttcggcgcgccattgagcagctggctgccatggactga

SEQ ID NO: 3541 - protein, 142 aa, synthetic construct
  REGION 1..142: note = survivin__Homo_sapiens__O15392
MGAPTLPPAWQPFLKDHRISTFKNWPFLEGCACTPERMAEAGFIHCPTENEPDLAQCFFCFKELEGWEPDDDPIEEHKKHSSGCAFLSVKKQFEELTLGEFLKLDRERAKNKIAKETNNKKKEFEETAKKVRRAIEQLAAMD

SEQ ID NO: 3542 - RNA, 429 nt, synthetic construct
  misc_feature 1..429: note = survivin__Homo_sapiens__AAC51660
  source 1..429: mol_type = other RNA
atgggtgccccgacgttgccccctgcctggcagccctttctcaaggaccaccgcatctctacattcaagaactggcccttcttggagggctgcgcctgcaccccggagcggatggccgaggctggcttcatccactgccccactgagaacgagccagacttggcccagtgtttcttctgcttcaaggagctggaaggctgggagccagatgacgaccccatagaggaacataaaaagcattcgtccggttgcgctttcctttctgtcaagaagcagtttgaagaattaacccttggtgaatttttgaaactggacagagaaagagccaagaacaaaattgcaaaggaaaccaacaataagaagaaagaatttgaggaaactgcgaagaaagtgcgccgtgccatcgagcagctggctgccatggattga

SEQ ID NO: 3543 - RNA, 429 nt, synthetic construct
  misc_feature 1..429: note = derived and/or modified sequence opt1 fromsurvivin__Homo_sapiens__AAC51660
  source 1..429: mol_type = other RNA
atgggcgcccccaccctgccgcccgcctggcagcccttcctcaaggaccaccgcatcagcaccttcaagaactggcccttcctggaggggtgcgcgtgcacgccggagcggatggccgaggccggcttcatccactgccccaccgagaacgagcccgacctggcccagtgcttcttctgcttcaaggagctcgaggggtgggagcccgacgacgacccgatcgaggagcacaagaagcactccagcggctgcgccttcctgtccgtgaagaagcagttcgaggagctgaccctcggggagttcctgaagctggaccgcgagcgggcgaagaacaagatcgccaaggagaccaacaacaagaagaaggagttcgaggagacggccaagaaggtccgccgggccatcgagcagctcgcggccatggactga

SEQ ID NO: 3544 - RNA, 429 nt, synthetic construct
  misc_feature 1..429: note = derived and/or modified sequence opt2 fromsurvivin__Homo_sapiens__AAC51660
  source 1..429: mol_type = other RNA
atgggcgcccccaccctcccccccgcctggcagcccttcctcaaggaccaccgcatctccaccttcaagaactggcccttcctcgagggctgcgcctgcacccccgagcgcatggccgaggccggcttcatccactgccccaccgagaacgagcccgacctcgcccagtgcttcttctgcttcaaggagctcgagggctgggagcccgacgacgaccccatcgaggagcacaagaagcactcctccggctgcgccttcctctccgtcaagaagcagttcgaggagctcaccctcggcgagttcctcaagctcgaccgcgagcgcgccaagaacaagatcgccaaggagaccaacaacaagaagaaggagttcgaggagaccgccaagaaggtccgccgcgccatcgagcagctcgccgccatggactga

SEQ ID NO: 3545 - RNA, 429 nt, synthetic construct
  misc_feature 1..429: note = derived and/or modified sequence opt3 fromsurvivin__Homo_sapiens__AAC51660
  source 1..429: mol_type = other RNA
atgggcgcccccaccctgcctccagcttggcagccgttcctcaaggaccacagaatcagcacatttaaaaactggcccttccttgaggggtgcgcatgtactcctgaaaggatggccgaggcgggatttattcattgcccaacggaaaatgagcccgatctggctcaatgtttcttttgcttcaaggaattggagggttgggagcctgacgatgacccaatagaagaacacaaaaagcattcctctggctgtgcctttttatcagtgaaaaagcagttcgaggagctgaccctaggggagtttctcaagctggatcgggaacgcgccaaaaacaagatcgcaaaagagacaaataacaagaaaaaggagttcgaagaaactgctaagaaagtccgacgtgcaattgagcagcttgccgctatggactga

SEQ ID NO: 3546 - RNA, 429 nt, synthetic construct
  misc_feature 1..429: note = derived and/or modified sequence opt4 fromsurvivin__Homo_sapiens__AAC51660
  source 1..429: mol_type = other RNA
atgggcgcccccaccctgccccccgcctggcagcccttcctgaaggaccacagaatcagcaccttcaagaactggcccttcctggagggctgcgcctgcacccccgagagaatggccgaggccggcttcatccactgccccaccgagaacgagcccgacctggcccagtgcttcttctgcttcaaggagctggagggctgggagcccgacgacgaccccatcgaggagcacaagaagcacagcagcggctgcgccttcctgagcgtgaagaagcagttcgaggagctgaccctgggcgagttcctgaagctggacagagagagagccaagaacaagatcgccaaggagaccaacaacaagaagaaggagttcgaggagaccgccaagaaggtgagaagagccatcgagcagctggccgccatggactga

SEQ ID NO: 3547 - RNA, 429 nt, synthetic construct
  misc_feature 1..429: note = derived and/or modified sequence opt5 fromsurvivin__Homo_sapiens__AAC51660
  source 1..429: mol_type = other RNA
atgggcgcccccaccctgcctccggcttggcagcccttcctcaaggaccacagaatcagcacatttaaaaactggcctttcctggaggggtgcgcctgtacgcccgaacggatggcggaggctggatttattcattgccctaccgaaaatgagcccgatcttgcccaatgtttcttttgcttcaaggaactggagggctgggagcctgacgatgacccgatcgaagaacacaaaaagcattcctctgggtgtgcctttctcagcgtgaaaaagcagttcgaggagctgacacttggagagtttctgaagctcgatcgcgaaagagctaaaaacaagattgccaaagagaccaataacaagaaaaaggagttcgaagaaacagctaagaaagtccggcgcgccatcgagcagctggcggccatggactga

SEQ ID NO: 3548 - protein, 976 aa, synthetic construct
  REGION 1..976: note = SYCP1__Homo_sapiens__A0A024R0I2
MEKQKPFALFVPPRSSSSQVSAVKPQTLGGDSTFFKSFNKCTEDDFEFPFAKTNLSKNGENIDSDPALQKVNFLPVLEQVGNSDCHYQEGLKDSDLENSEGLSRVYSKLYKEAEKIKKWKVSTEAELRQKESKLQENRKIIEAQRKAIQELQFGNEKVSLKLEEGIQENKDLIKENNATRHLCNLLKETCARSAEKTKKYEYEREETRQVYMDLNNNIEKMITAFEELRVQAENSRLEMHFKLKEDYEKIQHLEQEYKKEINDKEKQVSLLLIQITEKENKMKDLTFLLEESRDKVNQLEEKTKLQSENLKQSIEKQHHLTKELEDIKVSLQRSVSTQKALEEDLQIATKTICQLTEEKETQMEESNKARAAHSFVVTEFETTVCSLEELLRTEQQRLEKNEDQLKILTMELQKKSSELEEMTKLTNNKEVELEELKKVLGEKETLLYENKQFEKIAEELKGTEQELIGLLQAREKEVHDLEIQLTAITTSEQYYSKEVKDLKTELENEKLKNTELTSHCNKLSLENKELTQETSDMTLELKNQQEDINNNKKQEERMLKQIENLQETETQLRNELEYVREELKQKRDEVKCKLDKSEENCNNLRKQVENKNKYIEELQQENKALKKKGTAESKQLNVYEIKVNKLELELESAKQKFGEITDTYQKEIEDKKISEENLLEEVEKAKVIADEAVKLQKEIDKRCQHKIAEMVALMEKHKHQYDKIIEERDSELGLYKSKEQEQSSLRASLEIELSNLKAELLSVKKQLEIEREEKEKLKREAKENTATLKEKKDKKTQTFLLETPEIYWKLDSKAVPSQTVSRNFTSVDHGISKDKRDYLWTSAKNTLSTPLPKAYTVKTPTKPKLQQRENLNIPIEESKKKRKMAFEFDINSDSSETTDLLSMVSEEETLKTLYRNNNPPASHLCVKTPKKAPSSLTTPGSTLKFGAIRKMREDRWAVIAKMDRKKKLKEAEKLFV

SEQ ID NO: 3549 - RNA, 2931 nt, synthetic construct
  misc_feature 1..2931: note = SYCP1__Homo_sapiens__EAW56623
  source 1..2931: mol_type = other RNA
atggaaaagcaaaagccctttgcattgttcgtaccaccgagatcaagcagcagtcaggtgtctgcggtgaaacctcagaccctgggaggcgattccactttcttcaagagtttcaacaaatgtactgaagatgattttgagtttccatttgcaaagactaatctctccaaaaatggggaaaacattgattcagatcctgctttacaaaaagttaatttcttgcccgtgcttgagcaggttggtaattctgactgtcactatcaggaaggactaaaagactctgatttggagaattcagagggattgagcagagtgtattcaaaactgtataaggaggctgaaaagataaaaaaatggaaagtaagtacagaagctgaactgagacagaaagaaagtaagttgcaagaaaacagaaagataattgaagcacagcgaaaagccattcaggaactgcaatttggaaatgaaaaagtaagtttgaaattagaagaaggaatacaagaaaataaagatttaataaaagagaataatgccacaaggcatttatgtaatctactcaaagaaacctgtgctagatctgcagaaaagacaaagaaatatgaatatgaacgggaagaaaccaggcaagtttatatggatctaaataataacattgagaaaatgataacagcttttgaggaacttcgtgtgcaagctgagaattccagactggaaatgcattttaagttaaaggaagattatgaaaaaatccaacaccttgaacaagaatacaagaaggaaataaatgacaaggaaaagcaggtatcactactattgatccaaatcactgagaaagaaaataaaatgaaagatttaacatttctgctagaggaatccagagataaagttaatcaattagaggaaaagacaaaattacagagtgaaaacttaaaacaatcaattgagaaacagcatcatttgactaaagaactagaagatattaaagtgtcattacaaagaagtgtgagtactcaaaaggctttagaggaagatttacagatagcaacaaaaacaatttgtcagctaactgaagaaaaagaaactcaaatggaagaatctaataaagctagagctgctcattcgtttgtggttactgaatttgaaactactgtctgcagcttggaagaattattgagaacagaacagcaaagattggaaaaaaatgaagatcaattgaaaatacttaccatggagcttcaaaagaaatcaagtgagctggaagagatgactaagcttacaaataacaaagaagtagaacttgaagaattgaaaaaagtcttgggagaaaaggaaacacttttatatgaaaataaacaatttgagaagattgctgaagaattaaaaggaacagaacaagaactaattggtcttctccaagccagagagaaagaagtacatgatttggaaatacagttaactgccattaccacaagtgaacagtattattcaaaagaggttaaagatctaaaaactgagcttgaaaacgagaagcttaagaatactgaattaacttcacactgcaacaagctttcactagaaaacaaagagctcacacaggaaacaagtgatatgaccctagaactcaagaatcagcaagaagatattaataataacaaaaagcaagaagaaaggatgttgaaacaaatagaaaatcttcaagaaacagaaacccaattaagaaatgaactagaatatgtgagagaagagctaaaacagaaaagagatgaagttaaatgtaaattggacaagagtgaagaaaattgtaacaatttaaggaaacaagttgaaaataaaaacaagtatattgaagaacttcagcaggagaataaggccttgaaaaaaaaaggtacagcagaaagcaagcaactgaatgtttatgagataaaggtcaataaattagagttagaactagaaagtgccaaacagaaatttggagaaatcacagacacctatcagaaagaaattgaggacaaaaagatatcagaagaaaatcttttggaagaggttgagaaagcaaaagtaatagctgatgaagcagtaaaattacagaaagaaattgataagcgatgtcaacataaaatagctgaaatggtagcacttatggaaaaacataagcaccaatatgataagatcattgaagaaagagactcagaattaggactttataagagcaaagaacaagaacagtcatcactgagagcatctttggagattgaactatccaatctcaaagctgaacttttgtctgttaagaagcaacttgaaatagaaagagaagagaaggaaaaactcaaaagagaggcaaaagaaaacacagctactcttaaagaaaaaaaagacaagaaaacacaaacatttttattggaaacacctgaaatttattggaaattggattctaaagcagttccttcacaaactgtatctcgaaatttcacatcagttgatcatggcatatccaaagataaaagagactatctgtggacatctgccaaaaatactttatctacaccattgccaaaggcatatacagtgaagacaccaacaaaaccaaaactacagcaaagagaaaacttgaatatacccattgaagaaagtaaaaaaaagagaaaaatggcctttgaatttgatattaattcagatagttcagaaactactgatcttttgagcatggtttcagaagaagagacattgaaaacactgtataggaacaataatccaccagcttctcatctttgtgtcaaaacaccaaaaaaggccccttcatctctaacaacccctggatctacactgaagtttggagctataagaaaaatgcgggaggaccgttgggctgtaattgctaaaatggatagaaaaaaaaaactaaaagaagctgaaaagttatttgtttaa

SEQ ID NO: 3550 - RNA, 2931 nt, synthetic construct
  misc_feature 1..2931: note = derived and/or modified sequence opt1 fromSYCP1__Homo_sapiens__EAW56623
  source 1..2931: mol_type = other RNA
atggagaagcagaagcccttcgccctgttcgtgccgccccgcagctccagctcccaggtcagcgccgtgaagccccagaccctcggcggggactccaccttcttcaagagcttcaacaagtgcacggaggacgacttcgagttccccttcgcgaagaccaacctgtccaagaacggcgagaacatcgacagcgacccggccctgcagaaggtgaacttcctccccgtcctggagcaggtcgggaactccgactgccactaccaggagggcctgaaggacagcgacctcgagaactccgaggggctgagccgggtgtactccaagctgtacaaggaggccgagaagatcaagaagtggaaggtgagcaccgaggccgagctccgccagaaggagtccaagctgcaggagaaccggaagatcatcgaggcccagcgcaaggcgatccaggagctgcagttcggcaacgagaaggtgagcctcaagctggaggagggcatccaggagaacaaggacctgatcaaggagaacaacgccacccggcacctctgcaacctgctgaaggagacgtgcgcccgctccgccgagaagaccaagaagtacgagtacgagcgggaggagacccgccaggtgtacatggacctcaacaacaacatcgagaagatgatcaccgcgttcgaggagctgcgggtccaggccgagaacagccgcctggagatgcacttcaagctcaaggaggactacgagaagatccagcacctggagcaggagtacaagaaggagatcaacgacaaggagaagcaggtctccctgctcctgatccagatcacggagaaggagaacaagatgaaggacctgaccttcctcctggaggagagccgggacaaggtgaaccagctggaggagaagaccaagctccagagcgagaacctgaagcagtccatcgagaagcagcaccacctgaccaaggagctcgaggacatcaaggtgagcctgcagcgctccgtgagcacgcagaaggccctggaggaggacctccagatcgccaccaagaccatctgccagctgaccgaggagaaggagacgcagatggaggagtccaacaaggcccgggcggcccacagcttcgtggtcaccgagttcgagaccaccgtgtgctccctggaggagctcctgcgcacggagcagcagcggctggagaagaacgaggaccagctcaagatcctgaccatggagctgcagaagaagtccagcgagctcgaggagatgaccaagctgaccaacaacaaggaggtggagctggaggagctcaagaaggtcctgggggagaaggagacgctgctgtacgagaacaagcagttcgagaagatcgccgaggagctcaagggcaccgagcaggagctgatcgggctgctccaggcccgcgagaaggaggtgcacgacctggagatccagctgaccgccatcaccacgagcgagcagtactactccaaggaggtgaaggacctcaagaccgagctggagaacgagaagctgaagaacaccgagctcaccagccactgcaacaagctgtccctggagaacaaggagctcacgcaggagaccagcgacatgaccctggagctgaagaaccagcaggaggacatcaacaacaacaagaagcaggaggagcggatgctcaagcagatcgagaacctgcaggagaccgagacgcagctgcgcaacgagctcgagtacgtccgggaggagctgaagcagaagcgcgacgaggtgaagtgcaagctggacaagtccgaggagaactgcaacaacctccggaagcaggtcgagaacaagaacaagtacatcgaggagctgcagcaggagaacaaggcgctgaagaagaagggcaccgccgagagcaagcagctcaacgtgtacgagatcaaggtgaacaagctggagctggagctcgagtccgccaagcagaagttcggggagatcaccgacacctaccagaaggagatcgaggacaagaagatcagcgaggagaacctgctggaggaggtcgagaaggccaaggtgatcgccgacgaggcggtgaagctccagaaggagatcgacaagcgctgccagcacaagatcgccgagatggtcgccctgatggagaagcacaagcaccagtacgacaagatcatcgaggagcgcgactccgagctgggcctctacaagagcaaggagcaggagcagagctccctgcgggccagcctggagatcgagctctccaacctgaaggccgagctgctcagcgtgaagaagcagctggagatcgagcgcgaggagaaggagaagctgaagcgggaggcgaaggagaacaccgccacgctcaaggagaagaaggacaagaagacccagaccttcctgctggagacccccgagatctactggaagctcgactccaaggccgtgcccagccagacggtctcccgcaacttcaccagcgtggaccacggcatctccaaggacaagcgggactacctgtggaccagcgccaagaacaccctgtccacgccgctccccaaggcgtacaccgtgaagacccccaccaagcccaagctgcagcagcgcgagaacctgaacatcccgatcgaggagagcaagaagaagcggaagatggccttcgagttcgacatcaactccgacagctccgagacgaccgacctcctgagcatggtctccgaggaggagaccctgaagaccctctaccgcaacaacaacccgcccgccagccacctgtgcgtgaagacgcccaagaaggcccccagctccctgaccacccccgggagcaccctcaagttcggcgccatccggaagatgcgcgaggaccggtgggcggtgatcgccaagatggaccgcaagaagaagctgaaggaggccgagaagctgttcgtctga

SEQ ID NO: 3551 - RNA, 2931 nt, synthetic construct
  misc_feature 1..2931: note = derived and/or modified sequence opt2 fromSYCP1__Homo_sapiens__EAW56623
  source 1..2931: mol_type = other RNA
atggagaagcagaagcccttcgccctcttcgtccccccccgctcctcctcctcccaggtctccgccgtcaagccccagaccctcggcggcgactccaccttcttcaagtccttcaacaagtgcaccgaggacgacttcgagttccccttcgccaagaccaacctctccaagaacggcgagaacatcgactccgaccccgccctccagaaggtcaacttcctccccgtcctcgagcaggtcggcaactccgactgccactaccaggagggcctcaaggactccgacctcgagaactccgagggcctctcccgcgtctactccaagctctacaaggaggccgagaagatcaagaagtggaaggtctccaccgaggccgagctccgccagaaggagtccaagctccaggagaaccgcaagatcatcgaggcccagcgcaaggccatccaggagctccagttcggcaacgagaaggtctccctcaagctcgaggagggcatccaggagaacaaggacctcatcaaggagaacaacgccacccgccacctctgcaacctcctcaaggagacctgcgcccgctccgccgagaagaccaagaagtacgagtacgagcgcgaggagacccgccaggtctacatggacctcaacaacaacatcgagaagatgatcaccgccttcgaggagctccgcgtccaggccgagaactcccgcctcgagatgcacttcaagctcaaggaggactacgagaagatccagcacctcgagcaggagtacaagaaggagatcaacgacaaggagaagcaggtctccctcctcctcatccagatcaccgagaaggagaacaagatgaaggacctcaccttcctcctcgaggagtcccgcgacaaggtcaaccagctcgaggagaagaccaagctccagtccgagaacctcaagcagtccatcgagaagcagcaccacctcaccaaggagctcgaggacatcaaggtctccctccagcgctccgtctccacccagaaggccctcgaggaggacctccagatcgccaccaagaccatctgccagctcaccgaggagaaggagacccagatggaggagtccaacaaggcccgcgccgcccactccttcgtcgtcaccgagttcgagaccaccgtctgctccctcgaggagctcctccgcaccgagcagcagcgcctcgagaagaacgaggaccagctcaagatcctcaccatggagctccagaagaagtcctccgagctcgaggagatgaccaagctcaccaacaacaaggaggtcgagctcgaggagctcaagaaggtcctcggcgagaaggagaccctcctctacgagaacaagcagttcgagaagatcgccgaggagctcaagggcaccgagcaggagctcatcggcctcctccaggcccgcgagaaggaggtccacgacctcgagatccagctcaccgccatcaccacctccgagcagtactactccaaggaggtcaaggacctcaagaccgagctcgagaacgagaagctcaagaacaccgagctcacctcccactgcaacaagctctccctcgagaacaaggagctcacccaggagacctccgacatgaccctcgagctcaagaaccagcaggaggacatcaacaacaacaagaagcaggaggagcgcatgctcaagcagatcgagaacctccaggagaccgagacccagctccgcaacgagctcgagtacgtccgcgaggagctcaagcagaagcgcgacgaggtcaagtgcaagctcgacaagtccgaggagaactgcaacaacctccgcaagcaggtcgagaacaagaacaagtacatcgaggagctccagcaggagaacaaggccctcaagaagaagggcaccgccgagtccaagcagctcaacgtctacgagatcaaggtcaacaagctcgagctcgagctcgagtccgccaagcagaagttcggcgagatcaccgacacctaccagaaggagatcgaggacaagaagatctccgaggagaacctcctcgaggaggtcgagaaggccaaggtcatcgccgacgaggccgtcaagctccagaaggagatcgacaagcgctgccagcacaagatcgccgagatggtcgccctcatggagaagcacaagcaccagtacgacaagatcatcgaggagcgcgactccgagctcggcctctacaagtccaaggagcaggagcagtcctccctccgcgcctccctcgagatcgagctctccaacctcaaggccgagctcctctccgtcaagaagcagctcgagatcgagcgcgaggagaaggagaagctcaagcgcgaggccaaggagaacaccgccaccctcaaggagaagaaggacaagaagacccagaccttcctcctcgagacccccgagatctactggaagctcgactccaaggccgtcccctcccagaccgtctcccgcaacttcacctccgtcgaccacggcatctccaaggacaagcgcgactacctctggacctccgccaagaacaccctctccacccccctccccaaggcctacaccgtcaagacccccaccaagcccaagctccagcagcgcgagaacctcaacatccccatcgaggagtccaagaagaagcgcaagatggccttcgagttcgacatcaactccgactcctccgagaccaccgacctcctctccatggtctccgaggaggagaccctcaagaccctctaccgcaacaacaacccccccgcctcccacctctgcgtcaagacccccaagaaggccccctcctccctcaccacccccggctccaccctcaagttcggcgccatccgcaagatgcgcgaggaccgctgggccgtcatcgccaagatggaccgcaagaagaagctcaaggaggccgagaagctcttcgtctga

SEQ ID NO: 3552 - RNA, 2931 nt, synthetic construct
  misc_feature 1..2931: note = derived and/or modified sequence opt3 fromSYCP1__Homo_sapiens__EAW56623
  source 1..2931: mol_type = other RNA
atggagaagcagaaacccttcgccctgtttgtgcctccaagaagctcctcttcacaagtcagtgctgttaagccgcagaccctcggcggggacagcacattctttaaatccttcaacaagtgcactgaagatgactttgagttcccctttgcaaaaacgaatctttctaagaacggagaaaatatcgattcggaccctgccctgcagaaggtgaacttcttgccagtattagaacaggtgggtaattcagattgtcactaccaagaaggcctgaaagacagcgatctagagaacagtgaggggctctccagggtctattctaagctgtacaaagaagcggagaagattaaaaagtggaaggtgagcaccgaagctgagcttcggcagaaagagtccaagctgcaggaaaatcgcaaaataatcgaggcccagcgaaaggcaattcaagaattgcagtttggaaacgagaaagtttcactcaagctggaagagggcatccaggagaataaagacctgattaaggaaaacaatgccacacgtcatctctgcaacttactgaaggagacttgtgctagaagtgcagagaaaaccaagaaatatgagtacgaaagggaggagacacgccaggtgtatatggatcttaataacaatatcgaaaagatgataaccgccttcgaggaattgcgggtccaagctgagaacagcagactggaaatgcactttaaactaaaggaggactacgagaagatccagcatctcgaacaggagtataaaaaggaaattaacgataaagagaagcaagtgtctctgcttctgatccagattactgagaaagaaaataagatgaaggacttgacattcctcctggaggaatccagggataaagtaaaccagttagaggaaaagaccaaactgcagtcagagaatctcaagcaaagcatcgagaaacagcaccatcttacgaaggaactggaggacataaaggttagtttgcagcggtctgtgtccactcagaaagccctagaagaggacctgcaaattgcgaccaagacaatctgccagctcactgaagagaaagagacccagatggaagagagcaacaaggcacgcgccgctcactcgtttgtcgtgacagagttcgaaaccacggtgtgttctctggaggaacttctgcgaactgagcagcaaagattggagaaaaatgaagatcagctcaagattctgacaatggaattacagaaaaagtcctcagagctggaggaaatgaccaagctaactaacaataaagaggtcgaactcgaggaactgaagaaagttcttggtgagaaggagacattgctgtacgaaaacaaacagttcgagaagatcgccgaggaactcaaggggaccgaacaagagctgatcggacttctgcaggcaagggagaaagaagtgcacgacttggagattcagctcacggctataaccacaagtgaacaatactatagcaaggaggtaaaagatctgaagactgaattagagaatgagaaactgaagaacaccgaactaacatcccattgcaataagctctctctggagaacaaagaacttactcaggagaccagcgacatgacattggagctgaagaatcagcaggaagatatcaacaataacaaaaagcaagaggaacggatgctcaaacagattgagaacctgcaggaaaccgagactcagttacgtaatgagctggaatacgtgcgcgaggaacttaagcaaaagagagacgaggtcaaatgtaagttggataaatcagaagagaactgcaataacctcaggaaacaggtggagaataaaaacaagtatatcgaggaactgcagcaggaaaataaagccctaaagaagaaaggcacggcggagagtaagcaactgaacgtttacgaaataaaagtgaataagctcgagctggagcttgaatccgccaaacagaagtttggcgagattacagacacctatcagaaggaaatcgaggataaaaagatcagcgaggaaaacttgctggaggaagtcgagaaagcaaaggtgattgctgacgaagccgtaaaattacaaaaggagatcgataagcggtgtcagcacaaaattgctgagatggttgccctcatggaaaagcataaacaccagtacgacaagataatcgaggaacgagactctgagctggggctttataaatcaaaggaacaggagcaaagtagcctgcgcgcatccttggagattgaactctctaatctgaaggccgagctactgtcggtgaaaaagcagctcgaaatcgagagagaagagaaagagaagctgaaaagggaagctaaggagaacactgcgacccttaaggagaaaaaggataaaaagacacagaccttcttgctggaaactcccgagatctactggaaattagacagcaaggcagtcccttcccagacagtgtcacggaattttacgagtgtcgatcacggaatttctaaagacaagcgcgattacctctggaccagcgccaagaacactctgtccacaccacttcccaaggcttataccgtgaagacacctactaaaccaaagctgcaacagagagaaaatctaaacataccgatcgaggaaagcaaaaagaagaggaaaatggccttcgagtttgacattaactcagattcttccgaaaccacggacctcctgagtatggttagcgaggaggaaaccttgaagacactgtaccgtaataacaatccccctgcatctcatttatgcgtgaaaactccaaagaaagccccctcctcactcaccacacctggtagtactctgaagttcggcgctatccggaagatgcgagaggatagatgggccgtaattgcaaaaatggacaggaagaagaaacttaaagaagcggagaagctgtttgtctga

SEQ ID NO: 3553 - RNA, 2931 nt, synthetic construct
  misc_feature 1..2931: note = derived and/or modified sequence opt4 fromSYCP1__Homo_sapiens__EAW56623
  source 1..2931: mol_type = other RNA
atggagaagcagaagcccttcgccctgttcgtgccccccagaagcagcagcagccaggtgagcgccgtgaagccccagaccctgggcggcgacagcaccttcttcaagagcttcaacaagtgcaccgaggacgacttcgagttccccttcgccaagaccaacctgagcaagaacggcgagaacatcgacagcgaccccgccctgcagaaggtgaacttcctgcccgtgctggagcaggtgggcaacagcgactgccactaccaggagggcctgaaggacagcgacctggagaacagcgagggcctgagcagagtgtacagcaagctgtacaaggaggccgagaagatcaagaagtggaaggtgagcaccgaggccgagctgagacagaaggagagcaagctgcaggagaacagaaagatcatcgaggcccagagaaaggccatccaggagctgcagttcggcaacgagaaggtgagcctgaagctggaggagggcatccaggagaacaaggacctgatcaaggagaacaacgccaccagacacctgtgcaacctgctgaaggagacctgcgccagaagcgccgagaagaccaagaagtacgagtacgagagagaggagaccagacaggtgtacatggacctgaacaacaacatcgagaagatgatcaccgccttcgaggagctgagagtgcaggccgagaacagcagactggagatgcacttcaagctgaaggaggactacgagaagatccagcacctggagcaggagtacaagaaggagatcaacgacaaggagaagcaggtgagcctgctgctgatccagatcaccgagaaggagaacaagatgaaggacctgaccttcctgctggaggagagcagagacaaggtgaaccagctggaggagaagaccaagctgcagagcgagaacctgaagcagagcatcgagaagcagcaccacctgaccaaggagctggaggacatcaaggtgagcctgcagagaagcgtgagcacccagaaggccctggaggaggacctgcagatcgccaccaagaccatctgccagctgaccgaggagaaggagacccagatggaggagagcaacaaggccagagccgcccacagcttcgtggtgaccgagttcgagaccaccgtgtgcagcctggaggagctgctgagaaccgagcagcagagactggagaagaacgaggaccagctgaagatcctgaccatggagctgcagaagaagagcagcgagctggaggagatgaccaagctgaccaacaacaaggaggtggagctggaggagctgaagaaggtgctgggcgagaaggagaccctgctgtacgagaacaagcagttcgagaagatcgccgaggagctgaagggcaccgagcaggagctgatcggcctgctgcaggccagagagaaggaggtgcacgacctggagatccagctgaccgccatcaccaccagcgagcagtactacagcaaggaggtgaaggacctgaagaccgagctggagaacgagaagctgaagaacaccgagctgaccagccactgcaacaagctgagcctggagaacaaggagctgacccaggagaccagcgacatgaccctggagctgaagaaccagcaggaggacatcaacaacaacaagaagcaggaggagagaatgctgaagcagatcgagaacctgcaggagaccgagacccagctgagaaacgagctggagtacgtgagagaggagctgaagcagaagagagacgaggtgaagtgcaagctggacaagagcgaggagaactgcaacaacctgagaaagcaggtggagaacaagaacaagtacatcgaggagctgcagcaggagaacaaggccctgaagaagaagggcaccgccgagagcaagcagctgaacgtgtacgagatcaaggtgaacaagctggagctggagctggagagcgccaagcagaagttcggcgagatcaccgacacctaccagaaggagatcgaggacaagaagatcagcgaggagaacctgctggaggaggtggagaaggccaaggtgatcgccgacgaggccgtgaagctgcagaaggagatcgacaagagatgccagcacaagatcgccgagatggtggccctgatggagaagcacaagcaccagtacgacaagatcatcgaggagagagacagcgagctgggcctgtacaagagcaaggagcaggagcagagcagcctgagagccagcctggagatcgagctgagcaacctgaaggccgagctgctgagcgtgaagaagcagctggagatcgagagagaggagaaggagaagctgaagagagaggccaaggagaacaccgccaccctgaaggagaagaaggacaagaagacccagaccttcctgctggagacccccgagatctactggaagctggacagcaaggccgtgcccagccagaccgtgagcagaaacttcaccagcgtggaccacggcatcagcaaggacaagagagactacctgtggaccagcgccaagaacaccctgagcacccccctgcccaaggcctacaccgtgaagacccccaccaagcccaagctgcagcagagagagaacctgaacatccccatcgaggagagcaagaagaagagaaagatggccttcgagttcgacatcaacagcgacagcagcgagaccaccgacctgctgagcatggtgagcgaggaggagaccctgaagaccctgtacagaaacaacaacccccccgccagccacctgtgcgtgaagacccccaagaaggcccccagcagcctgaccacccccggcagcaccctgaagttcggcgccatcagaaagatgagagaggacagatgggccgtgatcgccaagatggacagaaagaagaagctgaaggaggccgagaagctgttcgtgtga

SEQ ID NO: 3554 - RNA, 2931 nt, synthetic construct
  misc_feature 1..2931: note = derived and/or modified sequence opt5 fromSYCP1__Homo_sapiens__EAW56623
  source 1..2931: mol_type = other RNA
atggagaagcagaaacccttcgccctgtttgtgcctccgagaagctcctctagccaagtctccgctgttaagccccagaccctcggcggggactctacattctttaagagcttcaacaagtgcacggaagatgactttgagttcccttttgccaaaaccaatctgtccaagaacggagaaaatatcgattctgaccccgcgcttcagaaggtgaacttcctgcctgtgctcgagcaggtcggcaatagcgattgtcactaccaagaagggctgaaagactccgatcttgagaacagcgagggactgtctcgggtgtattccaagctctacaaagaagctgagaagattaaaaagtggaaggttagcacagaagccgagctgcgccagaaagagtctaagctgcaggaaaatagaaaaatcattgaggcccagcggaaggctatccaagaactccagtttggcaacgagaaagtgtccctgaaacttgaagaggggattcaggagaataaagacctgatcaaggaaaacaatgccacccgccatctctgcaacctgcttaaggagacatgtgctagaagcgccgaaaagaccaagaaatatgagtacgaacgggaggagacacgccaggtctatatggatctgaataacaatatcgaaaagatgattaccgcgttcgaggaactcagagtgcaagccgagaactctcggctggaaatgcactttaaactgaaggaggactacgagaagatccagcatctcgaacaggagtataaaaaggaaattaacgataaagagaagcaagtttccctgcttctgatccagattacggagaaagaaaataagatgaaggacctcaccttcctgcttgaggaaagccgcgataaagtgaaccagctggaggaaaagacaaaactccagtccgagaatctgaagcaatctatcgagaaacagcaccatctgaccaaggaactcgaggacattaaggtcagcctgcagagatccgtgagcacacagaaagctcttgaagaggacctgcaaatcgccaccaagacgatctgccagctcacagaagagaaagagacccagatggaagagtctaacaaggctcgggccgcgcactcctttgtggtcacagagttcgaaaccaccgtttgtagcctggaggaacttctgcgcacagagcagcaaagactcgaaaagaatgaggatcagctgaagattctgacgatggaactccagaaaaagtctagcgagctggaggaaatgaccaaacttacaaacaataaagaggtggaactggaggaactcaagaaagtgctgggagagaaggagaccctgctttacgaaaacaaacagttcgagaagatcgccgaggaactcaagggcacagaacaagagctgattggcctgctccaggctcgggagaaagaagtccacgacctggagatccagcttaccgccattacgacatccgaacaatactattctaaggaggtgaaagatctgaagaccgaactcgagaatgagaaactgaagaacaccgaactgacaagccattgcaataaactttccctcgagaacaaagaactgacccaggagacaagcgacatgacgctggagctcaagaatcagcaggaagatatcaacaataacaaaaagcaagaggaacgcatgctgaaacagatcgagaaccttcaggaaaccgagacacagctgagaaatgagctcgaatacgttcgggaggaactgaagcaaaagagagacgaggtgaaatgtaagctggataaatctgaagagaactgcaataaccttcgcaagcaggtcgagaataaaaacaagtatattgaggaactccagcaggaaaataaagctctgaagaagaaagggaccgccgagtccaagcaactgaacgtgtacgaaatcaaagttaataagctcgagctggagcttgaaagcgccaaacagaagtttggagagattacagacacctatcagaaggaaatcgaggataaaaagatttctgaggaaaacctgctcgaggaagtggagaaagctaaggtcatcgcggacgaagccgtgaaactgcaaaaggagatcgataagcggtgtcagcacaaaattgctgagatggtcgccctgatggaaaagcataaacaccagtacgacaagatcattgaggaaagagactccgagcttggcctctataaaagcaaggaacaggagcaatcctctctgcgcgccagcctggagatcgaactctccaatctgaaggctgagcttctgtctgtgaaaaagcagctcgaaattgagcgggaagagaaagagaagctgaaaagagaagccaaggagaacacggcgaccctgaaggaaaagaaggataaaaagacacagaccttccttctggagacacccgagatctactggaaactcgacagcaaggctgttccttcccagaccgtgagccgcaattttacgtctgtcgatcacgggatttccaaagacaagcgggattacctgtggacaagcgccaagaacaccctctctacaccgctgcccaaagcctataccgtgaagacccctacaaaacccaaacttcaacagagagaaaatctgaacatccctatcgaggaatccaaaaagaagcgcaaaatggctttcgagtttgacattaacagcgattctagcgaaacgaccgacctcctgtccatggttagcgaggaggaaacactgaagaccctttaccggaataacaatcccccggcctctcatctgtgcgtgaaaacacctaagaaagctccctccagcctcaccacgcctggatccacactgaagttcggcgccatcagaaagatgcgcgaggatcggtgggcggtcattgccaaaatggacagaaagaaaaagctcaaagaagctgagaagctgtttgtgtga

SEQ ID NO: 3555 - protein, 976 aa, synthetic construct [sequence omitted]

SEQ ID NO: 3556 - RNA, 2931 nt, synthetic construct
  misc_feature 1..2931: note = SYCP1__Homo_sapiens__AAI44020
  source 1..2931: mol_type = other RNA
atggaaaagcaaaagccctttgcattgttcgtaccaccgagatcaagcagcagtcaggtgtctgcggtgaaacctcagaccctgggaggcgattccactttcttcaagagtttcaacaaatgtactgaagatgattttgagtttccatttgcaaagactaatctctccaaaaatggggaaaacattgattcagatcctgctttacaaaaagttaatttcttgcccgtgtttgagcaggttggtaattctgactgtcactatcaggaaggactaaaagactctgatttggagaattcagagggattgagcagagtgtattcaaaactgtataaggaggctgaaaagataaaaaaatggaaagtaagtacagaagctgaactgagacagaaagaaagtaagttgcaagaaaacagaaagataattgaagcacagcgaaaagccattcaggaactgcaatttggaaatgaaaaagtaagtttgaaattagaagaaggaatacaagaaaataaagatttaataaaagagaataatgccacaaggcatttatgtaatctactcaaagaaacctgtgctagatctgcagaaaagacaaagaaatatgaatatgaacgggaagaaaccaggcaagtttatatggatctaaatagtaacattgagaaaatgataacagcttttgaggaacttcgtgtgcaagctgagaattccagactggaaatgcattttaagttaaaggaagattatgaaaaaatccaacaccttgaacaagaatacaagaaggaaataaatgacaaggaaaagcaggtatcactactattgatccaaatcactgagaaagaaaataaaatgaaagatttaacatttctgctagaggaatccagagataaagttaatcaattagaggaaaagacaaaattacagagtgaaaacttaaaacaatcaattgagaaacagcatcatttgactaaagaactagaagatattaaagtgtcattacaaagaagtgtgagtactcaaaaggctttagaggaagatttacagatagcaacaaaaacaatttgtcagctaactgaagaaaaagaaactcaaatggaagaatctaataaagctagagctgctcattcgtttgtggttactgaatttgaaactactgtctgcagcttggaagaattattgagaacagaacagcaaagattggaaaaaaatgaagatcaattgaaaatacttaccatggagcttcaaaagaaatcaagtgagctggaagagatgactaagcttacaaataacaaagaagtagaacttgaagaattgaaaaaagtcttgggagaaaaggaaacacttttatatgaaaataaacaatttgagaagattgctgaagaattaaaaggaacagaacaagaactaattggtcttctccaagccagagagaaagaagtacatgatttggaaatacagttaactgccattaccacaagtgaacagtattattcaaaagaggttaaagatctaaaaactgagcttgaaaacgagaagcttaagaatactgaattaacttcacactgcaacaagctttcactagaaaacaaagagctcacacaggaaacaagtgatatgaccctagaactcaagaatcagcaagaagatattaataataacaaaaagcaagaagaaaggatgttgaaacaaatagaaaatcttcaagaaacagaaacccaattaagaaatgaactagaatatgtgagagaagagctaaaacagaaaagagatgaagttaaatgtaaattggacaagagtgaagaaaattgtaacaatttaaggaaacaagttgaaaataaaaacaagtatattgaagaacttcagcaggagaataaggccttgaaaaaaaaaggtacagcagaaagcaagcaactgaatgtttatgagataaaggtcaataaattagagttagaactagaaagtgccaaacagaaatttggagaaatcacagacacctatcagaaagaaattgaggacaaaaagatatcagaagaaaatcttttggaagaggttgagaaagcaaaagtaatagctgatgaagcagtaaaattacagaaagaaattgataagcgatgtcaacataaaatagctgaaatggtagcacttatggaaaaacataagcaccaatatgataagatcattgaagaaagagactcagaattaggactttataagagcaaagaacaagaacagtcatcactgagagcatctttggagattgaactatccaatctcaaagctgaacttttgtctgttaagaagcaacttgaaatagaaagagaagagaaggaaaaactcaaaagagaggcaaaagaaaacacagctactcttaaagaaaaaaaagacaagaaaacacaaacatttttattggaaacacctgaaatttattggaaattggattctaaagcagttccttcacaaactgtatctcgaaatttcacatcagttgatcatggcatatccaaagataaaagagactatctgtggacatctgccaaaaatactttatctacaccattgccaaaggcatatacagtgaagacaccaacaaaaccaaaactacagcaaagagaaaacttgaatatacccattgaagaaagtaaaaaaaagagaaaaatggcctttgaatttgatattaattcagatagttcagaaactactgatcttttgagcatggtttcagaagaagagacattgaaaacactgtataggaacaataatccaccagcttctcatctttgtgtcaaaacaccaaaaaaggccccttcatctctaacaacccctggatctacactgaagtttggagctataagaaaaatgcgggaggaccgttgggctgtaattgctaaaatggatagaaaaaaaaaactaaaagaagctgaaaagttatttgtttaa

SEQ ID NO: 3557 - RNA, 2931 nt, synthetic construct
  misc_feature 1..2931: note = derived and/or modified sequence opt1 fromSYCP1__Homo_sapiens__AAI44020
  source 1..2931: mol_type = other RNA
atggagaagcagaagcccttcgccctgttcgtgccgccccgcagctccagctcccaggtcagcgccgtgaagccccagaccctcggcggggactccaccttcttcaagagcttcaacaagtgcacggaggacgacttcgagttccccttcgcgaagaccaacctgtccaagaacggcgagaacatcgacagcgacccggccctgcagaaggtgaacttcctccccgtcttcgagcaggtcgggaactccgactgccactaccaggagggcctgaaggacagcgacctggagaactccgaggggctcagccgggtgtactccaagctgtacaaggaggccgagaagatcaagaagtggaaggtgagcaccgaggccgagctgcgccagaaggagtccaagctccaggagaaccggaagatcatcgaggcccagcgcaaggcgatccaggagctgcagttcggcaacgagaaggtgagcctgaagctcgaggagggcatccaggagaacaaggacctgatcaaggagaacaacgccacccggcacctgtgcaacctcctgaaggagacgtgcgcccgctccgccgagaagaccaagaagtacgagtacgagcgggaggagacccgccaggtgtacatggacctgaacagcaacatcgagaagatgatcaccgcgttcgaggagctccgggtccaggccgagaactcccgcctggagatgcacttcaagctgaaggaggactacgagaagatccagcacctcgagcaggagtacaagaaggagatcaacgacaaggagaagcaggtcagcctgctgctcatccagatcacggagaaggagaacaagatgaaggacctgaccttcctgctcgaggagagccgggacaaggtgaaccagctggaggagaagaccaagctgcagtccgagaacctcaagcagagcatcgagaagcagcaccacctgaccaaggagctggaggacatcaaggtgtccctccagcgcagcgtgtccacgcagaaggccctggaggaggacctgcagatcgccaccaagaccatctgccagctcaccgaggagaaggagacgcagatggaggagagcaacaaggcccgggcggcccactccttcgtggtcaccgagttcgagaccaccgtgtgcagcctggaggagctgctccgcacggagcagcagcggctggagaagaacgaggaccagctgaagatcctcaccatggagctgcagaagaagtccagcgagctggaggagatgaccaagctcaccaacaacaaggaggtggagctggaggagctgaagaaggtcctcggggagaaggagacgctgctgtacgagaacaagcagttcgagaagatcgccgaggagctgaagggcaccgagcaggagctcatcgggctgctgcaggcccgcgagaaggaggtgcacgacctcgagatccagctgaccgccatcaccacgtccgagcagtactacagcaaggaggtgaaggacctgaagaccgagctcgagaacgagaagctgaagaacaccgagctgacctcccactgcaacaagctcagcctggagaacaaggagctgacgcaggagacctccgacatgaccctcgagctgaagaaccagcaggaggacatcaacaacaacaagaagcaggaggagcggatgctgaagcagatcgagaacctccaggagaccgagacgcagctgcgcaacgagctggagtacgtccgggaggagctcaagcagaagcgcgacgaggtgaagtgcaagctggacaagagcgaggagaactgcaacaacctgcggaagcaggtcgagaacaagaacaagtacatcgaggagctccagcaggagaacaaggcgctgaagaagaagggcaccgccgagtccaagcagctgaacgtgtacgagatcaaggtgaacaagctcgagctggagctggagagcgccaagcagaagttcggggagatcaccgacacctaccagaaggagatcgaggacaagaagatctccgaggagaacctcctggaggaggtcgagaaggccaaggtgatcgccgacgaggcggtgaagctgcagaaggagatcgacaagcgctgccagcacaagatcgccgagatggtcgccctcatggagaagcacaagcaccagtacgacaagatcatcgaggagcgcgacagcgagctgggcctgtacaagagcaaggagcaggagcagtccagcctccgggcctccctggagatcgagctgagcaacctcaaggccgagctgctgtccgtgaagaagcagctcgagatcgagcgcgaggagaaggagaagctgaagcgggaggcgaaggagaacaccgccacgctgaaggagaagaaggacaagaagacccagaccttcctcctggagacccccgagatctactggaagctggacagcaaggccgtgccctcccagacggtcagccgcaacttcacctccgtggaccacggcatcagcaaggacaagcgggactacctctggacctccgccaagaacaccctgagcacgccgctgcccaaggcgtacaccgtgaagacccccaccaagcccaagctccagcagcgcgagaacctgaacatcccgatcgaggagtccaagaagaagcggaagatggccttcgagttcgacatcaacagcgactccagcgagacgaccgacctgctctccatggtcagcgaggaggagaccctgaagaccctgtaccgcaacaacaacccgcccgccagccacctctgcgtgaagacgcccaagaaggccccctccagcctgaccacccccgggtccaccctgaagttcggcgccatccggaagatgcgcgaggaccggtgggcggtgatcgccaagatggaccgcaagaagaagctcaaggaggccgagaagctgttcgtctga

SEQ ID NO: 3558 - RNA, 2931 nt, synthetic construct
  misc_feature 1..2931: note = derived and/or modified sequence opt2 fromSYCP1__Homo_sapiens__AAI44020
  source 1..2931: mol_type = other RNA
atggagaagcagaagcccttcgccctcttcgtccccccccgctcctcctcctcccaggtctccgccgtcaagccccagaccctcggcggcgactccaccttcttcaagtccttcaacaagtgcaccgaggacgacttcgagttccccttcgccaagaccaacctctccaagaacggcgagaacatcgactccgaccccgccctccagaaggtcaacttcctccccgtcttcgagcaggtcggcaactccgactgccactaccaggagggcctcaaggactccgacctcgagaactccgagggcctctcccgcgtctactccaagctctacaaggaggccgagaagatcaagaagtggaaggtctccaccgaggccgagctccgccagaaggagtccaagctccaggagaaccgcaagatcatcgaggcccagcgcaaggccatccaggagctccagttcggcaacgagaaggtctccctcaagctcgaggagggcatccaggagaacaaggacctcatcaaggagaacaacgccacccgccacctctgcaacctcctcaaggagacctgcgcccgctccgccgagaagaccaagaagtacgagtacgagcgcgaggagacccgccaggtctacatggacctcaactccaacatcgagaagatgatcaccgccttcgaggagctccgcgtccaggccgagaactcccgcctcgagatgcacttcaagctcaaggaggactacgagaagatccagcacctcgagcaggagtacaagaaggagatcaacgacaaggagaagcaggtctccctcctcctcatccagatcaccgagaaggagaacaagatgaaggacctcaccttcctcctcgaggagtcccgcgacaaggtcaaccagctcgaggagaagaccaagctccagtccgagaacctcaagcagtccatcgagaagcagcaccacctcaccaaggagctcgaggacatcaaggtctccctccagcgctccgtctccacccagaaggccctcgaggaggacctccagatcgccaccaagaccatctgccagctcaccgaggagaaggagacccagatggaggagtccaacaaggcccgcgccgcccactccttcgtcgtcaccgagttcgagaccaccgtctgctccctcgaggagctcctccgcaccgagcagcagcgcctcgagaagaacgaggaccagctcaagatcctcaccatggagctccagaagaagtcctccgagctcgaggagatgaccaagctcaccaacaacaaggaggtcgagctcgaggagctcaagaaggtcctcggcgagaaggagaccctcctctacgagaacaagcagttcgagaagatcgccgaggagctcaagggcaccgagcaggagctcatcggcctcctccaggcccgcgagaaggaggtccacgacctcgagatccagctcaccgccatcaccacctccgagcagtactactccaaggaggtcaaggacctcaagaccgagctcgagaacgagaagctcaagaacaccgagctcacctcccactgcaacaagctctccctcgagaacaaggagctcacccaggagacctccgacatgaccctcgagctcaagaaccagcaggaggacatcaacaacaacaagaagcaggaggagcgcatgctcaagcagatcgagaacctccaggagaccgagacccagctccgcaacgagctcgagtacgtccgcgaggagctcaagcagaagcgcgacgaggtcaagtgcaagctcgacaagtccgaggagaactgcaacaacctccgcaagcaggtcgagaacaagaacaagtacatcgaggagctccagcaggagaacaaggccctcaagaagaagggcaccgccgagtccaagcagctcaacgtctacgagatcaaggtcaacaagctcgagctcgagctcgagtccgccaagcagaagttcggcgagatcaccgacacctaccagaaggagatcgaggacaagaagatctccgaggagaacctcctcgaggaggtcgagaaggccaaggtcatcgccgacgaggccgtcaagctccagaaggagatcgacaagcgctgccagcacaagatcgccgagatggtcgccctcatggagaagcacaagcaccagtacgacaagatcatcgaggagcgcgactccgagctcggcctctacaagtccaaggagcaggagcagtcctccctccgcgcctccctcgagatcgagctctccaacctcaaggccgagctcctctccgtcaagaagcagctcgagatcgagcgcgaggagaaggagaagctcaagcgcgaggccaaggagaacaccgccaccctcaaggagaagaaggacaagaagacccagaccttcctcctcgagacccccgagatctactggaagctcgactccaaggccgtcccctcccagaccgtctcccgcaacttcacctccgtcgaccacggcatctccaaggacaagcgcgactacctctggacctccgccaagaacaccctctccacccccctccccaaggcctacaccgtcaagacccccaccaagcccaagctccagcagcgcgagaacctcaacatccccatcgaggagtccaagaagaagcgcaagatggccttcgagttcgacatcaactccgactcctccgagaccaccgacctcctctccatggtctccgaggaggagaccctcaagaccctctaccgcaacaacaacccccccgcctcccacctctgcgtcaagacccccaagaaggccccctcctccctcaccacccccggctccaccctcaagttcggcgccatccgcaagatgcgcgaggaccgctgggccgtcatcgccaagatggaccgcaagaagaagctcaaggaggccgagaagctcttcgtctga

SEQ ID NO: 3559 - RNA, 2931 nt, synthetic construct
  misc_feature 1..2931: note = derived and/or modified sequence opt3 fromSYCP1__Homo_sapiens__AAI44020
  source 1..2931: mol_type = other RNA
atggagaagcagaagcccttcgccctgtttgtgcctccaagaagctcctcttcacaagtcagtgctgttaagccgcagaccctcggcggggacagcacattctttaaatccttcaacaagtgcactgaagatgactttgagttcccctttgcaaaaacgaacctttctaagaacggagaaaatatcgattcggaccctgccctgcagaaggtgaacttcttgccagtatttgaacaggtgggtaattcagattgtcactaccaagaaggcttaaaagacagcgatctggagaacagtgaggggctatccagggtctattctaagctctacaaagaagcggagaagattaaaaagtggaaggtgagcaccgaagctgagctgcggcagaaagagtccaaacttcaggaaaatcgcaaaataatcgaggcccagcgaaaggcaattcaagaactgcagttcggaaacgagaaagtttcattgaagctcgaagagggcatccaggagaataaagacctgattaaggaaaacaatgccacacgtcatctgtgcaacctcttaaaggagacttgtgctagaagtgcagaaaagaccaagaaatatgagtacgaaagggaggagacacgccaggtgtatatggatctgaatagcaacatcgaaaagatgataaccgcctttgaggaacttcgggtccaagctgaaaattctagattggaaatgcacttcaaactgaaggaggactacgagaagatccagcatctagaacaggagtataaaaaggaaattaacgataaagagaagcaagtgtccctcctgcttatccagattactgagaaagaaaacaagatgaaggacctgacatttttgctcgaggaatcaagggataaagtaaatcagctggaggaaaagaccaaattacagagcgagaacctgaagcaaagtatcgagaaacagcaccatctcacgaaggaacttgaggacataaaggtttctctgcagcggtccgtgagcactcagaaagccttggaagaggacctacaaattgcgaccaagacaatctgccagctgactgaagagaaagagacccagatggaagagtcgaataaggcacgcgccgctcactctttcgtcgtgacagagttcgagaccacggtgtgttccctcgaggagctgcttcgaactgagcagcaaagactggaaaagaacgaggatcagttgaagattctcacaatggaactgcagaaaaagtcaagtgagttagaggaaatgaccaagctgactaataacaaagaggtcgaactagaggaactcaagaaagttctgggtgagaaggagacacttttgtacgaaaataaacagtttgagaagatcgccgaggaactgaaggggaccgaacaagagctcatcggactgcttcaggcaagggagaaagaagtgcacgacctggagattcagttgacggctataaccacaagcgaacaatactattccaaggaggtaaaagatctcaagactgaactggagaacgagaaattaaagaataccgaactgacatctcattgcaacaagctaagcctcgagaataaagaactgactcaggagacctcagacatgacacttgagttgaagaaccagcaggaagatatcaataacaataaaaagcaagaggaacggatgctgaaacagattgagaacctccaggaaaccgagactcagctgcgtaacgagttagaatacgtgcgcgaggaactgaagcaaaagagagacgaggtcaaatgtaaacttgataaaagtgaagagaattgcaacaatttgaggaaacaggtggagaacaaaaataagtatatcgaggaactccagcaggaaaacaaagccctgaagaagaaaggcacggcggagtccaagcaactaaatgtttacgaaataaaagtgaacaagctggagctcgagctggaaagcgccaaacagaagttcggcgagattacagacacctatcagaaggaaatcgaggataaaaagatctctgaggaaaatcttttggaggaagtcgagaaagcaaaggtgattgctgacgaagccgtaaaactgcaaaaggagatcgataagcggtgtcagcacaaaattgctgagatggttgccttaatggaaaagcataaacaccagtacgacaagataatcgaggaacgagactcagagctcgggctgtataaaagtaaggaacaggagcaaagctcccttcgcgcatctctggagattgaattgtcgaacctcaaggccgagctgctaagcgtgaaaaagcagctggaaatcgagagagaagagaaagagaagctcaaaagggaagctaaggagaatactgcgaccctgaaggaaaagaaggataaaaagacacagacctttcttttggagactcccgagatctactggaaactggactccaaggcagtcccttcacagacagtgagtcggaacttcacgtctgtcgatcacggaattagcaaagacaagcgcgattacttatggacctccgccaagaatactctctcaacaccactgcccaaggcttataccgtgaagacacctactaaaccaaaacttcaacagagagaaaacctgaatataccgatcgaggaaagcaaaaagaagaggaaaatggcctttgagttcgacattaactctgattccagtgaaaccacggacctactcagcatggtttctgaggaggaaaccctgaagacattgtaccgtaacaataatccccctgcatcccatctgtgcgtgaaaactccaaagaaagccccctcaagtttaaccacacctggtagcactctcaagtttggcgctatccggaagatgcgagaggatagatgggccgtaattgcaaaaatggacaggaagaaaaagctgaaagaagcggagaaacttttcgtctga

SEQ ID NO: 3560 - RNA, 2931 nt, synthetic construct
  misc_feature 1..2931: note = derived and/or modified sequence opt4 fromSYCP1__Homo_sapiens__AAI44020
  source 1..2931: mol_type = other RNA
atggagaagcagaagcccttcgccctgttcgtgccccccagaagcagcagcagccaggtgagcgccgtgaagccccagaccctgggcggcgacagcaccttcttcaagagcttcaacaagtgcaccgaggacgacttcgagttccccttcgccaagaccaacctgagcaagaacggcgagaacatcgacagcgaccccgccctgcagaaggtgaacttcctgcccgtgttcgagcaggtgggcaacagcgactgccactaccaggagggcctgaaggacagcgacctggagaacagcgagggcctgagcagagtgtacagcaagctgtacaaggaggccgagaagatcaagaagtggaaggtgagcaccgaggccgagctgagacagaaggagagcaagctgcaggagaacagaaagatcatcgaggcccagagaaaggccatccaggagctgcagttcggcaacgagaaggtgagcctgaagctggaggagggcatccaggagaacaaggacctgatcaaggagaacaacgccaccagacacctgtgcaacctgctgaaggagacctgcgccagaagcgccgagaagaccaagaagtacgagtacgagagagaggagaccagacaggtgtacatggacctgaacagcaacatcgagaagatgatcaccgccttcgaggagctgagagtgcaggccgagaacagcagactggagatgcacttcaagctgaaggaggactacgagaagatccagcacctggagcaggagtacaagaaggagatcaacgacaaggagaagcaggtgagcctgctgctgatccagatcaccgagaaggagaacaagatgaaggacctgaccttcctgctggaggagagcagagacaaggtgaaccagctggaggagaagaccaagctgcagagcgagaacctgaagcagagcatcgagaagcagcaccacctgaccaaggagctggaggacatcaaggtgagcctgcagagaagcgtgagcacccagaaggccctggaggaggacctgcagatcgccaccaagaccatctgccagctgaccgaggagaaggagacccagatggaggagagcaacaaggccagagccgcccacagcttcgtggtgaccgagttcgagaccaccgtgtgcagcctggaggagctgctgagaaccgagcagcagagactggagaagaacgaggaccagctgaagatcctgaccatggagctgcagaagaagagcagcgagctggaggagatgaccaagctgaccaacaacaaggaggtggagctggaggagctgaagaaggtgctgggcgagaaggagaccctgctgtacgagaacaagcagttcgagaagatcgccgaggagctgaagggcaccgagcaggagctgatcggcctgctgcaggccagagagaaggaggtgcacgacctggagatccagctgaccgccatcaccaccagcgagcagtactacagcaaggaggtgaaggacctgaagaccgagctggagaacgagaagctgaagaacaccgagctgaccagccactgcaacaagctgagcctggagaacaaggagctgacccaggagaccagcgacatgaccctggagctgaagaaccagcaggaggacatcaacaacaacaagaagcaggaggagagaatgctgaagcagatcgagaacctgcaggagaccgagacccagctgagaaacgagctggagtacgtgagagaggagctgaagcagaagagagacgaggtgaagtgcaagctggacaagagcgaggagaactgcaacaacctgagaaagcaggtggagaacaagaacaagtacatcgaggagctgcagcaggagaacaaggccctgaagaagaagggcaccgccgagagcaagcagctgaacgtgtacgagatcaaggtgaacaagctggagctggagctggagagcgccaagcagaagttcggcgagatcaccgacacctaccagaaggagatcgaggacaagaagatcagcgaggagaacctgctggaggaggtggagaaggccaaggtgatcgccgacgaggccgtgaagctgcagaaggagatcgacaagagatgccagcacaagatcgccgagatggtggccctgatggagaagcacaagcaccagtacgacaagatcatcgaggagagagacagcgagctgggcctgtacaagagcaaggagcaggagcagagcagcctgagagccagcctggagatcgagctgagcaacctgaaggccgagctgctgagcgtgaagaagcagctggagatcgagagagaggagaaggagaagctgaagagagaggccaaggagaacaccgccaccctgaaggagaagaaggacaagaagacccagaccttcctgctggagacccccgagatctactggaagctggacagcaaggccgtgcccagccagaccgtgagcagaaacttcaccagcgtggaccacggcatcagcaaggacaagagagactacctgtggaccagcgccaagaacaccctgagcacccccctgcccaaggcctacaccgtgaagacccccaccaagcccaagctgcagcagagagagaacctgaacatccccatcgaggagagcaagaagaagagaaagatggccttcgagttcgacatcaacagcgacagcagcgagaccaccgacctgctgagcatggtgagcgaggaggagaccctgaagaccctgtacagaaacaacaacccccccgccagccacctgtgcgtgaagacccccaagaaggcccccagcagcctgaccacccccggcagcaccctgaagttcggcgccatcagaaagatgagagaggacagatgggccgtgatcgccaagatggacagaaagaagaagctgaaggaggccgagaagctgttcgtgtga

SEQ ID NO: 3561 - RNA, 2931 nt, synthetic construct
  misc_feature 1..2931: note = derived and/or modified sequence opt5 fromSYCP1__Homo_sapiens__AAI44020
  source 1..2931: mol_type = other RNA
atggagaagcagaaacccttcgccctgtttgtgcctccgagaagctcctctagccaagtctccgctgttaagccccagaccctcggcggggactctacattctttaagagcttcaacaagtgcacggaagatgactttgagttcccttttgccaaaaccaacctgtccaagaacggagaaaatatcgattctgaccccgcgcttcagaaggtgaacttcctgcctgtgtttgagcaggtcggcaatagcgattgtcactaccaagaagggctcaaagactccgatctggagaacagcgagggactttctcgggtgtattccaagctgtacaaagaagctgagaagattaaaaagtggaaggttagcacagaagccgagctccgccagaaagagtctaagctgcaggaaaatagaaaaatcattgaggcccagcggaaggctatccaagaactgcagttcggcaacgagaaagtgtccctcaagctggaagaggggattcaggagaataaagaccttatcaaggaaaacaatgccacccgccatctgtgcaacctcctgaaggagacatgtgctagaagcgccgagaaaaccaagaaatatgagtacgaacgggaggagacacgccaggtctatatggatcttaattctaacatcgaaaagatgattaccgcgtttgaggaactgagagtgcaagccgaaaattcccggctcgaaatgcacttcaaactgaaggaggactacgagaagatccagcatctggaacaggagtataaaaaggaaattaacgataaagagaagcaagttagcctcctgcttatccagattacggagaaagaaaacaagatgaaggacctgacctttctcctggaggaatcccgcgataaagtgaatcagcttgaggaaaagacaaaactgcagtctgagaacctcaagcaaagcatcgagaaacagcaccatctgaccaaggaactggaggacattaaggtctccctccagagaagcgtgtctacacagaaagctctggaagaggaccttcaaatcgccaccaagacgatctgccagctgacagaagagaaagagacccagatggaagagtccaataaggctcgggccgcgcacagcttcgtggtcacagagttcgaaaccaccgtttgttctctcgaggaactgcttcgcacagagcagcaaagactggagaaaaacgaagatcagctcaagattctgacgatggaactgcagaaaaagagctccgagctcgaggaaatgaccaagctgacaaataacaaagaggtggaacttgaggaactgaagaaagtgctcggagagaaggagaccctgctgtacgaaaataaacagtttgagaagatcgccgaggaacttaagggcacagaacaagagctcattggcctgctgcaggctcgggagaaagaagtccacgacctcgagatccagctgaccgccattacgacatctgaacaatactatagcaaggaggtgaaagatcttaagaccgaactggagaacgagaaactcaagaataccgaactgacatcccattgcaacaagctgagccttgagaataaagaactcacccaggagacatctgacatgacgctggagctgaagaaccagcaggaagatatcaataacaataaaaagcaagaggaacgcatgctcaaacagatcgagaacctgcaggaaaccgagacacagcttagaaacgagctggaatacgttcgggaggaactcaagcaaaagagagacgaggtgaaatgtaagctggataaatccgaagagaattgcaacaatctgcgcaagcaggtcgagaacaaaaataagtatattgaggaacttcagcaggaaaacaaagctctcaagaagaaagggaccgccgagagcaagcaactgaatgtgtacgaaatcaaagttaacaagctggagctcgagctggaatctgccaaacagaagttcggagagattacagacacctatcagaaggaaatcgaggataaaaagatttccgaggaaaatcttctggaggaagtggagaaagctaaggtcatcgcggacgaagccgtgaaactccaaaaggagatcgataagcggtgtcagcacaaaattgctgagatggtcgccctgatggaaaagcataaacaccagtacgacaagatcattgaggaaagagacagcgagctgggcctttataaatccaaggaacaggagcaatctagcctccgcgcctccctggagatcgaactgtctaacctcaaggctgagctgcttagcgtgaaaaagcagctggaaattgagcgggaagagaaagagaagctcaaaagagaagccaaggagaatacggcgaccctgaaggagaaaaaggataaaaagacacagacctttctgcttgaaacacccgagatctactggaaactggactccaaggctgttcctagccagaccgtgtctcgcaacttcacgtccgtcgatcacgggattagcaaagacaagcgggattacctctggacatctgccaagaataccctgtccacaccgctccccaaagcctataccgtgaagacccctacaaaacccaagctgcaacagagagaaaaccttaatatccctatcgaggaaagcaaaaagaagcgcaaaatggcttttgagttcgacattaactctgatagctccgaaacgaccgacctgctcagcatggtttctgaggaggaaacactgaagaccctgtaccggaacaataatcccccggcctcccatctttgcgtgaaaacacctaagaaagctcccagctccctgaccacgcctggatctacactcaagtttggcgccatcagaaagatgcgcgaggatcggtgggcggtcattgccaaaatggacagaaagaaaaagctgaaagaagctgagaaactcttcgtgtga

SEQ ID NO: 3562 - protein, 976 aa, synthetic construct; identical to SEQ ID NO: 3548
  REGION 1..976: note = SYCP1__Homo_sapiens__Q15431

SEQ ID NO: 3563 - RNA, 2931 nt, synthetic construct; identical to SEQ ID NO: 3549
  misc_feature 1..2931: note = SYCP1__Homo_sapiens__AAI26267
  source 1..2931: mol_type = other RNA

SEQ ID NO: 3564 - RNA, 2931 nt, synthetic construct; identical to SEQ ID NO: 3550
  misc_feature 1..2931: note = derived and/or modified sequence opt1 fromSYCP1__Homo_sapiens__AAI26267
  source 1..2931: mol_type = other RNA

SEQ ID NO: 3565 - RNA, 2931 nt, synthetic construct; identical to SEQ ID NO: 3551
  misc_feature 1..2931: note = derived and/or modified sequence opt2 fromSYCP1__Homo_sapiens__AAI26267
  source 1..2931: mol_type = other RNA

SEQ ID NO: 3566 - RNA, 2931 nt, synthetic construct; identical to SEQ ID NO: 3552
  misc_feature 1..2931: note = derived and/or modified sequence opt3 fromSYCP1__Homo_sapiens__AAI26267
  source 1..2931: mol_type = other RNA

SEQ ID NO: 3567 - RNA, 2931 nt, synthetic construct; identical to SEQ ID NO: 3553
  misc_feature 1..2931: note = derived and/or modified sequence opt4 fromSYCP1__Homo_sapiens__AAI26267
  source 1..2931: mol_type = other RNA

SEQ ID NO: 3568 - RNA, 2931 nt, synthetic construct; identical to SEQ ID NO: 3554
  misc_feature 1..2931: note = derived and/or modified sequence opt5 fromSYCP1__Homo_sapiens__AAI26267
  source 1..2931: mol_type = other RNA

SEQ ID NO: 3569 - protein, 109 aa, synthetic construct [sequence omitted]

SEQ ID NO: 3570 - RNA, 330 nt, synthetic construct
  misc_feature 1..330: note = SYCP1__Homo_sapiens__AAI05300
  source 1..330: mol_type = other RNA
atggaaaagcaaaagccctttgcattgttcgtaccaccgagatcaagcagcagtcaggtgtctgcggtgaaacctcagaccctgggaggcgattccactttcttcaagagtttcaacaaatgtactgaagatgattttgagtttccatttgcaaagactaatctctccaaaaatggggaaaacattgattcagatcctgctttacaaaacgttaatttcttgcccgtgcttgagcaggttggtaattctgactgtcactatcaggaaggactaaaagactctgatttggagaattcagagggattgagcagagtgtattcaaaactgtaa

SEQ ID NO: 3571 - RNA, 330 nt, synthetic construct
  misc_feature 1..330: note = derived and/or modified sequence opt1 fromSYCP1__Homo_sapiens__AAI05300
  source 1..330: mol_type = other RNA
atggagaagcagaagcccttcgccctgttcgtgccgccccgcagctccagctcccaggtgagcgccgtgaagccccagaccctcggcggggactccaccttcttcaagagcttcaacaagtgcacggaggacgacttcgagttccccttcgcgaagaccaacctgtccaagaacggcgagaacatcgacagcgacccggccctgcagaacgtgaacttcctccccgtcctggagcaggtcgggaactccgactgccactaccaggagggcctgaaggacagcgacctcgagaactccgaggggctgagccgggtgtactccaagctgtga

SEQ ID NO: 3572 - RNA, 330 nt, synthetic construct
  misc_feature 1..330: note = derived and/or modified sequence opt2 fromSYCP1__Homo_sapiens__AAI05300
  source 1..330: mol_type = other RNA
atggagaagcagaagcccttcgccctcttcgtccccccccgctcctcctcctcccaggtctccgccgtcaagccccagaccctcggcggcgactccaccttcttcaagtccttcaacaagtgcaccgaggacgacttcgagttccccttcgccaagaccaacctctccaagaacggcgagaacatcgactccgaccccgccctccagaacgtcaacttcctccccgtcctcgagcaggtcggcaactccgactgccactaccaggagggcctcaaggactccgacctcgagaactccgagggcctctcccgcgtctactccaagctctga

SEQ ID NO: 3573 - RNA, 330 nt, synthetic construct
  misc_feature 1..330: note = derived and/or modified sequence opt3 fromSYCP1__Homo_sapiens__AAI05300
  source 1..330: mol_type = other RNA
atggagaagcagaaacccttcgccctgtttgtgcctccaagaagctcctcttcacaagtcagtgctgttaagccgcagaccctcggcggggacagcacattctttaaatccttcaacaagtgcactgaagatgactttgagttcccctttgcaaaaacgaatctttctaagaacggagaaaatatcgattcggaccctgccctgcagaacgtgaatttcttgccagtattagaacaggtgggtaactcagattgtcactaccaagagggcctgaaggacagcgatctagagaatagtgaggggctctccagggtctattctaaactgtga

SEQ ID NO: 3574 - RNA, 330 nt, synthetic construct
  misc_feature 1..330: note = derived and/or modified sequence opt4 fromSYCP1__Homo_sapiens__AAI05300
  source 1..330: mol_type = other RNA
atggagaagcagaagcccttcgccctgttcgtgccccccagaagcagcagcagccaggtgagcgccgtgaagccccagaccctgggcggcgacagcaccttcttcaagagcttcaacaagtgcaccgaggacgacttcgagttccccttcgccaagaccaacctgagcaagaacggcgagaacatcgacagcgaccccgccctgcagaacgtgaacttcctgcccgtgctggagcaggtgggcaacagcgactgccactaccaggagggcctgaaggacagcgacctggagaacagcgagggcctgagcagagtgtacagcaagctgtga

SEQ ID NO: 3575 - RNA, 330 nt, synthetic construct
  misc_feature 1..330: note = derived and/or modified sequence opt5 fromSYCP1__Homo_sapiens__AAI05300
  source 1..330: mol_type = other RNA
atggagaagcagaaacccttcgccctgtttgtgcctccgagaagctcctctagccaagtctccgctgttaagccccagaccctcggcggggactctacattctttaagagcttcaacaaatgcacggaagatgactttgagttcccttttgccaaaaccaatctgtccaagaacggagaaaatatcgattctgaccccgcgcttcagaacgtgaatttcctgcctgtgctcgagcaggtcggcaacagcgattgtcactaccaagaagggctgaaggactccgatcttgagaatagcgagggactgtctcgggtgtattccaaactctga

SEQ ID NO: 3576 - protein, 488 aa, synthetic construct
  REGION 1..488: note = SYT-SSX-1__Homo_sapiens__A4PIV7
MSVAFAAPRQRGKGEITPAAIQKMLDDNNHLIQCIMDSQNKGKTSECSQYQQMLHTNLVYLATIADSNQNMQSLLPAPPTQNMPMGPGGMNQSGPPPPPRSHNMPSDGMVGGGPPAPHMQNQMNGQMPGPNHMPMQGPGPNQLNMTNSSMNMPSSSHGSMGGYNHSVPSSQSMPVQNQMTMSQGQPMGNYGPRPNMSMQPNQGPMMHQQPPSQQYNMPQGGGQHYQGQQPPMGMMGQVNQGNHMMGQRQIPPYRPPQQGPPQQYSGQEDYYGDQYSHGGQGPPEGMNQQYYPDGHNDYGYQQPSYPEQGYDRPYEDSSQHYYEGGNSQYGQQQDAYQGPPPQQGYPPQQQQYPGQQGYPGQQQGYGPSQGGPGPQYPNYPQGQGQQYGGYRPTQPGPPQPPQQRPYGYDQIMPKKPAEDENDSKGVSEASGPQNDGKQLHPPGKANISEKINKRSGPKRGKHAWTHRLRERKQLVIYEEISDPEEDDE

SEQ ID NO: 3577 - RNA, 1467 nt, synthetic construct
  misc_feature 1..1467: note = SYT-SSX-1__Homo_sapiens__BAF56181
  source 1..1467: mol_type = other RNA
atgtctgtggctttcgcggccccgaggcagcgaggcaagggggagatcactcccgctgcgattcagaagatgttggatgacaataaccatcttattcagtgtataatggactctcagaataaaggaaagacctcagagtgttctcagtatcagcagatgttgcacacaaacttggtataccttgctacaatagcagattctaatcaaaatatgcagtctcttttaccagcaccacccacacagaatatgcctatgggtcctggagggatgaatcagagcggccctcccccacctccacgctctcacaacatgccttcagatggaatggtaggtgggggtcctcctgcaccgcacatgcagaaccagatgaacggccagatgcctgggcctaaccatatgcctatgcagggacctggacccaatcaactcaatatgacaaacagttccatgaatatgccttcaagtagccatggatccatgggaggttacaaccattctgtgccatcatcgcagagcatgccagtacagaatcagatgacaatgagtcagggacaaccaatgggaaactatggtcccagaccaaatatgagtatgcagccaaaccaaggtccaatgatgcatcagcagcctccttctcagcaatacaatatgccacagggaggcggacagcattaccaaggacagcagccacctatggggatgatgggtcaagttaaccaaggcaatcatatgatgggtcagagacagattcctccctatagacctcctcaacagggcccaccacagcagtactcaggccaggaagactattacggggaccaatacagtcatggtggacaaggtcctccagaaggcatgaaccagcaatattaccctgatggtcataatgattacggttatcagcaaccgtcgtatcctgaacaaggctacgataggccttatgaggattcctcacaacattactacgaaggaggaaattcacagtatggccaacagcaagatgcataccagggaccacctccacaacagggatatccaccccagcagcagcagtacccagggcagcaaggttacccaggacagcagcagggctacggtccttcacagggtggtccaggtcctcagtatcctaactacccacagggacaaggtcagcagtatggaggatatagaccaacacagcctggaccaccacagccaccccagcagaggccttatggatatgaccagatcatgcccaagaagccagcagaggacgaaaatgattcgaagggagtgtcagaagcatctggcccacaaaacgatgggaaacaactgcaccccccaggaaaagcaaatatttctgagaagattaataagagatctggacccaaaagggggaaacatgcctggacccacagactgcgtgagagaaagcagctggtgatttatgaagagatcagcgaccctgaggaagatgacgagtaa

SEQ ID NO: 3578 - RNA, 1467 nt, synthetic construct
  misc_feature 1..1467: note = derived and/or modified sequence opt1 fromSYT-SSX-1__Homo_sapiens__BAF56181
  source 1..1467: mol_type = other RNA
atgagcgtggccttcgccgcgccccgccagcggggcaagggggagatcaccccggccgccatccagaagatgctggacgacaacaaccacctcatccagtgcatcatggactcccagaacaagggcaagaccagcgagtgctcccagtaccagcagatgctgcacacgaacctggtctacctcgccaccatcgccgacagcaaccagaacatgcagtccctgctgcccgcgccccccacccagaacatgccgatggggcccggcgggatgaaccagagcggcccccccccgcccccccgctcccacaacatgcccagcgacggcatggtggggggcgggccgcccgccccccacatgcagaaccagatgaacggccagatgcccgggccgaaccacatgcccatgcagggccccggccccaaccagctcaacatgaccaactccagcatgaacatgccgtccagctcccacgggagcatgggcgggtacaaccactccgtgcccagctcccagagcatgcccgtccagaaccagatgacgatgtcccagggccagcccatgggcaactacgggccgcggcccaacatgagcatgcagcccaaccagggccccatgatgcaccagcagccgcccagccagcagtacaacatgccccaggggggcgggcagcactaccagggccagcagccgcccatgggcatgatggggcaggtgaaccagggcaaccacatgatggggcagcgccagatccccccctaccggccgccccagcagggccccccccagcagtactccgggcaggaggactactacggcgaccagtacagccacggcgggcagggcccgcccgaggggatgaaccagcagtactaccccgacggccacaacgactacgggtaccagcagccctcctacccggagcagggctacgaccgcccctacgaggacagctcccagcactactacgagggcgggaacagccagtacggccagcagcaggacgcctaccaggggccccccccgcagcagggctaccccccccagcagcagcagtaccccggccagcaggggtacccgggccagcagcaggggtacggcccctcccaggggggccccggcccccagtacccgaactacccccaggggcagggccagcagtacgggggctaccggcccacccagccggggcccccccagcccccgcagcagcgcccctacggctacgaccagatcatgcccaagaagcccgccgaggacgagaacgacagcaagggcgtgtccgaggcgagcgggccgcagaacgacggcaagcagctgcacccccccgggaaggccaacatctccgagaagatcaacaagcggagcggccccaagcgcgggaagcacgcctggacccaccggctgcgcgagcggaagcagctcgtcatctacgaggagatctccgacccggaggaggacgacgagtga

SEQ ID NO: 3579 - RNA, 1467 nt, synthetic construct
  misc_feature 1..1467: note = derived and/or modified sequence opt2 fromSYT-SSX-1__Homo_sapiens__BAF56181
  source 1..1467: mol_type = other RNA
atgtccgtcgccttcgccgccccccgccagcgcggcaagggcgagatcacccccgccgccatccagaagatgctcgacgacaacaaccacctcatccagtgcatcatggactcccagaacaagggcaagacctccgagtgctcccagtaccagcagatgctccacaccaacctcgtctacctcgccaccatcgccgactccaaccagaacatgcagtccctcctccccgccccccccacccagaacatgcccatgggccccggcggcatgaaccagtccggcccccccccccccccccgctcccacaacatgccctccgacggcatggtcggcggcggcccccccgccccccacatgcagaaccagatgaacggccagatgcccggccccaaccacatgcccatgcagggccccggccccaaccagctcaacatgaccaactcctccatgaacatgccctcctcctcccacggctccatgggcggctacaaccactccgtcccctcctcccagtccatgcccgtccagaaccagatgaccatgtcccagggccagcccatgggcaactacggcccccgccccaacatgtccatgcagcccaaccagggccccatgatgcaccagcagcccccctcccagcagtacaacatgccccagggcggcggccagcactaccagggccagcagccccccatgggcatgatgggccaggtcaaccagggcaaccacatgatgggccagcgccagatccccccctaccgccccccccagcagggccccccccagcagtactccggccaggaggactactacggcgaccagtactcccacggcggccagggcccccccgagggcatgaaccagcagtactaccccgacggccacaacgactacggctaccagcagccctcctaccccgagcagggctacgaccgcccctacgaggactcctcccagcactactacgagggcggcaactcccagtacggccagcagcaggacgcctaccagggcccccccccccagcagggctaccccccccagcagcagcagtaccccggccagcagggctaccccggccagcagcagggctacggcccctcccagggcggccccggcccccagtaccccaactacccccagggccagggccagcagtacggcggctaccgccccacccagcccggccccccccagcccccccagcagcgcccctacggctacgaccagatcatgcccaagaagcccgccgaggacgagaacgactccaagggcgtctccgaggcctccggcccccagaacgacggcaagcagctccacccccccggcaaggccaacatctccgagaagatcaacaagcgctccggccccaagcgcggcaagcacgcctggacccaccgcctccgcgagcgcaagcagctcgtcatctacgaggagatctccgaccccgaggaggacgacgagtga

SEQ ID NO: 3580 - RNA, 1467 nt, synthetic construct
  misc_feature 1..1467: note = derived and/or modified sequence opt3 fromSYT-SSX-1__Homo_sapiens__BAF56181
  source 1..1467: mol_type = other RNA
atgagcgtggccttcgctgcacccagacagaggggcaagggggagatcacccctgccgcgattcagaaaatgctggacgataacaatcacctcatacaatgcatcatggactcccagaacaagggaaaaacatctgaatgttcacagtaccaacagatgcttcatactaatctggtctatttggctacgattgccgatagtaaccagaatatgcagagcttactgccagcaccgcccacccaaaacatgcctatgggtccaggcgggatgaatcagtccggaccccctccaccccctcggtctcacaacatgccatcggacggcatggttggtgggggaccgcccgcccctcatatgcagaatcagatgaacggccaaatgccaggccccaatcacatgcctatgcaggggccaggacccaaccagctaaatatgacaaactcaagcatgaatatgccgagttcctctcatggtagcatgggcgggtacaaccactccgtgccttcaagtcaaagcatgcccgtacagaaccagatgactatgtctcagggacaaccaatgggcaattatggtcctcgccccaacatgtccatgcagccaaatcaggggcccatgatgcaccagcaacctccatcacagcagtacaacatgccgcagggaggcggccaacattatcaggggcagcagccccctatgggaatgatgggtcaagtgaatcagggcaaccacatgatggggcagcgacaaatcccaccctaccgtcctccacagcagggacccccgcagcaatatagcggccaggaggattactacggtgaccagtatagtcatgggggccagggacctccagaaggcatgaatcaacagtactatcccgatgggcacaacgactacggatatcagcagccttcttaccccgagcaaggttatgatagaccatacgaagactccagccagcactactatgagggcggaaattcgcagtacgggcaacagcaggatgcttatcagggccctcccccacaacagggttacccgcctcagcagcaacagtatcccgggcagcagggctacccaggacaacagcagggctatgggccctctcagggaggtcctggcccacaataccccaactaccctcaggggcagggacaacagtatggcggttacaggccgacccagccagggccccctcagccaccccaacagcggccttatggctacgaccagattatgccgaagaaacccgcagaggatgaaaatgactccaagggagtctcagaggccagtggcccacagaacgacgggaagcaactccatcctcccggaaaagctaatatcagcgaaaagataaacaaacgctccggcccaaagagaggtaaacacgcctggacacataggctgcgggagcgcaagcagcttgtgatctatgaggaaatttctgatcctgaggaagacgatgagtga

SEQ ID NO: 3581 - RNA, 1467 nt, synthetic construct
  misc_feature 1..1467: note = derived and/or modified sequence opt4 fromSYT-SSX-1__Homo_sapiens__BAF56181
  source 1..1467: mol_type = other RNA
atgagcgtggccttcgccgcccccagacagagaggcaagggcgagatcacccccgccgccatccagaagatgctggacgacaacaaccacctgatccagtgcatcatggacagccagaacaagggcaagaccagcgagtgcagccagtaccagcagatgctgcacaccaacctggtgtacctggccaccatcgccgacagcaaccagaacatgcagagcctgctgcccgccccccccacccagaacatgcccatgggccccggcggcatgaaccagagcggccccccccccccccccagaagccacaacatgcccagcgacggcatggtgggcggcggcccccccgccccccacatgcagaaccagatgaacggccagatgcccggccccaaccacatgcccatgcagggccccggccccaaccagctgaacatgaccaacagcagcatgaacatgcccagcagcagccacggcagcatgggcggctacaaccacagcgtgcccagcagccagagcatgcccgtgcagaaccagatgaccatgagccagggccagcccatgggcaactacggccccagacccaacatgagcatgcagcccaaccagggccccatgatgcaccagcagccccccagccagcagtacaacatgccccagggcggcggccagcactaccagggccagcagccccccatgggcatgatgggccaggtgaaccagggcaaccacatgatgggccagagacagatccccccctacagacccccccagcagggccccccccagcagtacagcggccaggaggactactacggcgaccagtacagccacggcggccagggcccccccgagggcatgaaccagcagtactaccccgacggccacaacgactacggctaccagcagcccagctaccccgagcagggctacgacagaccctacgaggacagcagccagcactactacgagggcggcaacagccagtacggccagcagcaggacgcctaccagggcccccccccccagcagggctaccccccccagcagcagcagtaccccggccagcagggctaccccggccagcagcagggctacggccccagccagggcggccccggcccccagtaccccaactacccccagggccagggccagcagtacggcggctacagacccacccagcccggccccccccagcccccccagcagagaccctacggctacgaccagatcatgcccaagaagcccgccgaggacgagaacgacagcaagggcgtgagcgaggccagcggcccccagaacgacggcaagcagctgcacccccccggcaaggccaacatcagcgagaagatcaacaagagaagcggccccaagagaggcaagcacgcctggacccacagactgagagagagaaagcagctggtgatctacgaggagatcagcgaccccgaggaggacgacgagtga

SEQ ID NO: 3582 - RNA, 1467 nt, synthetic construct
  misc_feature 1..1467: note = derived and/or modified sequence opt5 fromSYT-SSX-1__Homo_sapiens__BAF56181
  source 1..1467: mol_type = other RNA
atgagcgtggccttcgctgcccccagacagcggggcaagggggagatcacccctgcggctattcagaaaatgctggacgataacaatcacctcatccaatgcattatggactcccagaacaagggaaaaacatctgaatgtagccagtaccaacagatgctgcatacgaatcttgtctatctggccaccatcgccgattccaaccagaatatgcagtctctcctgccggctccccctacacaaaacatgcccatgggccctgggggaatgaatcagagcgggccccctccgccccctcgctcccacaacatgccctctgacgggatggttggaggcggccctcccgccccgcatatgcagaatcagatgaacgggcaaatgcctggacccaatcacatgcctatgcagggccccgggcccaaccagcttaatatgaccaacagctccatgaatatgccttctagctcccatggaagcatgggcgggtacaaccactctgtgccgtccagccaatctatgcccgtgcagaaccagatgacaatgtcccagggacaacctatgggcaattatggccccagacctaacatgagcatgcagcccaatcaggggccgatgatgcaccagcaacctccctcccagcagtacaacatgcctcagggaggcgggcaacattatcagggacagcagccccctatgggcatgatggggcaagtcaatcagggaaaccacatgatgggccagcggcaaattcccccgtaccgccctccccagcaggggccccctcagcaatattctggccaggaggattactacggagaccagtatagccatggcgggcagggaccgcccgaaggcatgaatcaacagtactatcctgatgggcacaacgactacggctatcagcagccctcctaccctgagcaaggatatgatagaccctacgaagacagctctcagcactactatgagggcggcaattcccagtacggacaacagcaggatgcttatcagggccctcccccgcaacaggggtaccctccccagcagcaacagtatcctggacagcagggctaccccgggcaacagcagggctatggaccgagccagggcgggcctggaccccaataccctaactacccccagggccaggggcaacagtatggaggctaccggcccacccagcctgggccgccccagcctccccaacagcgcccttatggctacgaccagatcatgcccaagaaacctgccgaggatgaaaatgactctaagggagtgagcgaggcgtccggcccgcagaacgacgggaagcaactgcatccccctggaaaagccaatatctctgaaaagattaacaaaagaagcggccccaagcgggggaaacacgcttggacacatcgcctcagagagcggaagcagctggttatctatgaggaaatttccgatcctgaggaagacgatgagtga

SEQ ID NO: 3583 - protein, 457 aa, synthetic construct
  REGION 1..457: note = SYT-SSX-1__Homo_sapiens__A4PIV8
MSVAFAAPRQRGKGEITPAAIQKMLDDNNHLIQCIMDSQNKGKTSECSQYQQMLHTNLVYLATIADSNQNMQSLLPAPPTQNMPMGPGGMNQSGPPPPPRSHNMPSDGMVGGGPPAPHMQNQMNGQMPGPNHMPMQGPGPNQLNMTNSSMNMPSSSHGSMGGYNHSVPSSQSMPVQNQMTMSQGQPMGNYGPRPNMSMQPNQGPMMHQQPPSQQYNMPQGGGQHYQGQQPPMGMMGQVNQGNHMMGQRQIPPYRPPQQGPPQQYSGQEDYYGDQYSHGGQGPPEGMNQQYYPDGNSQYGQQQDAYQGPPPQQGYPPQQQQYPGQQGYPGQQQGYGPSQGGPGPQYPNYPQGQGQQYGGYRPTQPGPPQPPQQRPYGYDQIMPKKPAEDENDSKGVSEASGPQNDGKQLHPPGKANISEKINKRSGPKRGKHAWTHRLRERKQLVIYEEISDPEEDDE

SEQ ID NO: 3584 - RNA, 1374 nt, synthetic construct
  misc_feature 1..1374: note = SYT-SSX-1__Homo_sapiens__BAF56182
  source 1..1374: mol_type = other RNA
atgtctgtggctttcgcggccccgaggcagcgaggcaagggggagatcactcccgctgcgattcagaagatgttggatgacaataaccatcttattcagtgtataatggactctcagaataaaggaaagacctcagagtgttctcagtatcagcagatgttgcacacaaacttggtataccttgctacaatagcagattctaatcaaaatatgcagtctcttttaccagcaccacccacacagaatatgcctatgggtcctggagggatgaatcagagcggccctcccccacctccacgctctcacaacatgccttcagatggaatggtaggtgggggtcctcctgcaccgcacatgcagaaccagatgaacggccagatgcctgggcctaaccatatgcctatgcagggacctggacccaatcaactcaatatgacaaacagttccatgaatatgccttcaagtagccatggatccatgggaggttacaaccattctgtgccatcatcgcagagcatgccagtacagaatcagatgacaatgagtcagggacaaccaatgggaaactatggtcccagaccaaatatgagtatgcagccaaaccaaggtccaatgatgcatcagcagcctccttctcagcaatacaatatgccacagggaggcggacagcattaccaaggacagcagccacctatggggatgatgggtcaagttaaccaaggcaatcatatgatgggtcagagacagattcctccctatagacctcctcaacagggcccaccacagcagtactcaggccaggaagactattacggggaccaatacagtcatggtggacaaggtcctccagaaggcatgaaccagcaatattaccctgatggaaattcacagtatggccaacagcaagatgcataccagggaccacctccacaacagggatatccaccccagcagcagcagtacccagggcagcaaggttacccaggacagcagcagggctacggtccttcacagggtggtccaggtcctcagtatcctaactacccacagggacaaggtcagcagtatggaggatatagaccaacacagcctggaccaccacagccaccccagcagaggccttatggatatgaccagatcatgcccaagaagccagcagaggacgaaaatgattcgaagggagtgtcagaagcatctggcccacaaaacgatgggaaacaactgcaccccccaggaaaagcaaatatttctgagaagattaataagagatctggacccaaaagggggaaacatgcctggacccacagactgcgtgagagaaagcagctggtgatttatgaagagatcagcgaccctgaggaagatgacgagtaa

SEQ ID NO: 3585 - RNA, 1374 nt, synthetic construct
  misc_feature 1..1374: note = derived and/or modified sequence opt1 fromSYT-SSX-1__Homo_sapiens__BAF56182
  source 1..1374: mol_type = other RNA
atgagcgtggccttcgccgcgccccgccagcggggcaagggggagatcaccccggccgccatccagaagatgctggacgacaacaaccacctcatccagtgcatcatggactcccagaacaagggcaagaccagcgagtgctcccagtaccagcagatgctgcacacgaacctggtctacctcgccaccatcgccgacagcaaccagaacatgcagtccctgctgcccgcgccccccacccagaacatgccgatggggcccggcgggatgaaccagagcggcccccccccgcccccccgctcccacaacatgcccagcgacggcatggtggggggcgggccgcccgccccccacatgcagaaccagatgaacggccagatgcccgggccgaaccacatgcccatgcagggccccggccccaaccagctcaacatgaccaactccagcatgaacatgccgtccagctcccacgggagcatgggcgggtacaaccactccgtgcccagctcccagagcatgcccgtccagaaccagatgacgatgtcccagggccagcccatgggcaactacgggccgcggcccaacatgagcatgcagcccaaccagggccccatgatgcaccagcagccgcccagccagcagtacaacatgccccaggggggcgggcagcactaccagggccagcagccgcccatgggcatgatggggcaggtgaaccagggcaaccacatgatggggcagcgccagatccccccctaccggccgccccagcagggccccccccagcagtactccgggcaggaggactactacggcgaccagtacagccacggcgggcagggcccgcccgaggggatgaaccagcagtactaccccgacggcaactcccagtacgggcagcagcaggacgcctaccagggccccccgccccagcagggctaccccccccagcagcagcagtacccggggcagcagggctaccccgggcagcagcagggctacggccccagccaggggggccccgggccgcagtaccccaactacccccagggccaggggcagcagtacggcggctaccgccccacccagccggggcccccccagccgccccagcagcggccctacggctacgaccagatcatgcccaagaagccggccgaggacgagaacgactccaagggggtgagcgaggcgtccggcccccagaacgacgggaagcagctgcacccccccggcaaggccaacatcagcgagaagatcaacaagcgctccggcccgaagcgggggaagcacgcctggacccaccgcctgcgggagcgcaagcagctcgtcatctacgaggagatcagcgaccccgaggaggacgacgagtga

SEQ ID NO: 3586 - RNA, 1374 nt, synthetic construct
  misc_feature 1..1374: note = derived and/or modified sequence opt2 fromSYT-SSX-1__Homo_sapiens__BAF56182
  source 1..1374: mol_type = other RNA
atgtccgtcgccttcgccgccccccgccagcgcggcaagggcgagatcacccccgccgccatccagaagatgctcgacgacaacaaccacctcatccagtgcatcatggactcccagaacaagggcaagacctccgagtgctcccagtaccagcagatgctccacaccaacctcgtctacctcgccaccatcgccgactccaaccagaacatgcagtccctcctccccgccccccccacccagaacatgcccatgggccccggcggcatgaaccagtccggcccccccccccccccccgctcccacaacatgccctccgacggcatggtcggcggcggcccccccgccccccacatgcagaaccagatgaacggccagatgcccggccccaaccacatgcccatgcagggccccggccccaaccagctcaacatgaccaactcctccatgaacatgccctcctcctcccacggctccatgggcggctacaaccactccgtcccctcctcccagtccatgcccgtccagaaccagatgaccatgtcccagggccagcccatgggcaactacggcccccgccccaacatgtccatgcagcccaaccagggccccatgatgcaccagcagcccccctcccagcagtacaacatgccccagggcggcggccagcactaccagggccagcagccccccatgggcatgatgggccaggtcaaccagggcaaccacatgatgggccagcgccagatccccccctaccgccccccccagcagggccccccccagcagtactccggccaggaggactactacggcgaccagtactcccacggcggccagggcccccccgagggcatgaaccagcagtactaccccgacggcaactcccagtacggccagcagcaggacgcctaccagggcccccccccccagcagggctaccccccccagcagcagcagtaccccggccagcagggctaccccggccagcagcagggctacggcccctcccagggcggccccggcccccagtaccccaactacccccagggccagggccagcagtacggcggctaccgccccacccagcccggccccccccagcccccccagcagcgcccctacggctacgaccagatcatgcccaagaagcccgccgaggacgagaacgactccaagggcgtctccgaggcctccggcccccagaacgacggcaagcagctccacccccccggcaaggccaacatctccgagaagatcaacaagcgctccggccccaagcgcggcaagcacgcctggacccaccgcctccgcgagcgcaagcagctcgtcatctacgaggagatctccgaccccgaggaggacgacgagtga

SEQ ID NO: 3587 - RNA, 1374 nt, synthetic construct
  misc_feature 1..1374: note = derived and/or modified sequence opt3 fromSYT-SSX-1__Homo_sapiens__BAF56182
  source 1..1374: mol_type = other RNA
atgagcgtggccttcgctgcacccagacagaggggcaagggggagatcacccctgccgcgattcagaaaatgctggacgataacaatcacctcatacaatgcatcatggactcccagaacaagggaaaaacatctgaatgttcacagtaccaacagatgcttcatactaatctggtctatttggctacgattgccgatagtaaccagaatatgcagagcttactgccagcaccgcccacccaaaacatgcctatgggtccaggcgggatgaatcagtccggaccccctccaccccctcggtctcacaacatgccatcggacggcatggttggtgggggaccgcccgcccctcatatgcagaatcagatgaacggccaaatgccaggccccaatcacatgcctatgcaggggccaggacccaaccagctaaatatgacaaactcaagcatgaatatgccgagttcctctcatggtagcatgggcgggtacaaccactccgtgccttcaagtcaaagcatgcccgtacagaaccagatgactatgtctcagggacaaccaatgggcaattatggtcctcgccccaacatgtccatgcagccaaatcaggggcccatgatgcaccagcaacctccatcacagcagtacaacatgccgcagggaggcggccaacattatcaggggcagcagccccctatgggaatgatgggtcaagtgaatcagggcaaccacatgatggggcagcgacaaatcccaccctaccgtcctccacagcagggacccccgcagcaatatagcggccaggaggattactacggtgaccagtatagtcatgggggccagggacctccagaaggcatgaatcaacagtactatcccgatgggaactctcagtacggacagcaacaggacgcttatcagggtcctcccccacaacagggctaccctccccagcagcaacagtatccagggcagcagggatacccgggccaacagcagggttacgggccttcccagggcggacccggcccacaatatcccaattaccctcaggggcagggacagcaatatggtggctacagaccaacccagcccgggcctccgcagccaccccaacagaggccttatggatacgatcagattatgccaaagaaacccgcagaggacgaaaacgatagcaagggcgtctcggaggcctctggtcctcagaatgacgggaagcaactccacccgcccggcaaagctaacatctccgagaagataaataaacggtcaggaccaaagcgcggcaaacacgcctggacacatagactgagggaacggaagcagcttgtgatctatgaggaaattagtgatcctgaggaggacgacgaatga

SEQ ID NO: 3588 - RNA, 1374 nt, synthetic construct
  misc_feature 1..1374: note = derived and/or modified sequence opt4 fromSYT-SSX-1__Homo_sapiens__BAF56182
  source 1..1374: mol_type = other RNA
atgagcgtggccttcgccgcccccagacagagaggcaagggcgagatcacccccgccgccatccagaagatgctggacgacaacaaccacctgatccagtgcatcatggacagccagaacaagggcaagaccagcgagtgcagccagtaccagcagatgctgcacaccaacctggtgtacctggccaccatcgccgacagcaaccagaacatgcagagcctgctgcccgccccccccacccagaacatgcccatgggccccggcggcatgaaccagagcggccccccccccccccccagaagccacaacatgcccagcgacggcatggtgggcggcggcccccccgccccccacatgcagaaccagatgaacggccagatgcccggccccaaccacatgcccatgcagggccccggccccaaccagctgaacatgaccaacagcagcatgaacatgcccagcagcagccacggcagcatgggcggctacaaccacagcgtgcccagcagccagagcatgcccgtgcagaaccagatgaccatgagccagggccagcccatgggcaactacggccccagacccaacatgagcatgcagcccaaccagggccccatgatgcaccagcagccccccagccagcagtacaacatgccccagggcggcggccagcactaccagggccagcagccccccatgggcatgatgggccaggtgaaccagggcaaccacatgatgggccagagacagatccccccctacagacccccccagcagggccccccccagcagtacagcggccaggaggactactacggcgaccagtacagccacggcggccagggcccccccgagggcatgaaccagcagtactaccccgacggcaacagccagtacggccagcagcaggacgcctaccagggcccccccccccagcagggctaccccccccagcagcagcagtaccccggccagcagggctaccccggccagcagcagggctacggccccagccagggcggccccggcccccagtaccccaactacccccagggccagggccagcagtacggcggctacagacccacccagcccggccccccccagcccccccagcagagaccctacggctacgaccagatcatgcccaagaagcccgccgaggacgagaacgacagcaagggcgtgagcgaggccagcggcccccagaacgacggcaagcagctgcacccccccggcaaggccaacatcagcgagaagatcaacaagagaagcggccccaagagaggcaagcacgcctggacccacagactgagagagagaaagcagctggtgatctacgaggagatcagcgaccccgaggaggacgacgagtga

SEQ ID NO: 3589 - RNA, 1374 nt, synthetic construct
  misc_feature 1..1374: note = derived and/or modified sequence opt5 fromSYT-SSX-1__Homo_sapiens__BAF56182
  source 1..1374: mol_type = other RNA
atgagcgtggccttcgctgcccccagacagcggggcaagggggagatcacccctgcggctattcagaaaatgctggacgataacaatcacctcatccaatgcattatggactcccagaacaagggaaaaacatctgaatgtagccagtaccaacagatgctgcatacgaatcttgtctatctggccaccatcgccgattccaaccagaatatgcagtctctcctgccggctccccctacacaaaacatgcccatgggccctgggggaatgaatcagagcgggccccctccgccccctcgctcccacaacatgccctctgacggcatggttggaggcggccctcccgccccgcatatgcagaatcagatgaacgggcaaatgcctggacccaatcacatgcctatgcagggccccgggcccaaccagcttaatatgaccaacagctccatgaatatgccttctagctcccatggaagcatgggcgggtacaaccactctgtgccgtccagccaatctatgcccgtgcagaaccagatgacaatgtcccagggacaacctatgggcaattatggccccagacctaacatgagcatgcagcccaatcaggggccgatgatgcaccagcaacctccctcccagcagtacaacatgcctcagggaggcgggcaacattatcagggacagcagccccctatgggcatgatggggcaagtcaatcagggaaaccacatgatgggccagcggcaaattcccccgtaccgccctccccagcaggggccccctcagcaatattctggccaggaggattactacggagaccagtatagccatggcgggcagggaccgcccgaaggcatgaatcaacagtactatcctgatgggaactcccagtacggccagcaacaggacgcttatcagggaccccctccccaacagggctaccctccccagcagcaacagtatccggggcagcagggataccctggccaacagcaggggtacggacccagccagggcgggcctggcccccaatatccgaattaccctcagggacagggccagcaatatgggggatacagacccacccagcctggccctccccagcccccgcaacagcggccctatgggtacgatcagatcatgcctaagaaacccgccgaggacgaaaacgattctaagggagtgtccgaggcgagcggccctcagaatgacgggaagcaactgcatccccctggcaaagccaacatctctgagaagattaataaacgcagcggaccgaagagaggcaaacacgcttggacacaccggctccgcgaaagaaagcagctggttatctatgaggaaatttccgatcccgaggaggacgacgaatga

SEQ ID NO: 3590 - protein, 488 aa, synthetic construct
  REGION 1..488: note = SYT-SSX-2__Homo_sapiens__A4PIV9
MSVAFAAPRQRGKGEITPAAIQKMLDDNNHLIQCIMDSQNKGKTSECSQYQQMLHTNLVYLATIADSNQNMQSLLPAPPTQNMPMGPGGMNQSGPPPPPRSHNMPSDGMVGGGPPAPHMQNQMNGQMPGPNHMPMQGPGPNQLNMTNSSMNMPSSSHGSMGGYNHSVPSSQSMPVQNQMTMSQGQPMGNYGPRPNMSMQPNQGPMMHQQPPSQQYNMPQGGGQHYQGQQPPMGMMGQVNQGNHMMGQRQIPPYRPPQQGPPQQYSGQEDYYGDQYSHGGQGPPEGMNQQYYPDGHNDYGYQQPSYPEQGYDRPYEDSSQHYYEGGNSQYGQQQDAYQGPPPQQGYPPQQQQYPGQQGYPGQQQGYGPSQGGPGPQYPNYPQGQGQQYGGYRPTQPGPPQPPQQRPYGYDQIMPKKPAEEGNDSEEVPEASGPQNDGKELCPPGKPTTSEKIHERSGPKRGEHAWTHRLRERKQLVIYEEISDPEEDDE

SEQ ID NO: 3591 - RNA, 1467 nt, synthetic construct
  misc_feature 1..1467: note = SYT-SSX-2__Homo_sapiens__BAF56183
  source 1..1467: mol_type = other RNA
atgtctgtggctttcgcggccccgaggcagcgaggcaagggggagatcactcccgctgcgattcagaagatgttggatgacaataaccatcttattcagtgtataatggactctcagaataaaggaaagacctcagagtgttctcagtatcagcagatgttgcacacaaacttggtataccttgctacaatagcagattctaatcaaaatatgcagtctcttttaccagcaccacccacacagaatatgcctatgggtcctggagggatgaatcagagcggccctcccccacctccacgctctcacaacatgccttcagatggaatggtaggtgggggtcctcctgcaccgcacatgcagaaccagatgaacggccagatgcctgggcctaaccatatgcctatgcagggacctggacccaatcaactcaatatgacaaacagttccatgaatatgccttcaagtagccatggatccatgggaggttacaaccattctgtgccatcatcgcagagcatgccagtacagaatcagatgacaatgagtcagggacaaccaatgggaaactatggtcccagaccaaatatgagtatgcagccaaaccaaggtccaatgatgcatcagcagcctccttctcagcaatacaatatgccacagggaggcggacagcattaccaaggacagcagccacctatggggatgatgggtcaagttaaccaaggcaatcatatgatgggtcagagacagattcctccctatagacctcctcaacagggcccaccacagcagtactcaggccaggaagactattacggggaccaatacagtcatggtggacaaggtcctccagaaggcatgaaccagcaatattaccctgatggtcataatgattacggttatcagcaaccgtcgtatcctgaacaaggctacgataggccttatgaggattcctcacaacattactacgaaggaggaaattcacagtatggccaacagcaagatgcataccagggaccacctccacaacagggatatccaccccagcagcagcagtacccagggcagcaaggttacccaggacagcagcagggctacggtccttcacagggtggtccaggtcctcagtatcctaactacccacagggacaaggtcagcagtatggaggatatagaccaacacagcctggaccaccacagccaccccagcagaggccttatggatatgaccagatcatgcccaagaagccagcagaggaaggaaatgattcggaggaagtgccagaagcatctggcccacaaaatgatgggaaagagctgtgccccccgggaaaaccaactacctctgagaagattcacgagagatctggacccaaaaggggggaacatgcctggacccacagactgcgtgagagaaaacagctggtgatttatgaagagatcagcgaccctgaggaagatgacgagtaa

SEQ ID NO: 3592 - RNA, 1467 nt, synthetic construct
  misc_feature 1..1467: note = derived and/or modified sequence opt1 fromSYT-SSX-2__Homo_sapiens__BAF56183
  source 1..1467: mol_type = other RNA
atgagcgtggccttcgccgcgccccgccagcggggcaagggggagatcaccccggccgccatccagaagatgctggacgacaacaaccacctcatccagtgcatcatggactcccagaacaagggcaagaccagcgagtgctcccagtaccagcagatgctgcacacgaacctggtctacctcgccaccatcgccgacagcaaccagaacatgcagtccctgctgcccgcgccccccacccagaacatgccgatggggcccggcgggatgaaccagagcggcccccccccgcccccccgctcccacaacatgcccagcgacggcatggtggggggcgggccgcccgccccccacatgcagaaccagatgaacggccagatgcccgggccgaaccacatgcccatgcagggccccggccccaaccagctcaacatgaccaactccagcatgaacatgccgtccagctcccacgggagcatgggcgggtacaaccactccgtgcccagctcccagagcatgcccgtccagaaccagatgacgatgtcccagggccagcccatgggcaactacgggccgcggcccaacatgagcatgcagcccaaccagggccccatgatgcaccagcagccgcccagccagcagtacaacatgccccaggggggcgggcagcactaccagggccagcagccgcccatgggcatgatggggcaggtgaaccagggcaaccacatgatggggcagcgccagatccccccctaccggccgccccagcagggccccccccagcagtactccgggcaggaggactactacggcgaccagtacagccacggcgggcagggcccgcccgaggggatgaaccagcagtactaccccgacggccacaacgactacgggtaccagcagccctcctacccggagcagggctacgaccgcccctacgaggacagctcccagcactactacgagggcgggaacagccagtacggccagcagcaggacgcctaccaggggccccccccgcagcagggctaccccccccagcagcagcagtaccccggccagcaggggtacccgggccagcagcaggggtacggcccctcccaggggggccccggcccccagtacccgaactacccccaggggcagggccagcagtacgggggctaccggcccacccagccggggcccccccagcccccgcagcagcgcccctacggctacgaccagatcatgcccaagaagcccgccgaggagggcaacgacagcgaggaggtgccggaggcgtccgggccccagaacgacggcaaggagctgtgcccccccgggaagccgaccaccagcgagaagatccacgagcggtccggccccaagcgcggggagcacgcctggacgcaccggctgcgcgagcggaagcagctcgtcatctacgaggagatcagcgaccccgaggaggacgacgagtga

SEQ ID NO: 3593 - RNA, 1467 nt, synthetic construct
  misc_feature 1..1467: note = derived and/or modified sequence opt2 fromSYT-SSX-2__Homo_sapiens__BAF56183
  source 1..1467: mol_type = other RNA
atgtccgtcgccttcgccgccccccgccagcgcggcaagggcgagatcacccccgccgccatccagaagatgctcgacgacaacaaccacctcatccagtgcatcatggactcccagaacaagggcaagacctccgagtgctcccagtaccagcagatgctccacaccaacctcgtctacctcgccaccatcgccgactccaaccagaacatgcagtccctcctccccgccccccccacccagaacatgcccatgggccccggcggcatgaaccagtccggcccccccccccccccccgctcccacaacatgccctccgacggcatggtcggcggcggcccccccgccccccacatgcagaaccagatgaacggccagatgcccggccccaaccacatgcccatgcagggccccggccccaaccagctcaacatgaccaactcctccatgaacatgccctcctcctcccacggctccatgggcggctacaaccactccgtcccctcctcccagtccatgcccgtccagaaccagatgaccatgtcccagggccagcccatgggcaactacggcccccgccccaacatgtccatgcagcccaaccagggccccatgatgcaccagcagcccccctcccagcagtacaacatgccccagggcggcggccagcactaccagggccagcagccccccatgggcatgatgggccaggtcaaccagggcaaccacatgatgggccagcgccagatccccccctaccgccccccccagcagggccccccccagcagtactccggccaggaggactactacggcgaccagtactcccacggcggccagggcccccccgagggcatgaaccagcagtactaccccgacggccacaacgactacggctaccagcagccctcctaccccgagcagggctacgaccgcccctacgaggactcctcccagcactactacgagggcggcaactcccagtacggccagcagcaggacgcctaccagggcccccccccccagcagggctaccccccccagcagcagcagtaccccggccagcagggctaccccggccagcagcagggctacggcccctcccagggcggccccggcccccagtaccccaactacccccagggccagggccagcagtacggcggctaccgccccacccagcccggccccccccagcccccccagcagcgcccctacggctacgaccagatcatgcccaagaagcccgccgaggagggcaacgactccgaggaggtccccgaggcctccggcccccagaacgacggcaaggagctctgcccccccggcaagcccaccacctccgagaagatccacgagcgctccggccccaagcgcggcgagcacgcctggacccaccgcctccgcgagcgcaagcagctcgtcatctacgaggagatctccgaccccgaggaggacgacgagtga

SEQ ID NO: 3594 - RNA, 1467 nt, synthetic construct
  misc_feature 1..1467: note = derived and/or modified sequence opt3 fromSYT-SSX-2__Homo_sapiens__BAF56183
  source 1..1467: mol_type = other RNA
atgagcgtggccttcgctgcacccagacagaggggcaagggggagatcacccctgccgcgattcagaaaatgctggacgataacaatcacctcatacaatgcatcatggactcccagaacaagggaaaaacatctgaatgctcacagtaccaacagatgcttcatactaatctggtctatttggctacgattgccgatagtaaccagaatatgcagagcttactgccagcaccgcccacccaaaacatgcctatgggtccaggcgggatgaatcagtccggaccccctccaccccctcggtctcacaacatgccatcggacggcatggttggtgggggaccgcccgcccctcatatgcagaatcagatgaacggccaaatgccaggccccaatcacatgcctatgcaggggccaggacccaaccagctaaatatgacaaactcaagcatgaatatgccgagttcctctcatggtagcatgggcgggtacaaccactccgtgccttcaagtcaaagcatgcccgtacagaaccagatgactatgtctcagggacaaccaatgggcaattatggtcctcgccccaacatgtccatgcagccaaatcaggggcccatgatgcaccagcaacctccatcacagcagtacaacatgccgcagggaggcggccaacattatcaggggcagcagccccctatgggaatgatgggtcaagtgaatcagggcaaccacatgatggggcagcgacaaatcccaccctaccgtcctccacagcagggacccccgcagcaatatagcggccaggaggattactacggtgaccagtatagtcatgggggccagggacctccagaaggcatgaatcaacagtactatcccgatgggcacaacgactacggatatcagcagccttcttaccccgagcaaggttatgatagaccatacgaagactccagccagcactactatgagggcggaaattcgcagtacgggcaacagcaggatgcttatcagggccctcccccacaacagggttacccgcctcagcagcaacagtatcccgggcagcagggctacccaggacaacagcagggctatgggccctctcagggaggtcctggcccacaataccccaactaccctcaggggcagggacaacagtatggcggttacaggccgacccagccagggccccctcagccaccccaacagcggccttatggctacgaccagattatgccgaagaaacccgcagaggaaggaaatgattccgaggaagtcccagaggcctcaggccctcagaacgacgggaaggagctctgtcccccaggaaagcctacaaccagtgagaaaatccatgaacgcagcggccccaagagaggtgaacacgcttggactcataggctgcgggagcgcaaacaacttgtgatatatgaagagatctccgacccagaggaagatgacgagtga

SEQ ID NO: 3595 - RNA, 1467 nt, synthetic construct
  misc_feature 1..1467: note = derived and/or modified sequence opt4 fromSYT-SSX-2__Homo_sapiens__BAF56183
  source 1..1467: mol_type = other RNA
atgagcgtggccttcgccgcccccagacagagaggcaagggcgagatcacccccgccgccatccagaagatgctggacgacaacaaccacctgatccagtgcatcatggacagccagaacaagggcaagaccagcgagtgcagccagtaccagcagatgctgcacaccaacctggtgtacctggccaccatcgccgacagcaaccagaacatgcagagcctgctgcccgccccccccacccagaacatgcccatgggccccggcggcatgaaccagagcggccccccccccccccccagaagccacaacatgcccagcgacggcatggtgggcggcggcccccccgccccccacatgcagaaccagatgaacggccagatgcccggccccaaccacatgcccatgcagggccccggccccaaccagctgaacatgaccaacagcagcatgaacatgcccagcagcagccacggcagcatgggcggctacaaccacagcgtgcccagcagccagagcatgcccgtgcagaaccagatgaccatgagccagggccagcccatgggcaactacggccccagacccaacatgagcatgcagcccaaccagggccccatgatgcaccagcagccccccagccagcagtacaacatgccccagggcggcggccagcactaccagggccagcagccccccatgggcatgatgggccaggtgaaccagggcaaccacatgatgggccagagacagatccccccctacagacccccccagcagggccccccccagcagtacagcggccaggaggactactacggcgaccagtacagccacggcggccagggcccccccgagggcatgaaccagcagtactaccccgacggccacaacgactacggctaccagcagcccagctaccccgagcagggctacgacagaccctacgaggacagcagccagcactactacgagggcggcaacagccagtacggccagcagcaggacgcctaccagggcccccccccccagcagggctaccccccccagcagcagcagtaccccggccagcagggctaccccggccagcagcagggctacggccccagccagggcggccccggcccccagtaccccaactacccccagggccagggccagcagtacggcggctacagacccacccagcccggccccccccagcccccccagcagagaccctacggctacgaccagatcatgcccaagaagcccgccgaggagggcaacgacagcgaggaggtgcccgaggccagcggcccccagaacgacggcaaggagctgtgcccccccggcaagcccaccaccagcgagaagatccacgagagaagcggccccaagagaggcgagcacgcctggacccacagactgagagagagaaagcagctggtgatctacgaggagatcagcgaccccgaggaggacgacgagtga

SEQ ID NO: 3596 - RNA, 1467 nt, synthetic construct
  misc_feature 1..1467: note = derived and/or modified sequence opt5 fromSYT-SSX-2__Homo_sapiens__BAF56183
  source 1..1467: mol_type = other RNA
atgagcgtggccttcgctgcccccagacagcggggcaagggggagatcacccctgcggctattcagaaaatgctggacgataacaatcacctcatccaatgcattatggactcccagaacaagggaaaaacatctgaatgtagccagtaccaacagatgctgcatacgaatcttgtctatctggccaccatcgccgattccaaccagaatatgcagtctctcctgccggctccccctacacaaaacatgcccatgggccctgggggaatgaatcagagcgggccccctccgccccctcgctcccacaacatgccctctgacgggatggttggaggcggccctcccgccccgcatatgcagaatcagatgaacgggcaaatgcctggacccaatcacatgcctatgcagggccccgggcccaaccagcttaatatgaccaacagctccatgaatatgccttctagctcccatggaagcatgggcgggtacaaccactctgtgccgtccagccaatctatgcccgtgcagaaccagatgacaatgtcccagggacaacctatgggcaattatggccccagacctaacatgagcatgcagcccaatcaggggccgatgatgcaccagcaacctccctcccagcagtacaacatgcctcagggaggcgggcaacattatcagggacagcagccccctatgggcatgatggggcaagtcaatcagggaaaccacatgatgggccagcggcaaattcccccgtaccgccctccccagcaggggccccctcagcaatattctgggcaggaggattactacggagaccagtatagccatggcgggcagggaccgcccgaaggcatgaatcaacagtactatcctgatgggcacaacgactacggctatcagcagccctcctaccctgagcaaggatatgatagaccctacgaagacagctctcagcactactatgagggcggcaattcccagtacggacaacagcaggatgcttatcagggccctcccccgcaacaggggtaccctccccagcagcaacagtatcctggacagcagggctaccccgggcaacagcagggctatggaccgagccagggcgggcctggaccccaataccctaactacccccagggccaggggcaacagtatggaggctaccggcccacccagcctgggccgccccagcctccccaacagcgcccttatggctacgaccagatcatgcccaagaaacctgccgaggaaggaaatgattctgaggaagtgccggaggcgagcggcccccagaacgacgggaaggagctgtgccctcccggaaagcctacaacctccgagaaaatccatgaaagatctggccccaagcggggcgaacacgcctggacgcatcgcctcagagagcggaaacaactggttatttatgaagagatcagcgacccggaggaagatgacgagtga

SEQ ID NO: 3597 - protein, 457 aa, synthetic construct
  REGION 1..457: note = SYT-SSX-2__Homo_sapiens__A4PIW0
MSVAFAAPRQRGKGEITPAAIQKMLDDNNHLIQCIMDSQNKGKTSECSQYQQMLHTNLVYLATIADSNQNMQSLLPAPPTQNMPMGPGGMNQSGPPPPPRSHNMPSDGMVGGGPPAPHMQNQMNGQMPGPNHMPMQGPGPNQLNMTNSSMNMPSSSHGSMGGYNHSVPSSQSMPVQNQMTMSQGQPMGNYGPRPNMSMQPNQGPMMHQQPPSQQYNMPQGGGQHYQGQQPPMGMMGQVNQGNHMMGQRQIPPYRPPQQGPPQQYSGQEDYYGDQYSHGGQGPPEGMNQQYYPDGNSQYGQQQDAYQGPPPQQGYPPQQQQYPGQQGYPGQQQGYGPSQGGPGPQYPNYPQGQGQQYGGYRPTQPGPPQPPQQRPYGYDQIMPKKPAEEGNDSEEVPEASGPQNDGKELCPPGKPTTSEKIHERSGPKRGEHAWTHRLRERKQLVIYEEISDPEEDDE

SEQ ID NO: 3598 - RNA, 1374 nt, synthetic construct
  misc_feature 1..1374: note = SYT-SSX-2__Homo_sapiens__BAF56184
  source 1..1374: mol_type = other RNA
atgtctgtggctttcgcggccccgaggcagcgaggcaagggggagatcactcccgctgcgattcagaagatgttggatgacaataaccatcttattcagtgtataatggactctcagaataaaggaaagacctcagagtgttctcagtatcagcagatgttgcacacaaacttggtataccttgctacaatagcagattctaatcaaaatatgcagtctcttttaccagcaccacccacacagaatatgcctatgggtcctggagggatgaatcagagcggccctcccccacctccacgctctcacaacatgccttcagatggaatggtaggtgggggtcctcctgcaccgcacatgcagaaccagatgaacggccagatgcctgggcctaaccatatgcctatgcagggacctggacccaatcaactcaatatgacaaacagttccatgaatatgccttcaagtagccatggatccatgggaggttacaaccattctgtgccatcatcgcagagcatgccagtacagaatcagatgacaatgagtcagggacaaccaatgggaaactatggtcccagaccaaatatgagtatgcagccaaaccaaggtccaatgatgcatcagcagcctccttctcagcaatacaatatgccacagggaggcggacagcattaccaaggacagcagccacctatggggatgatgggtcaagttaaccaaggcaatcatatgatgggtcagagacagattcctccctatagacctcctcaacagggcccaccacagcagtactcaggccaggaagactattacggggaccaatacagtcatggtggacaaggtcctccagaaggcatgaaccagcaatattaccctgatggaaattcacagtatggccaacagcaagatgcataccagggaccacctccacaacagggatatccaccccagcagcagcagtacccagggcagcaaggttacccaggacagcagcagggctacggtccttcacagggtggtccaggtcctcagtatcctaactacccacagggacaaggtcagcagtatggaggatatagaccaacacagcctggaccaccacagccaccccagcagaggccttatggatatgaccagatcatgcccaagaagccagcagaggaaggaaatgattcggaggaagtgccagaagcatctggcccacaaaatgatgggaaagagctgtgccccccgggaaaaccaactacctctgagaagattcacgagagatctggacccaaaaggggggaacatgcctggacccacagactgcgtgagagaaaacagctggtgatttatgaagagatcagcgaccctgaggaagatgacgagtaa

SEQ ID NO: 3599 - RNA, 1374 nt, synthetic construct
  misc_feature 1..1374: note = derived and/or modified sequence opt1 fromSYT-SSX-2__Homo_sapiens__BAF56184
  source 1..1374: mol_type = other RNA
atgagcgtggccttcgccgcgccccgccagcggggcaagggggagatcaccccggccgccatccagaagatgctggacgacaacaaccacctcatccagtgcatcatggactcccagaacaagggcaagaccagcgagtgctcccagtaccagcagatgctgcacacgaacctggtctacctcgccaccatcgccgacagcaaccagaacatgcagtccctgctgcccgcgccccccacccagaacatgccgatggggcccggcgggatgaaccagagcggcccccccccgcccccccgctcccacaacatgcccagcgacggcatggtggggggcgggccgcccgccccccacatgcagaaccagatgaacggccagatgcccgggccgaaccacatgcccatgcagggccccggccccaaccagctcaacatgaccaactccagcatgaacatgccgtccagctcccacgggagcatgggcgggtacaaccactccgtgcccagctcccagagcatgcccgtccagaaccagatgacgatgtcccagggccagcccatgggcaactacgggccgcggcccaacatgagcatgcagcccaaccagggccccatgatgcaccagcagccgcccagccagcagtacaacatgccccaggggggcgggcagcactaccagggccagcagccgcccatgggcatgatggggcaggtgaaccagggcaaccacatgatggggcagcgccagatccccccctaccggccgccccagcagggccccccccagcagtactccgggcaggaggactactacggcgaccagtacagccacggcgggcagggcccgcccgaggggatgaaccagcagtactaccccgacggcaactcccagtacgggcagcagcaggacgcctaccagggccccccgccccagcagggctaccccccccagcagcagcagtacccggggcagcagggctaccccgggcagcagcagggctacggccccagccaggggggccccgggccgcagtaccccaactacccccagggccaggggcagcagtacggcggctaccgccccacccagccggggcccccccagccgccccagcagcggccctacggctacgaccagatcatgcccaagaagccggccgaggaggggaacgactccgaggaggtgcccgaggcgagcggcccccagaacgacgggaaggagctgtgccccccgggcaagcccaccacctccgagaagatccacgagcgcagcggccccaagcggggggagcacgcctggacgcaccgcctgcgggagcgcaagcagctcgtcatctacgaggagatctccgaccccgaggaggacgacgagtga

SEQ ID NO: 3600 - RNA, 1374 nt, synthetic construct
  misc_feature 1..1374: note = derived and/or modified sequence opt2 fromSYT-SSX-2__Homo_sapiens__BAF56184
  source 1..1374: mol_type = other RNA
atgtccgtcgccttcgccgccccccgccagcgcggcaagggcgagatcacccccgccgccatccagaagatgctcgacgacaacaaccacctcatccagtgcatcatggactcccagaacaagggcaagacctccgagtgctcccagtaccagcagatgctccacaccaacctcgtctacctcgccaccatcgccgactccaaccagaacatgcagtccctcctccccgccccccccacccagaacatgcccatgggccccggcggcatgaaccagtccggcccccccccccccccccgctcccacaacatgccctccgacggcatggtcggcggcggcccccccgccccccacatgcagaaccagatgaacggccagatgcccggccccaaccacatgcccatgcagggccccggccccaaccagctcaacatgaccaactcctccatgaacatgccctcctcctcccacggctccatgggcggctacaaccactccgtcccctcctcccagtccatgcccgtccagaaccagatgaccatgtcccagggccagcccatgggcaactacggcccccgccccaacatgtccatgcagcccaaccagggccccatgatgcaccagcagcccccctcccagcagtacaacatgccccagggcggcggccagcactaccagggccagcagccccccatgggcatgatgggccaggtcaaccagggcaaccacatgatgggccagcgccagatccccccctaccgccccccccagcagggccccccccagcagtactccggccaggaggactactacggcgaccagtactcccacggcggccagggcccccccgagggcatgaaccagcagtactaccccgacggcaactcccagtacggccagcagcaggacgcctaccagggcccccccccccagcagggctaccccccccagcagcagcagtaccccggccagcagggctaccccggccagcagcagggctacggcccctcccagggcggccccggcccccagtaccccaactacccccagggccagggccagcagtacggcggctaccgccccacccagcccggccccccccagcccccccagcagcgcccctacggctacgaccagatcatgcccaagaagcccgccgaggagggcaacgactccgaggaggtccccgaggcctccggcccccagaacgacggcaaggagctctgcccccccggcaagcccaccacctccgagaagatccacgagcgctccggccccaagcgcggcgagcacgcctggacccaccgcctccgcgagcgcaagcagctcgtcatctacgaggagatctccgaccccgaggaggacgacgagtga

SEQ ID NO: 3601 - RNA, 1374 nt, synthetic construct
  misc_feature 1..1374: note = derived and/or modified sequence opt3 fromSYT-SSX-2__Homo_sapiens__BAF56184
  source 1..1374: mol_type = other RNA
atgagcgtggccttcgctgcacccagacagaggggcaagggggagatcacccctgccgcgattcagaaaatgctggacgataacaatcacctcatacaatgcatcatggactcccagaacaagggaaaaacatctgaatgctcacagtaccaacagatgcttcatactaatctggtctatttggctacgattgccgatagtaaccagaatatgcagagcttactgccagcaccgcccacccaaaacatgcctatgggtccaggcgggatgaatcagtccggaccccctccaccccctcggtctcacaacatgccatcggacggcatggttggtgggggaccgcccgcccctcatatgcagaatcagatgaacggccaaatgccaggccccaatcacatgcctatgcaggggccaggacccaaccagctaaatatgacaaactcaagcatgaatatgccgagttcctctcatggtagcatgggcgggtacaaccactccgtgccttcaagtcaaagcatgcccgtacagaaccagatgactatgtctcagggacaaccaatgggcaattatggtcctcgccccaacatgtccatgcagccaaatcaggggcccatgatgcaccagcaacctccatcacagcagtacaacatgccgcagggaggcggccaacattatcaggggcagcagccccctatgggaatgatgggtcaagtgaatcagggcaaccacatgatggggcagcgacaaatcccaccctaccgtcctccacagcagggacccccgcagcaatatagcggccaggaggattactacggtgaccagtatagtcatgggggccagggacctccagaaggcatgaatcaacagtactatcccgatgggaactctcagtacggacagcaacaggacgcttatcagggtcctcccccacaacagggctaccctccccagcagcaacagtatccagggcagcagggatacccgggccaacagcagggttacgggccttcccagggcggacccggcccacaatatcccaattaccctcaggggcagggacagcaatatggtggctacagaccaacccagcccgggcctccgcagccaccccaacagaggccttatggatacgatcagattatgccaaagaaacccgcagaggaaggcaacgacagcgaggaggtccctgaagcctcgggtccgcagaatgatgggaaggagctctgtcccccaggcaagcctacaacctctgagaaaatccacgaacggtccggacccaagcgcggcgagcacgcttggactcatagactgagggaacggaaacaacttgtgatatatgaggaaatctcagacccagaggaagatgacgagtga

SEQ ID NO: 3602 - RNA, 1374 nt, synthetic construct
  misc_feature 1..1374: note = derived and/or modified sequence opt4 fromSYT-SSX-2__Homo_sapiens__BAF56184
  source 1..1374: mol_type = other RNA
atgagcgtggccttcgccgcccccagacagagaggcaagggcgagatcacccccgccgccatccagaagatgctggacgacaacaaccacctgatccagtgcatcatggacagccagaacaagggcaagaccagcgagtgcagccagtaccagcagatgctgcacaccaacctggtgtacctggccaccatcgccgacagcaaccagaacatgcagagcctgctgcccgccccccccacccagaacatgcccatgggccccggcggcatgaaccagagcggccccccccccccccccagaagccacaacatgcccagcgacggcatggtgggcggcggcccccccgccccccacatgcagaaccagatgaacggccagatgcccggccccaaccacatgcccatgcagggccccggccccaaccagctgaacatgaccaacagcagcatgaacatgcccagcagcagccacggcagcatgggcggctacaaccacagcgtgcccagcagccagagcatgcccgtgcagaaccagatgaccatgagccagggccagcccatgggcaactacggccccagacccaacatgagcatgcagcccaaccagggccccatgatgcaccagcagccccccagccagcagtacaacatgccccagggcggcggccagcactaccagggccagcagccccccatgggcatgatgggccaggtgaaccagggcaaccacatgatgggccagagacagatccccccctacagacccccccagcagggccccccccagcagtacagcggccaggaggactactacggcgaccagtacagccacggcggccagggcccccccgagggcatgaaccagcagtactaccccgacggcaacagccagtacggccagcagcaggacgcctaccagggcccccccccccagcagggctaccccccccagcagcagcagtaccccggccagcagggctaccccggccagcagcagggctacggccccagccagggcggccccggcccccagtaccccaactacccccagggccagggccagcagtacggcggctacagacccacccagcccggccccccccagcccccccagcagagaccctacggctacgaccagatcatgcccaagaagcccgccgaggagggcaacgacagcgaggaggtgcccgaggccagcggcccccagaacgacggcaaggagctgtgcccccccggcaagcccaccaccagcgagaagatccacgagagaagcggccccaagagaggcgagcacgcctggacccacagactgagagagagaaagcagctggtgatctacgaggagatcagcgaccccgaggaggacgacgagtga

SEQ ID NO: 3603 - RNA, 1374 nt, synthetic construct
  misc_feature 1..1374: note = derived and/or modified sequence opt5 fromSYT-SSX-2__Homo_sapiens__BAF56184
  source 1..1374: mol_type = other RNA
atgagcgtggccttcgctgcccccagacagcggggcaagggggagatcacccctgcggctattcagaaaatgctggacgataacaatcacctcatccaatgcattatggactcccagaacaagggaaaaacatctgaatgtagccagtaccaacagatgctgcatacgaatcttgtctatctggccaccatcgccgattccaaccagaatatgcagtctctcctgccggctccccctacacaaaacatgcccatgggccctgggggaatgaatcagagcgggccccctccgccccctcgctcccacaacatgccctctgacggcatggttggaggcggccctcccgccccgcatatgcagaatcagatgaacgggcaaatgcctggacccaatcacatgcctatgcagggccccgggcccaaccagcttaatatgaccaacagctccatgaatatgccttctagctcccatggaagcatgggcgggtacaaccactctgtgccgtccagccaatctatgcccgtgcagaaccagatgacaatgtcccagggacaacctatgggcaattatggccccagacctaacatgagcatgcagcccaatcaggggccgatgatgcaccagcaacctccctcccagcagtacaacatgcctcagggaggcgggcaacattatcagggacagcagccccctatgggcatgatggggcaagtcaatcagggaaaccacatgatgggccagcggcaaattcccccgtaccgccctccccagcaggggccccctcagcaatattctggccaggaggattactacggagaccagtatagccatggcgggcagggaccgcccgaaggcatgaatcaacagtactatcctgatgggaactcccagtacggccagcaacaggacgcttatcagggaccccctccccaacagggctaccctccccagcagcaacagtatccggggcagcagggataccctggccaacagcaggggtacggacccagccagggcgggcctggcccccaatatccgaattaccctcagggacagggccagcaatatgggggatacagacccacccagcctggccctccccagcccccgcaacagcggccctatgggtacgatcagatcatgcctaagaaacccgccgaggaaggaaacgactctgaggaggtgcctgaagcgtccggcccccagaatgatgggaaggagctgtgccctccgggcaagcccacaaccagcgagaaaatccacgaacgctctggacctaagagaggcgagcacgcctggacgcatcggctccgcgaaagaaaacaactggttatttatgaggaaatcagcgaccccgaggaagatgacgagtga

SEQ ID NO: 3604 - protein, 111 aa, synthetic construct
  REGION 1..111: note = TARP__Homo_sapiens__Q0VGM3
MKTNDTYMKFSWLTVPEKSLDKEHRCIVRHENNKNGVDQEIIFPPIKTDVITMDPKDNCSKDANDTLLLQLTNTSAYYMYLLLLLKSVVYFAIITCCLLRRTAFCCNGEKS

SEQ ID NO: 3605 - RNA, 336 nt, synthetic construct
  misc_feature 1..336: note = TARP__Homo_sapiens__AAI05590
  source 1..336: mol_type = other RNA
atgaagactaacgacacatacatgaaatttagctggttaacggtgccagaaaagtcactggacaaagaacacagatgtatcgtcagacatgagaataataaaaacggagttgatcaagaaattatctttcctccaataaagacagatgtcatcacaatggatcccaaagacaattgttcaaaagatgcaaatgatacactactgctgcagctcacaaacacctctgcatattacatgtacctcctcctgctcctcaagagtgtggtctattttgccatcatcacctgctgtctgcttagaagaacggctttctgctgcaatggagagaaatcataa

SEQ ID NO: 3606 - RNA, 336 nt, synthetic construct
  misc_feature 1..336: note = derived and/or modified sequence opt1 fromTARP__Homo_sapiens__AAI05590
  source 1..336: mol_type = other RNA
atgaagaccaacgacacctacatgaagttcagctggctgaccgtgcccgagaagtccctcgacaaggagcaccgctgcatcgtccggcacgagaacaacaagaacggcgtggaccaggagatcatcttcccgcccatcaagaccgacgtgatcaccatggaccccaaggacaactgcagcaaggacgccaacgacaccctgctgctccagctgacgaacacctccgcctactacatgtacctgctcctgctgctcaagagcgtcgtgtacttcgcgatcatcacgtgctgcctgctgcgccggaccgccttctgctgcaacggggagaagtcctga

SEQ ID NO: 3607 - RNA, 336 nt, synthetic construct
  misc_feature 1..336: note = derived and/or modified sequence opt2 fromTARP__Homo_sapiens__AAI05590
  source 1..336: mol_type = other RNA
atgaagaccaacgacacctacatgaagttctcctggctcaccgtccccgagaagtccctcgacaaggagcaccgctgcatcgtccgccacgagaacaacaagaacggcgtcgaccaggagatcatcttcccccccatcaagaccgacgtcatcaccatggaccccaaggacaactgctccaaggacgccaacgacaccctcctcctccagctcaccaacacctccgcctactacatgtacctcctcctcctcctcaagtccgtcgtctacttcgccatcatcacctgctgcctcctccgccgcaccgccttctgctgcaacggcgagaagtcctga

SEQ ID NO: 3608 - RNA, 336 nt, synthetic construct
  misc_feature 1..336: note = derived and/or modified sequence opt3 fromTARP__Homo_sapiens__AAI05590
  source 1..336: mol_type = other RNA
atgaagaccaacgacacatacatgaaattcagctggctgactgtgcccgagaagtccctcgataaagagcacagatgcatcgtcaggcatgagaataacaagaatggcgttgaccaggaaattatatttcctccaatcaaaacggatgtgattaccatggacccgaaggataactgttctaaggacgccaatgatacacttctgttgcaattaactaacacctcagcttattacatgtatctgctactcctgcttaaaagtgtagtgtacttcgcaatcattacatgctgtctgttgcggcgcaccgccttttgctgtaatggggaaaagagctga

SEQ ID NO: 3609 - RNA, 336 nt, synthetic construct
  misc_feature 1..336: note = derived and/or modified sequence opt4 fromTARP__Homo_sapiens__AAI05590
  source 1..336: mol_type = other RNA
atgaagaccaacgacacctacatgaagttcagctggctgaccgtgcccgagaagagcctggacaaggagcacagatgcatcgtgagacacgagaacaacaagaacggcgtggaccaggagatcatcttcccccccatcaagaccgacgtgatcaccatggaccccaaggacaactgcagcaaggacgccaacgacaccctgctgctgcagctgaccaacaccagcgcctactacatgtacctgctgctgctgctgaagagcgtggtgtacttcgccatcatcacctgctgcctgctgagaagaaccgccttctgctgcaacggcgagaagagctga

SEQ ID NO: 3610 - RNA, 336 nt, synthetic construct
  misc_feature 1..336: note = derived and/or modified sequence opt5 fromTARP__Homo_sapiens__AAI05590
  source 1..336: mol_type = other RNA
atgaagaccaacgacacatacatgaaattcagctggctgacggtgcccgagaagtccctcgataaagaacacagatgcatcgtccggcatgagaataacaagaatggcgttgaccaggaaattatctttcctccgattaaaaccgatgtgatcacaatggaccccaaggataactgttctaaggacgccaatgataccctgcttctgcaactcacaaacaccagcgcttattacatgtatctgcttctgctcctgaaatccgtggtctacttcgccattatcacatgctgtctgctccgcagaaccgcgttttgctgtaatggggagaagtcttga

SEQ ID NO: 3611 - protein, 58 aa, synthetic construct
  REGION 1..58: note = TCRg__Homo_sapiens__A2JGV3
MQMFPPSPLFFFLQLLKQSSRRLEHTFVFLRNFSLMLLRYIGKKRRATRFWDPRRGTP

SEQ ID NO: 3612 - RNA, 177 nt, synthetic construct
  misc_feature 1..177: note = TCRg__Homo_sapiens__AAG29337
  source 1..177: mol_type = other RNA
atgcagatgtttcccccaagcccactatttttcttccttcaattgctgaaacaaagctccagaaggctggaacatacctttgtcttcttgagaaatttttccctgatgttattaagatacattggcaagaaaagaagagcaacacgattctgggatcccaggaggggaacaccatga

SEQ ID NO: 3613 - RNA, 177 nt, synthetic construct
  misc_feature 1..177: note = derived and/or modified sequence opt1 fromTCRg__Homo_sapiens__AAG29337
  source 1..177: mol_type = other RNA
atgcagatgttcccgcccagccccctgttcttcttcctccagctgctgaagcagtccagccgccggctcgagcacaccttcgtgttcctgcgcaacttctccctgatgctcctgcggtacatcggcaagaagcgccgggccacccgcttctgggacccccggcgcgggacgccctga

SEQ ID NO: 3614 - RNA, 177 nt, synthetic construct
  misc_feature 1..177: note = derived and/or modified sequence opt2 fromTCRg__Homo_sapiens__AAG29337
  source 1..177: mol_type = other RNA
atgcagatgttccccccctcccccctcttcttcttcctccagctcctcaagcagtcctcccgccgcctcgagcacaccttcgtcttcctccgcaacttctccctcatgctcctccgctacatcggcaagaagcgccgcgccacccgcttctgggacccccgccgcggcaccccctga

SEQ ID NO: 3615 - RNA, 177 nt, synthetic construct
  misc_feature 1..177: note = derived and/or modified sequence opt3 fromTCRg__Homo_sapiens__AAG29337
  source 1..177: mol_type = other RNA
atgcagatgtttccccctagcccactgttcttctttctccaacttctgaagcagtcctctagaaggttggagcacaccttcgtgtttttacggaacttctcactgatgctactccgctacatcggcaaaaagcgacgtgccacaagattttgggacccgaggcgggggactccctga

SEQ ID NO: 3616 - RNA, 177 nt, synthetic construct
  misc_feature 1..177: note = derived and/or modified sequence opt4 fromTCRg__Homo_sapiens__AAG29337
  source 1..177: mol_type = other RNA
atgcagatgttcccccccagccccctgttcttcttcctgcagctgctgaagcagagcagcagaagactggagcacaccttcgtgttcctgagaaacttcagcctgatgctgctgagatacatcggcaagaagagaagagccaccagattctgggaccccagaagaggcaccccctga

SEQ ID NO: 3617 - RNA, 177 nt, synthetic construct
  misc_feature 1..177: note = derived and/or modified sequence opt5 fromTCRg__Homo_sapiens__AAG29337
  source 1..177: mol_type = other RNA
atgcagatgtttccccctagcccgctgttcttctttctccaactgcttaagcagtcctctagacggctggagcacaccttcgtgtttctccgcaacttcagcctgatgcttctgagatacatcggcaaaaagcggcgcgccacaagattttgggacccccggcgcgggacgccttga

SEQ ID NO: 3618 - protein, 376 aa, synthetic construct
  REGION 1..376: note = TF2AA__Homo_sapiens__P52655
MANSANTNTVPKLYRSVIEDVINDVRDIFLDDGVDEQVLMELKTLWENKLMQSRAVDGFHSEEQQLLLQVQQQHQPQQQQHHHHHHHQQAQPQQTVPQQAQTQQVLIPASQQATAPQVIVPDSKLIQHMNASNMSAAATAATLALPAGVTPVQQILTNSGQLLQVVRAANGAQYIFQPQQSVVLQQQVIPQMQPGGVQAPVIQQVLAPLPGGISPQTGVIIQPQQILFTGNKTQVIPTTVAAPTPAQAQITATGQQQPQAQPAQTQAPLVLQVDGTGDTSSEEDEDEEEDYDDDEEEDKEKDGAEDGQVEEEPLNSEDDVSDEEGQELFDTENVVVCQYDKIHRSKNKWKFHLKDGIMNLNGRDYIFSKAIGDAEW

SEQ ID NO: 3619 - RNA, 1131 nt, synthetic construct
  misc_feature 1..1131: note = TF2AA__Homo_sapiens__AAF26776
  source 1..1131: mol_type = other RNA
atggcgaactcggcaaatacaaacaccgtgcctaaattatacagatctgtgattgaagatgtcattaatgatgtgagagacatctttctggatgatggagtggatgaacaagtactgatggaactaaaaactttatgggaaaacaaactaatgcagtccagggcagtagatggatttcattcagaagagcagcagcttctactgcaagttcaacagcagcatcaaccccagcagcagcagcatcaccaccatcaccatcatcagcaagctcagcctcagcagacagtacctcagcaagcgcagacccagcaggttcttattcctgcatcacagcaagccacagcaccacaagttattgttccagattctaagttgatacagcatatgaatgcatcaaacatgagtgctgctgctacagctgctaccttagcactccctgcaggtgtgactcctgttcagcagatattaacaaattcaggccagcttcttcaggtggtcagagcagccaatggtgcccaatatatctttcagcctcagcagtcagtggttctacaacaacaggttataccacaaatgcagcctggtggagtacaagctcctgttatacagcaggtgctggctcctcttcctggagggatttcaccacagacaggtgtcatcatccagcctcagcaaatcttatttacaggaaataagactcaagttatacctacgacagtggcagcacctacaccagcccaagcacagataactgcaactggccagcagcaaccgcaggcccagcctgctcaaacacaagctccattggtcttacaagttgatggaactggggatacatcatctgaagaagatgaagatgaagaagaagactatgatgatgatgaggaggaagacaaagagaaagatggagctgaagatgggcaggtggaagaagagcccctcaatagtgaagatgatgtgagtgatgaggaaggacaggaactctttgacacagaaaatgttgttgtatgccaatatgataagatacacagaagtaaaaacaaatggaaatttcatctcaaggatggcattatgaatcttaatggaagagattatatattttccaaagccattggagatgcagaatggtga

SEQ ID NO: 3620 - RNA, 1131 nt, synthetic construct
  misc_feature 1..1131: note = derived and/or modified sequence opt1 fromTF2AA__Homo_sapiens__AAF26776
  source 1..1131: mol_type = other RNA
atggccaacagcgccaacaccaacaccgtgcccaagctgtaccgctccgtcatcgaggacgtgatcaacgacgtgcgggacatcttcctcgacgacggcgtcgacgagcaggtcctgatggagctgaagacgctctgggagaacaagctgatgcagagccgcgcggtggacgggttccactccgaggagcagcagctgctcctccaggtgcagcagcagcaccagccgcagcagcagcagcaccaccaccaccaccaccaccagcaggcccagccccagcagaccgtgccccagcaggcccagacccagcaggtcctgatccccgccagccagcaggccaccgcgccccaggtgatcgtgccggactccaagctgatccagcacatgaacgccagcaacatgtccgccgccgcgacggccgccaccctggccctgcccgccggcgtgacccccgtccagcagatcctcaccaacagcgggcagctgctccaggtggtgcgggcggccaacggcgcccagtacatcttccagccgcagcagtccgtcgtgctgcagcagcaggtcatcccccagatgcagcccgggggcgtgcaggcccccgtgatccagcaggtcctggccccgctgcccggcgggatcagcccccagacgggcgtgatcatccagccccagcagatcctcttcaccgggaacaagacccaggtgatcccgaccacggtggcggcccccacccccgcccaggcccagatcaccgccaccggccagcagcagccccaggcgcagccggcccagacgcaggcgcccctggtcctccaggtggacgggaccggcgacacctccagcgaggaggacgaggacgaggaggaggactacgacgacgacgaggaggaggacaaggagaaggacggcgccgaggacgggcaggtcgaggaggagcccctgaactccgaggacgacgtgagcgacgaggagggccaggagctgttcgacaccgagaacgtggtcgtgtgccagtacgacaagatccaccgctccaagaacaagtggaagttccacctgaaggacgggatcatgaacctcaacggccgggactacatcttcagcaaggccatcggcgacgccgagtggtga

SEQ ID NO: 3621 - RNA, 1131 nt, synthetic construct
  misc_feature 1..1131: note = derived and/or modified sequence opt2 fromTF2AA__Homo_sapiens__AAF26776
  source 1..1131: mol_type = other RNA
atggccaactccgccaacaccaacaccgtccccaagctctaccgctccgtcatcgaggacgtcatcaacgacgtccgcgacatcttcctcgacgacggcgtcgacgagcaggtcctcatggagctcaagaccctctgggagaacaagctcatgcagtcccgcgccgtcgacggcttccactccgaggagcagcagctcctcctccaggtccagcagcagcaccagccccagcagcagcagcaccaccaccaccaccaccaccagcaggcccagccccagcagaccgtcccccagcaggcccagacccagcaggtcctcatccccgcctcccagcaggccaccgccccccaggtcatcgtccccgactccaagctcatccagcacatgaacgcctccaacatgtccgccgccgccaccgccgccaccctcgccctccccgccggcgtcacccccgtccagcagatcctcaccaactccggccagctcctccaggtcgtccgcgccgccaacggcgcccagtacatcttccagccccagcagtccgtcgtcctccagcagcaggtcatcccccagatgcagcccggcggcgtccaggcccccgtcatccagcaggtcctcgcccccctccccggcggcatctccccccagaccggcgtcatcatccagccccagcagatcctcttcaccggcaacaagacccaggtcatccccaccaccgtcgccgcccccacccccgcccaggcccagatcaccgccaccggccagcagcagccccaggcccagcccgcccagacccaggcccccctcgtcctccaggtcgacggcaccggcgacacctcctccgaggaggacgaggacgaggaggaggactacgacgacgacgaggaggaggacaaggagaaggacggcgccgaggacggccaggtcgaggaggagcccctcaactccgaggacgacgtctccgacgaggagggccaggagctcttcgacaccgagaacgtcgtcgtctgccagtacgacaagatccaccgctccaagaacaagtggaagttccacctcaaggacggcatcatgaacctcaacggccgcgactacatcttctccaaggccatcggcgacgccgagtggtga

SEQ ID NO: 3622 - RNA, 1131 nt, synthetic construct
  misc_feature 1..1131: note = derived and/or modified sequence opt3 fromTF2AA__Homo_sapiens__AAF26776
  source 1..1131: mol_type = other RNA
atggccaacagcgctaataccaacacagtgcccaagctgtacagatccgtcatcgaggacgttattaatgatgtgagggacatattcctcgatgacggcgtagatgaacaggtgcttatggagctgaaaactttgtgggaaaacaagttaatgcaatctcgggcagtcgacgggtttcactcagaggaacagcagctgctactccaggtgcaacagcagcatcagcctcaacagcagcagcaccatcaccatcaccaccatcaacaggcccagccacaacagacggttccgcagcaggcgcaaacccaacaggtgctgatccccgctagtcagcaggccacagcacctcaggtcattgtgccagatagcaaacttatccagcacatgaatgcctccaacatgtctgctgcagccactgctgccaccctggcgttgcccgcaggagtaacacctgttcagcaaattctcaccaattcgggtcagctgctccaggtggtccgcgccgctaacggcgcccagtatatcttccaaccacagcagtcagtggtgctccaacagcaggtcataccccagatgcaacctgggggagttcaggcaccagtgatccagcaggtattagctccgctgcccggcggtattagccctcaaactggggtgatcattcagccacagcagatcctttttacaggaaataagacccaagtcatacccacgactgtggccgcgcctaccccagcccaggcacagattacagctactggccaacagcagccccaggcccaaccggctcagacccaggcccctttggttctacaggtggacggcacaggggataccagttccgaggaggacgaagatgaggaagaggactacgatgacgacgaggaagaggataaagaaaaggacggagcagaggatggtcaagtcgaagaggagcccctgaactctgaagacgatgtgagcgacgaggaaggccaggagctgttcgatacggaaaatgtagttgtgtgccagtatgacaagatccatcgatccaaaaacaagtggaaatttcacctgaaggatgggattatgaatcttaacggacgtgactacatcttctcaaaagccatcggcgatgctgagtggtga

SEQ ID NO: 3623 - RNA, 1131 nt, synthetic construct
  misc_feature 1..1131: note = derived and/or modified sequence opt4 fromTF2AA__Homo_sapiens__AAF26776
  source 1..1131: mol_type = other RNA
atggccaacagcgccaacaccaacaccgtgcccaagctgtacagaagcgtgatcgaggacgtgatcaacgacgtgagagacatcttcctggacgacggcgtggacgagcaggtgctgatggagctgaagaccctgtgggagaacaagctgatgcagagcagagccgtggacggcttccacagcgaggagcagcagctgctgctgcaggtgcagcagcagcaccagccccagcagcagcagcaccaccaccaccaccaccaccagcaggcccagccccagcagaccgtgccccagcaggcccagacccagcaggtgctgatccccgccagccagcaggccaccgccccccaggtgatcgtgcccgacagcaagctgatccagcacatgaacgccagcaacatgagcgccgccgccaccgccgccaccctggccctgcccgccggcgtgacccccgtgcagcagatcctgaccaacagcggccagctgctgcaggtggtgagagccgccaacggcgcccagtacatcttccagccccagcagagcgtggtgctgcagcagcaggtgatcccccagatgcagcccggcggcgtgcaggcccccgtgatccagcaggtgctggcccccctgcccggcggcatcagcccccagaccggcgtgatcatccagccccagcagatcctgttcaccggcaacaagacccaggtgatccccaccaccgtggccgcccccacccccgcccaggcccagatcaccgccaccggccagcagcagccccaggcccagcccgcccagacccaggcccccctggtgctgcaggtggacggcaccggcgacaccagcagcgaggaggacgaggacgaggaggaggactacgacgacgacgaggaggaggacaaggagaaggacggcgccgaggacggccaggtggaggaggagcccctgaacagcgaggacgacgtgagcgacgaggagggccaggagctgttcgacaccgagaacgtggtggtgtgccagtacgacaagatccacagaagcaagaacaagtggaagttccacctgaaggacggcatcatgaacctgaacggcagagactacatcttcagcaaggccatcggcgacgccgagtggtga

SEQ ID NO: 3624 - RNA, 1131 nt, synthetic construct
  misc_feature 1..1131: note = derived and/or modified sequence opt5 fromTF2AA__Homo_sapiens__AAF26776
  source 1..1131: mol_type = other RNA
atggccaacagcgctaataccaacacagtgcccaagctgtacagatccgtcatcgaggacgttattaatgatgtgcgggacatcttcctcgatgacggcgtggatgaacaggtcctgatggagcttaaaacgctgtgggaaaacaagctcatgcaatctcgcgccgtggacgggtttcacagcgaggaacagcagctgcttctgcaggttcaacagcagcatcagcctcaacagcagcagcaccatcaccatcaccaccatcaacaggcgcagccgcaacagaccgtgccccagcaggctcaaacacagcaggtcctcattcctgcctcccagcaagccaccgctccccaggtgatcgttcctgattctaaactgattcagcacatgaatgccagcaacatgtccgctgccgcgacagccgctaccctggccctccccgctggagtgacacctgtccagcaaatcctgaccaattctggccagcttctccaggtggtgagagccgcgaacggggcccagtatatcttccaaccgcagcagagcgtcgttctccaacaacaggtgattccccagatgcagcctggaggcgtgcaggctcccgtcatccaacaggtgctggcccctcttcccgggggaatttccccgcagacgggcgttatcattcagcctcagcagatcctgtttaccggcaataagacacaagtgattcccaccacagtcgctgcccctacccccgcccaggctcagatcacggcgacagggcaacagcagccccaggcccaacctgctcagacccaggccccgctcgtgctgcaggttgacggaacaggcgataccagctctgaggaggacgaagatgaggaagaggactacgatgacgacgaggaagaggataaagaaaaggacggggccgaggatggacaagtggaagaggagcccctgaactccgaagacgatgtcagcgacgaggaaggccaggagctgttcgataccgaaaatgtggtcgtgtgccagtatgacaagatccatcggtctaaaaacaagtggaaatttcacctgaaggatgggattatgaatcttaacggacgcgactacatcttctccaaagctattggcgatgccgagtggtga

SEQ ID NO: 3625 - protein, 567 aa, synthetic construct
  REGION 1..567: note = TGFR2__Homo_sapiens__P37173
MGRGLLRGLWPLHIVLWTRIASTIPPHVQKSVNNDMIVTDNNGAVKFPQLCKFCDVRFSTCDNQKSCMSNCSITSICEKPQEVCVAVWRKNDENITLETVCHDPKLPYHDFILEDAASPKCIMKEKKKPGETFFMCSCSSDECNDNIIFSEEYNTSNPDLLLVIFQVTGISLLPPLGVAISVIIIFYCYRVNRQQKLSSTWETGKTRKLMEFSEHCAIILEDDRSDISSTCANNINHNTELLPIELDTLVGKGRFAEVYKAKLKQNTSEQFETVAVKIFPYEEYASWKTEKDIFSDINLKHENILQFLTAEERKTELGKQYWLITAFHAKGNLQEYLTRHVISWEDLRKLGSSLARGIAHLHSDHTPCGRPKMPIVHRDLKSSNILVKNDLTCCLCDFGLSLRLDPTLSVDDLANSGQVGTARYMAPEVLESRMNLENVESFKQTDVYSMALVLWEMTSRCNAVGEVKDYEPPFGSKVREHPCVESMKDNVLRDRGRPEIPSFWLNHQGIQMVCETLTECWDHDPEARLTAQCVAERFSELEHLDRLSGRSCSEEKIPEDGSLNTTK

SEQ ID NO: 3626 - RNA, 1704 nt, synthetic construct
  misc_feature 1..1704: note = TGFR2__Homo_sapiens__AAT70724
  source 1..1704: mol_type = other RNA
atgggtcgggggctgctcaggggcctgtggccgctgcacatcgtcctgtggacgcgtatcgccagcacgatcccaccgcacgttcagaagtcggttaataacgacatgatagtcactgacaacaacggtgcagtcaagtttccacaactgtgtaaattttgtgatgtgagattttccacctgtgacaaccagaaatcctgcatgagcaactgcagcatcacctccatctgtgagaagccacaggaagtctgtgtggctgtatggagaaagaatgacgagaacataacactagagacagtttgccatgaccccaagctcccctaccatgactttattctggaagatgctgcttctccaaagtgcattatgaaggaaaaaaaaaagcctggtgagactttcttcatgtgttcctgtagctctgatgagtgcaatgacaacatcatcttctcagaagaatataacaccagcaatcctgacttgttgctagtcatatttcaagtgacaggcatcagcctcctgccaccactgggagttgccatatctgtcatcatcatcttctactgctaccgcgttaaccggcagcagaagctgagttcaacctgggaaaccggcaagacgcggaagctcatggagttcagcgagcactgtgccatcatcctggaagatgaccgctctgacatcagctccacgtgtgccaacaacatcaaccacaacacagagctgctgcccattgagctggacaccctggtggggaaaggtcgctttgctgaggtctataaggccaagctgaagcagaacacttcagagcagtttgagacagtggcagtcaagatctttccctatgaggagtatgcctcttggaagacagagaaggacatcttctcagacatcaatctgaagcatgagaacatactccagttcctgacggctgaggagcggaagacggagttggggaaacaatactggctgatcaccgccttccacgccaagggcaacctacaggagtacctgacgcggcatgtcatcagctgggaggacctgcgcaagctgggcagctccctcgcccgggggattgctcacctccacagtgatcacactccatgtgggaggcccaagatgcccatcgtgcacagggacctcaagagctccaatatcctcgtgaagaacgacctaacctgctgcctgtgtgactttgggctttccctgcgtctggaccctactctgtctgtggatgacctggctaacagtgggcaggtgggaactgcaagatacatggctccagaagtcctagaatccaggatgaatttggagaatgttgagtccttcaagcagaccgatgtctactccatggctctggtgctctgggaaatgacatctcgctgtaatgcagtgggagaagtaaaagattatgagcctccatttggttccaaggtgcgggagcacccctgtgtcgaaagcatgaaggacaacgtgttgagagatcgagggcgaccagaaattcccagcttctggctcaaccaccagggcatccagatggtgtgtgagacgttgactgagtgctgggaccacgacccagaggcccgtctcacagcccagtgtgtggcagaacgcttcagtgagctggagcatctggacaggctctcggggaggagctgctcggaggagaagattcctgaagacggctccctaaacactaccaaatag

SEQ ID NO: 3627 - RNA, 1704 nt, synthetic construct
  misc_feature 1..1704: note = derived and/or modified sequence opt1 fromTGFR2__Homo_sapiens__AAT70724
  source 1..1704: mol_type = other RNA
atgggccgcgggctgctccggggcctgtggcccctgcacatcgtgctctggacccgcatcgccagcaccatcccgccccacgtccagaagtccgtgaacaacgacatgatcgtgacggacaacaacggggccgtcaagttcccccagctgtgcaagttctgcgacgtgcggttcagcacgtgcgacaaccagaagtcctgcatgagcaactgctccatcaccagcatctgcgagaagccccaggaggtgtgcgtcgcggtgtggcgcaagaacgacgagaacatcaccctggagaccgtgtgccacgacccgaagctcccctaccacgacttcatcctggaggacgccgcctcccccaagtgcatcatgaaggagaagaagaagcccggcgagaccttcttcatgtgcagctgctccagcgacgagtgcaacgacaacatcatcttctccgaggagtacaacaccagcaacccggacctgctcctggtcatcttccaggtgaccgggatctccctgctcccgcccctgggcgtggccatcagcgtcatcatcatcttctactgctaccgggtgaaccgccagcagaagctgtccagcacgtgggagaccggcaagacccggaagctcatggagttctccgagcactgcgccatcatcctggaggacgaccgcagcgacatctccagcacgtgcgcgaacaacatcaaccacaacaccgagctgctccccatcgagctggacaccctggtggggaagggccggttcgccgaggtctacaaggccaagctcaagcagaacaccagcgagcagttcgagaccgtggccgtgaagatcttcccctacgaggagtacgcgtcctggaagacggagaaggacatcttcagcgacatcaacctgaagcacgagaacatcctgcagttcctcaccgccgaggagcgcaagaccgagctggggaagcagtactggctgatcaccgccttccacgccaagggcaacctccaggagtacctgacgcggcacgtcatctcctgggaggacctgcgcaagctcgggagctccctggcccggggcatcgcgcacctccacagcgaccacaccccctgcggccgccccaagatgcccatcgtgcaccgggacctgaagtccagcaacatcctggtgaagaacgacctgacctgctgcctctgcgacttcgggctgtccctgcgcctcgacccgaccctgagcgtcgacgacctggccaactccggccaggtggggacggcccggtacatggcccccgaggtgctcgagagccgcatgaacctggagaacgtcgagtccttcaagcagaccgacgtgtacagcatggccctggtcctctgggagatgacctcccggtgcaacgcggtgggcgaggtgaaggactacgagccgcccttcggcagcaaggtccgcgagcacccctgcgtggagtccatgaaggacaacgtgctgcgggaccgcgggcgccccgagatccccagcttctggctgaaccaccagggcatccagatggtctgcgagaccctcacggagtgctgggaccacgaccccgaggcccggctgaccgcccagtgcgtggccgagcgcttctccgagctggagcacctggaccggctcagcgggcgcagctgctccgaggagaagatcccggaggacggcagcctgaacaccaccaagtga

SEQ ID NO: 3628 - RNA, 1704 nt, synthetic construct
  misc_feature 1..1704: note = derived and/or modified sequence opt2 fromTGFR2__Homo_sapiens__AAT70724
  source 1..1704: mol_type = other RNA
atgggccgcggcctcctccgcggcctctggcccctccacatcgtcctctggacccgcatcgcctccaccatccccccccacgtccagaagtccgtcaacaacgacatgatcgtcaccgacaacaacggcgccgtcaagttcccccagctctgcaagttctgcgacgtccgcttctccacctgcgacaaccagaagtcctgcatgtccaactgctccatcacctccatctgcgagaagccccaggaggtctgcgtcgccgtctggcgcaagaacgacgagaacatcaccctcgagaccgtctgccacgaccccaagctcccctaccacgacttcatcctcgaggacgccgcctcccccaagtgcatcatgaaggagaagaagaagcccggcgagaccttcttcatgtgctcctgctcctccgacgagtgcaacgacaacatcatcttctccgaggagtacaacacctccaaccccgacctcctcctcgtcatcttccaggtcaccggcatctccctcctcccccccctcggcgtcgccatctccgtcatcatcatcttctactgctaccgcgtcaaccgccagcagaagctctcctccacctgggagaccggcaagacccgcaagctcatggagttctccgagcactgcgccatcatcctcgaggacgaccgctccgacatctcctccacctgcgccaacaacatcaaccacaacaccgagctcctccccatcgagctcgacaccctcgtcggcaagggccgcttcgccgaggtctacaaggccaagctcaagcagaacacctccgagcagttcgagaccgtcgccgtcaagatcttcccctacgaggagtacgcctcctggaagaccgagaaggacatcttctccgacatcaacctcaagcacgagaacatcctccagttcctcaccgccgaggagcgcaagaccgagctcggcaagcagtactggctcatcaccgccttccacgccaagggcaacctccaggagtacctcacccgccacgtcatctcctgggaggacctccgcaagctcggctcctccctcgcccgcggcatcgcccacctccactccgaccacaccccctgcggccgccccaagatgcccatcgtccaccgcgacctcaagtcctccaacatcctcgtcaagaacgacctcacctgctgcctctgcgacttcggcctctccctccgcctcgaccccaccctctccgtcgacgacctcgccaactccggccaggtcggcaccgcccgctacatggcccccgaggtcctcgagtcccgcatgaacctcgagaacgtcgagtccttcaagcagaccgacgtctactccatggccctcgtcctctgggagatgacctcccgctgcaacgccgtcggcgaggtcaaggactacgagccccccttcggctccaaggtccgcgagcacccctgcgtcgagtccatgaaggacaacgtcctccgcgaccgcggccgccccgagatcccctccttctggctcaaccaccagggcatccagatggtctgcgagaccctcaccgagtgctgggaccacgaccccgaggcccgcctcaccgcccagtgcgtcgccgagcgcttctccgagctcgagcacctcgaccgcctctccggccgctcctgctccgaggagaagatccccgaggacggctccctcaacaccaccaagtga

SEQ ID NO: 3629 - RNA, 1704 nt, synthetic construct
  misc_feature 1..1704: note = derived and/or modified sequence opt3 fromTGFR2__Homo_sapiens__AAT70724
  source 1..1704: mol_type = other RNA
atgggcagagggctgctcaggggactttggcccctgcacatcgtgttgtggacccggattgccagcacaatacctccacatgtccagaagtccgttaacaatgacatgatcgtgactgataacaatggtgctgtaaaattcccgcaattatgcaagttttgtgacgtgcgcttctctacgtgcgataaccagaaatcatgtatgagtaattgcagcattacctccatctgtgagaagccccaggaagtctgcgtggcagtttggcgtaaaaacgacgagaatattacactggaaactgtgtgtcacgatcctaagctaccataccatgactttatcctcgaggatgccgcgtctcccaagtgcataatgaaagaaaagaaaaagcctggcgagaccttctttatgtgttcgtgctcaagcgacgagtgtaacgataatatcattttcagtgaagagtataacacatccaatccagacctgcttctggtcatctttcaggtgaccgggatttctttgctgccccctctcggagtagctatcagcgttataattatcttctactgctatcgagtgaacagacaacagaaactgtcctcaacttgggaaacaggcaagaccaggaagctcatggagtttagtgagcactgcgccattatcttagaagatgaccggagcgatatctcttccacgtgtgcaaataacattaatcataacactgagctgcttccaatagaattggacaccctggtcggtaaagggcgcttcgccgaggtgtacaaggctaaactaaagcagaacacatcagaacagtttgagactgtggcagtcaaaatcttcccgtatgaggaatacgccagctggaagaccgagaaagacatttttagtgatatcaatctcaagcacgaaaacatactgcaattccttacagctgaggaaagaaagaccgagctgggaaaacagtattggttgattacggccttccacgcgaagggcaatctccaggagtacctgactaggcatgttatctcttgggaagacttacggaaactgggctccagcctcgcacgcgggatcgcccaccttcattcggatcacacaccctgcggacgacctaagatgccaattgtgcacagagacctgaaatcttccaacatcttggtaaagaatgatctaacctgttgcctgtgtgactttggtctctcactgaggcttgatcccactctgagtgtggacgatttggctaacagcggccaggtcgggacagcccggtacatggcacctgaggtgctcgaatcccgtatgaatctggagaacgttgaatctttcaagcaaaccgacgtgtatagcatggctttagtcctgtgggagatgacgtcacgctgcaatgccgtgggagaggtaaaagattacgaaccaccctttggcagtaaggttagagagcatccgtgtgtggaatccatgaaagacaacgtcctaagggaccggggtcgacctgagattcccagcttctggctcaatcaccaggggatacagatggtgtgcgagaccctgacagaatgttgggatcatgacccagaggcgcgccttactgcccaatgcgtcgcagaaagattttctgagttggaacacctggataggctctcaggacggagttgtagcgaggagaagatccctgaagacggctccctgaacaccacaaaatga

SEQ ID NO: 3630 - RNA, 1704 nt, synthetic construct
  misc_feature 1..1704: note = derived and/or modified sequence opt4 fromTGFR2__Homo_sapiens__AAT70724
  source 1..1704: mol_type = other RNA
atgggcagaggcctgctgagaggcctgtggcccctgcacatcgtgctgtggaccagaatcgccagcaccatccccccccacgtgcagaagagcgtgaacaacgacatgatcgtgaccgacaacaacggcgccgtgaagttcccccagctgtgcaagttctgcgacgtgagattcagcacctgcgacaaccagaagagctgcatgagcaactgcagcatcaccagcatctgcgagaagccccaggaggtgtgcgtggccgtgtggagaaagaacgacgagaacatcaccctggagaccgtgtgccacgaccccaagctgccctaccacgacttcatcctggaggacgccgccagccccaagtgcatcatgaaggagaagaagaagcccggcgagaccttcttcatgtgcagctgcagcagcgacgagtgcaacgacaacatcatcttcagcgaggagtacaacaccagcaaccccgacctgctgctggtgatcttccaggtgaccggcatcagcctgctgccccccctgggcgtggccatcagcgtgatcatcatcttctactgctacagagtgaacagacagcagaagctgagcagcacctgggagaccggcaagaccagaaagctgatggagttcagcgagcactgcgccatcatcctggaggacgacagaagcgacatcagcagcacctgcgccaacaacatcaaccacaacaccgagctgctgcccatcgagctggacaccctggtgggcaagggcagattcgccgaggtgtacaaggccaagctgaagcagaacaccagcgagcagttcgagaccgtggccgtgaagatcttcccctacgaggagtacgccagctggaagaccgagaaggacatcttcagcgacatcaacctgaagcacgagaacatcctgcagttcctgaccgccgaggagagaaagaccgagctgggcaagcagtactggctgatcaccgccttccacgccaagggcaacctgcaggagtacctgaccagacacgtgatcagctgggaggacctgagaaagctgggcagcagcctggccagaggcatcgcccacctgcacagcgaccacaccccctgcggcagacccaagatgcccatcgtgcacagagacctgaagagcagcaacatcctggtgaagaacgacctgacctgctgcctgtgcgacttcggcctgagcctgagactggaccccaccctgagcgtggacgacctggccaacagcggccaggtgggcaccgccagatacatggcccccgaggtgctggagagcagaatgaacctggagaacgtggagagcttcaagcagaccgacgtgtacagcatggccctggtgctgtgggagatgaccagcagatgcaacgccgtgggcgaggtgaaggactacgagccccccttcggcagcaaggtgagagagcacccctgcgtggagagcatgaaggacaacgtgctgagagacagaggcagacccgagatccccagcttctggctgaaccaccagggcatccagatggtgtgcgagaccctgaccgagtgctgggaccacgaccccgaggccagactgaccgcccagtgcgtggccgagagattcagcgagctggagcacctggacagactgagcggcagaagctgcagcgaggagaagatccccgaggacggcagcctgaacaccaccaagtga

SEQ ID NO: 3631 - RNA, 1704 nt, synthetic construct
  misc_feature 1..1704: note = derived and/or modified sequence opt5 fromTGFR2__Homo_sapiens__AAT70724
  source 1..1704: mol_type = other RNA
atgggcagagggctgctccggggactgtggccccttcacatcgtgctgtggacccgcattgccagcacaatccctccgcatgtccagaagtccgttaacaatgacatgattgtgacggataacaatggcgctgtgaaattcccccaactctgcaagttttgtgacgtcagattctctacctgcgataaccagaaaagctgtatgtccaattgctctatcacaagcatttgtgagaagcctcaggaagtgtgcgttgccgtgtggcggaaaaacgacgagaatatcaccctggaaacagtctgtcacgatcccaagctgccttaccatgactttatcctggaggatgcggcttcccccaagtgcattatgaaagaaaagaaaaagcctggggagaccttctttatgtgttcttgcagctccgacgagtgtaacgataatatcattttcagcgaagagtataacacatctaatccggacctcctgctggtgatctttcaggttaccggaatttccctcctgccccctcttggcgtggccatcagcgtcattatcatcttctactgctatcgcgtgaacagacaacagaaactgtcttccacgtgggaaaccgggaagacacggaagctcatggagtttagcgagcactgcgccattatcctggaagatgaccgctctgatatttccagcacctgtgctaataacatcaatcataacacagagcttctgcccattgaactcgacaccctggtgggaaaaggcagattcgccgaggtctacaaggctaaactgaagcagaacacgtccgaacagtttgagacagttgccgtgaaaatcttcccttatgaggaatacgcgtcttggaagaccgagaaagacatctttagcgatattaatctcaagcacgaaaacatcctgcaattccttacagccgaggaacggaagaccgagctgggcaaacagtattggctcattaccgctttccacgccaaggggaatctgcaggagtaccttacacgccatgtgatctcctgggaagacctgagaaaactcggaagctctctggctcggggcattgcccaccttcattccgatcacacgccctgcgggcgcccgaagatgcctatcgtccacagagacctcaaaagctctaacatcctggtgaagaatgatcttacctgttgcctgtgtgactttggactcagcctgcggcttgatcccacactgtccgttgacgatctcgcgaactctggccaggtggggaccgcccgctacatggctcctgaggtcctggaaagcagaatgaatctggagaacgtggaatccttcaagcaaacagacgtttatagcatggccctcgtgctgtgggagatgacctctcggtgcaatgctgtcggagaggtgaaagattacgaacctccctttggctccaaggtcagagagcatccctgtgtggaaagcatgaaagacaacgttcttcgcgaccggggcagaccggagattccctctttctggctgaatcaccaggggatccagatggtgtgcgagacgctcacagaatgttgggatcatgaccctgaggcccgcctgaccgcccaatgcgtcgctgaacggttttccgagctggaacaccttgatagactcagcggacgctcctgttctgaggagaagattcccgaagacggcagcctgaacaccacaaaatga

SEQ ID NO: 3632 - protein, 684 aa, synthetic construct [sequence omitted]

SEQ ID NO: 3633 - RNA, 2055 nt, synthetic construct
  misc_feature 1..2055: note = TGM-4__Homo_sapiens__BAG35778
  source 1..2055: mol_type = other RNA
atgatggatgcatcaaaagagctgcaagttctccacattgacttcttgaatcaggacaacgccgtttctcaccacacatgggagttccaaacgagcagtcctgtgttccggcgaggacaggtgtttcacctgcggctggtgctgaaccagcccccacaatcctaccaccaactgaaactggaattcagcacagggccgaatcctagcatcgccaaacacaccctggtggtgctcgacccgaggacgccctcagaccactacaactggcaggcaacccttcaaaatgagtctggcaaagaggtcacagtggctgtcaccagttcccccaatgccatcctgggcaagtaccaactaaacgtgaaaactggaaaccacatccttaagtctgaagaaaacatcctataccttctcttcaacccatggtgtaaagaggacatggttttcatgcctgatgaggacgagcgcaaagagtacatcctcaatgacacgggctgccattacgtgggggctgccagaagtatcaaatgcaaaccctggaactttggtcagtttgagaaaaatgtcctggactgctgcatttccctgctgactgagagctccctcaagcccacagataggagggaccccgtgctggtgtgcagggccatgtgtgctatgatgagctttgagaaaggccagggcgtgctcattgggaattggactggggactacgaaggtggcacagccccatacaagtggacaggcagtgccccgatcctgcagcagtactacaacacgaagcaggctgtgtgctttggccagtgctgggtgtttgctgggatcctgactacagtgctgagagcgttgggcatcccagcacgcagtgtgacaggcttcgattcagctcacgacacagaaaggaacctcacggtggacacctatgtgaatgagaatggcgagaaaatcaccagtatgacccacgactctgtctggaatttccatgtgtggacggatgcctggatgaagcgaccggatctgcccaagggctacgacggctggcaggctgtggacgcaacgccgcaggagcgaagccagggtgtcttctgctgtgggccatcaccactgaccgccatccgcaaaggtgacatctttattgtctatgacaccagattcgtcttctcagaagtgaatggtgacaggctcatctggttggtgaagatggtgaatgggcaggaggagttacacgtaatttcaatggagaccacaagcatcgggaaaaacatcagcaccaaggcagtgggccaagacaggcggagagatatcacctatgagtacaagtatccagaaggctcctctgaggagaggcaggtcatggatcatgccttcctccttctcagttctgagagggagcacagacgacctgtaaaagagaactttcttcacatgtcggtacaatcagatgatgtgctgctgggaaactctgttaatttcaccgtgattcttaaaaggaagaccgctgccctacagaatgtcaacatcttgggctcctttgaactacagttgtacactggcaagaagatggcaaaactgtgtgacctcaataagacctcgcagatccaaggtcaagtatcagaagtgactctgaccttggactccaagacctacatcaacagcctggctatattagatgatgagccagttatcagaggtttcatcattgcggaaattgtggagtctaaggaaatcatggcctctgaagtattcacgtctttccagtaccctgagttctctatagagttgcctaacacaggcagaattggccagctacttgtctgcaattgtatcttcaagaataccctggccatccctttgactgacgtcaagttctctttggaaagcctgggcatctcctcactacagacctctgaccatgggacggtgcagcctggtgagaccatccaatcccaaataaaatgcaccccaataaaaactggacccaagaaatttatcgtcaagttaagttccaaacaagtgaaagagattaatgctcagaagattgttctcatcaccaagtag

SEQ ID NO: 3634 - RNA, 2055 nt, synthetic construct
  misc_feature 1..2055: note = derived and/or modified sequence opt1 fromTGM-4__Homo_sapiens__BAG35778
  source 1..2055: mol_type = other RNA
atgatggacgccagcaaggagctccaggtgctccacatcgacttcctgaaccaggacaacgccgtctcccaccacacctgggagttccagaccagctcccccgtgttccgccggggccaggtgttccacctccgcctggtcctgaaccagccgccccagagctaccaccagctgaagctcgagttctccacggggcccaaccccagcatcgcgaagcacaccctggtggtgctggacccgcggaccccctccgaccactacaactggcaggccaccctccagaacgagagcggcaaggaggtcacggtggccgtgacctccagccccaacgccatcctggggaagtaccagctgaacgtcaagaccggcaaccacatcctcaagtccgaggagaacatcctgtacctgctgttcaacccctggtgcaaggaggacatggtgttcatgccggacgaggacgagcgcaaggagtacatcctgaacgacaccgggtgccactacgtgggcgccgcgcggagcatcaagtgcaagccctggaacttcggccagttcgagaagaacgtcctggactgctgcatctccctcctgacggagagctccctgaagcccaccgaccgccgggaccccgtgctcgtgtgccgcgccatgtgcgccatgatgagcttcgagaaggggcagggcgtcctgatcgggaactggaccggcgactacgagggcgggaccgccccgtacaagtggacgggctccgcgcccatcctgcagcagtactacaacaccaagcaggccgtgtgcttcgggcagtgctgggtgttcgccggcatcctcaccaccgtcctgcgggccctggggatccccgcccgcagcgtgacgggcttcgactccgcgcacgacaccgagcggaacctcaccgtggacacctacgtcaacgagaacggcgagaagatcacgagcatgacccacgacagcgtgtggaacttccacgtgtggaccgacgcctggatgaagcgccccgacctgccgaaggggtacgacggctggcaggccgtcgacgccacgccccaggagcggtcccagggggtgttctgctgcggccccagccccctgaccgccatccgcaagggggacatcttcatcgtctacgacacccggttcgtgttctccgaggtgaacggcgaccgcctcatctggctggtcaagatggtgaacggccaggaggagctgcacgtgatcagcatggagaccacctccatcgggaagaacatcagcacgaaggcggtcggccaggaccggcgccgggacatcacctacgagtacaagtacccggaggggtccagcgaggagcgccaggtgatggaccacgccttcctcctgctgtccagcgagcgggagcaccgccgccccgtgaaggagaacttcctccacatgtccgtccagagcgacgacgtgctgctgggcaactccgtgaacttcaccgtcatcctcaagcggaagaccgccgccctgcagaacgtgaacatcctggggagcttcgagctccagctgtacacgggcaagaagatggccaagctgtgcgacctcaacaagacctcccagatccagggccaggtgagcgaggtcaccctgaccctggactccaagacgtacatcaacagcctcgcgatcctggacgacgagcccgtgatccgcgggttcatcatcgccgagatcgtggagtccaaggagatcatggccagcgaggtcttcaccagcttccagtaccccgagttctccatcgagctgccgaacaccggccggatcgggcagctgctcgtgtgcaactgcatcttcaagaacaccctggccatccccctgaccgacgtgaagttcagcctcgagtccctgggcatcagctccctgcagacgagcgaccacgggaccgtccagcccggcgagaccatccagtcccagatcaagtgcacccccatcaagacgggcccgaagaagttcatcgtgaagctcagctccaagcaggtcaaggagatcaacgcccagaagatcgtgctgatcaccaagtga

SEQ ID NO: 3635 - RNA, 2055 nt, synthetic construct
  misc_feature 1..2055: note = derived and/or modified sequence opt2 fromTGM-4__Homo_sapiens__BAG35778
  source 1..2055: mol_type = other RNA
atgatggacgcctccaaggagctccaggtcctccacatcgacttcctcaaccaggacaacgccgtctcccaccacacctgggagttccagacctcctcccccgtcttccgccgcggccaggtcttccacctccgcctcgtcctcaaccagcccccccagtcctaccaccagctcaagctcgagttctccaccggccccaacccctccatcgccaagcacaccctcgtcgtcctcgacccccgcaccccctccgaccactacaactggcaggccaccctccagaacgagtccggcaaggaggtcaccgtcgccgtcacctcctcccccaacgccatcctcggcaagtaccagctcaacgtcaagaccggcaaccacatcctcaagtccgaggagaacatcctctacctcctcttcaacccctggtgcaaggaggacatggtcttcatgcccgacgaggacgagcgcaaggagtacatcctcaacgacaccggctgccactacgtcggcgccgcccgctccatcaagtgcaagccctggaacttcggccagttcgagaagaacgtcctcgactgctgcatctccctcctcaccgagtcctccctcaagcccaccgaccgccgcgaccccgtcctcgtctgccgcgccatgtgcgccatgatgtccttcgagaagggccagggcgtcctcatcggcaactggaccggcgactacgagggcggcaccgccccctacaagtggaccggctccgcccccatcctccagcagtactacaacaccaagcaggccgtctgcttcggccagtgctgggtcttcgccggcatcctcaccaccgtcctccgcgccctcggcatccccgcccgctccgtcaccggcttcgactccgcccacgacaccgagcgcaacctcaccgtcgacacctacgtcaacgagaacggcgagaagatcacctccatgacccacgactccgtctggaacttccacgtctggaccgacgcctggatgaagcgccccgacctccccaagggctacgacggctggcaggccgtcgacgccaccccccaggagcgctcccagggcgtcttctgctgcggcccctcccccctcaccgccatccgcaagggcgacatcttcatcgtctacgacacccgcttcgtcttctccgaggtcaacggcgaccgcctcatctggctcgtcaagatggtcaacggccaggaggagctccacgtcatctccatggagaccacctccatcggcaagaacatctccaccaaggccgtcggccaggaccgccgccgcgacatcacctacgagtacaagtaccccgagggctcctccgaggagcgccaggtcatggaccacgccttcctcctcctctcctccgagcgcgagcaccgccgccccgtcaaggagaacttcctccacatgtccgtccagtccgacgacgtcctcctcggcaactccgtcaacttcaccgtcatcctcaagcgcaagaccgccgccctccagaacgtcaacatcctcggctccttcgagctccagctctacaccggcaagaagatggccaagctctgcgacctcaacaagacctcccagatccagggccaggtctccgaggtcaccctcaccctcgactccaagacctacatcaactccctcgccatcctcgacgacgagcccgtcatccgcggcttcatcatcgccgagatcgtcgagtccaaggagatcatggcctccgaggtcttcacctccttccagtaccccgagttctccatcgagctccccaacaccggccgcatcggccagctcctcgtctgcaactgcatcttcaagaacaccctcgccatccccctcaccgacgtcaagttctccctcgagtccctcggcatctcctccctccagacctccgaccacggcaccgtccagcccggcgagaccatccagtcccagatcaagtgcacccccatcaagaccggccccaagaagttcatcgtcaagctctcctccaagcaggtcaaggagatcaacgcccagaagatcgtcctcatcaccaagtga

SEQ ID NO: 3636 - RNA, 2055 nt, synthetic construct
  misc_feature 1..2055: note = derived and/or modified sequence opt3 fromTGM-4__Homo_sapiens__BAG35778
  source 1..2055: mol_type = other RNA
atgatggacgccagcaaggagctgcaagtgctccacatcgatttccttaaccaagacaatgctgtctcccatcacacctgggaatttcagacatcttcacccgttttcagaaggggccaggtgtttcatctgcggttggtattaaaccagcctccacaaagttaccaccagctgaaactagagttcagcactgggccgaatccctccattgcaaagcatacgctcgtggtcctggatcctcgcaccccatctgaccactataactggcaggccacacttcagaatgaatcgggaaaagaggtgactgttgcggtgacctcaagccccaacgctatactgggtaagtaccaattgaatgtcaaaacaggcaaccacatcctcaagagtgaagagaatattctgtatctgctctttaacccttggtgcaaggaggatatggtgttcatgccagacgaagatgagcgaaaagaatacatcttaaatgacaccgggtgtcattatgtaggagccgcacgttccattaagtgcaaaccctggaactttggccagttcgagaagaatgttctggattgttgcatctctcttttgactgagagctccctgaaacctacagacagaagggatccagtgctagtctgtcgggccatgtgcgctatgatgtcatttgaaaagggtcagggggtgctcataggaaactggaccggcgactacgagggcgggacggcaccgtataagtggactggaagtgcccccatcctgcagcaatactacaataccaaacaggctgtgtgtttcggtcagtgctgggtctttgccggcattcttacaactgttctgcgcgcgttggggatccctgcaagaagcgtgaccggattcgattctgcccacgacacagaaaggaacctcaccgtagacacgtatgtgaacgagaatggcgaaaagattacttccatgacacatgattcagtctggaactttcacgtgtggaccgacgcttggatgaaacggccagatctgcccaagggttacgacgggtggcaagccgttgatgcaactcctcaggagcgcagccagggagtgttctgttgcggcccaagtcccttaacagctatccgaaaaggcgacatattcattgtctatgataccagatttgtgttctctgaggtaaatggggacaggctgatctggctcgttaagatggtgaacggacaggaggaacttcacgtcatttccatggaaacgaccagcatcggtaaaaatatctcgacaaaggccgtgggccaagatcggcgtcgcgacattacttacgagtataagtacccggaagggtcttccgaggagagacaggtcatggatcatgcgtttctgttgctatcaagtgaaagggagcaccggcgacctgtgaaagaaaacttcctgcatatgagcgttcagtccgacgacgtgctcctgggaaattctgtaaactttaccgtcatacttaagcgcaaaacagccgcactgcagaatgtgaacatcttgggcagcttcgagctccaactgtatactggtaagaaaatggctaagttatgtgatctgaataagacctcacagattcaggggcaggttagtgaagtgacactaaccctcgactccaaaacttacatcaacagcctggccatacttgatgacgagcccgtcattagaggctttatcatcgctgagattgtggaatctaaggagatcatggcctcagaagtattcacgagttttcaatacccagagttcagcattgagttgcctaatacaggaaggataggccagctgctcgtgtgcaactgcatctttaaaaataccctggcaattccccttactgatgttaagttctccctggaatctttggggatctcgagcctccagacctccgaccacggaacagtccagccaggtgagaccatccaatcacagattaaatgtactcccataaagacaggccctaagaaatttatcgtgaagctgagttctaaacaggtgaaggaaattaacgcccagaaaatcgtcttaattacgaagtga

SEQ ID NO: 3637 - RNA, 2055 nt, synthetic construct
  misc_feature 1..2055: note = derived and/or modified sequence opt4 fromTGM-4__Homo_sapiens__BAG35778
  source 1..2055: mol_type = other RNA
atgatggacgccagcaaggagctgcaggtgctgcacatcgacttcctgaaccaggacaacgccgtgagccaccacacctgggagttccagaccagcagccccgtgttcagaagaggccaggtgttccacctgagactggtgctgaaccagcccccccagagctaccaccagctgaagctggagttcagcaccggccccaaccccagcatcgccaagcacaccctggtggtgctggaccccagaacccccagcgaccactacaactggcaggccaccctgcagaacgagagcggcaaggaggtgaccgtggccgtgaccagcagccccaacgccatcctgggcaagtaccagctgaacgtgaagaccggcaaccacatcctgaagagcgaggagaacatcctgtacctgctgttcaacccctggtgcaaggaggacatggtgttcatgcccgacgaggacgagagaaaggagtacatcctgaacgacaccggctgccactacgtgggcgccgccagaagcatcaagtgcaagccctggaacttcggccagttcgagaagaacgtgctggactgctgcatcagcctgctgaccgagagcagcctgaagcccaccgacagaagagaccccgtgctggtgtgcagagccatgtgcgccatgatgagcttcgagaagggccagggcgtgctgatcggcaactggaccggcgactacgagggcggcaccgccccctacaagtggaccggcagcgcccccatcctgcagcagtactacaacaccaagcaggccgtgtgcttcggccagtgctgggtgttcgccggcatcctgaccaccgtgctgagagccctgggcatccccgccagaagcgtgaccggcttcgacagcgcccacgacaccgagagaaacctgaccgtggacacctacgtgaacgagaacggcgagaagatcaccagcatgacccacgacagcgtgtggaacttccacgtgtggaccgacgcctggatgaagagacccgacctgcccaagggctacgacggctggcaggccgtggacgccaccccccaggagagaagccagggcgtgttctgctgcggccccagccccctgaccgccatcagaaagggcgacatcttcatcgtgtacgacaccagattcgtgttcagcgaggtgaacggcgacagactgatctggctggtgaagatggtgaacggccaggaggagctgcacgtgatcagcatggagaccaccagcatcggcaagaacatcagcaccaaggccgtgggccaggacagaagaagagacatcacctacgagtacaagtaccccgagggcagcagcgaggagagacaggtgatggaccacgccttcctgctgctgagcagcgagagagagcacagaagacccgtgaaggagaacttcctgcacatgagcgtgcagagcgacgacgtgctgctgggcaacagcgtgaacttcaccgtgatcctgaagagaaagaccgccgccctgcagaacgtgaacatcctgggcagcttcgagctgcagctgtacaccggcaagaagatggccaagctgtgcgacctgaacaagaccagccagatccagggccaggtgagcgaggtgaccctgaccctggacagcaagacctacatcaacagcctggccatcctggacgacgagcccgtgatcagaggcttcatcatcgccgagatcgtggagagcaaggagatcatggccagcgaggtgttcaccagcttccagtaccccgagttcagcatcgagctgcccaacaccggcagaatcggccagctgctggtgtgcaactgcatcttcaagaacaccctggccatccccctgaccgacgtgaagttcagcctggagagcctgggcatcagcagcctgcagaccagcgaccacggcaccgtgcagcccggcgagaccatccagagccagatcaagtgcacccccatcaagaccggccccaagaagttcatcgtgaagctgagcagcaagcaggtgaaggagatcaacgcccagaagatcgtgctgatcaccaagtga

SEQ ID NO: 3638 - RNA, 2055 nt, synthetic construct
  misc_feature 1..2055: note = derived and/or modified sequence opt5 fromTGM-4__Homo_sapiens__BAG35778
  source 1..2055: mol_type = other RNA
atgatggacgccagcaaggagctccaggtgctgcacatcgatttcctgaaccaagacaatgctgtctcccatcacacctgggaatttcagacatctagccccgttttcagacggggccaggtgtttcatcttcgcctggtgctcaaccagcctccgcaatcctaccaccagctgaaacttgagttctctacggggcccaatcctagcattgccaagcataccctggtcgtgctcgatcccagaacaccttccgaccactataactggcaggcgaccctgcagaatgaatctggaaaagaggttacagtggctgtcaccagctcccccaacgccatcctgggcaagtaccaactcaatgtgaaaacagggaaccacattctgaaaagcgaagagaatatcctttatctgctctttaacccttggtgcaaggaggatatggttttcatgccggacgaagatgagcggaaagaatacattctgaatgacaccggatgtcattatgtgggcgccgctcgctctatcaagtgcaaaccctggaactttgggcagttcgagaagaatgtccttgattgttgcatctccctgctcacggagagctctctgaaacctaccgacagacgggatcccgtgctggtgtgtcgcgccatgtgcgctatgatgtcctttgaaaagggacagggcgtcctcattggcaactggacaggggactacgagggaggcaccgccccttataagtggacagggagcgcgcccatcctgcagcaatactacaataccaaacaggccgtttgtttcggacagtgctgggtgtttgctggcattcttacgacagtgctgagagccctcgggatcccggctcggtctgtcaccggattcgattccgcccacgacacagaacgcaacctgaccgtggacacctatgttaacgagaatggcgaaaagattacaagcatgacgcatgattccgtgtggaactttcacgtctggaccgacgcgtggatgaaaagacctgatcttcccaagggctacgacgggtggcaagccgtggatgctacacctcaggagcggtctcagggagttttctgttgcggccccagccccctgaccgccatccgcaaaggggacattttcatcgtgtatgatacaagatttgtcttctccgaggtgaatggagaccggctcatctggctggtcaagatggtgaacggccaggaggaactgcacgttattagcatggaaaccacgtctatcgggaaaaatatttccacaaaggctgtgggacaagatcgcagacgggacatcacctacgagtataagtaccctgaaggcagctctgaggagagacaggtcatggatcatgcctttctcctgcttagctccgaacgcgagcaccggagaccggtgaaagaaaacttcctgcatatgtctgttcagagcgacgacgtgctcctgggcaattccgtcaactttaccgtgattcttaagcgcaaaacagccgctctgcagaatgtgaacatcctcgggagcttcgagctgcaactgtataccggaaagaaaatggcgaagctctgtgatctgaataagacatctcagatccagggccaggtttccgaagtcacgcttaccctggacagcaaaacatacattaactctctcgccatcctggatgacgagcccgtgattcgggggtttatcattgctgagatcgtggaatccaaggagatcatggccagcgaagtcttcacctcctttcaataccctgagttctctattgagctgcccaatacaggaagaatcggccagcttctcgtgtgcaactgcatttttaaaaataccctggccatccctctgacggatgttaagttcagcctcgaatccctggggatttctagccttcagacctccgaccacggcacagtgcagcccggagagaccatccaaagccagattaaatgtacaccgatcaagaccggccctaagaaatttatcgtcaagctgtcttccaaacaggtgaaggaaattaacgctcaaaagatcgttctcattacgaagtga

SEQ ID NO: 3639 - protein, 1124 aa, synthetic construct
  REGION 1..1124: note = TIE2__Homo_sapiens__Q02763
MDSLASLVLCGVSLLLSGTVEGAMDLILINSLPLVSDAETSLTCIASGWRPHEPITIGRDFEALMNQHQDPLEVTQDVTREWAKKVVWKREKASKINGAYFCEGRVRGEAIRIRTMKMRQQASFLPATLTMTVDKGDNVNISFKKVLIKEEDAVIYKNGSFIHSVPRHEVPDILEVHLPHAQPQDAGVYSARYIGGNLFTSAFTRLIVRRCEAQKWGPECNHLCTACMNNGVCHEDTGECICPPGFMGRTCEKACELHTFGRTCKERCSGQEGCKSYVFCLPDPYGCSCATGWKGLQCNEACHPGFYGPDCKLRCSCNNGEMCDRFQGCLCSPGWQGLQCEREGIQRMTPKIVDLPDHIEVNSGKFNPICKASGWPLPTNEEMTLVKPDGTVLHPKDFNHTDHFSVAIFTIHRILPPDSGVWVCSVNTVAGMVEKPFNISVKVLPKPLNAPNVIDTGHNFAVINISSEPYFGDGPIKSKKLLYKPVNHYEAWQHIQVTNEIVTLNYLEPRTEYELCVQLVRRGEGGEGHPGPVRRFTTASIGLPPPRGLNLLPKSQTTLNLTWQPIFPSSEDDFYVEVERRSVQKSDQQNIKVPGNLTSVLLNNLHPREQYVVRARVNTKAQGEWSEDLTAWTLSDILPPQPENIKISNITHSSAVISWTILDGYSISSITIRYKVQGKNEDQHVDVKIKNATITQYQLKGLEPETAYQVDIFAENNIGSSNPAFSHELVTLPESQAPADLGGGKMLLIAILGSAGMTCLTVLLAFLIILQLKRANVQRRMAQAFQNVREEPAVQFNSGTLALNRKVKNNPDPTIYPVLDWNDIKFQDVIGEGNFGQVLKARIKKDGLRMDAAIKRMKEYASKDDHRDFAGELEVLCKLGHHPNIINLLGACEHRGYLYLAIEYAPHGNLLDFLRKSRVLETDPAFAIANSTASTLSSQQLLHFAADVARGMDYLSQKQFIHRDLAARNILVGENYVAKIADFGLSRGQEVYVKKTMGRLPVRWMAIESLNYSVYTTNSDVWSYGVLLWEIVSLGGTPYCGMTCAELYEKLPQGYRLEKPLNCDDEVYDLMRQCWREKPYERPSFAQILVSLNRMLEERKTYVNTTLYEKFTYAGIDCSAEEAA

SEQ ID NO: 3640 - RNA, 3375 nt, synthetic construct
  misc_feature 1..3375: note = TIE2__Homo_sapiens__CCDS6519.1
  source 1..3375: mol_type = other RNA
atggactctttagccagcttagttctctgtggagtcagcttgctcctttctggaactgtggaaggtgccatggacttgatcttgatcaattccctacctcttgtatctgatgctgaaacatctctcacctgcattgcctctgggtggcgcccccatgagcccatcaccataggaagggactttgaagccttaatgaaccagcaccaggatccgctggaagttactcaagatgtgaccagagaatgggctaaaaaagttgtttggaagagagaaaaggctagtaagatcaatggtgcttatttctgtgaagggcgagttcgaggagaggcaatcaggatacgaaccatgaagatgcgtcaacaagcttccttcctaccagctactttaactatgactgtggacaagggagataacgtgaacatatctttcaaaaaggtattgattaaagaagaagatgcagtgatttacaaaaatggttccttcatccattcagtgccccggcatgaagtacctgatattctagaagtacacctgcctcatgctcagccccaggatgctggagtgtactcggccaggtatataggaggaaacctcttcacctcggccttcaccaggctgatagtccggagatgtgaagcccagaagtggggacctgaatgcaaccatctctgtactgcttgtatgaacaatggtgtctgccatgaagatactggagaatgcatttgccctcctgggtttatgggaaggacgtgtgagaaggcttgtgaactgcacacgtttggcagaacttgtaaagaaaggtgcagtggacaagagggatgcaagtcttatgtgttctgtctccctgacccctatgggtgttcctgtgccacaggctggaagggtctgcagtgcaatgaagcatgccaccctggtttttacgggccagattgtaagcttaggtgcagctgcaacaatggggagatgtgtgatcgcttccaaggatgtctctgctctccaggatggcaggggctccagtgtgagagagaaggcatacagaggatgaccccaaagatagtggatttgccagatcatatagaagtaaacagtggtaaatttaatcccatttgcaaagcttctggctggccgctacctactaatgaagaaatgaccctggtgaagccggatgggacagtgctccatccaaaagactttaaccatacggatcatttctcagtagccatattcaccatccaccggatcctcccccctgactcaggagtttgggtctgcagtgtgaacacagtggctgggatggtggaaaagcccttcaacatttctgttaaagttcttccaaagcccctgaatgccccaaacgtgattgacactggacataactttgctgtcatcaacatcagctctgagccttactttggggatggaccaatcaaatccaagaagcttctatacaaacccgttaatcactatgaggcttggcaacatattcaagtgacaaatgagattgttacactcaactatttggaacctcggacagaatatgaactctgtgtgcaactggtccgtcgtggagagggtggggaagggcatcctggacctgtgagacgcttcacaacagcttctatcggactccctcctccaagaggtctaaatctcctgcctaaaagtcagaccactctaaatttgacctggcaaccaatatttccaagctcggaagatgacttttatgttgaagtggagagaaggtctgtgcaaaaaagtgatcagcagaatattaaagttccaggcaacttgacttcggtgctacttaacaacttacatcccagggagcagtacgtggtccgagctagagtcaacaccaaggcccagggggaatggagtgaagatctcactgcttggacccttagtgacattcttcctcctcaaccagaaaacatcaagatttccaacattacacactcctcagctgtgatttcttggacaatattggatggctattctatttcttctattactatccgttacaaggttcaaggcaagaatgaagaccagcacgttgatgtgaagataaagaatgccaccatcactcagtatcagctcaagggcctagagcctgaaacagcataccaggtggacatttttgcagagaacaacatagggtcaagcaacccagccttttctcatgaactggtgaccctcccagaatctcaagcaccagcggacctcggaggggggaagatgctgcttatagccatccttggctctgctggaatgacctgcctgactgtgctgttggcctttctgatcatattgcaattgaagagggcaaatgtgcaaaggagaatggcccaagccttccaaaacgtgagggaagaaccagctgtgcagttcaactcagggactctggccctaaacaggaaggtcaaaaacaacccagatcctacaatttatccagtgcttgactggaatgacatcaaatttcaagatgtgattggggagggcaattttggccaagttcttaaggcgcgcatcaagaaggatgggttacggatggatgctgccatcaaaagaatgaaagaatatgcctccaaagatgatcacagggactttgcaggagaactggaagttctttgtaaacttggacaccatccaaacatcatcaatctcttaggagcatgtgaacatcgaggctacttgtacctggccattgagtacgcgccccatggaaaccttctggacttccttcgcaagagccgtgtgctggagacggacccagcatttgccattgccaatagcaccgcgtccacactgtcctcccagcagctccttcacttcgctgccgacgtggcccggggcatggactacttgagccaaaaacagtttatccacagggatctggctgccagaaacattttagttggtgaaaactatgtggcaaaaatagcagattttggattgtcccgaggtcaagaggtgtatgtgaaaaagacaatgggaaggctcccagtgcgctggatggccatcgagtcactgaattacagtgtgtacacaaccaacagtgatgtatggtcctatggtgtgttactatgggagattgttagcttaggaggcacaccctactgcgggatgacttgtgcagaactctacgagaagctgccccagggctacagactggagaagcccctgaactgtgatgatgaggtgtatgatctaatgagacaatgctggcgggagaagccttatgagaggccatcatttgcccagatattggtgtccttaaacagaatgttagaggagcgaaagacctacgtgaataccacgctttatgagaagtttacttatgcaggaattgactgttctgctgaagaagcggcctag

SEQ ID NO: 3641 - RNA, 3375 nt, synthetic construct
  misc_feature 1..3375: note = derived and/or modified sequence opt1 fromTIE2__Homo_sapiens__CCDS6519.1
  source 1..3375: mol_type = other RNA
atggacagcctggcctccctcgtgctgtgcggcgtcagcctgctcctgtccgggaccgtggagggcgccatggacctgatcctcatcaacagcctgcccctggtgtccgacgcggagaccagcctcacgtgcatcgcctccgggtggcgcccgcacgagcccatcaccatcggccgggacttcgaggccctgatgaaccagcaccaggaccccctggaggtcacccaggacgtgacccgcgagtgggccaagaaggtggtctggaagcgggagaaggccagcaagatcaacggggcgtacttctgcgagggccgcgtgcggggcgaggccatccgcatccggacgatgaagatgcgccagcaggcctccttcctccccgccaccctgaccatgaccgtggacaagggggacaacgtcaacatcagcttcaagaaggtgctgatcaaggaggaggacgcggtgatctacaagaacggctccttcatccacagcgtcccgcggcacgaggtgcccgacatcctcgaggtgcacctcccccacgcccagccccaggacgccggggtctactccgcccgctacatcggcgggaacctgttcacgagcgccttcacccggctcatcgtgcgccggtgcgaggcgcagaagtggggcccggagtgcaaccacctgtgcaccgcctgcatgaacaacggcgtgtgccacgaggacaccggggagtgcatctgcccgcccggcttcatggggcgcacgtgcgagaaggcctgcgagctgcacaccttcggccggacctgcaaggagcgctgctccggccaggaggggtgcaagagctacgtcttctgcctccccgacccctacggctgctcctgcgccaccgggtggaagggcctgcagtgcaacgaggcctgccaccccgggttctacggccccgactgcaagctgcggtgcagctgcaacaacggcgagatgtgcgaccgcttccaggggtgcctctgctcccccggctggcaggggctgcagtgcgagcgggagggcatccagcgcatgacgccgaagatcgtggacctgcccgaccacatcgaggtgaacagcgggaagttcaaccccatctgcaaggcgagcggctggcccctcccgaccaacgaggagatgaccctggtcaagcccgacggcaccgtgctgcaccccaaggacttcaaccacacggaccacttctccgtggccatcttcaccatccaccggatcctgcccccggacagcggggtctgggtgtgctccgtcaacaccgtggccggcatggtggagaagcccttcaacatcagcgtcaaggtgctgcccaagcccctgaacgccccgaacgtgatcgacaccgggcacaacttcgccgtcatcaacatctccagcgagccctacttcggcgacgggcccatcaagtccaagaagctcctgtacaagccggtgaaccactacgaggcgtggcagcacatccaggtgacgaacgagatcgtcaccctgaactacctcgagccccgcaccgagtacgagctgtgcgtgcagctggtgcgccggggcgagggcggggagggccaccccgggcccgtccgccggttcaccacggccagcatcggcctcccgccgccccgcggcctgaacctgctccccaagtcccagaccaccctgaacctgacctggcagcccatcttccccagctccgaggacgacttctacgtggaggtggagcggcgcagcgtccagaagtccgaccagcagaacatcaaggtgcccgggaacctcacgagcgtgctgctgaacaacctccacccccgggagcagtacgtcgtgcgcgcccgggtgaacaccaaggcccagggcgagtggtccgaggacctgaccgcctggaccctgagcgacatcctgccgccccagcccgagaacatcaagatctccaacatcacgcacagctccgcggtcatcagctggaccatcctcgacgggtacagcatctccagcatcaccatccgctacaaggtgcagggcaagaacgaggaccagcacgtggacgtcaagatcaagaacgccaccatcacccagtaccagctgaaggggctggagcccgagacggcctaccaggtggacatcttcgccgagaacaacatcggctccagcaacccggcgttctcccacgagctcgtgaccctgcccgagagccaggcccccgccgacctgggcgggggcaagatgctcctgatcgccatcctggggtccgccggcatgacctgcctcaccgtcctgctggcgttcctcatcatcctgcagctgaagcgggccaacgtgcagcgccggatggcccaggccttccagaacgtgcgcgaggagcccgccgtccagttcaacagcgggacgctcgcgctgaaccggaaggtgaagaacaacccggaccccaccatctaccccgtgctggactggaacgacatcaagttccaggacgtcatcggcgagggcaacttcggccaggtgctcaaggcccgcatcaagaaggacgggctgcggatggacgccgccatcaagcgcatgaaggagtacgcctccaaggacgaccaccgggacttcgcgggggagctggaggtgctctgcaagctgggccaccaccccaacatcatcaacctgctcggggcctgcgagcaccgcggctacctgtacctggccatcgagtacgccccgcacggcaacctcctggacttcctgcgcaagagccgggtcctcgagaccgaccccgcgttcgccatcgccaactccaccgccagcacgctgtccagccagcagctgctccacttcgccgcggacgtggcccgcgggatggactacctgtcccagaagcagttcatccaccgggacctggccgcccgcaacatcctcgtgggcgagaactacgtcgccaagatcgcggacttcgggctgagccggggccaggaggtgtacgtgaagaagaccatggggcgcctgcccgtccggtggatggccatcgagtccctcaactacagcgtgtacaccaccaacagcgacgtgtggtcctacggcgtcctgctgtgggagatcgtgagcctcggcgggacgccgtactgcggcatgacctgcgccgagctgtacgagaagctgccccaggggtaccgcctcgagaagcccctgaactgcgacgacgaggtgtacgacctgatgcggcagtgctggcgcgagaagccctacgagcggccgtccttcgcccagatcctcgtcagcctgaaccgcatgctggaggagcggaagacctacgtgaacaccacgctctacgagaagttcacctacgccggcatcgactgctccgcggaggaggccgcctga

SEQ ID NO: 3642 - RNA, 3375 nt, synthetic construct
  misc_feature 1..3375: note = derived and/or modified sequence opt2 fromTIE2__Homo_sapiens__CCDS6519.1
  source 1..3375: mol_type = other RNA
atggactccctcgcctccctcgtcctctgcggcgtctccctcctcctctccggcaccgtcgagggcgccatggacctcatcctcatcaactccctccccctcgtctccgacgccgagacctccctcacctgcatcgcctccggctggcgcccccacgagcccatcaccatcggccgcgacttcgaggccctcatgaaccagcaccaggaccccctcgaggtcacccaggacgtcacccgcgagtgggccaagaaggtcgtctggaagcgcgagaaggcctccaagatcaacggcgcctacttctgcgagggccgcgtccgcggcgaggccatccgcatccgcaccatgaagatgcgccagcaggcctccttcctccccgccaccctcaccatgaccgtcgacaagggcgacaacgtcaacatctccttcaagaaggtcctcatcaaggaggaggacgccgtcatctacaagaacggctccttcatccactccgtcccccgccacgaggtccccgacatcctcgaggtccacctcccccacgcccagccccaggacgccggcgtctactccgcccgctacatcggcggcaacctcttcacctccgccttcacccgcctcatcgtccgccgctgcgaggcccagaagtggggccccgagtgcaaccacctctgcaccgcctgcatgaacaacggcgtctgccacgaggacaccggcgagtgcatctgcccccccggcttcatgggccgcacctgcgagaaggcctgcgagctccacaccttcggccgcacctgcaaggagcgctgctccggccaggagggctgcaagtcctacgtcttctgcctccccgacccctacggctgctcctgcgccaccggctggaagggcctccagtgcaacgaggcctgccaccccggcttctacggccccgactgcaagctccgctgctcctgcaacaacggcgagatgtgcgaccgcttccagggctgcctctgctcccccggctggcagggcctccagtgcgagcgcgagggcatccagcgcatgacccccaagatcgtcgacctccccgaccacatcgaggtcaactccggcaagttcaaccccatctgcaaggcctccggctggcccctccccaccaacgaggagatgaccctcgtcaagcccgacggcaccgtcctccaccccaaggacttcaaccacaccgaccacttctccgtcgccatcttcaccatccaccgcatcctcccccccgactccggcgtctgggtctgctccgtcaacaccgtcgccggcatggtcgagaagcccttcaacatctccgtcaaggtcctccccaagcccctcaacgcccccaacgtcatcgacaccggccacaacttcgccgtcatcaacatctcctccgagccctacttcggcgacggccccatcaagtccaagaagctcctctacaagcccgtcaaccactacgaggcctggcagcacatccaggtcaccaacgagatcgtcaccctcaactacctcgagccccgcaccgagtacgagctctgcgtccagctcgtccgccgcggcgagggcggcgagggccaccccggccccgtccgccgcttcaccaccgcctccatcggcctcccccccccccgcggcctcaacctcctccccaagtcccagaccaccctcaacctcacctggcagcccatcttcccctcctccgaggacgacttctacgtcgaggtcgagcgccgctccgtccagaagtccgaccagcagaacatcaaggtccccggcaacctcacctccgtcctcctcaacaacctccacccccgcgagcagtacgtcgtccgcgcccgcgtcaacaccaaggcccagggcgagtggtccgaggacctcaccgcctggaccctctccgacatcctccccccccagcccgagaacatcaagatctccaacatcacccactcctccgccgtcatctcctggaccatcctcgacggctactccatctcctccatcaccatccgctacaaggtccagggcaagaacgaggaccagcacgtcgacgtcaagatcaagaacgccaccatcacccagtaccagctcaagggcctcgagcccgagaccgcctaccaggtcgacatcttcgccgagaacaacatcggctcctccaaccccgccttctcccacgagctcgtcaccctccccgagtcccaggcccccgccgacctcggcggcggcaagatgctcctcatcgccatcctcggctccgccggcatgacctgcctcaccgtcctcctcgccttcctcatcatcctccagctcaagcgcgccaacgtccagcgccgcatggcccaggccttccagaacgtccgcgaggagcccgccgtccagttcaactccggcaccctcgccctcaaccgcaaggtcaagaacaaccccgaccccaccatctaccccgtcctcgactggaacgacatcaagttccaggacgtcatcggcgagggcaacttcggccaggtcctcaaggcccgcatcaagaaggacggcctccgcatggacgccgccatcaagcgcatgaaggagtacgcctccaaggacgaccaccgcgacttcgccggcgagctcgaggtcctctgcaagctcggccaccaccccaacatcatcaacctcctcggcgcctgcgagcaccgcggctacctctacctcgccatcgagtacgccccccacggcaacctcctcgacttcctccgcaagtcccgcgtcctcgagaccgaccccgccttcgccatcgccaactccaccgcctccaccctctcctcccagcagctcctccacttcgccgccgacgtcgcccgcggcatggactacctctcccagaagcagttcatccaccgcgacctcgccgcccgcaacatcctcgtcggcgagaactacgtcgccaagatcgccgacttcggcctctcccgcggccaggaggtctacgtcaagaagaccatgggccgcctccccgtccgctggatggccatcgagtccctcaactactccgtctacaccaccaactccgacgtctggtcctacggcgtcctcctctgggagatcgtctccctcggcggcaccccctactgcggcatgacctgcgccgagctctacgagaagctcccccagggctaccgcctcgagaagcccctcaactgcgacgacgaggtctacgacctcatgcgccagtgctggcgcgagaagccctacgagcgcccctccttcgcccagatcctcgtctccctcaaccgcatgctcgaggagcgcaagacctacgtcaacaccaccctctacgagaagttcacctacgccggcatcgactgctccgccgaggaggccgcctga

SEQ ID NO: 3643 - RNA, 3375 nt, synthetic construct
  misc_feature 1..3375: note = derived and/or modified sequence opt3 fromTIE2__Homo_sapiens__CCDS6519.1
  source 1..3375: mol_type = other RNA
atggacagcctggcctccctcgtgctttgcggcgtctctctgttgttatcagggaccgttgagggagctatggatctgatcctaattaacagtctccccctggtgagcgacgcagaaacatcccttacttgtatagcctctggttggagacctcacgagccaatcacgattggcagggatttcgaagcgctgatgaatcagcatcaagacccgttggaggtaacccaggatgtgacacgggaatgggctaagaaagtcgtgtggaagcgcgagaaagcctcgaagatcaacggggcatacttttgcgagggacgagttcgtggcgaagccattagaatcaggactatgaaaatgcggcagcaggcttcattcctccccgcaaccctgacaatgaccgtggacaagggtgataatgtcaacatcagctttaagaaagtgctgataaaggaggaagacgccgtaatttataaaaatgggagtttcatccactccgttcctcgccatgaggtgccagatattctcgaggtccacttaccccatgctcaacctcaggacgccggagtgtactctgcgagatatatcggcggcaacctgtttactagcgcattcacaaggcttatagtgcggcgctgtgaagcccagaagtgggggccagagtgcaatcacttgtgtaccgcttgcatgaacaatggagtctgtcacgaagatacgggtgagtgcatttgtccccctggctttatggggcgaacttgcgaaaaagcctgtgagctgcataccttcggaagaacatgcaaggagaggtgctccggccaggaaggttgtaagtcatacgtgttttgcctaccagacccgtatgggtgtagttgcgcaactggatggaaaggcctccaatgtaacgaggcttgccaccccggcttctacgggcctgattgtaagctgcggtgcagctgtaataacggagaaatgtgcgaccgttttcagggttgtctttgctctccaggctggcaggggctgcagtgcgagcgcgaaggaatccaaagaatgacccccaaaattgttgacttgcctgatcatatcgaggtaaattccggcaagttcaacccaatctgtaaagcctcaggttggcccctcccgacaaatgaggaaatgaccctggtgaagcctgacgggacggtcttacaccccaaagattttaaccacactgaccatttcagcgtggcgattttcacaatacacaggatcctgccacctgatagtggcgtttgggtgtgctctgtcaacaccgtggccggaatggtagagaagccctttaatatttccgttaaggtgctcccaaaaccccttaacgcacctaatgtcatcgacactggccataacttcgctgtgataaatattagctcggaaccatattttggggatggaccgatcaagtctaaaaagctgttgtacaaacccgtcaaccactacgaggcctggcagcatatccaggtgacaaatgaaattgttaccctaaactatctggagcctcggacggagtacgaactctgtgtgcaactggtacgacgcggtgagggcggggaaggacacccaggccccgtcagaaggttcaccacagcttccatcggtcttcctccaccccgggggctgaatttgctcccgaagtcacagactaccctgaacttaacatggcagcctatttttccaagtagcgaggacgatttctatgtggaggttgaacgcagatccgtgcagaagtctgaccaacagaatataaaagtccccggcaacctgactagcgtgctactcaataacctgcaccctagggagcagtacgtagtgcgtgcccgggttaataccaaggcacagggagaatggtcagaggatcttacagcctggaccttgagtgacatcctgcccccacaacctgaaaacattaaaatctccaacatcactcatagctctgctgtcatttcatggacgatactcgacggctatagtatcagctccattacaatccgatacaaggtgcaggggaaaaatgaggatcagcacgtggacgtcaagattaagaacgcgaccatcactcagtatcaactgaaaggacttgagcccgaaaccgcataccaggttgatatatttgccgagaataacatcggttcttcgaatccagctttcagccatgaactggtgacattgccggagtcccaggcccctgcagacctcggcgggggaaagatgctgttaattgccatcctgggctcagctggtatgacctgcctaactgtgctcctggcctttcttattatcttgcagctgaaaagagcaaacgtacaaaggcgcatggcgcaggctttccagaatgtccgggaagaacccgccgtgcaatttaacagtgggacactcgcactgaatagaaaggttaaaaacaatccagatcccacgatataccctgtgttagactggaacgatattaagttccaggacgtcatcggcgagggaaattttggccaggtgctgaaggccaggattaaaaaggatgggcttcgcatggacgctgccatcaaacgaatgaaggaatatgcatctaaagatgaccaccgggatttcgctggagagttggaagttctctgtaagctgggccaccatccaaacataatcaatctactgggtgcctgcgagcaccgtgggtacctctatctggcgattgaatacgctccccatggaaaccttttggacttcctgagaaaaagcagggtgttagagaccgaccctgcctttgcaatcgccaactccactgcttcaacactcagctctcagcaactgcttcacttcgccgcagatgtagcgcgcggcatggactatctgtcccagaagcagtttattcatcgggatttggccgctagaaatatcctcgtcggtgagaactacgtggccaagatagcagacttcggcctgagtagggggcaggaagtgtatgtcaaaaagaccatgggacgactaccggttcgctggatggctattgagagcctgaattactctgtgtacacaactaactccgatgtatggtcatatggcgtgctcctgtgggaaatcgtcagtcttgggggaaccccatactgtggcatgacgtgcgccgagttgtatgagaaactgccccaaggttaccggttagaaaagcctctcaattgtgacgatgaggtgtatgacctgatgagacagtgctggagggaaaaaccatacgagcgtcccagctttgcacagatccttgtttcgctgaaccgcatgctagaggagcggaagacctatgtgaatacaactctctacgagaagttcacctacgccgggattgattgttccgctgaagaggcggcctga

SEQ ID NO: 3644 - RNA, 3375 nt, synthetic construct
  misc_feature 1..3375: note = derived and/or modified sequence opt4 fromTIE2__Homo_sapiens__CCDS6519.1
  source 1..3375: mol_type = other RNA
atggacagcctggccagcctggtgctgtgcggcgtgagcctgctgctgagcggcaccgtggagggcgccatggacctgatcctgatcaacagcctgcccctggtgagcgacgccgagaccagcctgacctgcatcgccagcggctggagaccccacgagcccatcaccatcggcagagacttcgaggccctgatgaaccagcaccaggaccccctggaggtgacccaggacgtgaccagagagtgggccaagaaggtggtgtggaagagagagaaggccagcaagatcaacggcgcctacttctgcgagggcagagtgagaggcgaggccatcagaatcagaaccatgaagatgagacagcaggccagcttcctgcccgccaccctgaccatgaccgtggacaagggcgacaacgtgaacatcagcttcaagaaggtgctgatcaaggaggaggacgccgtgatctacaagaacggcagcttcatccacagcgtgcccagacacgaggtgcccgacatcctggaggtgcacctgccccacgcccagccccaggacgccggcgtgtacagcgccagatacatcggcggcaacctgttcaccagcgccttcaccagactgatcgtgagaagatgcgaggcccagaagtggggccccgagtgcaaccacctgtgcaccgcctgcatgaacaacggcgtgtgccacgaggacaccggcgagtgcatctgcccccccggcttcatgggcagaacctgcgagaaggcctgcgagctgcacaccttcggcagaacctgcaaggagagatgcagcggccaggagggctgcaagagctacgtgttctgcctgcccgacccctacggctgcagctgcgccaccggctggaagggcctgcagtgcaacgaggcctgccaccccggcttctacggccccgactgcaagctgagatgcagctgcaacaacggcgagatgtgcgacagattccagggctgcctgtgcagccccggctggcagggcctgcagtgcgagagagagggcatccagagaatgacccccaagatcgtggacctgcccgaccacatcgaggtgaacagcggcaagttcaaccccatctgcaaggccagcggctggcccctgcccaccaacgaggagatgaccctggtgaagcccgacggcaccgtgctgcaccccaaggacttcaaccacaccgaccacttcagcgtggccatcttcaccatccacagaatcctgccccccgacagcggcgtgtgggtgtgcagcgtgaacaccgtggccggcatggtggagaagcccttcaacatcagcgtgaaggtgctgcccaagcccctgaacgcccccaacgtgatcgacaccggccacaacttcgccgtgatcaacatcagcagcgagccctacttcggcgacggccccatcaagagcaagaagctgctgtacaagcccgtgaaccactacgaggcctggcagcacatccaggtgaccaacgagatcgtgaccctgaactacctggagcccagaaccgagtacgagctgtgcgtgcagctggtgagaagaggcgagggcggcgagggccaccccggccccgtgagaagattcaccaccgccagcatcggcctgcccccccccagaggcctgaacctgctgcccaagagccagaccaccctgaacctgacctggcagcccatcttccccagcagcgaggacgacttctacgtggaggtggagagaagaagcgtgcagaagagcgaccagcagaacatcaaggtgcccggcaacctgaccagcgtgctgctgaacaacctgcaccccagagagcagtacgtggtgagagccagagtgaacaccaaggcccagggcgagtggagcgaggacctgaccgcctggaccctgagcgacatcctgcccccccagcccgagaacatcaagatcagcaacatcacccacagcagcgccgtgatcagctggaccatcctggacggctacagcatcagcagcatcaccatcagatacaaggtgcagggcaagaacgaggaccagcacgtggacgtgaagatcaagaacgccaccatcacccagtaccagctgaagggcctggagcccgagaccgcctaccaggtggacatcttcgccgagaacaacatcggcagcagcaaccccgccttcagccacgagctggtgaccctgcccgagagccaggcccccgccgacctgggcggcggcaagatgctgctgatcgccatcctgggcagcgccggcatgacctgcctgaccgtgctgctggccttcctgatcatcctgcagctgaagagagccaacgtgcagagaagaatggcccaggccttccagaacgtgagagaggagcccgccgtgcagttcaacagcggcaccctggccctgaacagaaaggtgaagaacaaccccgaccccaccatctaccccgtgctggactggaacgacatcaagttccaggacgtgatcggcgagggcaacttcggccaggtgctgaaggccagaatcaagaaggacggcctgagaatggacgccgccatcaagagaatgaaggagtacgccagcaaggacgaccacagagacttcgccggcgagctggaggtgctgtgcaagctgggccaccaccccaacatcatcaacctgctgggcgcctgcgagcacagaggctacctgtacctggccatcgagtacgccccccacggcaacctgctggacttcctgagaaagagcagagtgctggagaccgaccccgccttcgccatcgccaacagcaccgccagcaccctgagcagccagcagctgctgcacttcgccgccgacgtggccagaggcatggactacctgagccagaagcagttcatccacagagacctggccgccagaaacatcctggtgggcgagaactacgtggccaagatcgccgacttcggcctgagcagaggccaggaggtgtacgtgaagaagaccatgggcagactgcccgtgagatggatggccatcgagagcctgaactacagcgtgtacaccaccaacagcgacgtgtggagctacggcgtgctgctgtgggagatcgtgagcctgggcggcaccccctactgcggcatgacctgcgccgagctgtacgagaagctgccccagggctacagactggagaagcccctgaactgcgacgacgaggtgtacgacctgatgagacagtgctggagagagaagccctacgagagacccagcttcgcccagatcctggtgagcctgaacagaatgctggaggagagaaagacctacgtgaacaccaccctgtacgagaagttcacctacgccggcatcgactgcagcgccgaggaggccgcctga

SEQ ID NO: 3645 - RNA, 3375 nt, synthetic construct
  misc_feature 1..3375: note = derived and/or modified sequence opt5 fromTIE2__Homo_sapiens__CCDS6519.1
  source 1..3375: mol_type = other RNA
atggacagcctggcctccctcgtgctgtgcggcgtctctcttctgctcagcgggaccgttgagggagctatggatctgatccttattaactccctgcccctcgtgtctgacgccgaaacaagcctgacgtgtatcgcgtccggctggagacctcacgagccgattaccatcgggcgggatttcgaagctctgatgaatcagcatcaagaccccctcgaggtgacacaggatgtcacccgcgaatgggccaagaaagtggtttggaagagagagaaagcctctaagattaacggagcttacttttgcgagggccgggtgcgcggggaagccatcagaatccggacaatgaaaatgcgccagcaggctagcttcctgcctgccacccttacaatgaccgtcgacaagggagataatgtgaacatttcctttaagaaagttctgatcaaggaggaagacgcggtgatttataaaaatggcagcttcatccactctgtccccagacatgaggtgcctgatattctcgaggtgcatctgccccacgcccaacctcaggacgctggcgtctactccgcccggtatatcgggggaaacctttttacgagcgctttcacccgcctgattgttagacggtgtgaagcccagaagtggggcccggagtgcaatcacctctgtacagcgtgcatgaacaatggggtgtgtcacgaagataccggagagtgcatctgtccccctggctttatggggcgcacatgcgaaaaagcctgtgagctgcataccttcggaagaacgtgcaaggagcggtgctctggccaggaaggctgtaagtcctacgtgttttgcctgcccgacccttatgggtgtagctgcgctacaggatggaaaggcctccaatgtaacgaggcctgccaccccgggttctacggaccggattgtaagctgcgctgctcttgtaataacggcgaaatgtgcgacagatttcaggggtgtctttgctcccctggatggcagggcctgcagtgcgagcgggaaggcatccaaagaatgacccccaaaattgtcgacctccctgatcatatcgaggtgaatagcgggaagttcaaccccatttgtaaggcttccggatggcccctgcctacaaatgaggaaatgacccttgttaaaccggacggcaccgtgctgcaccccaaagattttaaccacacagaccatttctctgtcgccatcttcacgattcaccgcatcctccctcccgatagcggggtgtgggtttgctccgtgaacaccgtcgccggaatggtggagaagccttttaatatcagcgtcaaggtgctgcccaaaccgctgaacgctcctaatgttattgacacaggccataacttcgcggtgatcaatatttcttccgaaccctattttggggatggccctatcaagagcaaaaagctcctgtacaaacccgtcaaccactacgaggcctggcagcatattcaggtgaccaatgaaatcgttacacttaactatctggagcctcggaccgagtacgaactctgtgtgcaactggtcagacgcggagagggcggggaaggacaccccggcccggtgcggagattcacgacagcttctatcgggcttcctcctccccgcggactgaatctcctgcccaagagccagaccaccctgaacctcacatggcagccgatttttccctcctctgaggacgatttctatgtggaggttgaacggagaagcgtccagaagtccgaccaacagaatatcaaagtgcctggcaacctgaccagcgtgcttctgaataacctccacccccgcgagcagtacgtcgtgcgggccagagttaatacaaaggcccagggggaatggtctgaggatctgacggcttggaccctgtccgacattcttcctccccaacctgaaaacatcaaaattagcaacatcacacattcttccgccgtgattagctggaccatcctcgacggctattccatctctagcattacaatccgctacaaggtccagggcaaaaatgaggatcagcacgtggacgttaagattaagaacgcgaccatcacgcagtatcaactgaaaggactggagcccgaaaccgcttaccaggtggatatttttgccgagaataacatcgggtcctctaatccggccttcagccatgaactcgtcacactgcctgagtcccaggctcccgccgaccttggaggcgggaagatgctgctcatcgctattctgggaagcgccggcatgacctgcctgacagtgcttctcgcgtttctgatcattctgcagctcaaacgggccaacgttcaaagacggatggctcaggccttccagaatgtgcgcgaggaacctgctgtccaatttaactctgggaccctggcccttaatagaaaggtgaaaaacaatcccgatccgacgatctaccctgtgctggactggaacgatattaagttccaggacgtcatcggcgagggaaattttggccaggttctcaaggcgcggatcaaaaaggatgggctgagaatggacgccgctattaaacgcatgaaggaatatgcctccaaagatgaccaccgggatttcgctggagagctggaagtgctttgtaagctcggccaccatcccaacatcattaatctgctgggggcctgcgagcacagaggatacctctatctggccatcgaatacgctcctcatggcaaccttctggacttcctccgcaaaagcagagtgctggagacagaccccgcgtttgccattgctaactctaccgcctccacactgagctctcagcaacttctccacttcgccgctgatgtcgcccgggggatggactatctgagccagaagcagtttatccatcgcgatctggcggctagaaatatcctcgtgggcgagaactacgttgccaagattgccgacttcggactgtcccggggccaggaagtgtatgtcaaaaagaccatggggcgccttcccgtgagatggatggctatcgagagcctgaattactctgtttacaccacaaactccgatgtgtggagctatggagtcctcctgtgggaaattgtgtccctgggcgggacgccttactgtggaatgacctgcgccgagctttatgagaaactgccgcaaggctaccggctcgaaaagcccctgaattgtgacgatgaggtttatgacctcatgcgccagtgctggagagaaaaaccttacgagcggccctcttttgcgcagatcctggtgagccttaaccgcatgctggaagagagaaagacatatgtcaataccacactctacgagaagttcacctacgctggcattgattgttccgccgaagaggccgcttga

SEQ ID NO: 3646 - protein, 596 aa, synthetic construct
  REGION 1..596: note = TKTL1__Homo_sapiens__P51854
MADAEARAEFPEEARPDRGTLQVLQDMASRLRIHSIRATCSTSSGHPTSCSSSSEIMSVLFFYIMRYKQSDPENPDNDRFVLAKRLSFVDVATGWLGQGLGVACGMAYTGKYFDRASYRVFCLMSDGESSEGSVWEAMAFASYYSLDNLVAIFDVNRLGHSGALPAEHCINIYQRRCEAFGWNTYVVDGRDVEALCQVFWQASQVKHKPTAVVAKTFKGRGTPSIEDAESWHAKPMPRERADAIIKLIESQIQTSRNLDPQPPIEDSPEVNITDVRMTSPPDYRVGDKIATRKACGLALAKLGYANNRVVVLDGDTRYSTFSEIFNKEYPERFIECFMAEQNMVSVALGCASRGRTIAFASTFAAFLTRAFDHIRIGGLAESNINIIGSHCGVSVGDDGASQMALEDIAMFRTIPKCTIFYPTDAVSTEHAVALAANAKGMCFIRTTRPETMVIYTPQERFEIGQAKVLRHCVSDKVTVIGAGITVYEALAAADELSKQDIFIRVIDLFTIKPLDVATIVSSAKATEGRIITVEDHYPQGGIGEAVCAAVSMDPDIQVHSLAVSGVPQSGKSEELLDMYGISARHIIVAVKCMLLN

SEQ ID NO: 3647 - RNA, 1791 nt, synthetic construct
  misc_feature 1..1791: note = TKTL1__Homo_sapiens__BAF84950
  source 1..1791: mol_type = other RNA
atggcggatgctgaggcgagggctgagttcccggaggaggccagacctgacaggggcaccttgcaggtgttgcaagatatggccagccgcttgcgaatccattccatcagggccacatgctccacgagctccggccaccctacatcatgtagcagttcttctgagatcatgtctgtgctgttcttctacatcatgaggtacaagcagtcagatccagagaatccggacaacgaccgatttgtcctcgcaaagagactgtcgtttgtggatgtggcaacaggatggctcggacaaggactgggagttgcatgtggaatggcatatactggcaagtacttcgacagggccagctaccgggtgttctgcctcatgagtgatggcgagtcctcagaaggctctgtctgggaggcaatggcctttgcttcctactacagtctggacaatcttgtggcaatctttgatgtgaaccgcctgggacacagtggtgcattgcccgccgagcactgcataaacatctatcagaggcgctgcgaagcctttgggtggaacacttatgtggtggacggccgggacgtggaggcactgtgccaggtattctggcaggcttctcaggtgaagcacaagcccactgctgtggtggccaagaccttcaagggccggggcaccccaagtattgaggatgcagaaagttggcatgcaaagccaatgccgagagaaagagcagatgccattatcaaattaattgagagccagatacagaccagcaggaatcttgacccacagccccccattgaggactcacctgaagtcaacatcacagatgtaaggatgacctctccacctgattacagagttggtgacaagatagctactcggaaagcatgcggtctggctctggctaagctgggctacgcgaacaacagagtcgttgtgctggatggtgacaccaggtactctactttctctgagatattcaacaaggagtaccctgagcgcttcatcgagtgctttatggctgaacaaaacatggtgagcgtggctctgggctgtgcctcccgtggacggaccattgcttttgctagcacctttgctgcctttctgactcgagcatttgatcacatccggataggaggcctcgctgagagcaacatcaacattattggttcccactgtggggtatctgttggtgacgatggtgcttcccagatggccctggaggatatagccatgttccgaaccattcccaagtgcacgatcttctacccaactgatgccgtctccacggagcatgctgttgctctggcagccaatgccaaggggatgtgcttcattcggaccacccgaccagaaactatggttatttacaccccacaagaacgctttgagatcggacaggccaaggtcctccgccactgtgtcagtgacaaggtcacagttattggagctggaattactgtgtatgaagccttagcagctgctgatgagctttcgaaacaagatatttttatccgtgtcatcgacctgtttaccattaaacctctggatgtcgccaccatcgtctccagtgcaaaagccacagagggccggatcattacagtggaggatcactacccgcaaggtggcatcggggaagctgtctgcgcagccgtctccatggatcctgacattcaggttcattcgctggcagtgtcgggagtgccccagagtgggaagtccgaggaattgctggatatgtatggaattagtgccagacatatcatagtggccgtgaaatgcatgttgctgaactaa

SEQ ID NO: 3648 - RNA, 1791 nt, synthetic construct
  misc_feature 1..1791: note = derived and/or modified sequence opt1 fromTKTL1__Homo_sapiens__BAF84950
  source 1..1791: mol_type = other RNA
atggccgacgccgaggcgcgcgccgagttccccgaggaggcccggccggaccgcggcaccctccaggtgctgcaggacatggccagccggctgcgcatccactccatccgggcgacctgcagcacgtccagcgggcaccccacctcctgcagctccagctccgagatcatgagcgtcctgttcttctacatcatgcgctacaagcagtccgaccccgagaaccccgacaacgaccggttcgtgctcgccaagcgcctgagcttcgtggacgtcgccaccggctggctggggcagggcctcggggtggcctgcggcatggcctacaccggcaagtacttcgaccgggcgtcctaccgcgtgttctgcctgatgagcgacggggagtccagcgagggctccgtctgggaggccatggccttcgccagctactactccctggacaacctcgtggccatcttcgacgtgaaccggctggggcacagcggcgcgctgccggccgagcactgcatcaacatctaccagcgccggtgcgaggccttcgggtggaacacgtacgtcgtggacggccgcgacgtggaggccctctgccaggtcttctggcaggccagccaggtgaagcacaagcccaccgcggtggtcgccaagaccttcaagggccgggggaccccctccatcgaggacgccgagagctggcacgccaagcccatgccgcgcgagcgggccgacgcgatcatcaagctgatcgagtcccagatccagacgagccgcaacctggacccccagccgcccatcgaggactcccccgaggtgaacatcaccgacgtgcggatgaccagcccgcccgactaccgcgtcggcgacaagatcgccacccggaaggcctgcgggctcgccctggccaagctgggctacgcgaacaaccgcgtggtggtcctcgacggcgacacgcgctactccaccttcagcgagatcttcaacaaggagtaccccgagcggttcatcgagtgcttcatggccgagcagaacatggtgtccgtggccctggggtgcgccagccgcggccggaccatcgcgttcgcctccaccttcgccgccttcctgacgcgcgccttcgaccacatccggatcgggggcctcgcggagagcaacatcaacatcatcgggtcccactgcggcgtcagcgtgggcgacgacggggcctcccagatggccctggaggacatcgccatgttccgcaccatccccaagtgcaccatcttctaccccaccgacgccgtcagcacggagcacgcggtggccctggccgccaacgccaagggcatgtgcttcatccggaccacccgccccgagaccatggtgatctacacgccccaggagcggttcgagatcgggcaggcgaaggtcctccgccactgcgtgtccgacaaggtgaccgtcatcggcgccgggatcaccgtgtacgaggccctggccgcggccgacgagctgagcaagcaggacatcttcatccgggtgatcgacctcttcaccatcaagccgctggacgtcgccacgatcgtgtccagcgccaaggccaccgagggccgcatcatcaccgtggaggaccactacccccagggcgggatcggcgaggcggtctgcgccgccgtgagcatggaccccgacatccaggtgcactccctggccgtcagcggggtgccccagtccggcaagagcgaggagctcctggacatgtacgggatctccgcccggcacatcatcgtggcggtcaagtgcatgctgctcaactga

SEQ ID NO: 3649 - RNA, 1791 nt, synthetic construct
  misc_feature 1..1791: note = derived and/or modified sequence opt2 fromTKTL1__Homo_sapiens__BAF84950
  source 1..1791: mol_type = other RNA
atggccgacgccgaggcccgcgccgagttccccgaggaggcccgccccgaccgcggcaccctccaggtcctccaggacatggcctcccgcctccgcatccactccatccgcgccacctgctccacctcctccggccaccccacctcctgctcctcctcctccgagatcatgtccgtcctcttcttctacatcatgcgctacaagcagtccgaccccgagaaccccgacaacgaccgcttcgtcctcgccaagcgcctctccttcgtcgacgtcgccaccggctggctcggccagggcctcggcgtcgcctgcggcatggcctacaccggcaagtacttcgaccgcgcctcctaccgcgtcttctgcctcatgtccgacggcgagtcctccgagggctccgtctgggaggccatggccttcgcctcctactactccctcgacaacctcgtcgccatcttcgacgtcaaccgcctcggccactccggcgccctccccgccgagcactgcatcaacatctaccagcgccgctgcgaggccttcggctggaacacctacgtcgtcgacggccgcgacgtcgaggccctctgccaggtcttctggcaggcctcccaggtcaagcacaagcccaccgccgtcgtcgccaagaccttcaagggccgcggcaccccctccatcgaggacgccgagtcctggcacgccaagcccatgccccgcgagcgcgccgacgccatcatcaagctcatcgagtcccagatccagacctcccgcaacctcgacccccagccccccatcgaggactcccccgaggtcaacatcaccgacgtccgcatgacctccccccccgactaccgcgtcggcgacaagatcgccacccgcaaggcctgcggcctcgccctcgccaagctcggctacgccaacaaccgcgtcgtcgtcctcgacggcgacacccgctactccaccttctccgagatcttcaacaaggagtaccccgagcgcttcatcgagtgcttcatggccgagcagaacatggtctccgtcgccctcggctgcgcctcccgcggccgcaccatcgccttcgcctccaccttcgccgccttcctcacccgcgccttcgaccacatccgcatcggcggcctcgccgagtccaacatcaacatcatcggctcccactgcggcgtctccgtcggcgacgacggcgcctcccagatggccctcgaggacatcgccatgttccgcaccatccccaagtgcaccatcttctaccccaccgacgccgtctccaccgagcacgccgtcgccctcgccgccaacgccaagggcatgtgcttcatccgcaccacccgccccgagaccatggtcatctacaccccccaggagcgcttcgagatcggccaggccaaggtcctccgccactgcgtctccgacaaggtcaccgtcatcggcgccggcatcaccgtctacgaggccctcgccgccgccgacgagctctccaagcaggacatcttcatccgcgtcatcgacctcttcaccatcaagcccctcgacgtcgccaccatcgtctcctccgccaaggccaccgagggccgcatcatcaccgtcgaggaccactacccccagggcggcatcggcgaggccgtctgcgccgccgtctccatggaccccgacatccaggtccactccctcgccgtctccggcgtcccccagtccggcaagtccgaggagctcctcgacatgtacggcatctccgcccgccacatcatcgtcgccgtcaagtgcatgctcctcaactga

SEQ ID NO: 3650 - RNA, 1791 nt, synthetic construct
  misc_feature 1..1791: note = derived and/or modified sequence opt3 fromTKTL1__Homo_sapiens__BAF84950
  source 1..1791: mol_type = other RNA
atggccgacgctgaggcaagagccgagttccccgaggaagcgaggcctgatcggggcaccctccaggtgctgcaagacatggctagccgccttcgaatccactccattcgtgccacatgctctacttcaagtgggcatccaacgagctgttcctcttcgtcagagataatgagcgtcctgtttttctacatcatgagatataagcagagtgatccggaaaaccccgacaatgataggtttgttttggcaaaacggttatccttcgtggacgtagccaccggatggctgggtcagggcctaggggtggcttgcggaatggcatacacaggcaagtattttgatcgcgcctcttacagagtcttctgtctcatgagcgacggtgagtcctcagaggggagtgtgtgggaagctatggcctttgcgagctattactctctggataaccttgttgcaattttcgacgtgaataggctgggacactccggcgccttgcctgctgagcattgcatcaacatttatcagcggcgctgtgaagcctttggctggaatacttacgtcgtggatgggcgagacgtagaggcactctgccaagttttctggcaggcttcacaggtgaaacacaagccaaccgccgtcgtggcgaaaacatttaagggaagaggtacccccagcatcgaggatgccgaaagttggcatgcaaagcctatgccaagggagcgggctgacgccataatcaaactgattgaatctcagatccaaacttcccgtaacctggacccccagcctccaattgaggatagcccggaagtgaatatcacagacgtccgcatgacctcgccccctgattacagagttggcgacaagatagctacgaggaaagcctgtgggctcgcattagccaagctgggatatgctaacaatcgggtggtagtgcttgatggcgacactcgatactctaccttctccgagatttttaacaaagagtatccagaacgcttcatcgagtgcttcatggcggaacagaatatggtctcagtggcattgggttgtgccagtagagggaggacaattgcttttgccagcactttcgcagcctttctgacccgggctttcgatcacatccgcatcggaggcctagccgagtccaacattaatataatcggctctcactgcggggttagcgtgggagacgatggtgcatcacagatggcgctcgaagacattgctatgtttagaacaatccccaagtgtaccatattctaccctacggatgccgtcagtactgagcatgcagtggccctggctgccaacgcaaagggcatgtgctttattaggacaacccgtccagagactatggtaatctatacaccccaagaacggttcgagatcgggcaggctaaagttcttcgacactgcgtgtccgacaaggtcaccgtgattggagccggcatcacggtctacgaagcgctggccgctgcagacgagttgagcaaacaggatatttttataagagtgatcgacctcttcaccattaagccgctggatgttgccacaatcgtgtcttcagctaaagccactgaaggtaggatcattaccgtagaggaccattatcctcaagggggcataggagaggcagtctgtgcggccgtgagtatggatcccgacatccaggttcacagcttagctgtgtccggcgtcccacagtctgggaagtcggaagaactgctcgatatgtacggaattagcgcccgccacatcattgtggcagtaaaatgcatgcttctgaattga

SEQ ID NO: 3651 - RNA, 1791 nt, synthetic construct
  misc_feature 1..1791: note = derived and/or modified sequence opt4 fromTKTL1__Homo_sapiens__BAF84950
  source 1..1791: mol_type = other RNA
atggccgacgccgaggccagagccgagttccccgaggaggccagacccgacagaggcaccctgcaggtgctgcaggacatggccagcagactgagaatccacagcatcagagccacctgcagcaccagcagcggccaccccaccagctgcagcagcagcagcgagatcatgagcgtgctgttcttctacatcatgagatacaagcagagcgaccccgagaaccccgacaacgacagattcgtgctggccaagagactgagcttcgtggacgtggccaccggctggctgggccagggcctgggcgtggcctgcggcatggcctacaccggcaagtacttcgacagagccagctacagagtgttctgcctgatgagcgacggcgagagcagcgagggcagcgtgtgggaggccatggccttcgccagctactacagcctggacaacctggtggccatcttcgacgtgaacagactgggccacagcggcgccctgcccgccgagcactgcatcaacatctaccagagaagatgcgaggccttcggctggaacacctacgtggtggacggcagagacgtggaggccctgtgccaggtgttctggcaggccagccaggtgaagcacaagcccaccgccgtggtggccaagaccttcaagggcagaggcacccccagcatcgaggacgccgagagctggcacgccaagcccatgcccagagagagagccgacgccatcatcaagctgatcgagagccagatccagaccagcagaaacctggacccccagccccccatcgaggacagccccgaggtgaacatcaccgacgtgagaatgaccagcccccccgactacagagtgggcgacaagatcgccaccagaaaggcctgcggcctggccctggccaagctgggctacgccaacaacagagtggtggtgctggacggcgacaccagatacagcaccttcagcgagatcttcaacaaggagtaccccgagagattcatcgagtgcttcatggccgagcagaacatggtgagcgtggccctgggctgcgccagcagaggcagaaccatcgccttcgccagcaccttcgccgccttcctgaccagagccttcgaccacatcagaatcggcggcctggccgagagcaacatcaacatcatcggcagccactgcggcgtgagcgtgggcgacgacggcgccagccagatggccctggaggacatcgccatgttcagaaccatccccaagtgcaccatcttctaccccaccgacgccgtgagcaccgagcacgccgtggccctggccgccaacgccaagggcatgtgcttcatcagaaccaccagacccgagaccatggtgatctacaccccccaggagagattcgagatcggccaggccaaggtgctgagacactgcgtgagcgacaaggtgaccgtgatcggcgccggcatcaccgtgtacgaggccctggccgccgccgacgagctgagcaagcaggacatcttcatcagagtgatcgacctgttcaccatcaagcccctggacgtggccaccatcgtgagcagcgccaaggccaccgagggcagaatcatcaccgtggaggaccactacccccagggcggcatcggcgaggccgtgtgcgccgccgtgagcatggaccccgacatccaggtgcacagcctggccgtgagcggcgtgccccagagcggcaagagcgaggagctgctggacatgtacggcatcagcgccagacacatcatcgtggccgtgaagtgcatgctgctgaactga

SEQ ID NO: 3652 - RNA, 1791 nt, synthetic construct
  misc_feature 1..1791: note = derived and/or modified sequence opt5 fromTKTL1__Homo_sapiens__BAF84950
  source 1..1791: mol_type = other RNA
atggccgacgctgaggccagagcggaatttcccgaggaagctcggcctgatcgcggcacccttcaggtgctccaagacatggccagcagactgcggatccactccattcgcgccacatgctctacgagctccgggcatccgacctcttgtagctcctctagcgagatcatgtccgtccttttcttctacattatgagatataagcagagcgatcccgaaaaccctgacaatgatcggtttgttctggctaaacgcctctctttcgtggacgtggccacaggatggctgggccaggggcttggagtcgcttgcggcatggcctacaccgggaagtattttgatagagcgtcctaccgggtgttctgtctgatgagcgacggagagtcttccgagggcagcgtttgggaagccatggcttttgcctcttattactccctcgataacctggtggctatcttcgacgtcaatcgcctgggccacagcggggccctccccgcggagcattgcattaacatctatcagagacggtgtgaagcctttggatggaatacatacgtggttgatggccgcgacgtggaggctctgtgccaagtcttctggcaggcctcccaggtgaaacacaagcctaccgctgtggtcgccaaaacatttaaggggagaggaaccccctctatcgaggatgccgaaagctggcatgctaagcctatgccgcgggagcgcgcggacgccattatcaaacttattgaatcccagatccaaacgagcagaaacctggacccccagcctcccattgaggattctcctgaagttaatatcaccgacgtgcggatgacatccccgcccgattacagagtgggcgacaagattgctacccgcaaagcctgtgggctcgccctggctaagctgggatatgccaacaatcgggtcgtggttctggatggcgacacaagatacagcaccttctctgagatctttaacaaagagtatcctgaacgcttcatcgagtgcttcatggcggaacagaatatggtgagcgtcgctctcggctgtgcctcccgggggagaacgattgcctttgcttctacattcgccgcttttctgacccgcgccttcgatcacatccggattggaggcctggcggagagcaacatcaatattatcgggtcccactgcggagtgagcgttggcgacgatggggcctctcagatggctctcgaagacatcgccatgtttagaacaattcccaagtgtaccatcttctaccctaccgatgctgtgtccacagagcatgccgtcgcgctggccgctaacgccaagggaatgtgctttattcgcacgacccggcccgagacaatggtgatctatacaccccaagaaagattcgagattggccaggctaaagtccttcgccactgcgtgagcgacaaggttaccgtgatcggcgccgggatcaccgtctacgaagccctggctgcggccgacgagctctctaaacaggatatttttatccgggtgattgacctgttcacgatcaagcctcttgatgttgctacaattgtgtccagcgccaaagccaccgaaggaagaatcattaccgtcgaggaccattatccgcaaggcgggatcggagaggctgtgtgtgccgcggtgtccatggatcccgacatccaggttcactctctggctgtcagcggcgtgcctcagtccgggaagtctgaggaactcctggatatgtacggcattagcgcccggcacatcattgtggccgtcaaatgcatgctgctcaattga

SEQ ID NO: 3653 - protein, 286 aa, synthetic construct
  REGION 1..286: note = TPI/m__Homo_sapiens__P60174
MAEDGEEAEFHFAALYISGQWPRLRADTDLQRLGSSAMAPSRKFFVGGNWKMNGRKQSLGELIGTLNAAKVPADTEVVCAPPTAYIDFARQKLDPKIAVAAQNCYKVTNGAFTGEISPGMIKDCGATWVVLGHSERRHVFGESDELIGQKVAHALAEGLGVIACIGEKLDEREAGITEKVVFEQTKVIADNVKDWSKVVLAYEPVWAIGTGKTATPQQAQEVHEKLRGWLKSNVSDAVAQSTRIIYGGSVTGATCKELASQPDVDGFLVGGASLKPEFVDIINAKQ

SEQ ID NO: 3654 - RNA, 861 nt, synthetic construct
  misc_feature 1..861: note = TPI/m__Homo_sapiens__EAW88722
  source 1..861: mol_type = other RNA
atggcggaggacggcgaggaggcggagttccacttcgcggcgctctatataagtgggcagtggccgcgactgcgcgcagacactgaccttcagcgcctcggctccagcgccatggcgccctccaggaagttcttcgttgggggaaactggaagatgaacgggcggaagcagagtctgggggagctcatcggcactctgaacgcggccaaggtgccggccgacaccgaggtggtttgtgctccccctactgcctatatcgacttcgcccggcagaagctagatcccaagattgctgtggctgcgcagaactgctacaaagtgactaatggggcttttactggggagatcagccctggcatgatcaaagactgcggagccacgtgggtggtcctggggcactcagagagaaggcatgtctttggggagtcagatgagctgattgggcagaaagtggcccatgctctggcagagggactcggagtaatcgcctgcattggggagaagctagatgaaagggaagctggcatcactgagaaggttgttttcgagcagacaaaggtcatcgcagataacgtgaaggactggagcaaggtcgtcctggcctatgagcctgtgtgggccattggtactggcaagactgcaacaccccaacaggcccaggaagtacacgagaagctccgaggatggctgaagtccaacgtctctgatgcggtggctcagagcacccgtatcatttatggaggctctgtgactggggcaacctgcaaggagctggccagccagcctgatgtggatggcttccttgtgggtggtgcttccctcaagcccgaattcgtggacatcatcaatgccaaacaatga

SEQ ID NO: 3655 - RNA, 861 nt, synthetic construct
  misc_feature 1..861: note = derived and/or modified sequence opt1 fromTPI/m__Homo_sapiens__EAW88722
  source 1..861: mol_type = other RNA
atggccgaggacggcgaggaggccgagttccacttcgcggccctgtacatcagcgggcagtggccccgcctccgggccgacaccgacctgcagcgcctgggctccagcgccatggccccgtcccggaagttcttcgtcgggggcaactggaagatgaacgggcgcaagcagagcctcggcgagctgatcggcaccctgaacgcggccaaggtgcccgccgacacggaggtggtgtgcgccccgcccaccgcgtacatcgacttcgcccggcagaagctcgaccccaagatcgccgtcgccgcccagaactgctacaaggtgaccaacggggcgttcaccggcgagatctcccccgggatgatcaaggactgcggcgccacgtgggtggtcctggggcacagcgagcgccggcacgtgttcggcgagtccgacgagctgatcggccagaaggtggcccacgccctcgccgaggggctgggcgtcatcgcgtgcatcggggagaagctggacgagcgcgaggccggcatcaccgagaaggtggtgttcgagcagaccaaggtcatcgccgacaacgtgaaggactggagcaaggtggtcctcgcctacgagcccgtgtgggccatcggcaccgggaagacggcgaccccgcagcaggcccaggaggtgcacgagaagctgcggggctggctgaagtccaacgtcagcgacgccgtggcccagtccacccgcatcatctacgggggcagcgtgaccggggccacgtgcaaggagctcgcgtcccagcccgacgtcgacggcttcctggtgggcggggccagcctgaagcccgagttcgtggacatcatcaacgccaagcagtga

SEQ ID NO: 3656 - RNA, 861 nt, synthetic construct
  misc_feature 1..861: note = derived and/or modified sequence opt2 fromTPI/m__Homo_sapiens__EAW88722
  source 1..861: mol_type = other RNA
atggccgaggacggcgaggaggccgagttccacttcgccgccctctacatctccggccagtggccccgcctccgcgccgacaccgacctccagcgcctcggctcctccgccatggccccctcccgcaagttcttcgtcggcggcaactggaagatgaacggccgcaagcagtccctcggcgagctcatcggcaccctcaacgccgccaaggtccccgccgacaccgaggtcgtctgcgccccccccaccgcctacatcgacttcgcccgccagaagctcgaccccaagatcgccgtcgccgcccagaactgctacaaggtcaccaacggcgccttcaccggcgagatctcccccggcatgatcaaggactgcggcgccacctgggtcgtcctcggccactccgagcgccgccacgtcttcggcgagtccgacgagctcatcggccagaaggtcgcccacgccctcgccgagggcctcggcgtcatcgcctgcatcggcgagaagctcgacgagcgcgaggccggcatcaccgagaaggtcgtcttcgagcagaccaaggtcatcgccgacaacgtcaaggactggtccaaggtcgtcctcgcctacgagcccgtctgggccatcggcaccggcaagaccgccaccccccagcaggcccaggaggtccacgagaagctccgcggctggctcaagtccaacgtctccgacgccgtcgcccagtccacccgcatcatctacggcggctccgtcaccggcgccacctgcaaggagctcgcctcccagcccgacgtcgacggcttcctcgtcggcggcgcctccctcaagcccgagttcgtcgacatcatcaacgccaagcagtga

SEQ ID NO: 3657 - RNA, 861 nt, synthetic construct
  misc_feature 1..861: note = derived and/or modified sequence opt3 fromTPI/m__Homo_sapiens__EAW88722
  source 1..861: mol_type = other RNA
atggccgaggacggcgaagaggctgagttccactttgcagccctgtacatcagcgggcagtggcccagactcagggcggataccgaccttcaacggctgggatcctctgctatggccccttcacgcaagttctttgtgggtggcaactggaaaatgaatgggcgaaagcagagtttgggagaattaattggcacactgaacgcagccaaagtcccagctgatactgaagttgtgtgcgcaccgcccacggcctatatagacttcgctcgtcagaagctagatcctaaaatcgccgtagcggcacagaattgttacaaggtgaccaacggtgcctttacaggggagattagcccaggaatgatcaaggactgcggcgctacttgggtcgtgctcggccattccgagagaaggcacgttttcggggaatctgatgagctgattggacaaaaagtggcccatgcacttgctgaaggtctgggcgtcatcgcctgtataggggagaagttggacgagcgggaagcgggaatcaccgagaaagtggtatttgaacagacaaaggttattgccgataatgtgaaagactggtcgaaggtcgtgctcgcatatgagcccgtgtgggctatcggcaccggtaagactgccacacctcagcaggctcaagaagtccacgagaaactgcgcgggtggctgaagtcaaacgttagcgatgccgtggcacagagtaccagaattatctacggaggctccgtaacgggcgccacttgcaaagagctcgcttctcagccagacgtggatgggttcttagtcggaggtgcgagcctgaagcccgaatttgtggacataattaatgcaaaacagtga

SEQ ID NO: 3658 - RNA, 861 nt, synthetic construct
  misc_feature 1..861: note = derived and/or modified sequence opt4 fromTPI/m__Homo_sapiens__EAW88722
  source 1..861: mol_type = other RNA
atggccgaggacggcgaggaggccgagttccacttcgccgccctgtacatcagcggccagtggcccagactgagagccgacaccgacctgcagagactgggcagcagcgccatggcccccagcagaaagttcttcgtgggcggcaactggaagatgaacggcagaaagcagagcctgggcgagctgatcggcaccctgaacgccgccaaggtgcccgccgacaccgaggtggtgtgcgccccccccaccgcctacatcgacttcgccagacagaagctggaccccaagatcgccgtggccgcccagaactgctacaaggtgaccaacggcgccttcaccggcgagatcagccccggcatgatcaaggactgcggcgccacctgggtggtgctgggccacagcgagagaagacacgtgttcggcgagagcgacgagctgatcggccagaaggtggcccacgccctggccgagggcctgggcgtgatcgcctgcatcggcgagaagctggacgagagagaggccggcatcaccgagaaggtggtgttcgagcagaccaaggtgatcgccgacaacgtgaaggactggagcaaggtggtgctggcctacgagcccgtgtgggccatcggcaccggcaagaccgccaccccccagcaggcccaggaggtgcacgagaagctgagaggctggctgaagagcaacgtgagcgacgccgtggcccagagcaccagaatcatctacggcggcagcgtgaccggcgccacctgcaaggagctggccagccagcccgacgtggacggcttcctggtgggcggcgccagcctgaagcccgagttcgtggacatcatcaacgccaagcagtga

SEQ ID NO: 3659 - RNA, 861 nt, synthetic construct
  misc_feature 1..861: note = derived and/or modified sequence opt5 fromTPI/m__Homo_sapiens__EAW88722
  source 1..861: mol_type = other RNA
atggccgaggacggcgaagaggctgagttccactttgccgcgctgtacatcagcgggcagtggcccagactccgggctgataccgacctgcaacgccttggatcctctgccatggcccctagcagaaagttctttgtgggcgggaactggaaaatgaatggacggaagcagtccctgggcgaactcattgggacactgaacgctgccaaagtcccggctgatacggaagttgtgtgcgcgccccctaccgcctatatcgacttcgcccgccagaagctggatcccaaaattgctgtggccgctcagaattgttacaaggtcacaaacggagcctttaccggcgagatctctcctggcatgattaaggactgcggggcgacatgggtggttctgggacatagcgagagacggcacgtgttcggcgaatccgatgagctcatcgggcaaaaagtcgcccatgctctggccgaaggactgggcgtgatcgcttgtattggggagaagctcgacgagcgcgaagccggaatcaccgagaaagttgtgtttgaacagacaaaggtcattgccgataatgtgaaagactggtctaaggtggtcctggcttatgagcccgtttgggcgatcggcaccggcaagacggccacccctcagcaggctcaagaagtgcacgagaaacttagagggtggcttaagagcaacgtgtccgatgccgtcgcccagagcacacggattatctacggaggctctgtgaccggggctacatgcaaagagctcgcctcccagccggacgttgatggattcctggtgggcggggcgagccttaagcccgaatttgtcgacattatcaatgctaaacagtga

SEQ ID NO: 3660 - protein, 119 aa, synthetic construct
  REGION 1..119: note = TRGV11__Homo_sapiens__Q99601
MPLVVAVIFFSLWVFALGQLEQPEISISRPANKSAHISWKASIQGFSSKIIHWYWQKPNKGLEYLLHVFLTISAQDCSGGKTKKLEVSKNAHTSTSTLKIKFLEKEDEVVYHCACWIRH

SEQ ID NO: 3661 - RNA, 357 nt, synthetic construct
  misc_feature 1..357: note = TRGV11__Homo_sapiens__CAA72108
  source 1..357: mol_type = other RNA
atgccactggtagtagctgttatcttcttctccctctgggtttttgcacttgggcagttggaacaacctgaaatatctatttccagaccagcaaataagagtgcccacatatcttggaaggcatccatccaaggctttagcagtaaaatcatacactggtactggcagaaaccaaacaaaggcttagaatatttattacatgtcttcttgacaatctctgctcaagattgctcaggtgggaagactaagaaacttgaggtaagtaaaaatgctcacacttccacttccactttgaaaataaagttcttagagaaagaagatgaggtggtgtaccactgtgcctgctggattaggcac

SEQ ID NO: 3662 - RNA, 357 nt, synthetic construct
  misc_feature 1..357: note = derived and/or modified sequence opt1 fromTRGV11__Homo_sapiens__CAA72108
  source 1..357: mol_type = other RNA
atgcccctggtggtcgccgtgatcttcttcagcctctgggtgttcgccctgggccagctggagcagccggagatctccatcagccgccccgcgaacaagtccgcccacatcagctggaaggcctccatccaggggttcagctccaagatcatccactggtactggcagaagcccaacaagggcctcgagtacctgctgcacgtcttcctcaccatcagcgcccaggactgctccgggggcaagaccaagaagctggaggtgagcaagaacgcccacacgtccaccagcaccctgaagatcaagttcctcgagaaggaggacgaggtggtctaccactgcgcgtgctggatccggcac

SEQ ID NO: 3663 - RNA, 357 nt, synthetic construct
  misc_feature 1..357: note = derived and/or modified sequence opt2 fromTRGV11__Homo_sapiens__CAA72108
  source 1..357: mol_type = other RNA
atgcccctcgtcgtcgccgtcatcttcttctccctctgggtcttcgccctcggccagctcgagcagcccgagatctccatctcccgccccgccaacaagtccgcccacatctcctggaaggcctccatccagggcttctcctccaagatcatccactggtactggcagaagcccaacaagggcctcgagtacctcctccacgtcttcctcaccatctccgcccaggactgctccggcggcaagaccaagaagctcgaggtctccaagaacgcccacacctccacctccaccctcaagatcaagttcctcgagaaggaggacgaggtcgtctaccactgcgcctgctggatccgccac

SEQ ID NO: 3664 - RNA, 357 nt, synthetic construct
  misc_feature 1..357: note = derived and/or modified sequence opt3 fromTRGV11__Homo_sapiens__CAA72108
  source 1..357: mol_type = other RNA
atgcccctggtggtcgccgttatcttctttagcctctgggtgttcgctcttggccagctggagcaacctgaaatttccatatctagaccagcaaacaagtcagcccacatcagttggaaagcgagcattcaggggttttcctctaagatcattcattggtactggcagaaaccgaataagggattggagtatttactgcacgtattcctaaccatctcggctcaggactgctcaggtggcaaaacaaagaagctcgaagtgagcaaaaacgcccatacgagtacttccaccctgaagataaaatttcttgagaaggaagatgaggtcgtgtaccactgtgcatgctggatcaggcat

SEQ ID NO: 3665 - RNA, 357 nt, synthetic construct
  misc_feature 1..357: note = derived and/or modified sequence opt4 fromTRGV11__Homo_sapiens__CAA72108
  source 1..357: mol_type = other RNA
atgcccctggtggtggccgtgatcttcttcagcctgtgggtgttcgccctgggccagctggagcagcccgagatcagcatcagcagacccgccaacaagagcgcccacatcagctggaaggccagcatccagggcttcagcagcaagatcatccactggtactggcagaagcccaacaagggcctggagtacctgctgcacgtgttcctgaccatcagcgcccaggactgcagcggcggcaagaccaagaagctggaggtgagcaagaacgcccacaccagcaccagcaccctgaagatcaagttcctggagaaggaggacgaggtggtgtaccactgcgcctgctggatcagacac

SEQ ID NO: 3666 - RNA, 357 nt, synthetic construct
  misc_feature 1..357: note = derived and/or modified sequence opt5 fromTRGV11__Homo_sapiens__CAA72108
  source 1..357: mol_type = other RNA
atgcccctggtggtcgccgttatcttctttagcctctgggtgttcgctctgggccagcttgagcaacctgaaatttccatctctagaccggccaacaagagcgcgcacatttcctggaaggcttctatccaggggtttagctccaaaattatccattggtactggcagaaacccaataagggactggagtatctcctgcacgtgttccttaccatctctgcccaggactgcagcggcgggaaaacaaagaagctggaagtctccaaaaacgcccatacgagcacctctacactcaagattaaatttctggagaaggaagatgaggtggtttaccactgtgcttgctggatccggcat

SEQ ID NO: 3667 - protein, 137 aa, synthetic construct
  REGION 1..137: note = TRGV9__Homo_sapiens__A4D1X2
MLSLLHTSTLAVLGALCVYGAGHLEQPQISSTKTLSKTARLECVVSGITISATSVYWYRERPGEVIQFLVSISYDGTVRKESGIPSGKFEVDRIPETSTSTLTIHNVEKQDIATYYCALWEVHSSRQFEPSHSINVY

SEQ ID NO: 3668 - RNA, 414 nt, synthetic construct
  misc_feature 1..414: note = TRGV9__Homo_sapiens__EAL23985
  source 1..414: mol_type = other RNA
atgctgtcactgctccacacatcaacgctggcagtccttggggctctgtgtgtatatggtgcaggtcacctagagcaacctcaaatttccagtactaaaacgctgtcaaaaacagcccgcctggaatgtgtggtgtctggaataacaatttctgcaacatctgtatattggtatcgagagagacctggtgaagtcatacagttcctggtgtccatttcatatgacggcactgtcagaaaggaatccggcattccgtcaggcaaatttgaggtggataggatacctgaaacgtctacatccactctcaccattcacaatgtagagaaacaggacatagctacctactactgtgccttgtgggaggtgcacagcagcagacagtttgagccatcccattcaataaatgtttattga

SEQ ID NO: 3669 - RNA, 414 nt, synthetic construct
  misc_feature 1..414: note = derived and/or modified sequence opt1 fromTRGV9__Homo_sapiens__EAL23985
  source 1..414: mol_type = other RNA
atgctgagcctcctgcacacctccaccctggccgtgctcggcgccctgtgcgtctacggggcgggccacctggagcagccccagatcagctccacgaagaccctcagcaagaccgcccgcctggagtgcgtggtgtccgggatcaccatcagcgccacgtccgtctactggtaccgggagcgcccgggcgaggtgatccagttcctggtgagcatctcctacgacgggaccgtccggaaggagagcggcatcccctccggcaagttcgaggtggaccgcatccccgagaccagcacctccacgctcaccatccacaacgtggagaagcaggacatcgccacctactactgcgccctgtgggaggtccacagctcccggcagttcgagcccagccactccatcaacgtgtactga

SEQ ID NO: 3670 - RNA, 414 nt, synthetic construct
  misc_feature 1..414: note = derived and/or modified sequence opt2 fromTRGV9__Homo_sapiens__EAL23985
  source 1..414: mol_type = other RNA
atgctctccctcctccacacctccaccctcgccgtcctcggcgccctctgcgtctacggcgccggccacctcgagcagccccagatctcctccaccaagaccctctccaagaccgcccgcctcgagtgcgtcgtctccggcatcaccatctccgccacctccgtctactggtaccgcgagcgccccggcgaggtcatccagttcctcgtctccatctcctacgacggcaccgtccgcaaggagtccggcatcccctccggcaagttcgaggtcgaccgcatccccgagacctccacctccaccctcaccatccacaacgtcgagaagcaggacatcgccacctactactgcgccctctgggaggtccactcctcccgccagttcgagccctcccactccatcaacgtctactga

SEQ ID NO: 3671 - RNA, 414 nt, synthetic construct
  misc_feature 1..414: note = derived and/or modified sequence opt3 fromTRGV9__Homo_sapiens__EAL23985
  source 1..414: mol_type = other RNA
atgctgagcctccttcacacctccacactggccgtgttgggcgctttatgcgtctacggggcaggacatctggagcagccccaaatctcttcaactaagacgctaagtaaaaccgccagactcgaatgtgttgtgagcggtattacaatatccgcgacttctgtatattggtacagggagcggcctggcgaagtgatccagttcctggtctcgatttcatatgacgggaccgtgcgcaaggagagcggaatcccaagtggcaaatttgaagttgatcgtattccggagacatccacctctactcttacaatccacaacgtggagaagcaggacatagctacctactattgcgccctgtgggaagtccatagctcccgacagttcgagccctcacacagtatcaatgtgtactga

SEQ ID NO: 3672 - RNA, 414 nt, synthetic construct
  misc_feature 1..414: note = derived and/or modified sequence opt4 fromTRGV9__Homo_sapiens__EAL23985
  source 1..414: mol_type = other RNA
atgctgagcctgctgcacaccagcaccctggccgtgctgggcgccctgtgcgtgtacggcgccggccacctggagcagccccagatcagcagcaccaagaccctgagcaagaccgccagactggagtgcgtggtgagcggcatcaccatcagcgccaccagcgtgtactggtacagagagagacccggcgaggtgatccagttcctggtgagcatcagctacgacggcaccgtgagaaaggagagcggcatccccagcggcaagttcgaggtggacagaatccccgagaccagcaccagcaccctgaccatccacaacgtggagaagcaggacatcgccacctactactgcgccctgtgggaggtgcacagcagcagacagttcgagcccagccacagcatcaacgtgtactga

SEQ ID NO: 3673 - RNA, 414 nt, synthetic construct
  misc_feature 1..414: note = derived and/or modified sequence opt5 fromTRGV9__Homo_sapiens__EAL23985
  source 1..414: mol_type = other RNA
atgctgagcctcctgcacacctccacacttgccgtgctgggcgctctctgcgtctacggggccggacatctggagcagccccaaatctctagcacgaagaccctttccaaaacagcgagactggaatgtgttgtgtctggcattaccatcagcgctacatccgtgtattggtaccgggagcgccctggggaagtcattcagttcctcgtgtctatcagctatgacggaaccgttagaaaggagtccggcattccgagcgggaaatttgaagtggatcggatccccgagacatctacctccacgctgaccatccacaacgtcgagaagcaggacattgccacatactattgcgccctgtgggaagtgcatagctctcgccagttcgagccttcccacagcatcaatgtttactga

SEQ ID NO: 3674 - protein, 122 aa, synthetic construct
  REGION 1..122: note = TRGV9__Homo_sapiens__Q99603
MLSLLHTSTLAVLGALCVYGAGHLEQPQISSTKTLSKTARLECVVSGITISATSVYWYRERPGEVIQFLVSISYDGTVRKESGIPSGKFEVDRIPETSTSTLTIHNVEKQDIATYYCALWEV

SEQ ID NO: 3675 - RNA, 366 nt, synthetic construct
  misc_feature 1..366: note = TRGV9__Homo_sapiens__CAA30181
  source 1..366: mol_type = other RNA
atgctgtcactgctccacacatcaacgctggcagtccttggggctctgtgtgtatatggtgcaggtcacctagagcaacctcaaatttccagtactaaaacgctgtcaaaaacagcccgcctggaatgtgtggtgtctggaataacaatttctgcaacatctgtatattggtatcgagagagacctggtgaagtcatacagttcctggtgtccatttcatatgacggcactgtcagaaaggaatccggcattccgtcaggcaaatttgaggtggataggatacctgaaacgtctacatccactctcaccattcacaatgtagagaaacaggacatagctacctactactgtgccttgtgggaggtg

SEQ ID NO: 3676 - RNA, 366 nt, synthetic construct
  misc_feature 1..366: note = derived and/or modified sequence opt1 fromTRGV9__Homo_sapiens__CAA30181
  source 1..366: mol_type = other RNA
atgctgagcctcctgcacacctccaccctggccgtgctcggcgccctgtgcgtctacggggcgggccacctggagcagccccagatcagctccacgaagaccctcagcaagaccgcccgcctggagtgcgtggtgtccgggatcaccatcagcgccacgtccgtctactggtaccgggagcgcccgggcgaggtgatccagttcctggtgagcatctcctacgacgggaccgtccggaaggagagcggcatcccctccggcaagttcgaggtggaccgcatccccgagaccagcacctccacgctcaccatccacaacgtggagaagcaggacatcgccacctactactgcgccctgtgggaggtc

SEQ ID NO: 3677 - RNA, 366 nt, synthetic construct
  misc_feature 1..366: note = derived and/or modified sequence opt2 fromTRGV9__Homo_sapiens__CAA30181
  source 1..366: mol_type = other RNA
atgctctccctcctccacacctccaccctcgccgtcctcggcgccctctgcgtctacggcgccggccacctcgagcagccccagatctcctccaccaagaccctctccaagaccgcccgcctcgagtgcgtcgtctccggcatcaccatctccgccacctccgtctactggtaccgcgagcgccccggcgaggtcatccagttcctcgtctccatctcctacgacggcaccgtccgcaaggagtccggcatcccctccggcaagttcgaggtcgaccgcatccccgagacctccacctccaccctcaccatccacaacgtcgagaagcaggacatcgccacctactactgcgccctctgggaggtc

SEQ ID NO: 3678 - RNA, 366 nt, synthetic construct
  misc_feature 1..366: note = derived and/or modified sequence opt3 fromTRGV9__Homo_sapiens__CAA30181
  source 1..366: mol_type = other RNA
atgctgagcctccttcacacctccacactggccgtgttgggcgctttatgcgtctacggggcaggacatctggagcagccccaaatctcttcaactaagacgctaagtaaaaccgccagactcgaatgtgttgtgagcggtattacaatatccgcgacttctgtatattggtacagggagcggcctggcgaagtgatccagttcctggtctcgatttcatatgacgggaccgtgcgcaaggagagcggaatcccaagtggcaaatttgaagttgatcgaatcccggagacatccacctctactcttacaattcacaacgtggagaagcaggacatagctacctactattgcgccctgtgggaagtc

SEQ ID NO: 3679 - RNA, 366 nt, synthetic construct
  misc_feature 1..366: note = derived and/or modified sequence opt4 fromTRGV9__Homo_sapiens__CAA30181
  source 1..366: mol_type = other RNA
atgctgagcctgctgcacaccagcaccctggccgtgctgggcgccctgtgcgtgtacggcgccggccacctggagcagccccagatcagcagcaccaagaccctgagcaagaccgccagactggagtgcgtggtgagcggcatcaccatcagcgccaccagcgtgtactggtacagagagagacccggcgaggtgatccagttcctggtgagcatcagctacgacggcaccgtgagaaaggagagcggcatccccagcggcaagttcgaggtggacagaatccccgagaccagcaccagcaccctgaccatccacaacgtggagaagcaggacatcgccacctactactgcgccctgtgggaggtg

SEQ ID NO: 3680 - RNA, 366 nt, synthetic construct
  misc_feature 1..366: note = derived and/or modified sequence opt5 fromTRGV9__Homo_sapiens__CAA30181
  source 1..366: mol_type = other RNA
atgctgagcctcctgcacacctccacacttgccgtgctgggcgctctctgcgtctacggggccggacatctggagcagccccaaatctctagcacgaagaccctttccaaaacagcgagactggaatgtgttgtgtctggcattaccatcagcgctacatccgtgtattggtaccgggagcgccctggggaagtcattcagttcctcgtgtctatcagctatgacggaaccgttagaaaggagtccggcattccgagcgggaaatttgaagtggatcggatccccgagacatctacctccacgctgaccatccacaacgtcgagaagcaggacattgccacatactattgcgccctgtgggaagtg

SEQ ID NO: 3681 - protein, 122 aa, synthetic construct
  REGION 1..122: note = TRGV9__Homo_sapiens__Q99604
MLSLLHTSTLAVLGALCVYGAGHLEQPQISSTKTLSKTARLECVVSGIKISATSVYWYRERPGEVIQFLVSISYDGTVRKESGIPSGKFEVDRIPETSTSTLTIHNVEKQDIATYYCALWEV

SEQ ID NO: 3682 - RNA, 366 nt, synthetic construct
  misc_feature 1..366: note = TRGV9__Homo_sapiens__CAA33345
  source 1..366: mol_type = other RNA
atgctgtcactgctccacacatcaacgctggcagtccttggggctctgtgtgtatatggtgcaggtcacctagagcaacctcaaatttccagtactaaaacgctgtcaaaaacagcccgcctggaatgtgtggtgtctggaataaaaatttctgcaacatctgtatattggtatcgagagagacctggtgaagtcatacagttcctggtgtccatttcatatgacggcactgtcagaaaggaatctggcattccgtcaggcaaatttgaggtggataggatacctgaaacgtctacatccactctcaccattcacaatgtagagaaacaggacatagctacctactactgtgccttgtgggaggtg

SEQ ID NO: 3683 - RNA, 366 nt, synthetic construct
  misc_feature 1..366: note = derived and/or modified sequence opt1 fromTRGV9__Homo_sapiens__CAA33345
  source 1..366: mol_type = other RNA
atgctgagcctcctgcacacctccaccctggccgtgctcggcgccctgtgcgtctacggggcgggccacctggagcagccccagatcagctccacgaagaccctcagcaagaccgcccgcctggagtgcgtggtgtccgggatcaagatcagcgccacctccgtctactggtaccgggagcgcccgggcgaggtgatccagttcctggtgagcatctcctacgacgggacggtccggaaggagagcggcatcccctccggcaagttcgaggtggaccgcatccccgagaccagcacctccaccctcacgatccacaacgtggagaagcaggacatcgccacctactactgcgccctgtgggaggtc

SEQ ID NO: 3684 - RNA, 366 nt, synthetic construct
  misc_feature 1..366: note = derived and/or modified sequence opt2 fromTRGV9__Homo_sapiens__CAA33345
  source 1..366: mol_type = other RNA
atgctctccctcctccacacctccaccctcgccgtcctcggcgccctctgcgtctacggcgccggccacctcgagcagccccagatctcctccaccaagaccctctccaagaccgcccgcctcgagtgcgtcgtctccggcatcaagatctccgccacctccgtctactggtaccgcgagcgccccggcgaggtcatccagttcctcgtctccatctcctacgacggcaccgtccgcaaggagtccggcatcccctccggcaagttcgaggtcgaccgcatccccgagacctccacctccaccctcaccatccacaacgtcgagaagcaggacatcgccacctactactgcgccctctgggaggtc

SEQ ID NO: 3685 - RNA, 366 nt, synthetic construct
  misc_feature 1..366: note = derived and/or modified sequence opt3 fromTRGV9__Homo_sapiens__CAA33345
  source 1..366: mol_type = other RNA
atgctgagcctccttcacacctccacactggccgtgttgggcgctttatgcgtctacggggcaggacatctggagcagccccaaatctcttcaactaagacgctaagtaaaaccgccagactcgaatgtgttgtgagcggtattaagatatccgcgacatctgtatattggtacagggagcggcctggcgaagtgatccagttcctggtctcgatttcatatgacgggactgtgcgcaaagagagcggaatcccaagtggcaagtttgaagttgatcgaatcccggagacctccacatctacccttactattcacaacgtggagaaacaggacatagctacatactattgcgccctgtgggaagtc

SEQ ID NO: 3686 - RNA, 366 nt, synthetic construct
  misc_feature 1..366: note = derived and/or modified sequence opt4 fromTRGV9__Homo_sapiens__CAA33345
  source 1..366: mol_type = other RNA
atgctgagcctgctgcacaccagcaccctggccgtgctgggcgccctgtgcgtgtacggcgccggccacctggagcagccccagatcagcagcaccaagaccctgagcaagaccgccagactggagtgcgtggtgagcggcatcaagatcagcgccaccagcgtgtactggtacagagagagacccggcgaggtgatccagttcctggtgagcatcagctacgacggcaccgtgagaaaggagagcggcatccccagcggcaagttcgaggtggacagaatccccgagaccagcaccagcaccctgaccatccacaacgtggagaagcaggacatcgccacctactactgcgccctgtgggaggtg

SEQ ID NO: 3687 - RNA, 366 nt, synthetic construct
  misc_feature 1..366: note = derived and/or modified sequence opt5 fromTRGV9__Homo_sapiens__CAA33345
  source 1..366: mol_type = other RNA
atgctgagcctcctgcacacctccacacttgccgtgctgggcgctctctgcgtctacggggccggacatctggagcagccccaaatctctagcacgaagaccctttccaaaacagcgagactggaatgtgttgtgtctggcattaagatcagcgctacctccgtgtattggtaccgggagcgccctggggaagtcattcagttcctcgtgtctatcagctatgacggaacagttagaaaagagtccggcattccgagcgggaagtttgaagtggatcggatccccgagacctctacatccaccctgacgatccacaacgtcgagaaacaggacattgccacctactattgcgccctgtgggaagtg

SEQ ID NO: 3688 - protein, 793 aa, synthetic construct
  REGION 1..793: note = TRPC1__Homo_sapiens__P48995
MMAALYPSTDLSGASSSSLPSSPSSSSPNEVMALKDVREVKEENTLNEKLFLLACDKGDYYMVKKILEENSSGDLNINCVDVLGRNAVTITIENENLDILQLLLDYGCQSADALLVAIDSEVVGAVDILLNHRPKRSSRPTIVKLMERIQNPEYSTTMDVAPVILAAHRNNYEILTMLLKQDVSLPKPHAVGCECTLCSAKNKKDSLRHSRFRLDIYRCLASPALIMLTEEDPILRAFELSADLKELSLVEVEFRNDYEELARQCKMFAKDLLAQARNSRELEVILNHTSSDEPLDKRGLLEERMNLSRLKLAIKYNQKEFVSQSNCQQFLNTVWFGQMSGYRRKPTCKKIMTVLTVGIFWPVLSLCYLIAPKSQFGRIIHTPFMKFIIHGASYFTFLLLLNLYSLVYNEDKKNTMGPALERIDYLLILWIIGMIWSDIKRLWYEGLEDFLEESRNQLSFVMNSLYLATFALKVVAHNKFHDFADRKDWDAFHPTLVAEGLFAFANVLSYLRLFFMYTTSSILGPLQISMGQMLQDFGKFLGMFLLVLFSFTIGLTQLYDKGYTSKEQKDCVGIFCEQQSNDTFHSFIGTCFALFWYIFSLAHVAIFVTRFSYGEELQSFVGAVIVGTYNVVVVIVLTKLLVAMLHKSFQLIANHEDKEWKFARAKLWLSYFDDKCTLPPPFNIIPSPKTICYMISSLSKWICSHTSKGKVKRQNSLKEWRNLKQKRDENYQKVMCCLVHRYLTSMRQKMQSTDQATVENLNELRQDLSKFRNEIRDLLGFRTSKYAMFYPRN

SEQ ID NO: 3689 - RNA, 2382 nt, synthetic construct
  misc_feature 1..2382: note = TRPC1__Homo_sapiens__AAA93251
  source 1..2382: mol_type = other RNA
atgatggcggccctgtacccgagcacggacctctcgggcgcctcctcctcctccctgccttcctctccatcctcttcctcgccgaacgaggtgatggcgctgaaggatgtgcgggaggtgaaggaggagaatacgctgaatgagaagcttttcttgctggcgtgcgacaagggtgactattatatggttaaaaagattttggaggaaaacagttcaggtgacttgaacataaattgcgtagatgtgcttgggagaaatgctgttaccataactattgaaaacgaaaacttggatatactgcagcttcttttggactacggttgtcagtctgcagatgcacttttggtggcaatcgactctgaagtagtgggagctgttgatatactacttaatcatcgaccaaaacgatcatcaagaccaactatagtaaaactaatggaacgaattcagaatcctgagtattcaacaactatggatgttgcacctgtcattttagctgctcatcgtaacaactatgaaattcttacaatgctcttaaaacaggatgtatctctacccaagccccatgcagttggctgtgaatgcacattgtgttctgcaaaaaacaaaaaggatagcctccggcattccaggtttcgtcttgatatatatcgatgtttggccagtccagctctaataatgttaacagaggaggatccaattctgagagcatttgaacttagtgctgatttaaaagaactaagtcttgtggaggtggaattcaggaatgattatgaggaactagcccggcaatgtaaaatgtttgctaaggatttacttgcacaagcccggaattctcgtgaattggaagttattctaaaccatacgtctagtgacgagcctcttgacaaacggggattattagaagaaagaatgaatttaagtcgtctaaaacttgctatcaaatataaccagaaagagtttgtctcccagtctaactgccagcagttcctgaacactgtttggtttggacagatgtcgggttaccgacgcaagcccacctgtaagaagataatgactgttttgacagtaggcatcttttggccagttttgtcactttgttatttgatagctcccaaatctcagtttggcagaatcattcacacaccttttatgaaatttatcattcatggagcatcatatttcacatttctgctgttgcttaatctatactctcttgtctacaatgaggataagaaaaacacaatggggccagcccttgaaagaatagactatcttcttattctgtggattattgggatgatttggtcagacattaaaagactctggtatgaagggttggaagactttttagaagaatctcgtaatcaactcagttttgtcatgaattctctttatttggcaacctttgccctcaaagtggttgctcacaacaagtttcatgattttgctgatcggaaggattgggatgcattccatcctacactggtggcagaagggctttttgcatttgcaaatgttctaagttatcttcgtctcttttttatgtatacaaccagctctatcttgggtccattacagatttcaatgggacagatgttacaagattttggaaaatttcttgggatgtttcttcttgttttgttttctttcacaattggactgacacaactgtatgataaaggatatacttcaaaggagcagaaggactgtgtaggcatcttctgtgaacagcaaagcaatgataccttccattcgttcattggcacctgctttgctttgttctggtatattttctccttagcgcatgtggcaatctttgtcacaagatttagctatggagaagaactgcagtcctttgtgggagctgtcattgttggtacatacaatgtcgtggttgtgattgtgcttaccaaactgctggtggcaatgcttcataaaagctttcagttgatagcaaatcatgaagacaaagaatggaagtttgctcgagcaaaattatggcttagctactttgatgacaaatgtacgttacctccacctttcaacatcattccctcaccaaagactatctgctatatgattagtagcctcagtaagtggatttgctctcatacatcaaaaggcaaggtcaaacggcaaaacagtttaaaggaatggaggaatttgaaacagaagagagatgaaaactatcaaaaagtgatgtgctgcctagtgcatcgttacttgacttccatgagacagaagatgcaaagtacagatcaggcaactgtggaaaatctaaacgaactgcgccaagatctgtcaaaattccgaaatgaaataagggatttacttggctttcggacttctaaatatgctatgttttatccaagaaattaa

SEQ ID NO: 3690 - RNA, 2382 nt, synthetic construct
  misc_feature 1..2382: note = derived and/or modified sequence opt1 fromTRPC1__Homo_sapiens__AAA93251
  source 1..2382: mol_type = other RNA
atgatggccgccctgtaccccagcaccgacctctccggcgcgagctccagctccctgccgagctcccccagctccagctcccccaacgaggtgatggccctgaaggacgtccgcgaggtgaaggaggagaacaccctcaacgagaagctgttcctgctcgcctgcgacaagggggactactacatggtgaagaagatcctggaggagaacagctccggcgacctgaacatcaactgcgtcgacgtgctcgggcggaacgccgtgacgatcaccatcgagaacgagaacctggacatcctgcagctcctgctggactacggctgccagagcgccgacgcgctcctggtcgccatcgactccgaggtggtgggggccgtcgacatcctgctcaaccaccgccccaagcggagctcccgcccgaccatcgtgaagctgatggagcggatccagaaccccgagtacagcaccacgatggacgtggcccccgtcatcctggcggcccaccgcaacaactacgagatcctcaccatgctgctgaagcaggacgtgtccctccccaagccgcacgccgtgggctgcgagtgcaccctgtgcagcgccaagaacaagaaggacagcctgcggcactcccgcttccggctcgacatctaccgctgcctggccagccccgcgctgatcatgctcaccgaggaggaccccatcctgcgggccttcgagctgtccgccgacctcaaggagctgagcctggtcgaggtggagttccgcaacgactacgaggagctcgcccggcagtgcaagatgttcgccaaggacctgctggcgcaggcccgcaactcccgggagctcgaggtgatcctgaaccacacgagctccgacgagcccctggacaagcgcggcctcctggaggagcggatgaacctgagccgcctcaagctggccatcaagtacaaccagaaggagttcgtctcccagagcaactgccagcagttcctgaacaccgtgtggttcgggcagatgtccggctaccggcgcaagccgacctgcaagaagatcatgaccgtgctcacggtcgggatcttctggcccgtgctgagcctgtgctacctgatcgcccccaagtcccagttcggccggatcatccacacccccttcatgaagttcatcatccacggggccagctacttcaccttcctcctgctgctcaacctgtactccctggtgtacaacgaggacaagaagaacaccatgggcccggcgctcgagcgcatcgactacctgctgatcctctggatcatcggcatgatctggagcgacatcaagcgcctgtggtacgaggggctggaggacttcctcgaggagtcccggaaccagctgagcttcgtcatgaactccctgtacctcgccacgttcgccctgaaggtggtcgcccacaacaagttccacgacttcgccgaccgcaaggactgggacgcgttccaccccaccctggtggccgagggcctcttcgccttcgccaacgtgctgagctacctgcgcctcttcttcatgtacaccaccagctccatcctggggcccctgcagatcagcatgggccagatgctccaggacttcggcaagttcctggggatgttcctgctcgtcctgttctccttcacgatcggcctgacccagctctacgacaaggggtacaccagcaaggagcagaaggactgcgtgggcatcttctgcgagcagcagtccaacgacaccttccacagcttcatcgggacgtgcttcgcgctgttctggtacatcttctccctggcccacgtggccatcttcgtcacccggttcagctacggcgaggagctccagtccttcgtgggcgccgtgatcgtcgggacctacaacgtggtggtcgtgatcgtgctgaccaagctgctcgtcgccatgctgcacaagagcttccagctgatcgcgaaccacgaggacaaggagtggaagttcgcccgggccaagctctggctgtcctacttcgacgacaagtgcacgctgcccccgcccttcaacatcatccccagccccaagaccatctgctacatgatctccagcctctccaagtggatctgcagccacacctccaagggcaaggtgaagcgccagaacagcctgaaggagtggcggaacctgaagcagaagcgcgacgagaactaccagaaggtgatgtgctgcctcgtccaccggtacctgaccagcatgcgccagaagatgcagtccacggaccaggccaccgtggagaacctgaacgagctccggcaggacctgagcaagttccgcaacgagatccgggacctgctcgggttccgcacctccaagtacgccatgttctacccgcggaactga

SEQ ID NO: 3691 - RNA, 2382 nt, synthetic construct
  misc_feature 1..2382: note = derived and/or modified sequence opt2 fromTRPC1__Homo_sapiens__AAA93251
  source 1..2382: mol_type = other RNA
atgatggccgccctctacccctccaccgacctctccggcgcctcctcctcctccctcccctcctccccctcctcctcctcccccaacgaggtcatggccctcaaggacgtccgcgaggtcaaggaggagaacaccctcaacgagaagctcttcctcctcgcctgcgacaagggcgactactacatggtcaagaagatcctcgaggagaactcctccggcgacctcaacatcaactgcgtcgacgtcctcggccgcaacgccgtcaccatcaccatcgagaacgagaacctcgacatcctccagctcctcctcgactacggctgccagtccgccgacgccctcctcgtcgccatcgactccgaggtcgtcggcgccgtcgacatcctcctcaaccaccgccccaagcgctcctcccgccccaccatcgtcaagctcatggagcgcatccagaaccccgagtactccaccaccatggacgtcgcccccgtcatcctcgccgcccaccgcaacaactacgagatcctcaccatgctcctcaagcaggacgtctccctccccaagccccacgccgtcggctgcgagtgcaccctctgctccgccaagaacaagaaggactccctccgccactcccgcttccgcctcgacatctaccgctgcctcgcctcccccgccctcatcatgctcaccgaggaggaccccatcctccgcgccttcgagctctccgccgacctcaaggagctctccctcgtcgaggtcgagttccgcaacgactacgaggagctcgcccgccagtgcaagatgttcgccaaggacctcctcgcccaggcccgcaactcccgcgagctcgaggtcatcctcaaccacacctcctccgacgagcccctcgacaagcgcggcctcctcgaggagcgcatgaacctctcccgcctcaagctcgccatcaagtacaaccagaaggagttcgtctcccagtccaactgccagcagttcctcaacaccgtctggttcggccagatgtccggctaccgccgcaagcccacctgcaagaagatcatgaccgtcctcaccgtcggcatcttctggcccgtcctctccctctgctacctcatcgcccccaagtcccagttcggccgcatcatccacacccccttcatgaagttcatcatccacggcgcctcctacttcaccttcctcctcctcctcaacctctactccctcgtctacaacgaggacaagaagaacaccatgggccccgccctcgagcgcatcgactacctcctcatcctctggatcatcggcatgatctggtccgacatcaagcgcctctggtacgagggcctcgaggacttcctcgaggagtcccgcaaccagctctccttcgtcatgaactccctctacctcgccaccttcgccctcaaggtcgtcgcccacaacaagttccacgacttcgccgaccgcaaggactgggacgccttccaccccaccctcgtcgccgagggcctcttcgccttcgccaacgtcctctcctacctccgcctcttcttcatgtacaccacctcctccatcctcggccccctccagatctccatgggccagatgctccaggacttcggcaagttcctcggcatgttcctcctcgtcctcttctccttcaccatcggcctcacccagctctacgacaagggctacacctccaaggagcagaaggactgcgtcggcatcttctgcgagcagcagtccaacgacaccttccactccttcatcggcacctgcttcgccctcttctggtacatcttctccctcgcccacgtcgccatcttcgtcacccgcttctcctacggcgaggagctccagtccttcgtcggcgccgtcatcgtcggcacctacaacgtcgtcgtcgtcatcgtcctcaccaagctcctcgtcgccatgctccacaagtccttccagctcatcgccaaccacgaggacaaggagtggaagttcgcccgcgccaagctctggctctcctacttcgacgacaagtgcaccctccccccccccttcaacatcatcccctcccccaagaccatctgctacatgatctcctccctctccaagtggatctgctcccacacctccaagggcaaggtcaagcgccagaactccctcaaggagtggcgcaacctcaagcagaagcgcgacgagaactaccagaaggtcatgtgctgcctcgtccaccgctacctcacctccatgcgccagaagatgcagtccaccgaccaggccaccgtcgagaacctcaacgagctccgccaggacctctccaagttccgcaacgagatccgcgacctcctcggcttccgcacctccaagtacgccatgttctacccccgcaactga

SEQ ID NO: 3692 - RNA, 2382 nt, synthetic construct
  misc_feature 1..2382: note = derived and/or modified sequence opt3 fromTRPC1__Homo_sapiens__AAA93251
  source 1..2382: mol_type = other RNA
atgatggccgctctgtaccccagcaccgacctctccggcgcatcttcaagtagccttccttcctctccatcgtcaagcagtccgaacgaggtgatggccctgaaggatgtcagagaagttaaagaggaaaatacattgaacgagaagttattcctgctagcgtgcgacaaaggggattattacatggtgaagaaaatcctcgaagaaaattcctctggagacctgaacattaattgtgtagatgtgcttggtaggaacgctgtcactataacgatcgagaatgaaaacctggacattttgcagctcctgctggattatggctgccaaagcgccgacgcactcttagtggccatcgattccgaggttgtgggggctgtcgacattctgcttaatcaccggcccaagcgctcaagtcgacctaccatcgtgaagttgatggaacgtatacagaacccagagtacagcacaactatggatgtagcacccgttatcctggccgctcatagaaataactatgagattctaaccatgctcctgaaacaggacgtgtctcttcctaagccacacgccgtcggatgtgaatgcacactgtgttccgcgaaaaataagaaagattcattgaggcatagccggtttcgcctcgacatctacagatgcctggcaagtcccgccttaattatgctgaccgaggaagaccctatcctcagggctttcgagctttctgccgatctgaaggaattgtccctagtggaggtggagtttcggaacgactatgaggagctggcacgccagtgtaagatgttcgctaaagatctcctggcccaagcgcgaaatagcagagaacttgaggtcatactgaaccacacttcgtctgacgaaccattggataagaggggcctcctggaggagcggatgaacttatcccgtctgaaactagccattaagtacaatcagaaagaatttgtttcacagagtaactgccagcaattcctcaatacagtgtggtttggtcagatgagcgggtaccgcagaaagccgacctgtaaaaagatcatgacggtactgactgtgggaattttctggcccgtcctttccttgtgctatctgatcgcacctaagtctcagtttggcaggatcattcataccccattcatgaaatttataatccacggcgctagctacttcacatttctcctgcttctgaacttgtattcactcgtgtacaatgaggacaagaaaaacactatggggcccgccctggaacggattgattatttactgatcctatggataattggaatgatctggagtgacatcaagcgactctggtacgagggtctggaagatttccttgaggagtcccgcaatcagttgagcttcgttatgaactctctgtatctcgctacctttgccctgaaagtggtcgcacacaataagttccatgactttgccgatagaaaggactgggacgctttccaccctacattagtggcggaaggcctgtttgcattcgccaacgtactttcatacttgaggctctttttcatgtacaccacgagtagcattctggggccactacaaatctccatgggacagatgctgcaggattttggcaaattcctcggtatgtttctgcttgttttgttctcttttactattgggctgacacaattatatgacaagggatacacctcgaaagagcagaaggattgtgtgggcatattctgcgaacagcagagcaatgacactttccattcctttatcggcacatgcttcgctctcttttggtatattttctcactggcccacgtcgcaatctttgtgacccggttcagttacggggaggagcttcaatcttttgtcggagccgtgatcgttggtacgtataacgtggtagtcgtgattgttctgaccaaattgctcgtggctatgctgcacaagagcttccagctaatagccaatcatgaagataaggagtggaaatttgcacgcgcgaagctgtggctctcctacttcgacgataaatgtacactgcccccgccttttaacatcattccctcaccaaagactatctgctatatgattagctctctttccaaatggatctgtagtcacaccagcaagggcaaggtcaaaagacaaaattctttgaaggaatggaggaacctgaaacagaagcgtgacgagaactaccagaaagtgatgtgctgtttagtacatcggtacctcacatccatgcgacagaagatgcagtcaactgatcaggctaccgtggaaaatctgaacgagcttagacaagacctgagtaaattcaggaatgagatacgcgatctactcgggtttcggacaagcaagtatgccatgttctaccctagaaactga

SEQ ID NO: 3693 - RNA, 2382 nt, synthetic construct
  misc_feature 1..2382: note = derived and/or modified sequence opt4 fromTRPC1__Homo_sapiens__AAA93251
  source 1..2382: mol_type = other RNA
atgatggccgccctgtaccccagcaccgacctgagcggcgccagcagcagcagcctgcccagcagccccagcagcagcagccccaacgaggtgatggccctgaaggacgtgagagaggtgaaggaggagaacaccctgaacgagaagctgttcctgctggcctgcgacaagggcgactactacatggtgaagaagatcctggaggagaacagcagcggcgacctgaacatcaactgcgtggacgtgctgggcagaaacgccgtgaccatcaccatcgagaacgagaacctggacatcctgcagctgctgctggactacggctgccagagcgccgacgccctgctggtggccatcgacagcgaggtggtgggcgccgtggacatcctgctgaaccacagacccaagagaagcagcagacccaccatcgtgaagctgatggagagaatccagaaccccgagtacagcaccaccatggacgtggcccccgtgatcctggccgcccacagaaacaactacgagatcctgaccatgctgctgaagcaggacgtgagcctgcccaagccccacgccgtgggctgcgagtgcaccctgtgcagcgccaagaacaagaaggacagcctgagacacagcagattcagactggacatctacagatgcctggccagccccgccctgatcatgctgaccgaggaggaccccatcctgagagccttcgagctgagcgccgacctgaaggagctgagcctggtggaggtggagttcagaaacgactacgaggagctggccagacagtgcaagatgttcgccaaggacctgctggcccaggccagaaacagcagagagctggaggtgatcctgaaccacaccagcagcgacgagcccctggacaagagaggcctgctggaggagagaatgaacctgagcagactgaagctggccatcaagtacaaccagaaggagttcgtgagccagagcaactgccagcagttcctgaacaccgtgtggttcggccagatgagcggctacagaagaaagcccacctgcaagaagatcatgaccgtgctgaccgtgggcatcttctggcccgtgctgagcctgtgctacctgatcgcccccaagagccagttcggcagaatcatccacacccccttcatgaagttcatcatccacggcgccagctacttcaccttcctgctgctgctgaacctgtacagcctggtgtacaacgaggacaagaagaacaccatgggccccgccctggagagaatcgactacctgctgatcctgtggatcatcggcatgatctggagcgacatcaagagactgtggtacgagggcctggaggacttcctggaggagagcagaaaccagctgagcttcgtgatgaacagcctgtacctggccaccttcgccctgaaggtggtggcccacaacaagttccacgacttcgccgacagaaaggactgggacgccttccaccccaccctggtggccgagggcctgttcgccttcgccaacgtgctgagctacctgagactgttcttcatgtacaccaccagcagcatcctgggccccctgcagatcagcatgggccagatgctgcaggacttcggcaagttcctgggcatgttcctgctggtgctgttcagcttcaccatcggcctgacccagctgtacgacaagggctacaccagcaaggagcagaaggactgcgtgggcatcttctgcgagcagcagagcaacgacaccttccacagcttcatcggcacctgcttcgccctgttctggtacatcttcagcctggcccacgtggccatcttcgtgaccagattcagctacggcgaggagctgcagagcttcgtgggcgccgtgatcgtgggcacctacaacgtggtggtggtgatcgtgctgaccaagctgctggtggccatgctgcacaagagcttccagctgatcgccaaccacgaggacaaggagtggaagttcgccagagccaagctgtggctgagctacttcgacgacaagtgcaccctgcccccccccttcaacatcatccccagccccaagaccatctgctacatgatcagcagcctgagcaagtggatctgcagccacaccagcaagggcaaggtgaagagacagaacagcctgaaggagtggagaaacctgaagcagaagagagacgagaactaccagaaggtgatgtgctgcctggtgcacagatacctgaccagcatgagacagaagatgcagagcaccgaccaggccaccgtggagaacctgaacgagctgagacaggacctgagcaagttcagaaacgagatcagagacctgctgggcttcagaaccagcaagtacgccatgttctaccccagaaactga

SEQ ID NO: 3694 - RNA, 2382 nt, synthetic construct
  misc_feature 1..2382: note = derived and/or modified sequence opt5 fromTRPC1__Homo_sapiens__AAA93251
  source 1..2382: mol_type = other RNA
atgatggccgctctgtaccccagcaccgacctctccggcgcctctagctcctctctgcctagctccccgtctagctccagccccaacgaggtgatggcgcttaaggatgtcagagaagttaaagaggaaaatacactgaacgagaagctctttctgcttgcttgcgacaaaggggattattacatggtgaagaaaatcctggaagaaaattcttccggagacctcaacattaattgtgtggatgtcctgggccggaacgccgtgacgatcaccattgagaatgaaaacctggacatcctccagctgcttctggattatgggtgccaaagcgccgacgctctcctggttgccattgattctgaggtggtcggagctgtggacatccttctgaatcaccgccctaagagatccagccggcccacaatcgttaagctcatggaacgcattcagaaccctgagtactctaccacaatggatgtggcccccgtcatcctggcggcccatagaaataactatgagattctgaccatgctcctgaaacaggacgtgtcccttcctaagccgcacgctgtgggctgtgaatgcacactgtgtagcgccaaaaataagaaagattccctccggcattctcgctttagactggacatctaccggtgccttgctagccccgccctgattatgctcaccgaggaagaccctatcctgcgcgcgttcgagctgtccgccgatctcaaggaactgagccttgtcgaggttgagtttagaaacgactatgaggagctggctcggcagtgtaagatgttcgccaaagatctcctggctcaagcccgcaattctagagaacttgaggtgattctgaaccacacgtccagcgacgaacccctcgataagcgggggctgctggaggagcgcatgaacctctctagactgaaacttgccatcaagtacaatcagaaagaatttgtgagccagtccaactgccagcaattcctgaataccgtctggtttggacagatgtctggctaccggagaaagcctacatgtaaaaagatcatgaccgtgctcacagttggcattttctggcccgtgctgagcctgtgctatcttatcgctccgaagtcccagtttgggcgcattatccatacccctttcatgaaatttattatccacggagcgagctacttcacgtttctcctgctgctcaacctgtattctcttgtctacaatgaggacaagaaaaacacaatgggccccgccctggaacggatcgattatctcctgattctgtggatcattgggatgatctggtccgacattaagagactttggtacgagggactcgaagatttcctggaggagagccgcaatcagctgtctttcgtgatgaactccctctatctggctacctttgcccttaaagttgtggcccacaataagttccatgactttgctgatcggaaggactgggacgccttccaccctacactggtcgcggaaggcctctttgctttcgccaacgtgctgagctacctgagacttttcttcatgtacaccacctcctctatcctcgggcccctgcaaatcagcatgggacagatgctgcaggattttggcaaattcctcggcatgtttctgcttgtcctgttctcctttacaattgggctcacgcaactgtatgacaagggatacacctctaaagagcagaaggattgtgtgggcatcttctgcgaacagcagagcaatgacacattccattcctttattgggacctgcttcgccctgttttggtatatcttcagccttgctcacgttgccatttttgtgacacgcttctcttacggagaggagctccaatcctttgtcggcgctgtgatcgttgggacctataacgtggtcgtggtgattgttctgacgaaactgctcgtcgccatgctgcacaagagcttccagcttatcgcgaatcatgaagataaggagtggaaatttgcccgggctaagctgtggctctcttacttcgacgataaatgtacactgccccctccgtttaacatcattccctcccctaagaccatctgctatatgattagctctctgagcaaatggatctgttcccacaccagcaagggaaaggtgaaaagacaaaattctcttaaggaatggcgcaacctgaaacagaagcgggacgagaactaccagaaagtgatgtgctgtctcgtccatagatacctgacatccatgcgccagaagatgcagagcaccgatcaggccacagtggaaaatctcaacgagctgcggcaagacctttccaaattcagaaatgagattcgggatctgctcggctttcgcacgtctaagtatgctatgttctaccccagaaactga

SEQ ID NO: 3695 - protein, 1104 aa, synthetic construct
  REGION 1..1104: note = TRP-p8__Homo_sapiens__Q7Z2W7
MSFRAARLSMRNRRNDTLDSTRTLYSSASRSTDLSYSESDLVNFIQANFKKRECVFFTKDSKATENVCKCGYAQSQHMEGTQINQSEKWNYKKHTKEFPTDAFGDIQFETLGKKGKYIRLSCDTDAEILYELLTQHWHLKTPNLVISVTGGAKNFALKPRMRKIFSRLIYIAQSKGAWILTGGTHYGLMKYIGEVVRDNTISRSSEENIVAIGIAAWGMVSNRDTLIRNCDAEGYFLAQYLMDDFTRDPLYILDNNHTHLLLVDNGCHGHPTVEAKLRNQLEKYISERTIQDSNYGGKIPIVCFAQGGGKETLKAINTSIKNKIPCVVVEGSGQIADVIASLVEVEDALTSSAVKEKLVRFLPRTVSRLPEEETESWIKWLKEILECSHLLTVIKMEEAGDEIVSNAISYALYKAFSTSEQDKDNWNGQLKLLLEWNQLDLANDEIFTNDRRWESADLQEVMFTALIKDRPKFVRLFLENGLNLRKFLTHDVLTELFSNHFSTLVYRNLQIAKNSYNDALLTFVWKLVANFRRGFRKEDRNGRDEMDIELHDVSPITRHPLQALFIWAILQNKKELSKVIWEQTRGCTLAALGASKLLKTLAKVKNDINAAGESEELANEYETRAVELFTECYSSDEDLAEQLLVYSCEAWGGSNCLELAVEATDQHFIAQPGVQNFLSKQWYGEISRDTKNWKIILCLFIIPLVGCGFVSFRKKPVDKHKKLLWYYVAFFTSPFVVFSWNVVFYIAFLLLFAYVLLMDFHSVPHPPELVLYSLVFVLFCDEVRQWYVNGVNYFTDLWNVMDTLGLFYFIAGIVFRLHSSNKSSLYSGRVIFCLDYIIFTLRLIHIFTVSRNLGPKIIMLQRMLIDVFFFLFLFAVWMVAFGVARQGILRQNEQRWRWIFRSVIYEPYLAMFGQVPSDVDGTTYDFAHCTFTGNESKPLCVELDEHNLPRFPEWITIPLVCIYMLSTNILLVNLLVAMFGYTVGTVQENNDQVWKFQRYFLVQEYCSRLNIPFPFIVFAYFYMVVKKCFKCCCKEKNMESSVCCFKNEDNETLAWEGVMKENYLVKINTKANDTSEEMRHRFRQLDTKLNDLKGLLKEIANKIK

SEQ ID NO: 3696 - RNA, 3315 nt, synthetic construct
  misc_feature 1..3315: note = TRP-p8__Homo_sapiens__AAZ73614
  source 1..3315: mol_type = other RNA
atgtcctttcgggcagccaggctcagcatgaggaacagaaggaatgacactctggacagcacccggaccctgtactccagcgcgtctcggagcacagacttgtcttacagtgaaagcgacttggtgaattttattcaagcaaattttaagaaacgagaatgtgtcttctttaccaaagattccaaggccacggagaatgtgtgcaagtgtggctatgcccagagccagcacatggaaggcacccagatcaaccaaagtgagaaatggaactacaagaaacacaccaaggaatttcctaccgacgcctttggggatattcagtttgagacactggggaagaaagggaagtatatacgtctgtcctgcgacacggacgcggaaatcctttacgagctgctgacccagcactggcacctgaaaacacccaacctggtcatttctgtgaccgggggcgccaagaacttcgccctgaagccgcgcatgcgcaagatcttcagccggctcatctacatcgcgcagtccaaaggtgcttggattctcacgggaggcacccattatggcctgatgaagtacatcggggaggtggtgagagataacaccatcagcaggagttcagaggagaatattgtggccattggcatagcagcttggggcatggtctccaaccgggacaccctcatcaggaattgcgatgctgagggctattttttagcccagtaccttatggatgacttcacaagagatccactgtatatcctggacaacaaccacacacatttgctgctcgtggacaatggctgtcatggacatcccactgtcgaagcaaagctccggaatcagctagagaagtatatctctgagcgcactattcaagattccaactatggtggcaagatccccattgtgtgttttgcccaaggaggtggaaaagagactttgaaagccatcaatacctccatcaaaaataaaattccttgtgtggtggtggaaggctcgggccagatcgctgatgtgatcgctagcctggtggaggtggaggatgccctgacatcttctgccgtcaaggagaagctggtacgctttttaccccgcacggtgtcccggctgcctgaggaggagactgagagttggatcaaatggctcaaagaaattctcgaatgttctcacctattaacagttattaaaatggaagaagctggggatgaaattgtgagcaatgccatctcctacgctctatacaaagccttcagcaccagtgagcaagacaaggataactggaatgggcagctgaagcttctgctggagtggaaccagctggacttagccaatgatgagattttcaccaatgaccgccgatgggagtctgctgaccttcaagaagtcatgtttacggctctcataaaggacagacccaagtttgtccgcctctttctggagaatggcttgaacctacggaagtttctcacccatgatgtcctcactgaactcttctccaaccacttcagcacgcttgtgtaccggaatctgcagatcgccaagaattcctataatgatgccctcctcacgtttgtctggaaactggttgcgaacttccgaagaggcttccggaaggaagacagaaatggccgggacgagatggacatagaactccacgacgtgtctcctattactcggcaccccctgcaagctctcttcatctgggccattcttcagaataagaaggaactctccaaagtcatttgggagcagaccaggggctgcactctggcagccctgggagccagcaagcttctgaagactctggccaaagtgaagaacgacatcaatgctgctggggagtccgaggagctggctaatgagtacgagacccgggctgttgagctgttcactgagtgttacagcagcgatgaagacttggcagaacagctgctggtctattcctgtgaagcttggggtggaagcaactgtctggagctggcggtggaggccacagaccagcatttcatcgcccagcctggggtccagaattttctttctaagcaatggtatggagagatttcccgagacaccaagaactggaagattatcctgtgtctgtttattatacccttggtgggctgtggctttgtatcatttaggaagaaacctgtcgacaagcacaagaagctgctttggtactatgtggcgttcttcacctcccccttcgtggtcttctcctggaatgtggtcttctacatcgccttcctcctgctgtttgcctacgtgctgctcatggatttccattcggtgccacacccccccgagctggtcctgtactcgctggtctttgtcctcttctgtgatgaagtgagacagtggtacgtaaatggggtgaattattttactgacctgtggaatgtgatggacacgctggggcttttttacttcatagcaggaattgtatttcggctccactcttctaataaaagctctttgtattctggacgagtcattttctgtctggactacattattttcactctaagattgatccacatttttactgtaagcagaaacttaggacccaagattataatgctgcagaggatgctgatcgatgtgttcttcttcctgttcctctttgcggtgtggatggtggcctttggcgtggccaggcaagggatccttaggcagaatgagcagcgctggaggtggatattccgttcggtcatctacgagccctacctggccatgttcggccaggtgcccagtgacgtggatggtaccacgtatgactttgcccactgcaccttcactgggaatgagtccaagccactgtgtgtggagctggatgagcacaacctgccccggttccccgagtggatcaccatccccctggtgtgcatctacatgttatccaccaacatcctgctggtcaacctgctggtcgccatgtttggctacacggtgggcaccgtccaggagaacaatgaccaggtctggaagttccagaggtacttcctggtgcaggagtactgcagccgcctcaatatccccttccccttcatcgtcttcgcttacttctacatggtggtgaagaagtgcttcaagtgttgctgcaaggagaaaaacatggagtcttctgtctgctgtttcaaaaatgaagacaatgagactctggcatgggagggtgtcatgaaggaaaactaccttgtcaagatcaacacaaaagccaacgacacctcagaggaaatgaggcatcgatttagacaactggatacaaagcttaatgatctcaagggtcttctgaaagagattgctaataaaatcaaataa

SEQ ID NO: 3697 - RNA, 3315 nt, synthetic construct
  misc_feature 1..3315: note = derived and/or modified sequence opt1 fromTRP-p8__Homo_sapiens__AAZ73614
  source 1..3315: mol_type = other RNA
atgagcttccgcgccgcccggctgtccatgcgcaaccggcgcaacgacaccctcgacagcacccggacgctgtactccagcgcgtcccgcagcaccgacctgtcctacagcgagtccgacctcgtgaacttcatccaggccaacttcaagaagcgggagtgcgtcttcttcaccaaggacagcaaggccaccgagaacgtgtgcaagtgcggctacgcccagtcccagcacatggaggggacgcagatcaaccagagcgagaagtggaactacaagaagcacaccaaggagttccccaccgacgccttcggcgacatccagttcgagaccctggggaagaagggcaagtacatccgcctgtcctgcgacacggacgcggagatcctctacgagctgctgacccagcactggcacctcaagaccccgaacctggtgatcagcgtcaccgggggcgccaagaacttcgccctgaagccccggatgcgcaagatcttctcccggctcatctacatcgcccagagcaagggcgcgtggatcctgaccgggggcacgcactacgggctgatgaagtacatcggcgaggtggtgcgcgacaacaccatctcccggagctccgaggagaacatcgtcgccatcgggatcgccgcctggggcatggtgagcaaccgcgacaccctcatccggaactgcgacgccgagggctacttcctggcgcagtacctgatggacgacttcacgcgcgaccccctctacatcctggacaacaaccacacccacctcctcctggtggacaacgggtgccacggccaccccaccgtcgaggccaagctgcggaaccagctcgagaagtacatcagcgagcgcaccatccaggactccaactacgggggcaagatcccgatcgtgtgcttcgcccagggcgggggcaaggagacgctgaaggccatcaacaccagcatcaagaacaagatcccctgcgtggtcgtggaggggtccggccagatcgccgacgtgatcgcgagcctggtcgaggtggaggacgccctcacctccagcgccgtgaaggagaagctggtccggttcctgccccgcaccgtgtcccggctccccgaggaggagacggagagctggatcaagtggctgaaggagatcctggagtgctcccacctcctgaccgtgatcaagatggaggaggccggggacgagatcgtcagcaacgccatctcctacgcgctgtacaaggccttcagcacctccgagcaggacaaggacaactggaacggccagctcaagctgctgctcgagtggaaccagctggacctggccaacgacgagatcttcaccaacgaccgccgctgggagagcgccgacctccaggaggtgatgttcacggccctgatcaaggaccggccgaagttcgtgcgcctgttcctcgagaacggcctgaacctgcggaagttcctcacccacgacgtcctgaccgagctgttctccaaccacttcagcaccctggtgtaccgcaacctccagatcgcgaagaactcctacaacgacgccctgctgacgttcgtctggaagctcgtggccaacttccggcgcgggttccggaaggaggaccgcaacggccgggacgagatggacatcgagctgcacgacgtgagccccatcacccgccaccccctgcaggccctcttcatctgggcgatcctgcagaacaagaaggagctgtccaaggtcatctgggagcagacccgggggtgcaccctcgccgccctgggcgccagcaagctgctcaagacgctggccaaggtgaagaacgacatcaacgcggccggggagagcgaggagctggccaacgagtacgagacccgcgccgtggagctgttcaccgagtgctactccagcgacgaggacctggccgagcagctgctcgtctactcctgcgaggcgtggggcggcagcaactgcctggagctggccgtggaggccaccgaccagcacttcatcgcccagcccggggtgcagaacttcctctccaagcagtggtacggcgagatcagccgggacaccaagaactggaagatcatcctgtgcctgttcatcatcccgctcgtcgggtgcggcttcgtgtccttccgcaagaagcccgtggacaagcacaagaagctgctgtggtactacgtcgccttcttcacgagccccttcgtggtgttctcctggaacgtcgtgttctacatcgcgttcctcctgctgttcgcctacgtgctcctgatggacttccacagcgtcccccacccgcccgagctggtgctctactccctggtgttcgtcctgttctgcgacgaggtgcggcagtggtacgtgaacggggtcaactacttcaccgacctctggaacgtgatggacaccctgggcctgttctacttcatcgccggcatcgtgttccgcctccacagctccaacaagagctccctgtacagcgggcgggtcatcttctgcctggactacatcatcttcaccctccgcctgatccacatcttcacggtgtcccggaacctgggccccaagatcatcatgctccagcgcatgctgatcgacgtgttcttcttcctgttcctcttcgccgtctggatggtggcgttcggggtggcccgccagggcatcctgcggcagaacgagcagcgctggcggtggatcttccgcagcgtcatctacgagccctacctggccatgttcggccaggtgccgagcgacgtggacgggaccacctacgacttcgcccactgcaccttcacgggcaacgagtccaagcccctctgcgtcgagctggacgagcacaacctgccccggttccccgagtggatcaccatcccgctcgtgtgcatctacatgctgagcaccaacatcctgctcgtgaacctgctggtcgccatgttcgggtacaccgtgggcacggtgcaggagaacaacgaccaggtctggaagttccagcgctacttcctcgtgcaggagtactgctcccggctgaacatccccttccccttcatcgtgttcgcgtacttctacatggtcgtgaagaagtgcttcaagtgctgctgcaaggagaagaacatggagagctccgtgtgctgcttcaagaacgaggacaacgagaccctggcctgggagggggtcatgaaggagaactacctcgtgaagatcaacaccaaggccaacgacaccagcgaggagatgcgccaccggttccgccagctggacacgaagctgaacgacctcaagggcctgctgaaggagatcgccaacaagatcaagtga

SEQ ID NO: 3698 - RNA, 3315 nt, synthetic construct
  misc_feature 1..3315: note = derived and/or modified sequence opt2 fromTRP-p8__Homo_sapiens__AAZ73614
  source 1..3315: mol_type = other RNA
atgtccttccgcgccgcccgcctctccatgcgcaaccgccgcaacgacaccctcgactccacccgcaccctctactcctccgcctcccgctccaccgacctctcctactccgagtccgacctcgtcaacttcatccaggccaacttcaagaagcgcgagtgcgtcttcttcaccaaggactccaaggccaccgagaacgtctgcaagtgcggctacgcccagtcccagcacatggagggcacccagatcaaccagtccgagaagtggaactacaagaagcacaccaaggagttccccaccgacgccttcggcgacatccagttcgagaccctcggcaagaagggcaagtacatccgcctctcctgcgacaccgacgccgagatcctctacgagctcctcacccagcactggcacctcaagacccccaacctcgtcatctccgtcaccggcggcgccaagaacttcgccctcaagccccgcatgcgcaagatcttctcccgcctcatctacatcgcccagtccaagggcgcctggatcctcaccggcggcacccactacggcctcatgaagtacatcggcgaggtcgtccgcgacaacaccatctcccgctcctccgaggagaacatcgtcgccatcggcatcgccgcctggggcatggtctccaaccgcgacaccctcatccgcaactgcgacgccgagggctacttcctcgcccagtacctcatggacgacttcacccgcgaccccctctacatcctcgacaacaaccacacccacctcctcctcgtcgacaacggctgccacggccaccccaccgtcgaggccaagctccgcaaccagctcgagaagtacatctccgagcgcaccatccaggactccaactacggcggcaagatccccatcgtctgcttcgcccagggcggcggcaaggagaccctcaaggccatcaacacctccatcaagaacaagatcccctgcgtcgtcgtcgagggctccggccagatcgccgacgtcatcgcctccctcgtcgaggtcgaggacgccctcacctcctccgccgtcaaggagaagctcgtccgcttcctcccccgcaccgtctcccgcctccccgaggaggagaccgagtcctggatcaagtggctcaaggagatcctcgagtgctcccacctcctcaccgtcatcaagatggaggaggccggcgacgagatcgtctccaacgccatctcctacgccctctacaaggccttctccacctccgagcaggacaaggacaactggaacggccagctcaagctcctcctcgagtggaaccagctcgacctcgccaacgacgagatcttcaccaacgaccgccgctgggagtccgccgacctccaggaggtcatgttcaccgccctcatcaaggaccgccccaagttcgtccgcctcttcctcgagaacggcctcaacctccgcaagttcctcacccacgacgtcctcaccgagctcttctccaaccacttctccaccctcgtctaccgcaacctccagatcgccaagaactcctacaacgacgccctcctcaccttcgtctggaagctcgtcgccaacttccgccgcggcttccgcaaggaggaccgcaacggccgcgacgagatggacatcgagctccacgacgtctcccccatcacccgccaccccctccaggccctcttcatctgggccatcctccagaacaagaaggagctctccaaggtcatctgggagcagacccgcggctgcaccctcgccgccctcggcgcctccaagctcctcaagaccctcgccaaggtcaagaacgacatcaacgccgccggcgagtccgaggagctcgccaacgagtacgagacccgcgccgtcgagctcttcaccgagtgctactcctccgacgaggacctcgccgagcagctcctcgtctactcctgcgaggcctggggcggctccaactgcctcgagctcgccgtcgaggccaccgaccagcacttcatcgcccagcccggcgtccagaacttcctctccaagcagtggtacggcgagatctcccgcgacaccaagaactggaagatcatcctctgcctcttcatcatccccctcgtcggctgcggcttcgtctccttccgcaagaagcccgtcgacaagcacaagaagctcctctggtactacgtcgccttcttcacctcccccttcgtcgtcttctcctggaacgtcgtcttctacatcgccttcctcctcctcttcgcctacgtcctcctcatggacttccactccgtcccccacccccccgagctcgtcctctactccctcgtcttcgtcctcttctgcgacgaggtccgccagtggtacgtcaacggcgtcaactacttcaccgacctctggaacgtcatggacaccctcggcctcttctacttcatcgccggcatcgtcttccgcctccactcctccaacaagtcctccctctactccggccgcgtcatcttctgcctcgactacatcatcttcaccctccgcctcatccacatcttcaccgtctcccgcaacctcggccccaagatcatcatgctccagcgcatgctcatcgacgtcttcttcttcctcttcctcttcgccgtctggatggtcgccttcggcgtcgcccgccagggcatcctccgccagaacgagcagcgctggcgctggatcttccgctccgtcatctacgagccctacctcgccatgttcggccaggtcccctccgacgtcgacggcaccacctacgacttcgcccactgcaccttcaccggcaacgagtccaagcccctctgcgtcgagctcgacgagcacaacctcccccgcttccccgagtggatcaccatccccctcgtctgcatctacatgctctccaccaacatcctcctcgtcaacctcctcgtcgccatgttcggctacaccgtcggcaccgtccaggagaacaacgaccaggtctggaagttccagcgctacttcctcgtccaggagtactgctcccgcctcaacatccccttccccttcatcgtcttcgcctacttctacatggtcgtcaagaagtgcttcaagtgctgctgcaaggagaagaacatggagtcctccgtctgctgcttcaagaacgaggacaacgagaccctcgcctgggagggcgtcatgaaggagaactacctcgtcaagatcaacaccaaggccaacgacacctccgaggagatgcgccaccgcttccgccagctcgacaccaagctcaacgacctcaagggcctcctcaaggagatcgccaacaagatcaagtga

SEQ ID NO: 3699 - RNA, 3315 nt, synthetic construct
  misc_feature 1..3315: note = derived and/or modified sequence opt3 fromTRP-p8__Homo_sapiens__AAZ73614
  source 1..3315: mol_type = other RNA
atgagcttcagagccgctaggctgtccatgcggaaccgccgaaatgacaccctcgattctacacgtactctttactcaagtgcaagcagatccacggacctgtcttattcggagtcagatttggtgaactttatccaggccaatttcaagaaaagggaatgcgtctttttcaccaaggacagcaaagcgacagagaacgtttgtaagtgcggctacgctcaaagtcagcacatggaagggactcagattaatcagtccgagaaatggaactataagaagcataccaaagaatttcccacagatgccttcggagacatacaatttgagaccttaggtaagaaaggcaagtacatccggctgtcttgtgatactgacgcagagattctatatgaactcctgacacagcactggcatcttaaaacccctaatctggtgatcagcgtaactgggggagccaagaacttcgctttgaagccacgcatgagaaaaatcttttccaggctcatttacatagcacagtcaaagggcgcctggatcctgacgggtgggacccactatggactgatgaaatacattggcgaggtggtccgggataatacaatcagtcgcagctctgaagagaacattgtggctatcggcatagccgcgtgggggatggtttccaatcgagacactctcattagaaactgcgatgcagagggatacttcttagcccagtatctgatggacgattttaccagggacccgctttacatcttggacaataaccatacacaccttctactcgtggataatggttgtcacggccatcccaccgtcgaagctaagctgcggaaccaacttgagaaatatatttcagaacgtacgatccaggacagcaactacgggggaaagatccctattgtgtgcttcgcccagggcggtgggaaagagactctgaaggcaataaatacaagtatcaagaacaaaattccatgtgtagttgtggaaggatctggccagatcgctgatgtcatagcctccttggtggaggtggaggacgcgctcaccagctcggccgtcaaggaaaaactggttcgctttttacccagaactgtgtctaggctgcctgaggaagagacagaatcctggattaagtggctcaaagagatccttgagtgctcacacctgttgaccgtaatcaagatggaagaggcaggcgatgaaattgtgagtaatgctatcagctatgccctatacaaggctttctccacgtctgagcaagacaaagataactggaatgggcagctgaagctcctgcttgaatggaaccagctggacttggccaatgatgagattttcaccaacgaccggcgatgggagagcgcagatctccaagaagtcatgtttacagccctgataaaagaccgcccaaagttcgtgagattatttctggagaatggactaaacctcaggaaattcctgactcatgacgttcttaccgaattgttttcaaatcacttcagtacactggtgtatcggaacctccagatcgctaaaaattcctacaacgatgcgctgcttacttttgtctggaagctggtggcaaatttccgcagaggttttaggaaggaggaccgtaacggccgggatgagatggacattgaattgcacgatgtaagccccatcacccgacatcctctccaggccctgttcatctgggctattttacagaacaagaaagagctgtctaaggttatatgggaacaaacaagagggtgtaccctagccgcactcggagcctcaaaactgcttaagactttggctaaggtgaaaaatgacatcaacgccgcaggcgagagtgaggaactggcgaatgagtacgaaacgagggctgtcgagctctttacagaatgctatagctccgatgaggacctggccgaacagttactggtgtactcttgtgaggcatggggtgggtcgaactgccttgagttggccgtcgaagctaccgatcagcacttcattgcccagccaggcgtgcaaaattttctcagcaagcagtggtatggagagatctcccgcgacactaaaaactggaagattatcctgtgcctattcataatcccgctggttggctgtgggttcgtgtcatttcggaaaaagcccgtagataaacataagaagctcctgtggtactatgtcgcattctttaccagtcctttcgtggtgttttcttggaatgttgtcttctacattgcttttcttttgctgttcgcctatgtgttactcatggactttcacagcgtaccacatccccctgaactggtgctttactccctggttttcgtcttgttttgcgatgaggtgagacagtggtacgtgaacggagtcaattatttcacagacctctggaacgttatggacaccctgggtctattttacttcatcgcgggcattgtgttcaggctgcactcaagcaataaatcttccctctatagtgggcgcgtgatcttttgtctggattacataattttcactcttcgattgatccacatttttacagtaagccggaacctgggaccaaagatcataatgttacagcgtatgctcatcgacgtcttctttttcctgtttcttttcgccgtgtggatggttgcttttggcgtggcaagacaaggtattctgaggcagaatgaacagcgctggcggtggatcttcagatctgtcatttatgagccctacctagccatgtttggccaggtgccgtccgatgttgacgggacgacctatgatttcgctcattgcactttcacaggaaacgagtcaaaacctctctgtgtggaactggacgagcacaatttgcccaggtttccagaatggatcaccatacctctggtatgcatttacatgttaagtacaaacatcctcctggtcaaccttctggtggccatgttcggctacactgtggggaccgtccaagagaataacgatcaggtttggaagtttcagcgatatttcttggtgcaagagtactgtagccgcctcaatatcccctttccattcattgtatttgcatatttctacatggtggtcaaaaagtgctttaagtgttgctgtaaagaaaagaacatggagtcgtccgtgtgctgcttcaaaaatgaagacaacgagacgctggcgtgggaaggagttatgaaggagaattatctagtgaaaatcaacaccaaggccaatgatacatctgaggaaatgcggcatagatttaggcagctggacactaagctgaacgatctcaaaggtctgttgaaggagattgctaataaaataaagtga

SEQ ID NO: 3700 - RNA, 3315 nt, synthetic construct
  misc_feature 1..3315: note = derived and/or modified sequence opt4 fromTRP-p8__Homo_sapiens__AAZ73614
  source 1..3315: mol_type = other RNA
atgagcttcagagccgccagactgagcatgagaaacagaagaaacgacaccctggacagcaccagaaccctgtacagcagcgccagcagaagcaccgacctgagctacagcgagagcgacctggtgaacttcatccaggccaacttcaagaagagagagtgcgtgttcttcaccaaggacagcaaggccaccgagaacgtgtgcaagtgcggctacgcccagagccagcacatggagggcacccagatcaaccagagcgagaagtggaactacaagaagcacaccaaggagttccccaccgacgccttcggcgacatccagttcgagaccctgggcaagaagggcaagtacatcagactgagctgcgacaccgacgccgagatcctgtacgagctgctgacccagcactggcacctgaagacccccaacctggtgatcagcgtgaccggcggcgccaagaacttcgccctgaagcccagaatgagaaagatcttcagcagactgatctacatcgcccagagcaagggcgcctggatcctgaccggcggcacccactacggcctgatgaagtacatcggcgaggtggtgagagacaacaccatcagcagaagcagcgaggagaacatcgtggccatcggcatcgccgcctggggcatggtgagcaacagagacaccctgatcagaaactgcgacgccgagggctacttcctggcccagtacctgatggacgacttcaccagagaccccctgtacatcctggacaacaaccacacccacctgctgctggtggacaacggctgccacggccaccccaccgtggaggccaagctgagaaaccagctggagaagtacatcagcgagagaaccatccaggacagcaactacggcggcaagatccccatcgtgtgcttcgcccagggcggcggcaaggagaccctgaaggccatcaacaccagcatcaagaacaagatcccctgcgtggtggtggagggcagcggccagatcgccgacgtgatcgccagcctggtggaggtggaggacgccctgaccagcagcgccgtgaaggagaagctggtgagattcctgcccagaaccgtgagcagactgcccgaggaggagaccgagagctggatcaagtggctgaaggagatcctggagtgcagccacctgctgaccgtgatcaagatggaggaggccggcgacgagatcgtgagcaacgccatcagctacgccctgtacaaggccttcagcaccagcgagcaggacaaggacaactggaacggccagctgaagctgctgctggagtggaaccagctggacctggccaacgacgagatcttcaccaacgacagaagatgggagagcgccgacctgcaggaggtgatgttcaccgccctgatcaaggacagacccaagttcgtgagactgttcctggagaacggcctgaacctgagaaagttcctgacccacgacgtgctgaccgagctgttcagcaaccacttcagcaccctggtgtacagaaacctgcagatcgccaagaacagctacaacgacgccctgctgaccttcgtgtggaagctggtggccaacttcagaagaggcttcagaaaggaggacagaaacggcagagacgagatggacatcgagctgcacgacgtgagccccatcaccagacaccccctgcaggccctgttcatctgggccatcctgcagaacaagaaggagctgagcaaggtgatctgggagcagaccagaggctgcaccctggccgccctgggcgccagcaagctgctgaagaccctggccaaggtgaagaacgacatcaacgccgccggcgagagcgaggagctggccaacgagtacgagaccagagccgtggagctgttcaccgagtgctacagcagcgacgaggacctggccgagcagctgctggtgtacagctgcgaggcctggggcggcagcaactgcctggagctggccgtggaggccaccgaccagcacttcatcgcccagcccggcgtgcagaacttcctgagcaagcagtggtacggcgagatcagcagagacaccaagaactggaagatcatcctgtgcctgttcatcatccccctggtgggctgcggcttcgtgagcttcagaaagaagcccgtggacaagcacaagaagctgctgtggtactacgtggccttcttcaccagccccttcgtggtgttcagctggaacgtggtgttctacatcgccttcctgctgctgttcgcctacgtgctgctgatggacttccacagcgtgccccacccccccgagctggtgctgtacagcctggtgttcgtgctgttctgcgacgaggtgagacagtggtacgtgaacggcgtgaactacttcaccgacctgtggaacgtgatggacaccctgggcctgttctacttcatcgccggcatcgtgttcagactgcacagcagcaacaagagcagcctgtacagcggcagagtgatcttctgcctggactacatcatcttcaccctgagactgatccacatcttcaccgtgagcagaaacctgggccccaagatcatcatgctgcagagaatgctgatcgacgtgttcttcttcctgttcctgttcgccgtgtggatggtggccttcggcgtggccagacagggcatcctgagacagaacgagcagagatggagatggatcttcagaagcgtgatctacgagccctacctggccatgttcggccaggtgcccagcgacgtggacggcaccacctacgacttcgcccactgcaccttcaccggcaacgagagcaagcccctgtgcgtggagctggacgagcacaacctgcccagattccccgagtggatcaccatccccctggtgtgcatctacatgctgagcaccaacatcctgctggtgaacctgctggtggccatgttcggctacaccgtgggcaccgtgcaggagaacaacgaccaggtgtggaagttccagagatacttcctggtgcaggagtactgcagcagactgaacatccccttccccttcatcgtgttcgcctacttctacatggtggtgaagaagtgcttcaagtgctgctgcaaggagaagaacatggagagcagcgtgtgctgcttcaagaacgaggacaacgagaccctggcctgggagggcgtgatgaaggagaactacctggtgaagatcaacaccaaggccaacgacaccagcgaggagatgagacacagattcagacagctggacaccaagctgaacgacctgaagggcctgctgaaggagatcgccaacaagatcaagtga

SEQ ID NO: 3701 - RNA, 3315 nt, synthetic construct
  misc_feature 1..3315: note = derived and/or modified sequence opt5 fromTRP-p8__Homo_sapiens__AAZ73614
  source 1..3315: mol_type = other RNA
atgagcttcagagccgctcggctgtccatgcgcaacagacggaatgacaccctcgattctacacgcacgctgtacagctccgcctctagaagcaccgacctttcctattctgagagcgatctggtgaactttatccaggcgaatttcaagaaacgggaatgcgtctttttcacaaaggactccaaagctaccgagaacgtttgtaagtgcggctacgcccaaagccagcacatggaagggacacagattaatcagtctgagaaatggaactataagaagcataccaaagaatttcccacagatgccttcggagacatccaatttgagaccctcggcaagaaagggaagtacattcgcctgtcctgtgatacggacgctgagatcctttatgaactgctcacccagcactggcatctgaaaacacctaatctggtgattagcgtgaccggaggcgccaagaacttcgctctcaagccgagaatgcggaaaatcttttctcgcctgatctacattgcccagtccaagggggcgtggatccttacaggaggcacccactatggcctgatgaaatacattggggaggtcgtgagagataatacgatcagccggtcttccgaagagaacattgttgccatcggaattgctgcctggggcatggtgagcaatcgcgacacactcatcagaaactgcgatgctgaggggtacttcctggcccagtatcttatggacgattttacccgggaccccctgtacatcctcgacaataaccatacacaccttctgctcgtcgataatggatgtcacggccatcctaccgtggaagcgaagctgcgcaaccaacttgagaaatatatttccgaaagaaccatccaggactctaactacgggggaaagattcccatcgtttgcttcgcccagggcggcgggaaagagacactgaaggctattaatacgagcatcaagaacaaaatcccttgtgtggtcgtggaaggatccggccagattgccgatgtgatcgctagcctcgtcgaggttgaggacgccctgacctcttccgccgtgaaggaaaaacttgtgcggtttctgcccagaacagtcagccgcctccctgaggaagagaccgaatcttggattaagtggctgaaagagatcctggagtgcagccacctcctgacagtgattaagatggaagaggctggggatgaaatcgtttccaatgcgatctcttatgccctttacaaggctttcagcacctccgagcaagacaaagataactggaatggacagctgaagctcctgcttgaatggaaccagctggacctcgccaatgatgagattttcacgaacgaccggagatgggagagcgccgatctgcaagaagtgatgtttacagctctgatcaaagaccgcccgaagttcgtccggctctttctggagaatggccttaacctgagaaaattcctcacccatgacgtgctgaccgaactgttttctaatcacttctccacacttgtttatcgcaacctccagattgccaagaatagctacaacgatgcgctgctgacctttgtgtggaagctcgtcgctaatttccggagagggtttcgcaaagaggaccggaacggaagagatgagatggacatcgaactgcacgatgtgtctcccattacacgccatcctcttcaggccctgttcatctgggccattctccagaacaagaaagagctgtccaaggtcatctgggaacaaacgcggggctgtaccctggctgcccttggcgctagcaaactcctgaagacactggccaaggtgaaaaatgacatcaacgcggccggggagtccgaggaactcgctaatgagtacgaaaccagagccgttgagctgtttacagaatgctattctagcgatgaggaccttgctgaacagctgctcgtgtactcctgtgaggcctggggaggctctaactgcctggagctggcggtcgaagccaccgatcagcacttcattgctcagcccggggtgcaaaattttcttagcaagcagtggtatggagagatctcccgggacacgaaaaactggaagattatcctctgcctgttcattatccctctggttggctgtgggttcgtgagctttcgcaaaaagcccgtcgataaacataagaagctcctgtggtactatgtggccttctttacctctccgttcgtggtcttttcctggaatgttgtgttctacatcgcttttcttcttctcttcgcctatgtgctgctgatggactttcacagcgtccctcatccccctgaacttgtgctctactctctggttttcgtgctgttttgcgatgaggtcagacagtggtacgtgaacggcgttaattatttcacagacctctggaacgtgatggacaccctgggactgttttacttcattgccggcatcgtcttccggctgcactccagcaataaatctagcctctattccgggagagtgatcttttgtctggattacattattttcacactgcgccttatccacatctttaccgttagccggaacctgggacccaagattatcatgctccagagaatgctgattgacgtgttctttttcctctttctgttcgctgtctggatggtggcgtttggcgtggcccgccaagggatccttagacagaatgaacagcggtggcgctggattttcagatctgtcatctatgagccctacctggctatgtttggacaggttccttccgatgtggacggcacgacatatgatttcgcccattgcaccttcacagggaacgagagcaaaccgctctgtgtggaactggacgagcacaatctgccccggtttcctgaatggatcaccattccccttgtctgcatctacatgctgtccaccaacattctcctggtgaacctcctggttgccatgttcggctacacagtgggaacggtccaagagaataacgatcaggtgtggaagtttcagcgctatttccttgttcaagagtactgttctagactgaatatcccttttcccttcattgtgtttgcttatttctacatggtcgtgaaaaagtgctttaagtgttgctgtaaagaaaagaacatggagagctccgtttgctgcttcaaaaatgaagacaacgagaccctcgcctgggaaggcgtgatgaaggagaattatctggtcaaaatcaacacaaaggcgaatgatacctctgaggaaatgcggcatcgctttagacagctggacacaaagctgaacgatctgaaagggctcctgaaggagattgctaataaaatcaagtga

SEQ ID NO: 3702 - protein, 698 aa, synthetic construct
  REGION 1..698: note = TSG10__Homo_sapiens__Q9BZW7
MMRSRSKSPRRPSPTARGANCDVELLKTTTRDREELKCMLEKYERHLAEIQGNVKVLKSERDKIFLLYEQAQEEITRLRREMMKSCKSPKSTTAHAILRRVETERDVAFTDLRRMTTERDSLRERLKIAQETAFNEKAHLEQRIEELECTVHNLDDERMEQMSNMTLMKETISTVEKEMKSLARKAMDTESELGRQKAENNSLRLLYENTEKDLSDTQRHLAKKKYELQLTQEKIMCLDEKIDNFTRQNIAQREEISILGGTLNDLAKEKECLQACLDKKSENIASLGESLAMKEKTISGMKNIIAEMEQASRQCTEALIVCEQDVSRMRRQLDETNDELAQIARERDILAHDNDNLQEQFAKAKQENQALSKKLNDTHNELNDIKQKVQDTNLEVNKLKNILKSEESENRQMMEQLRKANEDAENWENKARQSEADNNTLKLELITAEAEGNRLKEKVDSLNREVEQHLNAERSYKSQISTLHKSVVKMEEELQKVQFEKVSALADLSSTRELCIKLDSSKELLNRQLVAKDQEIEMRENELDSAHSEIELLRSQMANERISMQNLEALLVANRDKEYQSQIALQEKESEIQLLKEHLCLAENKMAIQSRDVAQFRNVVTQLEADLDITKRQLGTERFERERAVQELRRQNYSSNAYHMSSTMKPNTKCHSPERAHHRSPDRGLDRSLEENLCYRDF

SEQ ID NO: 3703 - RNA, 2097 nt, synthetic construct
  misc_feature 1..2097: note = TSG10__Homo_sapiens__AAK13079
  source 1..2097: mol_type = other RNA
atgatgcgaagtaggtctaaaagtccaagacgcccatcaccaactgcccggggtgcaaactgtgatgtagaacttttgaagacaacaacaagagatcgtgaagaacttaaatgcatgctggaaaaatatgagcgccatttggcagaaattcagggtaatgtcaaggttcttaaatctgagagagacaagatcttccttctttatgaacaggcacaggaagaaattacccgacttcgacgagaaatgatgaaaagctgtaagagtcctaaatcaacaacggcacatgctattctccggcgagtggagactgaaagagatgtagcctttactgatttacgaagaatgaccacagaacgagatagtctaagggagaggctaaagattgctcaagagacagcatttaatgagaaggctcacctggaacaaaggatagaggagctggagtgtacagttcataatcttgatgatgaacgtatggagcaaatgtcaaatatgactttgatgaaggaaaccataagcactgtggaaaaagaaatgaaatcactagcaagaaaggcaatggataccgaaagtgaacttggcagacaaaaagcagagaataattctttgagacttttgtatgaaaacacagaaaaagatctttctgatactcagcgacaccttgctaagaaaaaatatgagctacagcttactcaggagaaaattatgtgcttggatgaaaaaattgataactttacaaggcaaaatattgcacagcgagaagaaatcagcattcttggtggaaccctcaatgatctggctaaagaaaaggaatgcctgcaagcatgtttggataaaaaatctgagaatattgcatcccttggagagagtttggcaatgaaagaaaagaccatttcaggcatgaagaatatcattgctgagatggaacaggcatcaagacagtgtactgaggccctaattgtgtgtgaacaagacgtttccagaatgcgtcggcaattggatgagacaaatgatgagctggcccagatcgccagggaaagagatatcttggctcatgacaatgacaatctccaggaacagtttgctaaagctaaacaagaaaaccaggcactgtccaaaaaattgaatgacactcataatgaacttaatgacataaaacagaaggttcaagatactaatttggaggttaacaagctgaagaatatattaaagtctgaagaatctgagaaccggcaaatgatggaacaacttcgaaaagccaatgaagatgctgaaaactgggaaaataaagcccgtcaatcagaggcagataacaataccctcaaactggaacttatcactgctgaggcagagggtaacagattaaaagaaaaagtagattccctcaacagagaggttgagcaacacttaaatgcagaaaggtcttacaagtcccagatttctaccttacataaatctgttgtaaaaatggaagaggagcttcagaaggttcagtttgaaaaagtgtccgctcttgcagatttgtcttctactagggaactctgtattaaacttgactcaagcaaagaacttcttaatcgacagctggttgctaaagatcaagaaatagaaatgagggagaatgagttagattctgctcattctgaaattgaactcctgaggagtcagatggcaaatgagagaatctccatgcagaatctagaagctttgctggtggccaatcgagacaaagaatatcagtctcagatagcacttcaagaaaaagaatctgaaattcagcttcttaaagaacacctttgtttggcagaaaataaaatggccatccagagtagagatgtggcccagttcagaaatgttgtcacacaattggaagctgatttagacattaccaaaagacaactaggaacagagcgctttgaaagggagagggccgtacaagaacttcgccgccaaaattattcaagtaatgcttatcatatgagttctacaatgaagccaaatacaaaatgtcattcaccagaacgtgctcaccatcgatctcctgaccgaggcctagatcgatcattagaagagaatctttgctacagagatttctga

SEQ ID NO: 3704 - RNA, 2097 nt, synthetic construct
  misc_feature 1..2097: note = derived and/or modified sequence opt1 fromTSG10__Homo_sapiens__AAK13079
  source 1..2097: mol_type = other RNA
atgatgcgcagccggtccaagagcccccgccggccgtcccccaccgcccgcggcgccaactgcgacgtggagctgctcaagaccacgacccgggaccgcgaggagctgaagtgcatgctggagaagtacgagcggcacctcgcggagatccaggggaacgtcaaggtgctcaagagcgagcgcgacaagatcttcctgctgtacgagcaggcccaggaggagatcacccggctgcgccgggagatgatgaagtcctgcaagagccccaagtccaccacggcccacgccatcctgcgccgggtggagaccgagcgcgacgtcgccttcaccgacctccggcgcatgaccacggagcgggacagcctgcgcgagcggctgaagatcgcgcaggagaccgccttcaacgagaaggcccacctcgagcagcgcatcgaggagctggagtgcaccgtgcacaacctggacgacgagcggatggagcagatgtccaacatgaccctcatgaaggagacgatcagcaccgtggagaaggagatgaagtccctggcccgcaaggcgatggacaccgagagcgagctgggccgccagaaggccgagaacaactccctccggctgctgtacgagaacaccgagaaggacctcagcgacacgcagcgccacctggccaagaagaagtacgagctgcagctcacccaggagaagatcatgtgcctggacgagaagatcgacaacttcacccggcagaacatcgcccagcgcgaggagatctccatcctcgggggcaccctgaacgacctggccaaggagaaggagtgcctgcaggcgtgcctcgacaagaagtccgagaacatcgccagcctgggggagagcctggccatgaaggagaagacgatctccggcatgaagaacatcatcgccgagatggagcaggccagccggcagtgcaccgaggcgctcatcgtctgcgagcaggacgtgagccgcatgcggcgccagctggacgagaccaacgacgagctggcccagatcgcccgggagcgcgacatcctcgcccacgacaacgacaacctgcaggagcagttcgccaaggcgaagcaggagaaccaggccctgtccaagaagctcaacgacacccacaacgagctgaacgacatcaagcagaaggtgcaggacacgaacctggaggtcaacaagctcaagaacatcctcaagagcgaggagtccgagaaccggcagatgatggagcagctgcgcaaggccaacgaggacgccgagaactgggagaacaaggcccggcagagcgaggcggacaacaacaccctgaagctggagctgatcaccgccgaggccgagggcaaccgcctcaaggagaaggtggactccctgaaccgggaggtggagcagcacctgaacgccgagcgcagctacaagtcccagatcagcaccctgcacaagtccgtcgtgaagatggaggaggagctccagaaggtgcagttcgagaaggtcagcgcgctggccgacctgtccagcacgcgggagctctgcatcaagctggactccagcaaggagctgctcaaccgccagctggtggccaaggaccaggagatcgagatgcgggagaacgagctggactccgcccacagcgagatcgagctcctgcgctcccagatggccaacgagcgcatcagcatgcagaacctggaggcgctcctggtggccaaccgggacaaggagtaccagtcccagatcgccctgcaggagaaggagagcgagatccagctcctgaaggagcacctgtgcctcgccgagaacaagatggccatccagagccgcgacgtcgcgcagttccggaacgtggtgacccagctggaggccgacctggacatcaccaagcgccagctcgggaccgagcggttcgagcgcgagcgggccgtccaggagctgcgccggcagaactactccagcaacgcctaccacatgtccagcacgatgaagcccaacaccaagtgccactccccggagcgcgcccaccaccggagccccgaccgcggcctggaccggtccctcgaggagaacctgtgctaccgcgacttctga

SEQ ID NO: 3705 - RNA, 2097 nt, synthetic construct
  misc_feature 1..2097: note = derived and/or modified sequence opt2 fromTSG10__Homo_sapiens__AAK13079
  source 1..2097: mol_type = other RNA
atgatgcgctcccgctccaagtccccccgccgcccctcccccaccgcccgcggcgccaactgcgacgtcgagctcctcaagaccaccacccgcgaccgcgaggagctcaagtgcatgctcgagaagtacgagcgccacctcgccgagatccagggcaacgtcaaggtcctcaagtccgagcgcgacaagatcttcctcctctacgagcaggcccaggaggagatcacccgcctccgccgcgagatgatgaagtcctgcaagtcccccaagtccaccaccgcccacgccatcctccgccgcgtcgagaccgagcgcgacgtcgccttcaccgacctccgccgcatgaccaccgagcgcgactccctccgcgagcgcctcaagatcgcccaggagaccgccttcaacgagaaggcccacctcgagcagcgcatcgaggagctcgagtgcaccgtccacaacctcgacgacgagcgcatggagcagatgtccaacatgaccctcatgaaggagaccatctccaccgtcgagaaggagatgaagtccctcgcccgcaaggccatggacaccgagtccgagctcggccgccagaaggccgagaacaactccctccgcctcctctacgagaacaccgagaaggacctctccgacacccagcgccacctcgccaagaagaagtacgagctccagctcacccaggagaagatcatgtgcctcgacgagaagatcgacaacttcacccgccagaacatcgcccagcgcgaggagatctccatcctcggcggcaccctcaacgacctcgccaaggagaaggagtgcctccaggcctgcctcgacaagaagtccgagaacatcgcctccctcggcgagtccctcgccatgaaggagaagaccatctccggcatgaagaacatcatcgccgagatggagcaggcctcccgccagtgcaccgaggccctcatcgtctgcgagcaggacgtctcccgcatgcgccgccagctcgacgagaccaacgacgagctcgcccagatcgcccgcgagcgcgacatcctcgcccacgacaacgacaacctccaggagcagttcgccaaggccaagcaggagaaccaggccctctccaagaagctcaacgacacccacaacgagctcaacgacatcaagcagaaggtccaggacaccaacctcgaggtcaacaagctcaagaacatcctcaagtccgaggagtccgagaaccgccagatgatggagcagctccgcaaggccaacgaggacgccgagaactgggagaacaaggcccgccagtccgaggccgacaacaacaccctcaagctcgagctcatcaccgccgaggccgagggcaaccgcctcaaggagaaggtcgactccctcaaccgcgaggtcgagcagcacctcaacgccgagcgctcctacaagtcccagatctccaccctccacaagtccgtcgtcaagatggaggaggagctccagaaggtccagttcgagaaggtctccgccctcgccgacctctcctccacccgcgagctctgcatcaagctcgactcctccaaggagctcctcaaccgccagctcgtcgccaaggaccaggagatcgagatgcgcgagaacgagctcgactccgcccactccgagatcgagctcctccgctcccagatggccaacgagcgcatctccatgcagaacctcgaggccctcctcgtcgccaaccgcgacaaggagtaccagtcccagatcgccctccaggagaaggagtccgagatccagctcctcaaggagcacctctgcctcgccgagaacaagatggccatccagtcccgcgacgtcgcccagttccgcaacgtcgtcacccagctcgaggccgacctcgacatcaccaagcgccagctcggcaccgagcgcttcgagcgcgagcgcgccgtccaggagctccgccgccagaactactcctccaacgcctaccacatgtcctccaccatgaagcccaacaccaagtgccactcccccgagcgcgcccaccaccgctcccccgaccgcggcctcgaccgctccctcgaggagaacctctgctaccgcgacttctga

SEQ ID NO: 3706 - RNA, 2097 nt, synthetic construct
  misc_feature 1..2097: note = derived and/or modified sequence opt3 fromTSG10__Homo_sapiens__AAK13079
  source 1..2097: mol_type = other RNA
atgatgagaagcaggtccaagtctccccggcgcccttcaccaaccgcccgaggcgctaactgcgacgtggagctgctcaaaacaactacgcgtgatagagaggaacttaagtgtatgctggaaaaatacgagaggcacttggcagaaatccaggggaatgtcaaggttttaaaaagtgagcgggacaagattttcctgctatatgagcaagcccaggaagagataacccgcctcagaagggaaatgatgaagtcctgcaaatccccgaagtctacaactgcgcatgctatcctgcggcgcgtggagaccgagcgagatgtagcctttacagaccttagaaggatgaccactgaacgggattcgctgcgtgagcgcttgaaaattgcacaggaaacagccttcaacgagaaggctcacctcgaacagagaatcgaggagctggaatgtaccgtgcataatctggacgatgagaggatggaacaaatgtcaaacatgacgctcatgaaagagactattagcaccgtcgaaaaggagatgaagagtttagcacggaaagccatggacacagagtccgaactgggacgacagaaggctgagaataactctcttcgcttgctgtacgaaaatactgagaaagatctaagcgacacccagagacacctcgccaagaaaaagtatgaactgcagcttacacaagagaaaatcatgtgcctggatgagaagatagacaactttaccaggcagaatatcgcgcagcgggaagagatttccatcttgggtggcacgctcaacgatctggcaaaggaaaaagagtgtttacaggcctgcctggacaagaaatcagagaatattgctagtctcggggaaagccttgccatgaaggagaaaactatctctggaatgaagaacataattgcagaaatggagcaagctagccgccagtgtacagaagccctgatcgtgtgcgagcaggacgtttcaagaatgaggcgtcaattggatgagaccaatgacgaactagcgcagattgcccgggagcgagatatcctggcacatgacaacgataatctccaggaacagttcgctaaggccaaacaagagaaccaggctctgagcaagaaacttaacgacactcacaatgaactgaacgatatcaagcagaaagtgcaggacacaaatttggaggtcaacaagctcaagaatattctgaaaagtgaggaatctgagaacagacaaatgatggaacagttaaggaaggccaatgaggatgcagaaaactgggagaataaagcccgccagtccgaggctgacaacaataccctgaagctagaactcataacggcggaggcagaaggcaaccggctgaaagagaaggtggatagccttaatagagaggtagaacagcacttgaacgccgagaggtcgtacaagtctcaaatctccaccctgcataaatcagttgtgaagatggaagaggaactccagaaagtccagtttgagaaggtgagtgctctggccgaccttagctccacacgcgagctgtgtattaaattggactctagcaaggaactcctgaatcgacagttagtggcaaaagatcaagagatcgaaatgcgggagaacgaactggactcagcccacagtgagatagagctactccgttcccagatggctaacgaaagaattagcatgcagaatctggaggcccttttggtcgcaaacagggataaggaatatcaatctcagatcgcgctgcaggagaaggaatcagagatccagctcctgaaagagcatttatgcctggctgaaaataagatggccattcaaagtcgcgacgttgcacagttccggaacgtggtaactcagcttgaggccgatttggacatcaccaaaagacagctcggtacagaaaggtttgagcgagagcgcgctgtgcaagaactgcggagacagaattacagctccaacgcctatcacatgtcttcgactatgaagcccaataccaaatgtcacagccctgagagggcacatcaccgttccccagatcgcgggctagaccggtcactggaagagaacctctgctacagagatttctga

SEQ ID NO: 3707 - RNA, 2097 nt, synthetic construct
  misc_feature 1..2097: note = derived and/or modified sequence opt4 fromTSG10__Homo_sapiens__AAK13079
  source 1..2097: mol_type = other RNA
atgatgagaagcagaagcaagagccccagaagacccagccccaccgccagaggcgccaactgcgacgtggagctgctgaagaccaccaccagagacagagaggagctgaagtgcatgctggagaagtacgagagacacctggccgagatccagggcaacgtgaaggtgctgaagagcgagagagacaagatcttcctgctgtacgagcaggcccaggaggagatcaccagactgagaagagagatgatgaagagctgcaagagccccaagagcaccaccgcccacgccatcctgagaagagtggagaccgagagagacgtggccttcaccgacctgagaagaatgaccaccgagagagacagcctgagagagagactgaagatcgcccaggagaccgccttcaacgagaaggcccacctggagcagagaatcgaggagctggagtgcaccgtgcacaacctggacgacgagagaatggagcagatgagcaacatgaccctgatgaaggagaccatcagcaccgtggagaaggagatgaagagcctggccagaaaggccatggacaccgagagcgagctgggcagacagaaggccgagaacaacagcctgagactgctgtacgagaacaccgagaaggacctgagcgacacccagagacacctggccaagaagaagtacgagctgcagctgacccaggagaagatcatgtgcctggacgagaagatcgacaacttcaccagacagaacatcgcccagagagaggagatcagcatcctgggcggcaccctgaacgacctggccaaggagaaggagtgcctgcaggcctgcctggacaagaagagcgagaacatcgccagcctgggcgagagcctggccatgaaggagaagaccatcagcggcatgaagaacatcatcgccgagatggagcaggccagcagacagtgcaccgaggccctgatcgtgtgcgagcaggacgtgagcagaatgagaagacagctggacgagaccaacgacgagctggcccagatcgccagagagagagacatcctggcccacgacaacgacaacctgcaggagcagttcgccaaggccaagcaggagaaccaggccctgagcaagaagctgaacgacacccacaacgagctgaacgacatcaagcagaaggtgcaggacaccaacctggaggtgaacaagctgaagaacatcctgaagagcgaggagagcgagaacagacagatgatggagcagctgagaaaggccaacgaggacgccgagaactgggagaacaaggccagacagagcgaggccgacaacaacaccctgaagctggagctgatcaccgccgaggccgagggcaacagactgaaggagaaggtggacagcctgaacagagaggtggagcagcacctgaacgccgagagaagctacaagagccagatcagcaccctgcacaagagcgtggtgaagatggaggaggagctgcagaaggtgcagttcgagaaggtgagcgccctggccgacctgagcagcaccagagagctgtgcatcaagctggacagcagcaaggagctgctgaacagacagctggtggccaaggaccaggagatcgagatgagagagaacgagctggacagcgcccacagcgagatcgagctgctgagaagccagatggccaacgagagaatcagcatgcagaacctggaggccctgctggtggccaacagagacaaggagtaccagagccagatcgccctgcaggagaaggagagcgagatccagctgctgaaggagcacctgtgcctggccgagaacaagatggccatccagagcagagacgtggcccagttcagaaacgtggtgacccagctggaggccgacctggacatcaccaagagacagctgggcaccgagagattcgagagagagagagccgtgcaggagctgagaagacagaactacagcagcaacgcctaccacatgagcagcaccatgaagcccaacaccaagtgccacagccccgagagagcccaccacagaagccccgacagaggcctggacagaagcctggaggagaacctgtgctacagagacttctga

SEQ ID NO: 3708 - RNA, 2097 nt, synthetic construct
  misc_feature 1..2097: note = derived and/or modified sequence opt5 fromTSG10__Homo_sapiens__AAK13079
  source 1..2097: mol_type = other RNA
atgatgagaagccggtccaagtctccccgcagacctagcccgaccgcccggggcgctaactgcgacgtggagctgctcaaaacaacgacccgcgatagagaggaactgaagtgtatgcttgaaaaatacgagcggcacctggccgaaatccaggggaatgtcaaggttctcaaatccgagcgcgacaagattttcctgctttatgagcaagcgcaggaagagatcacaagactgcggcgcgaaatgatgaagtcttgcaaaagccccaagtccaccacagctcatgccattctcagacgggtggagaccgagcgcgatgtggcctttacagacctgagacggatgaccacggaacgcgattctctgagagagcggctcaaaatcgctcaggaaaccgccttcaacgagaaggctcacctggaacagagaattgaggagcttgaatgtacagtccataatctggacgatgagcgcatggaacaaatgagcaacatgaccctcatgaaagagacaatctccaccgtggaaaaggagatgaaaagcctggcccggaaggcgatggacacggagtctgaacttggaagacagaaggccgagaataactccctgcgcctcctgtacgaaaatacagagaaagatctgagcgacacccagcggcacctcgctaagaaaaagtatgaactgcagcttacacaagagaaaatcatgtgcctggatgagaagattgacaactttaccagacagaatatcgcccagcgcgaagagatttctatcctcggcgggaccctgaacgatcttgctaaggaaaaagagtgtctgcaggcctgcctcgacaagaaatccgagaatattgcgagcctgggagaatctctggccatgaaggagaaaacaatctccggcatgaagaacattatcgctgaaatggagcaagccagccggcagtgtacggaagctctcatcgtttgcgagcaggacgtgtccagaatgcgccggcaactggatgagaccaatgacgaacttgcccagattgccagagagcgcgatatcctggctcatgacaacgataatctccaggaacagttcgcgaaggccaaacaagagaaccaggctctgtctaagaaacttaacgacacacacaatgaactgaacgatattaagcagaaagtccaggacaccaatctcgaggtgaacaagctgaagaatatcctgaaaagcgaggaatccgagaaccggcaaatgatggaacagctcagaaaggccaatgaggatgccgaaaactgggagaataaagctcggcagagcgaggccgacaacaatacactgaaacttgaactgattaccgcggaggctgaagggaaccgcctcaaggagaaggttgattctctgaatagagaggtggaacagcacctgaacgccgagcggtcctacaagagccaaatctctacgcttcataaaagcgtcgtgaagatggaagaggaactccagaaagtgcagtttgagaaggtctccgccctggctgacctgtctagcacaagagagctctgtatcaaactggactccagcaaggaacttctgaatcgccagctcgttgccaaagatcaagagattgaaatgcgggagaacgaactggactctgctcactccgagatcgagctgcttagaagccagatggccaacgaacgcatttctatgcagaatctcgaggcgctgctggtggccaacagagataaggaatatcaatcccagatcgctctccaggagaaggaaagcgagattcagctgcttaaagagcatctgtgcctcgccgaaaataagatggctatccaatcccgggacgtggcccagttccgcaacgtcgtgacccagctggaggcggatctggacatcaccaaaagacagcttggaacagaacggtttgagcgcgagagagccgttcaagaactccggcgccagaattactctagcaacgcttatcacatgtcctctaccatgaagcctaatacaaaatgtcacagccccgagagagcccatcaccggtcccctgatcgcggcctggacagaagcctggaagagaacctctgctaccgggatttctga

SEQ ID NO: 3709 - protein, 308 aa, synthetic construct
  REGION 1..308: note = TSPY1__Homo_sapiens__Q01534
MRPEGSLTYRVPERLRQGFCGVGRAAQALVCASAKEGTAFRMEAVQEGAAGVESEQAALGEEAVLLLDDIMAEVEVVAEEEGLVERREEAQRAQQAVPGPGPMTPESAPEELLAVQVELEPVNAQARKAFSRQREKMERRRKPHLDRRGAVIQSVPGFWANVIANHPQMSALITDEDEDMLSYMVSLEVGEEKHPVHLCKIMLFFRSNPYFQNKVITKEYLVNITEYRASHSTPIEWYPDYEVEAYRRRHHNSSLNFFNWFSDHNFAGSNKIAEILCKDLWRNPLQYYKRMKPPEEGTETSGDSQLLS

SEQ ID NO: 3710 - RNA, 927 nt, synthetic construct
  misc_feature 1..927: note = TSPY1__Homo_sapiens__CCDS48205.1
  source 1..927: mol_type = other RNA
atgcgccctgagggctcgctgacctaccgggtgccagagaggctgcggcagggtttctgtggcgtgggtcgggcagcacaggccttggtgtgtgcgagtgccaaggagggcaccgccttcaggatggaggctgtgcaggagggggcggccggggtggagagtgagcaggcggctttgggggaggaggcggtgctgctgttggatgacataatggcggaggtggaggtggtggcggaggaggagggcctcgtggagcggcgggaggaggcccagcgggcacagcaggctgtgcctggccctgggcccatgaccccagagtctgcaccggaggagctgctggccgttcaggtggagctggagccggttaatgcccaagccaggaaggccttttctcggcagcgggaaaagatggagcggaggcgcaagccccacctagaccgcagaggcgccgtcatccagagcgtccctggcttctgggccaatgttattgcaaaccacccccagatgtcagccctgatcactgacgaagatgaagacatgctgagctacatggtcagcctggaggtgggagaagagaagcatcctgttcatctctgcaagatcatgttgttctttcggagtaacccctacttccagaataaagtgattaccaaggaatatctggtgaacatcacagaatacagggcttctcattccactccaattgagtggtatccggattatgaagtggaggcctatcgccgcagacaccacaacagcagccttaacttcttcaactggttctctgaccacaacttcgcaggatctaacaagattgctgagatcctatgtaaggacctgtggcgcaatcccctgcaatactacaagaggatgaagccacctgaagagggaacagagacgtcaggggactcccagttgttgagttga

SEQ ID NO: 3711 - RNA, 927 nt, synthetic construct
  misc_feature 1..927: note = derived and/or modified sequence opt1 fromTSPY1__Homo_sapiens__CCDS48205.1
  source 1..927: mol_type = other RNA
atgcgccccgagggcagcctgacctaccgggtgccggagcgcctccggcaggggttctgcggcgtcgggcgcgccgcccaggcgctggtgtgcgcctccgccaaggagggcaccgccttccggatggaggccgtgcaggagggggcggccggcgtcgagagcgagcaggccgccctgggcgaggaggcggtgctcctgctggacgacatcatggccgaggtggaggtcgtggccgaggaggaggggctcgtggagcgccgggaggaggcccagcgcgcccagcaggcggtccccggccccgggcccatgacgccggagtccgcccccgaggagctgctggccgtccaggtggagctcgagcccgtgaacgcccaggcccggaaggcgttcagccgccagcgggagaagatggagcgccggcgcaagccccacctggaccggcgcggcgccgtgatccagtccgtgccggggttctgggccaacgtcatcgccaaccacccccagatgagcgccctgatcaccgacgaggacgaggacatgctctcctacatggtgagcctggaggtgggcgaggagaagcaccccgtccacctgtgcaagatcatgctgttcttccggtccaacccctacttccagaacaaggtgatcaccaaggagtacctcgtgaacatcaccgagtaccgcgcgagccactccacgccgatcgagtggtaccccgactacgaggtcgaggcctaccggcgccggcaccacaacagctccctgaacttcttcaactggttcagcgaccacaacttcgccggctccaacaagatcgccgagatcctctgcaaggacctgtggcgcaaccccctgcagtactacaagcgcatgaagcccccggaggaggggaccgagaccagcggcgactcccagctcctgagctga

SEQ ID NO: 3712 - RNA, 927 nt, synthetic construct
  misc_feature 1..927: note = derived and/or modified sequence opt2 fromTSPY1__Homo_sapiens__CCDS48205.1
  source 1..927: mol_type = other RNA
atgcgccccgagggctccctcacctaccgcgtccccgagcgcctccgccagggcttctgcggcgtcggccgcgccgcccaggccctcgtctgcgcctccgccaaggagggcaccgccttccgcatggaggccgtccaggagggcgccgccggcgtcgagtccgagcaggccgccctcggcgaggaggccgtcctcctcctcgacgacatcatggccgaggtcgaggtcgtcgccgaggaggagggcctcgtcgagcgccgcgaggaggcccagcgcgcccagcaggccgtccccggccccggccccatgacccccgagtccgcccccgaggagctcctcgccgtccaggtcgagctcgagcccgtcaacgcccaggcccgcaaggccttctcccgccagcgcgagaagatggagcgccgccgcaagccccacctcgaccgccgcggcgccgtcatccagtccgtccccggcttctgggccaacgtcatcgccaaccacccccagatgtccgccctcatcaccgacgaggacgaggacatgctctcctacatggtctccctcgaggtcggcgaggagaagcaccccgtccacctctgcaagatcatgctcttcttccgctccaacccctacttccagaacaaggtcatcaccaaggagtacctcgtcaacatcaccgagtaccgcgcctcccactccacccccatcgagtggtaccccgactacgaggtcgaggcctaccgccgccgccaccacaactcctccctcaacttcttcaactggttctccgaccacaacttcgccggctccaacaagatcgccgagatcctctgcaaggacctctggcgcaaccccctccagtactacaagcgcatgaagccccccgaggagggcaccgagacctccggcgactcccagctcctctcctga

SEQ ID NO: 3713 - RNA, 927 nt, synthetic construct
  misc_feature 1..927: note = derived and/or modified sequence opt3 fromTSPY1__Homo_sapiens__CCDS48205.1
  source 1..927: mol_type = other RNA
atgagacccgagggcagcctgacctacagggtgcctgaacggctccgccaggggttctgcggagtcggtcgagccgctcaagcacttgtttgtgcctccgcgaaggagggcacagcttttcgtatggaagccgtgcaggagggggcagccggagtagaatctgagcaggctgcactgggcgaggaagccgtgttgttactggacgatatcatggctgaggtcgaagtggttgccgaggaggaaggtctagtggagagaagggaagaggcgcagcgggcacaacaggccgtcccagggccgggacccatgactcctgaatcagctccagaggagctcctggccgtgcaggtagaacttgagcccgttaacgcacaggctcgcaaagccttcagtagacaaagggaaaagatggagcggcgccgaaaacctcacctggacagaaggggcgcggtgattcagagcgtcccaggcttttgggccaatgtgatagcaaaccatccccagatgtccgctttgatcacggatgaagacgaggatatgctctcttatatggtgtcgctggaggtcggggaagagaagcaccctgttcatctgtgcaaaattatgttattctttcggtcaaatccatacttccagaacaaggtgatcaccaaggaatatctcgtaaatattacagagtaccgtgccagccacagtactccgatcgaatggtatcccgactacgaggtggaggcttatcgcagaaggcatcacaactcctctctgaactttttcaattggtttagcgatcacaatttcgccggatccaacaaaatagcagaaatcctttgtaaggacttgtggcggaatcctctgcaatactacaaacgaatgaagccacccgaggaaggtaccgagacatcaggcgatagtcagctactcagctga

SEQ ID NO: 3714 - RNA, 927 nt, synthetic construct
  misc_feature 1..927: note = derived and/or modified sequence opt4 fromTSPY1__Homo_sapiens__CCDS48205.1
  source 1..927: mol_type = other RNA
atgagacccgagggcagcctgacctacagagtgcccgagagactgagacagggcttctgcggcgtgggcagagccgcccaggccctggtgtgcgccagcgccaaggagggcaccgccttcagaatggaggccgtgcaggagggcgccgccggcgtggagagcgagcaggccgccctgggcgaggaggccgtgctgctgctggacgacatcatggccgaggtggaggtggtggccgaggaggagggcctggtggagagaagagaggaggcccagagagcccagcaggccgtgcccggccccggccccatgacccccgagagcgcccccgaggagctgctggccgtgcaggtggagctggagcccgtgaacgcccaggccagaaaggccttcagcagacagagagagaagatggagagaagaagaaagccccacctggacagaagaggcgccgtgatccagagcgtgcccggcttctgggccaacgtgatcgccaaccacccccagatgagcgccctgatcaccgacgaggacgaggacatgctgagctacatggtgagcctggaggtgggcgaggagaagcaccccgtgcacctgtgcaagatcatgctgttcttcagaagcaacccctacttccagaacaaggtgatcaccaaggagtacctggtgaacatcaccgagtacagagccagccacagcacccccatcgagtggtaccccgactacgaggtggaggcctacagaagaagacaccacaacagcagcctgaacttcttcaactggttcagcgaccacaacttcgccggcagcaacaagatcgccgagatcctgtgcaaggacctgtggagaaaccccctgcagtactacaagagaatgaagccccccgaggagggcaccgagaccagcggcgacagccagctgctgagctga

SEQ ID NO: 3715 - RNA, 927 nt, synthetic construct
  misc_feature 1..927: note = derived and/or modified sequence opt5 fromTSPY1__Homo_sapiens__CCDS48205.1
  source 1..927: mol_type = other RNA
atgagacccgagggcagcctgacctaccgggtgcctgaacgcctcagacaggggttctgcggagtcggccgggccgctcaagccctggtttgtgcgtccgctaaggaggggacagcctttcgcatggaagccgtgcaggagggagctgccggcgtggaatctgagcaggctgcccttggggaggaagcggtcctgctcctggacgatatcatggccgaggtggaagttgtggctgaggaggaaggacttgtcgagagacgggaagaggcccagcgcgctcaacaggccgtgccgggccccggccctatgacgcccgaaagcgcgcctgaggagctgctcgccgttcaggtggaactggagcccgtcaacgctcaggccagaaaagccttctcccggcaacgcgaaaagatggagagacggcgcaaacctcacctggacagacgcggggctgtgattcagtctgtgccgggattttgggccaatgtcatcgctaaccatccccagatgagcgcgctcattaccgatgaagacgaggatatgctgtcctatatggtttctcttgaggtgggcgaagagaagcaccctgtgcatctgtgcaaaatcatgctgttctttcggagcaatccctacttccagaacaaggtcattacaaaggaatatctcgtgaatatcaccgagtacagagcctcccacagcacacctatcgaatggtatcccgactacgaggttgaggcttatcggagacgccatcacaactcttcccttaactttttcaattggtttagcgatcacaatttcgccgggtctaacaaaattgccgaaatcctgtgtaaggacctctggcggaatccgctgcaatactacaaaagaatgaagcctcccgaggaaggaaccgagacatccggcgatagccagctgctctcttga

SEQ ID NO: 3716 - protein, 122 aa, synthetic construct
  REGION 1..122: note = TVC_(TRGV3)__Homo_sapiens__M13231.1
MRWALLVLLAFLSPASQKSSNLEGRTKSVTRQTGSSAEITCDLTVTNTFYIHWYLHQEGKAPQRLLYYDVSTARDVLESGLSPGKYYTHTPRRWSWILRLQNLIENDSGVYYCATWDRQKLL

SEQ ID NO: 3717 - RNA, 369 nt, synthetic construct
  misc_feature 1..369: note = TVC_(TRGV3)__Homo_sapiens__M13231.1
  source 1..369: mol_type = other RNA
atgcggtgggccctactggtgcttctagctttcctgtctcctgccagtcagaaatcttccaacttggaagggagaacgaagtcagtcaccaggcagactgggtcatctgctgaaatcacttgcgatcttactgtaacaaataccttctacatccactggtacctacaccaggaggggaaggccccacagcgtcttctgtactatgacgtctccactgcaagggatgtgttggaatcaggactcagtccaggaaagtattatactcatacacccaggaggtggagctggatattgagactgcaaaatctaattgaaaatgattctggggtctattactgtgccacctgggacaggcaaaaattattataa

SEQ ID NO: 3718 - RNA, 369 nt, synthetic construct
  misc_feature 1..369: note = derived and/or modified sequence opt1 fromTVC_(TRGV3)__Homo_sapiens__M13231.1
  source 1..369: mol_type = other RNA
atgcgctgggccctgctcgtgctgctggccttcctcagccccgcgtcccagaagtccagcaacctggagggccggaccaagagcgtcacccgccagacggggtccagcgccgagatcacgtgcgacctgaccgtgaccaacaccttctacatccactggtacctccaccaggagggcaaggccccgcagcggctgctgtactacgacgtgtccaccgcccgcgacgtcctcgagagcgggctgtcccccggcaagtactacacccacacgccccggcgctggagctggatcctgcggctccagaacctgatcgagaacgactccggggtgtactactgcgccacctgggaccgccagaagctgctctga

SEQ ID NO: 3719 - RNA, 369 nt, synthetic construct
  misc_feature 1..369: note = derived and/or modified sequence opt2 fromTVC_(TRGV3)__Homo_sapiens__M13231.1
  source 1..369: mol_type = other RNA
atgcgctgggccctcctcgtcctcctcgccttcctctcccccgcctcccagaagtcctccaacctcgagggccgcaccaagtccgtcacccgccagaccggctcctccgccgagatcacctgcgacctcaccgtcaccaacaccttctacatccactggtacctccaccaggagggcaaggccccccagcgcctcctctactacgacgtctccaccgcccgcgacgtcctcgagtccggcctctcccccggcaagtactacacccacaccccccgccgctggtcctggatcctccgcctccagaacctcatcgagaacgactccggcgtctactactgcgccacctgggaccgccagaagctcctctga

SEQ ID NO: 3720 - RNA, 369 nt, synthetic construct
  misc_feature 1..369: note = derived and/or modified sequence opt3 fromTVC_(TRGV3)__Homo_sapiens__M13231.1
  source 1..369: mol_type = other RNA
atgagatgggccctgctcgtgcttctggctttcttgagccccgcatcccagaagtcttcaaacttagagggcaggaccaaaagtgtcacacggcaaactgggagctccgccgaaatcacgtgcgacctgaccgttacaaatactttttacattcactggtatctacatcaggagggaaaggcgcctcagcgcctcctgtactatgatgtgtctaccgctcgagacgtacttgaatcgggtctgtcaccaggcaaatactatacacacaccccgcgtagatggagctggatattgaggctccagaacctgatcgagaatgatagtggggtgtactattgtgccacttgggaccggcaaaagctgctctga

SEQ ID NO: 3721 - RNA, 369 nt, synthetic construct
  misc_feature 1..369: note = derived and/or modified sequence opt4 fromTVC_(TRGV3)__Homo_sapiens__M13231.1
  source 1..369: mol_type = other RNA
atgagatgggccctgctggtgctgctggccttcctgagccccgccagccagaagagcagcaacctggagggcagaaccaagagcgtgaccagacagaccggcagcagcgccgagatcacctgcgacctgaccgtgaccaacaccttctacatccactggtacctgcaccaggagggcaaggccccccagagactgctgtactacgacgtgagcaccgccagagacgtgctggagagcggcctgagccccggcaagtactacacccacacccccagaagatggagctggatcctgagactgcagaacctgatcgagaacgacagcggcgtgtactactgcgccacctgggacagacagaagctgctgtga

SEQ ID NO: 3722 - RNA, 369 nt, synthetic construct
  misc_feature 1..369: note = derived and/or modified sequence opt5 fromTVC_(TRGV3)__Homo_sapiens__M13231.1
  source 1..369: mol_type = other RNA
atgagatgggccctgctcgtgctgcttgctttcctgagccccgcctcccagaagtctagcaacctcgagggccggaccaaatccgtcacacgccaaacggggtctagcgcggaaattacctgcgacctgacagttaccaatacattttacatccactggtatcttcatcaggagggaaaggctcctcagagactgctctactatgatgtgtccaccgcccgggacgtgctggaatctggcctgagcccggggaaatactatacacacacgccccgcagatggtcctggatcctccggctgcagaaccttattgagaatgatagcggagtctactattgtgccacctgggaccgccaaaagctgctctga

SEQ ID NO: 3723 - protein, 267 aa, synthetic construct
  REGION 1..267: note = TX101__Homo_sapiens__Q9BY14-2
MGARQIQTSSSQTSPEEAMGTPRIQHLLILLVLGASLLTSGLELYCQKGLSMTVEADPANMFNWTTEEVETCDKGALCQETILIIKAGTETAILATKGCIPEGEEAITIVQHSSPPGLIVTSYSNYCEDSFCNDKDSLSQFWEFSETTASTVSTTLHCPTCVALGTCFSAPSLPCPNGTTRCYQGKLEITGGGIESSVEVKGCTAMIGCRLMSGILAVGPMFVREACPHQLLTQPRKTENGATCLPIPVWGLQLLLPLLLPSFIHFS

SEQ ID NO: 3724 - RNA, 804 nt, synthetic construct
  misc_feature 1..804: note = TX101__Homo_sapiens__CCDS12619.1
  source 1..804: mol_type = other RNA
atgggggcgaggcagatccagaccagctcctcccagacctctccagaagaagccatgggaacccctcgtatccagcatttgctgatcctcctggtcctaggagcctccctcctgacctcgggcctagagctgtattgtcaaaagggtctgtccatgactgtggaagcagatccagccaatatgtttaactggaccacagaggaagtggagacttgtgacaaaggggcactttgccaggaaaccatactaataattaaagcagggactgagacagccattttggccacgaagggctgcatcccggaaggggaggaggccataacaattgtccagcactcttcacctcccggcctgatcgtgacctcctacagtaactactgtgaggattccttctgtaatgacaaagacagcctgtctcagttttgggagttcagtgagaccacagcttccactgtgtcaacaaccctccattgtccaacctgtgtggctttggggacctgtttcagtgctccttctcttccctgtcccaatggtacaactcgatgctatcaaggaaaacttgagatcactggaggtggcattgagtcgtctgtggaggtcaaaggctgtacagccatgattggctgcaggctgatgtctggaatcttagcagtaggacccatgtttgtgagggaagcgtgcccacatcagctgctcactcaacctcgaaagactgaaaatggggccacctgtcttcccattcctgtttgggggttacagctactgctgccattgctgctgccatcatttattcacttttcctaa

SEQ ID NO: 3725 - RNA, 804 nt, synthetic construct
  misc_feature 1..804: note = derived and/or modified sequence opt1 fromTX101__Homo_sapiens__CCDS12619.1
  source 1..804: mol_type = other RNA
atgggcgcccgccagatccagaccagctccagccagacctcccccgaggaggccatggggacgccgcggatccagcacctcctgatcctgctggtgctcggcgcgagcctgctgacctccgggctcgagctgtactgccagaagggcctgagcatgaccgtcgaggccgaccccgccaacatgttcaactggaccacggaggaggtggagacctgcgacaagggggccctctgccaggagaccatcctgatcatcaaggccggcaccgagacggcgatcctggccaccaagggctgcatccccgagggggaggaggccatcaccatcgtgcagcactccagcccgcccggcctcatcgtcacctcctacagcaactactgcgaggactccttctgcaacgacaaggacagcctgtcccagttctgggagttcagcgagacgaccgcctccaccgtgagcaccacgctgcactgcccgacctgcgtggcgctcgggacctgcttctccgcccccagcctgccctgccccaacggcaccacgcgctgctaccaggggaagctggagatcaccggcggcgggatcgagtccagcgtcgaggtgaagggctgcaccgccatgatcgggtgccggctcatgagcggcatcctggccgtgggccccatgttcgtccgcgaggcctgcccccaccagctgctcacccagccccggaagacggagaacggggcgacctgcctgccgatccccgtgtggggcctgcagctcctgctgcccctcctgctgccctccttcatccacttcagctga

SEQ ID NO: 3726 - RNA, 804 nt, synthetic construct
  misc_feature 1..804: note = derived and/or modified sequence opt2 fromTX101__Homo_sapiens__CCDS12619.1
  source 1..804: mol_type = other RNA
atgggcgcccgccagatccagacctcctcctcccagacctcccccgaggaggccatgggcaccccccgcatccagcacctcctcatcctcctcgtcctcggcgcctccctcctcacctccggcctcgagctctactgccagaagggcctctccatgaccgtcgaggccgaccccgccaacatgttcaactggaccaccgaggaggtcgagacctgcgacaagggcgccctctgccaggagaccatcctcatcatcaaggccggcaccgagaccgccatcctcgccaccaagggctgcatccccgagggcgaggaggccatcaccatcgtccagcactcctccccccccggcctcatcgtcacctcctactccaactactgcgaggactccttctgcaacgacaaggactccctctcccagttctgggagttctccgagaccaccgcctccaccgtctccaccaccctccactgccccacctgcgtcgccctcggcacctgcttctccgccccctccctcccctgccccaacggcaccacccgctgctaccagggcaagctcgagatcaccggcggcggcatcgagtcctccgtcgaggtcaagggctgcaccgccatgatcggctgccgcctcatgtccggcatcctcgccgtcggccccatgttcgtccgcgaggcctgcccccaccagctcctcacccagccccgcaagaccgagaacggcgccacctgcctccccatccccgtctggggcctccagctcctcctccccctcctcctcccctccttcatccacttctcctga

SEQ ID NO: 3727 - RNA, 804 nt, synthetic construct
  misc_feature 1..804: note = derived and/or modified sequence opt3 fromTX101__Homo_sapiens__CCDS12619.1
  source 1..804: mol_type = other RNA
atgggcgccagacagatccaaaccagctcctctcagacatcaccagaggaagctatggggactcctaggattcagcatctgctcatacttctggtgttgggagcaagtttactgacgagcggtctagagctctactgccagaagggcctgtccatgaccgtcgaagccgacccagcgaacatgttcaattggacaactgaggaagttgagacctgtgataaaggggctctttgccaagagacaatcctgattatcaaggccggaaccgaaactgcaattttggccacaaaaggctgtatcccggagggtgaagaggctataaccatcgtgcagcactcttcgccccctgggctcattgtaacgtcatatagcaactactgcgaggacagtttttgtaatgataaggactccctgtctcagttctgggaatttagcgagactaccgcatccacagtgtcaactaccctgcactgcccaacatgtgtcgccctcggaacctgcttcagtgctcccagcttaccttgtccaaacggcacgactcggtgctatcagggcaaactggaaatcacagggggaggtattgagtcttccgtggaagttaagggctgtaccgccatgatcgggtgccgccttatgtcaggaatattggcggtgggccccatgtttgtccgagaggcatgccctcatcaactgctaactcagccacgtaagacagagaatggtgccacctgtctcccgattcccgtgtgggggctgcagcttctgttgcctctcctgttacccagcttcatccactttagttga

SEQ ID NO: 3728 - RNA, 804 nt, synthetic construct
  misc_feature 1..804: note = derived and/or modified sequence opt4 fromTX101__Homo_sapiens__CCDS12619.1
  source 1..804: mol_type = other RNA
atgggcgccagacagatccagaccagcagcagccagaccagccccgaggaggccatgggcacccccagaatccagcacctgctgatcctgctggtgctgggcgccagcctgctgaccagcggcctggagctgtactgccagaagggcctgagcatgaccgtggaggccgaccccgccaacatgttcaactggaccaccgaggaggtggagacctgcgacaagggcgccctgtgccaggagaccatcctgatcatcaaggccggcaccgagaccgccatcctggccaccaagggctgcatccccgagggcgaggaggccatcaccatcgtgcagcacagcagcccccccggcctgatcgtgaccagctacagcaactactgcgaggacagcttctgcaacgacaaggacagcctgagccagttctgggagttcagcgagaccaccgccagcaccgtgagcaccaccctgcactgccccacctgcgtggccctgggcacctgcttcagcgcccccagcctgccctgccccaacggcaccaccagatgctaccagggcaagctggagatcaccggcggcggcatcgagagcagcgtggaggtgaagggctgcaccgccatgatcggctgcagactgatgagcggcatcctggccgtgggccccatgttcgtgagagaggcctgcccccaccagctgctgacccagcccagaaagaccgagaacggcgccacctgcctgcccatccccgtgtggggcctgcagctgctgctgcccctgctgctgcccagcttcatccacttcagctga

SEQ ID NO: 3729 - RNA, 804 nt, synthetic construct
  misc_feature 1..804: note = derived and/or modified sequence opt5 fromTX101__Homo_sapiens__CCDS12619.1
  source 1..804: mol_type = other RNA
atgggcgccagacagatccaaaccagctcctctcagacaagccccgaggaagctatggggacgcctcggattcagcatctgctcatcctgcttgtgctgggagcctccctcctgacctctggccttgagctgtactgccagaaggggctcagcatgacagtcgaagcggacccggctaacatgttcaattggaccacagaggaagttgagacctgtgataaaggagccctgtgccaagagacaattctgatcattaaggccggcaccgaaacggctatcctcgccaccaaagggtgtatccccgagggagaagaggctattacaatcgtgcagcactcctctcctcccggcctgattgtgaccagctattccaactactgcgaggacagcttttgtaatgataaggactctctttcccagttctgggaatttagcgagacaaccgcctctacggtctccacaaccctgcactgccctacatgtgtggcgctcggaacctgcttcagcgccccctctctgccttgtccgaacgggaccacacgctgctatcagggaaaacttgaaatcacgggcgggggaattgagtccagcgttgaagtgaagggctgtaccgctatgatcgggtgcagactgatgtccggcattctcgccgtcggccccatgtttgtgcgggaggcttgccctcatcaactgctgacacagccccgcaagaccgagaatggcgccacatgtctccctatccccgtttgggggctgcagcttctgctcccgctgcttctgccttctttcatccactttagctga

SEQ ID NO: 3730 - protein, 529 aa, synthetic construct [sequence omitted]

SEQ ID NO: 3731 - RNA, 1590 nt, synthetic construct
  misc_feature 1..1590: note = tyrosinase__Homo_sapiens__AHZ44440
  source 1..1590: mol_type = other RNA
atgctcctggctgttttgtactgcctgctgtggagtttccagacctccgctggccatttccctagagcctgtgtctcctctaagaacctgatggagaaggaatgctgtccaccgtggagcggggacaggagtccctgtggccagctttcaggcagaggttcctgtcagaatatccttctgtccaatgcaccacttgggcctcaatttcccttcacaggggtggatgaccgggagtcgtggccttccgtcttttataataggacctgccagtgctctggcaacttcatgggattcaactgtggaaactgcaagtttggcttttggggaccaaactgcacagagagacgactcttggtgagaagaaacatcttcgatttgagtgccccagagaaggacaaattttttgcctacctcactttagcaaagcataccatcagctcagactatgtcatccccatagggacctatggccaaatgaaaaatggatcaacacccatgtttaacgacatcaatatttatgacctctttgtctggatgcattattatgtgtcaatggatgcactgcttgggggatctgaaatctggagagacattgattttgcccatgaagcaccagcttttctgccttggcatagactcttcttgttgcggtgggaacaagaaatccagaagctgacaggagatgaaaacttcactattccatattgggactggcgggatgcagaaaagtgtgacatttgcacagatgagtacatgggaggtcagcaccccacaaatcctaacttactcagcccagcatcattcttctcctcttggcagattgtctgtagccgattggaggagtacaacagccatcagtctttatgcaatggaacgcccgagggacctttacggcgtaatcctggaaaccatgacaaatccagaaccccaaggctcccctcttcagctgatgtagaattttgcctgagtttgacccaatatgaatctggttccatggataaagctgccaatttcagctttagaaatacactggaaggatttgctagtccacttactgggatagcggatgcctctcaaagcagcatgcacaatgccttgcacatctatatgaatggaacaatgtcccaggtacagggatctgccaacgatcctatcttccttcttcaccatgcatttgttgacagtatttttgagcagtggctccgaaggcaccgtcctcttcaagaagtttatccagaagccaatgcacccattagacataaccgggaatcctacatggttccttttataccactgtacagaaatggtgatttctttatttcatccaaagatctgggctatgactatagctatctacaagattcagacccagactcttttcaagactacattaagtcctatttggaacaagcgagtcggatctggtcatggctccttggggcggcgatggtaggggccgtcctcactgccctgctggcagggcttgtgagcttgctgtgtcgtcacaagagaaagcagcttcctgaagaaaagcagccactcctcatggagaaagaggattaccacagcttgtatcagagccatttataa

SEQ ID NO: 3732 - RNA, 1590 nt, synthetic construct
  misc_feature 1..1590: note = derived and/or modified sequence opt1 fromtyrosinase__Homo_sapiens__AHZ44440
  source 1..1590: mol_type = other RNA
atgctgctcgccgtgctgtactgcctgctctggagcttccagacctccgccggccacttcccccgcgcgtgcgtcagctccaagaacctgatggagaaggagtgctgcccgccctggagcggggaccggtccccctgcggccagctgagcgggcgcggctcctgccagaacatcctcctgagcaacgcgcccctggggccgcagttccccttcaccggcgtggacgaccgggagtcctggcccagcgtgttctacaaccgcacgtgccagtgctccggcaacttcatggggttcaactgcggcaactgcaagttcgggttctggggccccaactgcaccgagcggcgcctcctggtccggcgcaacatcttcgacctgagcgccccggagaaggacaagttcttcgcctacctcaccctggccaagcacaccatctccagcgactacgtgatccccatcgggacgtacggccagatgaagaacggctccacccccatgttcaacgacatcaacatctacgacctgttcgtgtggatgcactactacgtcagcatggacgccctcctcgggggctccgagatctggcgggacatcgacttcgcccacgaggcccccgccttcctgccgtggcaccgcctgttcctgctgcggtgggagcaggagatccagaagctcaccggggacgagaacttcaccatcccctactgggactggcgcgacgcggagaagtgcgacatctgcacggacgagtacatgggcggccagcaccccaccaaccccaacctgctgagcccggcctccttcttcagcagctggcagatcgtgtgctcccggctcgaggagtacaacagccaccagtccctgtgcaacgggacccccgagggccccctgcgccggaaccccgggaaccacgacaagagccgcaccccgcggctcccctccagcgccgacgtggagttctgcctgtccctgacgcagtacgagagcggctccatggacaaggccgccaacttcagcttccgcaacaccctcgaggggttcgcgagccccctgaccggcatcgccgacgcctcccagtccagcatgcacaacgccctgcacatctacatgaacggcaccatgtcccaggtccaggggagcgccaacgaccccatcttcctcctgcaccacgcgttcgtggactccatcttcgagcagtggctgcggcgccaccggccgctccaggaggtgtaccccgaggccaacgcccccatccgccacaaccgcgagagctacatggtccccttcatcccgctgtaccggaacggcgacttcttcatctccagcaaggacctggggtacgactacagctacctccaggactccgaccccgacagcttccaggactacatcaagtcctacctggagcaggccagccgcatctggtcctggctgctcggcgccgcgatggtgggggccgtgctgacggccctgctcgccggcctggtcagcctgctctgccggcacaagcgcaagcagctgcccgaggagaagcagccgctgctgatggagaaggaggactaccactccctctaccagagccacctgtga

SEQ ID NO: 3733 - RNA, 1590 nt, synthetic construct
  misc_feature 1..1590: note = derived and/or modified sequence opt2 fromtyrosinase__Homo_sapiens__AHZ44440
  source 1..1590: mol_type = other RNA
atgctcctcgccgtcctctactgcctcctctggtccttccagacctccgccggccacttcccccgcgcctgcgtctcctccaagaacctcatggagaaggagtgctgccccccctggtccggcgaccgctccccctgcggccagctctccggccgcggctcctgccagaacatcctcctctccaacgcccccctcggcccccagttccccttcaccggcgtcgacgaccgcgagtcctggccctccgtcttctacaaccgcacctgccagtgctccggcaacttcatgggcttcaactgcggcaactgcaagttcggcttctggggccccaactgcaccgagcgccgcctcctcgtccgccgcaacatcttcgacctctccgcccccgagaaggacaagttcttcgcctacctcaccctcgccaagcacaccatctcctccgactacgtcatccccatcggcacctacggccagatgaagaacggctccacccccatgttcaacgacatcaacatctacgacctcttcgtctggatgcactactacgtctccatggacgccctcctcggcggctccgagatctggcgcgacatcgacttcgcccacgaggcccccgccttcctcccctggcaccgcctcttcctcctccgctgggagcaggagatccagaagctcaccggcgacgagaacttcaccatcccctactgggactggcgcgacgccgagaagtgcgacatctgcaccgacgagtacatgggcggccagcaccccaccaaccccaacctcctctcccccgcctccttcttctcctcctggcagatcgtctgctcccgcctcgaggagtacaactcccaccagtccctctgcaacggcacccccgagggccccctccgccgcaaccccggcaaccacgacaagtcccgcaccccccgcctcccctcctccgccgacgtcgagttctgcctctccctcacccagtacgagtccggctccatggacaaggccgccaacttctccttccgcaacaccctcgagggcttcgcctcccccctcaccggcatcgccgacgcctcccagtcctccatgcacaacgccctccacatctacatgaacggcaccatgtcccaggtccagggctccgccaacgaccccatcttcctcctccaccacgccttcgtcgactccatcttcgagcagtggctccgccgccaccgccccctccaggaggtctaccccgaggccaacgcccccatccgccacaaccgcgagtcctacatggtccccttcatccccctctaccgcaacggcgacttcttcatctcctccaaggacctcggctacgactactcctacctccaggactccgaccccgactccttccaggactacatcaagtcctacctcgagcaggcctcccgcatctggtcctggctcctcggcgccgccatggtcggcgccgtcctcaccgccctcctcgccggcctcgtctccctcctctgccgccacaagcgcaagcagctccccgaggagaagcagcccctcctcatggagaaggaggactaccactccctctaccagtcccacctctga

SEQ ID NO: 3734 - RNA, 1590 nt, synthetic construct
  misc_feature 1..1590: note = derived and/or modified sequence opt3 fromtyrosinase__Homo_sapiens__AHZ44440
  source 1..1590: mol_type = other RNA
atgctgctcgccgtgctttactgcctgttgtggagcttccagacctccgctggccactttcccagagcatgtgtctcttcaaagaacttaatggagaaagaatgctgtcctccatggagtggggacaggagcccgtgcggacaactgtccggtcggggctcttgtcagaatatcctactctcgaacgcccccttggggcctcagttcccatttacaggagttgatgaccgcgagtcatggcccagcgtgttctataatcgaacttgccagtgtagtggcaactttatgggtttcaattgcgggaactgtaagtttggattctggggccctaattgcacggaacgtagacttctggtaaggcggaacatttttgatttgtccgcgccagagaaagacaagttctttgcttacctcaccctggccaaacatacaatatctagcgattatgtgatccccattggcacttacgggcaaatgaagaatggatccacccctatgttcaacgacatcaatatttatgatctgtttgtctggatgcactactatgtgtcaatggacgcactcttaggtggcagtgaaatctggcgcgatatagacttcgcccatgaggctccagcattcctgccgtggcacagactttttctgctgaggtgggagcaggaaatccagaagctaacaggggatgagaacttcaccattccctactgggactggcgggatgccgaaaaatgtgacatctgcactgacgagtacatgggaggccagcatcctacaaatccaaacctcctgagccccgcttcctttttctcttcatggcaaattgtttgcagccgccttgaggaatataatagtcaccagtctctgtgtaacggtacccctgaggggccattgcgaagaaaccccggaaatcacgataagtccaggacgccgcggctccctagctcggccgacgtggaattttgcctgtctttaactcagtacgagtccggctcaatggataaagcggcaaacttcagttttcgtaataccctggaaggcttcgccagccccctcacagggatcgctgacgcctcccagtctagcatgcataacgcacttcacatatatatgaatggaactatgtcacaagtccagggtagtgctaacgatccaatttttctgttgcatcacgccttcgtggactccatctttgagcagtggctacgcagacacaggcctctgcaagaggtataccccgaagcgaatgccccaattcggcataaccgagagagctatatggttcccttcatccctctctaccgcaatggcgactttttcatctcttcaaaggatctggggtatgattacagttaccttcaggacagcgatccagactccttccaggactatattaaatcttacctggaacaggcatcgagaatatggagctggttgctcggagctgccatggtgggcgctgtcctgaccgccttactggcaggtctagtgtccctcctgtgtaggcacaagcggaagcaacttccggaggaaaaacagcccttgctgatggagaaggaggattatcattcactctaccagagtcacctgtga

SEQ ID NO: 3735 - RNA, 1590 nt, synthetic construct
  misc_feature 1..1590: note = derived and/or modified sequence opt4 fromtyrosinase__Homo_sapiens__AHZ44440
  source 1..1590: mol_type = other RNA
atgctgctggccgtgctgtactgcctgctgtggagcttccagaccagcgccggccacttccccagagcctgcgtgagcagcaagaacctgatggagaaggagtgctgccccccctggagcggcgacagaagcccctgcggccagctgagcggcagaggcagctgccagaacatcctgctgagcaacgcccccctgggcccccagttccccttcaccggcgtggacgacagagagagctggcccagcgtgttctacaacagaacctgccagtgcagcggcaacttcatgggcttcaactgcggcaactgcaagttcggcttctggggccccaactgcaccgagagaagactgctggtgagaagaaacatcttcgacctgagcgcccccgagaaggacaagttcttcgcctacctgaccctggccaagcacaccatcagcagcgactacgtgatccccatcggcacctacggccagatgaagaacggcagcacccccatgttcaacgacatcaacatctacgacctgttcgtgtggatgcactactacgtgagcatggacgccctgctgggcggcagcgagatctggagagacatcgacttcgcccacgaggcccccgccttcctgccctggcacagactgttcctgctgagatgggagcaggagatccagaagctgaccggcgacgagaacttcaccatcccctactgggactggagagacgccgagaagtgcgacatctgcaccgacgagtacatgggcggccagcaccccaccaaccccaacctgctgagccccgccagcttcttcagcagctggcagatcgtgtgcagcagactggaggagtacaacagccaccagagcctgtgcaacggcacccccgagggccccctgagaagaaaccccggcaaccacgacaagagcagaacccccagactgcccagcagcgccgacgtggagttctgcctgagcctgacccagtacgagagcggcagcatggacaaggccgccaacttcagcttcagaaacaccctggagggcttcgccagccccctgaccggcatcgccgacgccagccagagcagcatgcacaacgccctgcacatctacatgaacggcaccatgagccaggtgcagggcagcgccaacgaccccatcttcctgctgcaccacgccttcgtggacagcatcttcgagcagtggctgagaagacacagacccctgcaggaggtgtaccccgaggccaacgcccccatcagacacaacagagagagctacatggtgcccttcatccccctgtacagaaacggcgacttcttcatcagcagcaaggacctgggctacgactacagctacctgcaggacagcgaccccgacagcttccaggactacatcaagagctacctggagcaggccagcagaatctggagctggctgctgggcgccgccatggtgggcgccgtgctgaccgccctgctggccggcctggtgagcctgctgtgcagacacaagagaaagcagctgcccgaggagaagcagcccctgctgatggagaaggaggactaccacagcctgtaccagagccacctgtga

SEQ ID NO: 3736 - RNA, 1590 nt, synthetic construct
  misc_feature 1..1590: note = derived and/or modified sequence opt5 fromtyrosinase__Homo_sapiens__AHZ44440
  source 1..1590: mol_type = other RNA
atgctgctcgccgtgctgtactgccttctgtggagcttccagacctccgctggccactttcccagagcctgtgtctctagcaagaacctcatggagaaagaatgctgtcctccgtggtccggggaccggtctccctgcggacaactgagcggccgcgggtcctgtcagaatatccttctgtctaacgcgcctctcggaccccagttcccttttacaggcgttgatgacagagagagctggccctccgtgttctataatcggacgtgccagtgtagcgggaactttatgggattcaattgcggcaactgtaagtttggcttctgggggcctaattgcaccgaacgcagactgctggtgcggcgcaacatttttgatctctctgctccggagaaagacaagttctttgcctacctgacacttgccaaacataccatctccagcgattatgtcattcccatcggaacatacggccaaatgaagaatgggtctacccctatgttcaacgacattaatatctatgatctgtttgtgtggatgcactactatgtttccatggacgctctcctgggaggcagcgaaatctggagagatattgacttcgcccatgaggctcccgccttccttccttggcaccggctgtttctcctgcgctgggagcaggaaatccagaagctgacaggggatgagaacttcaccattccctactgggactggagagatgcggaaaaatgtgacatctgcacggacgagtacatgggaggccagcatccgaccaatcctaacctcctgtctcccgcctcctttttcagctcctggcaaattgtgtgctctcggcttgaggaatataatagccaccagtccctgtgtaacggcacacctgaggggcccctccgcagaaaccccggaaatcacgataagagccggacccctcgcctgccgtcttccgctgacgtcgaattttgccttagcctgacacagtacgagtctggcagcatggataaagccgctaacttctcctttagaaataccctcgaagggttcgcctctcccctgacgggaatcgcggacgccagccagtccagcatgcataacgctctgcacatttatatgaatggcacaatgtctcaagtgcaggggtccgccaacgatcctatctttctcctgcatcacgctttcgttgacagcatctttgagcagtggcttcggagacaccgccccctgcaagaggtgtaccctgaagccaatgcccccattcggcataacagagagtcttatatggtcccgttcatccctctctaccgcaatggagactttttcatttccagcaaggatctgggctatgattactcctaccttcaggactctgatcccgacagcttccaggactatatcaaatcctacctggaacaggcttctcggatttggagctggctcctgggcgcggccatggtgggggctgtgctgaccgccctcctggccggacttgtctccctgctctgtagacacaagcgcaagcaactgcctgaggaaaaacagcccctgcttatggagaaggaggattatcatagcctctaccagtctcacctgtga

SEQ ID NO: 3737 - protein, 529 aa, synthetic construct [sequence omitted]

SEQ ID NO: 3738 - RNA, 1590 nt, synthetic construct
  misc_feature 1..1590: note = tyrosinase__Homo_sapiens__AGV39051
  source 1..1590: mol_type = other RNA
atgctcctggctgttttgtactgcctgctgtggagtttccagacctccgctggccatttccctagagcctgtgtctcctctaagaacctgatggagaaggaatgctgtccaccgtggagcggggacaggagtccctgtggccagctttcaggcagaggttcctgtcagaatatccttctgtccaatgcaccacttgggcctcaatttcccttcacaggggtggatgaccgggagtcgtggccttccgtcttttataataggacctgccagtgctctggcaacttcatgggattcaactgtggaaactgcaagtttggcttttggggaccaaactgcacagagagacgactcttggtgagaagaaacatcttcgatttgagtgccccagagaaggacaaattttttgcctacctcactttagcaaagcataccatcagctcagactatgtcatccccatagggacctatggccaaatgaaaaatggatcaacacccatgtttaacgacatcaatatttatgacctctttgtctggatgcattattatgtgtcaatggatgcactgcttgggggatctgaaatctggagagacattgattttgcccatgaagcaccagcttttctgccttggcatagactcttcttgttgcggtgggaacaagaaatccagaagctgacaggagatgaaaacttcactattccatattgggactggcgggatgcagaaaagtgtgacatttgcacagatgagtacatgggaggtcagcaccccacaaatcctaacttactcagcccagcatcattcttctcctcttggcagattgtctgtagccgattggaggagtacaacagccatcagtctttatgcaatggaacgcccgagggacctttacggcgtaatcctggaaaccatgacaaatccagaaccccaaggctcccctcttcagctgatgtagaattttgcctgagtttgacccaatatgaatctggttccatggataaagctgccaatttcagctttagaaatacactggaaggatttgctagtccacttactgggatagcggatgcctctcaaagcagcatgcacaatgccttgcacatctatatgaatggaacaatgtcccaggtacagggatctgccaacgatcctatcttccttcttcaccatgcatttgttgacagtatttttgagcagtggctccgaaggcaccgtcctcttcaagaagtttatccagaagccaatgcacccattggacataaccgggaatcctacatggttccttttataccactgtacagaaatggtgatttctttatttcatccaaagatctgggctatgactatagctatctacaagattcagacccagactcttttcaagactacattaagtcctatttggaacaagcgagtcggatctggtcatggctccttggggcggcgatggtaggggccgtcctcactgccctgctggcagggcttgtgagcttgctgtgtcgtcacaagagaaagcagcttcctgaagaaaagcagccactcctcatggagaaagaggattaccacagcttgtatcagagccatttataa

SEQ ID NO: 3739 - RNA, 1590 nt, synthetic construct
  misc_feature 1..1590: note = derived and/or modified sequence opt1 fromtyrosinase__Homo_sapiens__AGV39051
  source 1..1590: mol_type = other RNA
atgctgctcgccgtgctgtactgcctgctctggagcttccagacctccgccggccacttcccccgcgcgtgcgtcagctccaagaacctgatggagaaggagtgctgcccgccctggagcggggaccggtccccctgcggccagctgagcgggcgcggctcctgccagaacatcctcctgagcaacgcgcccctggggccgcagttccccttcaccggcgtggacgaccgggagtcctggcccagcgtgttctacaaccgcacgtgccagtgctccggcaacttcatggggttcaactgcggcaactgcaagttcgggttctggggccccaactgcaccgagcggcgcctcctggtccggcgcaacatcttcgacctgagcgccccggagaaggacaagttcttcgcctacctcaccctggccaagcacaccatctccagcgactacgtgatccccatcgggacgtacggccagatgaagaacggctccacccccatgttcaacgacatcaacatctacgacctgttcgtgtggatgcactactacgtcagcatggacgccctcctcgggggctccgagatctggcgggacatcgacttcgcccacgaggcccccgccttcctgccgtggcaccgcctgttcctgctgcggtgggagcaggagatccagaagctcaccggggacgagaacttcaccatcccctactgggactggcgcgacgcggagaagtgcgacatctgcacggacgagtacatgggcggccagcaccccaccaaccccaacctgctgagcccggcctccttcttcagcagctggcagatcgtgtgctcccggctcgaggagtacaacagccaccagtccctgtgcaacgggacccccgagggccccctgcgccggaaccccgggaaccacgacaagagccgcaccccgcggctcccctccagcgccgacgtggagttctgcctgtccctgacgcagtacgagagcggctccatggacaaggccgccaacttcagcttccgcaacaccctcgaggggttcgcgagccccctgaccggcatcgccgacgcctcccagtccagcatgcacaacgccctgcacatctacatgaacggcaccatgtcccaggtccaggggagcgccaacgaccccatcttcctcctgcaccacgcgttcgtggactccatcttcgagcagtggctgcggcgccaccggccgctccaggaggtgtaccccgaggccaacgcccccatcggccacaaccgcgagagctacatggtccccttcatcccgctgtaccgcaacggggacttcttcatctccagcaaggacctgggctacgactacagctacctccaggactccgaccccgacagcttccaggactacatcaagtcctacctggagcaggccagccggatctggtcctggctgctcggggccgcgatggtgggcgccgtgctgacggccctgctcgccggcctggtcagcctgctctgccgccacaagcggaagcagctgcccgaggagaagcagccgctgctgatggagaaggaggactaccactccctctaccagagccacctgtga

SEQ ID NO: 3740 - RNA, 1590 nt, synthetic construct
  misc_feature 1..1590: note = derived and/or modified sequence opt2 fromtyrosinase__Homo_sapiens__AGV39051
  source 1..1590: mol_type = other RNA
atgctcctcgccgtcctctactgcctcctctggtccttccagacctccgccggccacttcccccgcgcctgcgtctcctccaagaacctcatggagaaggagtgctgccccccctggtccggcgaccgctccccctgcggccagctctccggccgcggctcctgccagaacatcctcctctccaacgcccccctcggcccccagttccccttcaccggcgtcgacgaccgcgagtcctggccctccgtcttctacaaccgcacctgccagtgctccggcaacttcatgggcttcaactgcggcaactgcaagttcggcttctggggccccaactgcaccgagcgccgcctcctcgtccgccgcaacatcttcgacctctccgcccccgagaaggacaagttcttcgcctacctcaccctcgccaagcacaccatctcctccgactacgtcatccccatcggcacctacggccagatgaagaacggctccacccccatgttcaacgacatcaacatctacgacctcttcgtctggatgcactactacgtctccatggacgccctcctcggcggctccgagatctggcgcgacatcgacttcgcccacgaggcccccgccttcctcccctggcaccgcctcttcctcctccgctgggagcaggagatccagaagctcaccggcgacgagaacttcaccatcccctactgggactggcgcgacgccgagaagtgcgacatctgcaccgacgagtacatgggcggccagcaccccaccaaccccaacctcctctcccccgcctccttcttctcctcctggcagatcgtctgctcccgcctcgaggagtacaactcccaccagtccctctgcaacggcacccccgagggccccctccgccgcaaccccggcaaccacgacaagtcccgcaccccccgcctcccctcctccgccgacgtcgagttctgcctctccctcacccagtacgagtccggctccatggacaaggccgccaacttctccttccgcaacaccctcgagggcttcgcctcccccctcaccggcatcgccgacgcctcccagtcctccatgcacaacgccctccacatctacatgaacggcaccatgtcccaggtccagggctccgccaacgaccccatcttcctcctccaccacgccttcgtcgactccatcttcgagcagtggctccgccgccaccgccccctccaggaggtctaccccgaggccaacgcccccatcggccacaaccgcgagtcctacatggtccccttcatccccctctaccgcaacggcgacttcttcatctcctccaaggacctcggctacgactactcctacctccaggactccgaccccgactccttccaggactacatcaagtcctacctcgagcaggcctcccgcatctggtcctggctcctcggcgccgccatggtcggcgccgtcctcaccgccctcctcgccggcctcgtctccctcctctgccgccacaagcgcaagcagctccccgaggagaagcagcccctcctcatggagaaggaggactaccactccctctaccagtcccacctctga

SEQ ID NO: 3741 - RNA, 1590 nt, synthetic construct
  misc_feature 1..1590: note = derived and/or modified sequence opt3 fromtyrosinase__Homo_sapiens__AGV39051
  source 1..1590: mol_type = other RNA
atgctgctcgccgtgctttactgcctgttgtggagcttccagacctccgctggccactttcccagagcatgtgtctcttcaaagaacttaatggagaaagaatgctgtcctccatggagtggggacaggagcccgtgcggacaactgtccggtcggggctcttgtcagaatatcctactctcgaacgcccccttggggcctcagttcccatttacaggagttgatgaccgcgagtcatggcccagcgtgttctataatcgaacttgccagtgtagtggcaactttatgggtttcaattgcgggaactgtaagtttggattctggggccctaattgcacggaacgtagacttctggtaaggcggaacatttttgatttgtccgcgccagagaaagacaagttctttgcttacctcaccctggccaaacatacaatatctagcgattatgtgatccccattggcacttacgggcaaatgaagaatggatccacccctatgttcaacgacatcaatatttatgatctgtttgtctggatgcactactatgtgtcaatggacgcactcttaggtggcagtgaaatctggcgcgatatagacttcgcccatgaggctccagcattcctgccgtggcacagactttttctgctgaggtgggagcaggaaatccagaagctaacaggggatgagaacttcaccattccctactgggactggcgggatgccgaaaaatgtgacatctgcactgacgagtacatgggaggccagcatcctacaaatccaaacctcctgagccccgcttcctttttctcttcatggcaaattgtttgcagccgccttgaggaatataatagtcaccagtctctgtgtaacggtacccctgaggggccattgcgaagaaaccccggaaatcacgataagtccaggacgccgcggctccctagctcggccgacgtggaattttgcctgtctttaactcagtacgagtccggctcaatggataaagcggcaaacttcagttttcgtaataccctggaaggcttcgccagccccctcacagggatcgctgacgcctcccagtctagcatgcataacgcacttcacatatatatgaatggaactatgtcacaagtccagggtagtgctaacgatccaatttttctgttgcatcacgccttcgtggactccatctttgagcagtggctacgcagacacaggcctctgcaagaggtataccccgaagcgaatgccccaattggccataaccgggagagctatatggttcccttcatccctctctaccgaaatggggactttttcatctcttcaaaggatctgggatatgattacagttaccttcaggacagcgatccagactccttccaggactatattaaatcttacctggaacaggcatcgcgcatatggagctggttgctcggcgctgccatggtgggtgctgtcctgaccgccttactggcagggctagtgtccctcctgtgtagacacaagaggaagcaacttccggaggaaaaacagcccttgctgatggagaaggaggattatcattcactctaccagagtcacctgtga

SEQ ID NO: 3742 - RNA, 1590 nt, synthetic construct
  misc_feature 1..1590: note = derived and/or modified sequence opt4 fromtyrosinase__Homo_sapiens__AGV39051
  source 1..1590: mol_type = other RNA
atgctgctggccgtgctgtactgcctgctgtggagcttccagaccagcgccggccacttccccagagcctgcgtgagcagcaagaacctgatggagaaggagtgctgccccccctggagcggcgacagaagcccctgcggccagctgagcggcagaggcagctgccagaacatcctgctgagcaacgcccccctgggcccccagttccccttcaccggcgtggacgacagagagagctggcccagcgtgttctacaacagaacctgccagtgcagcggcaacttcatgggcttcaactgcggcaactgcaagttcggcttctggggccccaactgcaccgagagaagactgctggtgagaagaaacatcttcgacctgagcgcccccgagaaggacaagttcttcgcctacctgaccctggccaagcacaccatcagcagcgactacgtgatccccatcggcacctacggccagatgaagaacggcagcacccccatgttcaacgacatcaacatctacgacctgttcgtgtggatgcactactacgtgagcatggacgccctgctgggcggcagcgagatctggagagacatcgacttcgcccacgaggcccccgccttcctgccctggcacagactgttcctgctgagatgggagcaggagatccagaagctgaccggcgacgagaacttcaccatcccctactgggactggagagacgccgagaagtgcgacatctgcaccgacgagtacatgggcggccagcaccccaccaaccccaacctgctgagccccgccagcttcttcagcagctggcagatcgtgtgcagcagactggaggagtacaacagccaccagagcctgtgcaacggcacccccgagggccccctgagaagaaaccccggcaaccacgacaagagcagaacccccagactgcccagcagcgccgacgtggagttctgcctgagcctgacccagtacgagagcggcagcatggacaaggccgccaacttcagcttcagaaacaccctggagggcttcgccagccccctgaccggcatcgccgacgccagccagagcagcatgcacaacgccctgcacatctacatgaacggcaccatgagccaggtgcagggcagcgccaacgaccccatcttcctgctgcaccacgccttcgtggacagcatcttcgagcagtggctgagaagacacagacccctgcaggaggtgtaccccgaggccaacgcccccatcggccacaacagagagagctacatggtgcccttcatccccctgtacagaaacggcgacttcttcatcagcagcaaggacctgggctacgactacagctacctgcaggacagcgaccccgacagcttccaggactacatcaagagctacctggagcaggccagcagaatctggagctggctgctgggcgccgccatggtgggcgccgtgctgaccgccctgctggccggcctggtgagcctgctgtgcagacacaagagaaagcagctgcccgaggagaagcagcccctgctgatggagaaggaggactaccacagcctgtaccagagccacctgtga

SEQ ID NO: 3743 - RNA, 1590 nt, synthetic construct
  misc_feature 1..1590: note = derived and/or modified sequence opt5 fromtyrosinase__Homo_sapiens__AGV39051
  source 1..1590: mol_type = other RNA
atgctgctcgccgtgctgtactgccttctgtggagcttccagacctccgctggccactttcccagagcctgtgtctctagcaagaacctcatggagaaagaatgctgtcctccgtggtccggggaccggtctccctgcggacaactgagcggccgcgggtcctgtcagaatatccttctgtctaacgcgcctctcggaccccagttcccttttacaggcgttgatgacagagagagctggccctccgtgttctataatcggacgtgccagtgtagcgggaactttatgggattcaattgcggcaactgtaagtttggcttctgggggcctaattgcaccgaacgcagactgctggtgcggcgcaacatttttgatctctctgctccggagaaagacaagttctttgcctacctgacacttgccaaacataccatctccagcgattatgtcattcccatcggaacatacggccaaatgaagaatgggtctacccctatgttcaacgacattaatatctatgatctgtttgtgtggatgcactactatgtttccatggacgctctcctgggaggcagcgaaatctggagagatattgacttcgcccatgaggctcccgccttccttccttggcaccggctgtttctcctgcgctgggagcaggaaatccagaagctgacaggggatgagaacttcaccattccctactgggactggagagatgcggaaaaatgtgacatctgcacggacgagtacatgggaggccagcatccgaccaatcctaacctcctgtctcccgcctcctttttcagctcctggcaaattgtgtgctctcggcttgaggaatataatagccaccagtccctgtgtaacggcacacctgaggggcccctccgcagaaaccccggaaatcacgataagagccggacccctcgcctgccgtcttccgctgacgtcgaattttgccttagcctgacacagtacgagtctggcagcatggataaagccgctaacttctcctttagaaataccctcgaagggttcgcctctcccctgacgggaatcgcggacgccagccagtccagcatgcataacgctctgcacatttatatgaatggcacaatgtctcaagtgcaggggtccgccaacgatcctatctttctcctgcatcacgctttcgttgacagcatctttgagcagtggcttcggagacaccgccccctgcaagaggtgtaccctgaagccaatgcccccattggacataaccgggagtcttatatggtcccgttcatccctctctacagaaatggcgactttttcatttccagcaaggatctgggctatgattactcctaccttcaggactctgatcccgacagcttccaggactatatcaaatcctacctggaacaggcttctcgcatttggagctggctcctgggggcggccatggtgggagctgtgctgaccgccctcctggccggccttgtctccctgctctgtcggcacaagagaaagcaactgcctgaggaaaaacagcccctgcttatggagaaggaggattatcatagcctctaccagtctcacctgtga

SEQ ID NO: 3744 - protein, 529 aa, synthetic construct [sequence omitted]

SEQ ID NO: 3745 - RNA, 1590 nt, synthetic construct
  misc_feature 1..1590: note = tyrosinase__Homo_sapiens__AGV39049
  source 1..1590: mol_type = other RNA
atgctcctggctgttttgtactgcctgctgtggagtttccagacctccgctggccatttccctagagcctgtgtctcctctaagaacctgatggagaaggaatgctgtccaccgtggagcggggacaggagtccctgtggccagctttcaggcagaggttcctgtcagaatatccttctgtccaatgcaccacttgggcctcaatttcccttcacaggggtggatgaccgggagtcgtggccttccgtcttttataataggacctgccagtgctctggcaacttcatgggattcaactgtggaaactgcaagtttggcttttggggaccaaactgcacagagagacgactcttggtgagaagaaacatcttcgatttgagtgccccagagaaggacaaattttttgcctacctcactttagcaaagcataccatcagctcagactatgtcatccccatagggacctatggccaaatgaaaaatggatcaacacccatgtttaacgacatcaatatttatgacctctttgtctggatgcattattatgtgtcaatggatgcactgcttgggggatctgaaatctggagagacattgattttgcccatgaagcaccagcttttctgccttggcatagactcttcttgttgcggtgggaacaagaaatccagaagctgacaggagatgaaaacttcactattccatattgggactggcgggatgcagaaaagtgtgacatttgcacagatgagtacatgggaggtcagcaccccacaaatcctaacttactcagcccagcatcattcttctcctcttggcagattgtctgtagccgattggaggagtacaacagccatcagtctttatgcaatggaacgcccgagggacctttacggcgtaatcctggaaaccatgacaaatccagaaccccaaggctcccctcttcagctgatgtagaattttgcctgagtttgacccaatatgaatctggttccatggataaagctgccaatttcagctttagaaatacactggaaggatttgctagtccacttactgggatagcggatgcctctcaaagcagcatgcacaatgccttgcacatctatatgaatggaacaatgtcccaggtacagggatctgccaacgatcctatcttccttcttcaccatgcatttgttgacagtatttttgagcagtggctccaaaggcaccgtcctcttcaagaagtttatccagaagccaatgcacccattggacataaccgggaatcctacatggttccttttataccactgtacagaaatggtgatttctttatttcatccaaagatctgggctatgactatagctatctacaagattcagacccagactcttttcaagactacattaagtcctatttggaacaagcgagtcggatctggtcatggctccttggggcggcgatggtaggggccgtcctcactgccctgctggcagggcttgtgagcttgctgtgtcgtcacaagagaaagcagcttcctgaagaaaagcagccactcctcatggagaaagaggattaccacagcttgtatcagagccatttataa

SEQ ID NO: 3746 - RNA, 1590 nt, synthetic construct
  misc_feature 1..1590: note = derived and/or modified sequence opt1 fromtyrosinase__Homo_sapiens__AGV39049
  source 1..1590: mol_type = other RNA
atgctgctcgccgtgctgtactgcctgctctggagcttccagacctccgccggccacttcccccgcgcgtgcgtcagctccaagaacctgatggagaaggagtgctgcccgccctggagcggggaccggtccccctgcggccagctgagcgggcgcggctcctgccagaacatcctcctgagcaacgcgcccctggggccgcagttccccttcaccggcgtggacgaccgggagtcctggcccagcgtgttctacaaccgcacgtgccagtgctccggcaacttcatggggttcaactgcggcaactgcaagttcgggttctggggccccaactgcaccgagcggcgcctcctggtccggcgcaacatcttcgacctgagcgccccggagaaggacaagttcttcgcctacctcaccctggccaagcacaccatctccagcgactacgtgatccccatcgggacgtacggccagatgaagaacggctccacccccatgttcaacgacatcaacatctacgacctgttcgtgtggatgcactactacgtcagcatggacgccctcctcgggggctccgagatctggcgggacatcgacttcgcccacgaggcccccgccttcctgccgtggcaccgcctgttcctgctgcggtgggagcaggagatccagaagctcaccggggacgagaacttcaccatcccctactgggactggcgcgacgcggagaagtgcgacatctgcacggacgagtacatgggcggccagcaccccaccaaccccaacctgctgagcccggcctccttcttcagcagctggcagatcgtgtgctcccggctcgaggagtacaacagccaccagtccctgtgcaacgggacccccgagggccccctgcgccggaaccccgggaaccacgacaagagccgcaccccgcggctcccctccagcgccgacgtggagttctgcctgtccctgacgcagtacgagagcggctccatggacaaggccgccaacttcagcttccgcaacaccctcgaggggttcgcgagccccctgaccggcatcgccgacgcctcccagtccagcatgcacaacgccctgcacatctacatgaacggcaccatgtcccaggtccaggggagcgccaacgaccccatcttcctcctgcaccacgcgttcgtggactccatcttcgagcagtggctgcagcggcaccgcccgctccaggaggtgtaccccgaggccaacgcccccatcggccacaaccgggagagctacatggtccccttcatcccgctgtaccgcaacggggacttcttcatctccagcaaggacctgggctacgactacagctacctccaggactccgaccccgacagcttccaggactacatcaagtcctacctggagcaggccagccgcatctggtcctggctgctcggggccgcgatggtgggcgccgtgctgacggccctgctcgccggcctggtcagcctgctctgccggcacaagcgcaagcagctgcccgaggagaagcagccgctgctgatggagaaggaggactaccactccctctaccagagccacctgtga

SEQ ID NO: 3747 - RNA, 1590 nt, synthetic construct
  misc_feature 1..1590: note = derived and/or modified sequence opt2 fromtyrosinase__Homo_sapiens__AGV39049
  source 1..1590: mol_type = other RNA
atgctcctcgccgtcctctactgcctcctctggtccttccagacctccgccggccacttcccccgcgcctgcgtctcctccaagaacctcatggagaaggagtgctgccccccctggtccggcgaccgctccccctgcggccagctctccggccgcggctcctgccagaacatcctcctctccaacgcccccctcggcccccagttccccttcaccggcgtcgacgaccgcgagtcctggccctccgtcttctacaaccgcacctgccagtgctccggcaacttcatgggcttcaactgcggcaactgcaagttcggcttctggggccccaactgcaccgagcgccgcctcctcgtccgccgcaacatcttcgacctctccgcccccgagaaggacaagttcttcgcctacctcaccctcgccaagcacaccatctcctccgactacgtcatccccatcggcacctacggccagatgaagaacggctccacccccatgttcaacgacatcaacatctacgacctcttcgtctggatgcactactacgtctccatggacgccctcctcggcggctccgagatctggcgcgacatcgacttcgcccacgaggcccccgccttcctcccctggcaccgcctcttcctcctccgctgggagcaggagatccagaagctcaccggcgacgagaacttcaccatcccctactgggactggcgcgacgccgagaagtgcgacatctgcaccgacgagtacatgggcggccagcaccccaccaaccccaacctcctctcccccgcctccttcttctcctcctggcagatcgtctgctcccgcctcgaggagtacaactcccaccagtccctctgcaacggcacccccgagggccccctccgccgcaaccccggcaaccacgacaagtcccgcaccccccgcctcccctcctccgccgacgtcgagttctgcctctccctcacccagtacgagtccggctccatggacaaggccgccaacttctccttccgcaacaccctcgagggcttcgcctcccccctcaccggcatcgccgacgcctcccagtcctccatgcacaacgccctccacatctacatgaacggcaccatgtcccaggtccagggctccgccaacgaccccatcttcctcctccaccacgccttcgtcgactccatcttcgagcagtggctccagcgccaccgccccctccaggaggtctaccccgaggccaacgcccccatcggccacaaccgcgagtcctacatggtccccttcatccccctctaccgcaacggcgacttcttcatctcctccaaggacctcggctacgactactcctacctccaggactccgaccccgactccttccaggactacatcaagtcctacctcgagcaggcctcccgcatctggtcctggctcctcggcgccgccatggtcggcgccgtcctcaccgccctcctcgccggcctcgtctccctcctctgccgccacaagcgcaagcagctccccgaggagaagcagcccctcctcatggagaaggaggactaccactccctctaccagtcccacctctga

SEQ ID NO: 3748 - RNA, 1590 nt, synthetic construct
  misc_feature 1..1590: note = derived and/or modified sequence opt3 fromtyrosinase__Homo_sapiens__AGV39049
  source 1..1590: mol_type = other RNA
atgctgctcgccgtgctttactgcctgttgtggagcttccagacctccgctggccactttcccagagcatgtgtctcttcaaagaacttaatggagaaagaatgctgtcctccatggagtggggacaggagcccgtgcggacaactgtccggtcggggctcttgtcagaatatcctactctcgaacgcccccttggggcctcagttcccatttacaggagttgatgaccgcgagtcatggcccagcgtgttctataatcgaacttgccagtgtagtggcaactttatgggtttcaattgcgggaactgtaagtttggattctggggccctaattgcacggaacgtagacttctggtaaggcggaacatttttgatttgtccgcgccagagaaagacaagttctttgcttacctcaccctggccaaacatacaatatctagcgattatgtgatccccattggcacttacgggcaaatgaagaatggatccacccctatgttcaacgacatcaatatttatgatctgtttgtctggatgcactactatgtgtcaatggacgcactcttaggtggcagtgaaatctggcgcgatatagacttcgcccatgaggctccagcattcctgccgtggcacagactttttctgctgaggtgggagcaggaaatccagaagctaacaggggatgagaacttcaccattccctactgggactggcgggatgccgaaaaatgtgacatctgcactgacgagtacatgggaggccagcatcctacaaatccaaacctcctgagccccgcttcctttttctcttcatggcaaattgtttgcagccgccttgaggaatataatagtcaccagtctctgtgtaacggtacccctgaggggccattgcgaagaaaccccggaaatcacgataagtccaggacgccgcggctccctagctcggccgacgtggaattttgcctgtctttaactcagtacgagtccggctcaatggataaagcggcaaacttcagttttcgtaataccctggaaggcttcgccagccccctcacagggatcgctgacgcctcccagtctagcatgcataacgcacttcacatatatatgaatggaactatgtcacaagtccagggtagtgctaacgatccaatttttctgttgcatcacgccttcgtggactccatctttgagcagtggctacaacgccacagacctctgcaggaggtataccccgaagcgaatgccccaattggccataacagggagagctatatggttcccttcatccctctctaccggaatggggactttttcatctcttcaaaggatctgggatatgattacagttaccttcaggacagcgatccagactccttccaggactatattaaatcttacctggaacaagcatcgcgaatatggagctggttgctcggcgctgccatggtgggtgctgtcctgaccgccttactggcagggctagtgtccctcctgtgtcgccacaagagaaagcagcttccggaggaaaaacagcccttgctgatggagaaggaggattatcattcactctaccagagtcacctgtga

SEQ ID NO: 3749 - RNA, 1590 nt, synthetic construct
  misc_feature 1..1590: note = derived and/or modified sequence opt4 fromtyrosinase__Homo_sapiens__AGV39049
  source 1..1590: mol_type = other RNA
atgctgctggccgtgctgtactgcctgctgtggagcttccagaccagcgccggccacttccccagagcctgcgtgagcagcaagaacctgatggagaaggagtgctgccccccctggagcggcgacagaagcccctgcggccagctgagcggcagaggcagctgccagaacatcctgctgagcaacgcccccctgggcccccagttccccttcaccggcgtggacgacagagagagctggcccagcgtgttctacaacagaacctgccagtgcagcggcaacttcatgggcttcaactgcggcaactgcaagttcggcttctggggccccaactgcaccgagagaagactgctggtgagaagaaacatcttcgacctgagcgcccccgagaaggacaagttcttcgcctacctgaccctggccaagcacaccatcagcagcgactacgtgatccccatcggcacctacggccagatgaagaacggcagcacccccatgttcaacgacatcaacatctacgacctgttcgtgtggatgcactactacgtgagcatggacgccctgctgggcggcagcgagatctggagagacatcgacttcgcccacgaggcccccgccttcctgccctggcacagactgttcctgctgagatgggagcaggagatccagaagctgaccggcgacgagaacttcaccatcccctactgggactggagagacgccgagaagtgcgacatctgcaccgacgagtacatgggcggccagcaccccaccaaccccaacctgctgagccccgccagcttcttcagcagctggcagatcgtgtgcagcagactggaggagtacaacagccaccagagcctgtgcaacggcacccccgagggccccctgagaagaaaccccggcaaccacgacaagagcagaacccccagactgcccagcagcgccgacgtggagttctgcctgagcctgacccagtacgagagcggcagcatggacaaggccgccaacttcagcttcagaaacaccctggagggcttcgccagccccctgaccggcatcgccgacgccagccagagcagcatgcacaacgccctgcacatctacatgaacggcaccatgagccaggtgcagggcagcgccaacgaccccatcttcctgctgcaccacgccttcgtggacagcatcttcgagcagtggctgcagagacacagacccctgcaggaggtgtaccccgaggccaacgcccccatcggccacaacagagagagctacatggtgcccttcatccccctgtacagaaacggcgacttcttcatcagcagcaaggacctgggctacgactacagctacctgcaggacagcgaccccgacagcttccaggactacatcaagagctacctggagcaggccagcagaatctggagctggctgctgggcgccgccatggtgggcgccgtgctgaccgccctgctggccggcctggtgagcctgctgtgcagacacaagagaaagcagctgcccgaggagaagcagcccctgctgatggagaaggaggactaccacagcctgtaccagagccacctgtga

SEQ ID NO: 3750 - RNA, 1590 nt, synthetic construct
  misc_feature 1..1590: note = derived and/or modified sequence opt5 fromtyrosinase__Homo_sapiens__AGV39049
  source 1..1590: mol_type = other RNA
atgctgctcgccgtgctgtactgccttctgtggagcttccagacctccgctggccactttcccagagcctgtgtctctagcaagaacctcatggagaaagaatgctgtcctccgtggtccggggaccggtctccctgcggacaactgagcggccgcgggtcctgtcagaatatccttctgtctaacgcgcctctcggaccccagttcccttttacaggcgttgatgacagagagagctggccctccgtgttctataatcggacgtgccagtgtagcgggaactttatgggattcaattgcggcaactgtaagtttggcttctgggggcctaattgcaccgaacgcagactgctggtgcggcgcaacatttttgatctctctgctccggagaaagacaagttctttgcctacctgacacttgccaaacataccatctccagcgattatgtcattcccatcggaacatacggccaaatgaagaatgggtctacccctatgttcaacgacattaatatctatgatctgtttgtgtggatgcactactatgtttccatggacgctctcctgggaggcagcgaaatctggagagatattgacttcgcccatgaggctcccgccttccttccttggcaccggctgtttctcctgcgctgggagcaggaaatccagaagctgacaggggatgagaacttcaccattccctactgggactggagagatgcggaaaaatgtgacatctgcacggacgagtacatgggaggccagcatccgaccaatcctaacctcctgtctcccgcctcctttttcagctcctggcaaattgtgtgctctcggcttgaggaatataatagccaccagtccctgtgtaacggcacacctgaggggcccctccgcagaaaccccggaaatcacgataagagccggacccctcgcctgccgtcttccgctgacgtcgaattttgccttagcctgacacagtacgagtctggcagcatggataaagccgctaacttctcctttagaaataccctcgaagggttcgcctctcccctgacgggaatcgcggacgccagccagtccagcatgcataacgctctgcacatttatatgaatggcacaatgtctcaagtgcaggggtccgccaacgatcctatctttctcctgcatcacgctttcgttgacagcatctttgagcagtggcttcaacggcacagacccctgcaggaggtgtaccctgaagccaatgcccccattggacataaccgcgagtcttatatggtcccgttcatccctctctaccggaatggcgactttttcatttccagcaaggatctgggctatgattactcctaccttcaggactctgatcccgacagcttccaggactatatcaaatcctacctggaacaggcttctagaatttggagctggctcctgggggcggccatggtgggagctgtgctgaccgccctcctggccggccttgtctccctgctctgtcgccacaagcggaagcaactgcctgaggaaaaacagcccctgcttatggagaaggaggattatcatagcctctaccagtctcacctgtga

SEQ ID NO: 3751 - protein, 529 aa, synthetic construct [sequence omitted]

SEQ ID NO: 3752 - RNA, 1590 nt, synthetic construct
  misc_feature 1..1590: note = tyrosinase__Homo_sapiens__AGV39050
  source 1..1590: mol_type = other RNA
atgctcctggctgttttgtactgcctgctgtggagtttccagacctccgctggccatttccctagagcctgtgtctcctctaagaacctgatggagaaggaatgctgtccaccgtggagcggggacaggagtccctgtggccagctttcaggcagaggttcctgtcagaatatccttctgtccaatgcaccacttgggcctcaatttcccttcacaggggtggatgaccgggagtcgtggccttccgtcttttataataggacctgccagtgctctggcaacttcatgggattcaactgtggaaactgcaagtttggcttttggggaccaaactgcacagagagacgactcttggtgagaagaaacatcttcgatttgagtgccccagagaaggacaaattttttgcctacctcactttagcaaagcataccatcagctcagactatgtcatccccatagggacctatggccaaatgaaaaatggatcaacacccatgtttaacgacatcaatatttatgacctctttgtctggatgcattattatgtgtcaatggatgcactgcttgggggatatgaaatctggagagacattgattttgcccatgaagcaccagcttttctgccttggcatagactcttcttgttgcggtgggaacaagaaatccagaagctgacaggagatgaaaacttcactattccatattgggactggcgggatgcagaaaagtgtgacatttgcacagatgagtacatgggaggtcagcaccccacaaatcctaacttactcagcccagcatcattcttctcctcttggcagattgtctgtagccgattggaggagtacaacagccatcagtctttatgcaatggaacgcccgagggacctttacggcgtaatcctggaaaccatgacaaatccagaaccccaaggctcccctcttcagctgatgtagaattttgcctgagtttgacccaatatgaatctggttccatggataaagctgccaatttcagctttagaaatacactggaaggatttgctagtccacttactgggatagcggatgcctctcaaagcagcatgcacaatgccttgcacatctatatgaatggaacaatgtcccaggtacagggatctgccaacgatcctatcttccttcttcaccatgcatttgttgacagtatttttgagcagtggctccgaaggcaccgtcctcttcaagaagtttatccagaagccaatgcacccattggacataaccgggaatcctacatggttccttttataccactgtacagaaatggtgatttctttatttcatccaaagatctgggctatgactatagctatctacaagattcagacccagactcttttcaagactacattaagtcctatttggaacaagcgagtcggatctggtcatggctccttggggcggcgatggtaggggccgtcctcactgccctgctggcagggcttgtgagcttgctgtgtcgtcacaagagaaagcagcttcctgaagaaaagcagccactcctcatggagaaagaggattaccacagcttgtatcagagccatttataa

SEQ ID NO: 3753 - RNA, 1590 nt, synthetic construct
  misc_feature 1..1590: note = derived and/or modified sequence opt1 fromtyrosinase__Homo_sapiens__AGV39050
  source 1..1590: mol_type = other RNA
atgctgctcgccgtgctgtactgcctgctctggagcttccagacctccgccggccacttcccccgcgcgtgcgtcagctccaagaacctgatggagaaggagtgctgcccgccctggagcggggaccggtccccctgcggccagctgagcgggcgcggctcctgccagaacatcctcctgagcaacgcgcccctggggccgcagttccccttcaccggcgtggacgaccgggagtcctggcccagcgtgttctacaaccgcacgtgccagtgctccggcaacttcatggggttcaactgcggcaactgcaagttcgggttctggggccccaactgcaccgagcggcgcctcctggtccggcgcaacatcttcgacctgagcgccccggagaaggacaagttcttcgcctacctcaccctggccaagcacaccatctccagcgactacgtgatccccatcgggacgtacggccagatgaagaacggctccacccccatgttcaacgacatcaacatctacgacctgttcgtgtggatgcactactacgtcagcatggacgccctcctcgggggctacgagatctggcgggacatcgacttcgcccacgaggcccccgccttcctgccgtggcaccgcctgttcctgctgcggtgggagcaggagatccagaagctcaccggggacgagaacttcaccatcccctactgggactggcgcgacgcggagaagtgcgacatctgcacggacgagtacatgggcggccagcaccccaccaaccccaacctgctgtccccggccagcttcttctccagctggcagatcgtgtgcagccggctcgaggagtacaactcccaccagagcctgtgcaacgggacccccgagggccccctgcgccggaaccccgggaaccacgacaagtcccgcaccccgcggctccccagctccgccgacgtggagttctgcctgagcctgacgcagtacgagtccggcagcatggacaaggccgccaacttctccttccgcaacaccctcgaggggttcgcgagccccctgaccggcatcgccgacgcctcccagagctccatgcacaacgccctgcacatctacatgaacggcaccatgagccaggtccaggggtccgccaacgaccccatcttcctcctgcaccacgcgttcgtggacagcatcttcgagcagtggctgcggcgccaccggccgctccaggaggtgtaccccgaggccaacgcccccatcggccacaaccgcgagtcctacatggtccccttcatcccgctgtaccgcaacggggacttcttcatcagctccaaggacctgggctacgactacagctacctccaggacagcgaccccgactccttccaggactacatcaagagctacctggagcaggcctcccggatctggagctggctgctcggggccgcgatggtgggcgccgtgctgacggccctgctcgccggcctggtctccctgctctgccgccacaagcggaagcagctgcccgaggagaagcagccgctgctgatggagaaggaggactaccacagcctctaccagtcccacctgtga

SEQ ID NO: 3754 - RNA, 1590 nt, synthetic construct
  misc_feature 1..1590: note = derived and/or modified sequence opt2 fromtyrosinase__Homo_sapiens__AGV39050
  source 1..1590: mol_type = other RNA
atgctcctcgccgtcctctactgcctcctctggtccttccagacctccgccggccacttcccccgcgcctgcgtctcctccaagaacctcatggagaaggagtgctgccccccctggtccggcgaccgctccccctgcggccagctctccggccgcggctcctgccagaacatcctcctctccaacgcccccctcggcccccagttccccttcaccggcgtcgacgaccgcgagtcctggccctccgtcttctacaaccgcacctgccagtgctccggcaacttcatgggcttcaactgcggcaactgcaagttcggcttctggggccccaactgcaccgagcgccgcctcctcgtccgccgcaacatcttcgacctctccgcccccgagaaggacaagttcttcgcctacctcaccctcgccaagcacaccatctcctccgactacgtcatccccatcggcacctacggccagatgaagaacggctccacccccatgttcaacgacatcaacatctacgacctcttcgtctggatgcactactacgtctccatggacgccctcctcggcggctacgagatctggcgcgacatcgacttcgcccacgaggcccccgccttcctcccctggcaccgcctcttcctcctccgctgggagcaggagatccagaagctcaccggcgacgagaacttcaccatcccctactgggactggcgcgacgccgagaagtgcgacatctgcaccgacgagtacatgggcggccagcaccccaccaaccccaacctcctctcccccgcctccttcttctcctcctggcagatcgtctgctcccgcctcgaggagtacaactcccaccagtccctctgcaacggcacccccgagggccccctccgccgcaaccccggcaaccacgacaagtcccgcaccccccgcctcccctcctccgccgacgtcgagttctgcctctccctcacccagtacgagtccggctccatggacaaggccgccaacttctccttccgcaacaccctcgagggcttcgcctcccccctcaccggcatcgccgacgcctcccagtcctccatgcacaacgccctccacatctacatgaacggcaccatgtcccaggtccagggctccgccaacgaccccatcttcctcctccaccacgccttcgtcgactccatcttcgagcagtggctccgccgccaccgccccctccaggaggtctaccccgaggccaacgcccccatcggccacaaccgcgagtcctacatggtccccttcatccccctctaccgcaacggcgacttcttcatctcctccaaggacctcggctacgactactcctacctccaggactccgaccccgactccttccaggactacatcaagtcctacctcgagcaggcctcccgcatctggtcctggctcctcggcgccgccatggtcggcgccgtcctcaccgccctcctcgccggcctcgtctccctcctctgccgccacaagcgcaagcagctccccgaggagaagcagcccctcctcatggagaaggaggactaccactccctctaccagtcccacctctga

SEQ ID NO: 3755 - RNA, 1590 nt, synthetic construct
  misc_feature 1..1590: note = derived and/or modified sequence opt3 fromtyrosinase__Homo_sapiens__AGV39050
  source 1..1590: mol_type = other RNA
atgctgctcgccgtgctttactgcctgttgtggagcttccagacctccgctggccactttcccagagcatgtgtctcttcaaagaacttaatggagaaagaatgctgtcctccatggagtggggacaggagcccgtgcggacaactgtccggtcggggctcttgtcagaatatcctactctcgaacgcccccttggggcctcagttcccatttacaggagttgatgaccgcgagtcatggcccagcgtgttctataatcgaacttgccagtgtagtggcaactttatgggtttcaattgcgggaactgtaagtttggattctggggccctaattgcacggaacgtagacttctggtaaggcggaacatttttgatttgtccgcgccagagaaagacaagttctttgcttacctcaccctggccaaacatacaatatctagcgattatgtgatccccattggcacttacgggcaaatgaagaatggatccacccctatgttcaacgacatcaatatttatgatctgtttgtctggatgcactactatgtgtcaatggacgcactcttaggtggctacgaaatctggcgcgatatagacttcgcccatgaggctccagcattcctgccgtggcacagactttttctgctgaggtgggagcaggaaatccagaagctaacaggggatgagaacttcaccattccctactgggactggcgggatgccgaaaaatgtgacatctgcactgacgagtatatgggaggccagcatcctacaaatccaaacctcctgagtcccgctagctttttctcttcctggcaaattgtttgctcacgccttgaggaatacaatagccaccagagtctgtgtaacggtacccctgaggggccattgcgaagaaaccccggaaatcacgataagtctaggacgccgcggctcccttccagcgccgacgtggaattttgcctgtcgttaactcagtatgagtctggctccatggataaagcggcaaacttctcatttcgtaataccctggaaggcttcgccagtcccctcacagggatcgctgacgccagccagtcctctatgcataacgcacttcacatatacatgaatggaactatgagccaagtccagggttcagctaacgatccaatttttctgttgcatcacgccttcgtggacagtatctttgagcagtggctacgcagacacaggcctctgcaagaggtatatcccgaagcgaatgccccaattggccataaccgggagtcctacatggttcccttcatccctctctatcgaaatggggactttttcatcagctctaaggatctgggatacgattactcatatcttcaggacagtgatccagacagcttccaggactacattaaatcctatctggaacaggcatctcgcatatggtcgtggttgctcggcgctgccatggtgggtgctgtcctgaccgccttactggcagggctagtgagcctcctgtgtagacacaagaggaagcaacttccggaggaaaaacagcccttgctgatggagaaggaggattaccattccctctatcagtcacacctgtga

SEQ ID NO: 3756 - RNA, 1590 nt, synthetic construct
  misc_feature 1..1590: note = derived and/or modified sequence opt4 fromtyrosinase__Homo_sapiens__AGV39050
  source 1..1590: mol_type = other RNA
atgctgctggccgtgctgtactgcctgctgtggagcttccagaccagcgccggccacttccccagagcctgcgtgagcagcaagaacctgatggagaaggagtgctgccccccctggagcggcgacagaagcccctgcggccagctgagcggcagaggcagctgccagaacatcctgctgagcaacgcccccctgggcccccagttccccttcaccggcgtggacgacagagagagctggcccagcgtgttctacaacagaacctgccagtgcagcggcaacttcatgggcttcaactgcggcaactgcaagttcggcttctggggccccaactgcaccgagagaagactgctggtgagaagaaacatcttcgacctgagcgcccccgagaaggacaagttcttcgcctacctgaccctggccaagcacaccatcagcagcgactacgtgatccccatcggcacctacggccagatgaagaacggcagcacccccatgttcaacgacatcaacatctacgacctgttcgtgtggatgcactactacgtgagcatggacgccctgctgggcggctacgagatctggagagacatcgacttcgcccacgaggcccccgccttcctgccctggcacagactgttcctgctgagatgggagcaggagatccagaagctgaccggcgacgagaacttcaccatcccctactgggactggagagacgccgagaagtgcgacatctgcaccgacgagtacatgggcggccagcaccccaccaaccccaacctgctgagccccgccagcttcttcagcagctggcagatcgtgtgcagcagactggaggagtacaacagccaccagagcctgtgcaacggcacccccgagggccccctgagaagaaaccccggcaaccacgacaagagcagaacccccagactgcccagcagcgccgacgtggagttctgcctgagcctgacccagtacgagagcggcagcatggacaaggccgccaacttcagcttcagaaacaccctggagggcttcgccagccccctgaccggcatcgccgacgccagccagagcagcatgcacaacgccctgcacatctacatgaacggcaccatgagccaggtgcagggcagcgccaacgaccccatcttcctgctgcaccacgccttcgtggacagcatcttcgagcagtggctgagaagacacagacccctgcaggaggtgtaccccgaggccaacgcccccatcggccacaacagagagagctacatggtgcccttcatccccctgtacagaaacggcgacttcttcatcagcagcaaggacctgggctacgactacagctacctgcaggacagcgaccccgacagcttccaggactacatcaagagctacctggagcaggccagcagaatctggagctggctgctgggcgccgccatggtgggcgccgtgctgaccgccctgctggccggcctggtgagcctgctgtgcagacacaagagaaagcagctgcccgaggagaagcagcccctgctgatggagaaggaggactaccacagcctgtaccagagccacctgtga

SEQ ID NO: 3757 - RNA, 1590 nt, synthetic construct
  misc_feature 1..1590: note = derived and/or modified sequence opt5 fromtyrosinase__Homo_sapiens__AGV39050
  source 1..1590: mol_type = other RNA
atgctgctcgccgtgctgtactgccttctgtggagcttccagacctccgctggccactttcccagagcctgtgtctctagcaagaacctcatggagaaagaatgctgtcctccgtggtccggggaccggtctccctgcggacaactgagcggccgcgggtcctgtcagaatatccttctgtctaacgcgcctctcggaccccagttcccttttacaggcgttgatgacagagagagctggccctccgtgttctataatcggacgtgccagtgtagcgggaactttatgggattcaattgcggcaactgtaagtttggcttctgggggcctaattgcaccgaacgcagactgctggtgcggcgcaacatttttgatctctctgctccggagaaagacaagttctttgcctacctgacacttgccaaacataccatctccagcgattatgtcattcccatcggaacatacggccaaatgaagaatgggtctacccctatgttcaacgacattaatatctatgatctgtttgtgtggatgcactactatgtttccatggacgctctcctgggaggctacgaaatctggagagatattgacttcgcccatgaggctcccgccttccttccttggcaccggctgtttctcctgcgctgggagcaggaaatccagaagctgacaggggatgagaacttcaccattccctactgggactggagagatgcggaaaaatgtgacatctgcacggacgagtatatgggaggccagcatccgaccaatcctaacctcctgagccccgcctcctttttctccagctggcaaattgtgtgctcccggcttgaggaatacaattctcaccagagcctgtgtaacggcacacctgaggggcccctccgcagaaaccccggaaatcacgataagtcccggacccctcgcctgccgagctctgctgacgtcgaattttgcctttccctgacacagtatgagagcggctctatggataaagccgctaacttcagctttagaaataccctcgaagggttcgcctctcccctgacgggaatcgcggacgcctctcagagctccatgcataacgctctgcacatttacatgaatggcacaatgagccaagtgcaggggtctgccaacgatcctatctttctcctgcatcacgctttcgttgactccatctttgagcagtggcttcggagacaccgccccctgcaagaggtgtatcctgaagccaatgcccccattggacataaccgggagagctacatggtcccgttcatccctctctatagaaatggcgactttttcatttcttccaaggatctgggctacgattacagctatcttcaggactccgatcccgactctttccaggactacatcaaaagctatctggaacaggcttcccgcatttggtcttggctcctgggggcggccatggtgggagctgtgctgaccgccctcctggccggccttgtcagcctgctctgtcggcacaagagaaagcaactgcctgaggaaaaacagcccctgcttatggagaaggaggattaccattccctctatcagagccacctgtga

SEQ ID NO: 3758 - protein, 237 aa, synthetic construct [sequence omitted]

SEQ ID NO: 3759 - RNA, 714 nt, synthetic construct
  misc_feature 1..714: note = tyrosinase__Homo_sapiens__CAA04137
  source 1..714: mol_type = other RNA
atgagccccctttggtgggggtttctgctcagttgcttgggctgcaaaatcctgccaggagcccagggtcagttcccccgagtctgcatgacggtggacagcctagtgaacaaggagtgctgcccacgcctgggtgcagagtcggccaatgtctgtggctctcagcaaggccgggggcagtgcacagaggtgcgagccgacacaaggccctggagtggtccctacatcctacgaaaccaggatgaccgtgagctgtggccaagaaaattcttccaccggacctgcaagtgcacaggaaactttgccggctataattgtggagactgcaagtttggctggaccggtcccaactgcgagcggaagaaaccaccagtgattcggcagaacatccattccttgagtcctcaggaaagagagcagttcttgggcgccttagatctcgcgaagaagagagtacaccccgactacgtgatcaccacacaacactgggtgggcctgcttgggcccaatggaacccagccgcagtttgccaactgcagtgtttatgatttttttgtgtggctccattattattctgttagagatacattattaggtgggttttttccttggctgaaggtatattattacaggtttgtgattgggttgagggtatggcagtgggaagtaatttcatgcaagttaattaagagagcaaccacaaggcagccttag

SEQ ID NO: 3760 - RNA, 714 nt, synthetic construct
  misc_feature 1..714: note = derived and/or modified sequence opt1 fromtyrosinase__Homo_sapiens__CAA04137
  source 1..714: mol_type = other RNA
atgagccccctgtggtggggcttcctcctgtcctgcctggggtgcaagatcctcccgggcgcccaggggcagttcccccgcgtgtgcatgaccgtcgacagcctggtgaacaaggagtgctgcccccggctgggcgccgagtccgcgaacgtgtgcgggagccagcagggccgcggccagtgcaccgaggtccgggccgacacgcgcccctggtccgggccgtacatcctccggaaccaggacgaccgcgagctgtggccccggaagttcttccaccggacctgcaagtgcaccggcaacttcgccgggtacaactgcggcgactgcaagttcgggtggaccggccccaactgcgagcgcaagaagcccccggtgatccgccagaacatccacagcctgagcccccaggagcgggagcagttcctcggcgccctggacctggccaagaagcgcgtgcaccccgactacgtcatcacgacccagcactgggtggggctcctgggccccaacgggacccagccgcagttcgcgaactgctccgtgtacgacttcttcgtctggctgcactactactccgtgcgggacaccctcctgggcggcttcttcccctggctgaaggtgtactactaccgcttcgtcatcgggctccgggtgtggcagtgggaggtgatcagctgcaagctgatcaagcgcgccacgacccggcagccctga

SEQ ID NO: 3761 - RNA, 714 nt, synthetic construct
  misc_feature 1..714: note = derived and/or modified sequence opt2 fromtyrosinase__Homo_sapiens__CAA04137
  source 1..714: mol_type = other RNA
atgtcccccctctggtggggcttcctcctctcctgcctcggctgcaagatcctccccggcgcccagggccagttcccccgcgtctgcatgaccgtcgactccctcgtcaacaaggagtgctgcccccgcctcggcgccgagtccgccaacgtctgcggctcccagcagggccgcggccagtgcaccgaggtccgcgccgacacccgcccctggtccggcccctacatcctccgcaaccaggacgaccgcgagctctggccccgcaagttcttccaccgcacctgcaagtgcaccggcaacttcgccggctacaactgcggcgactgcaagttcggctggaccggccccaactgcgagcgcaagaagccccccgtcatccgccagaacatccactccctctccccccaggagcgcgagcagttcctcggcgccctcgacctcgccaagaagcgcgtccaccccgactacgtcatcaccacccagcactgggtcggcctcctcggccccaacggcacccagccccagttcgccaactgctccgtctacgacttcttcgtctggctccactactactccgtccgcgacaccctcctcggcggcttcttcccctggctcaaggtctactactaccgcttcgtcatcggcctccgcgtctggcagtgggaggtcatctcctgcaagctcatcaagcgcgccaccacccgccagccctga

SEQ ID NO: 3762 - RNA, 714 nt, synthetic construct
  misc_feature 1..714: note = derived and/or modified sequence opt3 fromtyrosinase__Homo_sapiens__CAA04137
  source 1..714: mol_type = other RNA
atgagccccctgtggtggggcttcctcctttcctgcctggggtgtaagatcttgcctggagcccagggtcaatttccaagagtgtgcatgaccgtcgactctttagttaacaaagagtgttgcccgaggctgggcgctgaatcagcaaatgtgtgtgggagtcagcagggacggggccagtgcacagaggtacgcgccgatactcgaccctggagcggtccttacattctacgtaaccaagacgatagagaactctggccaaggaagttctttcaccggacgtgtaaatgcaccgggaatttcgcgggatataactgtggcgactgcaagtttggctggacagggcccaattgtgagcgcaaaaagcctccagtgataagacagaacatccattccctgtctccccaggaaagggagcagttccttggagctctggatttggccaagaaacgggtccaccctgactacgtgattactacccaacattgggttggtctcctgggcccaaatgggacacagccgcagtttgcaaactgctcggtgtatgatttctttgtctggctgcactactattcagtgcgcgacaccctcttaggaggcttctttccctggctgaaggtatactattaccgattcgttatcggtcttagagtgtggcagtgggaggtcattagctgcaaattgatcaagagggccactacacggcaaccttga

SEQ ID NO: 3763 - RNA, 714 nt, synthetic construct
  misc_feature 1..714: note = derived and/or modified sequence opt4 fromtyrosinase__Homo_sapiens__CAA04137
  source 1..714: mol_type = other RNA
atgagccccctgtggtggggcttcctgctgagctgcctgggctgcaagatcctgcccggcgcccagggccagttccccagagtgtgcatgaccgtggacagcctggtgaacaaggagtgctgccccagactgggcgccgagagcgccaacgtgtgcggcagccagcagggcagaggccagtgcaccgaggtgagagccgacaccagaccctggagcggcccctacatcctgagaaaccaggacgacagagagctgtggcccagaaagttcttccacagaacctgcaagtgcaccggcaacttcgccggctacaactgcggcgactgcaagttcggctggaccggccccaactgcgagagaaagaagccccccgtgatcagacagaacatccacagcctgagcccccaggagagagagcagttcctgggcgccctggacctggccaagaagagagtgcaccccgactacgtgatcaccacccagcactgggtgggcctgctgggccccaacggcacccagccccagttcgccaactgcagcgtgtacgacttcttcgtgtggctgcactactacagcgtgagagacaccctgctgggcggcttcttcccctggctgaaggtgtactactacagattcgtgatcggcctgagagtgtggcagtgggaggtgatcagctgcaagctgatcaagagagccaccaccagacagccctga

SEQ ID NO: 3764 - RNA, 714 nt, synthetic construct
  misc_feature 1..714: note = derived and/or modified sequence opt5 fromtyrosinase__Homo_sapiens__CAA04137
  source 1..714: mol_type = other RNA
atgagccccctgtggtggggcttcctcctgtcctgccttgggtgtaagatcctgcctggagcccagggccaatttccgagagtgtgcatgaccgtcgactctctcgttaacaaagagtgttgcccccggctgggggctgaaagcgccaatgtgtgtggatcccagcagggccgcgggcagtgcacagaggtgagagcggatacgcggccttggtctggaccctacattcttcgcaaccaagacgatagagaactgtggcctcggaagttctttcaccgcacctgtaaatgcacaggcaatttcgctggctataactgtggggactgcaagtttggatggaccggccccaattgtgagcggaaaaagcctccggtcatcagacagaacattcatagcctctctccccaggaacgcgagcagttcctgggggccctggatctcgccaagaaaagagtgcaccctgactacgttatcacaacccaacattgggtgggactgcttggccccaatgggacacagcctcagtttgctaactgctccgtctatgatttctttgtgtggctgcactactatagcgttcgggacaccctcctgggaggcttctttccctggcttaaggtgtactattaccgcttcgtcattggcctgagagtgtggcagtgggaggtgatctcctgcaaactcatcaagcgggccacgacccgccaaccgtga

SEQ ID NO: 3765 - protein, 529 aa, synthetic construct [sequence omitted]

SEQ ID NO: 3766 - RNA, 1590 nt, synthetic construct; identical to SEQ ID NO: 3738
  misc_feature 1..1590: note = tyrosinase__Homo_sapiens__AAA61242
  source 1..1590: mol_type = other RNA

SEQ ID NO: 3767 - RNA, 1590 nt, synthetic construct; identical to SEQ ID NO: 3739
  misc_feature 1..1590: note = derived and/or modified sequence opt1 fromtyrosinase__Homo_sapiens__AAA61242
  source 1..1590: mol_type = other RNA

SEQ ID NO: 3768 - RNA, 1590 nt, synthetic construct; identical to SEQ ID NO: 3740
  misc_feature 1..1590: note = derived and/or modified sequence opt2 fromtyrosinase__Homo_sapiens__AAA61242
  source 1..1590: mol_type = other RNA

SEQ ID NO: 3769 - RNA, 1590 nt, synthetic construct; identical to SEQ ID NO: 3741
  misc_feature 1..1590: note = derived and/or modified sequence opt3 fromtyrosinase__Homo_sapiens__AAA61242
  source 1..1590: mol_type = other RNA

SEQ ID NO: 3770 - RNA, 1590 nt, synthetic construct; identical to SEQ ID NO: 3742
  misc_feature 1..1590: note = derived and/or modified sequence opt4 fromtyrosinase__Homo_sapiens__AAA61242
  source 1..1590: mol_type = other RNA

SEQ ID NO: 3771 - RNA, 1590 nt, synthetic construct; identical to SEQ ID NO: 3743
  misc_feature 1..1590: note = derived and/or modified sequence opt5 fromtyrosinase__Homo_sapiens__AAA61242
  source 1..1590: mol_type = other RNA

SEQ ID NO: 3772 - protein, 529 aa, synthetic construct [sequence omitted]

SEQ ID NO: 3773 - RNA, 1590 nt, synthetic construct
  misc_feature 1..1590: note = tyrosinase__Homo_sapiens__AGV39054
  source 1..1590: mol_type = other RNA
atgctcctggctgttttgtactgcctgctgtggagtttccagacctccgctggccatttccctagagcctgtgtctcctctaagaacctgatggagaaggaatgctgtccaccgtggagcggggacaggagtccctgtggccagctttcaggcagaggttcctgtcagaatatccttctgtccaatgcaccacttgggcctcaatttcccttcacaggggtggatgaccgggagtcgtggccttccgtcttttataataggacctgccagtgctctggcaacttcatgggattcaactgtggaaactgcaagtttggcttttggggaccaaactgcacagagagacgactcttggtgagaagaaacatcttcgatttgagtgccccagagaaggacaaattttttgcctacctcactttagcaaagcataccatcagctcagactatgtcatccccatagggacctatggccaaatgaaaaatggatcaacacccatgtttaacgacatcaatatttatgacctctttgtctggatgcattattatgtgtcaatggatgcactgcttgggggatctgaaatctggagagacattgattttgcccatgaagcaccagcttttctgccttggcatagactcttcttgttgcggtgggaacaagaaatccagaagctgacaggagatgaaaacttcactattccatattgggactggcgggatgcagaaaagtgtgacatttgcacagatgagtacgtgggaggtcagcaccccacaaatcctaacttactcagcccagcatcattcttctcctcttggcagattgtctgtagccgattggaggagtacaacagccatcagtctttatgcaatggaacgcccgagggacctttacggcgtaatcctggaaaccatgacaaatccagaaccccaaggctcccctcttcagctgatgtagaattttgcctgagtttgacccaatatgaatctggttccatggataaagctgccaatttcagctttagaaatacactggaaggatttgctagtccacttactgggatagcggatgcctctcaaagcagcatgcacaatgccttgcacatctatatgaatggaacaatgtcccaggtacagggatctgccaacgatcctatcttccttcttcaccatgcatttgttgacagtatttttgagcagtggctccgaaggcaccgtcctcttcaagaagtttatccagaagccaatgcacccattggacataaccgggaatcctacatggttccttttataccactgtacagaaatggtgatttctttatttcatccaaagatctgggctatgactatagctatctacaagattcagacccagactcttttcaagactacattaagtcctatttggaacaagcgagtcggatctggtcatggctccttggggcggcgatggtaggggccgtcctcactgccctgctggcagggcttgtgagcttgctgtgtcgtcacaagagaaagcagcttcctgaagaaaagcagccactcctcatggagaaagaggattaccacagcttgtatcagagccatttataa

SEQ ID NO: 3774 - RNA, 1590 nt, synthetic construct
  misc_feature 1..1590: note = derived and/or modified sequence opt1 fromtyrosinase__Homo_sapiens__AGV39054
  source 1..1590: mol_type = other RNA
atgctgctcgccgtgctgtactgcctgctctggagcttccagacctccgccggccacttcccccgcgcgtgcgtcagctccaagaacctgatggagaaggagtgctgcccgccctggagcggggaccggtccccctgcggccagctgagcgggcgcggctcctgccagaacatcctcctgagcaacgcgcccctggggccgcagttccccttcaccggcgtggacgaccgggagtcctggcccagcgtgttctacaaccgcacgtgccagtgctccggcaacttcatggggttcaactgcggcaactgcaagttcgggttctggggccccaactgcaccgagcggcgcctcctggtccggcgcaacatcttcgacctgagcgccccggagaaggacaagttcttcgcctacctcaccctggccaagcacaccatctccagcgactacgtgatccccatcgggacgtacggccagatgaagaacggctccacccccatgttcaacgacatcaacatctacgacctgttcgtgtggatgcactactacgtcagcatggacgccctcctcgggggctccgagatctggcgggacatcgacttcgcccacgaggcccccgccttcctgccgtggcaccgcctgttcctgctgcggtgggagcaggagatccagaagctcaccggggacgagaacttcaccatcccctactgggactggcgcgacgcggagaagtgcgacatctgcacggacgagtacgtgggcggccagcaccccaccaaccccaacctgctgagcccggcctccttcttcagcagctggcagatcgtgtgctcccggctcgaggagtacaacagccaccagtccctgtgcaacgggacccccgagggccccctgcgccggaaccccgggaaccacgacaagagccgcaccccgcggctcccctccagcgccgacgtcgagttctgcctgtccctgacgcagtacgagagcggctccatggacaaggccgccaacttcagcttccgcaacaccctcgaggggttcgcgagccccctgaccggcatcgccgacgcctcccagtccagcatgcacaacgccctgcacatctacatgaacggcaccatgtcccaggtgcaggggagcgccaacgaccccatcttcctcctgcaccacgcgttcgtggactccatcttcgagcagtggctgcggcgccaccggccgctccaggaggtctaccccgaggccaacgcccccatcggccacaaccgcgagagctacatggtgcccttcatcccgctgtaccgcaacggggacttcttcatctccagcaaggacctgggctacgactacagctacctccaggactccgaccccgacagcttccaggactacatcaagtcctacctggagcaggccagccggatctggtcctggctgctcggggccgcgatggtgggcgccgtcctgacggccctgctcgccggcctggtgagcctgctctgccgccacaagcggaagcagctgcccgaggagaagcagccgctgctgatggagaaggaggactaccactccctctaccagagccacctgtga

SEQ ID NO: 3775 - RNA, 1590 nt, synthetic construct
  misc_feature 1..1590: note = derived and/or modified sequence opt2 fromtyrosinase__Homo_sapiens__AGV39054
  source 1..1590: mol_type = other RNA
atgctcctcgccgtcctctactgcctcctctggtccttccagacctccgccggccacttcccccgcgcctgcgtctcctccaagaacctcatggagaaggagtgctgccccccctggtccggcgaccgctccccctgcggccagctctccggccgcggctcctgccagaacatcctcctctccaacgcccccctcggcccccagttccccttcaccggcgtcgacgaccgcgagtcctggccctccgtcttctacaaccgcacctgccagtgctccggcaacttcatgggcttcaactgcggcaactgcaagttcggcttctggggccccaactgcaccgagcgccgcctcctcgtccgccgcaacatcttcgacctctccgcccccgagaaggacaagttcttcgcctacctcaccctcgccaagcacaccatctcctccgactacgtcatccccatcggcacctacggccagatgaagaacggctccacccccatgttcaacgacatcaacatctacgacctcttcgtctggatgcactactacgtctccatggacgccctcctcggcggctccgagatctggcgcgacatcgacttcgcccacgaggcccccgccttcctcccctggcaccgcctcttcctcctccgctgggagcaggagatccagaagctcaccggcgacgagaacttcaccatcccctactgggactggcgcgacgccgagaagtgcgacatctgcaccgacgagtacgtcggcggccagcaccccaccaaccccaacctcctctcccccgcctccttcttctcctcctggcagatcgtctgctcccgcctcgaggagtacaactcccaccagtccctctgcaacggcacccccgagggccccctccgccgcaaccccggcaaccacgacaagtcccgcaccccccgcctcccctcctccgccgacgtcgagttctgcctctccctcacccagtacgagtccggctccatggacaaggccgccaacttctccttccgcaacaccctcgagggcttcgcctcccccctcaccggcatcgccgacgcctcccagtcctccatgcacaacgccctccacatctacatgaacggcaccatgtcccaggtccagggctccgccaacgaccccatcttcctcctccaccacgccttcgtcgactccatcttcgagcagtggctccgccgccaccgccccctccaggaggtctaccccgaggccaacgcccccatcggccacaaccgcgagtcctacatggtccccttcatccccctctaccgcaacggcgacttcttcatctcctccaaggacctcggctacgactactcctacctccaggactccgaccccgactccttccaggactacatcaagtcctacctcgagcaggcctcccgcatctggtcctggctcctcggcgccgccatggtcggcgccgtcctcaccgccctcctcgccggcctcgtctccctcctctgccgccacaagcgcaagcagctccccgaggagaagcagcccctcctcatggagaaggaggactaccactccctctaccagtcccacctctga

SEQ ID NO: 3776 - RNA, 1590 nt, synthetic construct
  misc_feature 1..1590: note = derived and/or modified sequence opt3 fromtyrosinase__Homo_sapiens__AGV39054
  source 1..1590: mol_type = other RNA
atgctgctcgccgtgctttactgcctgttgtggagcttccagacctccgctggccactttcccagagcatgtgtctcttcaaagaacttaatggagaaagaatgctgtcctccatggagtggggacaggagcccgtgcggacaactgtccggtcggggctcttgtcagaatatcctactctcgaacgcccccttggggcctcagttcccatttacaggagttgatgaccgcgagtcatggcccagcgtgttctataatcgaacttgccagtgtagtggcaactttatgggtttcaattgcgggaactgtaagtttggattctggggccctaattgcacggaacgtagacttctggtaaggcggaacatttttgatttgtccgcgccagagaaagacaagttctttgcttacctcaccctggccaaacatacaatatctagcgattatgtgatccccattggcacttacgggcaaatgaagaatggatccacccctatgttcaacgacatcaatatttatgatctgtttgtctggatgcactactatgtgtcaatggacgcactcttaggtggcagtgaaatctggcgcgatatagacttcgcccatgaggctccagcattcctgccgtggcacagactttttctgctgaggtgggagcaggaaatccagaagctaacaggggatgagaacttcaccattccctactgggactggcgggatgccgaaaaatgtgacatctgcactgacgagtacgttggaggccagcatcctacaaatccaaacctcctgagccccgcttcctttttctcttcatggcaaattgtgtgcagccgccttgaggaatataatagtcaccagtctctgtgtaacggtacccctgaggggccattgcgaagaaaccccggaaatcacgataagtccaggacgccgcggctccctagctcggccgacgtcgaattttgcctgtctttaactcagtacgagtccggctcaatggataaagcggcaaacttcagttttcgtaataccctggaaggcttcgccagccccctcacagggatcgctgacgcctcccagtctagcatgcataacgcacttcacatatatatgaatggaactatgtcacaagtgcagggtagtgctaacgatccaatttttctgttgcatcacgccttcgtagactccatctttgagcagtggctacgcagacacaggcctctgcaagaggtttaccccgaagcgaatgccccaattggccataaccgggagagctatatggtgcccttcatccctctctaccgaaatggggactttttcatctcttcaaaggatctgggatatgattacagttaccttcaggacagcgatccagactccttccaggactatattaaatcttacctggaacaggcatcgcgcatatggagctggttgctcggcgctgccatggtcggtgctgtgctgaccgccttactggcagggctagtgtccctcctgtgtagacacaagaggaagcaacttccggaggaaaaacagcccttgctgatggagaaggaggattatcattcactctaccagagtcacctgtga

SEQ ID NO: 3777 - RNA, 1590 nt, synthetic construct
  misc_feature 1..1590: note = derived and/or modified sequence opt4 fromtyrosinase__Homo_sapiens__AGV39054
  source 1..1590: mol_type = other RNA
atgctgctggccgtgctgtactgcctgctgtggagcttccagaccagcgccggccacttccccagagcctgcgtgagcagcaagaacctgatggagaaggagtgctgccccccctggagcggcgacagaagcccctgcggccagctgagcggcagaggcagctgccagaacatcctgctgagcaacgcccccctgggcccccagttccccttcaccggcgtggacgacagagagagctggcccagcgtgttctacaacagaacctgccagtgcagcggcaacttcatgggcttcaactgcggcaactgcaagttcggcttctggggccccaactgcaccgagagaagactgctggtgagaagaaacatcttcgacctgagcgcccccgagaaggacaagttcttcgcctacctgaccctggccaagcacaccatcagcagcgactacgtgatccccatcggcacctacggccagatgaagaacggcagcacccccatgttcaacgacatcaacatctacgacctgttcgtgtggatgcactactacgtgagcatggacgccctgctgggcggcagcgagatctggagagacatcgacttcgcccacgaggcccccgccttcctgccctggcacagactgttcctgctgagatgggagcaggagatccagaagctgaccggcgacgagaacttcaccatcccctactgggactggagagacgccgagaagtgcgacatctgcaccgacgagtacgtgggcggccagcaccccaccaaccccaacctgctgagccccgccagcttcttcagcagctggcagatcgtgtgcagcagactggaggagtacaacagccaccagagcctgtgcaacggcacccccgagggccccctgagaagaaaccccggcaaccacgacaagagcagaacccccagactgcccagcagcgccgacgtggagttctgcctgagcctgacccagtacgagagcggcagcatggacaaggccgccaacttcagcttcagaaacaccctggagggcttcgccagccccctgaccggcatcgccgacgccagccagagcagcatgcacaacgccctgcacatctacatgaacggcaccatgagccaggtgcagggcagcgccaacgaccccatcttcctgctgcaccacgccttcgtggacagcatcttcgagcagtggctgagaagacacagacccctgcaggaggtgtaccccgaggccaacgcccccatcggccacaacagagagagctacatggtgcccttcatccccctgtacagaaacggcgacttcttcatcagcagcaaggacctgggctacgactacagctacctgcaggacagcgaccccgacagcttccaggactacatcaagagctacctggagcaggccagcagaatctggagctggctgctgggcgccgccatggtgggcgccgtgctgaccgccctgctggccggcctggtgagcctgctgtgcagacacaagagaaagcagctgcccgaggagaagcagcccctgctgatggagaaggaggactaccacagcctgtaccagagccacctgtga

SEQ ID NO: 3778 - RNA, 1590 nt, synthetic construct
  misc_feature 1..1590: note = derived and/or modified sequence opt5 fromtyrosinase__Homo_sapiens__AGV39054
  source 1..1590: mol_type = other RNA
atgctgctcgccgtgctgtactgccttctgtggagcttccagacctccgctggccactttcccagagcctgtgtctctagcaagaacctcatggagaaagaatgctgtcctccgtggtccggggaccggtctccctgcggacaactgagcggccgcgggtcctgtcagaatatccttctgtctaacgcgcctctcggaccccagttcccttttacaggcgttgatgacagagagagctggccctccgtgttctataatcggacgtgccagtgtagcgggaactttatgggattcaattgcggcaactgtaagtttggcttctgggggcctaattgcaccgaacgcagactgctggtgcggcgcaacatttttgatctctctgctccggagaaagacaagttctttgcctacctgacacttgccaaacataccatctccagcgattatgtcattcccatcggaacatacggccaaatgaagaatgggtctacccctatgttcaacgacattaatatctatgatctgtttgtgtggatgcactactatgtttccatggacgctctcctgggaggcagcgaaatctggagagatattgacttcgcccatgaggctcccgccttccttccttggcaccggctgtttctcctgcgctgggagcaggaaatccagaagctgacaggggatgagaacttcaccattccctactgggactggagagatgcggaaaaatgtgacatctgcacggacgagtacgtgggaggccagcatccgaccaatcctaacctcctgtctcccgcctcctttttcagctcctggcaaattgtctgctctcggcttgaggaatataatagccaccagtccctgtgtaacggcacacctgaggggcccctccgcagaaaccccggaaatcacgataagagccggacccctcgcctgccgtcttccgctgacgtggaattttgccttagcctgacacagtacgagtctggcagcatggataaagccgctaacttctcctttagaaataccctcgaagggttcgcctctcccctgacgggaatcgcggacgccagccagtccagcatgcataacgctctgcacatttatatgaatggcacaatgtctcaagttcaggggtccgccaacgatcctatctttctcctgcatcacgctttcgtggacagcatctttgagcagtggcttcggagacaccgccccctgcaagaggtctaccctgaagccaatgcccccattggacataaccgggagtcttatatggtgccgttcatccctctctacagaaatggcgactttttcatttccagcaaggatctgggctatgattactcctaccttcaggactctgatcccgacagcttccaggactatatcaaatcctacctggaacaggcttctcgcatttggagctggctcctgggggcggccatggtgggagctgtcctgaccgccctcctggccggccttgtttccctgctctgtcggcacaagagaaagcaactgcctgaggaaaaacagcccctgcttatggagaaggaggattatcatagcctctaccagtctcacctgtga

SEQ ID NO: 3779 - protein, 529 aa, synthetic construct [sequence omitted]

SEQ ID NO: 3780 - RNA, 1590 nt, synthetic construct
  misc_feature 1..1590: note = tyrosinase__Homo_sapiens__AGV39162
  source 1..1590: mol_type = other RNA
atgctcctggctgttttgtactgcctgctgtggagtttccagacctccgctggccatttccctagagcctgtgtctcctctaagaacctgatggagaaggaatgctgtccaccgtggagcggggacaggagtccctgtggccagctttcaggcagaggttcctgtcagaatatccttctgtccaatgcaccacttgggcctcaatttcccttcacaggggtggatgaccgggagtcgtggccttccgtcttttataataggacctgccagtgctctggcaacttcatgggattcaactgtggaaactgcaagtttggcttttggggaccaaactgcacagagagacgactcttggtgagaagaaacatcttcgatttgagtgccccagagaaggacaaattttttgcctacctcactttagcaaagcataccatcagctcagactatgtcatccccatagggacctatggccaaatgaaaaatggatcaacacccatgtttaacgacatcaatatttatgacctctttgtctggatgcattattatgtgtcaatggatgcactgcttgggggatctgaaatctggagagacattgattttgcccatgaagcaccagcttttctgccttggcatagactcttcttgttgcggtgggaacaagaaatccagaagctgacaggagatgaaaacttcactattccatattgggactggcgggatgcagaaaagtgtgacatttgcacagatgagtacatgggaggtcagcaccccacaaatcctaacttactcagcccagcatcattcttctcctcttggcagattgtctgtagccgattggaggagtacaacagccatcagtctttatgcaatggaacgcccgagggacctttacggcgtaatcctggaaaccatgacaaatccagaaccccaaggctcccctcttcagctgatgtagaattttgcctgagtttgacccaatatgaatctggttccatggataaagctgccaatttcagctttagaaatacactggaaggatttgctagtccacttactgggatagcggatgcctctcaaagcagcatgcacaatgccttgcacatctatatgaatggaacaatgtcccaggtacagggatctgccaacgatcctatcttccttcttcaccatgcatttgttgacagtatttttgagcagtggctccgaaggcaccgtcttcttcaagaagtttatccagaagccaatgcacccattggacataaccgggaatcctacatggttccttttataccactgtacagaaatggtgatttctttatttcatccaaagatctgggctatgactatagctatctacaagattcagacccagactcttttcaagactacattaagtcctatttggaacaagcgagtcggatctggtcatggctccttggggcggcgatggtaggggccgtcctcactgccctgctggcagggcttgtgagcttgctgtgtcgtcacaagagaaagcagcttcctgaagaaaagcagccactcctcatggagaaagaggattaccacagcttgtatcagagccatttataa

SEQ ID NO: 3781 - RNA, 1590 nt, synthetic construct
  misc_feature 1..1590: note = derived and/or modified sequence opt1 fromtyrosinase__Homo_sapiens__AGV39162
  source 1..1590: mol_type = other RNA
atgctgctcgccgtgctgtactgcctgctctggagcttccagacctccgccggccacttcccccgcgcgtgcgtcagctccaagaacctgatggagaaggagtgctgcccgccctggagcggggaccggtccccctgcggccagctgagcgggcgcggctcctgccagaacatcctcctgagcaacgcgcccctggggccgcagttccccttcaccggcgtggacgaccgggagtcctggcccagcgtgttctacaaccgcacgtgccagtgctccggcaacttcatggggttcaactgcggcaactgcaagttcgggttctggggccccaactgcaccgagcggcgcctcctggtccggcgcaacatcttcgacctgagcgccccggagaaggacaagttcttcgcctacctcaccctggccaagcacaccatctccagcgactacgtgatccccatcgggacgtacggccagatgaagaacggctccacccccatgttcaacgacatcaacatctacgacctgttcgtgtggatgcactactacgtcagcatggacgccctcctcgggggctccgagatctggcgggacatcgacttcgcccacgaggcccccgccttcctgccgtggcaccgcctgttcctgctgcggtgggagcaggagatccagaagctcaccggggacgagaacttcaccatcccctactgggactggcgcgacgcggagaagtgcgacatctgcacggacgagtacatgggcggccagcaccccaccaaccccaacctgctgagcccggcctccttcttcagcagctggcagatcgtgtgctcccggctcgaggagtacaacagccaccagtccctgtgcaacgggacccccgagggccccctgcgccggaaccccgggaaccacgacaagagccgcaccccgcggctcccctccagcgccgacgtggagttctgcctgtccctgacgcagtacgagagcggctccatggacaaggccgccaacttcagcttccgcaacaccctcgaggggttcgcgagccccctgaccggcatcgccgacgcctcccagtccagcatgcacaacgccctgcacatctacatgaacggcaccatgtcccaggtccaggggagcgccaacgaccccatcttcctcctgcaccacgcgttcgtggactccatcttcgagcagtggctgcggcgccaccggctcctgcaggaggtgtacccggaggccaacgcccccatcggccacaaccgcgagagctacatggtccccttcatccccctgtaccgcaacggggacttcttcatctccagcaaggacctcggctacgactacagctacctgcaggactccgacccggacagcttccaggactacatcaagtcctacctggagcaggccagccggatctggtcctggctcctgggggccgcgatggtgggcgccgtgctgacggccctcctggccggcctggtcagcctcctgtgccgccacaagcggaagcagctgcccgaggagaagcagcccctgctcatggagaaggaggactaccactccctgtaccagagccacctgtga

SEQ ID NO: 3782 - RNA, 1590 nt, synthetic construct
  misc_feature 1..1590: note = derived and/or modified sequence opt2 fromtyrosinase__Homo_sapiens__AGV39162
  source 1..1590: mol_type = other RNA
atgctcctcgccgtcctctactgcctcctctggtccttccagacctccgccggccacttcccccgcgcctgcgtctcctccaagaacctcatggagaaggagtgctgccccccctggtccggcgaccgctccccctgcggccagctctccggccgcggctcctgccagaacatcctcctctccaacgcccccctcggcccccagttccccttcaccggcgtcgacgaccgcgagtcctggccctccgtcttctacaaccgcacctgccagtgctccggcaacttcatgggcttcaactgcggcaactgcaagttcggcttctggggccccaactgcaccgagcgccgcctcctcgtccgccgcaacatcttcgacctctccgcccccgagaaggacaagttcttcgcctacctcaccctcgccaagcacaccatctcctccgactacgtcatccccatcggcacctacggccagatgaagaacggctccacccccatgttcaacgacatcaacatctacgacctcttcgtctggatgcactactacgtctccatggacgccctcctcggcggctccgagatctggcgcgacatcgacttcgcccacgaggcccccgccttcctcccctggcaccgcctcttcctcctccgctgggagcaggagatccagaagctcaccggcgacgagaacttcaccatcccctactgggactggcgcgacgccgagaagtgcgacatctgcaccgacgagtacatgggcggccagcaccccaccaaccccaacctcctctcccccgcctccttcttctcctcctggcagatcgtctgctcccgcctcgaggagtacaactcccaccagtccctctgcaacggcacccccgagggccccctccgccgcaaccccggcaaccacgacaagtcccgcaccccccgcctcccctcctccgccgacgtcgagttctgcctctccctcacccagtacgagtccggctccatggacaaggccgccaacttctccttccgcaacaccctcgagggcttcgcctcccccctcaccggcatcgccgacgcctcccagtcctccatgcacaacgccctccacatctacatgaacggcaccatgtcccaggtccagggctccgccaacgaccccatcttcctcctccaccacgccttcgtcgactccatcttcgagcagtggctccgccgccaccgcctcctccaggaggtctaccccgaggccaacgcccccatcggccacaaccgcgagtcctacatggtccccttcatccccctctaccgcaacggcgacttcttcatctcctccaaggacctcggctacgactactcctacctccaggactccgaccccgactccttccaggactacatcaagtcctacctcgagcaggcctcccgcatctggtcctggctcctcggcgccgccatggtcggcgccgtcctcaccgccctcctcgccggcctcgtctccctcctctgccgccacaagcgcaagcagctccccgaggagaagcagcccctcctcatggagaaggaggactaccactccctctaccagtcccacctctga

SEQ ID NO: 3783 - RNA, 1590 nt, synthetic construct
  misc_feature 1..1590: note = derived and/or modified sequence opt3 fromtyrosinase__Homo_sapiens__AGV39162
  source 1..1590: mol_type = other RNA
atgctgctcgccgtgctttactgcctgttgtggagcttccagacctccgctggccactttcccagagcatgtgtctcttcaaagaacttaatggagaaagaatgctgtcctccatggagtggggacaggagcccgtgcggacaactgtccggtcggggctcttgtcagaatatcctactctcgaacgcccccttggggcctcagttcccatttacaggagttgatgaccgcgagtcatggcccagcgtgttctataatcgaacttgccagtgtagtggcaactttatgggtttcaattgcgggaactgtaagtttggattctggggccctaattgcacggaacgtagacttctggtaaggcggaacatttttgatttgtccgcgccagagaaagacaagttctttgcttacctcaccctggccaaacatacaatatctagcgattatgtgatccccattggcacttacgggcaaatgaagaatggatccacccctatgttcaacgacatcaatatttatgatctgtttgtctggatgcactactatgtgtcaatggacgcactcttaggtggcagtgaaatctggcgcgatatagacttcgcccatgaggctccagcattcctgccgtggcacagactttttctgctgaggtgggagcaggaaatccagaagctaacaggggatgagaacttcaccattccctactgggactggcgggatgccgaaaaatgtgacatctgcactgacgagtacatgggaggccagcatcctacaaatccaaacctcctgagccccgcttcctttttctcttcatggcaaattgtttgcagccgccttgaggaatataatagtcaccagtctctgtgtaacggtacccctgaggggccattgcgaagaaaccccggaaatcacgataagtccaggacgccgcggctccctagctcggccgacgtggaattttgcctgtctttaactcagtacgagtccggctcaatggataaagcggcaaacttcagttttcgtaataccctggaaggcttcgccagccccctcacagggatcgctgacgcctcccagtctagcatgcataacgcacttcacatatatatgaatggaactatgtcacaagtccagggtagtgctaacgatccaatttttctgttgcatcacgccttcgtggactccatctttgagcagtggctacgcagacacaggctgctccaagaggtataccctgaagcgaatgcccccattggccataaccgggagagctatatggttccattcatccccctgtaccgaaatggggactttttcatctcttcaaaggatcttggatatgattacagttacctgcaggacagcgatcctgactccttccaggactatattaaatcttacttggaacaggcatcgcgcatatggagctggctcctgggcgctgccatggtgggtgctgtcttaaccgccctgctagcagggctcgtgtccctgctttgtagacacaagaggaagcaattgccagaggaaaaacagccgctgctcatggagaaggaggattatcattcactgtaccagagtcacctttga

SEQ ID NO: 3784 - RNA, 1590 nt, synthetic construct
  misc_feature 1..1590: note = derived and/or modified sequence opt4 fromtyrosinase__Homo_sapiens__AGV39162
  source 1..1590: mol_type = other RNA
atgctgctggccgtgctgtactgcctgctgtggagcttccagaccagcgccggccacttccccagagcctgcgtgagcagcaagaacctgatggagaaggagtgctgccccccctggagcggcgacagaagcccctgcggccagctgagcggcagaggcagctgccagaacatcctgctgagcaacgcccccctgggcccccagttccccttcaccggcgtggacgacagagagagctggcccagcgtgttctacaacagaacctgccagtgcagcggcaacttcatgggcttcaactgcggcaactgcaagttcggcttctggggccccaactgcaccgagagaagactgctggtgagaagaaacatcttcgacctgagcgcccccgagaaggacaagttcttcgcctacctgaccctggccaagcacaccatcagcagcgactacgtgatccccatcggcacctacggccagatgaagaacggcagcacccccatgttcaacgacatcaacatctacgacctgttcgtgtggatgcactactacgtgagcatggacgccctgctgggcggcagcgagatctggagagacatcgacttcgcccacgaggcccccgccttcctgccctggcacagactgttcctgctgagatgggagcaggagatccagaagctgaccggcgacgagaacttcaccatcccctactgggactggagagacgccgagaagtgcgacatctgcaccgacgagtacatgggcggccagcaccccaccaaccccaacctgctgagccccgccagcttcttcagcagctggcagatcgtgtgcagcagactggaggagtacaacagccaccagagcctgtgcaacggcacccccgagggccccctgagaagaaaccccggcaaccacgacaagagcagaacccccagactgcccagcagcgccgacgtggagttctgcctgagcctgacccagtacgagagcggcagcatggacaaggccgccaacttcagcttcagaaacaccctggagggcttcgccagccccctgaccggcatcgccgacgccagccagagcagcatgcacaacgccctgcacatctacatgaacggcaccatgagccaggtgcagggcagcgccaacgaccccatcttcctgctgcaccacgccttcgtggacagcatcttcgagcagtggctgagaagacacagactgctgcaggaggtgtaccccgaggccaacgcccccatcggccacaacagagagagctacatggtgcccttcatccccctgtacagaaacggcgacttcttcatcagcagcaaggacctgggctacgactacagctacctgcaggacagcgaccccgacagcttccaggactacatcaagagctacctggagcaggccagcagaatctggagctggctgctgggcgccgccatggtgggcgccgtgctgaccgccctgctggccggcctggtgagcctgctgtgcagacacaagagaaagcagctgcccgaggagaagcagcccctgctgatggagaaggaggactaccacagcctgtaccagagccacctgtga

SEQ ID NO: 3785 - RNA, 1590 nt, synthetic construct
  misc_feature 1..1590: note = derived and/or modified sequence opt5 fromtyrosinase__Homo_sapiens__AGV39162
  source 1..1590: mol_type = other RNA
atgctgctcgccgtgctgtactgccttctgtggagcttccagacctccgctggccactttcccagagcctgtgtctctagcaagaacctcatggagaaagaatgctgtcctccgtggtccggggaccggtctccctgcggacaactgagcggccgcgggtcctgtcagaatatccttctgtctaacgcgcctctcggaccccagttcccttttacaggcgttgatgacagagagagctggccctccgtgttctataatcggacgtgccagtgtagcgggaactttatgggattcaattgcggcaactgtaagtttggcttctgggggcctaattgcaccgaacgcagactgctggtgcggcgcaacatttttgatctctctgctccggagaaagacaagttctttgcctacctgacacttgccaaacataccatctccagcgattatgtcattcccatcggaacatacggccaaatgaagaatgggtctacccctatgttcaacgacattaatatctatgatctgtttgtgtggatgcactactatgtttccatggacgctctcctgggaggcagcgaaatctggagagatattgacttcgcccatgaggctcccgccttccttccttggcaccggctgtttctcctgcgctgggagcaggaaatccagaagctgacaggggatgagaacttcaccattccctactgggactggagagatgcggaaaaatgtgacatctgcacggacgagtacatgggaggccagcatccgaccaatcctaacctcctgtctcccgcctcctttttcagctcctggcaaattgtgtgctctcggcttgaggaatataatagccaccagtccctgtgtaacggcacacctgaggggcccctccgcagaaaccccggaaatcacgataagagccggacccctcgcctgccgtcttccgctgacgtcgaattttgccttagcctgacacagtacgagtctggcagcatggataaagccgctaacttctcctttagaaataccctcgaagggttcgcctctcccctgacgggaatcgcggacgccagccagtccagcatgcataacgctctgcacatttatatgaatggcacaatgtctcaagtgcaggggtccgccaacgatcctatctttctcctgcatcacgctttcgttgacagcatctttgagcagtggcttcggagacaccgcctgctccaagaggtgtaccccgaagccaatgcccctattggacataaccgggagtcttatatggtccccttcatcccgctgtacagaaatggcgactttttcatttccagcaaggatcttggctatgattactcctacctgcaggactctgatcctgacagcttccaggactatatcaaatcctacctcgaacaggcttctcgcatttggagctggctgctgggggcggccatggtgggagctgtgctcaccgccctgcttgccggcctggtctccctcctgtgtcggcacaagagaaagcaactgcccgaggaaaaacagcctcttctcatggagaaggaggattatcatagcctgtaccagtctcacctgtga

SEQ ID NO: 3786 - protein, 529 aa, synthetic construct [sequence omitted]

SEQ ID NO: 3787 - RNA, 1590 nt, synthetic construct
  misc_feature 1..1590: note = tyrosinase__Homo_sapiens__AGV39086
  source 1..1590: mol_type = other RNA
atgctcctggctgttttgtactgcctgctgtggagtttccagacctccgctggccatttccctagagcctgtgtctcctctaagaacctgatggagaaggaatgctgtccaccgtggagcggggacaggagtccctgtggccagctttcaggcagaggttcctgtcagaatatccttctgtccaatgcaccacttgggcctcaatttcccttcacaggggtggatgaccgggagtcgtggccttccgtcttttataataggacctgccagtgctctggcaacttcatgggattcaactgtggaaactgcaagtttggcttttggggaccaaactgcacagagagacgactcttggtgagaagaaacatcttcgatttgagtgccccagagaaggacaaattttttgcctacctcactttagcaaagcataccatcagctcagactatgtcatccccatagggacctatggccaaatgaaaaatggatcaacacccatgtttaacgacatcaatatttatgacctctttgtctggatgcattattatgtgtcaatggatgcactgcttgggggatctgaaatctggagagacattgattttgcccatgaagcaccagcttttctgccttggcatagactcttcttgttgcggtgggaacaagaaatccagaagctgacaggagatgaaaacttcactattccatattgggactggcgggatgcagaaaagtgtgacatttgcacagatgagtacatgggaggtcagcaccccacaaatcctaacttactcagcccagcatcattcttctcctcttggcagattgtctgtagccgattggaggagtacaacagccatcagtctttatgcaatggaacgcccgagggacctttacggcgtaatcctggaaaccatgacaaatccagaaccccaaggctcccctcttcagctgatgtagaattttgcctgagtttgacccaatatgaatctggttccatggataaagctgccaatttcagctttagaaatacactggaaggatttgctagtccacttactgggatagcggatgcctctcaaagcagcatgcacaatgccttgcacatctatatgaatggaacaatgtcccaggtacagggatctgccaacgatcctatcttccttcttcaccatgcatttgttgacagtatgtttgagcagtggctccgaaggcaccgtcctcttcaagaagtttatccagaagccaatgcacccattggacataaccgggaatcctacatggttccttttataccactgtacagaaatggtgatttctttatttcatccaaagatctgggctatgactatagctatctacaagattcagacccagactcttttcaagactacattaagtcctatttggaacaagcgagtcggatctggtcatggctccttggggcggcgatggtaggggccgtcctcactgccctgctggcagggcttgtgagcttgctgtgtcgtcacaagagaaagcagcttcctgaagaaaagcagccactcctcatggagaaagaggattaccacagcttgtatcagagccatttataa

SEQ ID NO: 3788 - RNA, 1590 nt, synthetic construct
  misc_feature 1..1590: note = derived and/or modified sequence opt1 fromtyrosinase__Homo_sapiens__AGV39086
  source 1..1590: mol_type = other RNA
atgctgctcgccgtgctgtactgcctgctctggagcttccagacctccgccggccacttcccccgcgcgtgcgtcagctccaagaacctgatggagaaggagtgctgcccgccctggagcggggaccggtccccctgcggccagctgagcgggcgcggctcctgccagaacatcctcctgagcaacgcgcccctggggccgcagttccccttcaccggcgtggacgaccgggagtcctggcccagcgtgttctacaaccgcacgtgccagtgctccggcaacttcatggggttcaactgcggcaactgcaagttcgggttctggggccccaactgcaccgagcggcgcctcctggtccggcgcaacatcttcgacctgagcgccccggagaaggacaagttcttcgcctacctcaccctggccaagcacaccatctccagcgactacgtgatccccatcgggacgtacggccagatgaagaacggctccacccccatgttcaacgacatcaacatctacgacctgttcgtgtggatgcactactacgtcagcatggacgccctcctcgggggctccgagatctggcgggacatcgacttcgcccacgaggcccccgccttcctgccgtggcaccgcctgttcctgctgcggtgggagcaggagatccagaagctcaccggggacgagaacttcaccatcccctactgggactggcgcgacgcggagaagtgcgacatctgcacggacgagtacatgggcggccagcaccccaccaaccccaacctgctgagcccggcctccttcttcagcagctggcagatcgtgtgctcccggctcgaggagtacaacagccaccagtccctgtgcaacgggacccccgagggccccctgcgccggaaccccgggaaccacgacaagagccgcaccccgcggctcccctccagcgccgacgtggagttctgcctgtccctgacgcagtacgagagcggctccatggacaaggccgccaacttcagcttccgcaacaccctcgaggggttcgcgagccccctgaccggcatcgccgacgcctcccagtccagcatgcacaacgccctgcacatctacatgaacggcaccatgtcccaggtccaggggagcgccaacgaccccatcttcctcctgcaccacgcgttcgtggactccatgttcgagcagtggctgcggcgccaccggccgctccaggaggtgtaccccgaggccaacgcccccatcggccacaaccgcgagagctacatggtccccttcatcccgctgtaccgcaacggggacttcttcatctccagcaaggacctgggctacgactacagctacctccaggactccgaccccgacagcttccaggactacatcaagtcctacctggagcaggccagccggatctggtcctggctgctcggggccgcgatggtgggcgccgtgctgacggccctgctcgccggcctggtcagcctgctctgccgccacaagcggaagcagctgcccgaggagaagcagccgctgctgatggagaaggaggactaccactccctctaccagagccacctgtga

SEQ ID NO: 3789 - RNA, 1590 nt, synthetic construct
  misc_feature 1..1590: note = derived and/or modified sequence opt2 fromtyrosinase__Homo_sapiens__AGV39086
  source 1..1590: mol_type = other RNA
atgctcctcgccgtcctctactgcctcctctggtccttccagacctccgccggccacttcccccgcgcctgcgtctcctccaagaacctcatggagaaggagtgctgccccccctggtccggcgaccgctccccctgcggccagctctccggccgcggctcctgccagaacatcctcctctccaacgcccccctcggcccccagttccccttcaccggcgtcgacgaccgcgagtcctggccctccgtcttctacaaccgcacctgccagtgctccggcaacttcatgggcttcaactgcggcaactgcaagttcggcttctggggccccaactgcaccgagcgccgcctcctcgtccgccgcaacatcttcgacctctccgcccccgagaaggacaagttcttcgcctacctcaccctcgccaagcacaccatctcctccgactacgtcatccccatcggcacctacggccagatgaagaacggctccacccccatgttcaacgacatcaacatctacgacctcttcgtctggatgcactactacgtctccatggacgccctcctcggcggctccgagatctggcgcgacatcgacttcgcccacgaggcccccgccttcctcccctggcaccgcctcttcctcctccgctgggagcaggagatccagaagctcaccggcgacgagaacttcaccatcccctactgggactggcgcgacgccgagaagtgcgacatctgcaccgacgagtacatgggcggccagcaccccaccaaccccaacctcctctcccccgcctccttcttctcctcctggcagatcgtctgctcccgcctcgaggagtacaactcccaccagtccctctgcaacggcacccccgagggccccctccgccgcaaccccggcaaccacgacaagtcccgcaccccccgcctcccctcctccgccgacgtcgagttctgcctctccctcacccagtacgagtccggctccatggacaaggccgccaacttctccttccgcaacaccctcgagggcttcgcctcccccctcaccggcatcgccgacgcctcccagtcctccatgcacaacgccctccacatctacatgaacggcaccatgtcccaggtccagggctccgccaacgaccccatcttcctcctccaccacgccttcgtcgactccatgttcgagcagtggctccgccgccaccgccccctccaggaggtctaccccgaggccaacgcccccatcggccacaaccgcgagtcctacatggtccccttcatccccctctaccgcaacggcgacttcttcatctcctccaaggacctcggctacgactactcctacctccaggactccgaccccgactccttccaggactacatcaagtcctacctcgagcaggcctcccgcatctggtcctggctcctcggcgccgccatggtcggcgccgtcctcaccgccctcctcgccggcctcgtctccctcctctgccgccacaagcgcaagcagctccccgaggagaagcagcccctcctcatggagaaggaggactaccactccctctaccagtcccacctctga

SEQ ID NO: 3790 - RNA, 1590 nt, synthetic construct
  misc_feature 1..1590: note = derived and/or modified sequence opt3 fromtyrosinase__Homo_sapiens__AGV39086
  source 1..1590: mol_type = other RNA
atgctgctcgccgtgctttactgcctgttgtggagcttccagacctccgctggccactttcccagagcatgtgtctcttcaaagaacttaatggagaaagaatgctgtcctccatggagtggggacaggagcccgtgcggacaactgtccggtcggggctcttgtcagaatatcctactctcgaacgcccccttggggcctcagttcccatttacaggagttgatgaccgcgagtcatggcccagcgtgttctataatcgaacttgccagtgtagtggcaactttatgggtttcaattgcgggaactgtaagtttggattctggggccctaattgcacggaacgtagacttctggtaaggcggaacatttttgatttgtccgcgccagagaaagacaagttctttgcttacctcaccctggccaaacatacaatatctagcgattatgtgatccccattggcacttacgggcaaatgaagaatggatccacccctatgttcaacgacatcaatatttatgatctgtttgtctggatgcactactatgtgtcaatggacgcactcttaggtggcagtgaaatctggcgcgatatagacttcgcccatgaggctccagcattcctgccgtggcacagactttttctgctgaggtgggagcaggaaatccagaagctaacaggggatgagaacttcaccattccctactgggactggcgggatgccgaaaaatgtgacatctgcactgacgagtacatgggaggccagcatcctacaaatccaaacctcctgagccccgcttcctttttctcttcatggcaaattgtttgcagccgccttgaggaatataatagtcaccagtctctgtgtaacggtacccctgaggggccattgcgaagaaaccccggaaatcacgataagtccaggacgccgcggctccctagctcggccgacgtggaattttgcctgtctttaactcagtacgagtccggctcaatggataaagcggcaaacttcagttttcgtaataccctggaaggcttcgccagccccctcacagggatcgctgacgcctcccagtctagcatgcataacgcacttcacatatatatgaatggaactatgtcacaagtccagggtagtgctaacgatccaatttttctgttgcatcacgccttcgtggactccatgtttgagcagtggctacgcagacacaggcctctgcaagaggtataccccgaagcgaatgccccaatcggccataaccgggagagctatatggttcccttcattcctctctaccgaaatggggactttttcatctcttcaaaggatctgggatatgattacagttaccttcaggacagcgatccagactccttccaggactatatcaaatcttacctggaacaggcatcgcgcatttggagctggttgctcggcgctgccatggtgggtgctgtcctgaccgccttactggcagggctagtgtccctcctgtgtagacacaagaggaagcaacttccggaggaaaaacagcccttgctgatggagaaggaggattatcattcactctaccagagtcacctgtga

SEQ ID NO: 3791 - RNA, 1590 nt, synthetic construct
  misc_feature 1..1590: note = derived and/or modified sequence opt4 fromtyrosinase__Homo_sapiens__AGV39086
  source 1..1590: mol_type = other RNA
atgctgctggccgtgctgtactgcctgctgtggagcttccagaccagcgccggccacttccccagagcctgcgtgagcagcaagaacctgatggagaaggagtgctgccccccctggagcggcgacagaagcccctgcggccagctgagcggcagaggcagctgccagaacatcctgctgagcaacgcccccctgggcccccagttccccttcaccggcgtggacgacagagagagctggcccagcgtgttctacaacagaacctgccagtgcagcggcaacttcatgggcttcaactgcggcaactgcaagttcggcttctggggccccaactgcaccgagagaagactgctggtgagaagaaacatcttcgacctgagcgcccccgagaaggacaagttcttcgcctacctgaccctggccaagcacaccatcagcagcgactacgtgatccccatcggcacctacggccagatgaagaacggcagcacccccatgttcaacgacatcaacatctacgacctgttcgtgtggatgcactactacgtgagcatggacgccctgctgggcggcagcgagatctggagagacatcgacttcgcccacgaggcccccgccttcctgccctggcacagactgttcctgctgagatgggagcaggagatccagaagctgaccggcgacgagaacttcaccatcccctactgggactggagagacgccgagaagtgcgacatctgcaccgacgagtacatgggcggccagcaccccaccaaccccaacctgctgagccccgccagcttcttcagcagctggcagatcgtgtgcagcagactggaggagtacaacagccaccagagcctgtgcaacggcacccccgagggccccctgagaagaaaccccggcaaccacgacaagagcagaacccccagactgcccagcagcgccgacgtggagttctgcctgagcctgacccagtacgagagcggcagcatggacaaggccgccaacttcagcttcagaaacaccctggagggcttcgccagccccctgaccggcatcgccgacgccagccagagcagcatgcacaacgccctgcacatctacatgaacggcaccatgagccaggtgcagggcagcgccaacgaccccatcttcctgctgcaccacgccttcgtggacagcatgttcgagcagtggctgagaagacacagacccctgcaggaggtgtaccccgaggccaacgcccccatcggccacaacagagagagctacatggtgcccttcatccccctgtacagaaacggcgacttcttcatcagcagcaaggacctgggctacgactacagctacctgcaggacagcgaccccgacagcttccaggactacatcaagagctacctggagcaggccagcagaatctggagctggctgctgggcgccgccatggtgggcgccgtgctgaccgccctgctggccggcctggtgagcctgctgtgcagacacaagagaaagcagctgcccgaggagaagcagcccctgctgatggagaaggaggactaccacagcctgtaccagagccacctgtga

SEQ ID NO: 3792 - RNA, 1590 nt, synthetic construct
  misc_feature 1..1590: note = derived and/or modified sequence opt5 fromtyrosinase__Homo_sapiens__AGV39086
  source 1..1590: mol_type = other RNA
atgctgctcgccgtgctgtactgccttctgtggagcttccagacctccgctggccactttcccagagcctgtgtctctagcaagaacctcatggagaaagaatgctgtcctccgtggtccggggaccggtctccctgcggacaactgagcggccgcgggtcctgtcagaatatccttctgtctaacgcgcctctcggaccccagttcccttttacaggcgttgatgacagagagagctggccctccgtgttctataatcggacgtgccagtgtagcgggaactttatgggattcaattgcggcaactgtaagtttggcttctgggggcctaattgcaccgaacgcagactgctggtgcggcgcaacatttttgatctctctgctccggagaaagacaagttctttgcctacctgacacttgccaaacataccatctccagcgattatgtcattcccatcggaacatacggccaaatgaagaatgggtctacccctatgttcaacgacattaatatctatgatctgtttgtgtggatgcactactatgtttccatggacgctctcctgggaggcagcgaaatctggagagatattgacttcgcccatgaggctcccgccttccttccttggcaccggctgtttctcctgcgctgggagcaggaaatccagaagctgacaggggatgagaacttcaccattccctactgggactggagagatgcggaaaaatgtgacatctgcacggacgagtacatgggaggccagcatccgaccaatcctaacctcctgtctcccgcctcctttttcagctcctggcaaattgtgtgctctcggcttgaggaatataatagccaccagtccctgtgtaacggcacacctgaggggcccctccgcagaaaccccggaaatcacgataagagccggacccctcgcctgccgtcttccgctgacgtcgaattttgccttagcctgacacagtacgagtctggcagcatggataaagccgctaacttctcctttagaaataccctcgaagggttcgcctctcccctgacgggaatcgcggacgccagccagtccagcatgcataacgctctgcacatttatatgaatggcacaatgtctcaagtgcaggggtccgccaacgatcctatctttctcctgcatcacgctttcgttgacagcatgtttgagcagtggcttcggagacaccgccccctgcaagaggtgtaccctgaagccaatgcccccatcggacataaccgggagtcttatatggtcccgttcattcctctctacagaaatggcgactttttcatctccagcaaggatctgggctatgattactcctaccttcaggactctgatcccgacagcttccaggactatattaaatcctacctggaacaggcttctcgcatctggagctggctcctgggggcggccatggtgggagctgtgctgaccgccctcctggccggccttgtctccctgctctgtcggcacaagagaaagcaactgcctgaggaaaaacagcccctgcttatggagaaggaggattatcatagcctctaccagtctcacctgtga

SEQ ID NO: 3793 - protein, 537 aa, synthetic construct
  REGION 1..537: note = TYRP1__Homo_sapiens__P17643
MSAPKLLSLGCIFFPLLLFQQARAQFPRQCATVEALRSGMCCPDLSPVSGPGTDRCGSSSGRGRCEAVTADSRPHSPQYPHDGRDDREVWPLRFFNRTCHCNGNFSGHNCGTCRPGWRGAACDQRVLIVRRNLLDLSKEEKNHFVRALDMAKRTTHPLFVIATRRSEEILGPDGNTPQFENISIYNYFVWTHYYSVKKTFLGVGQESFGEVDFSHEGPAFLTWHRYHLLRLEKDMQEMLQEPSFSLPYWNFATGKNVCDICTDDLMGSRSNFDSTLISPNSVFSQWRVVCDSLEDYDTLGTLCNSTEDGPIRRNPAGNVARPMVQRLPEPQDVAQCLEVGLFDTPPFYSNSTNSFRNTVEGYSDPTGKYDPAVRSLHNLAHLFLNGTGGQTHLSPNDPIFVLLHTFTDAVFDEWLRRYNADISTFPLENAPIGHNRQYNMVPFWPPVTNTEMFVTAPDNLGYTYEIQWPSREFSVPEIIAIAVVGALLLVALIFGTASYLIRARRSMDEANQPLLTDQYQCYAEEYEKLQNPNQSVV

SEQ ID NO: 3794 - RNA, 1614 nt, synthetic construct
  misc_feature 1..1614: note = TYRP1__Homo_sapiens__AAC15468
  source 1..1614: mol_type = other RNA
atgagtgctcctaaactcctctctctgggctgtatcttcttccccttgctactttttcagcaggcccgggctcaattcccaagacagtgtgccactgttgaggctttgagaagtggtatgtgttgcccagacctgtcccctgtgtctgggcctgggacagaccgctgtggctcatcatcagggaggggcagatgtgaggcagtgactgcagactcccggccccacagccctcagtatccccatgatggcagagatgatcgggaggtctggcccttgcgcttcttcaataggacatgtcactgcaacggcaatttctcaggacacaactgtgggacgtgccgtcctggctggagaggagctgcctgtgaccagagggttctcatagtcaggagaaatcttctggacttaagtaaagaagaaaagaaccactttgtccgggccctggatatggcaaagcgcacaactcaccctttatttgtcattgccaccaggagatcagaagaaatactggggccagatggcaacacgccacaatttgagaacatttccatttataactactttgtttggacacactattactcagtcaaaaagactttccttggggtaggacaggaaagctttggtgaagtggatttctctcatgagggaccagcttttctcacatggcacaggtaccacctcctgcgtctggagaaagacatgcaggaaatgttgcaagagccttctttctcccttccttactggaattttgcaacggggaaaaatgtctgtgatatctgcacggatgacttgatgggatccagaagcaactttgattccactctaataagcccaaactctgtcttttctcaatggcgagtggtctgtgactccttggaagattatgataccctgggaacactttgtaacagcaccgaggatgggccaattaggagaaatccagctggaaatgtggccagaccaatggtgcaacgtcttcctgaaccacaggatgtcgctcagtgcttggaagttggtttatttgacacgcctcctttttattccaactctacaaacagtttccgaaacacagtggaaggttacagtgaccccacgggaaagtatgaccctgctgttcgaagtcttcacaatttggctcatctattcctgaatggaacagggggacaaacccatttgtctccaaatgatcctatttttgtcctcctgcacaccttcacagatgcagtctttgatgaatggctgaggagatacaatgctgatatatccacatttccattggaaaatgcccctattggacataatagacaatacaacatggtgccattctggcccccagtcaccaacacagaaatgtttgttactgctccagacaacctgggatacacttatgaaattcaatggccaagtcgggagtttagtgtacctgagataattgccatagcagtagttggcgctttgttactggttgcactcatttttgggactgcttcttatctgattcgtgccagacgcagtatggatgaagctaaccagcctctcctcactgatcagtatcaatgctatgctgaagaatatgaaaaactccagaatcctaatcagtctgtggtctaa

SEQ ID NO: 3795 - RNA, 1614 nt, synthetic construct
  misc_feature 1..1614: note = derived and/or modified sequence opt1 fromTYRP1__Homo_sapiens__AAC15468
  source 1..1614: mol_type = other RNA
atgagcgcccccaagctgctctccctgggctgcatcttcttcccgctgctcctgttccagcaggcccgcgcgcagttcccccggcagtgcgccaccgtggaggccctgcgcagcgggatgtgctgccccgacctctcccccgtcagcggcccggggaccgaccggtgcggctccagctccgggcgcggccggtgcgaggccgtgacggccgacagccgcccccacagcccccagtacccccacgacggccgggacgaccgcgaggtgtggccgctgcggttcttcaaccggacctgccactgcaacgggaacttctccggccacaactgcgggacctgccgccccggctggcgcggggcggcctgcgaccagcgggtcctgatcgtgcgccggaacctcctggacctgtccaaggaggagaagaaccacttcgtgcgcgccctcgacatggccaagcggaccacgcaccccctgttcgtcatcgcgacccgccggagcgaggagatcctgggccccgacggcaacaccccgcagttcgagaacatctccatctacaactacttcgtgtggacccactactacagcgtgaagaagacgttcctcggggtcggccaggagtccttcggggaggtggacttcagccacgagggccccgccttcctgacctggcaccgctaccacctcctgcggctggagaaggacatgcaggagatgctgcaggagccctccttcagcctcccctactggaacttcgccaccggcaagaacgtgtgcgacatctgcaccgacgacctgatggggtcccgcagcaacttcgacagcacgctgatctccccgaacagcgtcttctcccagtggcgcgtggtgtgcgacagcctcgaggactacgacaccctgggcaccctgtgcaactccaccgaggacgggcccatccggcgcaaccccgccggcaacgtcgcccggcccatggtgcagcgcctcccggagccccaggacgtggcgcagtgcctggaggtcgggctgttcgacacgccgcccttctacagcaactccaccaacagcttccggaacaccgtggagggctactccgaccccaccggcaagtacgaccccgccgtgcgcagcctccacaacctggcccacctgttcctcaacgggacgggcgggcagacccacctgtcccccaacgaccccatcttcgtcctgctccacaccttcaccgacgccgtgttcgacgagtggctgcggcgctacaacgccgacatcagcacgttcccgctggagaacgcgcccatcggccacaaccggcagtacaacatggtgcccttctggccgcccgtcaccaacaccgagatgttcgtgaccgcccccgacaacctcgggtacacgtacgagatccagtggccctcccgcgagttcagcgtcccggagatcatcgccatcgccgtggtgggcgccctgctgctcgtcgcgctgatcttcggcaccgcctcctacctgatccgggcccgccggagcatggacgaggccaaccagcccctcctgaccgaccagtaccagtgctacgccgaggagtacgagaagctgcagaaccccaaccagtccgtggtgtga

SEQ ID NO: 3796 - RNA, 1614 nt, synthetic construct
  misc_feature 1..1614: note = derived and/or modified sequence opt2 fromTYRP1__Homo_sapiens__AAC15468
  source 1..1614: mol_type = other RNA
atgtccgcccccaagctcctctccctcggctgcatcttcttccccctcctcctcttccagcaggcccgcgcccagttcccccgccagtgcgccaccgtcgaggccctccgctccggcatgtgctgccccgacctctcccccgtctccggccccggcaccgaccgctgcggctcctcctccggccgcggccgctgcgaggccgtcaccgccgactcccgcccccactccccccagtacccccacgacggccgcgacgaccgcgaggtctggcccctccgcttcttcaaccgcacctgccactgcaacggcaacttctccggccacaactgcggcacctgccgccccggctggcgcggcgccgcctgcgaccagcgcgtcctcatcgtccgccgcaacctcctcgacctctccaaggaggagaagaaccacttcgtccgcgccctcgacatggccaagcgcaccacccaccccctcttcgtcatcgccacccgccgctccgaggagatcctcggccccgacggcaacaccccccagttcgagaacatctccatctacaactacttcgtctggacccactactactccgtcaagaagaccttcctcggcgtcggccaggagtccttcggcgaggtcgacttctcccacgagggccccgccttcctcacctggcaccgctaccacctcctccgcctcgagaaggacatgcaggagatgctccaggagccctccttctccctcccctactggaacttcgccaccggcaagaacgtctgcgacatctgcaccgacgacctcatgggctcccgctccaacttcgactccaccctcatctcccccaactccgtcttctcccagtggcgcgtcgtctgcgactccctcgaggactacgacaccctcggcaccctctgcaactccaccgaggacggccccatccgccgcaaccccgccggcaacgtcgcccgccccatggtccagcgcctccccgagccccaggacgtcgcccagtgcctcgaggtcggcctcttcgacaccccccccttctactccaactccaccaactccttccgcaacaccgtcgagggctactccgaccccaccggcaagtacgaccccgccgtccgctccctccacaacctcgcccacctcttcctcaacggcaccggcggccagacccacctctcccccaacgaccccatcttcgtcctcctccacaccttcaccgacgccgtcttcgacgagtggctccgccgctacaacgccgacatctccaccttccccctcgagaacgcccccatcggccacaaccgccagtacaacatggtccccttctggccccccgtcaccaacaccgagatgttcgtcaccgcccccgacaacctcggctacacctacgagatccagtggccctcccgcgagttctccgtccccgagatcatcgccatcgccgtcgtcggcgccctcctcctcgtcgccctcatcttcggcaccgcctcctacctcatccgcgcccgccgctccatggacgaggccaaccagcccctcctcaccgaccagtaccagtgctacgccgaggagtacgagaagctccagaaccccaaccagtccgtcgtctga

SEQ ID NO: 3797 - RNA, 1614 nt, synthetic construct
  misc_feature 1..1614: note = derived and/or modified sequence opt3 fromTYRP1__Homo_sapiens__AAC15468
  source 1..1614: mol_type = other RNA
atgagcgcccccaagctgctctcccttggctgcatcttctttcctctgttgttattccagcaagctagagcacagtttccaaggcagtgtgccaccgtggaggcgctgcggtctgggatgtgctgtccggacctatcacccgtcagtggacctggtacagatcgctgcggcagctcctctgggcgaggacgttgtgaagctgttactgccgactcgagaccacactcaccccagtaccctcatgatggcagggacgatcgggaggtgtggccactccgcttctttaacagaacgtgccactgtaatggtaacttcagcgggcataattgcggaacctgtaggcccggctggcggggcgcagcctgcgaccaacgcgtactgattgtgcgaagaaaccttctggatttgagtaaagaagagaagaatcactttgtcagggctctcgacatggcaaaacggacaactcatcctctgttcgtgatagccacccgtcgctccgaagagatcctggggccagatggaaacacaccgcagtttgagaatatttctatctataactacttcgtttggacccactattacagcgtgaagaaaacttttctcggtgtcggccaggaatccttcggggaggtggacttttcacacgaaggacccgctttcttaacatggcatagatatcatctgcttaggttggagaaggatatgcaggagatgctgcaagaacctagtttcagcctaccatactggaattttgccaccggcaagaacgtatgtgacatttgcacggatgacctcatgggttctcggtccaatttcgactcaactctgatcagccccaacagtgtgttttctcagtggcgagttgtctgcgattcccttgaggactatgataccctggggacattgtgtaatagcactgaagacggacctatacgcagaaacccagcgggcaatgtggcaaggcccatggtgcagcggctcccggagcctcaggatgtcgcccaatgcctggaagttggcttattcgacacacccccattttactcgaactctaccaactccttccgcaataccgtggaggggtactcagatcctacgggaaaatatgaccccgctgtaagaagtctgcacaacctcgcccacctttttctgaatggtactggcgggcagacacacttgagcccaaacgatcccatcttcgtgctactgcatacctttactgacgcagtcttcgatgagtggctcaggcgttacaatgctgacatttccacatttcctctggaaaacgccccaatcggacacaatcggcagtataacatggtgccgttctggccccctgttaccaatacggagatgtttgtgaccgcgccagacaaccttggctacacatatgaaattcaatggccctctcgagagttcagcgtccctgaaatcatagccattgcagtggtaggtgctctgttgctcgttgccctgatcttcgggactgcttcatacttaattagagccaggcgcagtatggatgaggcaaatcagccactgctaaccgaccagtatcagtgttacgccgaggaatacgagaagctccaaaaccccaatcagtccgtggtctga

SEQ ID NO: 3798 - RNA, 1614 nt, synthetic construct
  misc_feature 1..1614: note = derived and/or modified sequence opt4 fromTYRP1__Homo_sapiens__AAC15468
  source 1..1614: mol_type = other RNA
atgagcgcccccaagctgctgagcctgggctgcatcttcttccccctgctgctgttccagcaggccagagcccagttccccagacagtgcgccaccgtggaggccctgagaagcggcatgtgctgccccgacctgagccccgtgagcggccccggcaccgacagatgcggcagcagcagcggcagaggcagatgcgaggccgtgaccgccgacagcagaccccacagcccccagtacccccacgacggcagagacgacagagaggtgtggcccctgagattcttcaacagaacctgccactgcaacggcaacttcagcggccacaactgcggcacctgcagacccggctggagaggcgccgcctgcgaccagagagtgctgatcgtgagaagaaacctgctggacctgagcaaggaggagaagaaccacttcgtgagagccctggacatggccaagagaaccacccaccccctgttcgtgatcgccaccagaagaagcgaggagatcctgggccccgacggcaacaccccccagttcgagaacatcagcatctacaactacttcgtgtggacccactactacagcgtgaagaagaccttcctgggcgtgggccaggagagcttcggcgaggtggacttcagccacgagggccccgccttcctgacctggcacagataccacctgctgagactggagaaggacatgcaggagatgctgcaggagcccagcttcagcctgccctactggaacttcgccaccggcaagaacgtgtgcgacatctgcaccgacgacctgatgggcagcagaagcaacttcgacagcaccctgatcagccccaacagcgtgttcagccagtggagagtggtgtgcgacagcctggaggactacgacaccctgggcaccctgtgcaacagcaccgaggacggccccatcagaagaaaccccgccggcaacgtggccagacccatggtgcagagactgcccgagccccaggacgtggcccagtgcctggaggtgggcctgttcgacaccccccccttctacagcaacagcaccaacagcttcagaaacaccgtggagggctacagcgaccccaccggcaagtacgaccccgccgtgagaagcctgcacaacctggcccacctgttcctgaacggcaccggcggccagacccacctgagccccaacgaccccatcttcgtgctgctgcacaccttcaccgacgccgtgttcgacgagtggctgagaagatacaacgccgacatcagcaccttccccctggagaacgcccccatcggccacaacagacagtacaacatggtgcccttctggccccccgtgaccaacaccgagatgttcgtgaccgcccccgacaacctgggctacacctacgagatccagtggcccagcagagagttcagcgtgcccgagatcatcgccatcgccgtggtgggcgccctgctgctggtggccctgatcttcggcaccgccagctacctgatcagagccagaagaagcatggacgaggccaaccagcccctgctgaccgaccagtaccagtgctacgccgaggagtacgagaagctgcagaaccccaaccagagcgtggtgtga

SEQ ID NO: 3799 - RNA, 1614 nt, synthetic construct
  misc_feature 1..1614: note = derived and/or modified sequence opt5 fromTYRP1__Homo_sapiens__AAC15468
  source 1..1614: mol_type = other RNA
atgagcgcccccaagctgctctccctgggctgcatcttctttcctcttctcctgttccagcaagctagagcccagtttccgcggcagtgtgcgaccgtggaggctctgcgctctgggatgtgctgtcccgaccttagccctgtctccggacccggcacagatagatgcgggtctagctccggacggggccgctgtgaagccgttacggccgactctagacctcacagcccccagtaccctcatgatgggcgggacgatcgcgaggtgtggccgctgagattctttaaccggacctgccactgtaatggaaacttctccggccataattgcggcacatgtcgccccgggtggagaggagctgcctgcgaccaacgggtgctcattgtccgcagaaacctgctggatctcagcaaagaagagaagaatcactttgtgcgggctctggacatggccaaacgcaccacacatcctcttttcgttatcgcgaccagacggtctgaagagattctgggccccgatgggaacacacctcagtttgagaatatctccatttataactacttcgtgtggacccactattacagcgtcaagaaaacgtttctcggagtgggccaggaatctttcggggaggttgacttttcccacgaaggacccgccttcctgacctggcatagatatcaccttctgcgcctcgagaaggatatgcaggagatgctgcaagaaccgagcttctctctgccttactggaattttgctacaggcaagaacgtgtgtgacatctgcaccgatgacctcatgggctcccggagcaatttcgactccacactgatctctcccaacagcgtcttttcccagtggagagtggtgtgcgatagccttgaggactatgataccctggggacgctctgtaattctacagaagacggacctattcgccggaaccccgccggcaatgtcgctagacccatggttcagcgcctgcctgagccgcaggatgtggcccaatgccttgaagtggggctgttcgacacaccccctttttactccaacagcaccaactctttccggaataccgtcgagggatacagcgatcccaccggcaaatatgaccctgcggtgagatccctccataacctggcccacctgtttctcaatgggacaggaggccagacgcacctgtctcccaacgatccgatcttcgttcttctgcatacctttacagacgctgtgttcgatgagtggctccgccggtacaatgccgacattagcacctttcctctggaaaacgctcccatcggccacaatagacagtataacatggtccctttctggccccctgtgacaaataccgagatgtttgttacggcccccgacaaccttgggtacacatatgaaattcaatggccgtcccgcgagttcagcgtgcctgaaatcattgccatcgctgtcgtgggagcgctgctcctggtcgccctgatcttcggcaccgcttcttacctcattcgggccagacggtccatggatgaggccaatcagcccctgcttaccgaccagtatcagtgttacgctgaggaatacgagaagctgcaaaaccccaatcagagcgtggtttga

SEQ ID NO: 3800 - protein, 519 aa, synthetic construct
  REGION 1..519: note = TYRP2__Homo_sapiens__P40126
MSPLWWGFLLSCLGCKILPGAQGQFPRVCMTVDSLVNKECCPRLGAESANVCGSQQGRGQCTEVRADTRPWSGPYILRNQDDRELWPRKFFHRTCKCTGNFAGYNCGDCKFGWTGPNCERKKPPVIRQNIHSLSPQEREQFLGALDLAKKRVHPDYVITTQHWLGLLGPNGTQPQFANCSVYDFFVWLHYYSVRDTLLGPGRPYRAIDFSHQGPAFVTWHRYHLLCLERDLQRLIGNESFALPYWNFATGRNECDVCTDQLFGAARPDDPTLISRNSRFSSWETVCDSLDDYNHLVTLCNGTYEGLLRRNQMGRNSMKLPTLKDIRDCLSLQKFDNPPFFQNSTFSFRNALEGFDKADGTLDSQVMSLHNLVHSFLNGTNALPHSAANDPIFVVLHSFTDAIFDEWMKRFNPPADAWPQELAPIGHNRMYNMVPFFPPVTNEELFLTSDQLGYSYAIDLPVSVEETPGWPTTLLVVMGTLVALVGLFVLLAFLQYRRLRKGYTPLMETHLSSKRYTEEA

SEQ ID NO: 3801 - RNA, 1560 nt, synthetic construct
  misc_feature 1..1560: note = TYRP2__Homo_sapiens__AAA20870
  source 1..1560: mol_type = other RNA
atgagccccctttggtgggggtttctgctcagttgcttgggctgcaaaatcctgccaggagcccagggtcagttcccccgagtctgcatgacggtggacagcctagtgaacaaggagtgctgcccacgcctgggtgcagagtcggccaatgtctgtggctctcagcaaggccgggggcagtgcacagaggtgcgagccgacacaaggccctggagtggtccctacatcctacgaaaccaggatgaccgtgagctgtggccaagaaaattcttccaccggacctgcaagtgcacaggaaactttgccggctataattgtggagactgcaagtttggctggaccggtcccaactgcgagcggaagaaaccaccagtgattcggcagaacatccattccttgagtcctcaggaaagagagcagttcttgggcgccttagatctcgcgaagaagagagtacaccccgactacgtgatcaccacacaacactggctgggcctgcttgggcccaatggaacccagccgcagtttgccaactgcagtgtttatgatttttttgtgtggctccattattattctgttagagatacattattaggaccaggacgcccctacagggccatagatttctcacatcaaggacctgcatttgttacctggcaccggtaccatttgttgtgtctggaaagagatctccagcgactcattggcaatgagtcttttgctttgccctactggaactttgccactgggaggaacgagtgtgatgtgtgtacagaccagctgtttggggcagcgagaccagacgatccgactctgattagtcggaactcaagattctccagctgggaaactgtctgtgatagcttggatgactacaaccacctggtcaccttgtgcaatggaacctatgaaggtttgctgagaagaaatcaaatgggaagaaacagcatgaaattgccaaccttaaaagacatacgagattgcctgtctctccagaagtttgacaatcctcccttcttccagaactctaccttcagtttcaggaatgctttggaagggtttgataaagcagatgggactctggattctcaagtgatgagccttcataatttggttcattccttcctgaacgggacaaacgctttgccacattcagccgccaatgatcccatttttgtggttcttcattcctttactgatgccatctttgatgagtggatgaaaagatttaatcctcctgcagatgcctggcctcaggagctggcccctattggtcacaatcggatgtacaacatggttcctttcttccctccagtgactaatgaagaactctttttaacctcagaccaacttggctacagctatgccatcgatctgccagtttcagttgaagaaactccaggttggcccacaactctcttagtagtcatgggaacactggtggctttggttggtctttttgtgctgttggcttttcttcaatatagaagacttcgaaaaggatatacacccctaatggagacacatttaagcagcaagagatacacagaagaagcctag

SEQ ID NO: 3802 - RNA, 1560 nt, synthetic construct
  misc_feature 1..1560: note = derived and/or modified sequence opt1 fromTYRP2__Homo_sapiens__AAA20870
  source 1..1560: mol_type = other RNA
atgagccccctgtggtggggcttcctcctgtcctgcctggggtgcaagatcctcccgggcgcccaggggcagttcccccgcgtgtgcatgaccgtcgacagcctggtgaacaaggagtgctgcccccggctgggcgccgagtccgcgaacgtgtgcgggagccagcagggccgcggccagtgcaccgaggtccgggccgacacgcgcccctggtccgggccgtacatcctccggaaccaggacgaccgcgagctgtggccccggaagttcttccaccggacctgcaagtgcaccggcaacttcgccgggtacaactgcggcgactgcaagttcgggtggaccggccccaactgcgagcgcaagaagcccccggtgatccgccagaacatccacagcctgagcccccaggagcgggagcagttcctcggcgccctggacctggccaagaagcgcgtgcaccccgactacgtcatcacgacccagcactggctcgggctgctgggccccaacgggacccagccgcagttcgcgaactgctccgtgtacgacttcttcgtgtggctccactactactccgtccgggacaccctgctgggccccggccgcccctaccgggccatcgacttcagccaccaggggcccgccttcgtgacgtggcaccgctaccacctcctgtgcctggagcgggacctccagcgcctgatcggcaacgagtccttcgccctgccgtactggaacttcgcgaccgggcggaacgagtgcgacgtgtgcaccgaccagctgttcggcgccgcccgccccgacgaccccaccctcatcagccggaactcccgcttcagctcctgggagacggtctgcgacagcctggacgactacaaccacctcgtgaccctgtgcaacgggacctacgagggcctgctccgccggaaccagatgggccgcaactccatgaagctgcccaccctgaaggacatccgggactgcctcagcctgcagaagttcgacaacccgcccttcttccagaactccacgttcagcttccgcaacgccctggaggggttcgacaaggccgacggcaccctcgacagccaggtgatgtccctgcacaacctggtccacagcttcctcaacgggaccaacgcgctgccccactccgccgccaacgaccccatcttcgtggtgctgcacagcttcaccgacgccatcttcgacgagtggatgaagcggttcaacccgcccgccgacgcgtggccccaggagctcgcccccatcggccacaaccgcatgtacaacatggtcccgttcttcccgcccgtgacgaacgaggagctgttcctgacctccgaccagctcgggtacagctacgccatcgacctgcccgtgtccgtcgaggagacccccggctggcccaccacgctgctcgtggtgatgggcaccctggtcgccctggtggggctgttcgtcctcctggccttcctgcagtaccggcgcctccggaagggctacacgcccctgatggagacccacctgagctccaagcgctacaccgaggaggcgtga

SEQ ID NO: 3803 - RNA, 1560 nt, synthetic construct
  misc_feature 1..1560: note = derived and/or modified sequence opt2 fromTYRP2__Homo_sapiens__AAA20870
  source 1..1560: mol_type = other RNA
atgtcccccctctggtggggcttcctcctctcctgcctcggctgcaagatcctccccggcgcccagggccagttcccccgcgtctgcatgaccgtcgactccctcgtcaacaaggagtgctgcccccgcctcggcgccgagtccgccaacgtctgcggctcccagcagggccgcggccagtgcaccgaggtccgcgccgacacccgcccctggtccggcccctacatcctccgcaaccaggacgaccgcgagctctggccccgcaagttcttccaccgcacctgcaagtgcaccggcaacttcgccggctacaactgcggcgactgcaagttcggctggaccggccccaactgcgagcgcaagaagccccccgtcatccgccagaacatccactccctctccccccaggagcgcgagcagttcctcggcgccctcgacctcgccaagaagcgcgtccaccccgactacgtcatcaccacccagcactggctcggcctcctcggccccaacggcacccagccccagttcgccaactgctccgtctacgacttcttcgtctggctccactactactccgtccgcgacaccctcctcggccccggccgcccctaccgcgccatcgacttctcccaccagggccccgccttcgtcacctggcaccgctaccacctcctctgcctcgagcgcgacctccagcgcctcatcggcaacgagtccttcgccctcccctactggaacttcgccaccggccgcaacgagtgcgacgtctgcaccgaccagctcttcggcgccgcccgccccgacgaccccaccctcatctcccgcaactcccgcttctcctcctgggagaccgtctgcgactccctcgacgactacaaccacctcgtcaccctctgcaacggcacctacgagggcctcctccgccgcaaccagatgggccgcaactccatgaagctccccaccctcaaggacatccgcgactgcctctccctccagaagttcgacaacccccccttcttccagaactccaccttctccttccgcaacgccctcgagggcttcgacaaggccgacggcaccctcgactcccaggtcatgtccctccacaacctcgtccactccttcctcaacggcaccaacgccctcccccactccgccgccaacgaccccatcttcgtcgtcctccactccttcaccgacgccatcttcgacgagtggatgaagcgcttcaacccccccgccgacgcctggccccaggagctcgcccccatcggccacaaccgcatgtacaacatggtccccttcttcccccccgtcaccaacgaggagctcttcctcacctccgaccagctcggctactcctacgccatcgacctccccgtctccgtcgaggagacccccggctggcccaccaccctcctcgtcgtcatgggcaccctcgtcgccctcgtcggcctcttcgtcctcctcgccttcctccagtaccgccgcctccgcaagggctacacccccctcatggagacccacctctcctccaagcgctacaccgaggaggcctga

SEQ ID NO: 3804 - RNA, 1560 nt, synthetic construct
  misc_feature 1..1560: note = derived and/or modified sequence opt3 fromTYRP2__Homo_sapiens__AAA20870
  source 1..1560: mol_type = other RNA
atgagccccctgtggtggggcttcctcctttcctgcctggggtgtaagatcttgcctggagcccagggtcaatttccaagagtgtgcatgaccgtcgactctttagttaacaaagagtgttgcccgaggctgggcgctgaatcagcaaatgtgtgtgggagtcagcagggacggggccagtgcacagaggtacgcgccgatactcgaccctggagcggtccttacattctacgtaaccaagacgatagagaactctggccaaggaagttctttcaccggacgtgtaaatgcaccgggaatttcgcgggatataactgtggcgactgcaagtttggctggacagggcccaattgtgagcgcaaaaagcctccagtgataagacagaacatccattccctgtctccccaggaaagggagcagttccttggagctctggatttggccaagaaacgggtccaccctgactacgtgattactacccaacattggctcggtctgctgggcccaaatgggacacagccgcagtttgcaaactgctcggtttatgatttctttgtgtggctccactactattcagtccgcgacaccttactgggacccggccgaccttacagagccatcgatttcagccatcagggtccagcttttgtgacttggcacaggtatcaccttttgtgcctggagcgggacctacaacgtctcattgggaatgaaagtttcgcactgccctactggaactttgccacaggacgcaatgagtgtgatgtatgcaccgaccagcttttcggcgctgccagacctgatgacccaacgctgatctccaggaactctcggttcagctcctgggaaactgtttgtgactcattggatgactacaatcatctcgtgaccctgtgcaacggcacatatgaggggttactgcgacgcaatcagatgggaagaaacagtatgaagctccccactcttaaagatataagggactgtctgagcttgcaaaagtttgataacccgcctttctttcaaaattctaccttctcctttcggaacgcgctagagggtttcgacaaagcagatggcacactggactcacaggtcatgagcctccacaatctggtgcatagttttcttaacgggaccaatgccctgccccactctgctgccaacgatccaatcttcgtggtcttgcactcctttacggacgcaattttcgatgaatggatgaagcgctttaatcctcccgctgacgcctggccacaggagctcgcgcccatcggacataacagaatgtacaatatggttcctttctttccaccggtgactaacgaggaactgttcttaacaagcgaccagctgggctattcgtacgccattgatctacccgtatctgtggaagagacccctggttggccaactacactcctggtcgtgatggggacccttgttgcattggtgggcctgttcgtcctcctggcttttcttcagtataggcgtctgcggaagggatacacgcccttgatggagacccacctctcctcaaaacgatatacagaagaggcctga

SEQ ID NO: 3805 - RNA, 1560 nt, synthetic construct
  misc_feature 1..1560: note = derived and/or modified sequence opt4 fromTYRP2__Homo_sapiens__AAA20870
  source 1..1560: mol_type = other RNA
atgagccccctgtggtggggcttcctgctgagctgcctgggctgcaagatcctgcccggcgcccagggccagttccccagagtgtgcatgaccgtggacagcctggtgaacaaggagtgctgccccagactgggcgccgagagcgccaacgtgtgcggcagccagcagggcagaggccagtgcaccgaggtgagagccgacaccagaccctggagcggcccctacatcctgagaaaccaggacgacagagagctgtggcccagaaagttcttccacagaacctgcaagtgcaccggcaacttcgccggctacaactgcggcgactgcaagttcggctggaccggccccaactgcgagagaaagaagccccccgtgatcagacagaacatccacagcctgagcccccaggagagagagcagttcctgggcgccctggacctggccaagaagagagtgcaccccgactacgtgatcaccacccagcactggctgggcctgctgggccccaacggcacccagccccagttcgccaactgcagcgtgtacgacttcttcgtgtggctgcactactacagcgtgagagacaccctgctgggccccggcagaccctacagagccatcgacttcagccaccagggccccgccttcgtgacctggcacagataccacctgctgtgcctggagagagacctgcagagactgatcggcaacgagagcttcgccctgccctactggaacttcgccaccggcagaaacgagtgcgacgtgtgcaccgaccagctgttcggcgccgccagacccgacgaccccaccctgatcagcagaaacagcagattcagcagctgggagaccgtgtgcgacagcctggacgactacaaccacctggtgaccctgtgcaacggcacctacgagggcctgctgagaagaaaccagatgggcagaaacagcatgaagctgcccaccctgaaggacatcagagactgcctgagcctgcagaagttcgacaacccccccttcttccagaacagcaccttcagcttcagaaacgccctggagggcttcgacaaggccgacggcaccctggacagccaggtgatgagcctgcacaacctggtgcacagcttcctgaacggcaccaacgccctgccccacagcgccgccaacgaccccatcttcgtggtgctgcacagcttcaccgacgccatcttcgacgagtggatgaagagattcaacccccccgccgacgcctggccccaggagctggcccccatcggccacaacagaatgtacaacatggtgcccttcttcccccccgtgaccaacgaggagctgttcctgaccagcgaccagctgggctacagctacgccatcgacctgcccgtgagcgtggaggagacccccggctggcccaccaccctgctggtggtgatgggcaccctggtggccctggtgggcctgttcgtgctgctggccttcctgcagtacagaagactgagaaagggctacacccccctgatggagacccacctgagcagcaagagatacaccgaggaggcctga

SEQ ID NO: 3806 - RNA, 1560 nt, synthetic construct
  misc_feature 1..1560: note = derived and/or modified sequence opt5 fromTYRP2__Homo_sapiens__AAA20870
  source 1..1560: mol_type = other RNA
atgagccccctgtggtggggcttcctcctgtcctgccttgggtgtaagatcctgcctggagcccagggccaatttccgagagtgtgcatgaccgtcgactctctcgttaacaaagagtgttgcccccggctgggggctgaaagcgccaatgtgtgtggatcccagcagggccgcgggcagtgcacagaggtgagagcggatacgcggccttggtctggaccctacattcttcgcaaccaagacgatagagaactgtggcctcggaagttctttcaccgcacctgtaaatgcacaggcaatttcgctggctataactgtggggactgcaagtttggatggaccggccccaattgtgagcggaaaaagcctccggtcatcagacagaacattcatagcctcagcccccaggaacgcgagcagttcctgggggccctggatctcgccaagaaaagagtgcaccctgactacgttatcacaacccaacattggctgggacttctgggccccaatgggacacagcctcagtttgctaactgctctgtgtatgatttctttgtctggctccactactatagcgtgcgggacaccctgcttggacccggccgcccgtacagagccattgatttctcccatcagggccctgcttttgttacgtggcaccggtatcatctgctctgcctggagcgcgacctgcaaagactcatcgggaatgaatccttcgccctgccctactggaactttgcgaccggacggaatgagtgtgatgtgtgcacagaccagcttttcggcgccgctagacctgatgaccccaccctgatctctcgcaactcccggttcagctcttgggaaacagtctgtgactccctcgatgactacaatcacctggtgaccctttgcaacgggacgtatgagggactgctcagacgcaatcagatgggccggaacagcatgaagctgcccacactgaaagatattagagactgtctctctctgcaaaagtttgataaccctccgttctttcaaaattccaccttcagctttcgcaacgcccttgaggggttcgacaaagctgatggaacactggactcccaggtgatgtctctccacaatctggtccatagctttcttaacggcaccaatgccctgccccactccgcggccaacgatcctatcttcgttgtgctccacagctttaccgacgctattttcgatgaatggatgaagcggtttaatccccctgccgacgcttggccccaggagctggccccgatcggccataacagaatgtacaatatggtgcctttctttccccctgtcacaaacgaggaactgttcctcacgtctgaccagctggggtattcctacgccattgatcttcccgtgagcgttgaagagacccctggatggcccacaaccctgctcgtggtcatgggcacactggtggctctggttgggcttttcgtgctcctggcgtttctgcagtatcgccggctcagaaagggatacaccccgctgatggagacgcacctttctagcaaacgctatacagaagaggcctga

SEQ ID NO: 3807 - protein, 151 aa, synthetic construct
  REGION 1..151: note = UPA__Homo_sapiens__Q96NZ9
MRRLLLVTSLVVVLLWEAGAVPAPKVPIKMQVKHWPSEQDPEKAWGARVVEPPEKDDQLVVLFPVQKPKLLTTEEKPRGQGRGPILPGTKAWMETEDTLGHVLSPEPDHDSLYHPPPEEDQGEERPRLWVMPNHQVLLGPEEDQDHIYHPQ

SEQ ID NO: 3808 - RNA, 456 nt, synthetic construct
  misc_feature 1..456: note = UPA__Homo_sapiens__CCDS7679.1
  source 1..456: mol_type = other RNA
atgaggaggctcctcctggtcaccagcctggtggttgtgctgctgtgggaggcaggtgcagtcccagcacccaaggtccctatcaagatgcaagtcaaacactggccctcagagcaggacccagagaaggcctggggcgcccgtgtggtggagcctccggagaaggacgaccagctggtggtgctgttccctgtccagaagccgaaactcttgaccaccgaggagaagccacgaggtcagggcaggggccccatccttccaggcaccaaggcctggatggagaccgaggacaccctgggccatgtcctgagtcccgagcccgaccatgacagcctgtaccaccctccgcctgaggaggaccagggcgaggagaggccccggttgtgggtgatgccaaatcaccaggtgctcctgggaccggaggaagaccaagaccacatctaccacccccagtag

SEQ ID NO: 3809 - RNA, 456 nt, synthetic construct
  misc_feature 1..456: note = derived and/or modified sequence opt1 fromUPA__Homo_sapiens__CCDS7679.1
  source 1..456: mol_type = other RNA
atgcgccggctgctcctggtgaccagcctggtcgtggtgctcctgtgggaggccggcgccgtccccgcgcccaaggtgcccatcaagatgcaggtcaagcactggccctccgagcaggaccccgagaaggcctggggcgcccgcgtggtggagccgcccgagaaggacgaccagctggtggtcctcttccccgtgcagaagcccaagctgctgaccacggaggagaagccgcgggggcaggggcgcggccccatcctccccgggaccaaggcctggatggagaccgaggacaccctgggccacgtgctgagccccgagccggaccacgactccctctaccacccgccgcccgaggaggaccagggcgaggagcggccccgcctgtgggtcatgcccaaccaccaggtgctgctcgggcccgaggaggaccaggaccacatctaccacccccagtga

SEQ ID NO: 3810 - RNA, 456 nt, synthetic construct
  misc_feature 1..456: note = derived and/or modified sequence opt2 fromUPA__Homo_sapiens__CCDS7679.1
  source 1..456: mol_type = other RNA
atgcgccgcctcctcctcgtcacctccctcgtcgtcgtcctcctctgggaggccggcgccgtccccgcccccaaggtccccatcaagatgcaggtcaagcactggccctccgagcaggaccccgagaaggcctggggcgcccgcgtcgtcgagccccccgagaaggacgaccagctcgtcgtcctcttccccgtccagaagcccaagctcctcaccaccgaggagaagccccgcggccagggccgcggccccatcctccccggcaccaaggcctggatggagaccgaggacaccctcggccacgtcctctcccccgagcccgaccacgactccctctaccaccccccccccgaggaggaccagggcgaggagcgcccccgcctctgggtcatgcccaaccaccaggtcctcctcggccccgaggaggaccaggaccacatctaccacccccagtga

SEQ ID NO: 3811 - RNA, 456 nt, synthetic construct
  misc_feature 1..456: note = derived and/or modified sequence opt3 fromUPA__Homo_sapiens__CCDS7679.1
  source 1..456: mol_type = other RNA
atgagaaggctgctccttgtgaccagcctggtcgttgtgttgttatgggaggccggcgctgtacccgcacctaaagtgccaatcaaaatgcaggtcaagcactggccgtccgaacaagaccccgagaaagcctggggagcgcgggtggttgaacctccagagaaggatgaccagctggtggtcctattccccgtgcagaaacctaagctcctgacaactgaagagaagccacgcgggcagggtcgaggccccattcttcctgggacgaaggcttggatggagaccgaagatacactgggacatgtattgtctccagagccggaccacgattcactctaccatccccctccagaagaggaccaaggcgaggaacgtcccagactgtgggttatgcctaaccaccaggtgctgctcggtccagaggaagatcaggaccatatatatcacccccagtga

SEQ ID NO: 3812 - RNA, 456 nt, synthetic construct
  misc_feature 1..456: note = derived and/or modified sequence opt4 fromUPA__Homo_sapiens__CCDS7679.1
  source 1..456: mol_type = other RNA
atgagaagactgctgctggtgaccagcctggtggtggtgctgctgtgggaggccggcgccgtgcccgcccccaaggtgcccatcaagatgcaggtgaagcactggcccagcgagcaggaccccgagaaggcctggggcgccagagtggtggagccccccgagaaggacgaccagctggtggtgctgttccccgtgcagaagcccaagctgctgaccaccgaggagaagcccagaggccagggcagaggccccatcctgcccggcaccaaggcctggatggagaccgaggacaccctgggccacgtgctgagccccgagcccgaccacgacagcctgtaccaccccccccccgaggaggaccagggcgaggagagacccagactgtgggtgatgcccaaccaccaggtgctgctgggccccgaggaggaccaggaccacatctaccacccccagtga

SEQ ID NO: 3813 - RNA, 456 nt, synthetic construct
  misc_feature 1..456: note = derived and/or modified sequence opt5 fromUPA__Homo_sapiens__CCDS7679.1
  source 1..456: mol_type = other RNA
atgagacggctgctcctggtgaccagccttgtcgttgtgctgctctgggaggccggcgctgtgcccgcccctaaggtcccgatcaaaatgcaagtgaagcactggccctccgaacaggaccctgagaaagcgtggggagctcgcgttgtggaaccccctgagaaggatgaccagctggtcgtgcttttccccgttcagaaacctaagctgctcacaacggaagagaagccgagagggcagggccgggggcccattctgcctggaaccaaagcctggatggagacagaagataccctgggccatgtgctctctcccgagcctgaccacgatagcctgtaccatcccccgcctgaagaggaccaaggggaggaacgccccagactttgggtcatgcctaaccaccaggtgctgctcggacccgaggaagatcaggaccatatctatcacccccagtga

SEQ ID NO: 3814 - protein, 174 aa, synthetic construct [sequence omitted]

SEQ ID NO: 3815 - RNA, 525 nt, synthetic construct
  misc_feature 1..525: note = VEGFR1__Homo_sapiens__ACF47598
  source 1..525: mol_type = other RNA
atggtcagctactgggacaccggggtcctgctgtgcgcgctgctcagctgtctgcttctcacaggatctagttcaggttcaaaattaaaagatcctgaactgagtttaaaaggcacccagcacatcatgcaagcaggccagacactgcatctccaatgcaggggggaagcagcccataaatggtctttgcctgaaatggtgagtaaggaaagcgaaaggctgagcataactaaatctgcctgtggaagaaatggcaaacaattctgcagtactttaaccttgaacacagctcaagcaaaccacactggcttctacagctgcaaatatctagctgtacctacttcaaagaagaaggaaacagaatctgcaatctatatatttattagtgatacaggtagacctttcgtagagatgtacagtgaaatccccgaaattatacacatgactgaaggaagggagctcgtcattccctgccgggttacgtcacctaacatcactgttactttaaaaaagaaaaaggcataa

SEQ ID NO: 3816 - RNA, 525 nt, synthetic construct
  misc_feature 1..525: note = derived and/or modified sequence opt1 fromVEGFR1__Homo_sapiens__ACF47598
  source 1..525: mol_type = other RNA
atggtgagctactgggacaccggcgtcctgctctgcgccctgctgtcctgcctcctgctgaccgggagctccagcggctccaagctcaaggaccccgagctgagcctgaaggggacgcagcacatcatgcaggccggccagaccctccacctccagtgccgcggggaggcggcccacaagtggtccctgccggagatggtgagcaaggagtccgagcggctgagcatcaccaagtccgcctgcggccgcaacggcaagcagttctgcagcaccctgacgctgaacaccgcccaggccaaccacaccgggttctactcctgcaagtacctcgcggtgcccaccagcaagaagaaggagacggagtccgccatctacatcttcatcagcgacaccggccggcccttcgtcgagatgtactccgagatccccgagatcatccacatgaccgaggggcgcgagctggtgatcccgtgccgggtgaccagccccaacatcacggtcaccctgaagaagaagaaggcctga

SEQ ID NO: 3817 - RNA, 525 nt, synthetic construct
  misc_feature 1..525: note = derived and/or modified sequence opt2 fromVEGFR1__Homo_sapiens__ACF47598
  source 1..525: mol_type = other RNA
atggtctcctactgggacaccggcgtcctcctctgcgccctcctctcctgcctcctcctcaccggctcctcctccggctccaagctcaaggaccccgagctctccctcaagggcacccagcacatcatgcaggccggccagaccctccacctccagtgccgcggcgaggccgcccacaagtggtccctccccgagatggtctccaaggagtccgagcgcctctccatcaccaagtccgcctgcggccgcaacggcaagcagttctgctccaccctcaccctcaacaccgcccaggccaaccacaccggcttctactcctgcaagtacctcgccgtccccacctccaagaagaaggagaccgagtccgccatctacatcttcatctccgacaccggccgccccttcgtcgagatgtactccgagatccccgagatcatccacatgaccgagggccgcgagctcgtcatcccctgccgcgtcacctcccccaacatcaccgtcaccctcaagaagaagaaggcctga

SEQ ID NO: 3818 - RNA, 525 nt, synthetic construct
  misc_feature 1..525: note = derived and/or modified sequence opt3 fromVEGFR1__Homo_sapiens__ACF47598
  source 1..525: mol_type = other RNA
atggtgagctactgggacaccggcgtcctgctctgcgcccttctgtcctgtttgttactgacagggtcttcaagtggaagcaagctaaaagatcccgagctctccctgaagggtactcagcacatcatgcaagctggccagacgcttcatctgcagtgcagaggggaagcagcccacaaatggtctttgcctgagatggtttcgaaggaatcagagaggctcagcattaccaaaagtgcgtgtggacggaacggcaagcagttctgctccacactgactctgaataccgctcaagccaaccatacaggtttttattcttgtaagtacctcgcagtgccaaccagcaaaaagaaagaaactgagtccgccatatatatcttcatttcagacacagggcgcccgtttgtagagatgtacagtgaaatccccgagattatccacatgaccgaaggacgagagttagtgataccttgccgtgtcacgagcccaaatatcactgtgaccctgaagaaaaagaaggcttga

SEQ ID NO: 3819 - RNA, 525 nt, synthetic construct
  misc_feature 1..525: note = derived and/or modified sequence opt4 fromVEGFR1__Homo_sapiens__ACF47598
  source 1..525: mol_type = other RNA
atggtgagctactgggacaccggcgtgctgctgtgcgccctgctgagctgcctgctgctgaccggcagcagcagcggcagcaagctgaaggaccccgagctgagcctgaagggcacccagcacatcatgcaggccggccagaccctgcacctgcagtgcagaggcgaggccgcccacaagtggagcctgcccgagatggtgagcaaggagagcgagagactgagcatcaccaagagcgcctgcggcagaaacggcaagcagttctgcagcaccctgaccctgaacaccgcccaggccaaccacaccggcttctacagctgcaagtacctggccgtgcccaccagcaagaagaaggagaccgagagcgccatctacatcttcatcagcgacaccggcagacccttcgtggagatgtacagcgagatccccgagatcatccacatgaccgagggcagagagctggtgatcccctgcagagtgaccagccccaacatcaccgtgaccctgaagaagaagaaggcctga

SEQ ID NO: 3820 - RNA, 525 nt, synthetic construct
  misc_feature 1..525: note = derived and/or modified sequence opt5 fromVEGFR1__Homo_sapiens__ACF47598
  source 1..525: mol_type = other RNA
atggtgagctactgggacaccggcgtcctgctctgcgccctgctttcctgtctgctcctgacagggtctagctccggatctaaacttaaggatcccgagctgagcctcaagggcacgcagcacatcatgcaagctgggcagaccctgcatctgcagtgcagaggagaagccgcgcacaaatggtccctccctgagatggtttctaaggaaagcgagcggctgtccattacaaaaagcgcttgtggccgcaacgggaagcagttctgctctacccttacactgaataccgcccaagccaaccatacaggattttattcctgtaagtacctcgctgtgccgaccagcaaaaagaaagaaacggagtctgccatctatattttcatctccgacaccggcagaccctttgtggagatgtacagcgaaattcctgagatcatccacatgacagaaggccgggagctggtcattccctgccgcgtgacctctcctaatatcacagttacccttaagaaaaagaaggcttga

SEQ ID NO: 3821 - protein, 249 aa, synthetic construct
  REGION 1..249: note = WT1__Homo_sapiens__A0A0H5AUY0
MGSDVRDLNALLPAVPSLGGGGGCALPVSGAAQWAPVLDFAPPGASAYGSLGGPAPPPAPPPPPPPPPHSFIKQEPSWGGAEPHEEQCLSAFTVHFSGQFTGTAGACRYGPFGPPPPSQASSGQARMFPNAPYLPSCLESQPAIRNQGYSTVTFDGTPSYGHTPSHHAAQFPNHSFKHEDPMGQQGSLGEQQYSVPPPVYGCHTPTDSCTGSQALLLRTPYSSDNLYQMTSQLECMTWNQMNLGATLKG

SEQ ID NO: 3822 - RNA, 750 nt, synthetic construct
  misc_feature 1..750: note = WT1__Homo_sapiens__BAR92607
  source 1..750: mol_type = other RNA
atgggctccgacgtgcgggacctgaacgcgctgctgcccgccgtcccctccctgggtggcggcggcggctgtgccctgcctgtgagcggcgcggcgcagtgggcgccggtgctggactttgcgcccccgggcgcttcggcttacgggtcgttgggcggccccgcgccgccaccggctccgccgccacccccgccgccgccgcctcactccttcatcaaacaggagccgagctggggcggcgcggagccgcacgaggagcagtgcctgagcgccttcactgtccacttttccggccagttcactggcacagccggagcctgtcgctacgggcccttcggtcctcctccgcccagccaggcgtcatccggccaggccaggatgtttcctaacgcgccctacctgcccagctgcctcgagagccagcccgctattcgcaatcagggttacagcacggtcaccttcgacgggacgcccagctacggtcacacgccctcgcaccatgcggcgcagttccccaaccactcattcaagcatgaggatcccatgggccagcagggctcgctgggtgagcagcagtactcggtgccgcccccggtctatggctgccacacccccaccgacagctgcaccggcagccaggctttgctgctgaggacgccctacagcagtgacaatttataccaaatgacatcccagcttgaatgcatgacctggaatcagatgaacttaggagccaccttaaaggggtaa

SEQ ID NO: 3823 - RNA, 750 nt, synthetic construct
  misc_feature 1..750: note = derived and/or modified sequence opt1 fromWT1__Homo_sapiens__BAR92607
  source 1..750: mol_type = other RNA
atgggcagcgacgtgcgcgacctgaacgccctcctgcccgccgtcccctccctcgggggcgggggcgggtgcgcgctgcccgtgagcggcgccgcccagtgggcccccgtgctggacttcgcgccgcccggcgcctccgcctacgggagcctgggcgggcccgcgcccccgcccgcgcccccgcccccgcccccgcccccgccccactccttcatcaagcaggagcccagctggggcggggccgagccccacgaggagcagtgcctctccgccttcaccgtccacttcagcggccagttcaccggcacggccggggcctgccggtacggccccttcgggccgccgccgccctcccaggccagctccggccaggcccgcatgttccccaacgccccctacctgcccagctgcctggagtcccagcccgccatccggaaccagggctacagcaccgtgaccttcgacgggaccccctcctacggccacacgcccagccaccacgccgcccagttccccaaccactccttcaagcacgaggaccccatggggcagcagggcagcctcggggagcagcagtactccgtgcccccgcccgtctacggctgccacacccccaccgacagctgcaccggcagccaggcgctgctgctccgcacgccctactccagcgacaacctgtaccagatgacctcccagctggagtgcatgacctggaaccagatgaacctcggggccaccctgaagggctga

SEQ ID NO: 3824 - RNA, 750 nt, synthetic construct
  misc_feature 1..750: note = derived and/or modified sequence opt2 fromWT1__Homo_sapiens__BAR92607
  source 1..750: mol_type = other RNA
atgggctccgacgtccgcgacctcaacgccctcctccccgccgtcccctccctcggcggcggcggcggctgcgccctccccgtctccggcgccgcccagtgggcccccgtcctcgacttcgccccccccggcgcctccgcctacggctccctcggcggccccgcccccccccccgccccccccccccccccccccccccccccccactccttcatcaagcaggagccctcctggggcggcgccgagccccacgaggagcagtgcctctccgccttcaccgtccacttctccggccagttcaccggcaccgccggcgcctgccgctacggccccttcggccccccccccccctcccaggcctcctccggccaggcccgcatgttccccaacgccccctacctcccctcctgcctcgagtcccagcccgccatccgcaaccagggctactccaccgtcaccttcgacggcaccccctcctacggccacaccccctcccaccacgccgcccagttccccaaccactccttcaagcacgaggaccccatgggccagcagggctccctcggcgagcagcagtactccgtccccccccccgtctacggctgccacacccccaccgactcctgcaccggctcccaggccctcctcctccgcaccccctactcctccgacaacctctaccagatgacctcccagctcgagtgcatgacctggaaccagatgaacctcggcgccaccctcaagggctga

SEQ ID NO: 3825 - RNA, 750 nt, synthetic construct
  misc_feature 1..750: note = derived and/or modified sequence opt3 fromWT1__Homo_sapiens__BAR92607
  source 1..750: mol_type = other RNA
atgggcagcgacgtgagagatctgaacgccctccttcccgctgtcccttccctgggagggggtggcgggtgcgcattgccagtttctggagccgcgcagtgggctccggtgttagacttcgcaccccctggcgcctcagcctacggtagtctagggggaccagctccccctccagcaccccctccaccgccccctccaccccctcacagctttatcaagcaagagccatcctggggcggcgccgaaccccatgaggaacagtgtctgtctgctttcaccgtacacttttcggggcagttcacaggaactgccggtgcgtgcaggtatggcccgtttgggcctcccccaccttcacaggcaagcagtggacaagcccggatgttccccaatgctccatacctcccctcctgtctggagtctcagcctgccattcgcaaccagggctatagcacggtgacctttgatggtacaccatcctacgggcatactccgtcacaccatgcagctcagttccccaatcacagttttaaacacgaagaccctatgggacaacagggcagccttggcgagcagcagtattctgtcccaccccctgtgtacgggtgccataccccaacagattcctgtaccggatcacaagccctgttgctccgaactccctatagcagtgacaacctgtaccagatgacatctcagctggagtgcatgacctggaatcaaatgaacctcggtgcgacgttaaagggctga

SEQ ID NO: 3826 - RNA, 750 nt, synthetic construct
  misc_feature 1..750: note = derived and/or modified sequence opt4 fromWT1__Homo_sapiens__BAR92607
  source 1..750: mol_type = other RNA
atgggcagcgacgtgagagacctgaacgccctgctgcccgccgtgcccagcctgggcggcggcggcggctgcgccctgcccgtgagcggcgccgcccagtgggcccccgtgctggacttcgccccccccggcgccagcgcctacggcagcctgggcggccccgcccccccccccgccccccccccccccccccccccccccccccacagcttcatcaagcaggagcccagctggggcggcgccgagccccacgaggagcagtgcctgagcgccttcaccgtgcacttcagcggccagttcaccggcaccgccggcgcctgcagatacggccccttcggcccccccccccccagccaggccagcagcggccaggccagaatgttccccaacgccccctacctgcccagctgcctggagagccagcccgccatcagaaaccagggctacagcaccgtgaccttcgacggcacccccagctacggccacacccccagccaccacgccgcccagttccccaaccacagcttcaagcacgaggaccccatgggccagcagggcagcctgggcgagcagcagtacagcgtgcccccccccgtgtacggctgccacacccccaccgacagctgcaccggcagccaggccctgctgctgagaaccccctacagcagcgacaacctgtaccagatgaccagccagctggagtgcatgacctggaaccagatgaacctgggcgccaccctgaagggctga

SEQ ID NO: 3827 - RNA, 750 nt, synthetic construct
  misc_feature 1..750: note = derived and/or modified sequence opt5 fromWT1__Homo_sapiens__BAR92607
  source 1..750: mol_type = other RNA
atgggcagcgacgtgagagatctgaacgccctcctgcccgctgtcccttcccttgggggaggcgggggatgcgccctgccggtttctggcgcggctcagtgggcccccgtgctcgacttcgcccctcccggggctagcgcctacggatccctgggcggccctgctccccctccggcgccccctccccctcccccgcctccccctcactcttttatcaagcaagagcccagctggggaggggccgaaccccatgaggaacagtgtctttccgccttcaccgtgcacttttctggccagttcacagggacggctggagcctgccggtatggcccttttgggccgccccctcccagccaggcttccagcggacaagcccgcatgttccctaatgcgccctacctgccgtcttgtctcgagtcccagcctgccattagaaaccagggctatagcaccgtcacatttgatggcaccccctcttacgggcatacaccttcccaccatgctgcccagttccccaatcacagctttaaacacgaagaccctatgggacaacagggctctctgggggagcagcagtattccgtgcccccgcctgtttacggatgccatacccccacagatagctgtaccggctcccaagctctgctcctgcggacgccctattctagcgacaacctttaccagatgacctcccagctggagtgcatgacatggaatcaaatgaacctcggggccaccctgaagggatga

SEQ ID NO: 3828 - protein, 449 aa, synthetic construct
  REGION 1..449: note = WT1__Homo_sapiens__P19544
MGSDVRDLNALLPAVPSLGGGGGCALPVSGAAQWAPVLDFAPPGASAYGSLGGPAPPPAPPPPPPPPPHSFIKQEPSWGGAEPHEEQCLSAFTVHFSGQFTGTAGACRYGPFGPPPPSQASSGQARMFPNAPYLPSCLESQPAIRNQGYSTVTFDGTPSYGHTPSHHAAQFPNHSFKHEDPMGQQGSLGEQQYSVPPPVYGCHTPTDSCTGSQALLLRTPYSSDNLYQMTSQLECMTWNQMNLGATLKGVAAGSSSSVKWTEGQSNHSTGYESDNHTTPILCGAQYRIHTHGVFRGIQDVRRVPGVAPTLVRSASETSEKRPFMCAYPGCNKRYFKLSHLQMHSRKHTGEKPYQCDFKDCERRFSRSDQLKRHQRRHTGVKPFQCKTCQRKFSRSDHLKTHTRTHTGKTSEKPFSCRWPSCQKKFARSDELVRHHNMHQRNMTKLQLAL

SEQ ID NO: 3829 - RNA, 1350 nt, synthetic construct
  misc_feature 1..1350: note = WT1__Homo_sapiens__AAA61299
  source 1..1350: mol_type = other RNA
atgggctccgacgtgcgggacctgaacgcgctgctgcccgccgtcccctccctgggtggcggcggcggctgtgccctgcctgtgagcggcgcggcgcagtgggcgccggtgctggactttgcgcccccgggcgcttcggcttacgggtcgttgggcggccccgcgccgccaccggctccgccgccacccccgccgccgccgcctcactccttcatcaaacaggagccgagctggggcggcgcggagccgcacgaggagcagtgcctgagcgccttcactgtccacttttccggccagttcactggcacagccggagcctgtcgctacgggcccttcggtcctcctccgcccagccaggcgtcatccggccaggccaggatgtttcctaacgcgccctacctgcccagctgcctcgagagccagcccgctattcgcaatcagggttacagcacggtcaccttcgacgggacgcccagctacggtcacacgccctcgcaccatgcggcgcagttccccaaccactcattcaagcatgaggatcccatgggccagcagggctcgctgggtgagcagcagtactcggtgccgcccccggtctatggctgccacacccccaccgacagctgcaccggcagccaggctttgctgctgaggacgccctacagcagtgacaatttataccaaatgacatcccagcttgaatgcatgacctggaatcagatgaacttaggagccaccttaaagggagttgctgctgggagctccagctcagtgaaatggacagaagggcagagcaaccacagcacagggtacgagagcgataaccacacaacgcccatcctctgcggagcccaatacagaatacacacgcacggtgtcttcagaggcattcaggatgtgcgacgtgtgcctggagtagccccgactcttgtacggtcggcatctgagaccagtgagaaacgccccttcatgtgtgcttacccaggctgcaataagagatattttaagctgtcccacttacagatgcacagcaggaagcacactggtgagaaaccataccagtgtgacttcaaggactgtgaacgaaggttttctcgttcagaccagctcaaaagacaccaaaggagacatacaggtgtgaaaccattccagtgtaaaacttgtcagcgaaagttctcccggtccgaccacctgaagacccacaccaggactcatacaggtaaaacaagtgaaaagcccttcagctgtcggtggccaagttgtcagaaaaagtttgcccggtcagatgaattagtccgccatcacaacatgcatcagagaaacatgaccaaactccagctggcgctttga

SEQ ID NO: 3830 - RNA, 1350 nt, synthetic construct
  misc_feature 1..1350: note = derived and/or modified sequence opt1 fromWT1__Homo_sapiens__AAA61299
  source 1..1350: mol_type = other RNA
atgggcagcgacgtgcgcgacctgaacgccctcctgcccgccgtcccgtccctcgggggcgggggcgggtgcgcgctgcccgtgagcggcgccgcccagtgggcccccgtgctggacttcgcgccgcccggcgcctccgcctacgggagcctgggcgggcccgcgcccccgcccgcgcccccgcccccgcccccgcccccgccccactccttcatcaagcaggagcccagctggggcggggccgagccccacgaggagcagtgcctctccgccttcaccgtccacttcagcggccagttcaccggcacggccggggcctgccggtacggccccttcgggcccccgccgccctcccaggccagctccggccaggcccgcatgttccccaacgccccctacctgcccagctgcctggagtcccagcccgccatccggaaccagggctacagcaccgtgaccttcgacgggaccccctcctacggccacacgcccagccaccacgccgcccagttccccaaccactccttcaagcacgaggaccccatggggcagcagggcagcctcggggagcagcagtactccgtgccgccgcccgtctacggctgccacacccccaccgacagctgcaccggcagccaggcgctgctgctccgcacgccctactccagcgacaacctgtaccagatgacctcccagctggagtgcatgacctggaaccagatgaacctcggggccaccctgaagggcgtggccgccgggagctccagctccgtgaagtggacggagggccagagcaaccactccaccgggtacgagagcgacaaccacaccacccccatcctgtgcggcgcccagtaccggatccacacgcacggcgtcttccgcgggatccaggacgtgcggcgcgtgcccggcgtcgcgcccaccctcgtgcggtccgccagcgagacctccgagaagcgccccttcatgtgcgcctaccccgggtgcaacaagcggtacttcaagctgagccacctccagatgcactcccgcaagcacaccggcgagaagccgtaccagtgcgacttcaaggactgcgagcggcgcttcagccggtccgaccagctgaagcgccaccagcggcgccacacgggggtgaagcccttccagtgcaagacctgccagcggaagttcagccgctccgaccacctgaagacccacacccggacgcacaccggcaagaccagcgagaagcccttcagctgccgctggccctcctgccagaagaagttcgcccgcagcgacgagctggtccggcaccacaacatgcaccagcgcaacatgaccaagctccagctggccctgtga

SEQ ID NO: 3831 - RNA, 1350 nt, synthetic construct
  misc_feature 1..1350: note = derived and/or modified sequence opt2 fromWT1__Homo_sapiens__AAA61299
  source 1..1350: mol_type = other RNA
atgggctccgacgtccgcgacctcaacgccctcctccccgccgtcccctccctcggcggcggcggcggctgcgccctccccgtctccggcgccgcccagtgggcccccgtcctcgacttcgccccccccggcgcctccgcctacggctccctcggcggccccgcccccccccccgccccccccccccccccccccccccccccccactccttcatcaagcaggagccctcctggggcggcgccgagccccacgaggagcagtgcctctccgccttcaccgtccacttctccggccagttcaccggcaccgccggcgcctgccgctacggccccttcggccccccccccccctcccaggcctcctccggccaggcccgcatgttccccaacgccccctacctcccctcctgcctcgagtcccagcccgccatccgcaaccagggctactccaccgtcaccttcgacggcaccccctcctacggccacaccccctcccaccacgccgcccagttccccaaccactccttcaagcacgaggaccccatgggccagcagggctccctcggcgagcagcagtactccgtccccccccccgtctacggctgccacacccccaccgactcctgcaccggctcccaggccctcctcctccgcaccccctactcctccgacaacctctaccagatgacctcccagctcgagtgcatgacctggaaccagatgaacctcggcgccaccctcaagggcgtcgccgccggctcctcctcctccgtcaagtggaccgagggccagtccaaccactccaccggctacgagtccgacaaccacaccacccccatcctctgcggcgcccagtaccgcatccacacccacggcgtcttccgcggcatccaggacgtccgccgcgtccccggcgtcgcccccaccctcgtccgctccgcctccgagacctccgagaagcgccccttcatgtgcgcctaccccggctgcaacaagcgctacttcaagctctcccacctccagatgcactcccgcaagcacaccggcgagaagccctaccagtgcgacttcaaggactgcgagcgccgcttctcccgctccgaccagctcaagcgccaccagcgccgccacaccggcgtcaagcccttccagtgcaagacctgccagcgcaagttctcccgctccgaccacctcaagacccacacccgcacccacaccggcaagacctccgagaagcccttctcctgccgctggccctcctgccagaagaagttcgcccgctccgacgagctcgtccgccaccacaacatgcaccagcgcaacatgaccaagctccagctcgccctctga

SEQ ID NO: 3832 - RNA, 1350 nt, synthetic construct
  misc_feature 1..1350: note = derived and/or modified sequence opt3 fromWT1__Homo_sapiens__AAA61299
  source 1..1350: mol_type = other RNA
atgggcagcgacgtgagagatctgaacgccctccttcccgctgtcccttccctgggagggggtggcgggtgcgcattgccagtttctggagccgcgcagtgggctccggtgttagacttcgcaccccctggcgcctcagcctacggtagtctagggggaccagctccccctccagcaccccctccaccgccccctccaccccctcacagctttatcaagcaagagccatcctggggcggcgccgaaccccatgaggaacagtgtctgtctgctttcaccgtacacttttcggggcagttcacaggaactgccggtgcgtgcaggtatggcccgtttgggcctcccccaccttcacaggcaagcagtggacaagcccggatgttccccaatgctccatacctcccctcctgtctggagtctcagcctgccattcgcaaccagggctatagcacggtgacctttgatggtacaccatcctacgggcatactccgtcacaccatgcagctcagttccccaatcacagttttaaacacgaagaccctatgggacaacagggcagccttggcgagcagcagtattctgtcccaccccctgtgtacgggtgccataccccaacagattcctgtaccggatcacaagccctgttgctccgaactccctatagcagtgacaacctgtaccagatgacatctcagctggagtgcatgacctggaatcaaatgaacctcggtgcgacgttaaagggcgttgccgcagggtccagctcgtctgtgaaatggactgaaggacagtccaatcactcaaccggctacgagagtgataaccatacaactccgatactgtgtggtgctcagtatcgtatccacacccacggggtcttcagaggcattcaggacgtgaggcgggtacctggagttgccccaacacttgtgcgcagcgcttccgaaacctctgagaagagaccctttatgtgcgcctaccctggctgtaataaaaggtatttcaagttgagccatctgcaaatgcactcacggaagcatacgggggagaaaccctaccagtgcgattttaaggactgtgaacgccgattcagtagatccgatcagctaaaaaggcaccagcggcgtcatactggagtcaagccattccaatgcaaaacatgccagcgcaagtttagcagatctgaccacctcaagacccacactaggacacataccggtaaaacgtcagagaagcctttcagttgtcggtggcccagctgccagaaaaagtttgcacgatccgatgaactggtgcgccaccataacatgcaccagagaaatatgaccaaacttcaactggccttgtga

SEQ ID NO: 3833 - RNA, 1350 nt, synthetic construct
  misc_feature 1..1350: note = derived and/or modified sequence opt4 fromWT1__Homo_sapiens__AAA61299
  source 1..1350: mol_type = other RNA
atgggcagcgacgtgagagacctgaacgccctgctgcccgccgtgcccagcctgggcggcggcggcggctgcgccctgcccgtgagcggcgccgcccagtgggcccccgtgctggacttcgccccccccggcgccagcgcctacggcagcctgggcggccccgcccccccccccgccccccccccccccccccccccccccccccacagcttcatcaagcaggagcccagctggggcggcgccgagccccacgaggagcagtgcctgagcgccttcaccgtgcacttcagcggccagttcaccggcaccgccggcgcctgcagatacggccccttcggcccccccccccccagccaggccagcagcggccaggccagaatgttccccaacgccccctacctgcccagctgcctggagagccagcccgccatcagaaaccagggctacagcaccgtgaccttcgacggcacccccagctacggccacacccccagccaccacgccgcccagttccccaaccacagcttcaagcacgaggaccccatgggccagcagggcagcctgggcgagcagcagtacagcgtgcccccccccgtgtacggctgccacacccccaccgacagctgcaccggcagccaggccctgctgctgagaaccccctacagcagcgacaacctgtaccagatgaccagccagctggagtgcatgacctggaaccagatgaacctgggcgccaccctgaagggcgtggccgccggcagcagcagcagcgtgaagtggaccgagggccagagcaaccacagcaccggctacgagagcgacaaccacaccacccccatcctgtgcggcgcccagtacagaatccacacccacggcgtgttcagaggcatccaggacgtgagaagagtgcccggcgtggcccccaccctggtgagaagcgccagcgagaccagcgagaagagacccttcatgtgcgcctaccccggctgcaacaagagatacttcaagctgagccacctgcagatgcacagcagaaagcacaccggcgagaagccctaccagtgcgacttcaaggactgcgagagaagattcagcagaagcgaccagctgaagagacaccagagaagacacaccggcgtgaagcccttccagtgcaagacctgccagagaaagttcagcagaagcgaccacctgaagacccacaccagaacccacaccggcaagaccagcgagaagcccttcagctgcagatggcccagctgccagaagaagttcgccagaagcgacgagctggtgagacaccacaacatgcaccagagaaacatgaccaagctgcagctggccctgtga

SEQ ID NO: 3834 - RNA, 1350 nt, synthetic construct
  misc_feature 1..1350: note = derived and/or modified sequence opt5 fromWT1__Homo_sapiens__AAA61299
  source 1..1350: mol_type = other RNA
atgggcagcgacgtgagagatctgaacgccctcctgcccgctgtcccttcccttgggggaggcgggggatgcgccctgccggtttctggcgcggctcagtgggcccccgtgctcgacttcgcccctcccggggctagcgcctacggatccctgggcggccctgctccccctccggcgccccctccccctcccccgcctccccctcactcttttatcaagcaagagcccagctggggaggggccgaaccccatgaggaacagtgtctttccgccttcaccgtgcacttttctggccagttcacagggacggctggagcctgccggtatggcccttttgggccgccccctcccagccaggcttccagcggacaagcccgcatgttccctaatgcgccctacctgccgtcttgtctcgagtcccagcctgccattagaaaccagggctatagcaccgtcacatttgatggcaccccctcttacgggcatacaccttcccaccatgctgcccagttccccaatcacagctttaaacacgaagaccctatgggacaacagggctctctgggggagcagcagtattccgtgcccccgcctgtttacggatgccatacccccacagatagctgtaccggctcccaagctctgctcctgcggacgccctattctagcgacaacctttaccagatgacctcccagctggagtgcatgacatggaatcaaatgaacctcggggccaccctgaagggagtggccgctggctctagctccagcgtcaaatggacagaaggccagtctaatcacagcaccgggtacgagtccgataaccatacgacacctatcctttgtggagcgcagtatcgcattcacacccacggcgtgttcagagggatccaggacgttcggcgcgtgccgggagtcgcccccacactggtgagatctgctagcgaaacctccgagaagcggccttttatgtgcgcctaccccggctgtaataaacgctatttcaagctcagccatctgcaaatgcactctagaaagcataccggggagaaaccttaccagtgcgattttaaggactgtgaacggcgcttctccagaagcgatcagctgaaacggcaccagcgcagacatacaggcgtgaagcccttccaatgcaaaacgtgccagcggaagttttctagatccgaccacctcaagacccacacacgcacccatacaggaaaaaccagcgagaagcctttctcctgtcggtggccctcttgccagaaaaagtttgccagaagcgatgaactggtccgccaccataacatgcaccagcggaatatgacgaaacttcaactggctctctga

SEQ ID NO: 3835 - protein, 92 aa, synthetic construct
  REGION 1..92: note = WT1__Homo_sapiens__Q06250
MQRRGQPLENHVALIHWQSAGIPASKVHNYCNMKKSRLGRSRAVRISQPLLSPRRCPLHLTERGAGLLQPQPQGPVRTPGPPSGSHPAAADN

SEQ ID NO: 3836 - RNA, 279 nt, synthetic construct
  misc_feature 1..279: note = WT1__Homo_sapiens__AAA63269
  source 1..279: mol_type = other RNA
atgcagaggcgaggacagcccctggaaaaccatgtggcgttgatacactggcaaagcgcaggcatcccggcctcgaaggtgcataattattgcaatatgaaaaaatcgaggctgggtaggagcagggcagtgaggatttctcaacccttactttcaccccggcgctgtccactgcatctgacagagcgcggagctgggctgctacagccgcaaccccagggaccagtgcgcacgcctgggccgccctccgggagtcacccagcggccgcggacaactga

SEQ ID NO: 3837 - RNA, 279 nt, synthetic construct
  misc_feature 1..279: note = derived and/or modified sequence opt1 fromWT1__Homo_sapiens__AAA63269
  source 1..279: mol_type = other RNA
atgcagcgccggggccagcccctggagaaccacgtggccctcatccactggcagagcgccgggatcccggcgtccaaggtccacaactactgcaacatgaagaagtcccgcctgggccggtcccgcgccgtgcggatcagccagcccctgctcagcccccgccggtgccccctgcacctgaccgagcgcggggccggcctcctgcagccgcagccccaggggcccgtgcggacccccggcccgcccagcggctcccaccccgccgccgcggacaactga

SEQ ID NO: 3838 - RNA, 279 nt, synthetic construct
  misc_feature 1..279: note = derived and/or modified sequence opt2 fromWT1__Homo_sapiens__AAA63269
  source 1..279: mol_type = other RNA
atgcagcgccgcggccagcccctcgagaaccacgtcgccctcatccactggcagtccgccggcatccccgcctccaaggtccacaactactgcaacatgaagaagtcccgcctcggccgctcccgcgccgtccgcatctcccagcccctcctctccccccgccgctgccccctccacctcaccgagcgcggcgccggcctcctccagccccagccccagggccccgtccgcacccccggccccccctccggctcccaccccgccgccgccgacaactga

SEQ ID NO: 3839 - RNA, 279 nt, synthetic construct
  misc_feature 1..279: note = derived and/or modified sequence opt3 fromWT1__Homo_sapiens__AAA63269
  source 1..279: mol_type = other RNA
atgcagagaaggggccaacccctggagaaccacgtggccctcatccattggcagagcgctgggattcctgcatccaaggtccacaattactgcaacatgaaaaagtctcggcttggacgctcacgagccgttcgtataagtcagccactgttgagcccgagaaggtgtcccttacatctgaccgaacggggtgcgggcctactccagcctcaaccacaggggcccgtgcgcacacctggaccaccctccggctctcaccctgctgccgcagacaattga

SEQ ID NO: 3840 - RNA, 279 nt, synthetic construct
  misc_feature 1..279: note = derived and/or modified sequence opt4 fromWT1__Homo_sapiens__AAA63269
  source 1..279: mol_type = other RNA
atgcagagaagaggccagcccctggagaaccacgtggccctgatccactggcagagcgccggcatccccgccagcaaggtgcacaactactgcaacatgaagaagagcagactgggcagaagcagagccgtgagaatcagccagcccctgctgagccccagaagatgccccctgcacctgaccgagagaggcgccggcctgctgcagccccagccccagggccccgtgagaacccccggcccccccagcggcagccaccccgccgccgccgacaactga

SEQ ID NO: 3841 - RNA, 279 nt, synthetic construct
  misc_feature 1..279: note = derived and/or modified sequence opt5 fromWT1__Homo_sapiens__AAA63269
  source 1..279: mol_type = other RNA
atgcagagacggggccaacccctggagaaccacgtggccctcatccattggcagagcgctgggattcctgcctccaaggtccacaattactgcaacatgaaaaagtctcgcctgggaagaagccgggcggttcgcatctcccagccgcttctgtctcccagacggtgtcctctccatctgaccgaacgcggcgctgggcttctgcagccccaacctcagggacccgtgagaacacctggcccgcccagcgggtcccaccctgccgccgctgacaattga

SEQ ID NO: 3842 - protein, 81 aa, synthetic construct
  REGION 1..81: note = XAGE1__Homo_sapiens__Q9HD64
MESPKKKNQQLKVGILHLGSRQKKIRIQLRSQCATWKVICKSCISQTPGINLDLGSGVKVKIIPKEEHCKMPEAGEEQPQV

SEQ ID NO: 3843 - RNA, 246 nt, synthetic construct
  misc_feature 1..246: note = XAGE1__Homo_sapiens__AAP35763
  source 1..246: mol_type = other RNA
atggagagccccaaaaagaagaaccagcagctgaaagtcgggatcctacacctgggcagcagacagaagaagatcaggatacagctgagatcccagtgcgcgacatggaaggtgatctgcaagagctgcatcagtcaaacaccggggataaatctggatttgggttccggcgtcaaggtgaagataatacctaaagaggaacactgtaaaatgccagaagcaggtgaagagcaaccacaagtttag

SEQ ID NO: 3844 - RNA, 246 nt, synthetic construct
  misc_feature 1..246: note = derived and/or modified sequence opt1 fromXAGE1__Homo_sapiens__AAP35763
  source 1..246: mol_type = other RNA
atggagagccccaagaagaagaaccagcagctgaaggtgggcatcctccacctggggtcccgccagaagaagatccggatccagctgcgcagccagtgcgccacctggaaggtcatctgcaagtcctgcatcagccagaccccgggcatcaacctcgacctggggtccggcgtgaaggtgaagatcatccccaaggaggagcactgcaagatgcccgaggccggggaggagcagccccaggtctga

SEQ ID NO: 3845 - RNA, 246 nt, synthetic construct
  misc_feature 1..246: note = derived and/or modified sequence opt2 fromXAGE1__Homo_sapiens__AAP35763
  source 1..246: mol_type = other RNA
atggagtcccccaagaagaagaaccagcagctcaaggtcggcatcctccacctcggctcccgccagaagaagatccgcatccagctccgctcccagtgcgccacctggaaggtcatctgcaagtcctgcatctcccagacccccggcatcaacctcgacctcggctccggcgtcaaggtcaagatcatccccaaggaggagcactgcaagatgcccgaggccggcgaggagcagccccaggtctga

SEQ ID NO: 3846 - RNA, 246 nt, synthetic construct
  misc_feature 1..246: note = derived and/or modified sequence opt3 fromXAGE1__Homo_sapiens__AAP35763
  source 1..246: mol_type = other RNA
atggagagccccaagaaaaagaaccagcaactgaaagtgggcatcctccaccttgggtccagacagaagaaaattaggatacagctgcggtctcagtgcgccacctggaaggtcatctgtaagtcatgcattagtcaaacacctggaatcaatttggacttaggtagcggcgttaaagtgaagattatcccaaaagaggaacattgtaagatgccggaagctggggaggaacagccccaggtatga

SEQ ID NO: 3847 - RNA, 246 nt, synthetic construct
  misc_feature 1..246: note = derived and/or modified sequence opt4 fromXAGE1__Homo_sapiens__AAP35763
  source 1..246: mol_type = other RNA
atggagagccccaagaagaagaaccagcagctgaaggtgggcatcctgcacctgggcagcagacagaagaagatcagaatccagctgagaagccagtgcgccacctggaaggtgatctgcaagagctgcatcagccagacccccggcatcaacctggacctgggcagcggcgtgaaggtgaagatcatccccaaggaggagcactgcaagatgcccgaggccggcgaggagcagccccaggtgtga

SEQ ID NO: 3848 - RNA, 246 nt, synthetic construct
  misc_feature 1..246: note = derived and/or modified sequence opt5 fromXAGE1__Homo_sapiens__AAP35763
  source 1..246: mol_type = other RNA
atggagagccccaagaaaaagaaccagcaactgaaagtgggcatcctccacctggggtccagacagaagaaaattcggatccagcttcgctctcagtgcgccacctggaaggtcatttgtaagagctgcatctcccaaacacctggaattaatctggacctcggctctggggttaaagtgaagatcatcccgaaagaggaacattgtaagatgcccgaagctggagaggaacagcctcaggtgtga

SEQ ID NO: 3849 - protein, 254 aa, synthetic construct
  REGION 1..254: note = 4-1BBL__Homo_sapiens__P41273
MEYASDASLDPEAPWPPAPRARACRVLPWALVAGLLLLLLLAAACAVFLACPWAVSGARASPGSAASPRLREGPELSPDDPAGLLDLRQGMFAQLVAQNVLLIDGPLSWYSDPGLAGVSLTGGLSYKEDTKELVVAKAGVYYVFFQLELRRVVAGEGSGSVSLALHLQPLRSAAGAAALALTVDLPPASSEARNSAFGFQGRLLHLSAGQRLGVHLHTEARARHAWQLTQGATVLGLFRVTPEIPAGLPSPRSE

SEQ ID NO: 3850 - RNA, 765 nt, synthetic construct
  misc_feature 1..765: note = 4-1BBL__Homo_sapiens__AAA53134
  source 1..765: mol_type = other RNA
atggaatacgcctctgacgcttcactggaccccgaagccccgtggcctcccgcgccccgcgctcgcgcctgccgcgtactgccttgggccctggtcgcggggctgctgctgctgctgctgctcgctgccgcctgcgccgtcttcctcgcctgcccctgggccgtgtccggggctcgcgcctcgcccggctccgcggccagcccgagactccgcgagggtcccgagctttcgcccgacgatcccgccggcctcttggacctgcggcagggcatgtttgcgcagctggtggcccaaaatgttctgctgatcgatgggcccctgagctggtacagtgacccaggcctggcaggcgtgtccctgacggggggcctgagctacaaagaggacacgaaggagctggtggtggccaaggctggagtctactatgtcttctttcaactagagctgcggcgcgtggtggccggcgagggctcaggctccgtttcacttgcgctgcacctgcagccactgcgctctgctgctggggccgccgccctggctttgaccgtggacctgccacccgcctcctccgaggctcggaactcggccttcggtttccagggccgcttgctgcacctgagtgccggccagcgcctgggcgtccatcttcacactgaggccagggcacgccatgcctggcagcttacccagggcgccacagtcttgggactcttccgggtgacccccgaaatcccagccggactcccttcaccgaggtcggaataa

SEQ ID NO: 3851 - RNA, 765 nt, synthetic construct
  misc_feature 1..765: note = derived and/or modified sequence opt1 from4-1BBL__Homo_sapiens__AAA53134
  source 1..765: mol_type = other RNA
atggagtacgccagcgacgcctccctggaccccgaggcgccgtggccgcccgcgccccgcgcccgggcctgccgcgtgctcccctgggccctggtcgccggcctgctcctgctgctcctgctggccgccgcctgcgcggtgttcctcgcctgcccctgggccgtgagcggggcccgggcctcccccggcagcgcggccagcccccgcctgcgggaggggccggagctgtcccccgacgaccccgccggcctcctggacctgcgccaggggatgttcgcccagctcgtcgcccagaacgtgctgctgatcgacggccccctctcctggtacagcgacccgggcctggcgggggtgtccctgaccggcgggctcagctacaaggaggacaccaaggagctggtcgtggccaaggccggcgtgtactacgtcttcttccagctggagctccggcgcgtggtggccggggagggctccggcagcgtctccctggccctgcacctccagcccctgcggagcgcggccggggccgccgccctggcgctcacggtggacctgccgcccgcctccagcgaggcccgcaactccgccttcggcttccaggggcggctgctccacctgagcgcgggccagcgcctgggcgtgcacctccacaccgaggcccgggcccgccacgcctggcagctgacccagggggccaccgtcctgggcctcttccgggtgacgcccgagatccccgcggggctgcccagcccccgctccgagtga

SEQ ID NO: 3852 - RNA, 765 nt, synthetic construct
  misc_feature 1..765: note = derived and/or modified sequence opt2 from4-1BBL__Homo_sapiens__AAA53134
  source 1..765: mol_type = other RNA
atggagtacgcctccgacgcctccctcgaccccgaggccccctggccccccgccccccgcgcccgcgcctgccgcgtcctcccctgggccctcgtcgccggcctcctcctcctcctcctcctcgccgccgcctgcgccgtcttcctcgcctgcccctgggccgtctccggcgcccgcgcctcccccggctccgccgcctccccccgcctccgcgagggccccgagctctcccccgacgaccccgccggcctcctcgacctccgccagggcatgttcgcccagctcgtcgcccagaacgtcctcctcatcgacggccccctctcctggtactccgaccccggcctcgccggcgtctccctcaccggcggcctctcctacaaggaggacaccaaggagctcgtcgtcgccaaggccggcgtctactacgtcttcttccagctcgagctccgccgcgtcgtcgccggcgagggctccggctccgtctccctcgccctccacctccagcccctccgctccgccgccggcgccgccgccctcgccctcaccgtcgacctcccccccgcctcctccgaggcccgcaactccgccttcggcttccagggccgcctcctccacctctccgccggccagcgcctcggcgtccacctccacaccgaggcccgcgcccgccacgcctggcagctcacccagggcgccaccgtcctcggcctcttccgcgtcacccccgagatccccgccggcctcccctccccccgctccgagtga

SEQ ID NO: 3853 - RNA, 765 nt, synthetic construct
  misc_feature 1..765: note = derived and/or modified sequence opt3 from4-1BBL__Homo_sapiens__AAA53134
  source 1..765: mol_type = other RNA
atggagtacgccagcgacgcttccctggatcccgaagcaccttggccaccggcccccagagcgagggcttgccgggtgctcccttgggcccttgtcgcaggcctgttgttactgctactcctggccgctgcatgtgccgttttccttgcttgcccatgggccgtgtctggggcgcgcgcatcacccggaagtgccgctagccctcgactgcgtgagggtccagaattgtcccccgacgatcctgccggcctcctggacctgagacaggggatgtttgcacaactcgtagctcagaacgtgttactgatcgatggaccactttcttggtattcggacccgggcttggccggtgtctcactgaccgggggactaagctacaaggaggatacaaaagaactcgtggttgcgaaggccggcgtgtattacgtcttctttcagctggagcttaggcgggtggtagcaggcgaggggagtggatccgtttctctggctttgcacctccagcccctgcgcagcgccgctggtgccgcagccttagctctgactgtggacctccctccagcgtcctcagaagcaagaaatagtgccttcggctttcaagggaggcttctgcatttgagcgctggacagcggctaggcgtccatctgcacacggaggcccgcgcacgacacgcctggcagctcacccagggtgctacagtgctggggcttttcagagtgactcccgaaattcctgccggactgccatctcccaggtccgagtga

SEQ ID NO: 3854 - RNA, 765 nt, synthetic construct
  misc_feature 1..765: note = derived and/or modified sequence opt4 from4-1BBL__Homo_sapiens__AAA53134
  source 1..765: mol_type = other RNA
atggagtacgccagcgacgccagcctggaccccgaggccccctggccccccgcccccagagccagagcctgcagagtgctgccctgggccctggtggccggcctgctgctgctgctgctgctggccgccgcctgcgccgtgttcctggcctgcccctgggccgtgagcggcgccagagccagccccggcagcgccgccagccccagactgagagagggccccgagctgagccccgacgaccccgccggcctgctggacctgagacagggcatgttcgcccagctggtggcccagaacgtgctgctgatcgacggccccctgagctggtacagcgaccccggcctggccggcgtgagcctgaccggcggcctgagctacaaggaggacaccaaggagctggtggtggccaaggccggcgtgtactacgtgttcttccagctggagctgagaagagtggtggccggcgagggcagcggcagcgtgagcctggccctgcacctgcagcccctgagaagcgccgccggcgccgccgccctggccctgaccgtggacctgccccccgccagcagcgaggccagaaacagcgccttcggcttccagggcagactgctgcacctgagcgccggccagagactgggcgtgcacctgcacaccgaggccagagccagacacgcctggcagctgacccagggcgccaccgtgctgggcctgttcagagtgacccccgagatccccgccggcctgcccagccccagaagcgagtga

SEQ ID NO: 3855 - RNA, 765 nt, synthetic construct
  misc_feature 1..765: note = derived and/or modified sequence opt5 from4-1BBL__Homo_sapiens__AAA53134
  source 1..765: mol_type = other RNA
atggagtacgccagcgacgcttccctggatcccgaagccccttggccgcccgcgcctagagctcgggcctgccgcgtgctcccctgggccctggtcgctggccttctgctcctgcttctgctcgccgctgcctgtgcggttttcctggcctgcccttgggctgtgtctggggccagagctagccccggatccgccgcgtctcctcggctgcgcgagggcccggaactcagccccgacgatcctgccgggctgcttgacctgagacagggaatgtttgctcaactcgtggcccagaacgtcctgcttatcgatggccccctgtcctggtattctgaccctgggctcgctggagtgagcctgaccggcggcctgtcctacaaggaggatacaaaagaactcgttgtggccaaggccggggtctattacgtgttctttcagctggagcttcggcgcgttgtggctggagagggcagcgggtctgtctccctggcgctccatctgcagccccttagaagcgccgctggagccgccgctctggccctcacggtggacctgccgcctgcgtcttccgaagctcggaatagcgccttcggctttcaagggcgcctgctccacctgtctgccggacagagacttggcgtgcatctgcacaccgaggctcgggcccgccacgcttggcagctcacacagggcgccaccgtcctggggcttttcagagttacacccgaaattcctgcgggactgcccagcccccggtccgagtga

SEQ ID NO: 3856 - RNA, 765 nt, synthetic construct
  misc_feature 1..765: note = derived and/or modified sequence opt6 from4-1BBL__Homo_sapiens__AAA53134
  source 1..765: mol_type = other RNA
atggaatacgcatcagatgcatcactagatccagaagcaccatggcctccagctccaagagcaagagcctgtagagtactaccatgggcattagttgcaggattattactattattattactagcagcagcatgcgcagtatttctagcatgtccatgggctgtttctggagctagagcaagcccgggctcagcagcaagccctagattaagagaaggaccagaattaagcccagatgatccagcaggattacttgatttaagacaaggtatgtttgcacaactagtagctcaaaatgtattactaatagatggaccactaagttggtattcagatccaggattagcaggagtaagtctaacaggtggattaagttataaagaagacacaaaagaactagtagtcgcaaaagcgggagtatactatgtatttttccaattagagttaagaagagttgtagcgggcgaaggatcaggatcagtatcattagctttacatctacaaccactaagatcagccgctggcgcagctgcattagcactcacagtagatcttccaccagcaagttcagaagcaagaaatagtgcattcggattccaaggaagattattacatcttagcgcgggacaacgattaggtgtacacttacacacagaagcacgagcaagacatgcatggcaattaacacaaggagcaacagtattaggactatttagagtaaccccagaaataccagcaggattaccctcaccaagatcagaataa

SEQ ID NO: 3857 - protein, 250 aa, synthetic construct [sequence omitted]

SEQ ID NO: 3858 - RNA, 753 nt, synthetic construct
  misc_feature 1..753: note = APRIL__Homo_sapiens__AAC61312
  source 1..753: mol_type = other RNA
atgccagcctcatctcctttcttgctagcccccaaagggcctccaggcaacatggggggcccagtcagagagccggcactctcagttgccctctggttgagttggggggcagctctgggggccgtggcttgtgccatggctctgctgacccaacaaacagagctgcagagcctcaggagagaggtgagccggctgcaggggacaggaggcccctcccagaatggggaagggtatccctggcagagtctcccggagcagagttccgatgccctggaagcctgggagaatggggagagatcccggaaaaggagagcagtgctcacccaaaaacagaagaagcagcactctgtcctgcacctggttcccattaacgccacctccaaggatgactccgatgtgacagaggtgatgtggcaaccagctcttaggcgtgggagaggcctacaggcccaaggatatggtgtccgaatccaggatgctggagtttatctgctgtatagccaggtcctgtttcaagacgtgactttcaccatgggtcaggtggtgtctcgagaaggccaaggaaggcaggagactctattccgatgtataagaagtatgccctcccacccggaccgggcctacaacagctgctatagcgcaggtgtcttccatttacaccaaggggatattctgagtgtcataattccccgggcaagggcgaaacttaacctctctccacatggaaccttcctggggtttgtgaaactgtga

SEQ ID NO: 3859 - RNA, 753 nt, synthetic construct
  misc_feature 1..753: note = derived and/or modified sequence opt1 fromAPRIL__Homo_sapiens__AAC61312
  source 1..753: mol_type = other RNA
atgcccgccagctccccgttcctgctcgcccccaagggcccgcccgggaacatgggcgggcccgtgcgcgagcccgcgctgagcgtcgccctgtggctctcctggggcgccgccctgggggccgtggcgtgcgccatggccctgctcacccagcagaccgagctgcagagcctgcggcgcgaggtgtcccggctccagggcacgggcgggcccagccagaacggcgaggggtacccctggcagtccctgccggagcagagctccgacgccctggaggcgtgggagaacggcgagcgcagccggaagcgccgggccgtcctcacccagaagcagaagaagcagcactccgtgctgcacctggtgcccatcaacgccaccagcaaggacgactccgacgtcaccgaggtgatgtggcagcccgccctccgccgggggcgcggcctgcaggcccagggctacggggtgcggatccaggacgcgggcgtctacctgctctacagccaggtgctgttccaggacgtgacgttcaccatggggcaggtcgtgtcccgcgagggccagggccggcaggagaccctgttccgctgcatccggagcatgccctcccacccggaccgcgcctacaacagctgctactccgccggggtgttccacctccaccagggcgacatcctgagcgtcatcatcccccgggcccgcgccaagctgaacctcagcccccacgggaccttcctgggcttcgtgaagctgtga

SEQ ID NO: 3860 - RNA, 753 nt, synthetic construct
  misc_feature 1..753: note = derived and/or modified sequence opt2 fromAPRIL__Homo_sapiens__AAC61312
  source 1..753: mol_type = other RNA
atgcccgcctcctcccccttcctcctcgcccccaagggcccccccggcaacatgggcggccccgtccgcgagcccgccctctccgtcgccctctggctctcctggggcgccgccctcggcgccgtcgcctgcgccatggccctcctcacccagcagaccgagctccagtccctccgccgcgaggtctcccgcctccagggcaccggcggcccctcccagaacggcgagggctacccctggcagtccctccccgagcagtcctccgacgccctcgaggcctgggagaacggcgagcgctcccgcaagcgccgcgccgtcctcacccagaagcagaagaagcagcactccgtcctccacctcgtccccatcaacgccacctccaaggacgactccgacgtcaccgaggtcatgtggcagcccgccctccgccgcggccgcggcctccaggcccagggctacggcgtccgcatccaggacgccggcgtctacctcctctactcccaggtcctcttccaggacgtcaccttcaccatgggccaggtcgtctcccgcgagggccagggccgccaggagaccctcttccgctgcatccgctccatgccctcccaccccgaccgcgcctacaactcctgctactccgccggcgtcttccacctccaccagggcgacatcctctccgtcatcatcccccgcgcccgcgccaagctcaacctctccccccacggcaccttcctcggcttcgtcaagctctga

SEQ ID NO: 3861 - RNA, 753 nt, synthetic construct
  misc_feature 1..753: note = derived and/or modified sequence opt3 fromAPRIL__Homo_sapiens__AAC61312
  source 1..753: mol_type = other RNA
atgcccgccagctcccctttcctgctcgctccaaagggcccgcccgggaacatgggaggtcctgtgagagagccagcactttctgtcgccctgtggttgtcatggggcgcggctttaggggccgttgcatgcgccatggctctgctaacccagcaaacagaactccagagtctgaggcgggaggtgagccgccttcagggaactggcggtccctcccagaatggggaaggatacccttggcaatctctgccagagcagtcgtcagacgcattggaagcctgggagaacggcgagcgaagccgtaaaagaagggctgtactcacgcagaagcagaaaaagcaacacagtgtgctgcatctggtccccatcaatgccacctccaaagatgactctgatgtgacagaagttatgtggcagcctgcgctccggcgcggcagagggttacaggcacagggatatggtgtgaggattcaagacgccggcgtctacctgctttatagccaggtgttgtttcaggatgtaactttcaccatggggcaagttgtgtcccgggagggacagggccgccaggaaacactgtttcgatgtataagatcaatgccaagtcacccggacagggcttacaacagctgctattctgccggtgtcttccatctacaccagggggatatcctctccgtgattatcccccgggcacgtgctaagctgaatctttcacctcatggaacctttctgggcttcgtgaagttgtga

SEQ ID NO: 3862 - RNA, 753 nt, synthetic construct
  misc_feature 1..753: note = derived and/or modified sequence opt4 fromAPRIL__Homo_sapiens__AAC61312
  source 1..753: mol_type = other RNA
atgcccgccagcagccccttcctgctggcccccaagggcccccccggcaacatgggcggccccgtgagagagcccgccctgagcgtggccctgtggctgagctggggcgccgccctgggcgccgtggcctgcgccatggccctgctgacccagcagaccgagctgcagagcctgagaagagaggtgagcagactgcagggcaccggcggccccagccagaacggcgagggctacccctggcagagcctgcccgagcagagcagcgacgccctggaggcctgggagaacggcgagagaagcagaaagagaagagccgtgctgacccagaagcagaagaagcagcacagcgtgctgcacctggtgcccatcaacgccaccagcaaggacgacagcgacgtgaccgaggtgatgtggcagcccgccctgagaagaggcagaggcctgcaggcccagggctacggcgtgagaatccaggacgccggcgtgtacctgctgtacagccaggtgctgttccaggacgtgaccttcaccatgggccaggtggtgagcagagagggccagggcagacaggagaccctgttcagatgcatcagaagcatgcccagccaccccgacagagcctacaacagctgctacagcgccggcgtgttccacctgcaccagggcgacatcctgagcgtgatcatccccagagccagagccaagctgaacctgagcccccacggcaccttcctgggcttcgtgaagctgtga

SEQ ID NO: 3863 - RNA, 753 nt, synthetic construct
  misc_feature 1..753: note = derived and/or modified sequence opt5 fromAPRIL__Homo_sapiens__AAC61312
  source 1..753: mol_type = other RNA
atgcccgccagctcccctttcctgctcgctccgaaggggccccctgggaacatgggaggccccgtgagagagcctgccctgtctgtcgcgctttggctgagctggggcgctgccctcggagccgttgcttgcgccatggctctgcttacccagcaaacagaactgcagtccctccggcgcgaggtgtctagactgcagggcaccgggggacccagccagaatggcgaaggctacccttggcaatccctgccggagcagtctagcgacgccctcgaagcgtgggagaacggggagcggtcccgcaaaagacgggccgtgctgacgcagaagcagaaaaagcaacacagcgtccttcatctggtgcccatcaatgctacatctaaagatgactccgatgttaccgaagtgatgtggcagcctgccctccgcagaggacggggcctgcaggctcaggggtatggagtccgcattcaagacgccggcgtgtaccttctgtatagccaggttctctttcaggatgtgacattcaccatggggcaagtcgtgtctagagagggacagggccggcaggaaacactgtttcgctgtatcagatccatgcccagccaccctgaccgggcgtacaactcttgctattccgccggcgtgttccatctgcaccagggggatattctcagcgtcatcattccccgcgctagagccaagctgaatctttccccgcatggaacctttctgggcttcgttaagctctga

SEQ ID NO: 3864 - RNA, 753 nt, synthetic construct
  misc_feature 1..753: note = derived and/or modified sequence opt6 fromAPRIL__Homo_sapiens__AAC61312
  source 1..753: mol_type = other RNA
atgccagcatcaagcccatttttattagcaccaaaaggaccaccaggaaatatgggaggaccagtaagagaaccagcattatcagtagcattatggttatcgtggggagcagcattaggagcagtagcatgcgcaatggcattattaacacaacaaacagaattacaaagcttaagaagagaagtatcaagattacaaggaaccggaggaccaagccaaaacggagaagggtacccctggcaatcattaccagaacaatcatcagatgcattagaagcatgggaaaatggagaaagatcaagaaaaagaagagcagtattaacacaaaaacaaaaaaaacaacatagtgtattacatctcgtaccaataaatgcaacatcaaaagatgattcagacgtaacagaagtaatgtggcaaccagcactaagaagaggaagaggattacaagcacaagggtacggagtaagaatacaagatgcaggagtatatttattatattcacaagtactatttcaagatgtaactttcacaatgggacaagtagtatcaagagaaggacaaggacgacaagaaacattatttagatgcataagatcaatgccatcacacccagacagagcatacaattcatgttattcagcaggagtatttcacttacaccaaggagatatattaagtgtaataataccaagagcaagagcaaaattaaatctatcaccacacggaacattcttaggatttgtaaaattataa

SEQ ID NO: 3865 - protein, 184 aa, synthetic construct
  REGION 1..184: note = BAFF__Homo_sapiens__Q5H8V1
MRRGPRSLRGRDAPAPTPCVPAECFDLLVRHCVACGLLRTPRPKPAGASSPAPRTALQPQESVGAGAGEAALPLPGLLFGAPALLGLALVLALVLVGLVSWRRRQRRLRGASSAEAPDGDKDAPEPLDKVIILSPGISDATAPAWPPPGEDPGTTPPGHSVPVPATELGSTELVTTKTAGPEQQ

SEQ ID NO: 3866 - RNA, 555 nt, synthetic construct
  misc_feature 1..555: note = BAFF__Homo_sapiens__AAI05124
  source 1..555: mol_type = other RNA
atgaggcgagggccccggagcctgcggggcagggacgcgccagcccccacgccctgcgtcccggccgagtgcttcgacctgctggtccgccactgcgtggcctgcgggctcctgcgcacgccgcggccgaaaccggccggggccagcagccctgcgcccaggacggcgctgcagccgcaggagtcggtgggcgcgggggccggcgaggcggcgctgcccctgcccgggctgctctttggcgcccccgcgctgctgggcctggcactggtcctggcgctggtcctggtgggtctggtgagctggaggcggcgacagcggcggcttcgcggcgcgtcctccgcagaggcccccgacggagacaaggacgccccagagcccctggacaaggtcatcattctgtctccgggaatctctgatgccacagctcctgcctggcctcctcctggggaagacccaggaaccaccccacctggccacagtgtccctgtgccagccacagagctgggctccactgaactggtgaccaccaagacggccggccctgagcaacaatag

SEQ ID NO: 3867 - RNA, 555 nt, synthetic construct
  misc_feature 1..555: note = derived and/or modified sequence opt1 fromBAFF__Homo_sapiens__AAI05124
  source 1..555: mol_type = other RNA
atgcgccggggcccccgcagcctgcgggggcgcgacgccccggcccccaccccctgcgtgcccgcggagtgcttcgacctcctggtccggcactgcgtggcctgcggcctgctccgcaccccgcggcccaagcccgccggggcctccagccccgccccgcgcacggcgctgcagccccaggagtccgtgggcgccggggccggcgaggccgcgctgcccctccccggcctgctgttcggggccccggccctcctgggcctggccctcgtcctggccctggtgctcgtggggctggtcagctggcggcgccggcagcgccggctgcgcggcgcgtccagcgccgaggcccccgacggggacaaggacgcccccgagcccctcgacaaggtgatcatcctgtccccgggcatcagcgacgccaccgcgcccgcctggcccccgcccggcgaggaccccgggaccaccccgcccggccactccgtgcccgtccccgccacggagctggggagcaccgagctcgtgaccaccaagacggccggccccgagcagcagtga

SEQ ID NO: 3868 - RNA, 555 nt, synthetic construct
  misc_feature 1..555: note = derived and/or modified sequence opt2 fromBAFF__Homo_sapiens__AAI05124
  source 1..555: mol_type = other RNA
atgcgccgcggcccccgctccctccgcggccgcgacgcccccgcccccaccccctgcgtccccgccgagtgcttcgacctcctcgtccgccactgcgtcgcctgcggcctcctccgcaccccccgccccaagcccgccggcgcctcctcccccgccccccgcaccgccctccagccccaggagtccgtcggcgccggcgccggcgaggccgccctccccctccccggcctcctcttcggcgcccccgccctcctcggcctcgccctcgtcctcgccctcgtcctcgtcggcctcgtctcctggcgccgccgccagcgccgcctccgcggcgcctcctccgccgaggcccccgacggcgacaaggacgcccccgagcccctcgacaaggtcatcatcctctcccccggcatctccgacgccaccgcccccgcctggcccccccccggcgaggaccccggcaccaccccccccggccactccgtccccgtccccgccaccgagctcggctccaccgagctcgtcaccaccaagaccgccggccccgagcagcagtga

SEQ ID NO: 3869 - RNA, 555 nt, synthetic construct
  misc_feature 1..555: note = derived and/or modified sequence opt3 fromBAFF__Homo_sapiens__AAI05124
  source 1..555: mol_type = other RNA
atgagaaggggcccccggagcctgcgcgggcgagacgcccctgctccaaccccgtgcgtgcccgcagagtgtttcgatctccttgtccgtcactgcgttgcctgtggactgttgagaacacctaggccaaagcccgcgggtgcttcctctcctgccccacggactgcattacagccccaagaatcagtgggcgccggggctggagaggcagccctgcctctaccaggcctcctgtttggtgctccggcccttctggggttggcgctcgtactggcactggtgctcgtcggattagtgagttggcgcagaaggcagcggcgcctgcgaggcgccagctccgctgaagcccccgacggcgataaagacgcacctgagccacttgataaggttatcattttgtctcccgggatatcggacgctacggcccctgcgtggccacccccgggagaagatcctggtaccacacccccaggccattcagtgcctgtccccgccactgagctggggagcaccgagctagtgacaaccaaaactgcaggaccagaacagcagtga

SEQ ID NO: 3870 - RNA, 555 nt, synthetic construct
  misc_feature 1..555: note = derived and/or modified sequence opt4 fromBAFF__Homo_sapiens__AAI05124
  source 1..555: mol_type = other RNA
atgagaagaggccccagaagcctgagaggcagagacgcccccgcccccaccccctgcgtgcccgccgagtgcttcgacctgctggtgagacactgcgtggcctgcggcctgctgagaacccccagacccaagcccgccggcgccagcagccccgcccccagaaccgccctgcagccccaggagagcgtgggcgccggcgccggcgaggccgccctgcccctgcccggcctgctgttcggcgcccccgccctgctgggcctggccctggtgctggccctggtgctggtgggcctggtgagctggagaagaagacagagaagactgagaggcgccagcagcgccgaggcccccgacggcgacaaggacgcccccgagcccctggacaaggtgatcatcctgagccccggcatcagcgacgccaccgcccccgcctggcccccccccggcgaggaccccggcaccaccccccccggccacagcgtgcccgtgcccgccaccgagctgggcagcaccgagctggtgaccaccaagaccgccggccccgagcagcagtga

SEQ ID NO: 3871 - RNA, 555 nt, synthetic construct
  misc_feature 1..555: note = derived and/or modified sequence opt5 fromBAFF__Homo_sapiens__AAI05124
  source 1..555: mol_type = other RNA
atgagacggggcccccgcagcctgagagggcgggacgcccctgctccgaccccctgcgtgcctgccgagtgtttcgatctcctggtccgccactgcgttgcgtgtggacttctgagaacaccccggcctaagcccgctggcgcctcctctcctgccccgcgcacggctctccagccccaagaaagcgtgggggccggagctggcgaggccgcgctgcctcttcccgggctgctctttggagcccctgctctgctgggcctcgccctggtgcttgctctggtcctcgtgggcctggtttcctggagacggcgccagagacggcttcgcggggcctctagcgcggaagcccccgacggagataaagacgctccggagcctctggataaggtgatcattctctcccccggcatctctgacgccaccgctcctgcctggccccctcccggggaagatccgggaacaacaccccctggccatagcgtccccgtgcctgccaccgagctggggtccaccgagctggttacaaccaaaacggctggacccgaacagcagtga

SEQ ID NO: 3872 - RNA, 555 nt, synthetic construct
  misc_feature 1..555: note = derived and/or modified sequence opt6 fromBAFF__Homo_sapiens__AAI05124
  source 1..555: mol_type = other RNA
atgagaagaggaccaagatcattaagaggaagagatgcaccagcaccaacaccatgtgtaccagcagaatgtttcgatctattagtaagacattgtgtagcatgtggattattaagaacaccaagaccaaaaccagcaggagcatcatcaccagcaccaagaacagcattacaaccacaagaatcagtaggagctggagccggagaagcagcattaccactaccaggattattatttggagcacccgcattattaggattagcattagtactagcattagtattagttggtttagtatcatggagaagaagacaaagaagattaagaggagcttcatcagcagaagcacctgatggagataaagatgcaccagaaccattagataaagtaataatattatcaccaggaataagtgatgcaacagcaccagcatggccaccaccaggagaagatccaggaacaacaccaccaggccatagcgtaccagtaccagcaacagaattaggatcaacagaactagtaacaacaaaaacagcaggaccagaacaacaataa

SEQ ID NO: 3873 - protein, 285 aa, synthetic construct
  REGION 1..285: note = BAFF__Homo_sapiens__Q9Y275
MDDSTEREQSRLTSCLKKREEMKLKECVSILPRKESPSVRSSKDGKLLAATLLLALLSCCLTVVSFYQVAALQGDLASLRAELQGHHAEKLPAGAGAPKAGLEEAPAVTAGLKIFEPPAPGEGNSSQNSRNKRAVQGPEETVTQDCLQLIADSETPTIQKGSYTFVPWLLSFKRGSALEEKENKILVKETGYFFIYGQVLYTDKTYAMGHLIQRKKVHVFGDELSLVTLFRCIQNMPETLPNNSCYSAGIAKLEEGDELQLAIPRENAQISLDGDVTFFGALKLL

SEQ ID NO: 3874 - RNA, 858 nt, synthetic construct
  misc_feature 1..858: note = BAFF__Homo_sapiens__AAD21092
  source 1..858: mol_type = other RNA
atggatgactccacagaaagggagcagtcacgccttacttcttgccttaagaaaagagaagaaatgaaactgaaggagtgtgtttccatcctcccacggaaggaaagcccctctgtccgatcctccaaagacggaaagctgctggctgcaaccttgctgctggcactgctgtcttgctgcctcacggtggtgtctttctaccaggtggccgccctgcaaggggacctggccagcctccgggcagagctgcagggccaccacgcggagaagctgccagcaggagcaggagcccccaaggccggcctggaggaagctccagctgtcaccgcgggactgaaaatctttgaaccaccagctccaggagaaggcaactccagtcagaacagcagaaataagcgtgccgttcagggtccagaagaaacagtcactcaagactgcttgcaactgattgcagacagtgaaacaccaactatacaaaaaggatcttacacatttgttccatggcttctcagctttaaaaggggaagtgccctagaagaaaaagagaataaaatattggtcaaagaaactggttacttttttatatatggtcaggttttatatactgataagacctacgccatgggacatctaattcagaggaagaaggtccatgtctttggggatgaattgagtctggtgactttgtttcgatgtattcaaaatatgcctgaaacactacccaataattcctgctattcagctggcattgcaaaactggaagaaggagatgaactccaacttgcaataccaagagaaaatgcacaaatatcactggatggagatgtcacattttttggtgcattgaaactgctgtga

SEQ ID NO: 3875 - RNA, 858 nt, synthetic construct
  misc_feature 1..858: note = derived and/or modified sequence opt1 fromBAFF__Homo_sapiens__AAD21092
  source 1..858: mol_type = other RNA
atggacgacagcaccgagcgcgagcagtcccggctgaccagctgcctcaagaagcgcgaggagatgaagctgaaggagtgcgtgtccatcctgccccggaaggagagcccgtccgtccgcagctccaaggacggcaagctcctggccgccacgctgctcctggcgctgctcagctgctgcctgaccgtggtgtccttctaccaggtcgccgccctgcagggggacctcgccagcctgcgggccgagctgcagggccaccacgcggagaagctccccgccggggccggcgcccccaaggcggggctggaggaggcccccgccgtgaccgccggcctgaagatcttcgagccgcccgcccccggcgaggggaactccagccagaactcccgcaacaagcgggcggtgcagggccccgaggagaccgtcacgcaggactgcctccagctgatcgccgacagcgagaccccgaccatccagaaggggtcctacaccttcgtgccctggctgctcagcttcaagcgcggctccgccctggaggagaaggagaacaagatcctggtgaaggagacggggtacttcttcatctacggccaggtcctctacaccgacaagacctacgccatgggccacctgatccagcggaagaaggtgcacgtgttcggggacgagctgagcctcgtcaccctgttccgctgcatccagaacatgcccgagacgctgcccaacaactcctgctacagcgccggcatcgcgaagctcgaggagggggacgagctgcagctggccatcccgcgggagaacgcccagatcagcctcgacggcgacgtgaccttcttcggcgccctgaagctgctctga

SEQ ID NO: 3876 - RNA, 858 nt, synthetic construct
  misc_feature 1..858: note = derived and/or modified sequence opt2 fromBAFF__Homo_sapiens__AAD21092
  source 1..858: mol_type = other RNA
atggacgactccaccgagcgcgagcagtcccgcctcacctcctgcctcaagaagcgcgaggagatgaagctcaaggagtgcgtctccatcctcccccgcaaggagtccccctccgtccgctcctccaaggacggcaagctcctcgccgccaccctcctcctcgccctcctctcctgctgcctcaccgtcgtctccttctaccaggtcgccgccctccagggcgacctcgcctccctccgcgccgagctccagggccaccacgccgagaagctccccgccggcgccggcgcccccaaggccggcctcgaggaggcccccgccgtcaccgccggcctcaagatcttcgagccccccgcccccggcgagggcaactcctcccagaactcccgcaacaagcgcgccgtccagggccccgaggagaccgtcacccaggactgcctccagctcatcgccgactccgagacccccaccatccagaagggctcctacaccttcgtcccctggctcctctccttcaagcgcggctccgccctcgaggagaaggagaacaagatcctcgtcaaggagaccggctacttcttcatctacggccaggtcctctacaccgacaagacctacgccatgggccacctcatccagcgcaagaaggtccacgtcttcggcgacgagctctccctcgtcaccctcttccgctgcatccagaacatgcccgagaccctccccaacaactcctgctactccgccggcatcgccaagctcgaggagggcgacgagctccagctcgccatcccccgcgagaacgcccagatctccctcgacggcgacgtcaccttcttcggcgccctcaagctcctctga

SEQ ID NO: 3877 - RNA, 858 nt, synthetic construct
  misc_feature 1..858: note = derived and/or modified sequence opt3 fromBAFF__Homo_sapiens__AAD21092
  source 1..858: mol_type = other RNA
atggacgatagcaccgagagagaacagtccaggctgacatcttgcctcaagaaacgggaggaaatgaaacttaaggagtgtgtgtcaatcctgccccgcaaggaaagtcctagcgtccgatcctctaaagacggcaagttgttagccgctactctgctactcgcactgctttcgtgctgtctgacggttgtgtcattctaccaagtagccgcgttgcagggggatctcgctagcctgcgtgccgagctgcagggacaccatgcagagaagctcccagccggtgctggcgcaccgaaagccgggttagaagaggctcccgccgtgaccgcgggactgaagatttttgaacctccagcacccggcgagggtaacagttcccaaaattctagaaacaaaagggccgtccaggggcctgaggaaacagtgactcaggactgccttcagttgatagctgatagcgagaccccaacaatccagaagggatcctataccttcgttccctggctgctatcatttaaacggggcagtgccctcgaagagaaggaaaataagattctggtgaaagagactggctacttctttatctatgggcaagtcctttacacagacaagacctatgcaatgggacacctgattcagcgcaaaaaggtgcatgtattcggtgatgagttgagcctcgttacgctgtttagatgtatccagaacatgcctgaaactttaccaaataactcttgctactccgctggcatagccaaactggaggaaggggacgagctccagcttgcgatcccgagggaaaatgcccaaatttcactggatggagacgtgaccttctttggcgcattgaagctactgtga

SEQ ID NO: 3878 - RNA, 858 nt, synthetic construct
  misc_feature 1..858: note = derived and/or modified sequence opt4 fromBAFF__Homo_sapiens__AAD21092
  source 1..858: mol_type = other RNA
atggacgacagcaccgagagagagcagagcagactgaccagctgcctgaagaagagagaggagatgaagctgaaggagtgcgtgagcatcctgcccagaaaggagagccccagcgtgagaagcagcaaggacggcaagctgctggccgccaccctgctgctggccctgctgagctgctgcctgaccgtggtgagcttctaccaggtggccgccctgcagggcgacctggccagcctgagagccgagctgcagggccaccacgccgagaagctgcccgccggcgccggcgcccccaaggccggcctggaggaggcccccgccgtgaccgccggcctgaagatcttcgagccccccgcccccggcgagggcaacagcagccagaacagcagaaacaagagagccgtgcagggccccgaggagaccgtgacccaggactgcctgcagctgatcgccgacagcgagacccccaccatccagaagggcagctacaccttcgtgccctggctgctgagcttcaagagaggcagcgccctggaggagaaggagaacaagatcctggtgaaggagaccggctacttcttcatctacggccaggtgctgtacaccgacaagacctacgccatgggccacctgatccagagaaagaaggtgcacgtgttcggcgacgagctgagcctggtgaccctgttcagatgcatccagaacatgcccgagaccctgcccaacaacagctgctacagcgccggcatcgccaagctggaggagggcgacgagctgcagctggccatccccagagagaacgcccagatcagcctggacggcgacgtgaccttcttcggcgccctgaagctgctgtga

SEQ ID NO: 3879 - RNA, 858 nt, synthetic construct
  misc_feature 1..858: note = derived and/or modified sequence opt5 fromBAFF__Homo_sapiens__AAD21092
  source 1..858: mol_type = other RNA
atggacgatagcaccgagagagaacagtcccggctgacatcttgcctcaagaaacgcgaggaaatgaagctgaaagagtgtgtgagcatccttcccagaaaggaatccccttctgtccggagctccaaagacggcaagctgctcgccgctacgctgcttctggccctcctgtcttgctgtctgaccgttgtgagcttctaccaagtggcggctctccagggggatctggcctcccttcgcgccgagctgcagggacaccatgctgagaagctcccggccggcgctggggcccccaaagcgggactggaagaggcccctgctgtcacagccggccttaagatttttgaaccccctgctcccggggagggaaacagctctcaaaattccagaaacaaacgggccgtgcagggccctgaggaaaccgttacacaggactgcctgcagctcatcgcggatagcgagaccccgacaattcagaagggctcttataccttcgtgccctggctgctgtcctttaaacgcgggagcgccctcgaagagaaggaaaataagatcctggtcaaagagacgggatacttctttatttatggccaagtgctttacaccgacaagacatatgctatggggcacctgatccagagaaagaaggttcatgtgttcggagatgagctctctctggtcaccctttttcggtgtatccagaacatgcctgaaacactgcccaataactcctgctacagcgccggcattgctaaactcgaggaaggggacgagctgcagctggccatccctcgcgaaaatgcccaaatttccctcgatggagacgtgaccttctttggcgctctgaaacttctgtga

SEQ ID NO: 3880 - RNA, 858 nt, synthetic construct
  misc_feature 1..858: note = derived and/or modified sequence opt6 fromBAFF__Homo_sapiens__AAD21092
  source 1..858: mol_type = other RNA
atggacgactcaacagaaagagaacaatcaagactaacaagctgcctaaaaaaaagagaagaaatgaaactaaaagaatgcgtaagcatactaccaagaaaagaatctccctcagtaagatcatcaaaagacggaaaactactagcagcaacactactcctagcactcctatcatgctgcctaactgtagtatcattctaccaagtagcagcactacaaggagacctagcaagtctaagagcagaattacaaggacaccacgctgaaaaactcccagcaggagccggagcaccaaaagcaggtttagaagaagcaccagcagtaaccgcaggactaaaaatattcgaaccaccagcaccaggagaaggaaactcctcacaaaactccagaaataaaagagcagtacaaggaccagaagaaacagtaacacaagactgcctacaattaatagcagactcagaaacaccaaccatacaaaaaggaagttatacatttgtaccatggttattatcattcaaaagaggaagcgcattagaagaaaaagaaaacaaaatactagtaaaagaaaccggatacttctttatatacggccaagtactatacacagacaaaacatatgcaatgggacacttaatacaaagaaaaaaagtacatgtattcggcgacgaactatccttagtaacactattcagatgcatacaaaatatgccagaaacactaccaaacaactcatgttactcagcaggaatagccaaactagaagaaggtgacgaactacaattagcaataccaagagaaaacgcacaaatatcattagacggcgacgtaactttctttggagcattaaaactattataa

SEQ ID NO: 3881 - protein, 193 aa, synthetic construct
  REGION 1..193: note = CD27L__Homo_sapiens__P32970
MPEEGSGCSVRRRPYGCVLRAALVPLVAGLVICLVVCIQRFAQAQQQLPLESLGWDVAELQLNHTGPQQDPRLYWQGGPALGRSFLHGPELDKGQLRIHRDGIYMVHIQVTLAICSSTTASRHHPTTLAVGICSPASRSISLLRLSFHQGCTIASQRLTPLARGDTLCTNLTGTLLPSRNTDETFFGVQWVRP

SEQ ID NO: 3882 - RNA, 582 nt, synthetic construct
  misc_feature 1..582: note = CD27L__Homo_sapiens__AAB30121
  source 1..582: mol_type = other RNA
atgccggaggagggttcgggctgctcggtgcggcgcaggccctatgggtgcgtcctgcgggctgctttggtcccattggtcgcgggcttggtgatctgcctcgtggtgtgcatccagcgcttcgcacaggctcagcagcagctgccgctcgagtcacttgggtgggacgtagctgagctgcagctgaatcacacaggacctcagcaggaccccaggctatactggcaggggggcccagcactgggccgctccttcctgcatggaccagagctggacaaggggcagctacgtatccatcgtgatggcatctacatggtacacatccaggtgacgctggccatctgctcctccacgacggcctccaggcaccaccccaccaccctggccgtgggaatctgctctcccgcctcccgtagcatcagcctgctgcgtctcagcttccaccaaggttgtaccattgcctcccagcgcctgacgcccctggcccgaggggacacactctgcaccaacctcactgggacacttttgccttcccgaaacactgatgagaccttctttggagtgcagtgggtgcgcccctga

SEQ ID NO: 3883 - RNA, 582 nt, synthetic construct
  misc_feature 1..582: note = derived and/or modified sequence opt1 fromCD27L__Homo_sapiens__AAB30121
  source 1..582: mol_type = other RNA
atgcccgaggagggcagcgggtgctccgtgcgccggcgcccgtacggctgcgtcctgcgggccgccctcgtgcccctggtggcggggctggtcatctgcctcgtggtgtgcatccagcgcttcgcccaggcccagcagcagctgcccctggagagcctcggctgggacgtcgccgagctgcagctgaaccacaccgggccccagcaggacccgcggctctactggcagggcggccccgccctggggcgctccttcctgcacggccccgagctcgacaaggggcagctgcggatccaccgcgacggcatctacatggtgcacatccaggtgaccctggcgatctgcagctccacgaccgccagccggcaccaccccaccaccctcgccgtcgggatctgctccccggccagccgctccatcagcctgctgcggctctccttccaccagggctgcacgatcgcgagccagcgcctgacgcccctggcccggggcgacaccctctgcaccaacctgaccgggaccctgctcccctcccgcaacaccgacgagaccttcttcggcgtgcagtgggtgcggccctga

SEQ ID NO: 3884 - RNA, 582 nt, synthetic construct
  misc_feature 1..582: note = derived and/or modified sequence opt2 fromCD27L__Homo_sapiens__AAB30121
  source 1..582: mol_type = other RNA
atgcccgaggagggctccggctgctccgtccgccgccgcccctacggctgcgtcctccgcgccgccctcgtccccctcgtcgccggcctcgtcatctgcctcgtcgtctgcatccagcgcttcgcccaggcccagcagcagctccccctcgagtccctcggctgggacgtcgccgagctccagctcaaccacaccggcccccagcaggacccccgcctctactggcagggcggccccgccctcggccgctccttcctccacggccccgagctcgacaagggccagctccgcatccaccgcgacggcatctacatggtccacatccaggtcaccctcgccatctgctcctccaccaccgcctcccgccaccaccccaccaccctcgccgtcggcatctgctcccccgcctcccgctccatctccctcctccgcctctccttccaccagggctgcaccatcgcctcccagcgcctcacccccctcgcccgcggcgacaccctctgcaccaacctcaccggcaccctcctcccctcccgcaacaccgacgagaccttcttcggcgtccagtgggtccgcccctga

SEQ ID NO: 3885 - RNA, 582 nt, synthetic construct
  misc_feature 1..582: note = derived and/or modified sequence opt3 fromCD27L__Homo_sapiens__AAB30121
  source 1..582: mol_type = other RNA
atgcccgaggaaggcagcgggtgctccgtgagaaggcggccttacggatgtgtcctgcgcgccgctctcgttccacttgtggcaggtctggtaatctgcttggtggtctgtattcagcgattcgcccaagcgcagcagcagttaccgctggagtctctaggctgggacgtggctgaactccaactgaaccacaccgggccccagcaggatcctcgtctttattggcagggaggcccagccctgggtagatcatttttgcatgggcccgagctcgacaagggacaactgaggatacaccgggatggcatctacatggttcatattcaggtgacactggcaatctgcagtagcactacggcctcccgccaccatcctaccacactcgctgtcggcatttgttctccagcatcgagatcaatcagcttactgaggcttagtttccaccaggggtgcactatagcctcccagcggttgacacccctggctcgcggagacaccctatgtaccaatctcactggtacactgcttccttctcgaaacaccgatgaaacgtttttcggcgtgcaatgggtaagaccatga

SEQ ID NO: 3886 - RNA, 582 nt, synthetic construct
  misc_feature 1..582: note = derived and/or modified sequence opt4 fromCD27L__Homo_sapiens__AAB30121
  source 1..582: mol_type = other RNA
atgcccgaggagggcagcggctgcagcgtgagaagaagaccctacggctgcgtgctgagagccgccctggtgcccctggtggccggcctggtgatctgcctggtggtgtgcatccagagattcgcccaggcccagcagcagctgcccctggagagcctgggctgggacgtggccgagctgcagctgaaccacaccggcccccagcaggaccccagactgtactggcagggcggccccgccctgggcagaagcttcctgcacggccccgagctggacaagggccagctgagaatccacagagacggcatctacatggtgcacatccaggtgaccctggccatctgcagcagcaccaccgccagcagacaccaccccaccaccctggccgtgggcatctgcagccccgccagcagaagcatcagcctgctgagactgagcttccaccagggctgcaccatcgccagccagagactgacccccctggccagaggcgacaccctgtgcaccaacctgaccggcaccctgctgcccagcagaaacaccgacgagaccttcttcggcgtgcagtgggtgagaccctga

SEQ ID NO: 3887 - RNA, 582 nt, synthetic construct
  misc_feature 1..582: note = derived and/or modified sequence opt5 fromCD27L__Homo_sapiens__AAB30121
  source 1..582: mol_type = other RNA
atgcccgaggaaggcagcgggtgctccgtgagacggcgcccttacggatgtgtcctgagagccgctctcgttccgctggtggccggccttgtgatctgcctggtcgtgtgtattcagcggttcgcgcaagctcagcagcagctccccctggagtctcttgggtgggacgttgccgaactgcaactcaaccacaccggacctcagcaggatccccgcctgtattggcagggcgggcctgccctgggacggagctttctccatggccccgagctggacaagggccaacttcggatccaccgcgatgggatttacatggtgcatatccaggtcacactggctatttgctcctctacgaccgccagcagacaccatcctacaaccctcgctgtgggaatctgttccccggcctctcggagcatctccctgcttcgcctgagcttccaccagggctgcacaattgcgtctcagagactcacacccctggccagaggggacaccctgtgtaccaatctcacgggaaccctgcttccttcccgcaacacagatgaaacctttttcggcgttcaatgggtgagaccctga

SEQ ID NO: 3888 - RNA, 582 nt, synthetic construct
  misc_feature 1..582: note = derived and/or modified sequence opt6 fromCD27L__Homo_sapiens__AAB30121
  source 1..582: mol_type = other RNA
atgccagaagaaggctcaggatgttcagtacgaagaagaccatacggatgcgtactaagagcagcactagtaccattagtagcaggactagtaatatgcttagtagtatgcatacaaagattcgcacaagcacaacaacaattaccactagaatcactaggatgggacgtagcagaactacaattaaaccatacaggaccccaacaagacccaagactatactggcaaggaggaccagcattaggacgatcattcttacacggacctgaactagacaaaggacaattaagaatacacagagacggaatatacatggtacacatacaagtaacactagcaatatgttccagcacaacagcaagtagacatcatccaacaacactagcagtaggcatatgctcaccagcatcaagatccataagtttactaagactatcattccatcaaggatgtacaatagccagccaacgattaacaccactagcaagaggagacacattatgtacaaatttaacaggaacattactaccatcaagaaatacagacgaaacatttttcggagtacaatgggtaagaccataa

SEQ ID NO: 3889 - protein, 234 aa, synthetic construct
  REGION 1..234: note = CD30L__Homo_sapiens__P32971
MDPGLQQALNGMAPPGDTAMHVPAGSVASHLGTTSRSYFYLTTATLALCLVFTVATIMVLVVQRTDSIPNSPDNVPLKGGNCSEDLLCILKRAPFKKSWAYLQVAKHLNKTKLSWNKDGILHGVRYQDGNLVIQFPGLYFIICQLQFLVQCPNNSVDLKLELLINKHIKKQALVTVCESGMQTKHVYQNLSQFLLDYLQVNTTISVNVDTFQYIDTSTFPLENVLSIFLYSNSD

SEQ ID NO: 3890 - RNA, 705 nt, synthetic construct
  misc_feature 1..705: note = CD30L__Homo_sapiens__AAA74594
  source 1..705: mol_type = other RNA
atggacccagggctgcagcaagcactcaacggaatggcccctcctggagacacagccatgcatgtgccggcgggctccgtggccagccacctggggaccacgagccgcagctatttctatttgaccacagccactctggctctgtgccttgtcttcacggtggccactattatggtgttggtcgttcagaggacggactccattcccaactcacctgacaacgtccccctcaaaggaggaaattgctcagaagacctcttatgtatcctgaaaagagctccattcaagaagtcatgggcctacctccaagtggcaaagcatctaaacaaaaccaagttgtcttggaacaaagatggcattctccatggagtcagatatcaggatgggaatctggtgatccaattccctggtttgtacttcatcatttgccaactgcagtttcttgtacaatgcccaaataattctgtcgatctgaagttggagcttctcatcaacaagcatatcaaaaaacaggccctggtgacagtgtgtgagtctggaatgcaaacgaaacacgtataccagaatctctctcaattcttgctggattacctgcaggtcaacaccaccatatcagtcaatgtggatacattccagtacatagatacaagcacctttcctcttgagaatgtgttgtccatcttcttatacagtaattcagactga

SEQ ID NO: 3891 - RNA, 705 nt, synthetic construct
  misc_feature 1..705: note = derived and/or modified sequence opt1 fromCD30L__Homo_sapiens__AAA74594
  source 1..705: mol_type = other RNA
atggaccccggcctgcagcaggccctcaacgggatggccccgcccggcgacaccgcgatgcacgtgcccgccgggagcgtcgcctcccacctgggcaccacgagccgctcctacttctacctgaccaccgccaccctcgccctgtgcctggtgttcacggtggcgaccatcatggtcctcgtggtgcagcggaccgacagcatccccaactccccggacaacgtccccctgaagggcgggaactgcagcgaggacctgctctgcatcctgaagcgcgcccccttcaagaagtcctgggcctacctccaggtggccaagcacctgaacaagaccaagctgagctggaacaaggacggcatcctgcacggggtgcggtaccaggacggcaacctcgtcatccagttccccgggctgtacttcatcatctgccagctgcagttcctcgtgcagtgcccgaacaactccgtggacctgaagctggagctcctgatcaacaagcacatcaagaagcaggcgctggtcacggtgtgcgagagcggcatgcagaccaagcacgtgtaccagaacctctcccagttcctgctggactacctccaggtcaacaccaccatcagcgtgaacgtggacacgttccagtacatcgacacctccaccttccccctggagaacgtcctgagcatcttcctctactccaacagcgactga

SEQ ID NO: 3892 - RNA, 705 nt, synthetic construct
  misc_feature 1..705: note = derived and/or modified sequence opt2 fromCD30L__Homo_sapiens__AAA74594
  source 1..705: mol_type = other RNA
atggaccccggcctccagcaggccctcaacggcatggccccccccggcgacaccgccatgcacgtccccgccggctccgtcgcctcccacctcggcaccacctcccgctcctacttctacctcaccaccgccaccctcgccctctgcctcgtcttcaccgtcgccaccatcatggtcctcgtcgtccagcgcaccgactccatccccaactcccccgacaacgtccccctcaagggcggcaactgctccgaggacctcctctgcatcctcaagcgcgcccccttcaagaagtcctgggcctacctccaggtcgccaagcacctcaacaagaccaagctctcctggaacaaggacggcatcctccacggcgtccgctaccaggacggcaacctcgtcatccagttccccggcctctacttcatcatctgccagctccagttcctcgtccagtgccccaacaactccgtcgacctcaagctcgagctcctcatcaacaagcacatcaagaagcaggccctcgtcaccgtctgcgagtccggcatgcagaccaagcacgtctaccagaacctctcccagttcctcctcgactacctccaggtcaacaccaccatctccgtcaacgtcgacaccttccagtacatcgacacctccaccttccccctcgagaacgtcctctccatcttcctctactccaactccgactga

SEQ ID NO: 3893 - RNA, 705 nt, synthetic construct
  misc_feature 1..705: note = derived and/or modified sequence opt3 fromCD30L__Homo_sapiens__AAA74594
  source 1..705: mol_type = other RNA
atggaccccggcctgcagcaagccctcaacgggatggctcctccaggagataccgcaatgcacgtgccggccggtagcgtcgcgtcccatcttggcacaacttctagatcatacttctatctgacgaccgctacattggccttatgcctggtttttactgtggcaaccatcatggtgctagtagtccagaggacagacagtattcccaatagccctgataacgtgccactcaaagggggaaattgttccgaggacctgctttgcatactgaaacgggcccccttcaagaaatcttgggcttacttgcaggttgcaaagcacctcaacaaaaccaagctgtcgtggaataaggatggcatcctgcatggtgtgcgctatcaggacgggaacctcgtcattcaatttcctggattatacttcatcatttgtcagctgcagtttcttgtgcagtgcccaaataactcagtagatttgaaactggaactactcatcaataagcacataaagaagcaagccctggttactgtgtgtgagagcggcatgcagacaaaacatgtctatcagaaccttagtcagttcctgttggactacctccaagtgaataccacgatctccgtgaacgtcgatacttttcagtatattgacacctctacattccccctggaaaatgttttaagcatctttctgtactccaactcagattga

SEQ ID NO: 3894 - RNA, 705 nt, synthetic construct
  misc_feature 1..705: note = derived and/or modified sequence opt4 fromCD30L__Homo_sapiens__AAA74594
  source 1..705: mol_type = other RNA
atggaccccggcctgcagcaggccctgaacggcatggccccccccggcgacaccgccatgcacgtgcccgccggcagcgtggccagccacctgggcaccaccagcagaagctacttctacctgaccaccgccaccctggccctgtgcctggtgttcaccgtggccaccatcatggtgctggtggtgcagagaaccgacagcatccccaacagccccgacaacgtgcccctgaagggcggcaactgcagcgaggacctgctgtgcatcctgaagagagcccccttcaagaagagctgggcctacctgcaggtggccaagcacctgaacaagaccaagctgagctggaacaaggacggcatcctgcacggcgtgagataccaggacggcaacctggtgatccagttccccggcctgtacttcatcatctgccagctgcagttcctggtgcagtgccccaacaacagcgtggacctgaagctggagctgctgatcaacaagcacatcaagaagcaggccctggtgaccgtgtgcgagagcggcatgcagaccaagcacgtgtaccagaacctgagccagttcctgctggactacctgcaggtgaacaccaccatcagcgtgaacgtggacaccttccagtacatcgacaccagcaccttccccctggagaacgtgctgagcatcttcctgtacagcaacagcgactga

SEQ ID NO: 3895 - RNA, 705 nt, synthetic construct
  misc_feature 1..705: note = derived and/or modified sequence opt5 fromCD30L__Homo_sapiens__AAA74594
  source 1..705: mol_type = other RNA
atggaccccggcctgcagcaagccctcaacgggatggctcctccgggagataccgccatgcacgtgcccgcgggcagcgtcgcttcccatctggggacaacgtctagaagctacttctatcttaccacagccaccctggccctctgcctggtttttacagtggctaccatcatggtgcttgtcgtgcagcggacagactccattcctaattctcccgataacgttcctctgaagggaggcaattgtagcgaggacctcctgtgcatcctgaaacgcgcccccttcaagaaatcctgggcttacctccaggtggccaagcacctgaacaaaaccaaactttcttggaataaggatgggattctgcatggagtcagatatcaggacggcaacctcgtgatccaatttcctggcctgtacttcattatctgtcagcttcagtttctggttcagtgcccgaataacagcgtggatctcaagctggaactgctcatcaataagcacattaaaaagcaagcgctggtcacggtgtgtgagtccgggatgcagaccaaacatgtgtatcagaaccttagccagttcctgctcgactacctgcaagtcaatacaaccatctctgttaacgtggatacatttcagtatattgacacctccacgttcccccttgaaaatgtgctgagcatctttctctactctaactccgattga

SEQ ID NO: 3896 - RNA, 705 nt, synthetic construct
  misc_feature 1..705: note = derived and/or modified sequence opt6 fromCD30L__Homo_sapiens__AAA74594
  source 1..705: mol_type = other RNA
atggaccccggactccaacaagcactaaacggaatggcaccaccaggagacacagcaatgcacgtaccagcaggatcagtcgcatcacacttaggaacaacatctagatcatacttctacctcacaaccgcaacattagcactatgcctagtattcacagtagcaaccataatggtactagtagtacaaagaacagactccatacccaactccccagataacgtcccattaaaaggaggaaactgctcagaagacctcctctgcatattaaaaagagcaccattcaaaaaatcatgggcatacctacaagtagcaaaacacttaaacaaaaccaaactatcatggaacaaagacggaatactacacggagtaagataccaagacggaaacttagtaatacaattcccaggactatacttcataatatgtcaactacaattcctagtacaatgcccaaacaattcagtagacctaaaattagaactactaatcaacaaacacataaaaaaacaagcactagtaaccgtatgcgaatcaggaatgcaaaccaaacacgtataccaaaacctatcacaattccttctcgactacctacaagtaaacacaacaatatcagtaaacgtagacacattccaatacatagacacatctacattcccactagaaaacgtactatcaatcttcctctactccaactcagactaa

SEQ ID NO: 3897 - protein, 261 aa, synthetic construct
  REGION 1..261: note = CD40L_(CD154)__Homo_sapiens__P29965
MIETYNQTSPRSAATGLPISMKIFMYLLTVFLITQMIGSALFAVYLHRRLDKIEDERNLHEDFVFMKTIQRCNTGERSLSLLNCEEIKSQFEGFVKDIMLNKEETKKENSFEMQKGDQNPQIAAHVISEASSKTTSVLQWAEKGYYTMSNNLVTLENGKQLTVKRQGLYYIYAQVTFCSNREASSQAPFIASLCLKSPGRFERILLRAANTHSSAKPCGQQSIHLGGVFELQPGASVFVNVTDPSQVSHGTGFTSFGLLKL

SEQ ID NO: 3898 - RNA, 786 nt, synthetic construct
  misc_feature 1..786: note = CD40L_(CD154)__Homo_sapiens__AAA35662
  source 1..786: mol_type = other RNA
atgatcgaaacatacaaccaaacttctccccgatctgcggccactggactgcccatcagcatgaaaatttttatgtatttacttactgtttttcttatcacccagatgattgggtcagcactttttgctgtgtatcttcatagaaggttggacaagatagaagatgaaaggaatcttcatgaagattttgtattcatgaaaacgatacagagatgcaacacaggagaaagatccttatccttactgaactgtgaggagattaaaagccagtttgaaggctttgtgaaggatataatgttaaacaaagaggagacgaagaaagaaaacagctttgaaatgcaaaaaggtgatcagaatcctcaaattgcggcacatgtcataagtgaggccagcagtaaaacaacatctgtgttacagtgggctgaaaaaggatactacaccatgagcaacaacttggtaaccctggaaaatgggaaacagctgaccgttaaaagacaaggactctattatatctatgcccaagtcaccttctgttccaatcgggaagcttcgagtcaagctccatttatagccagcctctgcctaaagtcccccggtagattcgagagaatcttactcagagctgcaaatacccacagttccgccaaaccttgcgggcaacaatccattcacttgggaggagtatttgaattgcaaccaggtgcttcggtgtttgtcaatgtgactgatccaagccaagtgagccatggcactggcttcacgtcctttggcttactcaaactctga

SEQ ID NO: 3899 - RNA, 786 nt, synthetic construct
  misc_feature 1..786: note = derived and/or modified sequence opt1 fromCD40L_(CD154)__Homo_sapiens__AAA35662
  source 1..786: mol_type = other RNA
atgatcgagacctacaaccagaccagcccccgctccgccgccacgggcctgccgatcagcatgaagatcttcatgtacctcctgaccgtgttcctgatcacccagatgatcgggtccgcgctgttcgccgtctacctgcaccggcgcctggacaagatcgaggacgagcggaacctccacgaggacttcgtgttcatgaagaccatccagcgctgcaacacgggcgagcggagcctgtccctgctcaactgcgaggagatcaagagccagttcgaggggttcgtgaaggacatcatgctgaacaaggaggagaccaagaaggagaactccttcgagatgcagaagggcgaccagaacccccagatcgccgcccacgtcatcagcgaggcctccagcaagaccacctccgtgctgcagtgggcggagaaggggtactacacgatgagcaacaacctcgtgaccctggagaacggcaagcagctgaccgtcaagcgccagggcctctactacatctacgcccaggtgaccttctgctccaaccgggaggccagctcccaggcccccttcatcgcgagcctgtgcctgaagtcccccgggcgcttcgagcggatcctcctgcgcgccgccaacacgcacagctccgccaagccgtgcggccagcagagcatccacctcgggggcgtgttcgagctccagcccggggccagcgtcttcgtgaacgtgaccgacccctcccaggtcagccacggcaccggcttcacctccttcgggctgctgaagctctga

SEQ ID NO: 3900 - RNA, 786 nt, synthetic construct
  misc_feature 1..786: note = derived and/or modified sequence opt2 fromCD40L_(CD154)__Homo_sapiens__AAA35662
  source 1..786: mol_type = other RNA
atgatcgagacctacaaccagacctccccccgctccgccgccaccggcctccccatctccatgaagatcttcatgtacctcctcaccgtcttcctcatcacccagatgatcggctccgccctcttcgccgtctacctccaccgccgcctcgacaagatcgaggacgagcgcaacctccacgaggacttcgtcttcatgaagaccatccagcgctgcaacaccggcgagcgctccctctccctcctcaactgcgaggagatcaagtcccagttcgagggcttcgtcaaggacatcatgctcaacaaggaggagaccaagaaggagaactccttcgagatgcagaagggcgaccagaacccccagatcgccgcccacgtcatctccgaggcctcctccaagaccacctccgtcctccagtgggccgagaagggctactacaccatgtccaacaacctcgtcaccctcgagaacggcaagcagctcaccgtcaagcgccagggcctctactacatctacgcccaggtcaccttctgctccaaccgcgaggcctcctcccaggcccccttcatcgcctccctctgcctcaagtcccccggccgcttcgagcgcatcctcctccgcgccgccaacacccactcctccgccaagccctgcggccagcagtccatccacctcggcggcgtcttcgagctccagcccggcgcctccgtcttcgtcaacgtcaccgacccctcccaggtctcccacggcaccggcttcacctccttcggcctcctcaagctctga

SEQ ID NO: 3901 - RNA, 786 nt, synthetic construct
  misc_feature 1..786: note = derived and/or modified sequence opt3 fromCD40L_(CD154)__Homo_sapiens__AAA35662
  source 1..786: mol_type = other RNA
atgatcgagacctacaaccagacaagccccagatccgccgctactggcctgcctatttctatgaagatattcatgtatctccttacggtgtttctgatcacccaaatgattgggtcagcattgttcgccgtctacttacacaggcggctggacaaaatcgaagatgagcgcaatctacatgaagactttgttttcatgaagacaattcagcgatgcaacactggagagcgtagtctcagcctgcttaattgtgaagagatcaaatcccagtttgagggtttcgtgaaggatataatgctgaacaaagaagagaccaagaaggaaaattcttttgagatgcagaaaggcgaccaaaacccacagatcgcggctcacgtaatttcggaggcctcaagcaagacaaccagtgtgttgcagtgggcagaaaaagggtattacactatgtccaataacctcgtcacactggagaatggaaagcagctgaccgtgaaaagacaaggcctctattacatctatgcccaggttacgttctgctctaacagggaagctagctcccaggcaccgtttattgcctcattatgtctgaagagtcccggtcggttcgagcgcatccttttgagagctgccaatactcatagctctgcgaagccttgcgggcagcaatccatacacctgggaggcgtgtttgaactacagccaggcgcatcagtcttcgtgaacgtaaccgatcccagccaggttagtcatgggacaggatttacttctttcggtctcctgaaactttga

SEQ ID NO: 3902 - RNA, 786 nt, synthetic construct
  misc_feature 1..786: note = derived and/or modified sequence opt4 fromCD40L_(CD154)__Homo_sapiens__AAA35662
  source 1..786: mol_type = other RNA
atgatcgagacctacaaccagaccagccccagaagcgccgccaccggcctgcccatcagcatgaagatcttcatgtacctgctgaccgtgttcctgatcacccagatgatcggcagcgccctgttcgccgtgtacctgcacagaagactggacaagatcgaggacgagagaaacctgcacgaggacttcgtgttcatgaagaccatccagagatgcaacaccggcgagagaagcctgagcctgctgaactgcgaggagatcaagagccagttcgagggcttcgtgaaggacatcatgctgaacaaggaggagaccaagaaggagaacagcttcgagatgcagaagggcgaccagaacccccagatcgccgcccacgtgatcagcgaggccagcagcaagaccaccagcgtgctgcagtgggccgagaagggctactacaccatgagcaacaacctggtgaccctggagaacggcaagcagctgaccgtgaagagacagggcctgtactacatctacgcccaggtgaccttctgcagcaacagagaggccagcagccaggcccccttcatcgccagcctgtgcctgaagagccccggcagattcgagagaatcctgctgagagccgccaacacccacagcagcgccaagccctgcggccagcagagcatccacctgggcggcgtgttcgagctgcagcccggcgccagcgtgttcgtgaacgtgaccgaccccagccaggtgagccacggcaccggcttcaccagcttcggcctgctgaagctgtga

SEQ ID NO: 3903 - RNA, 786 nt, synthetic construct
  misc_feature 1..786: note = derived and/or modified sequence opt5 fromCD40L_(CD154)__Homo_sapiens__AAA35662
  source 1..786: mol_type = other RNA
atgatcgagacctacaaccagacaagccccagatccgccgctacgggcctgcctatttctatgaagatcttcatgtatctcctgaccgtgtttcttattacacaaatgatcgggagcgccctgttcgcggtctacctccaccggcgcctggacaaaattgaagatgagagaaatcttcatgaagactttgttttcatgaagaccatccagcggtgcaacacaggagagcgctccctgtctctcctgaattgtgaagagatcaaaagccagtttgagggcttcgtgaaggatattatgctgaacaaagaagagaccaagaaggaaaattcctttgagatgcagaaaggggaccaaaacccgcagatcgctgcccacgtgatttctgaggccagctccaagacaaccagcgtcctccagtgggctgaaaaaggatattacacgatgtctaataacctggtgacccttgagaatggcaagcagctgacagttaaaagacaagggctctattacatctatgcccaggtgaccttctgctccaaccgggaagctagctctcaggccccctttattgcgtccctgtgtcttaagagccctggacgcttcgagagaatcctgctccgggccgctaatacacattcttccgccaagccctgcggccagcaaagcattcacctgggcggggtctttgaactgcagcctggagcttccgtgttcgttaacgtgaccgatccctctcaggtcagccatggcacggggtttacatccttcggactcctgaaactttga

SEQ ID NO: 3904 - RNA, 786 nt, synthetic construct
  misc_feature 1..786: note = derived and/or modified sequence opt6 fromCD40L_(CD154)__Homo_sapiens__AAA35662
  source 1..786: mol_type = other RNA
atgatagaaacatataatcaaacaagcccaagatcagcagcaacaggactaccaatatcaatgaaaatattcatgtacctactcacagtcttcctaataacacaaatgataggatctgccctatttgcagtatacctacacagaagactagataaaatagaagacgaaagaaacctacatgaagacttcgtattcatgaaaacaatacaaagatgcaacaccggagaaagatccctatcactactaaactgcgaagaaataaaatcacaattcgaaggattcgtaaaagacataatgctaaacaaagaagaaacaaaaaaagaaaactctttcgaaatgcaaaaaggagaccaaaacccacaaatagctgcacacgtcatatcagaagcatcatcaaaaacaacatcagtacttcaatgggcagaaaaaggatactatacaatgtcaaacaatctagtaaccctagaaaacggaaaacaactaacagtaaaaagacaaggactatactatatatacgcacaagtaacattctgctcaaacagagaagcatcatcacaagcaccattcatcgcatcactatgcctaaaatccccaggaagattcgaacgaatcctactaagagcagcaaacacacactcatcagcaaaaccatgcggccaacaatcaatacacctaggaggagtattcgaactacaaccaggagcatcagtattcgtaaacgtaacagacccctcacaagtaagccacggcacaggattcacatcatttggactattaaaattataa

SEQ ID NO: 3905 - protein, 197 aa, synthetic construct
  REGION 1..197: note = EL-17C__Homo_sapiens__Q9P0M4
MTLLPGLLFLTWLHTCLAHHDPSLRGHPHSHGTPHCYSAEELPLGQAPPHLLARGAKWGQALPVALVSSLEAASHRGRHERPSATTQCPVLRPEEVLEADTHQRSISPWRYRVDTDEDRYPQKLAFAECLCRGCIDARTGRETAALNSVRLLQSLLVLRRRPCSRDGSGLPTPGAFAFHTEFIHVPVGCTCVLPRSV

SEQ ID NO: 3906 - RNA, 594 nt, synthetic construct
  misc_feature 1..594: note = EL-17C__Homo_sapiens__AAF28105
  source 1..594: mol_type = other RNA
atgacgctcctccccggcctcctgtttctgacctggctgcacacatgcctggcccaccatgacccctccctcagggggcacccccacagtcacggtaccccacactgctactcggctgaggaactgcccctcggccaggcccccccacacctgctggctcgaggtgccaagtgggggcaggctttgcctgtagccctggtgtccagcctggaggcagcaagccacagggggaggcacgagaggccctcagctacgacccagtgcccggtgctgcggccggaggaggtgttggaggcagacacccaccagcgctccatctcaccctggagataccgtgtggacacggatgaggaccgctatccacagaagctggccttcgccgagtgcctgtgcagaggctgtatcgatgcacggacgggccgcgagacagctgcgctcaactccgtgcggctgctccagagcctgctggtgctgcgccgccggccctgctcccgcgacggctcggggctccccacacctggggcctttgccttccacaccgagttcatccacgtccccgtcggctgcacctgcgtgctgccccgttcagtgtga

SEQ ID NO: 3907 - RNA, 594 nt, synthetic construct
  misc_feature 1..594: note = derived and/or modified sequence opt1 fromEL-17C__Homo_sapiens__AAF28105
  source 1..594: mol_type = other RNA
atgaccctgctccccggcctgctgttcctcacctggctgcacacgtgcctggcccaccacgacccgagcctccgcgggcacccccactcccacggcacgccccactgctacagcgccgaggagctgcccctggggcaggcgccgccccacctcctggcccggggcgccaagtgggggcaggccctgcccgtggccctcgtctccagcctggaggcggcctcccaccgcggccggcacgagcgccccagcgccaccacccagtgcccggtgctgcggcccgaggaggtgctcgaggccgacacccaccagcgctccatcagcccctggcggtaccgcgtcgacaccgacgaggaccggtacccccagaagctggcgttcgccgagtgcctgtgccgcggctgcatcgacgcccggaccgggcgcgagaccgccgccctcaactccgtgcggctgctgcagagcctcctggtgctgcgccggcgcccgtgctcccgggacggcagcgggctccccacccccggcgcgttcgccttccacaccgagttcatccacgtccccgtggggtgcacgtgcgtgctgccgcgctccgtctga

SEQ ID NO: 3908 - RNA, 594 nt, synthetic construct
  misc_feature 1..594: note = derived and/or modified sequence opt2 fromEL-17C__Homo_sapiens__AAF28105
  source 1..594: mol_type = other RNA
atgaccctcctccccggcctcctcttcctcacctggctccacacctgcctcgcccaccacgacccctccctccgcggccacccccactcccacggcaccccccactgctactccgccgaggagctccccctcggccaggcccccccccacctcctcgcccgcggcgccaagtggggccaggccctccccgtcgccctcgtctcctccctcgaggccgcctcccaccgcggccgccacgagcgcccctccgccaccacccagtgccccgtcctccgccccgaggaggtcctcgaggccgacacccaccagcgctccatctccccctggcgctaccgcgtcgacaccgacgaggaccgctacccccagaagctcgccttcgccgagtgcctctgccgcggctgcatcgacgcccgcaccggccgcgagaccgccgccctcaactccgtccgcctcctccagtccctcctcgtcctccgccgccgcccctgctcccgcgacggctccggcctccccacccccggcgccttcgccttccacaccgagttcatccacgtccccgtcggctgcacctgcgtcctcccccgctccgtctga

SEQ ID NO: 3909 - RNA, 594 nt, synthetic construct
  misc_feature 1..594: note = derived and/or modified sequence opt3 fromEL-17C__Homo_sapiens__AAF28105
  source 1..594: mol_type = other RNA
atgaccctgctccccggccttctgttcttgacatggttacacacttgcctggcccatcacgaccctagcctaagagggcatccacactcccatggaacgccgcactgttactctgctgaagaactccccctgggtcaggcacctccacaccttctggccaggggcgcgaagtgggggcaggctttgcccgtggccctcgtctcaagtctggaggcagccagccatcggggacgccacgaacgaccttccgctaccacacaatgcccagttctgcgtcccgaggaagtgctcgaggcagatactcatcagagatctatctcgccttggaggtatcgggtagacaccgatgaggaccgctacccacagaaattagcctttgctgaatgtctgtgcagaggctgtattgatgccaggacaggtcgggagaccgcggcacttaactcagtgcgcttgctgcaaagcctactcgtcctgcgaagaaggccgtgcagtcgggacgggtccggacttcccactcctggcgccttcgcttttcacacagagttcatacacgtgccagttggctgtacctgcgtgctgccccgttctgtctga

SEQ ID NO: 3910 - RNA, 594 nt, synthetic construct
  misc_feature 1..594: note = derived and/or modified sequence opt4 fromEL-17C__Homo_sapiens__AAF28105
  source 1..594: mol_type = other RNA
atgaccctgctgcccggcctgctgttcctgacctggctgcacacctgcctggcccaccacgaccccagcctgagaggccacccccacagccacggcaccccccactgctacagcgccgaggagctgcccctgggccaggcccccccccacctgctggccagaggcgccaagtggggccaggccctgcccgtggccctggtgagcagcctggaggccgccagccacagaggcagacacgagagacccagcgccaccacccagtgccccgtgctgagacccgaggaggtgctggaggccgacacccaccagagaagcatcagcccctggagatacagagtggacaccgacgaggacagatacccccagaagctggccttcgccgagtgcctgtgcagaggctgcatcgacgccagaaccggcagagagaccgccgccctgaacagcgtgagactgctgcagagcctgctggtgctgagaagaagaccctgcagcagagacggcagcggcctgcccacccccggcgccttcgccttccacaccgagttcatccacgtgcccgtgggctgcacctgcgtgctgcccagaagcgtgtga

SEQ ID NO: 3911 - RNA, 594 nt, synthetic construct
  misc_feature 1..594: note = derived and/or modified sequence opt5 fromEL-17C__Homo_sapiens__AAF28105
  source 1..594: mol_type = other RNA
atgaccctgctccccggcctgcttttcctgacatggctccacacgtgcctggcccatcacgaccctagccttagagggcatccgcactcccatggaacaccccactgttactctgctgaagaactgcctctcggccaggcgccccctcatctgctggcccgcggggctaagtggggacaagccctccccgtggccctggtcagctcccttgaggctgcctctcaccggggcagacacgaacggcctagcgctaccacccagtgcccggttctgcgccccgaggaagtgctcgaggccgatacacatcagagatccatctctccttggcggtatcgcgtggacaccgatgaggacagatacccccagaaactggcgtttgccgaatgtctttgccgggggtgtattgatgctcgcacaggaagagagaccgccgctctgaacagcgtccggctcctgcaatccctgctcgtgctgcgcagacggccttgcagccgcgacggctctggccttcccacgccgggggccttcgcgtttcacaccgagttcatccacgttcctgtgggatgtacatgcgtcctgcccagatccgtgtga

SEQ ID NO: 3912 - RNA, 594 nt, synthetic construct
  misc_feature 1..594: note = derived and/or modified sequence opt6 fromEL-17C__Homo_sapiens__AAF28105
  source 1..594: mol_type = other RNA
atgacattattaccaggactattatttttaacatggttacatacatgtctagctcatcacgatccatcactaagaggacatccacattcacacggaacacctcactgttattcagcagaagaattaccattaggacaagcaccaccacatttactagcaagaggagcaaaatggggacaagcattaccagtagcattagtaagctcactagaagcagcatcacatagaggaagacatgaaagaccatcagcaacaacacaatgtccagtcttaagaccagaagaagtcttagaagcagatacacatcaaagatcaatatcaccatggcgataccgagtagatacagatgaagatagatatccacaaaaactagcatttgcagaatgtttatgtagaggatgtatagatgcaagaacaggaagagaaacagcagcattaaattccgtaagattactacaaagtttactagtattaagaagaagaccatgttcaagagacggatcaggactaccaactccaggagcattcgcctttcatacagaatttatacacgtaccagtaggatgtacttgtgtattaccaagatcagtataa

SEQ ID NO: 3913 - protein, 178 aa, synthetic construct
  REGION 1..178: note = FLT3_ligand__Homo_sapiens__AAA90950.1
MTVLAPAWSPTTYLLLLLLLSSGLSGTQDCSFQHSPISSDFAVKIRELSDYLLQDYPVTVASNLQDEELCGGLWRLVLAQRWMERLKTVAGSKMQGLLERVNTEIHFVTKCAFQPPPSCLRFVQTNISRLLQETSEQLVALKPWITRQNFSRCLELQCQPVETVFHRVSQDGLDLLTS

SEQ ID NO: 3914 - RNA, 537 nt, synthetic construct
  misc_feature 1..537: note = FLT3_ligand__Homo_sapiens__U29874.1
  source 1..537: mol_type = other RNA
atgacagtgctggcgccagcctggagcccaacaacctatctcctcctgctgctgctgctgagctcgggactcagtgggacccaggactgctccttccaacacagccccatctcctccgacttcgctgtcaaaatccgtgagctgtctgactacctgcttcaagattacccagtcaccgtggcctccaacctgcaggacgaggagctctgcgggggcctctggcggctggtcctggcacagcgctggatggagcggctcaagactgtcgctgggtccaagatgcaaggcttgctggagcgcgtgaacacggagatacactttgtcaccaaatgtgcctttcagcccccccccagctgtcttcgcttcgtccagaccaacatctcccgcctcctgcaggagacctccgagcagctggtggcgctgaagccctggatcactcgccagaacttctcccggtgcctggagctgcagtgtcagcccgtagagacggtgtttcaccgtgtcagccaggatggtctcgatctcctgacctcgtga

SEQ ID NO: 3915 - RNA, 537 nt, synthetic construct
  misc_feature 1..537: note = derived and/or modified sequence opt1 fromFLT3_ligand__Homo_sapiens__U29874.1
  source 1..537: mol_type = other RNA
atgaccgtgctggcccccgcctggagcccgaccacgtacctcctgctgctcctgctgctctccagcggcctgtccgggacccaggactgcagcttccagcactcccccatcagctccgacttcgcggtcaagatccgcgagctgagcgactacctcctgcaggactaccccgtgaccgtggcctccaacctgcaggacgaggagctctgcggcgggctgtggcggctggtcctcgcccagcgctggatggagcggctgaagaccgtggccggcagcaagatgcaggggctgctcgagcgcgtgaacacggagatccacttcgtcaccaagtgcgccttccagcccccgccctcctgcctgcggttcgtgcagaccaacatcagccgcctgctccaggagacctccgagcagctggtggcgctgaagccctggatcacgcggcagaacttcagccgctgcctcgagctgcagtgccagcccgtcgagaccgtgttccaccgggtgtcccaggacggcctggacctcctgaccagctga

SEQ ID NO: 3916 - RNA, 537 nt, synthetic construct
  misc_feature 1..537: note = derived and/or modified sequence opt2 fromFLT3_ligand__Homo_sapiens__U29874.1
  source 1..537: mol_type = other RNA
atgaccgtcctcgcccccgcctggtcccccaccacctacctcctcctcctcctcctcctctcctccggcctctccggcacccaggactgctccttccagcactcccccatctcctccgacttcgccgtcaagatccgcgagctctccgactacctcctccaggactaccccgtcaccgtcgcctccaacctccaggacgaggagctctgcggcggcctctggcgcctcgtcctcgcccagcgctggatggagcgcctcaagaccgtcgccggctccaagatgcagggcctcctcgagcgcgtcaacaccgagatccacttcgtcaccaagtgcgccttccagccccccccctcctgcctccgcttcgtccagaccaacatctcccgcctcctccaggagacctccgagcagctcgtcgccctcaagccctggatcacccgccagaacttctcccgctgcctcgagctccagtgccagcccgtcgagaccgtcttccaccgcgtctcccaggacggcctcgacctcctcacctcctga

SEQ ID NO: 3917 - RNA, 537 nt, synthetic construct
  misc_feature 1..537: note = derived and/or modified sequence opt3 fromFLT3_ligand__Homo_sapiens__U29874.1
  source 1..537: mol_type = other RNA
atgaccgtgctggcccccgcttggagccctacaacttacctccttctgttgttactgctatcctctggcctctcagggacgcaggactgcagtttccaacacagcccaatctcctctgattttgcagtcaagattagagagctgtcggactatcttctgcaggattacccggttaccgtggcctcaaacttgcaggacgaggaactctgtggaggtctgtggaggctggtactcgcgcagcggtggatggaacgcttaaaaacagtggctggcagcaagatgcaagggctgcttgagcgagtcaatactgaaatacatttcgtgaccaaatgcgcctttcagccccctccaagttgtttgcgtttcgttcagacaaacatctccagactgctacaggagacctctgagcaactcgtggcactgaagccctggattactaggcagaattttagccggtgccttgaactgcagtgtcagcctgtcgagacagtgttccaccgcgtatcccaagatggattggacctcctgacctcatga

SEQ ID NO: 3918 - RNA, 537 nt, synthetic construct
  misc_feature 1..537: note = derived and/or modified sequence opt4 fromFLT3_ligand__Homo_sapiens__U29874.1
  source 1..537: mol_type = other RNA
atgaccgtgctggcccccgcctggagccccaccacctacctgctgctgctgctgctgctgagcagcggcctgagcggcacccaggactgcagcttccagcacagccccatcagcagcgacttcgccgtgaagatcagagagctgagcgactacctgctgcaggactaccccgtgaccgtggccagcaacctgcaggacgaggagctgtgcggcggcctgtggagactggtgctggcccagagatggatggagagactgaagaccgtggccggcagcaagatgcagggcctgctggagagagtgaacaccgagatccacttcgtgaccaagtgcgccttccagcccccccccagctgcctgagattcgtgcagaccaacatcagcagactgctgcaggagaccagcgagcagctggtggccctgaagccctggatcaccagacagaacttcagcagatgcctggagctgcagtgccagcccgtggagaccgtgttccacagagtgagccaggacggcctggacctgctgaccagctga

SEQ ID NO: 3919 - RNA, 537 nt, synthetic construct
  misc_feature 1..537: note = derived and/or modified sequence opt5 fromFLT3_ligand__Homo_sapiens__U29874.1
  source 1..537: mol_type = other RNA
atgaccgtgctggcccccgcttggagccctacaacgtacctcctgcttctgctcctgctttcctctggcctgagcgggacccaggactgctccttccaacactctccgatcagctccgattttgccgtcaagattagagagctctctgactatctgctgcaggattaccccgttacagtggcgagcaacctccaggacgaggaactgtgtggaggcctttggcggctggtgctcgctcagcgctggatggaaagactgaaaaccgtcgccgggtccaagatgcaaggacttctggagcgggtgaatacagaaatccatttcgttaccaaatgcgcctttcagcctccccctagctgtctccgcttcgtgcagacaaacatttctagactgctgcaggagacctccgagcaactcgtcgctctgaagccctggatcacgcggcagaattttagccgctgccttgaactgcagtgtcagcctgtggagaccgttttccacagagtgtctcaagatggcctcgacctgcttacatcctga

SEQ ID NO: 3920 - RNA, 537 nt, synthetic construct
  misc_feature 1..537: note = derived and/or modified sequence opt6 fromFLT3_ligand__Homo_sapiens__U29874.1
  source 1..537: mol_type = other RNA
atgacagtactcgcaccagcatggtcaccaacaacatacctactactattactactattatcctcaggactatcaggaacacaagactgctcattccaacactcaccaatatcctcagacttcgcagtaaaaatacgagaactatcagactacttactacaagactacccagtaacagtagcatccaacctacaagacgaagaactatgtggaggactctggagattagtactagcacaaagatggatggaaagactaaaaacagtagcaggctcaaaaatgcaaggactactagaaagagtcaacacagaaatccactttgtaacaaaatgcgcatttcaaccacccccatcatgcctaagattcgtacaaacaaacatatcaagattactacaagaaacatcagaacaactagtagcattaaaaccatggataacaagacaaaacttctcaagatgcctagaactccaatgccaacccgtagaaacagtattccacagagtatcacaagacggattagacctattaacctcataa

SEQ ID NO: 3921 - protein, 235 aa, synthetic construct
  REGION 1..235: note = FLT3_ligand__Homo_sapiens__P49771
MTVLAPAWSPTTYLLLLLLLSSGLSGTQDCSFQHSPISSDFAVKIRELSDYLLQDYPVTVASNLQDEELCGGLWRLVLAQRWMERLKTVAGSKMQGLLERVNTEIHFVTKCAFQPPPSCLRFVQTNISRLLQETSEQLVALKPWITRQNFSRCLELQCQPDSSTLPPPWSPRPLEATAPTAPQPPLLLLLLLPVGLLLLAAAWCLHWQRTRRRTPRPGEQVPPVPSPQDLLLVEH

SEQ ID NO: 3922 - RNA, 708 nt, synthetic construct
  misc_feature 1..708: note = FLT3_ligand__Homo_sapiens__CCDS12767.1
  source 1..708: mol_type = other RNA
atgacagtgctggcgccagcctggagcccaacaacctatctcctcctgctgctgctgctgagctcgggactcagtgggacccaggactgctccttccaacacagccccatctcctccgacttcgctgtcaaaatccgtgagctgtctgactacctgcttcaagattacccagtcaccgtggcctccaacctgcaggacgaggagctctgcgggggcctctggcggctggtcctggcacagcgctggatggagcggctcaagactgtcgctgggtccaagatgcaaggcttgctggagcgcgtgaacacggagatacactttgtcaccaaatgtgcctttcagcccccccccagctgtcttcgcttcgtccagaccaacatctcccgcctcctgcaggagacctccgagcagctggtggcgctgaagccctggatcactcgccagaacttctcccggtgcctggagctgcagtgtcagcccgactcctcaaccctgccacccccatggagtccccggcccctggaggccacagccccgacagccccgcagccccctctgctcctcctactgctgctgcccgtgggcctcctgctgctggccgctgcctggtgcctgcactggcagaggacgcggcggaggacaccccgccctggggagcaggtgccccccgtccccagtccccaggacctgctgcttgtggagcactga

SEQ ID NO: 3923 - RNA, 708 nt, synthetic construct
  misc_feature 1..708: note = derived and/or modified sequence opt1 fromFLT3_ligand__Homo_sapiens__CCDS12767.1
  source 1..708: mol_type = other RNA
atgaccgtgctggcccccgcctggtccccgaccacctacctcctgctgctcctgctgctctccagcggcctgtccgggacccaggactgcagcttccagcactcccccatcagctccgacttcgcggtcaagatccgcgagctgagcgactacctcctgcaggactaccccgtgaccgtggcctccaacctgcaggacgaggagctctgcggcgggctgtggcggctggtcctcgcccagcgctggatggagcggctgaagaccgtggccggcagcaagatgcaggggctgctcgagcgcgtgaacacggagatccacttcgtcaccaagtgcgccttccagcccccgccctcctgcctgcggttcgtgcagaccaacatcagccgcctgctccaggagacctccgagcagctggtggcgctgaagccctggatcacgcggcagaacttcagccgctgcctcgagctgcagtgccagcccgactccagcaccctgccgccgccctggagcccccggcccctcgaggccaccgcccccaccgcgccccagcccccgctgctgctcctgctgctcctgcccgtcggcctgctcctgctggccgccgcctggtgcctccactggcagcgcacgcggcgccggacgccccgccccggcgagcaggtcccgcccgtgcccagcccccaggacctgctgctcgtggagcactga

SEQ ID NO: 3924 - RNA, 708 nt, synthetic construct
  misc_feature 1..708: note = derived and/or modified sequence opt2 fromFLT3_ligand__Homo_sapiens__CCDS12767.1
  source 1..708: mol_type = other RNA
atgaccgtcctcgcccccgcctggtcccccaccacctacctcctcctcctcctcctcctctcctccggcctctccggcacccaggactgctccttccagcactcccccatctcctccgacttcgccgtcaagatccgcgagctctccgactacctcctccaggactaccccgtcaccgtcgcctccaacctccaggacgaggagctctgcggcggcctctggcgcctcgtcctcgcccagcgctggatggagcgcctcaagaccgtcgccggctccaagatgcagggcctcctcgagcgcgtcaacaccgagatccacttcgtcaccaagtgcgccttccagccccccccctcctgcctccgcttcgtccagaccaacatctcccgcctcctccaggagacctccgagcagctcgtcgccctcaagccctggatcacccgccagaacttctcccgctgcctcgagctccagtgccagcccgactcctccaccctcccccccccctggtccccccgccccctcgaggccaccgcccccaccgccccccagccccccctcctcctcctcctcctcctccccgtcggcctcctcctcctcgccgccgcctggtgcctccactggcagcgcacccgccgccgcaccccccgccccggcgagcaggtcccccccgtcccctccccccaggacctcctcctcgtcgagcactga

SEQ ID NO: 3925 - RNA, 708 nt, synthetic construct
  misc_feature 1..708: note = derived and/or modified sequence opt3 fromFLT3_ligand__Homo_sapiens__CCDS12767.1
  source 1..708: mol_type = other RNA
atgaccgtgctggcccccgcttggagccctacaacttacctccttctgttgttactgctatcctctggcctctcagggacgcaggactgcagtttccaacacagcccaatctcctctgattttgcagtcaagattagagagctgtcggactatcttctgcaggattacccggttaccgtggcctcaaacttgcaggacgaggaactctgtggaggtctgtggaggctggtactcgcgcagcggtggatggaacgcttaaaaacagtggctggcagcaagatgcaagggctgcttgagcgagtcaatactgaaatacatttcgtgaccaaatgcgcctttcagccccctccaagttgtttgcgtttcgttcagacaaacatctccagactgctacaggagacctctgagcaactcgtggcactgaagccctggattactaggcagaattttagccggtgccttgaactgcagtgtcagcctgattcctcaacattgccacccccttggagtccacgcccgctcgaggccaccgctcccacggcacctcaaccacccctgttactgctccttctgttgcctgtcggactactgctcctggccgctgcctggtgccttcactggcagagaactaggcggcgcaccccacgacccggcgaacaggtgccgcctgtacccagcccacaagacctgttgctcgttgagcattga

SEQ ID NO: 3926 - RNA, 708 nt, synthetic construct
  misc_feature 1..708: note = derived and/or modified sequence opt4 fromFLT3_ligand__Homo_sapiens__CCDS12767.1
  source 1..708: mol_type = other RNA
atgaccgtgctggcccccgcctggagccccaccacctacctgctgctgctgctgctgctgagcagcggcctgagcggcacccaggactgcagcttccagcacagccccatcagcagcgacttcgccgtgaagatcagagagctgagcgactacctgctgcaggactaccccgtgaccgtggccagcaacctgcaggacgaggagctgtgcggcggcctgtggagactggtgctggcccagagatggatggagagactgaagaccgtggccggcagcaagatgcagggcctgctggagagagtgaacaccgagatccacttcgtgaccaagtgcgccttccagcccccccccagctgcctgagattcgtgcagaccaacatcagcagactgctgcaggagaccagcgagcagctggtggccctgaagccctggatcaccagacagaacttcagcagatgcctggagctgcagtgccagcccgacagcagcaccctgccccccccctggagccccagacccctggaggccaccgcccccaccgccccccagccccccctgctgctgctgctgctgctgcccgtgggcctgctgctgctggccgccgcctggtgcctgcactggcagagaaccagaagaagaacccccagacccggcgagcaggtgccccccgtgcccagcccccaggacctgctgctggtggagcactga

SEQ ID NO: 3927 - RNA, 708 nt, synthetic construct
  misc_feature 1..708: note = derived and/or modified sequence opt5 fromFLT3_ligand__Homo_sapiens__CCDS12767.1
  source 1..708: mol_type = other RNA
atgaccgtgctggcccccgcttggagccctaccacgtacctcctgcttctgctcctgctttcctctggcctgagcgggacccaggactgctccttccaacactctccgatcagctccgattttgccgtcaagattagagagctctctgactatctgctgcaggattaccccgttacagtggcgagcaacctccaggacgaggaactgtgtggaggcctttggcggctggtgctcgctcagcgctggatggaaagactgaaaaccgtcgccgggtccaagatgcaaggacttctggagcgggtgaatacagaaatccatttcgttaccaaatgcgcctttcagcctccccctagctgtctccgcttcgtgcagacaaacatttctagactgctgcaggagacctccgagcaactcgtcgctctgaagccctggatcacgcggcagaattttagccgctgccttgaactgcagtgtcagcctgattcttccaccctcccgcccccttggagccccagacctctggaggccacagctcccaccgccccgcaacctccccttctgctcctgctgctcctgcctgtgggccttctgctcctggcggccgcttggtgccttcactggcagcggacacgcagacggacaccccgccccggggaacaggttcctccggtgccctctcctcaagacctgctcctggtcgagcattga

SEQ ID NO: 3928 - RNA, 708 nt, synthetic construct
  misc_feature 1..708: note = derived and/or modified sequence opt6 fromFLT3_ligand__Homo_sapiens__CCDS12767.1
  source 1..708: mol_type = other RNA
atgaccgtattagcaccagcatggtctccaacaacatacctactactactactattattatcttcaggactatcaggtacccaagactgctcatttcaacactccccaatatcatcagacttcgctgtaaaaataagagaattatcagactacttactacaagactacccagtaacagtagcatcaaacctacaagatgaagaactatgcggaggactatggcgactcgtattagcacaaagatggatggaaagactaaaaactgtagcaggatcaaaaatgcaaggactactagaacgagtaaacacagaaatccacttcgtaaccaaatgcgcattccaaccaccaccatcctgcttaagattcgtacaaacaaacatatcaagactactacaagaaacatcagaacaactagtagcattaaaaccatggataaccagacaaaacttctccagatgcttagaattacaatgccaaccagactcatccacactaccaccaccctggtccccaagacccctagaagccacagcaccaacagcaccccaaccacccttattattattattactcctaccagtcggactactacttctagcagctgcatggtgcctacattggcaaagaaccagaagacgaacaccaagaccaggagaacaagtaccaccagtcccatcaccacaagacctattactagtagaacactaa

SEQ ID NO: 3929 - protein, 207 aa, synthetic construct
  REGION 1..207: note = G-CSF__Homo_sapiens__P09919
MAGPATQSPMKLMALQLLLWHSALWTVQEATPLGPASSLPQSFLLKCLEQVRKIQGDGAALQEKLVSECATYKLCHPEELVLLGHSLGIPWAPLSSCPSQALQLAGCLSQLHSGLFLYQGLLQALEGISPELGPTLDTLQLDVADFATTIWQQMEELGMAPALQPTQGAMPAFASAFQRRAGGVLVASHLQSFLEVSYRVLRHLAQP

SEQ ID NO: 3930 - RNA, 624 nt, synthetic construct
  misc_feature 1..624: note = G-CSF__Homo_sapiens__AAK62469
  source 1..624: mol_type = other RNA
atggctggacctgccacccagagccccatgaagctgatggccctgcagctgctgctgtggcacagtgcactctggacagtgcaggaagccacccccctgggccctgccagctccctgccccagagcttcctgctcaagtgcttagagcaagtgaggaagatccagggcgatggcgcagcgctccaggagaagctggtgagtgagtgtgccacctacaagctgtgccaccccgaggagctggtgctgctcggacactctctgggcatcccctgggctcccctgagcagctgccccagccaggccctgcagctggcaggctgcttgagccaactccatagcggccttttcctctaccaggggctcctgcaggccctggaagggatctcccccgagttgggtcccaccttggacacactgcagctggacgtcgccgactttgccaccaccatctggcagcagatggaagaactgggaatggcccctgccctgcagcccacccagggtgccatgccggccttcgcctctgctttccagcgccgggcaggaggggtcctggttgcctcccatctgcagagcttcctggaggtgtcgtaccgcgttctacgccaccttgcccagccctga

SEQ ID NO: 3931 - RNA, 624 nt, synthetic construct
  misc_feature 1..624: note = derived and/or modified sequence opt1 fromG-CSF__Homo_sapiens__AAK62469
  source 1..624: mol_type = other RNA
atggccggccccgccacccagagcccgatgaagctgatggcgctccagctgctgctctggcactccgccctgtggaccgtgcaggaggccacgcccctggggcccgccagctccctcccccagagcttcctgctgaagtgcctcgagcaggtccgcaagatccagggcgacggggccgcgctgcaggagaagctggtgtccgagtgcgccacctacaagctctgccacccggaggagctggtgctgctcggccacagcctggggatcccctgggcgcccctgtccagctgcccctcccaggccctccagctggccggctgcctgagccagctccactccggcctgttcctgtaccaggggctcctgcaggccctggagggcatcagcccggagctcgggcccaccctggacaccctgcagctcgacgtcgccgacttcgccacgaccatctggcagcagatggaggagctgggcatggcccccgcgctgcagcccacccagggggccatgccggccttcgcctccgccttccagcggcgcgcgggcggcgtgctcgtggccagccacctccagtccttcctggaggtcagctaccgggtgctgcgccacctggcccagccctga

SEQ ID NO: 3932 - RNA, 624 nt, synthetic construct
  misc_feature 1..624: note = derived and/or modified sequence opt2 fromG-CSF__Homo_sapiens__AAK62469
  source 1..624: mol_type = other RNA
atggccggccccgccacccagtcccccatgaagctcatggccctccagctcctcctctggcactccgccctctggaccgtccaggaggccacccccctcggccccgcctcctccctcccccagtccttcctcctcaagtgcctcgagcaggtccgcaagatccagggcgacggcgccgccctccaggagaagctcgtctccgagtgcgccacctacaagctctgccaccccgaggagctcgtcctcctcggccactccctcggcatcccctgggcccccctctcctcctgcccctcccaggccctccagctcgccggctgcctctcccagctccactccggcctcttcctctaccagggcctcctccaggccctcgagggcatctcccccgagctcggccccaccctcgacaccctccagctcgacgtcgccgacttcgccaccaccatctggcagcagatggaggagctcggcatggcccccgccctccagcccacccagggcgccatgcccgccttcgcctccgccttccagcgccgcgccggcggcgtcctcgtcgcctcccacctccagtccttcctcgaggtctcctaccgcgtcctccgccacctcgcccagccctga

SEQ ID NO: 3933 - RNA, 624 nt, synthetic construct
  misc_feature 1..624: note = derived and/or modified sequence opt3 fromG-CSF__Homo_sapiens__AAK62469
  source 1..624: mol_type = other RNA
atggccggccccgctacccagagccctatgaagctgatggcactccaacttctgttgtggcactccgccttatggacagtgcaggaggcgactccactggggccggcttcttcactaccccagagtttcctcctgaaatgccttgaacaggtcagaaagatccaaggagacggtgccgcactgcaggagaaattggttagcgaatgtgccacgtacaagctctgccatcctgaggaactggtgctgctcggccactccttagggattccatgggctcccctgtcttcgtgtccttcacaggcacttcagttggccggatgcctgagccaactacatagtggcctctttctgtatcagggtcttctgcaggctttggaggggatatccccagagctcggacccaccctggatacattacagctggacgtagccgatttcgcgactaccatctggcaacagatggaggaactcggcatggcccctgcacttcagccaacacaaggcgctatgccggcctttgcatctgctttccagaggcgggccgggggagtgctggtcgcgagccacttgcagtcctttctagaagtgtcataccgcgttctgcgacatctcgcccagccctga

SEQ ID NO: 3934 - RNA, 624 nt, synthetic construct
  misc_feature 1..624: note = derived and/or modified sequence opt4 fromG-CSF__Homo_sapiens__AAK62469
  source 1..624: mol_type = other RNA
atggccggccccgccacccagagccccatgaagctgatggccctgcagctgctgctgtggcacagcgccctgtggaccgtgcaggaggccacccccctgggccccgccagcagcctgccccagagcttcctgctgaagtgcctggagcaggtgagaaagatccagggcgacggcgccgccctgcaggagaagctggtgagcgagtgcgccacctacaagctgtgccaccccgaggagctggtgctgctgggccacagcctgggcatcccctgggcccccctgagcagctgccccagccaggccctgcagctggccggctgcctgagccagctgcacagcggcctgttcctgtaccagggcctgctgcaggccctggagggcatcagccccgagctgggccccaccctggacaccctgcagctggacgtggccgacttcgccaccaccatctggcagcagatggaggagctgggcatggcccccgccctgcagcccacccagggcgccatgcccgccttcgccagcgccttccagagaagagccggcggcgtgctggtggccagccacctgcagagcttcctggaggtgagctacagagtgctgagacacctggcccagccctga

SEQ ID NO: 3935 - RNA, 624 nt, synthetic construct
  misc_feature 1..624: note = derived and/or modified sequence opt5 fromG-CSF__Homo_sapiens__AAK62469
  source 1..624: mol_type = other RNA
atggccggccccgctacccagagccctatgaagctgatggccctccaactgcttctgtggcactccgcgctctggacagtgcaggaggctacgccgctggggcccgcctctagccttcctcagtccttcctgctcaaatgcctggaacaggtcagaaagatccaaggagacggcgccgctctgcaggagaaactcgtttctgaatgtgccacctacaagctgtgccatcccgaggaacttgtgctgctcgggcacagcctgggcattccttgggctcccctttcctcttgtcctagccaggccctgcagctcgcgggatgcctgtcccaactgcatagcgggctctttctgtatcagggacttctgcaggccctcgagggcatctctccggagctgggccccacacttgataccctgcagctcgacgtggctgatttcgccacaaccatttggcaacagatggaggaactggggatggctcctgccctgcagcccacacaaggagcgatgcctgcctttgcttccgccttccagcggcgcgctggcggggtcctcgtggccagccatctgcagtcttttcttgaagtttcctacagagtgctgcggcacctcgcccagccctga

SEQ ID NO: 3936 - RNA, 624 nt, synthetic construct
  misc_feature 1..624: note = derived and/or modified sequence opt6 fromG-CSF__Homo_sapiens__AAK62469
  source 1..624: mol_type = other RNA
atggcaggaccagcaacacaatcaccaatgaaattaatggcactacaattactattatggcactcagcactatggacagtacaagaagcaacaccattaggaccagcatcctcattaccacaatccttcctactaaaatgcctagaacaagtaagaaaaatacaaggagacggagcagcattacaagaaaaattagtatctgaatgcgcaacatacaaactatgtcacccagaagaactcgtactattaggacattccctaggaataccatgggcaccactatcatcctgcccatcacaagcactacaattagcaggatgtttatcacaattacactcaggactattcctctaccaaggactactacaagcactagaaggaatatccccagaactaggaccaaccctagacacactacaattagacgtagcagacttcgcaacaacaatatggcaacaaatggaagaactaggcatggcaccagcattacaaccaacacaaggagcaatgccagcattcgcatcagcattccaacgaagagcaggaggagtattagtagcatcacaccttcaatcattcctagaagtatcttaccgagtactaagacacctagcacaaccataa

SEQ ID NO: 3937 - protein, 199 aa, synthetic construct
  REGION 1..199: note = GITRL__Homo_sapiens__Q9UNG2
MTLHPSPITCEFLFSTALISPKMCLSHLENMPLSHSRTQGAQRSSWKLWLFCSIVMLLFLCSFSWLIFIFLQLETAKEPCMAKFGPLPSKWQMASSEPPCVNKVSDWKLEILQNGLYLIYGQVAPNANYNDVAPFEVRLYKNKDMIQTLTNKSKIQNVGGTYELHVGDTIDLIFNSEHQVLKNNTYWGIILLANPQFIS

SEQ ID NO: 3938 - RNA, 600 nt, synthetic construct
  misc_feature 1..600: note = GITRL__Homo_sapiens__CCDS1305.2
  source 1..600: mol_type = other RNA
atgacattgcatccttcacccatcacttgtgaatttttgttttccacagctctcatttctccaaaaatgtgtttgagccacttggaaaatatgcctttaagccattcaagaactcaaggagctcagagatcatcctggaagctgtggctcttttgctcaatagttatgttgctatttctttgctccttcagttggctaatctttatttttctccaattagagactgctaaggagccctgtatggctaagtttggaccattaccctcaaaatggcaaatggcatcttctgaacctccttgcgtgaataaggtgtctgactggaagctggagatacttcagaatggcttatatttaatttatggccaagtggctcccaatgcaaactacaatgatgtagctccttttgaggtgcggctgtataaaaacaaagacatgatacaaactctaacaaacaaatctaaaatccaaaatgtaggagggacttatgaattgcatgttggggacaccatagacttgatattcaactctgagcatcaggttctaaaaaataatacatactggggtatcattttactagcaaatccccaattcatctcctag

SEQ ID NO: 3939 - RNA, 600 nt, synthetic construct
  misc_feature 1..600: note = derived and/or modified sequence opt1 fromGITRL__Homo_sapiens__CCDS1305.2
  source 1..600: mol_type = other RNA
atgaccctgcaccccagcccgatcacgtgcgagttcctcttctccaccgccctgatcagccccaagatgtgcctgtcccacctcgagaacatgcccctgagccactcccgcacccagggcgcccagcggagctcctggaagctgtggctgttctgcagcatcgtgatgctcctgttcctctgctccttcagctggctgatcttcatcttcctgcagctcgagaccgcgaaggagccctgcatggccaagttcgggccgctgccctccaagtggcagatggccagctccgagccgccctgcgtcaacaaggtgagcgactggaagctggagatcctccagaacggcctgtacctgatctacgggcaggtcgcccccaacgccaactacaacgacgtggcgcccttcgaggtgcgcctctacaagaacaaggacatgatccagaccctgacgaacaagtccaagatccagaacgtgggcgggacctacgagctgcacgtcggcgacaccatcgacctcatcttcaacagcgagcaccaggtgctgaagaacaacacctactggggcatcatcctgctcgccaacccccagttcatctcctga

SEQ ID NO: 3940 - RNA, 600 nt, synthetic construct
  misc_feature 1..600: note = derived and/or modified sequence opt2 fromGITRL__Homo_sapiens__CCDS1305.2
  source 1..600: mol_type = other RNA
atgaccctccacccctcccccatcacctgcgagttcctcttctccaccgccctcatctcccccaagatgtgcctctcccacctcgagaacatgcccctctcccactcccgcacccagggcgcccagcgctcctcctggaagctctggctcttctgctccatcgtcatgctcctcttcctctgctccttctcctggctcatcttcatcttcctccagctcgagaccgccaaggagccctgcatggccaagttcggccccctcccctccaagtggcagatggcctcctccgagcccccctgcgtcaacaaggtctccgactggaagctcgagatcctccagaacggcctctacctcatctacggccaggtcgcccccaacgccaactacaacgacgtcgcccccttcgaggtccgcctctacaagaacaaggacatgatccagaccctcaccaacaagtccaagatccagaacgtcggcggcacctacgagctccacgtcggcgacaccatcgacctcatcttcaactccgagcaccaggtcctcaagaacaacacctactggggcatcatcctcctcgccaacccccagttcatctcctga

SEQ ID NO: 3941 - RNA, 600 nt, synthetic construct
  misc_feature 1..600: note = derived and/or modified sequence opt3 fromGITRL__Homo_sapiens__CCDS1305.2
  source 1..600: mol_type = other RNA
atgaccctgcaccccagccctatcacatgcgagttcctcttttccactgcccttatttctccaaagatgtgtctgtcacatttggaaaacatgccgttaagtcacagcagaacgcagggcgctcaaaggtcctcttggaaactgtggctattctgctcgatagtgatgctcctgtttctttgttcattcagctggctgatctttattttcttgcagctcgagaccgcaaaggaaccctgcatggccaaatttgggcctctgccaagtaagtggcagatggcgtcctctgagcccccttgtgtcaataaagttagcgactggaagctggaaatcctccagaacggattatacctgatttatggtcaagtggctccaaatgccaactacaatgatgtagcacccttcgaggtgcggctttataagaacaaagacatgatccagacattgactaataagtccaaaatacagaacgtcggcgggacctacgagctgcatgtgggagatacaatcgacctaatttttaattcagaacaccaggttctcaagaacaatacctattggggcatcattctgcttgccaaccctcaattcatcagttga

SEQ ID NO: 3942 - RNA, 600 nt, synthetic construct
  misc_feature 1..600: note = derived and/or modified sequence opt4 fromGITRL__Homo_sapiens__CCDS1305.2
  source 1..600: mol_type = other RNA
atgaccctgcaccccagccccatcacctgcgagttcctgttcagcaccgccctgatcagccccaagatgtgcctgagccacctggagaacatgcccctgagccacagcagaacccagggcgcccagagaagcagctggaagctgtggctgttctgcagcatcgtgatgctgctgttcctgtgcagcttcagctggctgatcttcatcttcctgcagctggagaccgccaaggagccctgcatggccaagttcggccccctgcccagcaagtggcagatggccagcagcgagcccccctgcgtgaacaaggtgagcgactggaagctggagatcctgcagaacggcctgtacctgatctacggccaggtggcccccaacgccaactacaacgacgtggcccccttcgaggtgagactgtacaagaacaaggacatgatccagaccctgaccaacaagagcaagatccagaacgtgggcggcacctacgagctgcacgtgggcgacaccatcgacctgatcttcaacagcgagcaccaggtgctgaagaacaacacctactggggcatcatcctgctggccaacccccagttcatcagctga

SEQ ID NO: 3943 - RNA, 600 nt, synthetic construct
  misc_feature 1..600: note = derived and/or modified sequence opt5 fromGITRL__Homo_sapiens__CCDS1305.2
  source 1..600: mol_type = other RNA
atgaccctgcaccccagccctatcacatgcgagttcctcttttccacggccctgatttctccgaagatgtgtcttagccatctggaaaacatgcccctctcccactctagaacccagggcgctcaacggagctcctggaaactgtggcttttctgctctatcgtgatgctgctctttctgtgtagcttctcctggctgatttttatcttcctccagctggagacagccaaggaaccttgcatggcgaaatttgggccccttcctagcaagtggcagatggcttcttccgagcccccttgtgtcaataaagttagcgactggaagctggaaattctccagaacggactgtaccttatctatggccaagtggccccgaatgccaactacaatgatgtggctcccttcgaggtccgcctgtataagaacaaagacatgatccagaccctcacaaataagtctaaaattcagaacgttgggggaacctacgagctgcatgtgggcgatacaatcgacctgatttttaattccgaacaccaggtgctcaagaacaatacctattgggggatcattctgcttgccaaccctcaattcatcagctga

SEQ ID NO: 3944 - RNA, 600 nt, synthetic construct
  misc_feature 1..600: note = derived and/or modified sequence opt6 fromGITRL__Homo_sapiens__CCDS1305.2
  source 1..600: mol_type = other RNA
atgacactacacccatcacccataacatgcgaattcctattctcaacagccctaatatcaccaaaaatgtgcctatcacacctagaaaacatgccactatcacactcaagaacacaaggagcacaaagatcatcatggaaactctggctattctgctcaatcgtaatgttactattcctatgctccttctcatggctaatattcatattcctccaactagaaacagcaaaagaaccatgcatggccaaattcggaccattaccatctaaatggcaaatggcatcatcagaacccccatgcgtaaacaaagtatcagactggaaactagaaatattacaaaacggactctatttaatatacggacaagtagcaccaaacgcaaactacaacgacgtagcaccattcgaagtaagactatacaaaaataaagacatgatacaaacactaacaaacaaatcaaaaatacaaaacgtaggaggaacatacgaactacacgtaggagacacaatagacctaatcttcaactcagaacaccaagtactaaaaaacaacacatactggggaataatactactagcaaacccacaattcatatcataa

SEQ ID NO: 3945 - protein, 144 aa, synthetic construct
  REGION 1..144: note = GM-CSF__Homo_sapiens__P04141
MWLQSLLLLGTVACSISAPARSPSPSTQPWEHVNAIQEARRLLNLSRDTAAEMNETVEVISEMFDLQEPTCLQTRLELYKQGLRGSLTKLKGPLTMMASHYKQHCPPTPETSCATQIITFESFKENLKDFLLVIPFDCWEPVQE

SEQ ID NO: 3946 - RNA, 435 nt, synthetic construct
  misc_feature 1..435: note = GM-CSF__Homo_sapiens__AAA52122
  source 1..435: mol_type = other RNA
atgtggctgcagagcctgctgctcttgggcactgtggcctgcagcatctctgcacccgcccgctcgcccagccccagcacacagccctgggagcatgtgaatgccatccaggaggcccggcgtctcctgaacctgagtagagacactgctgctgagatgaatgaaacagtagaagtcatctcagaaatgtttgacctccaggagccgacctgcctacagacccgcctggagctgtacaagcagggcctgcggggcagcctcaccaagctcaagggccccttgaccatgatggccagccactacaaacagcactgccctccaaccccggaaacttcctgtgcaacccagattatcacctttgaaagtttcaaagagaacctgaaggactttctgcttgtcatcccctttgactgctgggagccagtccaggagtga

SEQ ID NO: 3947 - RNA, 435 nt, synthetic construct
  misc_feature 1..435: note = derived and/or modified sequence opt1 fromGM-CSF__Homo_sapiens__AAA52122
  source 1..435: mol_type = other RNA
atgtggctgcagagcctcctgctgctcggcaccgtggcctgctccatcagcgcccccgcgcgctccccgagcccctccacccagccctgggagcacgtcaacgccatccaggaggcccggcgcctgctgaacctcagccgggacacggccgccgagatgaacgagaccgtggaggtgatctccgagatgttcgacctgcaggagccgacctgcctgcagacccgcctcgagctgtacaagcaggggctgcggggcagcctcacgaagctgaaggggcccctgaccatgatggcgtcccactacaagcagcactgcccgcccacccccgagaccagctgcgccacgcagatcatcaccttcgagtccttcaaggagaacctcaaggacttcctgctggtcatccccttcgactgctgggagcccgtgcaggagtga

SEQ ID NO: 3948 - RNA, 435 nt, synthetic construct
  misc_feature 1..435: note = derived and/or modified sequence opt2 fromGM-CSF__Homo_sapiens__AAA52122
  source 1..435: mol_type = other RNA
atgtggctccagtccctcctcctcctcggcaccgtcgcctgctccatctccgcccccgcccgctccccctccccctccacccagccctgggagcacgtcaacgccatccaggaggcccgccgcctcctcaacctctcccgcgacaccgccgccgagatgaacgagaccgtcgaggtcatctccgagatgttcgacctccaggagcccacctgcctccagacccgcctcgagctctacaagcagggcctccgcggctccctcaccaagctcaagggccccctcaccatgatggcctcccactacaagcagcactgcccccccacccccgagacctcctgcgccacccagatcatcaccttcgagtccttcaaggagaacctcaaggacttcctcctcgtcatccccttcgactgctgggagcccgtccaggagtga

SEQ ID NO: 3949 - RNA, 435 nt, synthetic construct
  misc_feature 1..435: note = derived and/or modified sequence opt3 fromGM-CSF__Homo_sapiens__AAA52122
  source 1..435: mol_type = other RNA
atgtggctgcagagcctccttctgttgggcaccgtggcctgctccatctctgctcccgcaagatcacctagtccaagcacacaaccgtgggagcacgtcaacgccattcaggaagcgaggcggttactgaatctatcccgcgacactgctgccgagatgaacgaaacggttgaggtgatatctgaaatgttcgatctccaggagcccacctgtctgcagacacgacttgagctgtacaagcaagggttgcgtggatcgctcactaaactgaagggtcctctgaccatgatggcatcacattataaacagcactgcccacccacacctgaaaccagctgtgccactcagatcattacatttgagagtttcaaggaaaatctcaaagactttttactggtaatcccattcgattgctgggagcccgtgcaggagtga

SEQ ID NO: 3950 - RNA, 435 nt, synthetic construct
  misc_feature 1..435: note = derived and/or modified sequence opt4 fromGM-CSF__Homo_sapiens__AAA52122
  source 1..435: mol_type = other RNA
atgtggctgcagagcctgctgctgctgggcaccgtggcctgcagcatcagcgcccccgccagaagccccagccccagcacccagccctgggagcacgtgaacgccatccaggaggccagaagactgctgaacctgagcagagacaccgccgccgagatgaacgagaccgtggaggtgatcagcgagatgttcgacctgcaggagcccacctgcctgcagaccagactggagctgtacaagcagggcctgagaggcagcctgaccaagctgaagggccccctgaccatgatggccagccactacaagcagcactgcccccccacccccgagaccagctgcgccacccagatcatcaccttcgagagcttcaaggagaacctgaaggacttcctgctggtgatccccttcgactgctgggagcccgtgcaggagtga

SEQ ID NO: 3951 - RNA, 435 nt, synthetic construct
  misc_feature 1..435: note = derived and/or modified sequence opt5 fromGM-CSF__Homo_sapiens__AAA52122
  source 1..435: mol_type = other RNA
atgtggctgcagagcctcctgcttctgggcaccgtggcctgctccatctctgctcccgccagaagcccttccccgtctacacaaccctgggagcacgtcaacgcgattcaggaagctcggcgcctcctgaatcttagcagagacacggccgccgagatgaacgaaaccgttgaggtgatctccgaaatgttcgatctgcaggagcctacatgtctccagacccggctggagctgtacaagcaagggctccgcggatctctgacaaaacttaagggccccctgaccatgatggctagccattataaacagcactgccctcccacacctgaaacctcctgtgccacgcagattatcacctttgagagcttcaaggaaaatctcaaagactttctgcttgtgattccgttcgattgctgggagcccgtccaggagtga

SEQ ID NO: 3952 - RNA, 435 nt, synthetic construct
  misc_feature 1..435: note = derived and/or modified sequence opt6 fromGM-CSF__Homo_sapiens__AAA52122
  source 1..435: mol_type = other RNA
atgtggctccaatcactactactactaggaacagtagcatgctcaatatcagcaccagcaagatcaccatcaccatcaacacaaccatgggaacacgtaaacgcaatacaagaagcaagaagactactaaacttatcaagagacacagcagcagaaatgaacgaaacagtagaagtcatatcagaaatgttcgacctacaagaaccaacatgcctacaaacaagactagaactatacaaacaaggactaagaggatcactaacaaaactaaaaggaccactaacaatgatggcatcacactacaaacaacactgcccaccaacaccagaaacatcatgcgcaacacaaataataacattcgaatcattcaaagaaaacctaaaagacttcctactagtaataccattcgactgctgggaaccagtacaagaataa

SEQ ID NO: 3953 - protein, 189 aa, synthetic construct [sequence omitted]

SEQ ID NO: 3954 - RNA, 570 nt, synthetic construct
  misc_feature 1..570: note = IFNalpha__Homo_sapiens__AET86952
  source 1..570: mol_type = other RNA
atggcctcgccctttgctttactgatggtcctggtggtgctcagctgcaagtcaagctgctctccgggctgtgatctccctgagacccacagcctggataacaggaggaccttgatgctcctggcacaaatgagcagaatctctccttcctcctgtctgatggacagacatgactttggatttccccaggaggagtttgatggcaaccagttccagaaggctccagccatctctgtcctccaagagctgatccagcagatcttcaacctctttaccacaaaagattcatctgctgcttgggatgaggacctcctagacaaattctgcaccgaactctaccagcagctgaatgacttggaagcctgtgtgatgcaggaggagagggtgggagaaactcccctgatgaatgcggactccatcttggctgtgaagaaatacttccgaagaatcactctctatctgacggagaagaaatacagcccttgtgcctgggaggttgtcagagcagaaatcgtgagatccctctctttatcaacaaacttgcaagaaagattaaggaggaaggaataa

SEQ ID NO: 3955 - RNA, 570 nt, synthetic construct
  misc_feature 1..570: note = derived and/or modified sequence opt1 fromIFNalpha__Homo_sapiens__AET86952
  source 1..570: mol_type = other RNA
atggccagccccttcgccctgctcatggtgctggtcgtgctgtcctgcaagagctcctgcagcccgggctgcgacctccccgagacccactccctggacaaccgccggaccctgatgctcctggcgcagatgagccgcatctcccccagctcctgcctgatggaccggcacgacttcgggttcccccaggaggagttcgacggcaaccagttccagaaggccccggccatcagcgtgctccaggagctgatccagcagatcttcaacctgttcacgaccaaggactccagcgccgcctgggacgaggacctcctggacaagttctgcaccgagctgtaccagcagctcaacgacctggaggcgtgcgtcatgcaggaggagcgcgtgggggagacgcccctgatgaacgccgactccatcctcgccgtgaagaagtacttccggcgcatcaccctgtacctgaccgagaagaagtacagcccctgcgcctgggaggtcgtgcgggcggagatcgtgcgctccctcagcctgtccaccaacctgcaggagcggctccgccggaaggagtga

SEQ ID NO: 3956 - RNA, 570 nt, synthetic construct
  misc_feature 1..570: note = derived and/or modified sequence opt2 fromIFNalpha__Homo_sapiens__AET86952
  source 1..570: mol_type = other RNA
atggcctcccccttcgccctcctcatggtcctcgtcgtcctctcctgcaagtcctcctgctcccccggctgcgacctccccgagacccactccctcgacaaccgccgcaccctcatgctcctcgcccagatgtcccgcatctccccctcctcctgcctcatggaccgccacgacttcggcttcccccaggaggagttcgacggcaaccagttccagaaggcccccgccatctccgtcctccaggagctcatccagcagatcttcaacctcttcaccaccaaggactcctccgccgcctgggacgaggacctcctcgacaagttctgcaccgagctctaccagcagctcaacgacctcgaggcctgcgtcatgcaggaggagcgcgtcggcgagacccccctcatgaacgccgactccatcctcgccgtcaagaagtacttccgccgcatcaccctctacctcaccgagaagaagtactccccctgcgcctgggaggtcgtccgcgccgagatcgtccgctccctctccctctccaccaacctccaggagcgcctccgccgcaaggagtga

SEQ ID NO: 3957 - RNA, 570 nt, synthetic construct
  misc_feature 1..570: note = derived and/or modified sequence opt3 fromIFNalpha__Homo_sapiens__AET86952
  source 1..570: mol_type = other RNA
atggccagccccttcgctctgctcatggtgcttgtcgttctgtcctgcaagtcttcatgtagtcctggctgcgacttgccagagacccacagcttagataacagaaggacactgatgctactcgcacagatgtcccggatctctccgtcgtcatgtctgatggaccgccatgattttgggttcccccaagaagagtttgacggaaatcagttccagaaagcccctgcgattagcgtgcttcaggaactgatacaacagatctttaacttgttcactacgaaggatagttccgctgcctgggacgaggatctcctggacaaattttgcaccgaactgtaccagcagctcaatgatttagaggcatgtgtaatgcaagaggaacgagtgggtgagacaccactgatgaacgccgactctattcttgctgtcaagaaatatttccgtagaatcactttgtacctgaccgaaaagaagtatagcccctgcgcatgggaggtggttagggccgagattgtgcggtccctatcactcagtacaaatctgcaggaacgccttagaaggaaagagtga

SEQ ID NO: 3958 - RNA, 570 nt, synthetic construct
  misc_feature 1..570: note = derived and/or modified sequence opt4 fromIFNalpha__Homo_sapiens__AET86952
  source 1..570: mol_type = other RNA
atggccagccccttcgccctgctgatggtgctggtggtgctgagctgcaagagcagctgcagccccggctgcgacctgcccgagacccacagcctggacaacagaagaaccctgatgctgctggcccagatgagcagaatcagccccagcagctgcctgatggacagacacgacttcggcttcccccaggaggagttcgacggcaaccagttccagaaggcccccgccatcagcgtgctgcaggagctgatccagcagatcttcaacctgttcaccaccaaggacagcagcgccgcctgggacgaggacctgctggacaagttctgcaccgagctgtaccagcagctgaacgacctggaggcctgcgtgatgcaggaggagagagtgggcgagacccccctgatgaacgccgacagcatcctggccgtgaagaagtacttcagaagaatcaccctgtacctgaccgagaagaagtacagcccctgcgcctgggaggtggtgagagccgagatcgtgagaagcctgagcctgagcaccaacctgcaggagagactgagaagaaaggagtga

SEQ ID NO: 3959 - RNA, 570 nt, synthetic construct
  misc_feature 1..570: note = derived and/or modified sequence opt5 fromIFNalpha__Homo_sapiens__AET86952
  source 1..570: mol_type = other RNA
atggccagccccttcgctctgctcatggtgctggtcgttctttcctgcaagtctagctgttcccctggctgcgacctgccggagacccactctctcgataacagacggacactgatgcttctggcccagatgagccgcatctccccctctagctgtctcatggacagacatgattttgggttccctcaagaagagtttgacggaaatcagttccagaaagcgcccgctatttccgtgctgcaggaactgatccaacagatttttaacctcttcacgaccaaggatagctctgccgcctgggacgaggatctgcttgacaaattttgcacagaactgtaccagcagctcaatgatctggaggcttgtgtgatgcaagaggaacgggtcggcgagacccctcttatgaacgccgactccatcctggctgtgaagaaatatttccgcagaattacactctacctgaccgaaaagaagtatagcccctgcgcctgggaggttgtgcgggcggagatcgtccgctctctgtccctcagcacaaatctgcaggaaagacttcggcgcaaagagtga

SEQ ID NO: 3960 - RNA, 570 nt, synthetic construct
  misc_feature 1..570: note = derived and/or modified sequence opt6 fromIFNalpha__Homo_sapiens__AET86952
  source 1..570: mol_type = other RNA
atggcatcaccattcgcattacttatggtactagtagtattatcttgcaaatcatcatgctccccaggatgcgacctaccagaaacacactcactagacaacagaagaacattaatgctactagcacaaatgtcacgaataagcccatcatcatgcctaatggacagacacgacttcggattcccacaagaagaattcgacggaaaccaatttcaaaaagccccagcaatatcagtactacaagaactaatacaacaaatattcaacctattcacaacaaaagacagctcagcagcatgggacgaagacctattagacaaattctgcacagaactataccaacaactaaacgacctagaagcatgcgtaatgcaagaagaaagagtaggcgaaacaccattaatgaacgcagactcaatactagcagtaaaaaaatactttagaagaataacattatacttaacagaaaaaaaatacagcccatgtgcctgggaagtagtaagagcagaaatagtaagatcactatcactatcaacaaacttacaagaaagattaagaagaaaagaataa

SEQ ID NO: 3961 - protein, 189 aa, synthetic construct
  REGION 1..189: note = IFNalpha__Homo_sapiens__P01562
MASPFALLMVLVVLSCKSSCSLGCDLPETHSLDNRRTLMLLAQMSRISPSSCLMDRHDFGFPQEEFDGNQFQKAPAISVLHELIQQIFNLFTTKDSSAAWDEDLLDKFCTELYQQLNDLEACVMQEERVGETPLMNADSILAVKKYFRRITLYLTEKKYSPCAWEVVRAEIMRSLSLSTNLQERLRRKE

SEQ ID NO: 3962 - RNA, 570 nt, synthetic construct
  misc_feature 1..570: note = IFNalpha__Homo_sapiens__AAB59403
  source 1..570: mol_type = other RNA
atggcctcgccctttgctttactgatggtcctggtggtgctcagctgcaagtcaagctgctctctgggctgtgatctccctgagacccacagcctggataacaggaggaccttgatgctcctggcacaaatgagcagaatctctccttcctcctgtctgatggacagacatgactttggatttccccaggaggagtttgatggcaaccagttccagaaggctccagccatctctgtcctccatgagctgatccagcagatcttcaacctctttaccacaaaagattcatctgctgcttgggatgaggacctcctagacaaattctgcaccgaactctaccagcagctgaatgacttggaagcctgtgtgatgcaggaggagagggtgggagaaactcccctgatgaatgcggactccatcttggctgtgaagaaatacttccgaagaatcactctctatctgacagagaagaaatacagcccttgtgcctgggaggttgtcagagcagaaatcatgagatccctctctttatcaacaaacttgcaagaaagattaaggaggaaggaataa

SEQ ID NO: 3963 - RNA, 570 nt, synthetic construct
  misc_feature 1..570: note = derived and/or modified sequence opt1 fromIFNalpha__Homo_sapiens__AAB59403
  source 1..570: mol_type = other RNA
atggccagccccttcgccctgctcatggtgctggtcgtgctgtcctgcaagagctcctgcagcctcggctgcgacctgccggagacccactccctggacaaccgccggaccctcatgctgctggcgcagatgagccgcatctcccccagctcctgcctcatggaccggcacgacttcgggttcccccaggaggagttcgacggcaaccagttccagaaggcccccgccatcagcgtgctgcacgagctgatccagcagatcttcaacctcttcacgaccaaggactccagcgccgcctgggacgaggacctgctggacaagttctgcaccgagctctaccagcagctgaacgacctggaggcgtgcgtcatgcaggaggagcgcgtgggggagaccccgctcatgaacgccgactccatcctggccgtgaagaagtacttccggcgcatcacgctgtacctcaccgagaagaagtacagcccctgcgcctgggaggtcgtgcgggcggagatcatgcgctccctgagcctgtccaccaacctccaggagcggctgcgccggaaggagtga

SEQ ID NO: 3964 - RNA, 570 nt, synthetic construct
  misc_feature 1..570: note = derived and/or modified sequence opt2 fromIFNalpha__Homo_sapiens__AAB59403
  source 1..570: mol_type = other RNA
atggcctcccccttcgccctcctcatggtcctcgtcgtcctctcctgcaagtcctcctgctccctcggctgcgacctccccgagacccactccctcgacaaccgccgcaccctcatgctcctcgcccagatgtcccgcatctccccctcctcctgcctcatggaccgccacgacttcggcttcccccaggaggagttcgacggcaaccagttccagaaggcccccgccatctccgtcctccacgagctcatccagcagatcttcaacctcttcaccaccaaggactcctccgccgcctgggacgaggacctcctcgacaagttctgcaccgagctctaccagcagctcaacgacctcgaggcctgcgtcatgcaggaggagcgcgtcggcgagacccccctcatgaacgccgactccatcctcgccgtcaagaagtacttccgccgcatcaccctctacctcaccgagaagaagtactccccctgcgcctgggaggtcgtccgcgccgagatcatgcgctccctctccctctccaccaacctccaggagcgcctccgccgcaaggagtga

SEQ ID NO: 3965 - RNA, 570 nt, synthetic construct
  misc_feature 1..570: note = derived and/or modified sequence opt3 fromIFNalpha__Homo_sapiens__AAB59403
  source 1..570: mol_type = other RNA
atggccagccccttcgctctgctcatggtgcttgtcgttctgtcctgcaagtcttcatgtagtttgggctgcgacttacctgagacccacagcctggataacagaaggacactaatgctcctggcacagatgtcccggatctctccatcgtcatgtcttatggaccgccatgattttgggttcccgcaagaagagtttgacggaaatcagttccagaaagcccccgcgattagcgtgctgcacgaattgatacagcaaatctttaacctcttcactacgaaggatagttccgctgcctgggacgaggatctgctggacaaattttgcaccgaactctaccagcagttaaatgatctggaggcatgtgtaatgcaggaggaacgagtgggtgagacacctcttatgaacgccgactctattttggctgtcaagaaatatttccgtagaatcactctgtacctaaccgaaaagaagtatagcccatgcgcatgggaggtggttagggccgagattatgcggtccctctcactgagtacaaatcttcaagaacgcctgagaaggaaagagtga

SEQ ID NO: 3966 - RNA, 570 nt, synthetic construct
  misc_feature 1..570: note = derived and/or modified sequence opt4 fromIFNalpha__Homo_sapiens__AAB59403
  source 1..570: mol_type = other RNA
atggccagccccttcgccctgctgatggtgctggtggtgctgagctgcaagagcagctgcagcctgggctgcgacctgcccgagacccacagcctggacaacagaagaaccctgatgctgctggcccagatgagcagaatcagccccagcagctgcctgatggacagacacgacttcggcttcccccaggaggagttcgacggcaaccagttccagaaggcccccgccatcagcgtgctgcacgagctgatccagcagatcttcaacctgttcaccaccaaggacagcagcgccgcctgggacgaggacctgctggacaagttctgcaccgagctgtaccagcagctgaacgacctggaggcctgcgtgatgcaggaggagagagtgggcgagacccccctgatgaacgccgacagcatcctggccgtgaagaagtacttcagaagaatcaccctgtacctgaccgagaagaagtacagcccctgcgcctgggaggtggtgagagccgagatcatgagaagcctgagcctgagcaccaacctgcaggagagactgagaagaaaggagtga

SEQ ID NO: 3967 - RNA, 570 nt, synthetic construct
  misc_feature 1..570: note = derived and/or modified sequence opt5 fromIFNalpha__Homo_sapiens__AAB59403
  source 1..570: mol_type = other RNA
atggccagccccttcgctctgctcatggtgctggtcgttctttcctgcaagtctagctgttccctgggctgcgacctccctgagacccactctctggataacagacggacacttatgctgctcgcccagatgagccgcatctccccgtctagctgtctgatggacagacatgattttgggttcccccaagaagagtttgacggaaatcagttccagaaagcgcctgctatttccgtgctgcacgaactcatccagcaaatttttaacctgttcacgaccaaggatagctctgccgcctgggacgaggatcttctggacaaattttgcacagaactctaccagcagctgaatgatcttgaggcttgtgtgatgcaggaggaacgggtcggcgagacacccctgatgaacgccgactccatcctcgctgtgaagaaatatttccgcagaattaccctgtacctgaccgaaaagaagtatagcccttgcgcctgggaggttgtgcgggcggagatcatgcgctctctctccctgagcacaaatcttcaagaaagactgcggcgcaaagagtga

SEQ ID NO: 3968 - RNA, 570 nt, synthetic construct
  misc_feature 1..570: note = derived and/or modified sequence opt6 fromIFNalpha__Homo_sapiens__AAB59403
  source 1..570: mol_type = other RNA
atggcatcaccattcgccctactaatggtcctagtagtactatcatgcaaatcatcatgctcactaggatgcgacctaccagaaacacactcactagataacagaagaacactaatgctactagcacaaatgtcacgaatatcaccaagctcatgcctaatggacagacacgacttcggattcccacaagaagaattcgatggaaaccaattccaaaaagcaccagcaataagcgtactacacgaactaatacaacaaatattcaatctattcacaacaaaagactcatcagcagcatgggacgaagacctactagacaaattctgcacagaactataccaacaattaaacgacttagaagcatgcgtaatgcaagaagaaagagtaggagaaacaccactaatgaacgccgactcaatactagcagtaaaaaaatatttcagaagaatcacattatacctaacagaaaaaaaatactcaccatgcgcatgggaagtagtaagagcagaaataatgagatcattatcattatcaacaaacctacaagaaagattaagacgaaaagaataa

SEQ ID NO: 3969 - protein, 188 aa, synthetic construct [sequence omitted]

SEQ ID NO: 3970 - RNA, 567 nt, synthetic construct
  misc_feature 1..567: note = IFNalpha__Homo_sapiens__AAA59181
  source 1..567: mol_type = other RNA
atggccttgacctttgctttactggtggccctcctggtgctcagctgcaagtcaagctgctctgtgggctgtgatctgcctcaaacccacagcctgggtagcaggaggaccttgatgctcctggcacagatgaggaaaatctctcttttctcctgcttgaaggacagacatgactttggatttccccaggaggagtttggcaaccagttccaaaaggctgaaaccatccctgtcctccatgagatgatccagcagatcttcaatctcttcagcacaaaggactcatctgctgcttgggatgagaccctcctagacaaattctacactgaactctaccagcagctgaatgacctggaagcctgtgtgatacagggggtgggggtgacagagactcccctgatgaaggaggactccattctggctgtgaggaaatacttccaaagaatcactctctatctgaaagagaagaaatacagcccttgtgcctgggaggttgtcagagcagaaatcatgagatctttttctttgtcaacaaacttgcaagaaagtttaagaagtaaggaatga

SEQ ID NO: 3971 - RNA, 567 nt, synthetic construct
  misc_feature 1..567: note = derived and/or modified sequence opt1 fromIFNalpha__Homo_sapiens__AAA59181
  source 1..567: mol_type = other RNA
atggccctgaccttcgccctcctggtggcgctgctcgtcctgagctgcaagtccagctgctccgtgggctgcgacctgccccagacccacagcctcgggtcccgccggacgctgatgctgctcgcccagatgcgcaagatcagcctgttctcctgcctgaaggaccggcacgacttcggcttcccgcaggaggagttcgggaaccagttccagaaggccgagaccatccccgtgctccacgagatgatccagcagatcttcaacctgttcagcaccaaggactccagcgccgcctgggacgagaccctgctcgacaagttctacacggagctgtaccagcagctgaacgacctcgaggcgtgcgtcatccagggcgtgggggtgaccgagacgcccctgatgaaggaggactccatcctggccgtccgcaagtacttccagcggatcaccctctacctgaaggagaagaagtacagcccctgcgcctgggaggtggtgcgcgccgagatcatgcggtccttcagcctgtccaccaacctccaggagagcctgcgctccaaggagtga

SEQ ID NO: 3972 - RNA, 567 nt, synthetic construct
  misc_feature 1..567: note = derived and/or modified sequence opt2 fromIFNalpha__Homo_sapiens__AAA59181
  source 1..567: mol_type = other RNA
atggccctcaccttcgccctcctcgtcgccctcctcgtcctctcctgcaagtcctcctgctccgtcggctgcgacctcccccagacccactccctcggctcccgccgcaccctcatgctcctcgcccagatgcgcaagatctccctcttctcctgcctcaaggaccgccacgacttcggcttcccccaggaggagttcggcaaccagttccagaaggccgagaccatccccgtcctccacgagatgatccagcagatcttcaacctcttctccaccaaggactcctccgccgcctgggacgagaccctcctcgacaagttctacaccgagctctaccagcagctcaacgacctcgaggcctgcgtcatccagggcgtcggcgtcaccgagacccccctcatgaaggaggactccatcctcgccgtccgcaagtacttccagcgcatcaccctctacctcaaggagaagaagtactccccctgcgcctgggaggtcgtccgcgccgagatcatgcgctccttctccctctccaccaacctccaggagtccctccgctccaaggagtga

SEQ ID NO: 3973 - RNA, 567 nt, synthetic construct
  misc_feature 1..567: note = derived and/or modified sequence opt3 fromIFNalpha__Homo_sapiens__AAA59181
  source 1..567: mol_type = other RNA
atggccctgaccttcgctctccttgtggcactgttggtcttaagctgcaagtcctcttgttcagttggctgcgacctgccccagacacacagtctagggagcagaaggactctcatgctgcttgcccaaatgcggaaaatctccctgttttcttgtttgaaggatcgccatgacttcggatttcctcaggaggagttcggtaaccagtttcagaaagcggaaacgattccagtgctccacgaaatgatacaacagatcttcaatctgttttcgaccaaggattcaagcgctgcctgggacgagacactgctcgataaattctacactgaattatatcagcagctgaacgaccttgaggcatgcgtaattcaaggcgtgggggtcaccgagacaccgttgatgaaggaagatagtatcctggccgtgcgaaagtactttcagcgtattaccctatatctcaaagagaagaaatactccccctgtgcttgggaagttgtgagagcagagatcatgaggtctttcagcctgtccactaatcttcaggagtcactgcggagtaaggaatga

SEQ ID NO: 3974 - RNA, 567 nt, synthetic construct
  misc_feature 1..567: note = derived and/or modified sequence opt4 fromIFNalpha__Homo_sapiens__AAA59181
  source 1..567: mol_type = other RNA
atggccctgaccttcgccctgctggtggccctgctggtgctgagctgcaagagcagctgcagcgtgggctgcgacctgccccagacccacagcctgggcagcagaagaaccctgatgctgctggcccagatgagaaagatcagcctgttcagctgcctgaaggacagacacgacttcggcttcccccaggaggagttcggcaaccagttccagaaggccgagaccatccccgtgctgcacgagatgatccagcagatcttcaacctgttcagcaccaaggacagcagcgccgcctgggacgagaccctgctggacaagttctacaccgagctgtaccagcagctgaacgacctggaggcctgcgtgatccagggcgtgggcgtgaccgagacccccctgatgaaggaggacagcatcctggccgtgagaaagtacttccagagaatcaccctgtacctgaaggagaagaagtacagcccctgcgcctgggaggtggtgagagccgagatcatgagaagcttcagcctgagcaccaacctgcaggagagcctgagaagcaaggagtga

SEQ ID NO: 3975 - RNA, 567 nt, synthetic construct
  misc_feature 1..567: note = derived and/or modified sequence opt5 fromIFNalpha__Homo_sapiens__AAA59181
  source 1..567: mol_type = other RNA
atggccctgaccttcgctctcctggtggcccttctggtcctcagctgcaagtcctcttgtagcgttggctgcgacctgccccagacacactcccttgggtctagacggacgctgatgctcctggcgcaaatgcgcaaaatcagcctgttttcctgtctcaaggatagacatgacttcggatttcctcaggaggaatttggcaaccagtttcagaaagctgagaccattccggtgctgcacgaaatgatccaacagattttcaatcttttctctacaaaggatagctccgccgcctgggacgagaccctgctcgataaattctacacagaactgtatcagcagcttaacgacctggaggcttgcgtgatccaaggggtcggagtgaccgagacacccctcatgaaggaagatagcattctggccgttcggaagtactttcagcgcatcaccctgtatctcaaagagaagaaatactctccttgtgcttgggaagtggtcagagccgagatcatgcggtccttcagcctgtctacgaatcttcaggagtccctgcgcagcaaggaatga

SEQ ID NO: 3976 - RNA, 567 nt, synthetic construct
  misc_feature 1..567: note = derived and/or modified sequence opt6 fromIFNalpha__Homo_sapiens__AAA59181
  source 1..567: mol_type = other RNA
atggcactaacattcgcactactagtagcattactagtattatcatgcaaatcatcatgctcagtaggatgcgacctaccacaaacacactcattaggatcaagaagaacactaatgctactagcacaaatgagaaaaatatcactattctcatgcctaaaagacagacacgacttcggattcccacaagaagaattcggaaaccaattccaaaaagcagaaacaataccagtactacacgaaatgatacaacaaatattcaacttattctcaacaaaagactcatcagcagcatgggacgaaaccctactagacaaattctacacagaactataccaacaactaaacgacctagaagcatgcgtaatacaaggagtaggagtcacagaaacaccactaatgaaagaagactcaatactagcagtaagaaaatacttccaacgaataacactatacctaaaagaaaaaaaatactccccatgcgcatgggaagtagtaagagcagaaataatgagatccttctcactatccaccaacctacaagaatccctaagatcaaaagaataa

SEQ ID NO: 3977 - protein, 189 aa, synthetic construct
  REGION 1..189: note = IFNalpha__Homo_sapiens__P01566
MALSFSLLMAVLVLSYKSICSLGCDLPQTHSLGNRRALILLGQMGRISPFSCLKDRHDFRIPQEEFDGNQFQKAQAISVLHEMIQQTFNLFSTEDSSAAWEQSLLEKFSTELYQQLNDLEACVIQEVGVEETPLMNEDSILAVRKYFQRITLYLIERKYSPCAWEVVRAEIMRSLSFSTNLQKRLRRKD

SEQ ID NO: 3978 - RNA, 570 nt, synthetic construct
  misc_feature 1..570: note = IFNalpha__Homo_sapiens__AAH69409
  source 1..570: mol_type = other RNA
atggccctgtccttttctttacttatggccgtgctggtgctcagctacaaatccatctgttctctaggctgtgatctgcctcagacccacagcctgggtaataggagggccttgatactcctgggacaaatgggaagaatctctcctttctcctgcctgaaggacagacatgatttccgaatcccccaggaggagtttgatggcaaccagttccagaaggctcaagccatctctgtcctccatgagatgatccagcagaccttcaatctcttcagcacagaggactcatctgctgcttgggaacagagcctcctagaaaaattttccactgaactttaccagcaactgaatgacctggaagcatgtgtgatacaggaggttggggtggaagagactcccctgatgaatgaggactccatcctggctgtgaggaaatacttccaaagaatcactctttatctaatagagaggaaatacagcccttgtgcctgggaggttgtcagagcagaaatcatgagatccctctcgttttcaacaaacttgcaaaaaagattaaggaggaaggattga

SEQ ID NO: 3979 - RNA, 570 nt, synthetic construct
  misc_feature 1..570: note = derived and/or modified sequence opt1 fromIFNalpha__Homo_sapiens__AAH69409
  source 1..570: mol_type = other RNA
atggccctgagcttctccctcctgatggccgtgctggtcctcagctacaagtccatctgcagcctgggctgcgacctgccccagacccactccctcgggaaccgccgggcgctgatcctgctcggccagatggggcgcatcagcccgttctcctgcctgaaggaccggcacgacttccgcatcccccaggaggagttcgacggcaaccagttccagaaggcccaggccatcagcgtgctgcacgagatgatccagcagaccttcaacctcttctccacggaggacagctccgccgcctgggagcagagcctgctggagaagttctccaccgagctctaccagcagctgaacgacctggaggcgtgcgtgatccaggaggtcggggtggaggagacgcccctcatgaacgaggacagcatcctggccgtgcggaagtacttccagcgcatcaccctgtacctcatcgagcggaagtactccccctgcgcctgggaggtcgtgcgcgccgagatcatgcggagcctgtccttcagcaccaacctgcagaagcgcctccggcgcaaggactga

SEQ ID NO: 3980 - RNA, 570 nt, synthetic construct
  misc_feature 1..570: note = derived and/or modified sequence opt2 fromIFNalpha__Homo_sapiens__AAH69409
  source 1..570: mol_type = other RNA
atggccctctccttctccctcctcatggccgtcctcgtcctctcctacaagtccatctgctccctcggctgcgacctcccccagacccactccctcggcaaccgccgcgccctcatcctcctcggccagatgggccgcatctcccccttctcctgcctcaaggaccgccacgacttccgcatcccccaggaggagttcgacggcaaccagttccagaaggcccaggccatctccgtcctccacgagatgatccagcagaccttcaacctcttctccaccgaggactcctccgccgcctgggagcagtccctcctcgagaagttctccaccgagctctaccagcagctcaacgacctcgaggcctgcgtcatccaggaggtcggcgtcgaggagacccccctcatgaacgaggactccatcctcgccgtccgcaagtacttccagcgcatcaccctctacctcatcgagcgcaagtactccccctgcgcctgggaggtcgtccgcgccgagatcatgcgctccctctccttctccaccaacctccagaagcgcctccgccgcaaggactga

SEQ ID NO: 3981 - RNA, 570 nt, synthetic construct
  misc_feature 1..570: note = derived and/or modified sequence opt3 fromIFNalpha__Homo_sapiens__AAH69409
  source 1..570: mol_type = other RNA
atggccctgagcttctccctccttatggctgtgctggtcttgtcttacaagtcaatctgcagtttaggctgtgacctgccccagacccacagcctagggaacagaagggcactcattctgcttggacaaatgggtcggatatcccctttttcttgcctgaaagatcgccatgacttccgaatcccacaggaggaatttgatggcaatcagttccagaaggcccaagcgatttcggttttgcacgagatgatccagcagacatttaacctcttctcaactgaagacagcagtgctgcctgggagcagtccctgctggaaaaattttctacggagctctatcaacagttaaatgatctggaggcatgtgtgattcaggaagtaggggtggaggaaaccccgcttatgaacgaggacagcatcttggccgtccgtaagtacttccagagaataacactgtatctaatcgagaggaaatactccccctgcgcttgggaagtggttcgggcagagattatgcgctcactcagttttagcactaatctgcaaaagagacttaggcggaaggattga

SEQ ID NO: 3982 - RNA, 570 nt, synthetic construct
  misc_feature 1..570: note = derived and/or modified sequence opt4 fromIFNalpha__Homo_sapiens__AAH69409
  source 1..570: mol_type = other RNA
atggccctgagcttcagcctgctgatggccgtgctggtgctgagctacaagagcatctgcagcctgggctgcgacctgccccagacccacagcctgggcaacagaagagccctgatcctgctgggccagatgggcagaatcagccccttcagctgcctgaaggacagacacgacttcagaatcccccaggaggagttcgacggcaaccagttccagaaggcccaggccatcagcgtgctgcacgagatgatccagcagaccttcaacctgttcagcaccgaggacagcagcgccgcctgggagcagagcctgctggagaagttcagcaccgagctgtaccagcagctgaacgacctggaggcctgcgtgatccaggaggtgggcgtggaggagacccccctgatgaacgaggacagcatcctggccgtgagaaagtacttccagagaatcaccctgtacctgatcgagagaaagtacagcccctgcgcctgggaggtggtgagagccgagatcatgagaagcctgagcttcagcaccaacctgcagaagagactgagaagaaaggactga

SEQ ID NO: 3983 - RNA, 570 nt, synthetic construct
  misc_feature 1..570: note = derived and/or modified sequence opt5 fromIFNalpha__Homo_sapiens__AAH69409
  source 1..570: mol_type = other RNA
atggccctgagcttctccctcctgatggctgtgcttgtcctgtcttacaagagcatctgctccctcggctgtgacctgccccagacccactctcttgggaacagacgggccctgattctcctgggacaaatgggccgcatcagccctttttcctgcctgaaagatagacatgacttccggattccgcaggaggaatttgatgggaatcagttccagaaggcgcaagctatctctgttctccacgagatgattcagcagacatttaacctgttcagcacggaagactccagcgccgcctgggagcagtctcttctggaaaaattttccaccgagctctatcaacagctgaatgatcttgaggcttgtgtgatccaggaagtgggagtcgaggaaacacccctgatgaacgaggacagcatcctcgccgtgcgcaagtacttccagagaattaccctgtatctgatcgagcggaaatactctccttgcgcttgggaagttgtgcgcgccgagattatgagatccctcagcttttctacaaatctgcaaaagcggcttcgcagaaaggattga

SEQ ID NO: 3984 - RNA, 570 nt, synthetic construct
  misc_feature 1..570: note = derived and/or modified sequence opt6 fromIFNalpha__Homo_sapiens__AAH69409
  source 1..570: mol_type = other RNA
atggcactatcattctcactactaatggcagtactagtactatcatacaaatccatatgctcactcggatgcgacctaccacaaacacactcactaggaaacagaagagcattaatactactaggacaaatgggaagaatatcaccattctcatgcctaaaagacagacacgacttcagaataccacaagaagaattcgacggaaaccaattccaaaaagcacaagccatatccgtactacacgaaatgatacaacaaacattcaacttattctcaacagaagacagctcagcagcatgggaacaatcactactagaaaaattctcaacagaactataccaacaattaaacgacctagaagcatgcgtaatccaagaagtaggtgtagaagaaacaccactcatgaacgaagactcaatattagcagtaagaaaatacttccaaagaatcacactatacttaatagaaagaaaatactcaccatgcgcatgggaagtcgtaagagcagaaataatgagatcattatcattctcaacaaacctacaaaaacgactaagaagaaaagactaa

SEQ ID NO: 3985 - protein, 189 aa, synthetic construct
  REGION 1..189: note = IFNalpha__Homo_sapiens__P01567
MARSFSLLMVVLVLSYKSICSLGCDLPQTHSLRNRRALILLAQMGRISPFSCLKDRHEFRFPEEEFDGHQFQKTQAISVLHEMIQQTFNLFSTEDSSAAWEQSLLEKFSTELYQQLNDLEACVIQEVGVEETPLMNEDFILAVRKYFQRITLYLMEKKYSPCAWEVVRAEIMRSFSFSTNLKKGLRRKD

SEQ ID NO: 3986 - RNA, 570 nt, synthetic construct
  misc_feature 1..570: note = IFNalpha__Homo_sapiens__AAH74991
  source 1..570: mol_type = other RNA
atggcccggtccttttctttactgatggtcgtgctggtactcagctacaaatccatctgctctctgggctgtgatctgcctcagacccacagcctgcgtaataggagggccttgatactcctggcacaaatgggaagaatctctcctttctcctgcttgaaggacagacatgaattcagattcccagaggaggagtttgatggccaccagttccagaagactcaagccatctctgtcctccatgagatgatccagcagaccttcaatctcttcagcacagaggactcatctgctgcttgggaacagagcctcctagaaaaattttccactgaactttaccagcaactgaatgacctggaagcatgtgtgatacaggaggttggggtggaagagactcccctgatgaatgaggacttcatcctggctgtgaggaaatacttccaaagaatcactctttatctaatggagaagaaatacagcccttgtgcctgggaggttgtcagagcagaaatcatgagatccttctctttttcaacaaacttgaaaaaaggattaaggaggaaggattga

SEQ ID NO: 3987 - RNA, 570 nt, synthetic construct
  misc_feature 1..570: note = derived and/or modified sequence opt1 fromIFNalpha__Homo_sapiens__AAH74991
  source 1..570: mol_type = other RNA
atggcccgcagcttctccctgctcatggtggtcctggtgctgagctacaagtccatctgcagcctcggctgcgacctgccccagacccactccctgcggaaccgccgggccctcatcctgctggcgcagatggggcgcatcagcccgttctcctgcctcaaggaccggcacgagttccgcttccccgaggaggagttcgacggccaccagttccagaagacccaggccatcagcgtgctgcacgagatgatccagcagacgttcaacctgttctccaccgaggacagctccgccgcctgggagcagagcctcctggagaagttctccaccgagctgtaccagcagctcaacgacctggaggcctgcgtcatccaggaggtgggggtggaggagacgcccctgatgaacgaggacttcatcctcgcggtccggaagtacttccagcgcatcaccctgtacctgatggagaagaagtacagcccctgcgcctgggaggtggtgcgggccgagatcatgcgctccttcagcttctccaccaacctcaagaagggcctgcggcgcaaggactga

SEQ ID NO: 3988 - RNA, 570 nt, synthetic construct
  misc_feature 1..570: note = derived and/or modified sequence opt2 fromIFNalpha__Homo_sapiens__AAH74991
  source 1..570: mol_type = other RNA
atggcccgctccttctccctcctcatggtcgtcctcgtcctctcctacaagtccatctgctccctcggctgcgacctcccccagacccactccctccgcaaccgccgcgccctcatcctcctcgcccagatgggccgcatctcccccttctcctgcctcaaggaccgccacgagttccgcttccccgaggaggagttcgacggccaccagttccagaagacccaggccatctccgtcctccacgagatgatccagcagaccttcaacctcttctccaccgaggactcctccgccgcctgggagcagtccctcctcgagaagttctccaccgagctctaccagcagctcaacgacctcgaggcctgcgtcatccaggaggtcggcgtcgaggagacccccctcatgaacgaggacttcatcctcgccgtccgcaagtacttccagcgcatcaccctctacctcatggagaagaagtactccccctgcgcctgggaggtcgtccgcgccgagatcatgcgctccttctccttctccaccaacctcaagaagggcctccgccgcaaggactga

SEQ ID NO: 3989 - RNA, 570 nt, synthetic construct
  misc_feature 1..570: note = derived and/or modified sequence opt3 fromIFNalpha__Homo_sapiens__AAH74991
  source 1..570: mol_type = other RNA
atggccaggagcttctccctgctcatggtggtccttgttctgtcttacaagtcaatctgcagtttgggctgtgacttaccccagacccacagcctgagaaaccggcgcgctctaattctcctggcacaaatggggcgaatatcccctttttcttgccttaaagatcgtcatgagttcagatttccagaagaggagttcgacggacaccagtttcagaagacacaggccatctcggtgctgcatgaaatgattcaacagactttcaatttgttttcaacggaagatagcagtgcggcttgggagcagtccctcctggagaaattctctaccgaactgtatcagcaactcaacgacttagaggcctgtgtaatccaggaagtgggtgtcgaggagacaccgctgatgaatgaagattttattcttgcagtgaggaagtacttccagcggatcactttgtatctgatggagaaaaagtacagcccctgcgcctgggaagttgtgcgcgctgagataatgagatccttttcattcagtaccaacctaaagaaaggcctcaggcggaaggactga

SEQ ID NO: 3990 - RNA, 570 nt, synthetic construct
  misc_feature 1..570: note = derived and/or modified sequence opt4 fromIFNalpha__Homo_sapiens__AAH74991
  source 1..570: mol_type = other RNA
atggccagaagcttcagcctgctgatggtggtgctggtgctgagctacaagagcatctgcagcctgggctgcgacctgccccagacccacagcctgagaaacagaagagccctgatcctgctggcccagatgggcagaatcagccccttcagctgcctgaaggacagacacgagttcagattccccgaggaggagttcgacggccaccagttccagaagacccaggccatcagcgtgctgcacgagatgatccagcagaccttcaacctgttcagcaccgaggacagcagcgccgcctgggagcagagcctgctggagaagttcagcaccgagctgtaccagcagctgaacgacctggaggcctgcgtgatccaggaggtgggcgtggaggagacccccctgatgaacgaggacttcatcctggccgtgagaaagtacttccagagaatcaccctgtacctgatggagaagaagtacagcccctgcgcctgggaggtggtgagagccgagatcatgagaagcttcagcttcagcaccaacctgaagaagggcctgagaagaaaggactga

SEQ ID NO: 3991 - RNA, 570 nt, synthetic construct
  misc_feature 1..570: note = derived and/or modified sequence opt5 fromIFNalpha__Homo_sapiens__AAH74991
  source 1..570: mol_type = other RNA
atggcccggagcttctccctgctcatggtggtcctggttctttcttacaagagcatctgctccctgggctgtgacctcccccagacccactctctgagaaaccgcagagctcttattctgctcgcccaaatggggcggatcagccctttttcctgcctgaaagatcgccatgagttcagatttccggaagaggagttcgacggacaccagtttcagaagacacaggcgatttctgtgctgcatgaaatgatccaacagacgttcaatctctttagcaccgaagattccagcgctgcctgggagcagtctctgcttgagaaattctccacagaactgtatcagcaactcaacgacctggaggcctgtgtgattcaggaagtcggcgtggaggagacaccccttatgaatgaagattttatcctggctgttcggaagtacttccagcgcatcaccctctatctgatggagaaaaagtacagcccttgcgcctgggaagtggtcagagctgagattatgcggtctttttccttcagcaccaacctgaagaaagggctccgcagaaaggactga

SEQ ID NO: 3992 - RNA, 570 nt, synthetic construct
  misc_feature 1..570: note = derived and/or modified sequence opt6 fromIFNalpha__Homo_sapiens__AAH74991
  source 1..570: mol_type = other RNA
atggcacgaagcttctcactactaatggtagtactagtactatcatacaaaagcatatgctcactcggatgcgacctaccacaaacacactcactaagaaacagaagagcactcatactattagcacaaatgggacgaatatcaccattctcatgcctaaaagacagacacgaattcagattcccagaagaagaatttgacggacaccaatttcaaaaaacacaagcaataagcgtactacacgaaatgatacaacaaacattcaacttattctcaacagaagacagctcagcagcatgggaacaatcactactagaaaaattctccacagaactataccaacaactaaacgacctagaagcatgcgtaatacaagaagtaggagtagaagaaacaccactaatgaacgaagacttcatattagcagtaagaaaatacttccaaagaatcacactatacctaatggaaaaaaaatactcaccatgcgcatgggaagtagtaagagcagaaataatgagatcattctcattctcaacaaacttaaaaaaaggactaagaagaaaagactaa

SEQ ID NO: 3993 - protein, 189 aa, synthetic construct
  REGION 1..189: note = IFNalpha__Homo_sapiens__P01568
MALSFSLLMAVLVLSYKSICSLGCDLPQTHSLGNRRALILLAQMGRISPFSCLKDRHDFGFPQEEFDGNQFQKAQAISVLHEMIQQTFNLFSTKDSSATWEQSLLEKFSTELNQQLNDLEACVIQEVGVEETPLMNVDSILAVKKYFQRITLYLTEKKYSPCAWEVVRAEIMRSFSLSKIFQERLRRKE

SEQ ID NO: 3994 - RNA, 570 nt, synthetic construct
  misc_feature 1..570: note = IFNalpha__Homo_sapiens__AAA52718
  source 1..570: mol_type = other RNA
atggccctgtccttttctttactgatggccgtgctggtgctcagctacaaatccatctgttctctgggctgtgatctgcctcagacccacagcctgggtaataggagggccttgatactcctggcacaaatgggaagaatctctcctttctcctgcctgaaggacagacatgactttggattcccccaggaggagtttgatggcaaccagttccagaaggctcaagccatctctgtcctccatgagatgatccagcagaccttcaatctcttcagcacaaaggactcatctgctacttgggaacagagcctcctagaaaaattttccactgaacttaaccagcagctgaatgacctggaagcctgcgtgatacaggaggttggggtggaagagactcccctgatgaatgtggactccatcctggctgtgaagaaatacttccaaagaatcactctttatctgacagagaagaaatacagcccttgtgcctgggaggttgtcagagcagaaatcatgagatccttctctttatcaaaaatttttcaagaaagattaaggaggaaggaatga

SEQ ID NO: 3995 - RNA, 570 nt, synthetic construct
  misc_feature 1..570: note = derived and/or modified sequence opt1 fromIFNalpha__Homo_sapiens__AAA52718
  source 1..570: mol_type = other RNA
atggccctgagcttctccctcctgatggccgtgctggtcctcagctacaagtccatctgcagcctgggctgcgacctgccccagacccactccctcgggaaccgccgggcgctgatcctgctcgcccagatgggccgcatcagcccgttctcctgcctgaaggaccggcacgacttcgggttcccccaggaggagttcgacggcaaccagttccagaaggcccaggccatcagcgtgctgcacgagatgatccagcagaccttcaacctcttctccacgaaggacagctccgccacctgggagcagagcctgctggagaagttctccaccgagctcaaccagcagctgaacgacctggaggcgtgcgtgatccaggaggtcggggtggaggagacgcccctcatgaacgtggacagcatcctggccgtcaagaagtacttccagcgcatcaccctgtacctcaccgagaagaagtactccccctgcgcctgggaggtggtgcgggccgagatcatgcgcagcttctccctgagcaagatcttccaggagcggctgcgccggaaggagtga

SEQ ID NO: 3996 - RNA, 570 nt, synthetic construct
  misc_feature 1..570: note = derived and/or modified sequence opt2 fromIFNalpha__Homo_sapiens__AAA52718
  source 1..570: mol_type = other RNA
atggccctctccttctccctcctcatggccgtcctcgtcctctcctacaagtccatctgctccctcggctgcgacctcccccagacccactccctcggcaaccgccgcgccctcatcctcctcgcccagatgggccgcatctcccccttctcctgcctcaaggaccgccacgacttcggcttcccccaggaggagttcgacggcaaccagttccagaaggcccaggccatctccgtcctccacgagatgatccagcagaccttcaacctcttctccaccaaggactcctccgccacctgggagcagtccctcctcgagaagttctccaccgagctcaaccagcagctcaacgacctcgaggcctgcgtcatccaggaggtcggcgtcgaggagacccccctcatgaacgtcgactccatcctcgccgtcaagaagtacttccagcgcatcaccctctacctcaccgagaagaagtactccccctgcgcctgggaggtcgtccgcgccgagatcatgcgctccttctccctctccaagatcttccaggagcgcctccgccgcaaggagtga

SEQ ID NO: 3997 - RNA, 570 nt, synthetic construct
  misc_feature 1..570: note = derived and/or modified sequence opt3 fromIFNalpha__Homo_sapiens__AAA52718
  source 1..570: mol_type = other RNA
atggccctgagcttctccctccttatggctgtgctggtcttgtcttacaagtcaatctgcagtttaggctgtgacctgccccagacccacagcctagggaacagaagggcactcattctgcttgcccaaatgggacggatatcccctttttcttgcctgaaagatcgccatgacttcggttttccacaggaggagttcgatggcaatcagtttcagaaggcgcaagctatctcggttttgcacgaaatgattcagcagacattcaacctcttttcaactaaagacagcagtgccacgtgggaacagtccctgctggagaagttctctaccgaactcaatcaacagttaaacgatctggaggcatgtgtgatccaggaggtaggggtggaagagacaccgcttatgaatgtcgacagcattttggccgtgaaaaagtattttcagcgaatcactctgtacctaaccgaaaagaaatattccccctgcgcttgggaggttgtgcgtgcagagataatgagatcattcagtctcagcaagatctttcaagaaaggctgcggcgcaaagagtga

SEQ ID NO: 3998 - RNA, 570 nt, synthetic construct
  misc_feature 1..570: note = derived and/or modified sequence opt4 fromIFNalpha__Homo_sapiens__AAA52718
  source 1..570: mol_type = other RNA
atggccctgagcttcagcctgctgatggccgtgctggtgctgagctacaagagcatctgcagcctgggctgcgacctgccccagacccacagcctgggcaacagaagagccctgatcctgctggcccagatgggcagaatcagccccttcagctgcctgaaggacagacacgacttcggcttcccccaggaggagttcgacggcaaccagttccagaaggcccaggccatcagcgtgctgcacgagatgatccagcagaccttcaacctgttcagcaccaaggacagcagcgccacctgggagcagagcctgctggagaagttcagcaccgagctgaaccagcagctgaacgacctggaggcctgcgtgatccaggaggtgggcgtggaggagacccccctgatgaacgtggacagcatcctggccgtgaagaagtacttccagagaatcaccctgtacctgaccgagaagaagtacagcccctgcgcctgggaggtggtgagagccgagatcatgagaagcttcagcctgagcaagatcttccaggagagactgagaagaaaggagtga

SEQ ID NO: 3999 - RNA, 570 nt, synthetic construct
  misc_feature 1..570: note = derived and/or modified sequence opt5 fromIFNalpha__Homo_sapiens__AAA52718
  source 1..570: mol_type = other RNA
atggccctgagcttctccctcctgatggctgtgcttgtcctgtcttacaagagcatctgctccctcggctgtgacctgccccagacccactctcttgggaacagacgggccctgattctcctggcgcaaatgggacgcatcagccctttttcctgcctgaaagatagacatgacttcggctttccgcaggaggagttcgatgggaatcagtttcagaaggctcaagccatttctgttctccacgaaatgatccagcagacattcaacctgtttagcacgaaagactccagcgccacctgggaacagtctcttctggagaagttctccacagaactcaatcaacagctgaacgatcttgaggcttgtgtgattcaggaggtgggagtcgaagagacacccctgatgaatgtggacagcatcctcgccgttaaaaagtattttcagcggatcaccctgtacctgaccgaaaagaaatattctccttgcgcttgggaggtggtccgcgccgagattatgagatccttcagcctctctaagatctttcaagaacggctgcgcagaaaagagtga

SEQ ID NO: 4000 - RNA, 570 nt, synthetic construct
  misc_feature 1..570: note = derived and/or modified sequence opt6 fromIFNalpha__Homo_sapiens__AAA52718
  source 1..570: mol_type = other RNA
atggcactatcattctcactcctaatggcagtactcgtactatcatacaaatcaatatgctcactaggatgcgacctaccacaaacacactcactcggaaaccgaagagcactaatactactagcacaaatgggacgaatatcaccattctcatgcctaaaagaccgacacgacttcggatttccacaagaagaattcgatggaaaccaattccaaaaagcccaagcaatatcagtattacacgaaatgatacaacaaacattcaacctattttcaacaaaagactcatcagcaacatgggaacaatcactattagaaaaattctcaacagaactaaaccaacaactaaacgacctagaagcatgcgtaatacaagaagtaggagtagaagaaacaccactaatgaacgtagactcaatactagcagtaaaaaaatacttccaaagaataacactatacctaacagaaaaaaaatactcaccctgcgcatgggaagtagtacgagcagaaataatgagatcattctcattatcaaaaatatttcaagaaagactaagaagaaaagaataa

SEQ ID NO: 4001 - protein, 189 aa, synthetic construct
  REGION 1..189: note = IFNalpha__Homo_sapiens__P01569
MALPFVLLMALVVLNCKSICSLGCDLPQTHSLSNRRTLMIMAQMGRISPFSCLKDRHDFGFPQEEFDGNQFQKAQAISVLHEMIQQTFNLFSTKDSSATWDETLLDKFYTELYQQLNDLEACMMQEVGVEDTPLMNVDSILTVRKYFQRITLYLTEKKYSPCAWEVVRAEIMRSFSLSANLQERLRRKE

SEQ ID NO: 4002 - RNA, 570 nt, synthetic construct
  misc_feature 1..570: note = IFNalpha__Homo_sapiens__AAH93755
  source 1..570: mol_type = other RNA
atggccttgccctttgttttactgatggccctggtggtgctcaactgcaagtcaatctgttctctgggctgtgatctgcctcagacccacagcctgagtaacaggaggactttgatgataatggcacaaatgggaagaatctctcctttctcctgcctgaaggacagacatgactttggatttcctcaggaggagtttgatggcaaccagttccagaaggctcaagccatctctgtcctccatgagatgatccagcagaccttcaatctcttcagcacaaaggactcatctgctacttgggatgagacacttctagacaaattctacactgaactttaccagcagctgaatgacctggaagcctgtatgatgcaggaggttggagtggaagacactcctctgatgaatgtggactctatcctgactgtgagaaaatactttcaaagaatcaccctctatctgacagagaagaaatacagcccttgtgcatgggaggttgtcagagcagaaatcatgagatccttctctttatcagcaaacttgcaagaaagattaaggaggaaggaatga

SEQ ID NO: 4003 - RNA, 570 nt, synthetic construct
  misc_feature 1..570: note = derived and/or modified sequence opt1 fromIFNalpha__Homo_sapiens__AAH93755
  source 1..570: mol_type = other RNA
atggccctgcccttcgtgctcctgatggccctggtcgtgctcaactgcaagagcatctgctccctgggctgcgacctgccgcagacccacagcctctccaaccgccggaccctgatgatcatggcgcagatggggcgcatcagccccttctcctgcctgaaggaccggcacgacttcggcttcccccaggaggagttcgacgggaaccagttccagaaggcccaggccatcagcgtgctccacgagatgatccagcagacgttcaacctgttctccaccaaggacagctccgccacctgggacgagaccctgctcgacaagttctacacggagctgtaccagcagctgaacgacctcgaggcctgcatgatgcaggaggtcggcgtggaggacacgcccctgatgaacgtggacagcatcctgaccgtccgcaagtacttccagcggatcaccctctacctgaccgagaagaagtactccccgtgcgcgtgggaggtggtgcgcgccgagatcatgcggagcttctccctgagcgccaacctccaggagcgcctgcggcgcaaggagtga

SEQ ID NO: 4004 - RNA, 570 nt, synthetic construct
  misc_feature 1..570: note = derived and/or modified sequence opt2 fromIFNalpha__Homo_sapiens__AAH93755
  source 1..570: mol_type = other RNA
atggccctccccttcgtcctcctcatggccctcgtcgtcctcaactgcaagtccatctgctccctcggctgcgacctcccccagacccactccctctccaaccgccgcaccctcatgatcatggcccagatgggccgcatctcccccttctcctgcctcaaggaccgccacgacttcggcttcccccaggaggagttcgacggcaaccagttccagaaggcccaggccatctccgtcctccacgagatgatccagcagaccttcaacctcttctccaccaaggactcctccgccacctgggacgagaccctcctcgacaagttctacaccgagctctaccagcagctcaacgacctcgaggcctgcatgatgcaggaggtcggcgtcgaggacacccccctcatgaacgtcgactccatcctcaccgtccgcaagtacttccagcgcatcaccctctacctcaccgagaagaagtactccccctgcgcctgggaggtcgtccgcgccgagatcatgcgctccttctccctctccgccaacctccaggagcgcctccgccgcaaggagtga

SEQ ID NO: 4005 - RNA, 570 nt, synthetic construct
  misc_feature 1..570: note = derived and/or modified sequence opt3 fromIFNalpha__Homo_sapiens__AAH93755
  source 1..570: mol_type = other RNA
atggccctgcccttcgtgctccttatggctctggtcgttttgaactgcaagagcatctgttccttaggctgcgacctgcctcagacccactctctatcaaatagaaggacactcatgattatggcacaaatggggcggataagtccatttagctgtctgaaagatcgccatgacttcggatttccgcaggaggagttcgatggtaaccagtttcagaaggcccaagcgatctccgtgcttcacgaaatgattcagcagactttcaatctgttttctacgaaagactcgtcagctacctgggatgaaacattgctcgacaagttctacactgagctgtatcagcaactgaacgatctcgaagcctgcatgatgcaggaggtaggcgtggaggacacccccttaatgaatgtcgatagcatcctgacagtgcgaaaatactttcagcgtattaccctttatttgactgaaaagaagtacagtccttgtgcatgggaggttgtgagagccgaaatcatgaggtccttctctctgagcgctaacctacaggagcggctccgcagaaaagagtga

SEQ ID NO: 4006 - RNA, 570 nt, synthetic construct
  misc_feature 1..570: note = derived and/or modified sequence opt4 fromIFNalpha__Homo_sapiens__AAH93755
  source 1..570: mol_type = other RNA
atggccctgcccttcgtgctgctgatggccctggtggtgctgaactgcaagagcatctgcagcctgggctgcgacctgccccagacccacagcctgagcaacagaagaaccctgatgatcatggcccagatgggcagaatcagccccttcagctgcctgaaggacagacacgacttcggcttcccccaggaggagttcgacggcaaccagttccagaaggcccaggccatcagcgtgctgcacgagatgatccagcagaccttcaacctgttcagcaccaaggacagcagcgccacctgggacgagaccctgctggacaagttctacaccgagctgtaccagcagctgaacgacctggaggcctgcatgatgcaggaggtgggcgtggaggacacccccctgatgaacgtggacagcatcctgaccgtgagaaagtacttccagagaatcaccctgtacctgaccgagaagaagtacagcccctgcgcctgggaggtggtgagagccgagatcatgagaagcttcagcctgagcgccaacctgcaggagagactgagaagaaaggagtga

SEQ ID NO: 4007 - RNA, 570 nt, synthetic construct
  misc_feature 1..570: note = derived and/or modified sequence opt5 fromIFNalpha__Homo_sapiens__AAH93755
  source 1..570: mol_type = other RNA
atggccctgcccttcgtgctcctgatggctcttgtcgttctgaactgcaagagcatctgttccctcggctgcgacctgcctcagacccactctcttagcaatagacggacactgatgattatggcccaaatggggcgcatctccccgttttcttgtctcaaagatagacatgacttcggatttccccaggaggagttcgatggcaaccagtttcagaaggcgcaagctattagcgtgctgcacgaaatgatccagcagacgttcaatctgttttccaccaaagactctagcgccacatgggatgaaaccctcctggacaagttctacacagagctttatcagcaactgaacgatctcgaagcctgcatgatgcaggaggtgggggtcgaggacacccctctgatgaatgtggattccattcttacagttcggaaatactttcagcgcatcaccctgtatctcacggaaaagaagtacagcccctgtgcttgggaggtggtcagagccgaaatcatgcggtctttctccctgagcgctaacctgcaggagcgcctcagacggaaagagtga

SEQ ID NO: 4008 - RNA, 570 nt, synthetic construct
  misc_feature 1..570: note = derived and/or modified sequence opt6 fromIFNalpha__Homo_sapiens__AAH93755
  source 1..570: mol_type = other RNA
atggcactaccattcgtactactaatggcactagtagtactcaattgcaaatcaatatgctcactaggatgcgacttaccacaaacacactcactatcaaacagaagaacactaatgataatggcacaaatgggacgaataagcccattctcatgcctaaaagacagacacgatttcggattcccacaagaagaattcgacggaaaccaattccaaaaagcacaagcaatatcagtattacacgaaatgatacaacaaacattcaacctattctcaacaaaagactcatcagcaacatgggacgaaacacttctagacaaattctacacagaactatatcaacaactaaacgacctagaagcatgcatgatgcaagaagtaggagtagaagacacaccactaatgaacgtagactcaattctaacagtacgaaaatacttccaaagaataacactatacttaacagaaaaaaaatactcaccatgcgcatgggaagtagtaagagccgaaataatgagatcattctcactatcagcaaacctacaagaaagactaagaagaaaagaataa

SEQ ID NO: 4009 - protein, 189 aa, synthetic construct
  REGION 1..189: note = IFNalpha__Homo_sapiens__P01570
MALPFALMMALVVLSCKSSCSLGCNLSQTHSLNNRRTLMLMAQMRRISPFSCLKDRHDFEFPQEEFDGNQFQKAQAISVLHEMMQQTFNLFSTKNSSAAWDETLLEKFYIELFQQMNDLEACVIQEVGVEETPLMNEDSILAVKKYFQRITLYLMEKKYSPCAWEVVRAEIMRSLSFSTNLQKRLRRKD

SEQ ID NO: 4010 - RNA, 570 nt, synthetic construct
  misc_feature 1..570: note = IFNalpha__Homo_sapiens__AAH74956
  source 1..570: mol_type = other RNA
atggcattgccctttgctttaatgatggccctggtggtgctcagctgcaagtcaagctgctctctgggctgtaatctgtctcaaacccacagcctgaataacaggaggactttgatgctcatggcacaaatgaggagaatctctcctttctcctgcctgaaggacagacatgactttgaatttccccaggaggaatttgatggcaaccagttccagaaagctcaagccatctctgtcctccatgagatgatgcagcagaccttcaatctcttcagcacaaagaactcatctgctgcttgggatgagaccctcctagaaaaattctacattgaacttttccagcaaatgaatgacctggaagcctgtgtgatacaggaggttggggtggaagagactcccctgatgaatgaggactccatcctggctgtgaagaaatacttccaaagaatcactctttatctgatggagaagaaatacagcccttgtgcctgggaggttgtcagagcagaaatcatgagatccctctctttttcaacaaacttgcaaaaaagattaaggaggaaggattga

SEQ ID NO: 4011 - RNA, 570 nt, synthetic construct
  misc_feature 1..570: note = derived and/or modified sequence opt1 fromIFNalpha__Homo_sapiens__AAH74956
  source 1..570: mol_type = other RNA
atggccctgcccttcgccctcatgatggcgctggtggtcctgagctgcaagtccagctgctccctcggctgcaacctgagccagacccactccctgaacaaccgccggaccctcatgctgatggcccagatgcgccggatcagcccgttctcctgcctgaaggaccgccacgacttcgagttcccccaggaggagttcgacgggaaccagttccagaaggcccaggccatcagcgtgctccacgagatgatgcagcagacgttcaacctgttctccaccaagaacagctccgccgcgtgggacgagaccctgctcgagaagttctacatcgagctgttccagcagatgaacgacctggaggcctgcgtgatccaggaggtcggcgtggaggagacgcccctcatgaacgaggacagcatcctggccgtgaagaagtacttccagcggatcaccctgtacctcatggagaagaagtactccccctgcgcctgggaggtcgtgcgcgcggagatcatgcggagcctgtccttcagcaccaacctgcagaagcgcctccggcgcaaggactga

SEQ ID NO: 4012 - RNA, 570 nt, synthetic construct
  misc_feature 1..570: note = derived and/or modified sequence opt2 fromIFNalpha__Homo_sapiens__AAH74956
  source 1..570: mol_type = other RNA
atggccctccccttcgccctcatgatggccctcgtcgtcctctcctgcaagtcctcctgctccctcggctgcaacctctcccagacccactccctcaacaaccgccgcaccctcatgctcatggcccagatgcgccgcatctcccccttctcctgcctcaaggaccgccacgacttcgagttcccccaggaggagttcgacggcaaccagttccagaaggcccaggccatctccgtcctccacgagatgatgcagcagaccttcaacctcttctccaccaagaactcctccgccgcctgggacgagaccctcctcgagaagttctacatcgagctcttccagcagatgaacgacctcgaggcctgcgtcatccaggaggtcggcgtcgaggagacccccctcatgaacgaggactccatcctcgccgtcaagaagtacttccagcgcatcaccctctacctcatggagaagaagtactccccctgcgcctgggaggtcgtccgcgccgagatcatgcgctccctctccttctccaccaacctccagaagcgcctccgccgcaaggactga

SEQ ID NO: 4013 - RNA, 570 nt, synthetic construct
  misc_feature 1..570: note = derived and/or modified sequence opt3 fromIFNalpha__Homo_sapiens__AAH74956
  source 1..570: mol_type = other RNA
atggccctgcccttcgctctcatgatggcacttgtggtcctgagctgcaagtcctcttgttcattgggctgcaacttaagtcagacccacagcctgaataacagaaggacactaatgctcatggcccaaatgcggcgcatctcccctttttcttgtctgaaagaccgacatgatttcgagtttccacaggaagagttcgacgggaatcagtttcagaaggcgcaagctatttcggttcttcacgaaatgatgcagcagactttcaacctgttttcaacgaaaaatagcagtgccgcatgggatgagaccttgctcgaaaagttctacatagagctgtttcagcaaatgaacgacctggaggcctgcgtgatccaggaagtaggagtggaggaaacaccgctcatgaatgaggattccattttagctgtcaaaaagtatttccagcgtatcactctgtaccttatggagaagaaatattctccctgtgcatgggaagtggttagagccgagattatgaggagcttgtccttttcaaccaacctgcagaagcggctacgcagaaaagactga

SEQ ID NO: 4014 - RNA, 570 nt, synthetic construct
  misc_feature 1..570: note = derived and/or modified sequence opt4 fromIFNalpha__Homo_sapiens__AAH74956
  source 1..570: mol_type = other RNA
atggccctgcccttcgccctgatgatggccctggtggtgctgagctgcaagagcagctgcagcctgggctgcaacctgagccagacccacagcctgaacaacagaagaaccctgatgctgatggcccagatgagaagaatcagccccttcagctgcctgaaggacagacacgacttcgagttcccccaggaggagttcgacggcaaccagttccagaaggcccaggccatcagcgtgctgcacgagatgatgcagcagaccttcaacctgttcagcaccaagaacagcagcgccgcctgggacgagaccctgctggagaagttctacatcgagctgttccagcagatgaacgacctggaggcctgcgtgatccaggaggtgggcgtggaggagacccccctgatgaacgaggacagcatcctggccgtgaagaagtacttccagagaatcaccctgtacctgatggagaagaagtacagcccctgcgcctgggaggtggtgagagccgagatcatgagaagcctgagcttcagcaccaacctgcagaagagactgagaagaaaggactga

SEQ ID NO: 4015 - RNA, 570 nt, synthetic construct
  misc_feature 1..570: note = derived and/or modified sequence opt5 fromIFNalpha__Homo_sapiens__AAH74956
  source 1..570: mol_type = other RNA
atggccctgcccttcgctctcatgatggccctggtggtccttagctgcaagtcctcttgtagcctgggctgcaacctctcccagacccactctctgaataacagacggacacttatgctgatggcgcaaatgcgcagaatcagccctttttcctgtctcaaagaccggcatgatttcgagtttccgcaggaagagttcgacgggaatcagtttcagaaggctcaagccatttctgttctgcacgaaatgatgcagcagacgttcaacctgtttagcaccaaaaattccagcgccgcttgggatgagacactcctggaaaagttctacatcgagctttttcagcaaatgaacgacctggaggcctgcgtgattcaggaagtgggagtcgaggaaacacccctcatgaatgaggattctatcctggctgtgaaaaagtatttccagcgcattaccctttacctgatggagaagaaatattccccttgtgcctgggaagttgtgagagcggagatcatgcggagcctctctttttccaccaacctgcagaagcgcctgagacggaaagactga

SEQ ID NO: 4016 - RNA, 570 nt, synthetic construct
  misc_feature 1..570: note = derived and/or modified sequence opt6 fromIFNalpha__Homo_sapiens__AAH74956
  source 1..570: mol_type = other RNA
atggcactaccattcgcactaatgatggcactagtagtactatcatgcaaatcatcatgctcactaggatgcaacctatcacaaacacactcactcaacaacagaagaacactaatgttaatggcacaaatgagaagaatatcaccattctcatgcctaaaagacagacacgacttcgaattcccacaagaagaattcgacggaaaccaattccaaaaagcacaagcaatatcagtactacacgaaatgatgcaacaaacattcaacctattctcaacaaaaaactcatcagcagcatgggacgaaacactattagaaaaattctacatagaactattccaacaaatgaacgacctagaagcatgcgtaatacaagaagtaggagtagaagaaacaccattaatgaacgaagactcaatactagcagtaaaaaaatacttccaaagaataacactatacctaatggaaaaaaaatacagcccatgcgcatgggaagtcgtaagagcagaaataatgagaagcctaagcttcagcactaacctacaaaaaagactacgaagaaaagactaa

SEQ ID NO: 4017 - protein, 189 aa, synthetic construct
  REGION 1..189: note = IFNalpha__Homo_sapiens__P01571
MALSFSLLMAVLVLSYKSICSLGCDLPQTHSLGNRRALILLAQMGRISPFSCLKDRHDFGLPQEEFDGNQFQKTQAISVLHEMIQQTFNLFSTEDSSAAWEQSLLEKFSTELYQQLNNLEACVIQEVGMEETPLMNEDSILAVRKYFQRITLYLTEKKYSPCAWEVVRAEIMRSLSFSTNLQKILRRKD

SEQ ID NO: 4018 - RNA, 570 nt, synthetic construct
  misc_feature 1..570: note = IFNalpha__Homo_sapiens__AAA52725
  source 1..570: mol_type = other RNA
atggccctgtccttttctttactgatggccgtgctggtgctcagctacaaatccatctgttctctaggctgtgatctgcctcagacccacagcctgggtaataggagggccttgatactcctggcacaaatgggaagaatctctcctttctcctgcctgaaggacagacatgactttggacttccccaggaggagtttgatggcaaccagttccagaagactcaagccatctctgtcctccatgagatgatccagcagaccttcaatctcttcagcacagaggactcatctgctgcttgggaacagagcctcctagaaaaattttccactgaactttaccagcaactgaataacctggaagcatgtgtgatacaggaggttgggatggaagagactcccctgatgaatgaggactccatcctggctgtgaggaaatacttccaaagaatcactctttatctaacagagaagaaatacagcccttgtgcctgggaggttgtcagagcagaaatcatgagatccctctctttttcaacaaacttgcaaaaaatattaaggaggaaggattga

SEQ ID NO: 4019 - RNA, 570 nt, synthetic construct
  misc_feature 1..570: note = derived and/or modified sequence opt1 fromIFNalpha__Homo_sapiens__AAA52725
  source 1..570: mol_type = other RNA
atggccctgagcttctccctcctgatggccgtgctggtcctcagctacaagtccatctgcagcctgggctgcgacctgccccagacccactccctcgggaaccgccgggcgctgatcctgctcgcccagatgggccgcatcagcccgttctcctgcctgaaggaccggcacgacttcgggctgccccaggaggagttcgacggcaaccagttccagaagacccaggccatcagcgtgctccacgagatgatccagcagacgttcaacctgttctccaccgaggacagctccgccgcctgggagcagagcctgctcgagaagttctccaccgagctgtaccagcagctgaacaacctcgaggcgtgcgtgatccaggaggtcgggatggaggagacgcccctgatgaacgaggacagcatcctggccgtgcgcaagtacttccagcggatcaccctctacctgaccgagaagaagtactccccctgcgcctgggaggtggtccgcgccgagatcatgcggagcctgtccttcagcaccaacctccagaagatcctgcgccggaaggactga

SEQ ID NO: 4020 - RNA, 570 nt, synthetic construct
  misc_feature 1..570: note = derived and/or modified sequence opt2 fromIFNalpha__Homo_sapiens__AAA52725
  source 1..570: mol_type = other RNA
atggccctctccttctccctcctcatggccgtcctcgtcctctcctacaagtccatctgctccctcggctgcgacctcccccagacccactccctcggcaaccgccgcgccctcatcctcctcgcccagatgggccgcatctcccccttctcctgcctcaaggaccgccacgacttcggcctcccccaggaggagttcgacggcaaccagttccagaagacccaggccatctccgtcctccacgagatgatccagcagaccttcaacctcttctccaccgaggactcctccgccgcctgggagcagtccctcctcgagaagttctccaccgagctctaccagcagctcaacaacctcgaggcctgcgtcatccaggaggtcggcatggaggagacccccctcatgaacgaggactccatcctcgccgtccgcaagtacttccagcgcatcaccctctacctcaccgagaagaagtactccccctgcgcctgggaggtcgtccgcgccgagatcatgcgctccctctccttctccaccaacctccagaagatcctccgccgcaaggactga

SEQ ID NO: 4021 - RNA, 570 nt, synthetic construct
  misc_feature 1..570: note = derived and/or modified sequence opt3 fromIFNalpha__Homo_sapiens__AAA52725
  source 1..570: mol_type = other RNA
atggccctgagcttctccctccttatggctgtgctggtcttgtcttacaagtcaatctgcagtttaggctgtgacctgccccagacccacagcctagggaacagaagggcactcattctgcttgcccaaatgggacggatatcccctttttcttgcctgaaagatcgccatgacttcggtttgccacaggaggaatttgatggcaatcagttccagaagacacaagcgatctcggttctccacgagatgattcagcagacttttaacctgttctcaacggaagacagcagtgctgcctgggagcagtccctgctcgaaaaattttctaccgagttatatcaacagctgaataaccttgaggcatgtgtgatccaggaagtagggatggaggaaacaccgttgatgaatgaggatagcattctggccgtgcgaaagtacttccagcgtatcactctatatctcaccgagaaaaagtactccccctgcgcttgggaagtcgtgagagcagagataatgaggtcactgagttttagcacaaaccttcaaaagatcctgcggcgcaaagactga

SEQ ID NO: 4022 - RNA, 570 nt, synthetic construct
  misc_feature 1..570: note = derived and/or modified sequence opt4 fromIFNalpha__Homo_sapiens__AAA52725
  source 1..570: mol_type = other RNA
atggccctgagcttcagcctgctgatggccgtgctggtgctgagctacaagagcatctgcagcctgggctgcgacctgccccagacccacagcctgggcaacagaagagccctgatcctgctggcccagatgggcagaatcagccccttcagctgcctgaaggacagacacgacttcggcctgccccaggaggagttcgacggcaaccagttccagaagacccaggccatcagcgtgctgcacgagatgatccagcagaccttcaacctgttcagcaccgaggacagcagcgccgcctgggagcagagcctgctggagaagttcagcaccgagctgtaccagcagctgaacaacctggaggcctgcgtgatccaggaggtgggcatggaggagacccccctgatgaacgaggacagcatcctggccgtgagaaagtacttccagagaatcaccctgtacctgaccgagaagaagtacagcccctgcgcctgggaggtggtgagagccgagatcatgagaagcctgagcttcagcaccaacctgcagaagatcctgagaagaaaggactga

SEQ ID NO: 4023 - RNA, 570 nt, synthetic construct
  misc_feature 1..570: note = derived and/or modified sequence opt5 fromIFNalpha__Homo_sapiens__AAA52725
  source 1..570: mol_type = other RNA
atggccctgagcttctccctcctgatggctgtgcttgtcctgtcttacaagagcatctgctccctcggctgtgacctgccccagacccactctcttgggaacagacgggccctgattctcctggcgcaaatgggacgcatcagccctttttcctgcctgaaagatagacatgacttcggcctcccgcaggaggaatttgatgggaatcagttccagaagacacaagctatttctgttctgcacgagatgatccagcagacgtttaaccttttcagcaccgaagactccagcgccgcctgggagcagtctctgctcgaaaaattttccacagagctgtatcaacagcttaataacctggaggcttgtgtgattcaggaagtgggaatggaggaaacacccctcatgaatgaggatagcatcctggccgtccggaagtacttccagcgcatcaccctgtatctcaccgagaaaaagtactctccttgcgcttgggaagtggttagagccgagattatgcggtccctgagcttttctacaaaccttcaaaagatcctgcgcagaaaagactga

SEQ ID NO: 4024 - RNA, 570 nt, synthetic construct
  misc_feature 1..570: note = derived and/or modified sequence opt6 fromIFNalpha__Homo_sapiens__AAA52725
  source 1..570: mol_type = other RNA
atggcactatcattctcactactaatggcagtactcgtactatcatacaaatcaatatgctcactcggatgcgacctaccacaaacacactcattaggaaacagaagagcactcatactactagcacaaatgggaagaatatcaccattctcatgcctaaaagacagacatgacttcggattaccacaagaagaattcgacggaaaccaattccaaaaaacacaagcaatatcagtactccacgaaatgatacaacaaacattcaacttattctcaacagaagactcatcagcagcatgggaacaatcactactagaaaaattctcaacagaactataccaacaactaaacaacctagaagcatgcgtaatacaagaagtaggcatggaagaaacaccactaatgaacgaagactcaatactagcagtaagaaaatacttccaaagaataacactatacttaacagaaaaaaaatattcaccatgcgcatgggaagtagtacgcgcagaaataatgagaagcctaagcttctccacaaacctacaaaaaatattaagaagaaaagactaa

SEQ ID NO: 4025 - protein, 189 aa, synthetic construct
  REGION 1..189: note = IFNalpha__Homo_sapiens__P05013
MALPFALLMALVVLSCKSSCSLDCDLPQTHSLGHRRTMMLLAQMRRISLFSCLKDRHDFRFPQEEFDGNQFQKAEAISVLHEVIQQTFNLFSTKDSSVAWDERLLDKLYTELYQQLNDLEACVMQEVWVGGTPLMNEDSILAVRKYFQRITLYLTEKKYSPCAWEVVRAEIMRSFSSSRNLQERLRRKE

SEQ ID NO: 4026 - RNA, 570 nt, synthetic construct
  misc_feature 1..570: note = IFNalpha__Homo_sapiens__AAH69471
  source 1..570: mol_type = other RNA
atggctttgccttttgctttactgatggccctggtggtgctcagctgcaagtcaagctgctctctggactgtgatctgcctcagacccacagcctgggtcacaggaggaccatgatgctcctggcacaaatgaggagaatctctcttttctcctgtctgaaggacagacatgacttcagatttccccaggaggagtttgatggcaaccagttccagaaggctgaagccatctctgtcctccatgaggtgattcagcagaccttcaacctcttcagcacaaaggactcatctgttgcttgggatgagaggcttctagacaaactctatactgaactttaccagcagctgaatgacctggaagcctgtgtgatgcaggaggtgtgggtgggagggactcccctgatgaatgaggactccatcctggctgtgagaaaatacttccaaagaatcactctctacctgacagagaaaaagtacagcccttgtgcctgggaggttgtcagagcagaaatcatgagatccttctcttcatcaagaaacttgcaagaaaggttaaggaggaaggaataa

SEQ ID NO: 4027 - RNA, 570 nt, synthetic construct
  misc_feature 1..570: note = derived and/or modified sequence opt1 fromIFNalpha__Homo_sapiens__AAH69471
  source 1..570: mol_type = other RNA
atggccctgcccttcgccctcctgatggcgctggtggtcctcagctgcaagtccagctgctccctggactgcgacctgccgcagacccacagcctcggccaccgccggaccatgatgctgctggcccagatgcgccggatctccctcttcagctgcctgaaggaccgccacgacttccggttcccccaggaggagttcgacgggaaccagttccagaaggccgaggccatctccgtgctgcacgaggtgatccagcagacgttcaacctcttcagcaccaaggactccagcgtcgcctgggacgagcgcctgctggacaagctctacaccgagctgtaccagcagctgaacgacctcgaggcgtgcgtgatgcaggaggtgtgggtcggcgggacgcccctgatgaacgaggactccatcctggccgtgcggaagtacttccagcgcatcaccctctacctgaccgagaagaagtacagcccctgcgcctgggaggtggtccgggccgagatcatgcgctccttcagctccagccggaacctgcaggagcgcctccggcgcaaggagtga

SEQ ID NO: 4028 - RNA, 570 nt, synthetic construct
  misc_feature 1..570: note = derived and/or modified sequence opt2 fromIFNalpha__Homo_sapiens__AAH69471
  source 1..570: mol_type = other RNA
atggccctccccttcgccctcctcatggccctcgtcgtcctctcctgcaagtcctcctgctccctcgactgcgacctcccccagacccactccctcggccaccgccgcaccatgatgctcctcgcccagatgcgccgcatctccctcttctcctgcctcaaggaccgccacgacttccgcttcccccaggaggagttcgacggcaaccagttccagaaggccgaggccatctccgtcctccacgaggtcatccagcagaccttcaacctcttctccaccaaggactcctccgtcgcctgggacgagcgcctcctcgacaagctctacaccgagctctaccagcagctcaacgacctcgaggcctgcgtcatgcaggaggtctgggtcggcggcacccccctcatgaacgaggactccatcctcgccgtccgcaagtacttccagcgcatcaccctctacctcaccgagaagaagtactccccctgcgcctgggaggtcgtccgcgccgagatcatgcgctccttctcctcctcccgcaacctccaggagcgcctccgccgcaaggagtga

SEQ ID NO: 4029 - RNA, 570 nt, synthetic construct
  misc_feature 1..570: note = derived and/or modified sequence opt3 fromIFNalpha__Homo_sapiens__AAH69471
  source 1..570: mol_type = other RNA
atggccctgcccttcgctctccttatggcactggtggtcttgagctgcaagtcctcttgttcattagactgcgatctgcctcagacccacagtctaggccatagaaggacaatgatgctcctggcccaaatgcggcgcatcagccttttctcctgtctgaaagaccgacacgatttccgttttccacaggaggaatttgacgggaaccagtttcagaaggcggaggctatttctgttttgcatgaagtgatacaacagactttcaatctcttttcgacgaaagattcaagcgtagcctgggacgagagactgctggataagctctacaccgaattatatcagcagctgaacgaccttgaggcatgcgtgatgcaagaggtctgggtgggaggtacaccgttgatgaatgaagatagtatcctggccgttaggaaatacttccagcggattactctatatctcaccgagaagaagtactccccctgtgcttgggaagtggtccgcgcagagatcatgagatcttttagctcctcaaggaacctgcaggagcggcttcgccgaaaagaatga

SEQ ID NO: 4030 - RNA, 570 nt, synthetic construct
  misc_feature 1..570: note = derived and/or modified sequence opt4 fromIFNalpha__Homo_sapiens__AAH69471
  source 1..570: mol_type = other RNA
atggccctgcccttcgccctgctgatggccctggtggtgctgagctgcaagagcagctgcagcctggactgcgacctgccccagacccacagcctgggccacagaagaaccatgatgctgctggcccagatgagaagaatcagcctgttcagctgcctgaaggacagacacgacttcagattcccccaggaggagttcgacggcaaccagttccagaaggccgaggccatcagcgtgctgcacgaggtgatccagcagaccttcaacctgttcagcaccaaggacagcagcgtggcctgggacgagagactgctggacaagctgtacaccgagctgtaccagcagctgaacgacctggaggcctgcgtgatgcaggaggtgtgggtgggcggcacccccctgatgaacgaggacagcatcctggccgtgagaaagtacttccagagaatcaccctgtacctgaccgagaagaagtacagcccctgcgcctgggaggtggtgagagccgagatcatgagaagcttcagcagcagcagaaacctgcaggagagactgagaagaaaggagtga

SEQ ID NO: 4031 - RNA, 570 nt, synthetic construct
  misc_feature 1..570: note = derived and/or modified sequence opt5 fromIFNalpha__Homo_sapiens__AAH69471
  source 1..570: mol_type = other RNA
atggccctgcccttcgctctcctgatggcccttgtggtcctgagctgcaagtcctcttgtagcctcgactgcgatctgcctcagacccactcccttggccatagacggacaatgatgctgctcgcgcaaatgcgcagaatctctctgtttagctgtctgaaagaccggcacgatttccgctttccgcaggaggagttcgacgggaaccagtttcagaaggctgaagccatttccgttctccatgaagtgatccaacagacgttcaatctgttttctaccaaagatagctccgtggcctgggacgagagacttctggataagctctacacagaactgtatcagcagcttaacgacctggaggcttgcgtcatgcaagaggtgtgggttggaggcacacccctcatgaatgaagatagcattctggccgtgcggaaatacttccagcgcatcaccctgtatctcaccgagaagaagtactctccttgtgcttgggaagtcgtgagagccgagattatgcggtccttttctagctcccgcaacctgcaggagagacttcggcgcaaagaatga

SEQ ID NO: 4032 - RNA, 570 nt, synthetic construct
  misc_feature 1..570: note = derived and/or modified sequence opt6 fromIFNalpha__Homo_sapiens__AAH69471
  source 1..570: mol_type = other RNA
atggcattaccattcgcactactaatggcattagtagtattatcatgtaaaagctcatgctcactagactgcgacctaccacaaacacactcattaggacacagaagaacaatgatgctcctagcacaaatgagaagaatatcactattctcatgcttaaaagacagacacgacttcagattcccacaagaagaattcgacggaaaccaattccaaaaagcagaagcaatatcagtattacacgaagtaatacaacaaacattcaacctattctcaacaaaagactcatctgtcgcatgggacgaaagactactagacaaactatacacagaattataccaacaactaaacgacttagaagcatgcgtaatgcaagaagtatgggtaggaggaacaccactaatgaacgaagactcaatactagcagtaagaaaatacttccaaagaataaccttatacctaacagaaaaaaaatactcaccatgtgcatgggaagtagtaagagcagaaataatgagatcattctcatcatcaagaaatctacaagaaagactacgaagaaaagaataa

SEQ ID NO: 4033 - protein, 189 aa, synthetic construct
  REGION 1..189: note = IFNalpha__Homo_sapiens__P05014
MALSFSLLMAVLVLSYKSICSLGCDLPQTHSLGNRRALILLAQMGRISHFSCLKDRHDFGFPEEEFDGHQFQKAQAISVLHEMIQQTFNLFSTEDSSAAWEQSLLEKFSTELYQQLNDLEACVIQEVGVEETPLMNEDSILAVRKYFQRITLYLTEKKYSPCAWEVVRAEIMRSLSFSTNLQKRLRRKD

SEQ ID NO: 4034 - RNA, 570 nt, synthetic construct
  misc_feature 1..570: note = IFNalpha__Homo_sapiens__AAA52726
  source 1..570: mol_type = other RNA
atggccctgtccttttctttactgatggccgtgctggtgctcagctacaaatccatctgttctctgggctgtgatctgcctcagacccacagcctgggtaataggagggccttgatactcctggcacaaatgggaagaatctctcatttctcctgcctgaaggacagacatgatttcggattccccgaggaggagtttgatggccaccagttccagaaggctcaagccatctctgtcctccatgagatgatccagcagaccttcaatctcttcagcacagaggactcatctgctgcttgggaacagagcctcctagaaaaattttccactgaactttaccagcaactgaatgacctggaagcatgtgtgatacaggaggttggggtggaagagactcccctgatgaatgaggactccatcctggctgtgaggaaatacttccaaagaatcactctttatctaacagagaagaaatacagcccttgtgcctgggaggttgtcagagcagaaatcatgagatccctctcgttttcaacaaacttgcaaaaaagattaaggaggaaggattga

SEQ ID NO: 4035 - RNA, 570 nt, synthetic construct
  misc_feature 1..570: note = derived and/or modified sequence opt1 fromIFNalpha__Homo_sapiens__AAA52726
  source 1..570: mol_type = other RNA
atggccctgagcttctccctcctgatggccgtgctggtcctcagctacaagtccatctgcagcctgggctgcgacctgccccagacccactccctcgggaaccgccgggcgctgatcctgctcgcccagatgggccgcatcagccacttctcctgcctgaaggaccggcacgacttcgggttcccggaggaggagttcgacggccaccagttccagaaggcccaggccatcagcgtgctgcacgagatgatccagcagaccttcaacctcttctccacggaggacagctccgccgcgtgggagcagagcctgctggagaagttctccaccgagctctaccagcagctgaacgacctggaggcctgcgtgatccaggaggtcggggtggaggagacgcccctcatgaacgaggacagcatcctggccgtgcgcaagtacttccagcggatcaccctgtacctcaccgagaagaagtactccccctgcgcctgggaggtcgtgcgcgcggagatcatgcggagcctgtccttcagcaccaacctgcagaagcgcctccggcgcaaggactga

SEQ ID NO: 4036 - RNA, 570 nt, synthetic construct
  misc_feature 1..570: note = derived and/or modified sequence opt2 fromIFNalpha__Homo_sapiens__AAA52726
  source 1..570: mol_type = other RNA
atggccctctccttctccctcctcatggccgtcctcgtcctctcctacaagtccatctgctccctcggctgcgacctcccccagacccactccctcggcaaccgccgcgccctcatcctcctcgcccagatgggccgcatctcccacttctcctgcctcaaggaccgccacgacttcggcttccccgaggaggagttcgacggccaccagttccagaaggcccaggccatctccgtcctccacgagatgatccagcagaccttcaacctcttctccaccgaggactcctccgccgcctgggagcagtccctcctcgagaagttctccaccgagctctaccagcagctcaacgacctcgaggcctgcgtcatccaggaggtcggcgtcgaggagacccccctcatgaacgaggactccatcctcgccgtccgcaagtacttccagcgcatcaccctctacctcaccgagaagaagtactccccctgcgcctgggaggtcgtccgcgccgagatcatgcgctccctctccttctccaccaacctccagaagcgcctccgccgcaaggactga

SEQ ID NO: 4037 - RNA, 570 nt, synthetic construct
  misc_feature 1..570: note = derived and/or modified sequence opt3 fromIFNalpha__Homo_sapiens__AAA52726
  source 1..570: mol_type = other RNA
atggccctgagcttctccctccttatggctgtgctggtcttgtcttacaagtcaatctgcagtttaggctgtgacctgccccagacccacagcctagggaacagaagggcactcattctgcttgcccaaatgggacggatatcccatttttcttgcctgaaagatcgccacgacttcggttttcctgaggaagagttcgatggccatcagtttcagaaggcgcaggctatctcggttttgcacgaaatgattcaacagacattcaatctcttttcaactgaggacagcagtgccgcatgggaacagtccctgctggagaaattctctacggagctctatcagcaattaaacgatctggaagcctgtgtgatccaggaggtaggggtggaagagaccccacttatgaatgaggacagcattttggctgtccgaaagtactttcagcgtatcacactgtatctaactgagaaaaagtactccccgtgcgcatgggaagtggttagagccgaaataatgaggtcactcagtttcagcaccaacctgcagaagcggcttcgcagaaaagattga

SEQ ID NO: 4038 - RNA, 570 nt, synthetic construct
  misc_feature 1..570: note = derived and/or modified sequence opt4 fromIFNalpha__Homo_sapiens__AAA52726
  source 1..570: mol_type = other RNA
atggccctgagcttcagcctgctgatggccgtgctggtgctgagctacaagagcatctgcagcctgggctgcgacctgccccagacccacagcctgggcaacagaagagccctgatcctgctggcccagatgggcagaatcagccacttcagctgcctgaaggacagacacgacttcggcttccccgaggaggagttcgacggccaccagttccagaaggcccaggccatcagcgtgctgcacgagatgatccagcagaccttcaacctgttcagcaccgaggacagcagcgccgcctgggagcagagcctgctggagaagttcagcaccgagctgtaccagcagctgaacgacctggaggcctgcgtgatccaggaggtgggcgtggaggagacccccctgatgaacgaggacagcatcctggccgtgagaaagtacttccagagaatcaccctgtacctgaccgagaagaagtacagcccctgcgcctgggaggtggtgagagccgagatcatgagaagcctgagcttcagcaccaacctgcagaagagactgagaagaaaggactga

SEQ ID NO: 4039 - RNA, 570 nt, synthetic construct
  misc_feature 1..570: note = derived and/or modified sequence opt5 fromIFNalpha__Homo_sapiens__AAA52726
  source 1..570: mol_type = other RNA
atggccctgagcttctccctcctgatggctgtgcttgtcctgtcttacaagagcatctgctccctcggctgtgacctgccccagacccactctcttgggaacagacgggccctgattctcctggcgcaaatgggacgcatcagccatttttcctgcctgaaagatagacacgacttcggctttcctgaggaagagttcgatgggcatcagtttcagaaggctcaggccatttctgttctccacgaaatgatccaacagacattcaatctgtttagcacggaggactccagcgccgcttgggaacagtctcttctggagaaattctccaccgagctctatcagcaactgaacgatcttgaagcctgtgtgattcaggaggtgggagtcgaagagacaccgctgatgaatgaggacagcatcctcgctgtgcggaagtactttcagcgcatcaccctgtatctgacagagaaaaagtactctccctgcgcctgggaagttgtgagagcggaaattatgcggtccctcagcttctctaccaacctgcagaagcgccttagacggaaagattga

SEQ ID NO: 4040 - RNA, 570 nt, synthetic construct
  misc_feature 1..570: note = derived and/or modified sequence opt6 fromIFNalpha__Homo_sapiens__AAA52726
  source 1..570: mol_type = other RNA
atggcattaagcttctcactactcatggccgtactagtactatcatacaaatcaatatgctcactaggatgcgatctaccacaaacacactccctaggaaacagaagagcactaatactcctagcacaaatgggacgaataagccacttctcatgcctaaaagacagacacgacttcggattcccagaagaagaattcgacggacaccaattccaaaaagcacaagcaatatcagtactacacgaaatgatacaacaaacattcaacctcttctcaacagaagactcatcagcagcatgggaacaatcactactagaaaaattctcaacagaactataccaacaactaaacgacctagaagcatgcgtaatacaagaagtaggagtagaagaaacaccactaatgaacgaagactcaatactagcagtaagaaaatacttccaaagaataacactatacctaaccgaaaaaaaatactcaccatgcgcatgggaagtagtaagagcagaaataatgagaagcctatcattctcaacaaacctacaaaaaagactaagacgaaaagactaa

SEQ ID NO: 4041 - protein, 189 aa, synthetic construct
  REGION 1..189: note = IFNalpha__Homo_sapiens__P05015
MALSFSLLMAVLVLSYKSICSLGCDLPQTHSLGNRRALILLAQMGRISHFSCLKDRYDFGFPQEVFDGNQFQKAQAISAFHEMIQQTFNLFSTKDSSAAWDETLLDKFYIELFQQLNDLEACVTQEVGVEEIALMNEDSILAVRKYFQRITLYLMGKKYSPCAWEVVRAEIMRSFSFSTNLQKGLRRKD

SEQ ID NO: 4042 - RNA, 570 nt, synthetic construct
  misc_feature 1..570: note = IFNalpha__Homo_sapiens__AAA36042
  source 1..570: mol_type = other RNA
atggccctgtccttttctttactgatggccgtgctggtgctcagctacaaatccatctgttctctgggctgtgatctgcctcagactcacagcctgggtaataggagggccttgatactcctggcacaaatgggaagaatctctcatttctcctgcctgaaggacagatatgatttcggattcccccaggaggtgtttgatggcaaccagttccagaaggctcaagccatctctgccttccatgagatgatccagcagaccttcaatctcttcagcacaaaggattcatctgctgcttgggatgagaccctcctagacaaattctacattgaacttttccagcaactgaatgacctagaagcctgtgtgacacaggaggttggggtggaagagattgccctgatgaatgaggactccatcctggctgtgaggaaatactttcaaagaatcactctttatctgatggggaagaaatacagcccttgtgcctgggaggttgtcagagcagaaatcatgagatccttctctttttcaacaaacttgcaaaaaggattaagaaggaaggattga

SEQ ID NO: 4043 - RNA, 570 nt, synthetic construct
  misc_feature 1..570: note = derived and/or modified sequence opt1 fromIFNalpha__Homo_sapiens__AAA36042
  source 1..570: mol_type = other RNA
atggccctgagcttctccctcctgatggccgtgctggtcctcagctacaagtccatctgcagcctgggctgcgacctgccccagacccactccctcgggaaccgccgggcgctgatcctgctcgcccagatgggccgcatcagccacttctcctgcctgaaggaccggtacgacttcgggttcccgcaggaggtgttcgacggcaaccagttccagaaggcccaggccatcagcgccttccacgagatgatccagcagaccttcaacctgttctccacgaaggacagctccgcggcctgggacgagaccctcctggacaagttctacatcgagctgttccagcagctcaacgacctggaggcctgcgtgacccaggaggtcggggtggaggagatcgccctgatgaacgaggacagcatcctcgcggtgcgcaagtacttccagcggatcaccctgtacctgatgggcaagaagtactccccctgcgcctgggaggtcgtgcgcgccgagatcatgcggagcttctccttcagcacgaacctccagaagggcctgcgccggaaggactga

SEQ ID NO: 4044 - RNA, 570 nt, synthetic construct
  misc_feature 1..570: note = derived and/or modified sequence opt2 fromIFNalpha__Homo_sapiens__AAA36042
  source 1..570: mol_type = other RNA
atggccctctccttctccctcctcatggccgtcctcgtcctctcctacaagtccatctgctccctcggctgcgacctcccccagacccactccctcggcaaccgccgcgccctcatcctcctcgcccagatgggccgcatctcccacttctcctgcctcaaggaccgctacgacttcggcttcccccaggaggtcttcgacggcaaccagttccagaaggcccaggccatctccgccttccacgagatgatccagcagaccttcaacctcttctccaccaaggactcctccgccgcctgggacgagaccctcctcgacaagttctacatcgagctcttccagcagctcaacgacctcgaggcctgcgtcacccaggaggtcggcgtcgaggagatcgccctcatgaacgaggactccatcctcgccgtccgcaagtacttccagcgcatcaccctctacctcatgggcaagaagtactccccctgcgcctgggaggtcgtccgcgccgagatcatgcgctccttctccttctccaccaacctccagaagggcctccgccgcaaggactga

SEQ ID NO: 4045 - RNA, 570 nt, synthetic construct
  misc_feature 1..570: note = derived and/or modified sequence opt3 fromIFNalpha__Homo_sapiens__AAA36042
  source 1..570: mol_type = other RNA
atggccctgagcttctccctccttatggctgtgctggtcttgtcttacaagtcaatctgcagtttaggctgtgacctgccccagacccacagcctagggaacagaagggcactcattctgcttgcccaaatgggacggatatcccatttttcttgcctgaaagatcgctatgacttcggttttcctcaggaggttttcgatggcaatcagtttcagaaggcgcaagctatctcggccttccacgaaatgattcagcagacatttaacttgttctcaactaaagacagcagtgcagcctgggatgagacgctcctggacaagttttacatcgaactgttccagcaactcaatgatttagaggcttgtgtgacccaggaagtaggggtggaggagattgcactgatgaacgaagactccatccttgccgtccgaaaatattttcagcgtataacattgtacctgatgggaaagaagtattctccatgcgcttgggaggtggttagagccgaaatcatgaggagcttctccttttcaactaatctacagaaaggcctccggcgcaaggattga

SEQ ID NO: 4046 - RNA, 570 nt, synthetic construct
  misc_feature 1..570: note = derived and/or modified sequence opt4 fromIFNalpha__Homo_sapiens__AAA36042
  source 1..570: mol_type = other RNA
atggccctgagcttcagcctgctgatggccgtgctggtgctgagctacaagagcatctgcagcctgggctgcgacctgccccagacccacagcctgggcaacagaagagccctgatcctgctggcccagatgggcagaatcagccacttcagctgcctgaaggacagatacgacttcggcttcccccaggaggtgttcgacggcaaccagttccagaaggcccaggccatcagcgccttccacgagatgatccagcagaccttcaacctgttcagcaccaaggacagcagcgccgcctgggacgagaccctgctggacaagttctacatcgagctgttccagcagctgaacgacctggaggcctgcgtgacccaggaggtgggcgtggaggagatcgccctgatgaacgaggacagcatcctggccgtgagaaagtacttccagagaatcaccctgtacctgatgggcaagaagtacagcccctgcgcctgggaggtggtgagagccgagatcatgagaagcttcagcttcagcaccaacctgcagaagggcctgagaagaaaggactga

SEQ ID NO: 4047 - RNA, 570 nt, synthetic construct
  misc_feature 1..570: note = derived and/or modified sequence opt5 fromIFNalpha__Homo_sapiens__AAA36042
  source 1..570: mol_type = other RNA
atggccctgagcttctccctcctgatggctgtgcttgtcctgtcttacaagagcatctgctccctcggctgtgacctgccccagacccactctcttgggaacagacgggccctgattctcctggcgcaaatgggacgcatcagccatttttcctgcctgaaagatagatatgacttcggctttcctcaggaggttttcgatgggaatcagtttcagaaggctcaagccatttctgccttccacgaaatgatccagcagacatttaacctcttcagcacgaaagactccagcgctgcctgggatgagaccctgcttgacaagttttacattgaactgttccagcaactcaatgatctggaggcttgtgtgacacaggaagtgggagtcgaggagatcgcccttatgaacgaagactctatcctggcggtgcggaaatattttcagcgcattaccctctacctgatgggcaagaagtattccccgtgcgcctgggaggttgtgagagctgaaatcatgcggagcttctctttttccacaaatctgcagaaagggctccgcagaaaggattga

SEQ ID NO: 4048 - RNA, 570 nt, synthetic construct
  misc_feature 1..570: note = derived and/or modified sequence opt6 fromIFNalpha__Homo_sapiens__AAA36042
  source 1..570: mol_type = other RNA
atggcactaagctttagcttactaatggcagtactagtactatcatacaaaagtatatgctcattaggatgcgatctaccacaaacacactcactaggaaacagaagagcactaatactattagcacaaatgggacgaataagccatttctcatgcttaaaagatagatatgactttggatttccacaagaagtattcgatggaaatcaatttcaaaaagcacaagcaataagtgcattccatgaaatgatacaacaaacattcaatctatttagcacaaaagatagctcagcagcatgggatgaaacactattagacaaattctatatagaactcttccaacaactaaatgacttagaagcatgcgtaacacaagaagtaggagtagaagaaatagcactaatgaacgaagactcaatattagcagtaagaaaatactttcaaagaataacattatatctaatgggaaaaaaatatagcccatgcgcatgggaagtcgtaagagcagaaataatgagaagctttagctttagcacaaacttacaaaaaggcttaagaagaaaagattaa

SEQ ID NO: 4049 - protein, 189 aa, synthetic construct
  REGION 1..189: note = IFNalpha__Homo_sapiens__P32881
MALTFYLLVALVVLSYKSFSSLGCDLPQTHSLGNRRALILLAQMRRISPFSCLKDRHDFEFPQEEFDDKQFQKAQAISVLHEMIQQTFNLFSTKDSSAALDETLLDEFYIELDQQLNDLESCVMQEVGVIESPLMYEDSILAVRKYFQRITLYLTEKKYSSCAWEVVRAEIMRSFSLSINLQKRLKSKE

SEQ ID NO: 4050 - RNA, 570 nt, synthetic construct
  misc_feature 1..570: note = IFNalpha__Homo_sapiens__AAA52716
  source 1..570: mol_type = other RNA
atggccttgactttttatttactggtcgccctagtggtgctcagctacaagtcattcagctctctgggctgtgatctgcctcagactcacagcctgggtaacaggagggccttgatactcctggcacaaatgcgaagaatctctcctttctcctgcctgaaggacagacatgactttgaattcccccaggaggagtttgatgataaacagttccagaaggctcaagccatctctgtcctccatgagatgatccagcagaccttcaacctcttcagcacaaaggactcatctgctgctttggatgagacccttctagatgaattctacatcgaacttgaccagcagctgaatgacctggagtcctgtgtgatgcaggaagtgggggtgatagagtctcccctgatgtacgaggactccatcctggctgtgaggaaatacttccaaagaatcactctatatctgacagagaagaaatacagctcttgtgcctgggaggttgtcagagcagaaatcatgagatccttctctttatcaatcaacttgcaaaaaagattgaagagtaaggaatga

SEQ ID NO: 4051 - RNA, 570 nt, synthetic construct
  misc_feature 1..570: note = derived and/or modified sequence opt1 fromIFNalpha__Homo_sapiens__AAA52716
  source 1..570: mol_type = other RNA
atggccctgaccttctacctcctggtggccctggtcgtgctcagctacaagtccttcagctccctgggctgcgacctgccccagacccacagcctcgggaaccgccgggcgctgatcctgctcgcccagatgcgccggatctccccgttcagctgcctgaaggaccgccacgacttcgagttcccccaggaggagttcgacgacaagcagttccagaaggcccaggccatctccgtgctgcacgagatgatccagcagacgttcaacctcttcagcaccaaggactccagcgccgcgctggacgagaccctgctcgacgagttctacatcgagctggaccagcagctgaacgacctcgagtcctgcgtcatgcaggaggtgggcgtgatcgagagccccctgatgtacgaggactccatcctggccgtccggaagtacttccagcgcatcaccctctacctgacggagaagaagtacagctcctgcgcctgggaggtggtgcgggccgagatcatgcgcagcttctccctgagcatcaacctccagaagcggctgaagtccaaggagtga

SEQ ID NO: 4052 - RNA, 570 nt, synthetic construct
  misc_feature 1..570: note = derived and/or modified sequence opt2 fromIFNalpha__Homo_sapiens__AAA52716
  source 1..570: mol_type = other RNA
atggccctcaccttctacctcctcgtcgccctcgtcgtcctctcctacaagtccttctcctccctcggctgcgacctcccccagacccactccctcggcaaccgccgcgccctcatcctcctcgcccagatgcgccgcatctcccccttctcctgcctcaaggaccgccacgacttcgagttcccccaggaggagttcgacgacaagcagttccagaaggcccaggccatctccgtcctccacgagatgatccagcagaccttcaacctcttctccaccaaggactcctccgccgccctcgacgagaccctcctcgacgagttctacatcgagctcgaccagcagctcaacgacctcgagtcctgcgtcatgcaggaggtcggcgtcatcgagtcccccctcatgtacgaggactccatcctcgccgtccgcaagtacttccagcgcatcaccctctacctcaccgagaagaagtactcctcctgcgcctgggaggtcgtccgcgccgagatcatgcgctccttctccctctccatcaacctccagaagcgcctcaagtccaaggagtga

SEQ ID NO: 4053 - RNA, 570 nt, synthetic construct
  misc_feature 1..570: note = derived and/or modified sequence opt3 fromIFNalpha__Homo_sapiens__AAA52716
  source 1..570: mol_type = other RNA
atggccctgaccttctacctccttgtggctctggtcgttttgagctataagtccttttcttcattaggctgcgacctgccccagacacacagtctagggaacagaagggcactcatcctgcttgcccaaatgcggcgcattagccctttctcctgtctgaaagatcgacatgactttgagttcccacaggaagagtttgatgacaagcagttccagaaagcgcaagctatatctgtgttgcacgaaatgatccagcagacttttaatctcttctcgacgaaggattcaagcgccgcactggacgagaccctgctcgatgaattttacattgagttagaccagcaactgaacgatcttgagagttgcgtaatgcaggaagtgggagtcatcgagtccccgttgatgtatgaagactctattctggccgtgcgtaaatacttccagagaatcacactatatctcactgagaagaagtacagctcctgtgcttgggaggttgtgagggcagaaataatgcggtcatttagtctgagcatcaatcttcagaaacgcctgaagtctaaagagtga

SEQ ID NO: 4054 - RNA, 570 nt, synthetic construct
  misc_feature 1..570: note = derived and/or modified sequence opt4 fromIFNalpha__Homo_sapiens__AAA52716
  source 1..570: mol_type = other RNA
atggccctgaccttctacctgctggtggccctggtggtgctgagctacaagagcttcagcagcctgggctgcgacctgccccagacccacagcctgggcaacagaagagccctgatcctgctggcccagatgagaagaatcagccccttcagctgcctgaaggacagacacgacttcgagttcccccaggaggagttcgacgacaagcagttccagaaggcccaggccatcagcgtgctgcacgagatgatccagcagaccttcaacctgttcagcaccaaggacagcagcgccgccctggacgagaccctgctggacgagttctacatcgagctggaccagcagctgaacgacctggagagctgcgtgatgcaggaggtgggcgtgatcgagagccccctgatgtacgaggacagcatcctggccgtgagaaagtacttccagagaatcaccctgtacctgaccgagaagaagtacagcagctgcgcctgggaggtggtgagagccgagatcatgagaagcttcagcctgagcatcaacctgcagaagagactgaagagcaaggagtga

SEQ ID NO: 4055 - RNA, 570 nt, synthetic construct
  misc_feature 1..570: note = derived and/or modified sequence opt5 fromIFNalpha__Homo_sapiens__AAA52716
  source 1..570: mol_type = other RNA
atggccctgaccttctacctcctggtggctcttgtcgttctgagctataagtccttttctagcctcggctgcgacctgccccagacacactcccttgggaacagacgggccctgatcctcctggcgcaaatgcgcagaatttctcctttcagctgtctgaaagatcggcatgactttgagttcccgcaggaagagtttgatgacaagcagttccagaaagctcaagccatctccgtgctccacgaaatgattcagcagacgtttaatctgttctctaccaaggatagctccgccgctcttgacgagacactgctcgatgaattttacatcgagctggaccagcaacttaacgatctggagagctgcgtgatgcaggaagtcggagtgattgagtctcccctcatgtatgaagactccatcctggccgttcgcaaatacttccagagaatcaccctgtatctcacagagaagaagtacagctcttgtgcttgggaggtggtccgggccgaaattatgcgctcctttagcctgtctatcaatcttcagaaaagactgaagtccaaagagtga

SEQ ID NO: 4056 - RNA, 570 nt, synthetic construct
  misc_feature 1..570: note = derived and/or modified sequence opt6 fromIFNalpha__Homo_sapiens__AAA52716
  source 1..570: mol_type = other RNA
atggcactaaccttctacttactagtagccctagtagtactatcatacaaatcattttcatcactaggatgcgacctcccacaaacacactcactaggaaacagaagagcactcatactactagcacaaatgcgaagaatatcaccattctcatgcctaaaagacagacacgacttcgaattcccacaagaagaattcgacgacaaacaattccaaaaagcacaagcaatatccgtactacacgaaatgatacaacaaacattcaacctattctcaacaaaagactcatcagcagcactagacgaaacactactagacgaattctacatagaactagaccaacaactcaacgacttagaatcatgcgtaatgcaagaagtaggcgtaatcgaatcaccactaatgtacgaagactccatactagcagtaagaaaatactttcaacgaataacactatacctaacagaaaaaaaatactcatcatgcgcatgggaagtagtacgagcagaaataatgagatcattctcattaagcataaacttacaaaaaagactaaaatcaaaagaataa

SEQ ID NO: 4057 - protein, 189 aa, synthetic construct [sequence omitted]

SEQ ID NO: 4058 - RNA, 570 nt, synthetic construct
  misc_feature 1..570: note = IFNalpha__Homo_sapiens__CAA24970
  source 1..570: mol_type = other RNA
atgcccctgtccttttctttactgatggccgtgctggtgctcagctacaaatccatctgttctctgggctgtgatctgcctcagactcacagcctgggtaataggagggcctggatactcctggcacaaatgggaagaatctctcatttctcctgcctgaaggacagatatgatttcggattcccccaggaggtgtttgatggcaaccagttccagaaggctcaagccatctctgccttccatgagatgatccagcagaccttcaatctcttcagcacaaaggattcttctgctgcttgggatgagaccctcctagacaaattctacattgaacttttccagcaactgaatgacctagaagcctgtgtgacacaggaggttggggtggaagagattgccctgatgaatgaggactccatcctggctgtgaggaaatactttcaaagaatcactctttatctgatggggaagaaatacagcccttgtgcctgggaggttgtcagagcagaaatcatgagatccttctctttttcaacaaacttgcaaaaaggattaagaaggaaggattga

SEQ ID NO: 4059 - RNA, 570 nt, synthetic construct
  misc_feature 1..570: note = derived and/or modified sequence opt1 fromIFNalpha__Homo_sapiens__CAA24970
  source 1..570: mol_type = other RNA
atgcccctgagcttctccctcctgatggccgtgctggtcctcagctacaagtccatctgcagcctgggctgcgacctgccgcagacccactccctcgggaaccgccgggcctggatcctgctggcgcagatgggccgcatcagccacttctcctgcctcaaggaccggtacgacttcgggttcccccaggaggtgttcgacggcaaccagttccagaaggcccaggccatcagcgccttccacgagatgatccagcagaccttcaacctgttctccacgaaggacagctccgccgcgtgggacgagaccctgctcgacaagttctacatcgagctgttccagcagctgaacgacctcgaggcctgcgtgacccaggaggtcggggtggaggagatcgccctgatgaacgaggacagcatcctggccgtgcgcaagtacttccagcggatcaccctctacctgatgggcaagaagtactccccctgcgcgtgggaggtcgtgcgcgccgagatcatgcggagcttctccttcagcacgaacctgcagaagggcctccgccggaaggactga

SEQ ID NO: 4060 - RNA, 570 nt, synthetic construct
  misc_feature 1..570: note = derived and/or modified sequence opt2 fromIFNalpha__Homo_sapiens__CAA24970
  source 1..570: mol_type = other RNA
atgcccctctccttctccctcctcatggccgtcctcgtcctctcctacaagtccatctgctccctcggctgcgacctcccccagacccactccctcggcaaccgccgcgcctggatcctcctcgcccagatgggccgcatctcccacttctcctgcctcaaggaccgctacgacttcggcttcccccaggaggtcttcgacggcaaccagttccagaaggcccaggccatctccgccttccacgagatgatccagcagaccttcaacctcttctccaccaaggactcctccgccgcctgggacgagaccctcctcgacaagttctacatcgagctcttccagcagctcaacgacctcgaggcctgcgtcacccaggaggtcggcgtcgaggagatcgccctcatgaacgaggactccatcctcgccgtccgcaagtacttccagcgcatcaccctctacctcatgggcaagaagtactccccctgcgcctgggaggtcgtccgcgccgagatcatgcgctccttctccttctccaccaacctccagaagggcctccgccgcaaggactga

SEQ ID NO: 4061 - RNA, 570 nt, synthetic construct
  misc_feature 1..570: note = derived and/or modified sequence opt3 fromIFNalpha__Homo_sapiens__CAA24970
  source 1..570: mol_type = other RNA
atgcccctgagcttctccctccttatggccgtgctggtcttgtcttacaagtcaatctgcagtttaggctgtgacctgcctcagacccacagcctagggaacagaagggcttggattctcctggcacaaatgggacggatatcccatttttcttgccttaaagatcgctatgacttcggttttccacaggaggttttcgatggcaatcagtttcagaaggcccaagcgatctcggctttccacgaaatgattcagcagacatttaacctgttctcaactaaagacagcagtgccgcatgggatgagacgttgctcgacaagttttacatcgaactgttccagcaactgaatgatctcgaggcctgtgtgacccaggaagtaggggtggaggagattgctttaatgaacgaagactccatcctggcagtccgaaaatattttcagcgtataacactttacttgatgggaaagaagtattctccgtgcgcctgggaggtggttagagctgaaatcatgaggagcttctccttttcaactaatctgcagaaaggcctacggcgcaaggattga

SEQ ID NO: 4062 - RNA, 570 nt, synthetic construct
  misc_feature 1..570: note = derived and/or modified sequence opt4 fromIFNalpha__Homo_sapiens__CAA24970
  source 1..570: mol_type = other RNA
atgcccctgagcttcagcctgctgatggccgtgctggtgctgagctacaagagcatctgcagcctgggctgcgacctgccccagacccacagcctgggcaacagaagagcctggatcctgctggcccagatgggcagaatcagccacttcagctgcctgaaggacagatacgacttcggcttcccccaggaggtgttcgacggcaaccagttccagaaggcccaggccatcagcgccttccacgagatgatccagcagaccttcaacctgttcagcaccaaggacagcagcgccgcctgggacgagaccctgctggacaagttctacatcgagctgttccagcagctgaacgacctggaggcctgcgtgacccaggaggtgggcgtggaggagatcgccctgatgaacgaggacagcatcctggccgtgagaaagtacttccagagaatcaccctgtacctgatgggcaagaagtacagcccctgcgcctgggaggtggtgagagccgagatcatgagaagcttcagcttcagcaccaacctgcagaagggcctgagaagaaaggactga

SEQ ID NO: 4063 - RNA, 570 nt, synthetic construct
  misc_feature 1..570: note = derived and/or modified sequence opt5 fromIFNalpha__Homo_sapiens__CAA24970
  source 1..570: mol_type = other RNA
atgcccctgagcttctccctcctgatggccgtgcttgtcctgtcttacaagagcatctgctccctcggctgtgacctgcctcagacccactctcttgggaacagacgggcttggattctgctcgcccaaatgggacgcatcagccatttttcctgcctgaaagatagatatgacttcggctttccgcaggaggttttcgatgggaatcagtttcagaaggcgcaagctatttctgccttccacgaaatgatccagcagacatttaacctgttcagcacgaaagactccagcgccgcttgggatgagaccctcctggacaagttttacattgaacttttccagcaactgaatgatctcgaggcctgtgtgacacaggaagtgggagtcgaggagatcgctctgatgaacgaagactctatccttgccgtgcggaaatattttcagcgcattaccctgtacctcatgggcaagaagtattccccctgcgcgtgggaggttgtgagagccgaaatcatgcggagcttctctttttccacaaatctgcagaaagggctgcgcagaaaggattga

SEQ ID NO: 4064 - RNA, 570 nt, synthetic construct
  misc_feature 1..570: note = derived and/or modified sequence opt6 fromIFNalpha__Homo_sapiens__CAA24970
  source 1..570: mol_type = other RNA
atgccattaagctttagtttactaatggcagtactagtactatcatacaaaagcatatgctcactaggatgcgatctaccacaaacacactcactaggaaacagacgagcatggatattactagcacaaatgggaagaataagccatttctcatgcctaaaagatagatatgactttggatttccacaagaagtattcgatggaaatcaatttcaaaaagcacaagcaataagcgcattccatgaaatgatacaacaaacattcaatctatttagtacaaaagacagctcagcagcatgggatgaaacactattagacaaattctatatagaactatttcaacaactaaatgacttagaagcatgcgtaacacaagaagtaggagtagaagaaatagcactaatgaacgaagactcaatattagcagtaagaaaatactttcaaagaataacactatatttaatgggaaaaaaatacagcccatgcgcatgggaagtagtaagagcagaaataatgagaagctttagctttagcacaaacttacaaaaaggattaagaagaaaagattaa

SEQ ID NO: 4065 - protein, 166 aa, synthetic construct [sequence omitted]

SEQ ID NO: 4066 - RNA, 501 nt, synthetic construct
  misc_feature 1..501: note = IFNalpha__Homo_sapiens__AAP20099
  source 1..501: mol_type = other RNA
atgtgtgacctaccacaaacccacagcctgggtagcaggaggaccttgatgctcctggcgcagatgaggagaatctctcttttctcctgcttgaaggacagacatgactttggatttccccaggaggagtttggcaaccagttccaaaaggctgaaaccatccctgtcctccatgagatgatccagcagatcttcaacctcttcagcacaaaagactcatctgctgcttgggatgagaccctcctagacaaattctacactgaactctaccagcagctgaatgacctggaagcctgtgtgatacagggggtgggggtgacagagactcccctgatgaaggaggactccattctggctgtgaggaaatacttccaaagaatcactctctatctgaaagagaagaaatacagcccttgtgcctgggaggttgtcagagcagaaatcatgagatctttttctttgtcaacaaacttgcaagaaagtttaagatctaaagagtaa

SEQ ID NO: 4067 - RNA, 501 nt, synthetic construct
  misc_feature 1..501: note = derived and/or modified sequence opt1 fromIFNalpha__Homo_sapiens__AAP20099
  source 1..501: mol_type = other RNA
atgtgcgacctgccccagacccacagcctcggctcccgccggaccctgatgctgctcgcccagatgcgccggatcagcctgttctcctgcctgaaggaccgccacgacttcgggttcccgcaggaggagttcggcaaccagttccagaaggccgagaccatccccgtgctccacgagatgatccagcagatcttcaacctgttcagcaccaaggactccagcgcggcctgggacgagaccctgctcgacaagttctacaccgagctgtaccagcagctgaacgacctcgaggcctgcgtcatccagggggtgggcgtgacggagacgcccctgatgaaggaggactccatcctggccgtccggaagtacttccagcgcatcaccctctacctgaaggagaagaagtacagcccctgcgcctgggaggtggtgcgggcggagatcatgcgctccttcagcctgtccaccaacctccaggagagcctgcggtccaaggagtga

SEQ ID NO: 4068 - RNA, 501 nt, synthetic construct
  misc_feature 1..501: note = derived and/or modified sequence opt2 fromIFNalpha__Homo_sapiens__AAP20099
  source 1..501: mol_type = other RNA
atgtgcgacctcccccagacccactccctcggctcccgccgcaccctcatgctcctcgcccagatgcgccgcatctccctcttctcctgcctcaaggaccgccacgacttcggcttcccccaggaggagttcggcaaccagttccagaaggccgagaccatccccgtcctccacgagatgatccagcagatcttcaacctcttctccaccaaggactcctccgccgcctgggacgagaccctcctcgacaagttctacaccgagctctaccagcagctcaacgacctcgaggcctgcgtcatccagggcgtcggcgtcaccgagacccccctcatgaaggaggactccatcctcgccgtccgcaagtacttccagcgcatcaccctctacctcaaggagaagaagtactccccctgcgcctgggaggtcgtccgcgccgagatcatgcgctccttctccctctccaccaacctccaggagtccctccgctccaaggagtga

SEQ ID NO: 4069 - RNA, 501 nt, synthetic construct
  misc_feature 1..501: note = derived and/or modified sequence opt3 fromIFNalpha__Homo_sapiens__AAP20099
  source 1..501: mol_type = other RNA
atgtgcgacctgccccagacccacagcctcggctccagaaggacacttatgctgttggcccaaatgcggcgcatctctttattctcatgtctgaaggatcgacatgactttgggttccctcaggaggaatttggaaaccagttccagaaagctgagactattccagtgctacacgaaatgatacaacagatctttaatctcttcagtacgaaggatagctccgcagcctgggacgagaccctgcttgataaattttacacagaactgtatcagcagttgaacgacctcgaggcgtgcgtcattcaaggtgttggcgtgactgagaccccgctgatgaaggaagattctatcctggctgtacgtaaatacttccagagaattacactctatttaaaggagaagaaatactcgccctgtgcctgggaagtggtcagggcagagatcatgcggtcatttagcctgagtaccaatcttcaggagtccttgcgctctaaggaatga

SEQ ID NO: 4070 - RNA, 501 nt, synthetic construct
  misc_feature 1..501: note = derived and/or modified sequence opt4 fromIFNalpha__Homo_sapiens__AAP20099
  source 1..501: mol_type = other RNA
atgtgcgacctgccccagacccacagcctgggcagcagaagaaccctgatgctgctggcccagatgagaagaatcagcctgttcagctgcctgaaggacagacacgacttcggcttcccccaggaggagttcggcaaccagttccagaaggccgagaccatccccgtgctgcacgagatgatccagcagatcttcaacctgttcagcaccaaggacagcagcgccgcctgggacgagaccctgctggacaagttctacaccgagctgtaccagcagctgaacgacctggaggcctgcgtgatccagggcgtgggcgtgaccgagacccccctgatgaaggaggacagcatcctggccgtgagaaagtacttccagagaatcaccctgtacctgaaggagaagaagtacagcccctgcgcctgggaggtggtgagagccgagatcatgagaagcttcagcctgagcaccaacctgcaggagagcctgagaagcaaggagtga

SEQ ID NO: 4071 - RNA, 501 nt, synthetic construct
  misc_feature 1..501: note = derived and/or modified sequence opt5 fromIFNalpha__Homo_sapiens__AAP20099
  source 1..501: mol_type = other RNA
atgtgcgacctgccccagacccacagcctcggctccagacggacactgatgcttctggcccaaatgcgcagaatctctctcttcagctgtctgaaggatcggcatgactttgggttccctcaggaggaatttggaaaccagttccagaaagctgagacgattccggtgcttcacgaaatgatccaacagatttttaatctgttctccaccaaggattctagcgccgcgtgggacgagacactcctggataaattttacaccgaactgtatcagcagctcaacgacctggaggcttgcgtcatccaaggcgttggggtgacagagacaccccttatgaaggaagattccattctggccgtgcgcaaatacttccagagaatcaccctctatctgaaggagaagaaatactctccttgtgcctgggaagtcgtgcgggctgagatcatgcgcagcttttcccttagcaccaatctgcaggagtctctcagatccaaggaatga

SEQ ID NO: 4072 - RNA, 501 nt, synthetic construct
  misc_feature 1..501: note = derived and/or modified sequence opt6 fromIFNalpha__Homo_sapiens__AAP20099
  source 1..501: mol_type = other RNA
atgtgcgacctaccacaaacacactcactaggatcaagaagaacactaatgctactagcacaaatgcgaagaatatcattattctcatgcctaaaagacagacacgacttcggattcccacaagaagaattcggaaaccaattccaaaaagcagaaacaataccagtactacacgaaatgatacaacaaatattcaacctattctcaacaaaagactcatcagccgcatgggacgaaacactactagacaaattctacacagaattataccaacaactaaacgacttagaagcatgcgtaatacaaggagtaggagtcacagaaacaccactaatgaaagaagactcaatactagcagtaagaaaatacttccaaagaataacactatacctaaaagaaaaaaaatactcaccatgcgcatgggaagtagtaagagcagaaataatgagatccttctcactatcaacaaacctacaagaatcactaagatcaaaagaataa

SEQ ID NO: 4073 - protein, 187 aa, synthetic construct
  REGION 1..187: note = IFNB__Homo_sapiens__P01574
MTNKCLLQIALLLCFSTTALSMSYNLLGFLQRSSNFQCQKLLWQLNGRLEYCLKDRMNFDIPEEIKQLQQFQKEDAALTIYEMLQNIFAIFRQDSSSTGWNETIVENLLANVYHQINHLKTVLEEKLEKEDFTRGKLMSSLHLKRYYGRILHYLKAKEYSHCAWTIVRVEILRNFYFINRLTGYLRN

SEQ ID NO: 4074 - RNA, 564 nt, synthetic construct
  misc_feature 1..564: note = IFNB__Homo_sapiens__AAA36040
  source 1..564: mol_type = other RNA
atgaccaacaagtgtctcctccaaattgctctcctgttgtgcttctccactacagctctttccatgagctacaacttgcttggattcctacaaagaagcagcaattttcagtgtcagaagctcctgtggcaattgaatgggaggcttgaatactgcctcaaggacaggatgaactttgacatccctgaggagattaagcagctgcagcagttccagaaggaggacgccgcattgaccatctatgagatgctccagaacatctttgctattttcagacaagattcatctagcactggctggaatgagactattgttgagaacctcctggctaatgtctatcatcagataaaccatctgaagacagtcctggaagaaaaactggagaaagaagatttcaccaggggaaaactcatgagcagtctgcacctgaaaagatattatgggaggattctgcattacctgaaggccaaggagtacagtcactgtgcctggaccatagtcagagtggaaatcctaaggaacttttacttcattaacagacttacaggttacctccgaaactga

SEQ ID NO: 4075 - RNA, 564 nt, synthetic construct
  misc_feature 1..564: note = derived and/or modified sequence opt1 fromIFNB__Homo_sapiens__AAA36040
  source 1..564: mol_type = other RNA
atgaccaacaagtgcctgctccagatcgccctgctgctctgcttcagcaccacggccctgtccatgagctacaacctgctcggcttcctgcagcgctccagcaacttccagtgccagaagctgctctggcagctgaacgggcggctggagtactgcctcaaggaccgcatgaacttcgacatccccgaggagatcaagcagctgcagcagttccagaaggaggacgcggccctgaccatctacgagatgctccagaacatcttcgccatcttccggcaggactccagctccaccggctggaacgagaccatcgtggagaacctgctggccaacgtctaccaccagatcaaccacctcaagacggtgctggaggagaagctggagaaggaggacttcacccgcgggaagctcatgagctccctgcacctgaagcggtactacggccgcatcctccactacctgaaggccaaggagtacagccactgcgcgtggaccatcgtgcgggtcgagatcctgcgcaacttctacttcatcaaccggctcaccgggtacctgcgcaactga

SEQ ID NO: 4076 - RNA, 564 nt, synthetic construct
  misc_feature 1..564: note = derived and/or modified sequence opt2 fromIFNB__Homo_sapiens__AAA36040
  source 1..564: mol_type = other RNA
atgaccaacaagtgcctcctccagatcgccctcctcctctgcttctccaccaccgccctctccatgtcctacaacctcctcggcttcctccagcgctcctccaacttccagtgccagaagctcctctggcagctcaacggccgcctcgagtactgcctcaaggaccgcatgaacttcgacatccccgaggagatcaagcagctccagcagttccagaaggaggacgccgccctcaccatctacgagatgctccagaacatcttcgccatcttccgccaggactcctcctccaccggctggaacgagaccatcgtcgagaacctcctcgccaacgtctaccaccagatcaaccacctcaagaccgtcctcgaggagaagctcgagaaggaggacttcacccgcggcaagctcatgtcctccctccacctcaagcgctactacggccgcatcctccactacctcaaggccaaggagtactcccactgcgcctggaccatcgtccgcgtcgagatcctccgcaacttctacttcatcaaccgcctcaccggctacctccgcaactga

SEQ ID NO: 4077 - RNA, 564 nt, synthetic construct
  misc_feature 1..564: note = derived and/or modified sequence opt3 fromIFNB__Homo_sapiens__AAA36040
  source 1..564: mol_type = other RNA
atgaccaacaagtgcctgctccagatcgcccttctgttgtgtttcagcacaactgctttatccatgtcttacaatctgctaggctttctccaaagatcaagtaacttccagtgccagaaactgctttggcagctgaatgggaggttggagtattgtctcaaggaccggatgaactttgatattcccgaagagataaaacaactgcagcagttccagaaggaagacgcagccctgacgatctacgagatgctccaaaatatttttgcgatcttccgccaggatagctcctctaccggatggaacgaaacaattgtggagaatttactggctaacgtctatcaccagatcaatcatcttaaaactgttttggaggaaaagctggagaaggaagactttacccgaggtaaactaatgtcgtcactccacctgaagcgttactatggcagaatacttcattacctgaaagccaaggagtatagccactgcgcatggacaatcgtgagggtagagattttgcggaacttctactttatcaatcgcctcaccgggtacctgagaaactga

SEQ ID NO: 4078 - RNA, 564 nt, synthetic construct
  misc_feature 1..564: note = derived and/or modified sequence opt4 fromIFNB__Homo_sapiens__AAA36040
  source 1..564: mol_type = other RNA
atgaccaacaagtgcctgctgcagatcgccctgctgctgtgcttcagcaccaccgccctgagcatgagctacaacctgctgggcttcctgcagagaagcagcaacttccagtgccagaagctgctgtggcagctgaacggcagactggagtactgcctgaaggacagaatgaacttcgacatccccgaggagatcaagcagctgcagcagttccagaaggaggacgccgccctgaccatctacgagatgctgcagaacatcttcgccatcttcagacaggacagcagcagcaccggctggaacgagaccatcgtggagaacctgctggccaacgtgtaccaccagatcaaccacctgaagaccgtgctggaggagaagctggagaaggaggacttcaccagaggcaagctgatgagcagcctgcacctgaagagatactacggcagaatcctgcactacctgaaggccaaggagtacagccactgcgcctggaccatcgtgagagtggagatcctgagaaacttctacttcatcaacagactgaccggctacctgagaaactga

SEQ ID NO: 4079 - RNA, 564 nt, synthetic construct
  misc_feature 1..564: note = derived and/or modified sequence opt5 fromIFNB__Homo_sapiens__AAA36040
  source 1..564: mol_type = other RNA
atgaccaacaagtgcctgctccagatcgccctgcttctgtgtttcagcacaacggctctctccatgtcttacaatctgcttggctttctgcaaagaagctccaacttccagtgccagaaactcctgtggcagctgaatgggcggctcgagtattgtctgaaggaccgcatgaactttgatattcccgaagagatcaaacaacttcagcagttccagaaggaagacgccgcgctgaccatttacgagatgctccaaaatatctttgctattttcagacaggattctagctccacaggatggaacgaaaccatcgtggagaatctgcttgccaacgtctatcaccagatcaatcatctgaaaacagttctcgaggaaaagctggagaaggaagactttacccggggcaaactgatgtctagcctccacctgaagcgctactatgggcggattcttcattacctgaaagccaaggagtattcccactgcgcttggacaatcgtgagagtggagattctccgcaacttctactttatcaatagactgaccggataccttcggaactga

SEQ ID NO: 4080 - RNA, 564 nt, synthetic construct
  misc_feature 1..564: note = derived and/or modified sequence opt6 fromIFNB__Homo_sapiens__AAA36040
  source 1..564: mol_type = other RNA
atgacaaacaaatgcctactacaaatagcactactcctatgcttctccacaacagcactatcaatgtcatacaacctactaggattcctacaacgatcctcaaacttccaatgccaaaaactactatggcaactaaacggaagactagaatactgcttaaaagaccgcatgaacttcgacataccagaagaaataaaacaactacaacaattccaaaaagaagacgcagcactaaccatatacgaaatgctacaaaacatattcgcaatattccgacaagactcatcatcaacaggatggaacgaaacaatagtagaaaacctcctagcaaacgtataccaccaaataaaccacttaaaaacagtactagaagaaaaattagaaaaagaagacttcacaagaggaaaattaatgtcatcactacacctaaaacgatactatggaagaatactacactacctaaaagcaaaagaatactcacattgcgcatggacaatagtacgagtagaaatactaagaaacttctacttcataaacagactaacaggatacctacgaaactaa

SEQ ID NO: 4081 - protein, 187 aa, synthetic construct [sequence omitted]

SEQ ID NO: 4082 - RNA, 564 nt, synthetic construct
  misc_feature 1..564: note = IFNB__Homo_sapiens__AAC41702
  source 1..564: mol_type = other RNA
atgaccaacaagtgtctcctccaaattgctctcctgttgtgcttctccacgacagctctttccatgagctacaacttgcttggattcctacaaagaagcagcaattgtcagtgtcagaagctcctgtggcaattgaatgggaggcttgaatactgcctcaaggacaggaggaactttgacatccctgaggagattaagcagctgcagcagttccagaaggaggacgccgcagtgaccatctatgagatgctccagaacatctttgctattttcagacaagattcatcgagcactggctggaatgagactattgttgagaacctcctggctaatgtctatcatcagagaaaccatctgaagacagtcctggaagaaaaactggagaaagaagatttcaccaggggaaaacgcatgagcagtctgcacctgaaaagatattatgggaggattctgcattacctgaaggccaaggaggacagtcactgtgcctggaccatagtcagagtggaaatcctaaggaacttttacgtcattaacagacttacaggttacctccgaaactga

SEQ ID NO: 4083 - RNA, 564 nt, synthetic construct
  misc_feature 1..564: note = derived and/or modified sequence opt1 fromIFNB__Homo_sapiens__AAC41702
  source 1..564: mol_type = other RNA
atgaccaacaagtgcctgctccagatcgccctgctgctctgcttcagcaccacggccctgtccatgagctacaacctgctcggcttcctgcagcgctccagcaactgccagtgccagaagctgctctggcagctgaacgggcggctggagtactgcctcaaggaccgccggaacttcgacatccccgaggagatcaagcagctgcagcagttccagaaggaggacgcggccgtgaccatctacgagatgctgcagaacatcttcgccatcttccgccaggactccagctccaccggctggaacgagaccatcgtcgagaacctcctggccaacgtgtaccaccagcggaaccacctgaagacggtgctcgaggagaagctggagaaggaggacttcacccgcgggaagcggatgagctccctgcacctcaagcgctactacggccggatcctgcactacctgaaggccaaggaggacagccactgcgcgtggaccatcgtccgcgtggagatcctccggaacttctacgtgatcaaccgcctgaccgggtacctgcggaactga

SEQ ID NO: 4084 - RNA, 564 nt, synthetic construct
  misc_feature 1..564: note = derived and/or modified sequence opt2 fromIFNB__Homo_sapiens__AAC41702
  source 1..564: mol_type = other RNA
atgaccaacaagtgcctcctccagatcgccctcctcctctgcttctccaccaccgccctctccatgtcctacaacctcctcggcttcctccagcgctcctccaactgccagtgccagaagctcctctggcagctcaacggccgcctcgagtactgcctcaaggaccgccgcaacttcgacatccccgaggagatcaagcagctccagcagttccagaaggaggacgccgccgtcaccatctacgagatgctccagaacatcttcgccatcttccgccaggactcctcctccaccggctggaacgagaccatcgtcgagaacctcctcgccaacgtctaccaccagcgcaaccacctcaagaccgtcctcgaggagaagctcgagaaggaggacttcacccgcggcaagcgcatgtcctccctccacctcaagcgctactacggccgcatcctccactacctcaaggccaaggaggactcccactgcgcctggaccatcgtccgcgtcgagatcctccgcaacttctacgtcatcaaccgcctcaccggctacctccgcaactga

SEQ ID NO: 4085 - RNA, 564 nt, synthetic construct
  misc_feature 1..564: note = derived and/or modified sequence opt3 fromIFNB__Homo_sapiens__AAC41702
  source 1..564: mol_type = other RNA
atgaccaacaagtgcctgctccagatcgcccttctgttgtgtttcagcacaactgctttatccatgtcttacaatctgctaggctttctccaaagatcaagtaactgccagtgtcagaaactgctttggcagctgaatgggaggttggagtattgcctcaaggaccggcgcaacttcgatattcccgaagagataaaacaactgcagcagtttcagaaggaagacgcagccgtgacgatctacgagatgctgcaaaatattttcgcgatctttcgacaggatagctcctctaccggatggaacgaaacaattgtcgagaatctcttagctaacgtttatcaccagcgtaatcatctgaaaactgtgcttgaggaaaagttggagaaggaagacttcaccagaggtaaaaggatgtcgtcactgcacctaaagcggtactatggccgcatcctccattacctgaaagccaaggaggatagccactgtgcatggacaatagtaagagtggagatccttaggaacttttatgtcattaatcggctgaccgggtacttgcgcaactga

SEQ ID NO: 4086 - RNA, 564 nt, synthetic construct
  misc_feature 1..564: note = derived and/or modified sequence opt4 fromIFNB__Homo_sapiens__AAC41702
  source 1..564: mol_type = other RNA
atgaccaacaagtgcctgctgcagatcgccctgctgctgtgcttcagcaccaccgccctgagcatgagctacaacctgctgggcttcctgcagagaagcagcaactgccagtgccagaagctgctgtggcagctgaacggcagactggagtactgcctgaaggacagaagaaacttcgacatccccgaggagatcaagcagctgcagcagttccagaaggaggacgccgccgtgaccatctacgagatgctgcagaacatcttcgccatcttcagacaggacagcagcagcaccggctggaacgagaccatcgtggagaacctgctggccaacgtgtaccaccagagaaaccacctgaagaccgtgctggaggagaagctggagaaggaggacttcaccagaggcaagagaatgagcagcctgcacctgaagagatactacggcagaatcctgcactacctgaaggccaaggaggacagccactgcgcctggaccatcgtgagagtggagatcctgagaaacttctacgtgatcaacagactgaccggctacctgagaaactga

SEQ ID NO: 4087 - RNA, 564 nt, synthetic construct
  misc_feature 1..564: note = derived and/or modified sequence opt5 fromIFNB__Homo_sapiens__AAC41702
  source 1..564: mol_type = other RNA
atgaccaacaagtgcctgctccagatcgccctgcttctgtgtttcagcacaacggctctctccatgtcttacaatctgcttggctttctgcaaagaagctccaactgccagtgtcagaaactcctgtggcagctgaatgggcggctcgagtattgcctgaaggaccgcagaaacttcgatattcccgaagagatcaaacaacttcagcagtttcagaaggaagacgccgcggtgaccatttacgagatgctgcaaaatatcttcgctatttttcggcaggattctagctccacaggatggaacgaaaccatcgtcgagaatctcctggccaacgtttatcaccagcgcaatcatcttaaaacagtgctggaggaaaagctcgagaaggaagacttcaccagaggcaaacggatgtctagcctgcacctgaagcgctactatgggagaatcctccattacctgaaagccaaggaggattcccactgtgcttggacaattgtgcgggtcgagatccttcgcaacttttatgtgattaatagactgaccggatacctccggaactga

SEQ ID NO: 4088 - RNA, 564 nt, synthetic construct
  misc_feature 1..564: note = derived and/or modified sequence opt6 fromIFNB__Homo_sapiens__AAC41702
  source 1..564: mol_type = other RNA
atgacaaataaatgcctactacaaatagcactactactatgcttctccacaaccgcactatcaatgtcatacaacctactaggattcctccaaagatcatcaaactgccaatgccaaaaactactatggcaactaaacggaagactagaatactgcctaaaagacagacgaaacttcgacataccagaagaaataaaacaactacaacaattccaaaaagaagacgcagcagtaacaatctacgaaatgctacaaaacatattcgcaatattcagacaagactcatcatcaacaggatggaacgaaacaatagtagaaaacttactagcaaatgtataccaccaaagaaaccacttaaaaacagtactagaagaaaaactagaaaaagaagacttcacaagaggaaaaagaatgtcatcactacacctaaaaagatactacggcagaatactacactacctaaaagcaaaagaagactcacactgcgcatggacaatagtacgagtagaaatactaagaaacttctatgtaataaacagactaacaggatacttaagaaactaa

SEQ ID NO: 4089 - protein, 166 aa, synthetic construct
  REGION 1..166: note = IFNG__Homo_sapiens__P01579
MKYTSYILAFQLCIVLGSLGCYCQDPYVKEAENLKKYFNAGHSDVADNGTLFLGILKNWKEESDRKIMQSQIVSFYFKLFKNFKDDQSIQKSVETIKEDMNVKFFNSNKKKRDDFEKLTNYSVTDLNVQRKAIHELIQVMAELSPAAKTGKRKRSQMLFRGRRASQ

SEQ ID NO: 4090 - RNA, 501 nt, synthetic construct
  misc_feature 1..501: note = IFNG__Homo_sapiens__AAB59534
  source 1..501: mol_type = other RNA
atgaaatatacaagttatatcttggcttttcagctctgcatcgttttgggttctcttggctgttactgccaggacccatatgtaaaagaagcagaaaaccttaagaaatattttaatgcaggtcattcagatgtagcggataatggaactcttttcttaggcattttgaagaattggaaagaggagagtgacagaaaaataatgcagagccaaattgtctccttttacttcaaactttttaaaaactttaaagatgaccagagcatccaaaagagtgtggagaccatcaaggaagacatgaatgtcaagtttttcaatagcaacaaaaagaaacgagatgacttcgaaaagctgactaattattcggtaactgacttgaatgtccaacgcaaagcaatacatgaactcatccaagtgatggctgaactgtcgccagcagctaaaacagggaagcgaaaaaggagtcagatgctgtttcgaggtcgaagagcatcccagtaa

SEQ ID NO: 4091 - RNA, 501 nt, synthetic construct
  misc_feature 1..501: note = derived and/or modified sequence opt1 fromIFNG__Homo_sapiens__AAB59534
  source 1..501: mol_type = other RNA
atgaagtacaccagctacatcctcgccttccagctctgcatcgtgctgggctccctggggtgctactgccaggacccctacgtcaaggaggccgagaacctcaagaagtacttcaacgcgggccacagcgacgtggccgacaacgggaccctgttcctgggcatcctcaagaactggaaggaggagtccgaccgcaagatcatgcagagccagatcgtgtccttctacttcaagctgttcaagaacttcaaggacgaccagagcatccagaagtccgtcgagacgatcaaggaggacatgaacgtgaagttcttcaacagcaacaagaagaagcgggacgacttcgagaagctgaccaactactccgtgaccgacctcaacgtccagcgcaaggccatccacgagctgatccaggtgatggccgagctgagcccggccgcgaagaccgggaagcggaagcgctcccagatgctgttccggggccgccgggccagccagtga

SEQ ID NO: 4092 - RNA, 501 nt, synthetic construct
  misc_feature 1..501: note = derived and/or modified sequence opt2 fromIFNG__Homo_sapiens__AAB59534
  source 1..501: mol_type = other RNA
atgaagtacacctcctacatcctcgccttccagctctgcatcgtcctcggctccctcggctgctactgccaggacccctacgtcaaggaggccgagaacctcaagaagtacttcaacgccggccactccgacgtcgccgacaacggcaccctcttcctcggcatcctcaagaactggaaggaggagtccgaccgcaagatcatgcagtcccagatcgtctccttctacttcaagctcttcaagaacttcaaggacgaccagtccatccagaagtccgtcgagaccatcaaggaggacatgaacgtcaagttcttcaactccaacaagaagaagcgcgacgacttcgagaagctcaccaactactccgtcaccgacctcaacgtccagcgcaaggccatccacgagctcatccaggtcatggccgagctctcccccgccgccaagaccggcaagcgcaagcgctcccagatgctcttccgcggccgccgcgcctcccagtga

SEQ ID NO: 4093 - RNA, 501 nt, synthetic construct
  misc_feature 1..501: note = derived and/or modified sequence opt3 fromIFNG__Homo_sapiens__AAB59534
  source 1..501: mol_type = other RNA
atgaagtacaccagctatatcctcgccttccagctctgcattgtgcttggctccctggggtgttactgccaagacccctatgtcaaagaggctgaaaacttgaagaaatactttaatgcaggacactctgatgttgccgacaacggtacattattcctgggcatactaaagaattggaaagaggaatcagatagaaagatcatgcagagtcagattgtgagcttttatttcaagctctttaaaaacttcaaggacgatcagtccatccaaaaatctgtagagactattaaggaagacatgaatgtgaaatttttcaactcgaataagaagaaaagggatgactttgagaagctgacgaactactcagtcaccgatcttaatgtgcagcggaaagcgatccatgagctgatacaggttatggctgaattgagccctgccgcaaagacagggaaacgcaagcgaagtcagatgctgttccgtggaagaagggcctcccaatga

SEQ ID NO: 4094 - RNA, 501 nt, synthetic construct
  misc_feature 1..501: note = derived and/or modified sequence opt4 fromIFNG__Homo_sapiens__AAB59534
  source 1..501: mol_type = other RNA
atgaagtacaccagctacatcctggccttccagctgtgcatcgtgctgggcagcctgggctgctactgccaggacccctacgtgaaggaggccgagaacctgaagaagtacttcaacgccggccacagcgacgtggccgacaacggcaccctgttcctgggcatcctgaagaactggaaggaggagagcgacagaaagatcatgcagagccagatcgtgagcttctacttcaagctgttcaagaacttcaaggacgaccagagcatccagaagagcgtggagaccatcaaggaggacatgaacgtgaagttcttcaacagcaacaagaagaagagagacgacttcgagaagctgaccaactacagcgtgaccgacctgaacgtgcagagaaaggccatccacgagctgatccaggtgatggccgagctgagccccgccgccaagaccggcaagagaaagagaagccagatgctgttcagaggcagaagagccagccagtga

SEQ ID NO: 4095 - RNA, 501 nt, synthetic construct
  misc_feature 1..501: note = derived and/or modified sequence opt5 fromIFNG__Homo_sapiens__AAB59534
  source 1..501: mol_type = other RNA
atgaagtacaccagctatatcctggccttccagctctgcattgtgctgggctcccttgggtgttactgccaagacccctatgtcaaagaggctgaaaacctgaagaaatactttaatgccggacactctgatgttgcggacaacggcacactcttcctggggatccttaagaattggaaagaggaaagcgatagaaagattatgcagtcccagatcgtgtctttttatttcaagctgtttaaaaacttcaaggacgatcagagcattcaaaaatccgtggagacgatcaaggaagacatgaatgtcaaatttttcaactctaataagaagaaacgggatgactttgagaagctcaccaactacagcgtgacagatctgaatgttcagcgcaaagctatccatgagctgattcaggtgatggccgaactctcccctgccgctaagaccggaaaaagaaagcggagccagatgctgttccgcggcagacgggcctctcaatga

SEQ ID NO: 4096 - RNA, 501 nt, synthetic construct
  misc_feature 1..501: note = derived and/or modified sequence opt6 fromIFNG__Homo_sapiens__AAB59534
  source 1..501: mol_type = other RNA
atgaaatacacatcatacatattagcattccaactatgcatagtactaggatcactaggatgctactgccaagacccatacgtaaaagaagcagaaaacctaaaaaaatacttcaacgcaggtcactcagacgtagcagacaacggaacactattcctaggaatattaaaaaactggaaagaagaatcagacagaaaaataatgcaatcacaaatagtatcattctacttcaaactattcaaaaacttcaaagacgaccaatcaatacaaaaatcagtagaaacaataaaagaagacatgaacgtaaaattcttcaacagcaataaaaaaaaaagagacgacttcgaaaaactaacaaactactcagtaacagacctaaacgtacaaagaaaagcaatacacgaattaatacaagtaatggcagaactatcaccagcagcaaaaacaggaaaaagaaaaagatcacaaatgttattcagaggaagaagagcaagccaataa

SEQ ID NO: 4097 - protein, 144 aa, synthetic construct [sequence omitted]

SEQ ID NO: 4098 - RNA, 435 nt, synthetic construct
  misc_feature 1..435: note = IFNG__Homo_sapiens__AAP20100
  source 1..435: mol_type = other RNA
atgcaggacccatatgtaaaagaagcagaaaaccttaagaaatattttaatgcaggtcattcagatgtagcggataatggaactcttttcttaggcattttgaagaattggaaagaggagagtgacagaaaaataatgcagagccaaattgtctccttttacttcaaactttttaaaaactttaaagatgaccagagcatccaaaagagtgtggagaccatcaaggaagacatgaatgtcaagtttttcaatagcaacaaaaagaaacgagatgacttcgaaaagctgactaattattcggtaactgacttgaatgtccaacgcaaagcaatacatgaactcatccaagtgatggctgaactgtcgccagcagctaaaacagggaagcgaaaaaggagtcagatgctgtttcgaggtcgaagagcatcccagtaa

SEQ ID NO: 4099 - RNA, 435 nt, synthetic construct
  misc_feature 1..435: note = derived and/or modified sequence opt1 fromIFNG__Homo_sapiens__AAP20100
  source 1..435: mol_type = other RNA
atgcaggacccctacgtgaaggaggccgagaacctgaagaagtacttcaacgccggccacagcgacgtcgcggacaacgggaccctcttcctgggcatcctgaagaactggaaggaggagtccgaccgcaagatcatgcagagccagatcgtgtccttctacttcaagctgttcaagaacttcaaggacgaccagagcatccagaagtccgtggagaccatcaaggaggacatgaacgtcaagttcttcaacagcaacaagaagaagcgggacgacttcgagaagctcacgaactactccgtgaccgacctgaacgtgcagcgcaaggccatccacgagctcatccaggtcatggccgagctgagcccggccgccaagaccgggaagcggaagcgctcccagatgctgttccggggccgccgggcgagccagtga

SEQ ID NO: 4100 - RNA, 435 nt, synthetic construct
  misc_feature 1..435: note = derived and/or modified sequence opt2 fromIFNG__Homo_sapiens__AAP20100
  source 1..435: mol_type = other RNA
atgcaggacccctacgtcaaggaggccgagaacctcaagaagtacttcaacgccggccactccgacgtcgccgacaacggcaccctcttcctcggcatcctcaagaactggaaggaggagtccgaccgcaagatcatgcagtcccagatcgtctccttctacttcaagctcttcaagaacttcaaggacgaccagtccatccagaagtccgtcgagaccatcaaggaggacatgaacgtcaagttcttcaactccaacaagaagaagcgcgacgacttcgagaagctcaccaactactccgtcaccgacctcaacgtccagcgcaaggccatccacgagctcatccaggtcatggccgagctctcccccgccgccaagaccggcaagcgcaagcgctcccagatgctcttccgcggccgccgcgcctcccagtga

SEQ ID NO: 4101 - RNA, 435 nt, synthetic construct
  misc_feature 1..435: note = derived and/or modified sequence opt3 fromIFNG__Homo_sapiens__AAP20100
  source 1..435: mol_type = other RNA
atgcaggacccctacgtgaaggaggccgaaaacctgaaaaagtatttcaatgctggccacagcgatgtcgcagacaacgggaccctctttcttggaatcctgaaaaattggaaggaggaatccgatagaaaaattatgcaatctcagatagtttcattctactttaagttgttcaagaactttaaagacgatcagagtatccaaaagagcgtggagacaattaaagaagacatgaatgtaaagttctttaactccaataaaaagaagagggatgacttcgagaaattaactaactattctgtgacggatctgaatgtccagcggaaggccatccatgagctaattcaggtgatggcggaactctcgcctgctgccaaaaccggtaagcgcaaacgatcacagatgctgtttcgtggcagaagggcaagccagtga

SEQ ID NO: 4102 - RNA, 435 nt, synthetic construct
  misc_feature 1..435: note = derived and/or modified sequence opt4 fromIFNG__Homo_sapiens__AAP20100
  source 1..435: mol_type = other RNA
atgcaggacccctacgtgaaggaggccgagaacctgaagaagtacttcaacgccggccacagcgacgtggccgacaacggcaccctgttcctgggcatcctgaagaactggaaggaggagagcgacagaaagatcatgcagagccagatcgtgagcttctacttcaagctgttcaagaacttcaaggacgaccagagcatccagaagagcgtggagaccatcaaggaggacatgaacgtgaagttcttcaacagcaacaagaagaagagagacgacttcgagaagctgaccaactacagcgtgaccgacctgaacgtgcagagaaaggccatccacgagctgatccaggtgatggccgagctgagccccgccgccaagaccggcaagagaaagagaagccagatgctgttcagaggcagaagagccagccagtga

SEQ ID NO: 4103 - RNA, 435 nt, synthetic construct
  misc_feature 1..435: note = derived and/or modified sequence opt5 fromIFNG__Homo_sapiens__AAP20100
  source 1..435: mol_type = other RNA
atgcaggacccctacgtgaaggaggccgaaaacctgaaaaagtatttcaatgctggccacagcgatgtcgccgacaacgggaccctctttctgggaatccttaaaaattggaaggaggaatccgatagaaaaattatgcaatctcagatcgttagcttctactttaagctgttcaagaactttaaagacgatcagtccattcagaagtctgtggagacaatcaaagaagacatgaatgtgaagttctttaacagcaataaaaagaagcgggatgacttcgagaaactcacgaactattccgtcaccgatctgaatgtgcaacgcaaggcgattcatgagcttatccaggttatggctgaactgtctcctgccgccaaaacaggcaagagaaaacggagccagatgctctttcgcgggagacgggcttcccagtga

SEQ ID NO: 4104 - RNA, 435 nt, synthetic construct
  misc_feature 1..435: note = derived and/or modified sequence opt6 fromIFNG__Homo_sapiens__AAP20100
  source 1..435: mol_type = other RNA
atgcaagacccatacgtaaaagaagccgaaaacctaaaaaaatacttcaacgcaggacactcagacgtagcagacaacggaacactattcctaggaatactaaaaaactggaaagaagaaagcgacagaaaaataatgcaatcacaaatagtatcattctacttcaaactattcaaaaacttcaaagacgaccaatcaatacaaaaatcagtagaaacaataaaagaagacatgaacgtaaaattcttcaacagcaacaaaaaaaaaagagacgacttcgaaaaactaacaaactacagcgtaacagacctaaacgtacaaagaaaagcaatacacgaactaatacaagtaatggcagaactatcaccagcagcaaaaacaggaaaaagaaaaagatcacaaatgctattcagaggaagaagagcatcacaataa

SEQ ID NO: 4105 - protein, 134 aa, synthetic construct [sequence omitted]

SEQ ID NO: 4106 - RNA, 405 nt, synthetic construct
  misc_feature 1..405: note = IFNG__Homo_sapiens__CAA44326
  source 1..405: mol_type = other RNA
atgcaagacccatatgtaaaagaagcagaaaaccttaagaaatattttaatgcaggtcattcagatgtagcggataatggaactcttttcttaggcattttgaagaattggaaagaggagagtgacagaaaaataatgcagagccaaattgtctccttttacttcaaactttttaaaaactttaaagatgaccagagcatccaaaagagtgtggagaccatcaaggaagacatgaatgtcaagtttttcaatagcaacaaaaagaaacgagatgacttcgaaaagctgactaattattcggtaactgacttgaatgtccaacgcaaagcaatacatgaactcatccaagtgatggctgaactgtcgccagcagctaaaacagggaagcgaaaaaggagtctctag

SEQ ID NO: 4107 - RNA, 405 nt, synthetic construct
  misc_feature 1..405: note = derived and/or modified sequence opt1 fromIFNG__Homo_sapiens__CAA44326
  source 1..405: mol_type = other RNA
atgcaggacccctacgtgaaggaggccgagaacctgaagaagtacttcaacgccggccacagcgacgtcgcggacaacgggaccctcttcctgggcatcctgaagaactggaaggaggagtccgaccgcaagatcatgcagagccagatcgtgtccttctacttcaagctgttcaagaacttcaaggacgaccagagcatccagaagtccgtggagaccatcaaggaggacatgaacgtcaagttcttcaacagcaacaagaagaagcgggacgacttcgagaagctcacgaactactccgtgaccgacctgaacgtgcagcgcaaggccatccacgagctcatccaggtcatggccgagctgagcccggccgccaagaccgggaagcggaagcgctccctgtga

SEQ ID NO: 4108 - RNA, 405 nt, synthetic construct
  misc_feature 1..405: note = derived and/or modified sequence opt2 fromIFNG__Homo_sapiens__CAA44326
  source 1..405: mol_type = other RNA
atgcaggacccctacgtcaaggaggccgagaacctcaagaagtacttcaacgccggccactccgacgtcgccgacaacggcaccctcttcctcggcatcctcaagaactggaaggaggagtccgaccgcaagatcatgcagtcccagatcgtctccttctacttcaagctcttcaagaacttcaaggacgaccagtccatccagaagtccgtcgagaccatcaaggaggacatgaacgtcaagttcttcaactccaacaagaagaagcgcgacgacttcgagaagctcaccaactactccgtcaccgacctcaacgtccagcgcaaggccatccacgagctcatccaggtcatggccgagctctcccccgccgccaagaccggcaagcgcaagcgctccctctga

SEQ ID NO: 4109 - RNA, 405 nt, synthetic construct
  misc_feature 1..405: note = derived and/or modified sequence opt3 fromIFNG__Homo_sapiens__CAA44326
  source 1..405: mol_type = other RNA
atgcaggacccctacgtgaaggaggccgaaaacctgaaaaagtatttcaatgctggccacagcgatgtcgcagacaacgggaccctctttcttggaatcctgaaaaattggaaggaggaatccgatagaaaaattatgcaatctcagatagtttcattctactttaagttgttcaagaactttaaagacgatcagagtatccaaaagagcgtggagacaattaaagaagacatgaatgtaaagttctttaactccaataaaaagaagagggatgacttcgagaaattaactaactattctgtgacggatctgaatgtccagcggaaggccatccatgagctaattcaggtgatggcggaactctcgcctgctgccaaaaccggtaagcgcaaacgatcactgtga

SEQ ID NO: 4110 - RNA, 405 nt, synthetic construct
  misc_feature 1..405: note = derived and/or modified sequence opt4 fromIFNG__Homo_sapiens__CAA44326
  source 1..405: mol_type = other RNA
atgcaggacccctacgtgaaggaggccgagaacctgaagaagtacttcaacgccggccacagcgacgtggccgacaacggcaccctgttcctgggcatcctgaagaactggaaggaggagagcgacagaaagatcatgcagagccagatcgtgagcttctacttcaagctgttcaagaacttcaaggacgaccagagcatccagaagagcgtggagaccatcaaggaggacatgaacgtgaagttcttcaacagcaacaagaagaagagagacgacttcgagaagctgaccaactacagcgtgaccgacctgaacgtgcagagaaaggccatccacgagctgatccaggtgatggccgagctgagccccgccgccaagaccggcaagagaaagagaagcctgtga

SEQ ID NO: 4111 - RNA, 405 nt, synthetic construct
  misc_feature 1..405: note = derived and/or modified sequence opt5 fromIFNG__Homo_sapiens__CAA44326
  source 1..405: mol_type = other RNA
atgcaggacccctacgtgaaggaggccgaaaacctgaaaaagtatttcaatgctggccacagcgatgtcgccgacaacgggaccctctttctgggaatccttaaaaattggaaggaggaatccgatagaaaaattatgcaatctcagatcgttagcttctactttaagctgttcaagaactttaaagacgatcagtccattcagaagtctgtggagacaatcaaagaagacatgaatgtgaagttctttaacagcaataaaaagaagcgggatgacttcgagaaactcacgaactattccgtcaccgatctgaatgtgcaacgcaaggcgattcatgagcttatccaggttatggctgaactgtctcctgccgccaaaacaggcaagagaaaacggagcctctga

SEQ ID NO: 4112 - RNA, 405 nt, synthetic construct
  misc_feature 1..405: note = derived and/or modified sequence opt6 fromIFNG__Homo_sapiens__CAA44326
  source 1..405: mol_type = other RNA
atgcaagacccatacgtaaaagaagcagaaaacctaaaaaaatacttcaacgcaggacactcagacgtagcagacaacggaacactattcctaggaatactaaaaaactggaaagaagaatcagacagaaaaataatgcaatcacaaatagtatcattctacttcaaactattcaaaaacttcaaagacgaccaatcaatacaaaaatcagtagaaacaataaaagaagacatgaacgtaaaattcttcaactcaaacaaaaaaaaaagagacgacttcgaaaaactaacaaactactcagtaacagacctaaacgtacaaagaaaagcaatacacgaactaatacaagtaatggcagaactatcaccagcagcaaaaacaggaaaaagaaaaagatcactataa

SEQ ID NO: 4113 - protein, 133 aa, synthetic construct [sequence omitted]

SEQ ID NO: 4114 - RNA, 402 nt, synthetic construct
  misc_feature 1..402: note = IFNG__Homo_sapiens__CAA44330
  source 1..402: mol_type = other RNA
atgcaagacccatatgtaaaagaagcagaaaaccttaagaaatattttaatgcaggtcattcagatgtagcggataatggaactcttttcttaggcattttgaagaattggaaagaggagagtgacagaaaaataatgcagagccaaattgtctccttttacttcaaactttttaaaaactttaaagatgaccagagcatccaaaagagtgtggagaccatcaaggaagacatgaatgtcaagtttttcaatagcaacaaaaagaaacgagatgacttcgaaaagctgactaattattcggtaactgacttgaatgtccaacgcaaagcaatacatgaactcatccaagtgatggctgaactgtcgccagcagctaaaacagggaagcgaaaaaggagttaa

SEQ ID NO: 4115 - RNA, 402 nt, synthetic construct
  misc_feature 1..402: note = derived and/or modified sequence opt1 fromIFNG__Homo_sapiens__CAA44330
  source 1..402: mol_type = other RNA
atgcaggacccctacgtgaaggaggccgagaacctgaagaagtacttcaacgccggccacagcgacgtcgcggacaacgggaccctcttcctgggcatcctgaagaactggaaggaggagtccgaccgcaagatcatgcagagccagatcgtgtccttctacttcaagctgttcaagaacttcaaggacgaccagagcatccagaagtccgtggagaccatcaaggaggacatgaacgtcaagttcttcaacagcaacaagaagaagcgggacgacttcgagaagctcacgaactactccgtgaccgacctgaacgtgcagcgcaaggccatccacgagctcatccaggtcatggccgagctgagcccggccgccaagaccgggaagcggaagcgctcctga

SEQ ID NO: 4116 - RNA, 402 nt, synthetic construct
  misc_feature 1..402: note = derived and/or modified sequence opt2 fromIFNG__Homo_sapiens__CAA44330
  source 1..402: mol_type = other RNA
atgcaggacccctacgtcaaggaggccgagaacctcaagaagtacttcaacgccggccactccgacgtcgccgacaacggcaccctcttcctcggcatcctcaagaactggaaggaggagtccgaccgcaagatcatgcagtcccagatcgtctccttctacttcaagctcttcaagaacttcaaggacgaccagtccatccagaagtccgtcgagaccatcaaggaggacatgaacgtcaagttcttcaactccaacaagaagaagcgcgacgacttcgagaagctcaccaactactccgtcaccgacctcaacgtccagcgcaaggccatccacgagctcatccaggtcatggccgagctctcccccgccgccaagaccggcaagcgcaagcgctcctga

SEQ ID NO: 4117 - RNA, 402 nt, synthetic construct
  misc_feature 1..402: note = derived and/or modified sequence opt3 fromIFNG__Homo_sapiens__CAA44330
  source 1..402: mol_type = other RNA
atgcaggacccctacgtgaaggaggccgaaaacctgaaaaagtatttcaatgctggccacagcgatgtcgcagacaacgggaccctctttcttggaatcctgaaaaattggaaggaggaatccgatagaaaaattatgcaatctcagatagtttcattctactttaagttgttcaagaactttaaagacgatcagagtatccaaaagagcgtggagacaattaaagaagacatgaatgtaaagttctttaactccaataaaaagaagagggatgacttcgagaaattaactaactattctgtgacggatctgaatgtccagcggaaggccatccatgagctaattcaggtgatggcggaactctcgcctgctgccaaaaccggtaagcgcaaacgatcatga

SEQ ID NO: 4118 - RNA, 402 nt, synthetic construct
  misc_feature 1..402: note = derived and/or modified sequence opt4 fromIFNG__Homo_sapiens__CAA44330
  source 1..402: mol_type = other RNA
atgcaggacccctacgtgaaggaggccgagaacctgaagaagtacttcaacgccggccacagcgacgtggccgacaacggcaccctgttcctgggcatcctgaagaactggaaggaggagagcgacagaaagatcatgcagagccagatcgtgagcttctacttcaagctgttcaagaacttcaaggacgaccagagcatccagaagagcgtggagaccatcaaggaggacatgaacgtgaagttcttcaacagcaacaagaagaagagagacgacttcgagaagctgaccaactacagcgtgaccgacctgaacgtgcagagaaaggccatccacgagctgatccaggtgatggccgagctgagccccgccgccaagaccggcaagagaaagagaagctga

SEQ ID NO: 4119 - RNA, 402 nt, synthetic construct
  misc_feature 1..402: note = derived and/or modified sequence opt5 fromIFNG__Homo_sapiens__CAA44330
  source 1..402: mol_type = other RNA
atgcaggacccctacgtgaaggaggccgaaaacctgaaaaagtatttcaatgctggccacagcgatgtcgccgacaacgggaccctctttctgggaatccttaaaaattggaaggaggaatccgatagaaaaattatgcaatctcagatcgttagcttctactttaagctgttcaagaactttaaagacgatcagtccattcagaagtctgtggagacaatcaaagaagacatgaatgtgaagttctttaacagcaataaaaagaagcgggatgacttcgagaaactcacgaactattccgtcaccgatctgaatgtgcaacgcaaggcgattcatgagcttatccaggttatggctgaactgtctcctgccgccaaaacaggcaagagaaaacggagctga

SEQ ID NO: 4120 - RNA, 402 nt, synthetic construct
  misc_feature 1..402: note = derived and/or modified sequence opt6 fromIFNG__Homo_sapiens__CAA44330
  source 1..402: mol_type = other RNA
atgcaagacccatacgtaaaagaagcagaaaacctaaaaaaatacttcaacgcaggacactcagacgtagcagacaacggaacactattcctaggaatactaaaaaactggaaagaagaatcagacagaaaaataatgcaatcacaaatagtaagcttctacttcaaactattcaaaaacttcaaagacgaccaatcaatacaaaaatcagtagaaacaataaaagaagacatgaacgtaaaattcttcaactcaaacaaaaaaaaaagagacgacttcgaaaaactaacaaactactcagtaacagacctaaacgtacaaagaaaagcaatacacgaactaatacaagtaatggcagaactatcaccagcagcaaaaacaggaaaaagaaaaagatcataa

SEQ ID NO: 4121 - protein, 133 aa, synthetic construct [sequence omitted]

SEQ ID NO: 4122 - RNA, 402 nt, synthetic construct
  misc_feature 1..402: note = IFNG__Homo_sapiens__CAA44331
  source 1..402: mol_type = other RNA
atgcaagacccatatgtaaaagaagcagaaaaccttaagaaatattttaatgcaggtcattcagatgtagcggataatggaactcttttcttaggcattttgaagaattggaaagaggagagtgacagaaaaataatgcagagccaaattgtctccttttacttcaaactttttaaaaactttaaagatgaccagagcatccaaaagagtgtggagaccatcaaggaagacatgaatgtcaagtttttcaatagcaacaaaaagaaacgagatgacttcgaaaagctgactaattattcggtaactgacttgaatgtccaacgcaaagcaatacatgaactcatccaagtgatggctgaactgtcgccagcagctaaaacagggaagcgaaaaaggctctag

SEQ ID NO: 4123 - RNA, 402 nt, synthetic construct
  misc_feature 1..402: note = derived and/or modified sequence opt1 fromIFNG__Homo_sapiens__CAA44331
  source 1..402: mol_type = other RNA
atgcaggacccctacgtgaaggaggccgagaacctgaagaagtacttcaacgccggccacagcgacgtcgcggacaacgggaccctcttcctgggcatcctgaagaactggaaggaggagtccgaccgcaagatcatgcagagccagatcgtgtccttctacttcaagctgttcaagaacttcaaggacgaccagagcatccagaagtccgtggagaccatcaaggaggacatgaacgtcaagttcttcaacagcaacaagaagaagcgggacgacttcgagaagctcacgaactactccgtgaccgacctgaacgtgcagcgcaaggccatccacgagctcatccaggtcatggccgagctgagcccggccgccaagaccgggaagcggaagcgcctgtga

SEQ ID NO: 4124 - RNA, 402 nt, synthetic construct
  misc_feature 1..402: note = derived and/or modified sequence opt2 fromIFNG__Homo_sapiens__CAA44331
  source 1..402: mol_type = other RNA
atgcaggacccctacgtcaaggaggccgagaacctcaagaagtacttcaacgccggccactccgacgtcgccgacaacggcaccctcttcctcggcatcctcaagaactggaaggaggagtccgaccgcaagatcatgcagtcccagatcgtctccttctacttcaagctcttcaagaacttcaaggacgaccagtccatccagaagtccgtcgagaccatcaaggaggacatgaacgtcaagttcttcaactccaacaagaagaagcgcgacgacttcgagaagctcaccaactactccgtcaccgacctcaacgtccagcgcaaggccatccacgagctcatccaggtcatggccgagctctcccccgccgccaagaccggcaagcgcaagcgcctctga

SEQ ID NO: 4125 - RNA, 402 nt, synthetic construct
  misc_feature 1..402: note = derived and/or modified sequence opt3 fromIFNG__Homo_sapiens__CAA44331
  source 1..402: mol_type = other RNA
atgcaggacccctacgtgaaggaggccgaaaacctgaaaaagtatttcaatgctggccacagcgatgtcgcagacaacgggaccctctttcttggaatcctgaaaaattggaaggaggaatccgatagaaaaattatgcaatctcagatagtttcattctactttaagttgttcaagaactttaaagacgatcagagtatccaaaagagcgtggagacaattaaagaagacatgaatgtaaagttctttaactccaataaaaagaagagggatgacttcgagaaattaactaactattctgtgacggatctgaatgtccagcggaaggccatccatgagctaattcaggtgatggcggaactctcgcctgctgccaaaaccggtaagcgcaaacgactgtga

SEQ ID NO: 4126 - RNA, 402 nt, synthetic construct
  misc_feature 1..402: note = derived and/or modified sequence opt4 fromIFNG__Homo_sapiens__CAA44331
  source 1..402: mol_type = other RNA
atgcaggacccctacgtgaaggaggccgagaacctgaagaagtacttcaacgccggccacagcgacgtggccgacaacggcaccctgttcctgggcatcctgaagaactggaaggaggagagcgacagaaagatcatgcagagccagatcgtgagcttctacttcaagctgttcaagaacttcaaggacgaccagagcatccagaagagcgtggagaccatcaaggaggacatgaacgtgaagttcttcaacagcaacaagaagaagagagacgacttcgagaagctgaccaactacagcgtgaccgacctgaacgtgcagagaaaggccatccacgagctgatccaggtgatggccgagctgagccccgccgccaagaccggcaagagaaagagactgtga

SEQ ID NO: 4127 - RNA, 402 nt, synthetic construct
  misc_feature 1..402: note = derived and/or modified sequence opt5 fromIFNG__Homo_sapiens__CAA44331
  source 1..402: mol_type = other RNA
atgcaggacccctacgtgaaggaggccgaaaacctgaaaaagtatttcaatgctggccacagcgatgtcgccgacaacgggaccctctttctgggaatccttaaaaattggaaggaggaatccgatagaaaaattatgcaatctcagatcgttagcttctactttaagctgttcaagaactttaaagacgatcagtccattcagaagtctgtggagacaatcaaagaagacatgaatgtgaagttctttaacagcaataaaaagaagcgggatgacttcgagaaactcacgaactattccgtcaccgatctgaatgtgcaacgcaaggcgattcatgagcttatccaggttatggctgaactgtctcctgccgccaaaacaggcaagagaaaacggctctga

SEQ ID NO: 4128 - RNA, 402 nt, synthetic construct
  misc_feature 1..402: note = derived and/or modified sequence opt6 fromIFNG__Homo_sapiens__CAA44331
  source 1..402: mol_type = other RNA
atgcaagacccatacgtaaaagaagcagaaaacctaaaaaaatacttcaacgcaggacactcagacgtagcagacaacggaacactattcctaggaatactaaaaaactggaaagaagaatcagacagaaaaataatgcaatcacaaatagtatcattctacttcaaactattcaaaaacttcaaagacgatcaatcaatacaaaaatcagtagaaacaataaaagaagacatgaacgtaaaattcttcaactcaaacaaaaaaaaaagagacgacttcgaaaaactaacaaactactcagtaacagacctaaacgtacaaagaaaagcaatacacgaactaatacaagtaatggcagaactatcaccagcagcaaaaacaggaaaaagaaaaagactataa

SEQ ID NO: 4129 - protein, 130 aa, synthetic construct [sequence omitted]

SEQ ID NO: 4130 - RNA, 393 nt, synthetic construct
  misc_feature 1..393: note = IFNG__Homo_sapiens__CAA44329
  source 1..393: mol_type = other RNA
atgcaagacccatatgtaaaagaagcagaaaaccttaagaaatattttaatgcaggtcattcagatgtagcggataatggaactcttttcttaggcattttgaagaattggaaagaggagagtgacagaaaaataatgcagagccaaattgtctccttttacttcaaactttttaaaaactttaaagatgaccagagcatccaaaagagtgtggagaccatcaaggaagacatgaatgtcaagtttttcaatagcaacaaaaagaaacgagatgacttcgaaaagctgactaattattcggtaactgacttgaatgtccaacgcaaagcaatacatgaactcatccaagtgatggctgaactgtcgccagcagctaaaacagggaagctctag

SEQ ID NO: 4131 - RNA, 393 nt, synthetic construct
  misc_feature 1..393: note = derived and/or modified sequence opt1 fromIFNG__Homo_sapiens__CAA44329
  source 1..393: mol_type = other RNA
atgcaggacccctacgtgaaggaggccgagaacctgaagaagtacttcaacgccggccacagcgacgtcgcggacaacgggaccctcttcctgggcatcctgaagaactggaaggaggagtccgaccgcaagatcatgcagagccagatcgtgtccttctacttcaagctgttcaagaacttcaaggacgaccagagcatccagaagtccgtggagaccatcaaggaggacatgaacgtcaagttcttcaacagcaacaagaagaagcgggacgacttcgagaagctcacgaactactccgtgaccgacctgaacgtgcagcgcaaggccatccacgagctcatccaggtcatggccgagctgagcccggccgccaagaccgggaagctgtga

SEQ ID NO: 4132 - RNA, 393 nt, synthetic construct
  misc_feature 1..393: note = derived and/or modified sequence opt2 fromIFNG__Homo_sapiens__CAA44329
  source 1..393: mol_type = other RNA
atgcaggacccctacgtcaaggaggccgagaacctcaagaagtacttcaacgccggccactccgacgtcgccgacaacggcaccctcttcctcggcatcctcaagaactggaaggaggagtccgaccgcaagatcatgcagtcccagatcgtctccttctacttcaagctcttcaagaacttcaaggacgaccagtccatccagaagtccgtcgagaccatcaaggaggacatgaacgtcaagttcttcaactccaacaagaagaagcgcgacgacttcgagaagctcaccaactactccgtcaccgacctcaacgtccagcgcaaggccatccacgagctcatccaggtcatggccgagctctcccccgccgccaagaccggcaagctctga

SEQ ID NO: 4133 - RNA, 393 nt, synthetic construct
  misc_feature 1..393: note = derived and/or modified sequence opt3 fromIFNG__Homo_sapiens__CAA44329
  source 1..393: mol_type = other RNA
atgcaggacccctacgtgaaggaggccgaaaacctgaaaaagtatttcaatgctggccacagcgatgtcgcagacaacgggaccctctttcttggaatcctgaaaaattggaaggaggaatccgatagaaaaattatgcaatctcagatagtttcattctactttaagttgttcaagaactttaaagacgatcagagtatccaaaagagcgtggagacaattaaagaagacatgaatgtaaagttctttaactccaataaaaagaagagggatgacttcgagaaattaactaactattctgtgacggatctgaatgtccagcggaaggccatccatgagctaattcaggtgatggcggaactctcgcctgctgccaaaaccggtaagctgtga

SEQ ID NO: 4134 - RNA, 393 nt, synthetic construct
  misc_feature 1..393: note = derived and/or modified sequence opt4 fromIFNG__Homo_sapiens__CAA44329
  source 1..393: mol_type = other RNA
atgcaggacccctacgtgaaggaggccgagaacctgaagaagtacttcaacgccggccacagcgacgtggccgacaacggcaccctgttcctgggcatcctgaagaactggaaggaggagagcgacagaaagatcatgcagagccagatcgtgagcttctacttcaagctgttcaagaacttcaaggacgaccagagcatccagaagagcgtggagaccatcaaggaggacatgaacgtgaagttcttcaacagcaacaagaagaagagagacgacttcgagaagctgaccaactacagcgtgaccgacctgaacgtgcagagaaaggccatccacgagctgatccaggtgatggccgagctgagccccgccgccaagaccggcaagctgtga

SEQ ID NO: 4135 - RNA, 393 nt, synthetic construct
  misc_feature 1..393: note = derived and/or modified sequence opt5 fromIFNG__Homo_sapiens__CAA44329
  source 1..393: mol_type = other RNA
atgcaggacccctacgtgaaggaggccgaaaacctgaaaaagtatttcaatgctggccacagcgatgtcgccgacaacgggaccctctttctgggaatccttaaaaattggaaggaggaatccgatagaaaaattatgcaatctcagatcgttagcttctactttaagctgttcaagaactttaaagacgatcagtccattcagaagtctgtggagacaatcaaagaagacatgaatgtgaagttctttaacagcaataaaaagaagcgggatgacttcgagaaactcacgaactattccgtcaccgatctgaatgtgcaacgcaaggcgattcatgagcttatccaggttatggctgaactgtctcctgccgccaaaacaggcaagctctga

SEQ ID NO: 4136 - RNA, 393 nt, synthetic construct
  misc_feature 1..393: note = derived and/or modified sequence opt6 fromIFNG__Homo_sapiens__CAA44329
  source 1..393: mol_type = other RNA
atgcaagacccatacgtaaaagaagccgaaaacctaaaaaaatacttcaacgcaggacactcagacgtagcagacaacggaacactattcctcggaatactaaaaaactggaaagaagaatcagacagaaaaataatgcaatcacaaatagtatcattctatttcaaactattcaaaaacttcaaagacgaccaatcaatacaaaaatcagtagaaacaataaaagaagacatgaacgtaaaattcttcaactcaaacaaaaaaaaaagagacgacttcgaaaaactaacaaactactcagtaacagacctaaacgtacaaagaaaagcaatacacgaactaatacaagtaatggcagaactatcaccagcagcaaaaacaggaaaactataa

SEQ ID NO: 4137 - protein, 125 aa, synthetic construct [sequence omitted]

SEQ ID NO: 4138 - RNA, 378 nt, synthetic construct
  misc_feature 1..378: note = IFNG__Homo_sapiens__CAA44328
  source 1..378: mol_type = other RNA
atgcaagacccatatgtaaaagaagcagaaaaccttaagaaatattttaatgcaggtcattcagatgtagcggataatggaactcttttcttaggcattttgaagaattggaaagaggagagtgacagaaaaataatgcagagccaaattgtctccttttacttcaaactttttaaaaactttaaagatgaccagagcatccaaaagagtgtggagaccatcaaggaagacatgaatgtcaagtttttcaatagcaacaaaaagaaacgagatgacttcgaaaagctgactaattattcggtaactgacttgaatgtccaacgcaaagcaatacatgaactcatccaagtgatggctgaactgtcgccagcactctag

SEQ ID NO: 4139 - RNA, 378 nt, synthetic construct
  misc_feature 1..378: note = derived and/or modified sequence opt1 fromIFNG__Homo_sapiens__CAA44328
  source 1..378: mol_type = other RNA
atgcaggacccctacgtgaaggaggccgagaacctgaagaagtacttcaacgccggccacagcgacgtcgcggacaacgggaccctcttcctgggcatcctgaagaactggaaggaggagtccgaccgcaagatcatgcagagccagatcgtgtccttctacttcaagctgttcaagaacttcaaggacgaccagagcatccagaagtccgtggagaccatcaaggaggacatgaacgtcaagttcttcaacagcaacaagaagaagcgggacgacttcgagaagctcacgaactactccgtgaccgacctgaacgtgcagcgcaaggccatccacgagctcatccaggtcatggccgagctgagcccggccctgtga

SEQ ID NO: 4140 - RNA, 378 nt, synthetic construct
  misc_feature 1..378: note = derived and/or modified sequence opt2 fromIFNG__Homo_sapiens__CAA44328
  source 1..378: mol_type = other RNA
atgcaggacccctacgtcaaggaggccgagaacctcaagaagtacttcaacgccggccactccgacgtcgccgacaacggcaccctcttcctcggcatcctcaagaactggaaggaggagtccgaccgcaagatcatgcagtcccagatcgtctccttctacttcaagctcttcaagaacttcaaggacgaccagtccatccagaagtccgtcgagaccatcaaggaggacatgaacgtcaagttcttcaactccaacaagaagaagcgcgacgacttcgagaagctcaccaactactccgtcaccgacctcaacgtccagcgcaaggccatccacgagctcatccaggtcatggccgagctctcccccgccctctga

SEQ ID NO: 4141 - RNA, 378 nt, synthetic construct
  misc_feature 1..378: note = derived and/or modified sequence opt3 fromIFNG__Homo_sapiens__CAA44328
  source 1..378: mol_type = other RNA
atgcaggacccctacgtgaaggaggccgaaaacctgaaaaagtatttcaatgctggccacagcgatgtcgcagacaacgggaccctctttcttggaatcctgaaaaattggaaggaggaatccgatagaaaaattatgcaatctcagatagtttcattctactttaagttgttcaagaactttaaagacgatcagagtatccaaaagagcgtggagacaattaaagaagacatgaatgtaaagttctttaactccaataaaaagaagagggatgacttcgagaaattaactaactattctgtgacggatctgaatgtccagcggaaggccatccatgagctaattcaggtgatggcggaactctcgcctgctctgtga

SEQ ID NO: 4142 - RNA, 378 nt, synthetic construct
  misc_feature 1..378: note = derived and/or modified sequence opt4 fromIFNG__Homo_sapiens__CAA44328
  source 1..378: mol_type = other RNA
atgcaggacccctacgtgaaggaggccgagaacctgaagaagtacttcaacgccggccacagcgacgtggccgacaacggcaccctgttcctgggcatcctgaagaactggaaggaggagagcgacagaaagatcatgcagagccagatcgtgagcttctacttcaagctgttcaagaacttcaaggacgaccagagcatccagaagagcgtggagaccatcaaggaggacatgaacgtgaagttcttcaacagcaacaagaagaagagagacgacttcgagaagctgaccaactacagcgtgaccgacctgaacgtgcagagaaaggccatccacgagctgatccaggtgatggccgagctgagccccgccctgtga

SEQ ID NO: 4143 - RNA, 378 nt, synthetic construct
  misc_feature 1..378: note = derived and/or modified sequence opt5 fromIFNG__Homo_sapiens__CAA44328
  source 1..378: mol_type = other RNA
atgcaggacccctacgtgaaggaggccgaaaacctgaaaaagtatttcaatgctggccacagcgatgtcgccgacaacgggaccctctttctgggaatccttaaaaattggaaggaggaatccgatagaaaaattatgcaatctcagatcgttagcttctactttaagctgttcaagaactttaaagacgatcagtccattcagaagtctgtggagacaatcaaagaagacatgaatgtgaagttctttaacagcaataaaaagaagcgggatgacttcgagaaactcacgaactattccgtcaccgatctgaatgtgcaacgcaaggcgattcatgagcttatccaggttatggctgaactgtctcctgccctctga

SEQ ID NO: 4144 - RNA, 378 nt, synthetic construct
  misc_feature 1..378: note = derived and/or modified sequence opt6 fromIFNG__Homo_sapiens__CAA44328
  source 1..378: mol_type = other RNA
atgcaagacccatacgtaaaagaagcagaaaacttaaaaaaatacttcaacgcaggacactcagacgtagcagacaacggaacactcttcctaggaatactaaaaaactggaaagaagaatcagacagaaaaataatgcaatcacaaatagtatcattctacttcaaactattcaaaaacttcaaagacgaccaatcaatacaaaaatcagtagaaacaataaaagaagacatgaacgtaaaattcttcaactcaaacaaaaaaaaaagagacgacttcgaaaaactaacaaactactcagtaacagacctaaacgtacaaagaaaagcaatacacgaactaatacaagtaatggcagaactctcaccagcactataa

SEQ ID NO: 4145 - protein, 124 aa, synthetic construct [sequence omitted]

SEQ ID NO: 4146 - RNA, 375 nt, synthetic construct
  misc_feature 1..375: note = IFNG__Homo_sapiens__CAA44327
  source 1..375: mol_type = other RNA
atgcaagacccatatgtaaaagaagcagaaaaccttaagaaatattttaatgcaggtcattcagatgtagcggataatggaactcttttcttaggcattttgaagaattggaaagaggagagtgacagaaaaataatgcagagccaaattgtctccttttacttcaaactttttaaaaactttaaagatgaccagagcatccaaaagagtgtggagaccatcaaggaagacatgaatgtcaagtttttcaatagcaacaaaaagaaacgagatgacttcgaaaagctgactaattattcggtaactgacttgaatgtccaacgcaaagcaatacatgaactcatccaagtgatggctgaactgtcgccagcataa

SEQ ID NO: 4147 - RNA, 375 nt, synthetic construct
  misc_feature 1..375: note = derived and/or modified sequence opt1 fromIFNG__Homo_sapiens__CAA44327
  source 1..375: mol_type = other RNA
atgcaggacccctacgtgaaggaggccgagaacctgaagaagtacttcaacgccggccacagcgacgtcgcggacaacgggaccctcttcctgggcatcctgaagaactggaaggaggagtccgaccgcaagatcatgcagagccagatcgtgtccttctacttcaagctgttcaagaacttcaaggacgaccagagcatccagaagtccgtggagaccatcaaggaggacatgaacgtcaagttcttcaacagcaacaagaagaagcgggacgacttcgagaagctcacgaactactccgtgaccgacctgaacgtgcagcgcaaggccatccacgagctcatccaggtcatggccgagctgagcccggcctga

SEQ ID NO: 4148 - RNA, 375 nt, synthetic construct
  misc_feature 1..375: note = derived and/or modified sequence opt2 fromIFNG__Homo_sapiens__CAA44327
  source 1..375: mol_type = other RNA
atgcaggacccctacgtcaaggaggccgagaacctcaagaagtacttcaacgccggccactccgacgtcgccgacaacggcaccctcttcctcggcatcctcaagaactggaaggaggagtccgaccgcaagatcatgcagtcccagatcgtctccttctacttcaagctcttcaagaacttcaaggacgaccagtccatccagaagtccgtcgagaccatcaaggaggacatgaacgtcaagttcttcaactccaacaagaagaagcgcgacgacttcgagaagctcaccaactactccgtcaccgacctcaacgtccagcgcaaggccatccacgagctcatccaggtcatggccgagctctcccccgcctga

SEQ ID NO: 4149 - RNA, 375 nt, synthetic construct
  misc_feature 1..375: note = derived and/or modified sequence opt3 fromIFNG__Homo_sapiens__CAA44327
  source 1..375: mol_type = other RNA
atgcaggacccctacgtgaaggaggccgaaaacctgaaaaagtatttcaatgctggccacagcgatgtcgcagacaacgggaccctctttcttggaatcctgaaaaattggaaggaggaatccgatagaaaaattatgcaatctcagatagtttcattctactttaagttgttcaagaactttaaagacgatcagagtatccaaaagagcgtggagacaattaaagaagacatgaatgtaaagttctttaactccaataaaaagaagagggatgacttcgagaaattaactaactattctgtgacggatctgaatgtccagcggaaggccatccatgagctaattcaggtgatggcggaactctcgcctgcttga

SEQ ID NO: 4150 - RNA, 375 nt, synthetic construct
  misc_feature 1..375: note = derived and/or modified sequence opt4 fromIFNG__Homo_sapiens__CAA44327
  source 1..375: mol_type = other RNA
atgcaggacccctacgtgaaggaggccgagaacctgaagaagtacttcaacgccggccacagcgacgtggccgacaacggcaccctgttcctgggcatcctgaagaactggaaggaggagagcgacagaaagatcatgcagagccagatcgtgagcttctacttcaagctgttcaagaacttcaaggacgaccagagcatccagaagagcgtggagaccatcaaggaggacatgaacgtgaagttcttcaacagcaacaagaagaagagagacgacttcgagaagctgaccaactacagcgtgaccgacctgaacgtgcagagaaaggccatccacgagctgatccaggtgatggccgagctgagccccgcctga

SEQ ID NO: 4151 - RNA, 375 nt, synthetic construct
  misc_feature 1..375: note = derived and/or modified sequence opt5 fromIFNG__Homo_sapiens__CAA44327
  source 1..375: mol_type = other RNA
atgcaggacccctacgtgaaggaggccgaaaacctgaaaaagtatttcaatgctggccacagcgatgtcgccgacaacgggaccctctttctgggaatccttaaaaattggaaggaggaatccgatagaaaaattatgcaatctcagatcgttagcttctactttaagctgttcaagaactttaaagacgatcagtccattcagaagtctgtggagacaatcaaagaagacatgaatgtgaagttctttaacagcaataaaaagaagcgggatgacttcgagaaactcacgaactattccgtcaccgatctgaatgtgcaacgcaaggcgattcatgagcttatccaggttatggctgaactgtctcctgcctga

SEQ ID NO: 4152 - RNA, 375 nt, synthetic construct
  misc_feature 1..375: note = derived and/or modified sequence opt6 fromIFNG__Homo_sapiens__CAA44327
  source 1..375: mol_type = other RNA
atgcaagacccctacgtaaaagaagcagaaaacctaaaaaaatacttcaacgcaggacacagcgacgtagcagacaacggaacactattcctaggaatactaaaaaactggaaagaagaaagcgacagaaaaataatgcaatcacaaatagtatcattctacttcaaactattcaaaaacttcaaagacgaccaatcaatacaaaaatcagtagaaacaataaaagaagacatgaacgtaaaattcttcaacagcaacaaaaaaaaaagagacgacttcgaaaaattaacaaactactcagtaacagacctaaacgtacaaagaaaagcaatacacgaactaatacaagtaatggcagaactatcaccagcataa

SEQ ID NO: 4153 - protein, 144 aa, synthetic construct [sequence omitted]

SEQ ID NO: 4154 - RNA, 435 nt, synthetic construct
  misc_feature 1..435: note = IFNG__Homo_sapiens__AAM28885
  source 1..435: mol_type = other RNA
atgcaggacccatatgtaaaagaagcagaaaaccttaagaaatattttaatgcaggtcattcagatgtagcggataatggaactcttttcttaggcattttgaagaattggaaagaggagagtgacagaaaaataatgcagagccaaattgtctccttttacttcaaactttttaaaaactttaaagatgaccagagcatccaaaagagtgtggagaccatcaaggaagacatgaatgtcaagtttttcaatagcaacaaaaagaaacgagatgacttcgaaaagctgactaattattcggtaactgacttgaatgtccaacgcaaagcaatacatgaactcatccaagtgatggctgaactgtcgccagcagctaaaacagggaagcgaacaaggagtcagatgctgtttcgaggtcgaagagcatcccagtaa

SEQ ID NO: 4155 - RNA, 435 nt, synthetic construct
  misc_feature 1..435: note = derived and/or modified sequence opt1 fromIFNG__Homo_sapiens__AAM28885
  source 1..435: mol_type = other RNA
atgcaggacccctacgtgaaggaggccgagaacctgaagaagtacttcaacgccggccacagcgacgtcgcggacaacgggaccctcttcctgggcatcctgaagaactggaaggaggagtccgaccgcaagatcatgcagagccagatcgtgtccttctacttcaagctgttcaagaacttcaaggacgaccagagcatccagaagtccgtggagaccatcaaggaggacatgaacgtcaagttcttcaacagcaacaagaagaagcgggacgacttcgagaagctcacgaactactccgtgaccgacctgaacgtgcagcgcaaggccatccacgagctcatccaggtcatggccgagctgagcccggccgccaagaccgggaagcggacccgctcccagatgctgttccggggccgccgggcgagccagtga

SEQ ID NO: 4156 - RNA, 435 nt, synthetic construct
  misc_feature 1..435: note = derived and/or modified sequence opt2 fromIFNG__Homo_sapiens__AAM28885
  source 1..435: mol_type = other RNA
atgcaggacccctacgtcaaggaggccgagaacctcaagaagtacttcaacgccggccactccgacgtcgccgacaacggcaccctcttcctcggcatcctcaagaactggaaggaggagtccgaccgcaagatcatgcagtcccagatcgtctccttctacttcaagctcttcaagaacttcaaggacgaccagtccatccagaagtccgtcgagaccatcaaggaggacatgaacgtcaagttcttcaactccaacaagaagaagcgcgacgacttcgagaagctcaccaactactccgtcaccgacctcaacgtccagcgcaaggccatccacgagctcatccaggtcatggccgagctctcccccgccgccaagaccggcaagcgcacccgctcccagatgctcttccgcggccgccgcgcctcccagtga

SEQ ID NO: 4157 - RNA, 435 nt, synthetic construct
  misc_feature 1..435: note = derived and/or modified sequence opt3 fromIFNG__Homo_sapiens__AAM28885
  source 1..435: mol_type = other RNA
atgcaggacccctacgtgaaggaggccgaaaacctgaaaaagtatttcaatgctggccacagcgatgtcgcagacaacgggaccctctttcttggaatcctgaaaaattggaaggaggaatccgatagaaaaattatgcaatctcagatagtttcattctactttaagttgttcaagaactttaaagacgatcagagtatccaaaagagcgtggagacaattaaagaagacatgaatgtaaagttctttaactccaataaaaagaagagggatgacttcgagaaattaactaactattctgtgacggatctgaatgtccagcggaaggccatccatgagctaattcaggtgatggcggaactctcgcctgctgccaaaaccggtaagcgcacacgatcacagatgctgtttcgtggcagaagggcaagccagtga

SEQ ID NO: 4158 - RNA, 435 nt, synthetic construct
  misc_feature 1..435: note = derived and/or modified sequence opt4 fromIFNG__Homo_sapiens__AAM28885
  source 1..435: mol_type = other RNA
atgcaggacccctacgtgaaggaggccgagaacctgaagaagtacttcaacgccggccacagcgacgtggccgacaacggcaccctgttcctgggcatcctgaagaactggaaggaggagagcgacagaaagatcatgcagagccagatcgtgagcttctacttcaagctgttcaagaacttcaaggacgaccagagcatccagaagagcgtggagaccatcaaggaggacatgaacgtgaagttcttcaacagcaacaagaagaagagagacgacttcgagaagctgaccaactacagcgtgaccgacctgaacgtgcagagaaaggccatccacgagctgatccaggtgatggccgagctgagccccgccgccaagaccggcaagagaaccagaagccagatgctgttcagaggcagaagagccagccagtga

SEQ ID NO: 4159 - RNA, 435 nt, synthetic construct
  misc_feature 1..435: note = derived and/or modified sequence opt5 fromIFNG__Homo_sapiens__AAM28885
  source 1..435: mol_type = other RNA
atgcaggacccctacgtgaaggaggccgaaaacctgaaaaagtatttcaatgctggccacagcgatgtcgccgacaacgggaccctctttctgggaatccttaaaaattggaaggaggaatccgatagaaaaattatgcaatctcagatcgttagcttctactttaagctgttcaagaactttaaagacgatcagtccattcagaagtctgtggagacaatcaaagaagacatgaatgtgaagttctttaacagcaataaaaagaagcgggatgacttcgagaaactcacgaactattccgtcaccgatctgaatgtgcaacgcaaggcgattcatgagcttatccaggttatggctgaactgtctcctgccgccaaaacaggcaagagaacccggagccagatgctctttcgcgggagacgggcttcccagtga

SEQ ID NO: 4160 - RNA, 435 nt, synthetic construct
  misc_feature 1..435: note = derived and/or modified sequence opt6 fromIFNG__Homo_sapiens__AAM28885
  source 1..435: mol_type = other RNA
atgcaagacccatacgtaaaagaagcagaaaacctaaaaaaatacttcaacgcaggacactcagacgtagcagacaacggaacactattcctaggaatactaaaaaactggaaagaagaatcagacagaaaaataatgcaatcacaaatagtatcattctacttcaaactattcaaaaacttcaaagacgaccaatcaatacaaaaatcagtcgaaacaataaaagaagacatgaacgtaaaattcttcaactcaaacaaaaaaaaaagagacgacttcgaaaaactaacaaactactcagtaacagacctaaacgtacaaagaaaagcaatacacgaactaatacaagtaatggcagaactatcaccagccgcaaaaacaggaaaaagaacaagatcacaaatgctattcagaggaagaagagcaagccaataa

SEQ ID NO: 4161 - protein, 195 aa, synthetic construct
  REGION 1..195: note = IFNomega__Homo_sapiens__P05000
MALLFPLLAALVMTSYSPVGSLGCDLPQNHGLLSRNTLVLLHQMRRISPFLCLKDRRDFRFPQEMVKGSQLQKAHVMSVLHEMLQQIFSLFHTERSSAAWNMTLLDQLHTGLHQQLQHLETCLLQVVGEGESAGAISSPALTLRRYFQGIRVYLKEKKYSDCAWEVVRMEIMKSLFLSTNMQERLRSKDRDLGSS

SEQ ID NO: 4162 - RNA, 588 nt, synthetic construct
  misc_feature 1..588: note = IFNomega__Homo_sapiens__AAH69095
  source 1..588: mol_type = other RNA
atggccctcctgttccctctactggcagccctagtgatgaccagctatagccctgttggatctctgggctgtgatctgcctcagaaccatggcctacttagcaggaacaccttggtgcttctgcaccaaatgaggagaatctcccctttcttgtgtctcaaggacagaagagacttcaggttcccccaggagatggtaaaagggagccagttgcagaaggcccatgtcatgtctgtcctccatgagatgctgcagcagatcttcagcctcttccacacagagcgctcctctgctgcctggaacatgaccctcctagaccaactccacactggacttcatcagcaactgcaacacctggagacctgcttgctgcaggtagtgggagaaggagaatctgctggggcaattagcagccctgcactgaccttgaggaggtacttccagggaatccgtgtctacctgaaagagaagaaatacagcgactgtgcctgggaagttgtcagaatggaaatcatgaaatccttgttcttatcaacaaacatgcaagaaagactgagaagtaaagatagagacctgggctcatcttga

SEQ ID NO: 4163 - RNA, 588 nt, synthetic construct
  misc_feature 1..588: note = derived and/or modified sequence opt1 fromIFNomega__Homo_sapiens__AAH69095
  source 1..588: mol_type = other RNA
atggccctcctgttccccctgctggccgcgctcgtgatgaccagctactccccggtcggcagcctggggtgcgacctgccccagaaccacggcctcctgtcccgcaacaccctggtgctcctgcaccagatgcggcgcatcagccccttcctgtgcctcaaggaccggcgcgacttccggttcccccaggagatggtgaaggggtcccagctgcagaaggcccacgtcatgagcgtgctgcacgagatgctccagcagatcttctccctgttccacacggagcgcagctccgccgcctggaacatgaccctgctcgaccagctgcacaccggcctgcaccagcagctccagcacctggagacctgcctgctccaggtggtcggggagggcgagagcgccggcgcgatctccagcccggccctgacgctgcggcgctacttccaggggatccgggtgtacctcaaggagaagaagtactccgactgcgcctgggaggtggtccgcatggagatcatgaagtccctgttcctgagcaccaacatgcaggagcggctccgcagcaaggaccgggacctgggctccagctga

SEQ ID NO: 4164 - RNA, 588 nt, synthetic construct
  misc_feature 1..588: note = derived and/or modified sequence opt2 fromIFNomega__Homo_sapiens__AAH69095
  source 1..588: mol_type = other RNA
atggccctcctcttccccctcctcgccgccctcgtcatgacctcctactcccccgtcggctccctcggctgcgacctcccccagaaccacggcctcctctcccgcaacaccctcgtcctcctccaccagatgcgccgcatctcccccttcctctgcctcaaggaccgccgcgacttccgcttcccccaggagatggtcaagggctcccagctccagaaggcccacgtcatgtccgtcctccacgagatgctccagcagatcttctccctcttccacaccgagcgctcctccgccgcctggaacatgaccctcctcgaccagctccacaccggcctccaccagcagctccagcacctcgagacctgcctcctccaggtcgtcggcgagggcgagtccgccggcgccatctcctcccccgccctcaccctccgccgctacttccagggcatccgcgtctacctcaaggagaagaagtactccgactgcgcctgggaggtcgtccgcatggagatcatgaagtccctcttcctctccaccaacatgcaggagcgcctccgctccaaggaccgcgacctcggctcctcctga

SEQ ID NO: 4165 - RNA, 588 nt, synthetic construct
  misc_feature 1..588: note = derived and/or modified sequence opt3 fromIFNomega__Homo_sapiens__AAH69095
  source 1..588: mol_type = other RNA
atggccctcctgttcccccttctggctgcattggtgatgaccagctactcccctgtcggctctttagggtgcgacctgccacagaaccacggactactctcaagaaatacactggttcttctgcatcaaatgaggcggatcagtccgtttttgtgtctcaaggatcgccgagacttccgttttccccaggagatggtgaagggtagccagctgcagaaggcccacgtaatgtccgtgctgcatgaaatgctccaacagattttctctttatttcacactgagagatcgtcagcggcttggaacatgacgctgcttgatcagttgcataccggcctgcaccagcaactacagcacctcgaaacatgcctgcttcaggtcgtgggggagggagaaagcgccggcgcaataagttcccctgccctgactttgaggcggtatttccagggtatccgcgtttacctcaaagagaagaaatattctgactgtgcttgggaggtggtcagaatggaaattatgaaaagcctgtttttatccaccaatatgcaagagaggctgcggtcaaaggatcgcgacctcgggagtagctga

SEQ ID NO: 4166 - RNA, 588 nt, synthetic construct
  misc_feature 1..588: note = derived and/or modified sequence opt4 fromIFNomega__Homo_sapiens__AAH69095
  source 1..588: mol_type = other RNA
atggccctgctgttccccctgctggccgccctggtgatgaccagctacagccccgtgggcagcctgggctgcgacctgccccagaaccacggcctgctgagcagaaacaccctggtgctgctgcaccagatgagaagaatcagccccttcctgtgcctgaaggacagaagagacttcagattcccccaggagatggtgaagggcagccagctgcagaaggcccacgtgatgagcgtgctgcacgagatgctgcagcagatcttcagcctgttccacaccgagagaagcagcgccgcctggaacatgaccctgctggaccagctgcacaccggcctgcaccagcagctgcagcacctggagacctgcctgctgcaggtggtgggcgagggcgagagcgccggcgccatcagcagccccgccctgaccctgagaagatacttccagggcatcagagtgtacctgaaggagaagaagtacagcgactgcgcctgggaggtggtgagaatggagatcatgaagagcctgttcctgagcaccaacatgcaggagagactgagaagcaaggacagagacctgggcagcagctga

SEQ ID NO: 4167 - RNA, 588 nt, synthetic construct
  misc_feature 1..588: note = derived and/or modified sequence opt5 fromIFNomega__Homo_sapiens__AAH69095
  source 1..588: mol_type = other RNA
atggccctcctgttccccctgcttgctgccctggtgatgaccagctactcccctgtcggctctctcgggtgcgacctgccgcagaaccacggacttctgagcagaaatacactcgttctgctgcatcaaatgcggcgcatctccccctttctctgtctgaaggatagacgggacttccgctttcctcaggagatggtgaagggctctcagcttcagaaggcgcacgtgatgagcgtcctgcatgaaatgctccaacagattttctccctgtttcacacggagagatctagcgctgcctggaacatgacccttctggatcagctccatacagggctgcaccagcaactgcagcacctcgaaacctgcctgcttcaggtggttggagagggcgaatccgccggggctatcagctctcccgccctgacactccggcgctatttccagggaattagagtgtacctgaaagagaagaaatattccgactgtgcttgggaggtcgtgcggatggaaatcatgaaaagcctttttctgtctaccaatatgcaagagcgcctcagatccaaggatcgggacctgggcagctcttga

SEQ ID NO: 4168 - RNA, 588 nt, synthetic construct
  misc_feature 1..588: note = derived and/or modified sequence opt6 fromIFNomega__Homo_sapiens__AAH69095
  source 1..588: mol_type = other RNA
atggcactactcttcccactactagcagcattagtcatgacatcatactcaccagtaggatcactaggatgcgacctaccacaaaaccacggattactaagcagaaacacactagtactactacaccaaatgagaagaatatcaccattcctatgcttaaaagacagaagagacttcagattcccacaagaaatggtaaaaggatcacaattacaaaaagcacacgtaatgtcagtactacacgaaatgctacaacaaatattctcactattccacacagaaagatcatcagccgcatggaacatgacactattagaccaactacacacaggactccaccaacaactacaacacctagaaacatgcctactacaagtagtaggcgaaggagaatcagcaggagcaatatcatcaccagcactaacactaagaagatacttccaaggaataagagtatacctaaaagaaaaaaaatactcagactgcgcatgggaagtagtaagaatggaaataatgaaaagcctattcctctcaacaaacatgcaagaaagactacgctcaaaagatagagacttaggatcatcataa

SEQ ID NO: 4169 - protein, 178 aa, synthetic construct
  REGION 1..178: note = IL-10__Homo_sapiens__P22301
MHSSALLCCLVLLTGVRASPGQGTQSENSCTHFPGNLPNMLRDLRDAFSRVKTFFQMKDQLDNLLLKESLLEDFKGYLGCQALSEMIQFYLEEVMPQAENQDPDIKAHVNSLGENLKTLRLRLRRCHRFLPCENKSKAVEQVKNAFNKLQEKGIYKAMSEFDIFINYIEAYMTMKIRN

SEQ ID NO: 4170 - RNA, 537 nt, synthetic construct
  misc_feature 1..537: note = IL-10__Homo_sapiens__AAA63207
  source 1..537: mol_type = other RNA
atgcacagctcagcactgctctgttgcctggtcctcctgactggggtgagggccagcccaggccagggcacccagtctgagaacagctgcacccacttcccaggcaacctgcctaacatgcttcgagatctccgagatgccttcagcagagtgaagactttctttcaaatgaaggatcagctggacaacttgttgttaaaggagtccttgctggaggactttaagggttacctgggttgccaagccttgtctgagatgatccagttttacctggaggaggtgatgccccaagctgagaaccaagacccagacatcaaggcgcatgtgaactccctgggggagaacctgaagaccctcaggctgaggctacggcgctgtcatcgatttcttccctgtgaaaacaagagcaaggccgtggagcaggtgaagaatgcctttaataagctccaagagaaaggcatctacaaagccatgagtgagtttgacatcttcatcaactacatagaagcctacatgacaatgaagatacgaaactga

SEQ ID NO: 4171 - RNA, 537 nt, synthetic construct
  misc_feature 1..537: note = derived and/or modified sequence opt1 fromIL-10__Homo_sapiens__AAA63207
  source 1..537: mol_type = other RNA
atgcacagctccgccctgctctgctgcctggtgctgctcaccggcgtgcgcgccagccccgggcagggcacccagtccgagaacagctgcacgcacttcccggggaacctgcccaacatgctgcgggacctccgcgacgcgttctcccgggtgaagaccttcttccagatgaaggaccagctggacaacctgctcctgaaggagagcctgctcgaggacttcaagggctacctggggtgccaggccctgtccgagatgatccagttctacctcgaggaggtgatgccccaggccgagaaccaggaccccgacatcaaggcccacgtcaacagcctgggcgagaacctgaagaccctccgcctgcggctgcgccggtgccaccgcttcctcccgtgcgagaacaagtccaaggccgtggagcaggtcaagaacgcgttcaacaagctgcaggagaagggcatctacaaggccatgagcgagttcgacatcttcatcaactacatcgaggcctacatgaccatgaagatccggaactga

SEQ ID NO: 4172 - RNA, 537 nt, synthetic construct
  misc_feature 1..537: note = derived and/or modified sequence opt2 fromIL-10__Homo_sapiens__AAA63207
  source 1..537: mol_type = other RNA
atgcactcctccgccctcctctgctgcctcgtcctcctcaccggcgtccgcgcctcccccggccagggcacccagtccgagaactcctgcacccacttccccggcaacctccccaacatgctccgcgacctccgcgacgccttctcccgcgtcaagaccttcttccagatgaaggaccagctcgacaacctcctcctcaaggagtccctcctcgaggacttcaagggctacctcggctgccaggccctctccgagatgatccagttctacctcgaggaggtcatgccccaggccgagaaccaggaccccgacatcaaggcccacgtcaactccctcggcgagaacctcaagaccctccgcctccgcctccgccgctgccaccgcttcctcccctgcgagaacaagtccaaggccgtcgagcaggtcaagaacgccttcaacaagctccaggagaagggcatctacaaggccatgtccgagttcgacatcttcatcaactacatcgaggcctacatgaccatgaagatccgcaactga

SEQ ID NO: 4173 - RNA, 537 nt, synthetic construct
  misc_feature 1..537: note = derived and/or modified sequence opt3 fromIL-10__Homo_sapiens__AAA63207
  source 1..537: mol_type = other RNA
atgcacagctccgccctgctctgctgtcttgtgctgttgaccggcgtcagagcttctcccgggcagggaacacaatcagagaacagttgcactcatttccctggtaatttaccaaacatgctgagggacctacgggatgcatttagccgcgttaagacgttctttcagatgaaagaccagctcgataatctgcttctgaaggaatccttgctcgaggacttcaaaggctacctggggtgtcaggccctgtctgaaatgatccaattttatctcgaggaagtgatgccgcaggcggagaaccaggatcccgacattaaggctcacgtaaattcgttaggagagaacctgaaaacccttcgattgcgtctgagaaggtgccatcggttcctaccttgtgaaaataagtcaaaggccgtggagcaggtcaaaaacgcatttaataagctccaagaaaaaggcatatacaaggccatgagcgagttcgatatctttattaactatatcgaggcttacatgacaatgaaaattcgcaattga

SEQ ID NO: 4174 - RNA, 537 nt, synthetic construct
  misc_feature 1..537: note = derived and/or modified sequence opt4 fromIL-10__Homo_sapiens__AAA63207
  source 1..537: mol_type = other RNA
atgcacagcagcgccctgctgtgctgcctggtgctgctgaccggcgtgagagccagccccggccagggcacccagagcgagaacagctgcacccacttccccggcaacctgcccaacatgctgagagacctgagagacgccttcagcagagtgaagaccttcttccagatgaaggaccagctggacaacctgctgctgaaggagagcctgctggaggacttcaagggctacctgggctgccaggccctgagcgagatgatccagttctacctggaggaggtgatgccccaggccgagaaccaggaccccgacatcaaggcccacgtgaacagcctgggcgagaacctgaagaccctgagactgagactgagaagatgccacagattcctgccctgcgagaacaagagcaaggccgtggagcaggtgaagaacgccttcaacaagctgcaggagaagggcatctacaaggccatgagcgagttcgacatcttcatcaactacatcgaggcctacatgaccatgaagatcagaaactga

SEQ ID NO: 4175 - RNA, 537 nt, synthetic construct
  misc_feature 1..537: note = derived and/or modified sequence opt5 fromIL-10__Homo_sapiens__AAA63207
  source 1..537: mol_type = other RNA
atgcacagctccgccctgctctgctgtctggtgcttctgaccggcgtcagagcttctcccgggcagggaacacaaagcgagaactcctgcacgcatttccctggcaatctcccgaacatgctgcgggaccttcgcgatgccttttctagagttaagaccttctttcagatgaaagaccagctggataatctcctgctgaaggaaagcctcctggaggacttcaaagggtaccttggatgtcaggcgctgtccgaaatgatccaattttatctcgaggaagtgatgccccaggctgagaaccaggatcctgacattaaggcccacgtcaattctctgggcgagaaccttaaaacactgcggctccgcctgagacggtgccatcgcttcctgccctgtgaaaataagagcaaggccgtggaacaggtgaaaaacgcttttaataagctccaagagaaagggatctacaaggccatgtccgagttcgatatttttatcaactatattgaggcttacatgaccatgaaaatcagaaattga

SEQ ID NO: 4176 - RNA, 537 nt, synthetic construct
  misc_feature 1..537: note = derived and/or modified sequence opt6 fromIL-10__Homo_sapiens__AAA63207
  source 1..537: mol_type = other RNA
atgcactcctcagcactactatgctgcctagtattactaacaggagtaagagcatcaccaggacaaggaacacaatcagaaaactcatgcacacacttcccaggaaacctaccaaacatgctaagagacctaagagacgcattctcaagagtaaaaacattcttccaaatgaaagaccaactagacaacttactactaaaagaatcactactagaagacttcaaaggatacctaggatgccaagcactatcagaaatgatacaattctacctagaagaagtcatgccacaagcagaaaaccaagacccagacataaaagcacacgtaaactcactaggagaaaacttaaaaacattaagactaagactaagaagatgccacagattcctaccatgcgaaaacaaatcaaaagcagtagaacaagtaaaaaacgcattcaacaaactacaagaaaaaggaatatacaaagcaatgtcagaattcgacatattcataaactacatagaagcatacatgacaatgaaaataagaaactaa

SEQ ID NO: 4177 - protein, 199 aa, synthetic construct
  REGION 1..199: note = IL-11__Homo_sapiens__P20809
MNCVCRLVLVVLSLWPDTAVAPGPPPGPPRVSPDPRAELDSTVLLTRSLLADTRQLAAQLRDKFPADGDHNLDSLPTLAMSAGALGALQLPGVLTRLRADLLSYLRHVQWLRRAGGSSLKTLEPELGTLQARLDRLLRRLQLLMSRLALPQPPPDPPAPPLAPPSSAWGGIRAAHAILGGLHLTLDWAVRGLLLLKTRL

SEQ ID NO: 4178 - RNA, 600 nt, synthetic construct
  misc_feature 1..600: note = IL-11__Homo_sapiens__AAA59132
  source 1..600: mol_type = other RNA
atgaactgtgtttgccgcctggtcctggtcgtgctgagcctgtggccagatacagctgtcgcccctgggccaccacctggcccccctcgagtttccccagaccctcgggccgagctggacagcaccgtgctcctgacccgctctctcctggcggacacgcggcagctggctgcacagctgagggacaaattcccagctgacggggaccacaacctggattccctgcccaccctggccatgagtgcgggggcactgggagctctacagctcccaggtgtgctgacaaggctgcgagcggacctactgtcctacctgcggcacgtgcagtggctgcgccgggcaggtggctcttccctgaagaccctggagcccgagctgggcaccctgcaggcccgactggaccggctgctgcgccggctgcagctcctgatgtcccgcctggccctgccccagccacccccggacccgccggcgcccccgctggcgcccccctcctcagcctgggggggcatcagggccgcccacgccatcctgggggggctgcacctgacacttgactgggccgtgaggggactgctgctgctgaagactcggctgtga

SEQ ID NO: 4179 - RNA, 600 nt, synthetic construct
  misc_feature 1..600: note = derived and/or modified sequence opt1 fromIL-11__Homo_sapiens__AAA59132
  source 1..600: mol_type = other RNA
atgaactgcgtgtgccgcctggtcctcgtggtgctgagcctgtggcccgacaccgccgtcgcccccgggcccccgcccggcccgccccgggtgtcccccgacccccgcgcggagctcgacagcaccgtgctgctgacgcggtccctcctggccgacacccgccagctggccgcccagctccgggacaagttccccgccgacggcgaccacaacctggacagcctgcccaccctcgcgatgtccgccggggccctgggcgccctgcagctccccggggtcctgacccgcctgcgggcggacctcctgagctacctgcgccacgtgcagtggctccggcgcgccggcggctccagcctgaagacgctggagcccgagctcgggaccctgcaggcccggctggaccgcctcctgcggcgcctgcagctcctgatgtcccggctggccctcccccagcccccgcccgacccgcccgccccgcccctggcgccgcccagctccgcctggggcgggatccgcgccgcccacgccatcctgggcgggctccacctgaccctggactgggcggtgcggggcctcctgctgctcaagacccgcctgtga

SEQ ID NO: 4180 - RNA, 600 nt, synthetic construct
  misc_feature 1..600: note = derived and/or modified sequence opt2 fromIL-11__Homo_sapiens__AAA59132
  source 1..600: mol_type = other RNA
atgaactgcgtctgccgcctcgtcctcgtcgtcctctccctctggcccgacaccgccgtcgcccccggccccccccccggccccccccgcgtctcccccgacccccgcgccgagctcgactccaccgtcctcctcacccgctccctcctcgccgacacccgccagctcgccgcccagctccgcgacaagttccccgccgacggcgaccacaacctcgactccctccccaccctcgccatgtccgccggcgccctcggcgccctccagctccccggcgtcctcacccgcctccgcgccgacctcctctcctacctccgccacgtccagtggctccgccgcgccggcggctcctccctcaagaccctcgagcccgagctcggcaccctccaggcccgcctcgaccgcctcctccgccgcctccagctcctcatgtcccgcctcgccctcccccagcccccccccgacccccccgccccccccctcgcccccccctcctccgcctggggcggcatccgcgccgcccacgccatcctcggcggcctccacctcaccctcgactgggccgtccgcggcctcctcctcctcaagacccgcctctga

SEQ ID NO: 4181 - RNA, 600 nt, synthetic construct
  misc_feature 1..600: note = derived and/or modified sequence opt3 fromIL-11__Homo_sapiens__AAA59132
  source 1..600: mol_type = other RNA
atgaactgcgtgtgtagactggtcctcgttgtgcttagcctgtggcccgacaccgccgtagctcctggcccaccgcccgggcctccaagggtgtcccccgatcctcgggcagagttggactctacagtcttactgactcgctcactactcgccgatacgcgacagctggcggctcaacttcgtgacaagttcccagccgatggagaccacaatctggatagtttgcccaccctcgcaatgagcgccggtgctctgggcgcactgcagctccctggggtgttaacaagactgagggccgaccttttgtcctacctgcggcatgttcagtggctacgcagagctggagggtcttcgctcaaaactctggaaccagagcttggtaccctgcaggccaggttggatcggctcctgcgccgattacaactgctcatgtcaagacttgcgctgccgcagccccctccagatccccctgcaccacccttggccccgcctagcagtgcttggggcggaatcagggccgcacacgctattctaggcggcctgcatctcacactggactgggccgtgcgggggcttctgttgctcaagacccgtctgtga

SEQ ID NO: 4182 - RNA, 600 nt, synthetic construct
  misc_feature 1..600: note = derived and/or modified sequence opt4 fromIL-11__Homo_sapiens__AAA59132
  source 1..600: mol_type = other RNA
atgaactgcgtgtgcagactggtgctggtggtgctgagcctgtggcccgacaccgccgtggcccccggccccccccccggcccccccagagtgagccccgaccccagagccgagctggacagcaccgtgctgctgaccagaagcctgctggccgacaccagacagctggccgcccagctgagagacaagttccccgccgacggcgaccacaacctggacagcctgcccaccctggccatgagcgccggcgccctgggcgccctgcagctgcccggcgtgctgaccagactgagagccgacctgctgagctacctgagacacgtgcagtggctgagaagagccggcggcagcagcctgaagaccctggagcccgagctgggcaccctgcaggccagactggacagactgctgagaagactgcagctgctgatgagcagactggccctgccccagcccccccccgacccccccgccccccccctggccccccccagcagcgcctggggcggcatcagagccgcccacgccatcctgggcggcctgcacctgaccctggactgggccgtgagaggcctgctgctgctgaagaccagactgtga

SEQ ID NO: 4183 - RNA, 600 nt, synthetic construct
  misc_feature 1..600: note = derived and/or modified sequence opt5 fromIL-11__Homo_sapiens__AAA59132
  source 1..600: mol_type = other RNA
atgaactgcgtgtgtagactggtcctcgttgtgctgagcctttggcccgacaccgccgtggctcctggcccgccccctgggccccctcgggtctcccccgatcctcgcgccgagctggactctacagtgctcctgacgagaagccttctggcggatacccggcagctcgctgcccaactgcgcgacaagttcccggccgatggagaccacaatctggattccctccccacactggctatgtctgccggcgctcttggggccctgcagctccctggagttctgaccagacttcgggcggacctgctcagctacctgcgccatgtgcagtggctgagacgggccggcgggtcctctctcaaaacactggaacccgagcttggaaccctgcaggctcgcctcgatagactgcttcggcgcctgcaactcctgatgagcagactggccctccctcagcccccgcctgatccccctgctcctcccctggcgcccccgtccagcgcctggggcggcatccgggccgctcacgccattcttgggggactgcatctcacactggactgggctgtccgcggccttctgctcctgaagaccagactgtga

SEQ ID NO: 4184 - RNA, 600 nt, synthetic construct
  misc_feature 1..600: note = derived and/or modified sequence opt6 fromIL-11__Homo_sapiens__AAA59132
  source 1..600: mol_type = other RNA
atgaactgtgtatgtagactagtattagtagtattatcattatggccagacacagcagtagcaccaggaccaccaccaggaccaccaagagtatcaccagacccaagagcagaattagactcaacagttctcttaacaagatctttactagcagacacaagacaattagcagcacaactaagagacaaattcccagcagatggagatcataatttagatagtttaccaacattagctatgtcagcaggagcattaggagcactacaactaccaggagtactaacaagattaagagcagacttattatcatacttaagacatgtacaatggttaagaagagcaggaggatcatctctaaaaacactagaaccagaactaggaaccttacaagcaagattagaccgattattaagaagattacaattattaatgtcaagattagcattaccacaaccaccaccagatccaccagcaccaccattagcaccaccatcttcagcatggggaggaataagagcagcacatgccatattaggaggactacacctaacattagactgggcagtaagaggactactactactaaaaacaagactataa

SEQ ID NO: 4185 - protein, 219 aa, synthetic construct
  REGION 1..219: note = IL-12A__Homo_sapiens__P29459
MCPARSLLLVATLVLLDHLSLARNLPVATPDPGMFPCLHHSQNLLRAVSNMLQKARQTLEFYPCTSEEIDHEDITKDKTSTVEACLPLELTKNESCLNSRETSFITNGSCLASRKTSFMMALCLSSIYEDLKMYQVEFKTMNAKLLMDPKRQIFLDQNMLAVIDELMQALNFNSETVPQKSSLEEPDFYKTKIKLCILLHAFRIRAVTIDRVMSYLNAS

SEQ ID NO: 4186 - RNA, 660 nt, synthetic construct
  misc_feature 1..660: note = IL-12A__Homo_sapiens__AAK84425
  source 1..660: mol_type = other RNA
atgtgtccagcgcgcagcctcctccttgtggctaccctggtcctcctggaccacctcagtttggccagaaacctccccgtggccactccagacccaggaatgttcccatgccttcaccactcccaaaacctgctgagggccgtcagcaacatgctccagaaggccagacaaactctagaattttacccttgcacttctgaagagattgatcatgaagatatcacaaaagataaaaccagcacagtggaggcctgtttaccattggaattaaccaagaatgagagttgcctaaattccagagagacctctttcataactaatgggagttgcctggcctccagaaagacctcttttatgatggccctgtgccttagtagtatttatgaagacttgaagatgtaccaggtggagttcaagaccatgaatgcaaagcttctgatggatcctaagaggcagatctttctagatcaaaacatgctggcagttattgatgagctgatgcaggccctgaatttcaacagtgagactgtgccacaaaaatcctcccttgaagaaccggatttttataaaactaaaatcaagctctgcatacttcttcatgctttcagaattcgggcagtgactattgatagagtgatgagctatctgaatgcttcctaa

SEQ ID NO: 4187 - RNA, 660 nt, synthetic construct
  misc_feature 1..660: note = derived and/or modified sequence opt1 fromIL-12A__Homo_sapiens__AAK84425
  source 1..660: mol_type = other RNA
atgtgccccgcccgcagcctgctcctggtggccaccctggtcctcctggaccacctgtccctcgcgcggaacctgccggtggccacccccgaccccggcatgttcccctgcctgcaccacagccagaacctcctgcgcgccgtgtccaacatgctgcagaaggcccggcagacgctcgagttctacccgtgcaccagcgaggagatcgaccacgaggacatcaccaaggacaagacctccacggtcgaggcctgcctgcccctggagctcaccaagaacgagagctgcctgaactcccgcgagaccagcttcatcaccaacgggtcctgcctggcgagccggaagacgtccttcatgatggccctctgcctgagctccatctacgaggacctgaagatgtaccaggtggagttcaagaccatgaacgccaagctcctgatggaccccaagcgccagatcttcctggaccagaacatgctcgccgtgatcgacgagctgatgcaggcgctgaacttcaacagcgagaccgtcccccagaagtccagcctcgaggagccggacttctacaagaccaagatcaagctgtgcatcctgctccacgccttccggatccgcgccgtgacgatcgaccgggtgatgtcctacctgaacgccagctga

SEQ ID NO: 4188 - RNA, 660 nt, synthetic construct
  misc_feature 1..660: note = derived and/or modified sequence opt2 fromIL-12A__Homo_sapiens__AAK84425
  source 1..660: mol_type = other RNA
atgtgccccgcccgctccctcctcctcgtcgccaccctcgtcctcctcgaccacctctccctcgcccgcaacctccccgtcgccacccccgaccccggcatgttcccctgcctccaccactcccagaacctcctccgcgccgtctccaacatgctccagaaggcccgccagaccctcgagttctacccctgcacctccgaggagatcgaccacgaggacatcaccaaggacaagacctccaccgtcgaggcctgcctccccctcgagctcaccaagaacgagtcctgcctcaactcccgcgagacctccttcatcaccaacggctcctgcctcgcctcccgcaagacctccttcatgatggccctctgcctctcctccatctacgaggacctcaagatgtaccaggtcgagttcaagaccatgaacgccaagctcctcatggaccccaagcgccagatcttcctcgaccagaacatgctcgccgtcatcgacgagctcatgcaggccctcaacttcaactccgagaccgtcccccagaagtcctccctcgaggagcccgacttctacaagaccaagatcaagctctgcatcctcctccacgccttccgcatccgcgccgtcaccatcgaccgcgtcatgtcctacctcaacgcctcctga

SEQ ID NO: 4189 - RNA, 660 nt, synthetic construct
  misc_feature 1..660: note = derived and/or modified sequence opt3 fromIL-12A__Homo_sapiens__AAK84425
  source 1..660: mol_type = other RNA
atgtgccccgccagaagcctgctccttgtggctaccctggtcttgttagaccacctgtccctagcaaggaacctccctgttgccacaccagatccgggcatgttcccctgtctgcatcactctcagaatcttctgcgggcggtgtcaaacatgttgcaaaaggctcgccagactctcgagttttacccttgcacgagtgaagagatcgaccatgaagatattaccaaagacaagacaagcactgtagaggcctgtctgccactggaactcaccaaaaatgagtcctgcttaaactctcgagagacatcgttcataaccaatgggtcatgtctggcaagccgtaagacaagttttatgatggccctttgcttgtcctctatctatgaagatctgaaaatgtaccaggtggagttcaagactatgaacgctaagctactcatggaccccaaaagacagatttttctggatcaaaatatgcttgcagtcatcgacgaactgatgcaggccttgaacttcaatagcgagaccgtgcctcagaagtcctcactcgaggaaccagatttttataaaacgaagattaaactgtgtatcttactgcacgctttcaggatacgggccgttactatcgaccgcgtgatgagttacctcaacgcgagctga

SEQ ID NO: 4190 - RNA, 660 nt, synthetic construct
  misc_feature 1..660: note = derived and/or modified sequence opt4 fromIL-12A__Homo_sapiens__AAK84425
  source 1..660: mol_type = other RNA
atgtgccccgccagaagcctgctgctggtggccaccctggtgctgctggaccacctgagcctggccagaaacctgcccgtggccacccccgaccccggcatgttcccctgcctgcaccacagccagaacctgctgagagccgtgagcaacatgctgcagaaggccagacagaccctggagttctacccctgcaccagcgaggagatcgaccacgaggacatcaccaaggacaagaccagcaccgtggaggcctgcctgcccctggagctgaccaagaacgagagctgcctgaacagcagagagaccagcttcatcaccaacggcagctgcctggccagcagaaagaccagcttcatgatggccctgtgcctgagcagcatctacgaggacctgaagatgtaccaggtggagttcaagaccatgaacgccaagctgctgatggaccccaagagacagatcttcctggaccagaacatgctggccgtgatcgacgagctgatgcaggccctgaacttcaacagcgagaccgtgccccagaagagcagcctggaggagcccgacttctacaagaccaagatcaagctgtgcatcctgctgcacgccttcagaatcagagccgtgaccatcgacagagtgatgagctacctgaacgccagctga

SEQ ID NO: 4191 - RNA, 660 nt, synthetic construct
  misc_feature 1..660: note = derived and/or modified sequence opt5 fromIL-12A__Homo_sapiens__AAK84425
  source 1..660: mol_type = other RNA
atgtgccccgccagaagcctgctcctggtggctacccttgtcctgctcgaccacctgtcccttgcccggaacctgcctgttgcgacaccggatcccggcatgttcccttgtctccatcactctcagaatctgctgcgcgctgtgagcaacatgctccaaaaggccagacagacgctggagttttacccctgcacctccgaagagatcgaccatgaagatattacaaaagacaagacctctacagtggaggcctgtcttcctctggaactcaccaaaaatgagagctgcctgaactcccgggagacatctttcatcaccaatgggagctgtcttgcttcccgcaagacgagctttatgatggccctgtgcctctcttccatttatgaagatctgaaaatgtaccaggtcgagttcaagaccatgaacgctaagctgctcatggaccccaaaagacagatctttctggatcaaaatatgcttgccgtgattgacgaactgatgcaggcgctcaacttcaatagcgagacagttcctcagaagtcttccctggaggaaccggatttttataaaaccaagatcaaactttgtatcctgctccacgccttccggattcgcgctgtgacaatcgacagagtcatgagctacctgaacgcctcttga

SEQ ID NO: 4192 - RNA, 660 nt, synthetic construct
  misc_feature 1..660: note = derived and/or modified sequence opt6 fromIL-12A__Homo_sapiens__AAK84425
  source 1..660: mol_type = other RNA
atgtgcccagcaagatcactactactagtagcaacactagtactactagaccacctatcactcgccagaaacctcccagtagccacaccagacccaggaatgttcccctgcctccaccattcccaaaacctactaagagcagtatcaaacatgctacaaaaagcaagacaaacactagaattctatccatgcacatcagaagaaatagaccacgaagacataacaaaagacaaaacatcaaccgtagaagcatgcctcccactcgaactcacaaaaaacgaatcatgcctaaactcaagagaaacatcattcataacaaacggctcatgcttagcctcaagaaaaacatcattcatgatggcactatgcctctcatccatatatgaagacttaaaaatgtaccaagtagaatttaaaaccatgaacgcaaaattactaatggacccaaaaagacaaatattcctagaccaaaacatgctagcagtaatagacgaactaatgcaagcactaaacttcaactcagaaaccgtaccccaaaaatcatctctagaagaaccagacttctacaaaacaaaaataaaactatgcatactactacacgccttcagaataagagccgtcacaatagacagagtcatgtcatacctaaacgcctcataa

SEQ ID NO: 4193 - protein, 328 aa, synthetic construct
  REGION 1..328: note = IL-12__Homo_sapiens__P29460
MCHQQLVISWFSLVFLASPLVAIWELKKDVYVVELDWYPDAPGEMVVLTCDTPEEDGITWTLDQSSEVLGSGKTLTIQVKEFGDAGQYTCHKGGEVLSHSLLLLHKKEDGIWSTDILKDQKEPKNKTFLRCEAKNYSGRFTCWWLTTISTDLTFSVKSSRGSSDPQGVTCGAATLSAERVRGDNKEYEYSVECQEDSACPAAEESLPIEVMVDAVHKLKYENYTSSFFIRDIIKPDPPKNLQLKPLKNSRQVEVSWEYPDTWSTPHSYFSLTFCVQVQGKSKREKKDRVFTDKTSATVICRKNASISVRAQDRYYSSSWSEWASVPCS

SEQ ID NO: 4194 - RNA, 987 nt, synthetic construct
  misc_feature 1..987: note = IL-12__Homo_sapiens__AAA35695
  source 1..987: mol_type = other RNA
atgtgtcaccagcagttggtcatctcttggttttccctggtttttctggcatctcccctcgtggccatatgggaactgaagaaagatgtttatgtcgtagaattggattggtatccggatgcccctggagaaatggtggtcctcacctgtgacacccctgaagaagatggtatcacctggaccttggaccagagcagtgaggtcttaggctctggcaaaaccctgaccatccaagtcaaagagtttggagatgctggccagtacacctgtcacaaaggaggcgaggttctaagccattcgctcctgctgcttcacaaaaaggaagatggaatttggtccactgatattttaaaggaccagaaagaacccaaaaataagacctttctaagatgcgaggccaagaattattctggacgtttcacctgctggtggctgacgacaatcagtactgatttgacattcagtgtcaaaagcagcagaggctcttctgacccccaaggggtgacgtgcggagctgctacactctctgcagagagagtcagaggggacaacaaggagtatgagtactcagtggagtgccaggaggacagtgcctgcccagctgctgaggagagtctgcccattgaggtcatggtggatgccgttcacaagctcaagtatgaaaactacaccagcagcttcttcatcagggacatcatcaaacctgacccacccaagaacttgcagctgaagccattaaagaattctcggcaggtggaggtcagctgggagtaccctgacacctggagtactccacattcctacttctccctgacattctgcgttcaggtccagggcaagagcaagagagaaaagaaagatagagtcttcacggacaagacctcagccacggtcatctgccgcaaaaatgccagcattagcgtgcgggcccaggaccgctactatagctcatcttggagcgaatgggcatctgtgccctgcagttag

SEQ ID NO: 4195 - RNA, 987 nt, synthetic construct
  misc_feature 1..987: note = derived and/or modified sequence opt1 fromIL-12__Homo_sapiens__AAA35695
  source 1..987: mol_type = other RNA
atgtgccaccagcagctggtgatcagctggttctccctcgtcttcctggccagccccctggtggccatctgggagctcaagaaggacgtgtacgtcgtggagctggactggtacccggacgcgcccggcgagatggtggtcctgacctgcgacacccccgaggaggacgggatcacgtggaccctcgaccagtccagcgaggtgctgggctccgggaagaccctgaccatccaggtgaaggagttcggcgacgccgggcagtacacgtgccacaagggcggcgaggtcctcagccactccctgctgctcctgcacaagaaggaggacgggatctggagcaccgacatcctgaaggaccagaaggagcccaagaacaagaccttcctccgctgcgaggccaagaactactccggccggttcacgtgctggtggctgaccaccatcagcaccgacctgaccttctccgtcaagagctcccgcgggagctccgacccgcagggcgtgacgtgcggggccgccaccctcagcgcggagcgggtgcgcggcgacaacaaggagtacgagtactccgtggagtgccaggaggacagcgcctgccccgccgccgaggagtccctgcccatcgaggtgatggtcgacgcggtgcacaagctgaagtacgagaactacaccagcagcttcttcatccgggacatcatcaagcccgacccgcccaagaacctccagctgaagcccctgaagaactcccgccaggtggaggtcagctgggagtaccccgacacctggtccacgccgcacagctacttctccctcaccttctgcgtccaggtgcagggcaagagcaagcgggagaagaaggaccgcgtgttcaccgacaagacctccgccacggtgatctgccggaagaacgccagcatctccgtgcgcgcccaggaccggtactacagctccagctggtccgagtgggccagcgtcccctgctcctga

SEQ ID NO: 4196 - RNA, 987 nt, synthetic construct
  misc_feature 1..987: note = derived and/or modified sequence opt2 fromIL-12__Homo_sapiens__AAA35695
  source 1..987: mol_type = other RNA
atgtgccaccagcagctcgtcatctcctggttctccctcgtcttcctcgcctcccccctcgtcgccatctgggagctcaagaaggacgtctacgtcgtcgagctcgactggtaccccgacgcccccggcgagatggtcgtcctcacctgcgacacccccgaggaggacggcatcacctggaccctcgaccagtcctccgaggtcctcggctccggcaagaccctcaccatccaggtcaaggagttcggcgacgccggccagtacacctgccacaagggcggcgaggtcctctcccactccctcctcctcctccacaagaaggaggacggcatctggtccaccgacatcctcaaggaccagaaggagcccaagaacaagaccttcctccgctgcgaggccaagaactactccggccgcttcacctgctggtggctcaccaccatctccaccgacctcaccttctccgtcaagtcctcccgcggctcctccgacccccagggcgtcacctgcggcgccgccaccctctccgccgagcgcgtccgcggcgacaacaaggagtacgagtactccgtcgagtgccaggaggactccgcctgccccgccgccgaggagtccctccccatcgaggtcatggtcgacgccgtccacaagctcaagtacgagaactacacctcctccttcttcatccgcgacatcatcaagcccgacccccccaagaacctccagctcaagcccctcaagaactcccgccaggtcgaggtctcctgggagtaccccgacacctggtccaccccccactcctacttctccctcaccttctgcgtccaggtccagggcaagtccaagcgcgagaagaaggaccgcgtcttcaccgacaagacctccgccaccgtcatctgccgcaagaacgcctccatctccgtccgcgcccaggaccgctactactcctcctcctggtccgagtgggcctccgtcccctgctcctga

SEQ ID NO: 4197 - RNA, 987 nt, synthetic construct
  misc_feature 1..987: note = derived and/or modified sequence opt3 fromIL-12__Homo_sapiens__AAA35695
  source 1..987: mol_type = other RNA
atgtgccaccagcaactggtgatcagctggttctccctcgtctttcttgcctctcccctggttgctatttgggagttgaagaaagacgtgtacgtagtggaattagattggtatcctgacgcaccaggcgagatggtcgtgctgacctgtgatacaccggaagaggacgggataacttggacgctagatcagtcaagtgaagttctcggaagcggtaagaccctgacaatccaggtgaaagagttcggcgacgccgggcagtacacttgccataagggaggcgaggtcctttcccactctctgttgctcctgcataaaaaggaagatggtatttggtcgaccgacatcctgaaggatcaaaaagagcccaagaacaaaacatttctcagatgtgaagcgaagaattattcagggaggtttacctgctggtggttaactacaattagcaccgacctgacgttcagtgtgaaatcctctcggggaagctccgatcctcagggcgtaacttgtggcgctgccaccctttcagcagagcgcgttcgaggggacaacaaggagtacgaatatagtgtggagtgccaggaagatagcgcctgtccagctgcagaggaatctttgcccatcgaggtcatggtggacgccgtgcacaagctgaaatacgagaattatacatcctcattctttatacgtgacatcattaagcctgatccacccaaaaacctacagctcaagcctctgaaaaatagcagacaagtcgaagttagttgggagtacccagacacttggtctaccccgcattcctacttcagccttacattttgcgtgcaggtacagggaaagtcgaaaagggaaaagaaggatcgggtgttcaccgacaaaacgtctgctactgtcatctgtcgcaagaacgcctccatttcagtgagagcgcaggataggtattacagtagctcctggtctgagtgggcaagcgttccctgctcatga

SEQ ID NO: 4198 - RNA, 987 nt, synthetic construct
  misc_feature 1..987: note = derived and/or modified sequence opt4 fromIL-12__Homo_sapiens__AAA35695
  source 1..987: mol_type = other RNA
atgtgccaccagcagctggtgatcagctggttcagcctggtgttcctggccagccccctggtggccatctgggagctgaagaaggacgtgtacgtggtggagctggactggtaccccgacgcccccggcgagatggtggtgctgacctgcgacacccccgaggaggacggcatcacctggaccctggaccagagcagcgaggtgctgggcagcggcaagaccctgaccatccaggtgaaggagttcggcgacgccggccagtacacctgccacaagggcggcgaggtgctgagccacagcctgctgctgctgcacaagaaggaggacggcatctggagcaccgacatcctgaaggaccagaaggagcccaagaacaagaccttcctgagatgcgaggccaagaactacagcggcagattcacctgctggtggctgaccaccatcagcaccgacctgaccttcagcgtgaagagcagcagaggcagcagcgacccccagggcgtgacctgcggcgccgccaccctgagcgccgagagagtgagaggcgacaacaaggagtacgagtacagcgtggagtgccaggaggacagcgcctgccccgccgccgaggagagcctgcccatcgaggtgatggtggacgccgtgcacaagctgaagtacgagaactacaccagcagcttcttcatcagagacatcatcaagcccgacccccccaagaacctgcagctgaagcccctgaagaacagcagacaggtggaggtgagctgggagtaccccgacacctggagcaccccccacagctacttcagcctgaccttctgcgtgcaggtgcagggcaagagcaagagagagaagaaggacagagtgttcaccgacaagaccagcgccaccgtgatctgcagaaagaacgccagcatcagcgtgagagcccaggacagatactacagcagcagctggagcgagtgggccagcgtgccctgcagctga

SEQ ID NO: 4199 - RNA, 987 nt, synthetic construct
  misc_feature 1..987: note = derived and/or modified sequence opt5 fromIL-12__Homo_sapiens__AAA35695
  source 1..987: mol_type = other RNA
atgtgccaccagcaactggtgatcagctggttctccctcgtctttctggcctctccccttgttgctatttgggagctgaagaaagacgtgtacgtggtcgaactcgattggtatcctgacgccccgggcgagatggtggttctgacctgtgatacacccgaagaggacgggatcacgtggacccttgatcagagctccgaagtgctgggatctggcaagacactcaccattcaggtcaaagagttcggggacgcgggacagtacacatgccataagggcggggaggtgctgagccactccctgctcctgcttcataaaaaggaagatggaatctggtctaccgacattctgaaggatcaaaaagagcctaagaacaaaacatttctcagatgtgaagctaagaattatagcggccggtttacctgctggtggctgacgaccatctccacagaccttaccttcagcgttaaatcttcccgcggcagctctgatccccagggggtgacatgtggagccgccaccctgtccgctgagagagtccggggcgacaacaaggagtacgaatatagcgtggagtgccaggaagattctgcctgtcctgctgccgaggaatccctccccatcgaggtgatggtcgacgcggttcacaagctgaaatacgagaattatacgagctccttctttattcgcgacatcattaagcctgatccgcccaaaaacctgcagctcaagcctctgaaaaattctagacaagtggaagtgagctgggagtaccccgacacatggtccacccctcatagctacttctctcttacattttgcgtccaggtgcaggggaagtccaaacgggaaaagaaggatcgcgttttcaccgacaaaaccagcgccacagtgatctgtagaaagaacgcttctattagcgtccgggcccaggatcgctattactcctctagctggtccgagtgggctagcgtgccctgctcttga

SEQ ID NO: 4200 - RNA, 987 nt, synthetic construct
  misc_feature 1..987: note = derived and/or modified sequence opt6 fromIL-12__Homo_sapiens__AAA35695
  source 1..987: mol_type = other RNA
atgtgccaccaacaactagtaatatcatggttctcactagtattcttggcatcacccctagtagcaatatgggaactaaaaaaagacgtatacgtagtagaactagactggtacccagacgcaccaggagaaatggtagtattaacatgcgacacaccagaagaagatggaataacttggacattagaccaatcaagtgaagtattaggatcaggcaaaacactaactatacaagtaaaagaatttggagacgcaggacaatacacctgccacaaaggaggcgaagtcctatcacattcactactattattacacaaaaaagaagacggaatctggagcacagacatattaaaagaccaaaaagaaccaaaaaacaaaacatttctaagatgcgaagctaaaaactattcaggaagattcacatgctggtggctaacaaccatcagtaccgacttaacattctcagtaaaatcatcaagaggatcatcagacccacaaggagtaacatgtggagcagcaacactaagcgcagaaagagtacgaggagacaacaaagaatacgaatattcagtagaatgtcaagaagactcagcatgccctgcagcagaagaatcattaccaatagaagtaatggtcgacgctgtacacaaactaaaatatgaaaattacacaagcagtttcttcataagagacataataaaacccgacccaccaaaaaacctacaactaaaaccattaaaaaattcaagacaagtagaagtatcatgggaatacccagatacatggagcacaccacacagttacttctcattaacattctgcgtacaagtacaaggaaaaagtaaaagagaaaaaaaagacagagtattcacagataagacttcagcaacagtaatatgcagaaaaaacgcaagcataagcgtacgagcacaagacagatattactcaagctcatggtcagaatgggcatcagtaccatgttcataa

SEQ ID NO: 4201 - protein, 146 aa, synthetic construct [sequence omitted]

SEQ ID NO: 4202 - RNA, 441 nt, synthetic construct
  misc_feature 1..441: note = IL-13__Homo_sapiens__CAA48823
  source 1..441: mol_type = other RNA
atgcatccgctcctcaatcctctcctgttggcactgggcctcatggcgcttttgttgaccacggtcattgctctcacttgccttggcggctttgcctccccaggccctgtgcctccctctacagccctcagggagctcattgaggagctggtcaacatcacccagaaccagaaggctccgctctgcaatggcagcatggtatggagcatcaacctgacagctggcatgtactgtgcagccctggaatccctgatcaacgtgtcaggctgcagtgccatcgagaagacccagaggatgctgagcggattctgcccgcacaaggtctcagctgggcagttttccagcttgcatgtccgagacaccaaaatcgaggtggcccagtttgtaaaggacctgctcttacatttaaagaaactttttcgcgagggacggttcaactga

SEQ ID NO: 4203 - RNA, 441 nt, synthetic construct
  misc_feature 1..441: note = derived and/or modified sequence opt1 fromIL-13__Homo_sapiens__CAA48823
  source 1..441: mol_type = other RNA
atgcaccccctgctcaacccgctgctgctcgccctgggcctgatggccctcctgctgaccaccgtgatcgcgctcacgtgcctcgggggcttcgccagccccgggcccgtgcccccgtccaccgccctgcgcgagctcatcgaggagctggtcaacatcacccagaaccagaaggcgcccctgtgcaacggcagcatggtgtggtccatcaacctcaccgccgggatgtactgcgccgccctggagagcctgatcaacgtctccggctgcagcgccatcgagaagacgcagcggatgctctccggcttctgcccccacaaggtgagcgccgggcagttctccagcctgcacgtgcgcgacaccaagatcgaggtcgcgcagttcgtgaaggacctgctcctgcacctgaagaagctgttccgggagggccgcttcaactga

SEQ ID NO: 4204 - RNA, 441 nt, synthetic construct
  misc_feature 1..441: note = derived and/or modified sequence opt2 fromIL-13__Homo_sapiens__CAA48823
  source 1..441: mol_type = other RNA
atgcaccccctcctcaaccccctcctcctcgccctcggcctcatggccctcctcctcaccaccgtcatcgccctcacctgcctcggcggcttcgcctcccccggccccgtccccccctccaccgccctccgcgagctcatcgaggagctcgtcaacatcacccagaaccagaaggcccccctctgcaacggctccatggtctggtccatcaacctcaccgccggcatgtactgcgccgccctcgagtccctcatcaacgtctccggctgctccgccatcgagaagacccagcgcatgctctccggcttctgcccccacaaggtctccgccggccagttctcctccctccacgtccgcgacaccaagatcgaggtcgcccagttcgtcaaggacctcctcctccacctcaagaagctcttccgcgagggccgcttcaactga

SEQ ID NO: 4205 - RNA, 441 nt, synthetic construct
  misc_feature 1..441: note = derived and/or modified sequence opt3 fromIL-13__Homo_sapiens__CAA48823
  source 1..441: mol_type = other RNA
atgcaccccctgctcaaccctcttctgttggccttaggcctgatggctctactcctgaccacagtgatcgcacttacttgccttgggggattcgccagcccaggtccggttcccccttccacggcgttgagagagctcattgaagagttggtcaatataacccagaaccaaaaggctccactgtgtaatggctctatggtgtggtcaatcaacctcacagccgggatgtactgcgcagccttagaaagtctgattaatgtaagcggatgttccgctatcgagaaaactcagaggatgctttctggcttttgcccccataaggtgtcggcaggtcagttctcaagcctgcacgtccgggacaccaaaattgaagtggcccagtttgttaaggatctgctactccatctgaaaaagctgttccgcgaggggcgatttaactga

SEQ ID NO: 4206 - RNA, 441 nt, synthetic construct
  misc_feature 1..441: note = derived and/or modified sequence opt4 fromIL-13__Homo_sapiens__CAA48823
  source 1..441: mol_type = other RNA
atgcaccccctgctgaaccccctgctgctggccctgggcctgatggccctgctgctgaccaccgtgatcgccctgacctgcctgggcggcttcgccagccccggccccgtgccccccagcaccgccctgagagagctgatcgaggagctggtgaacatcacccagaaccagaaggcccccctgtgcaacggcagcatggtgtggagcatcaacctgaccgccggcatgtactgcgccgccctggagagcctgatcaacgtgagcggctgcagcgccatcgagaagacccagagaatgctgagcggcttctgcccccacaaggtgagcgccggccagttcagcagcctgcacgtgagagacaccaagatcgaggtggcccagttcgtgaaggacctgctgctgcacctgaagaagctgttcagagagggcagattcaactga

SEQ ID NO: 4207 - RNA, 441 nt, synthetic construct
  misc_feature 1..441: note = derived and/or modified sequence opt5 fromIL-13__Homo_sapiens__CAA48823
  source 1..441: mol_type = other RNA
atgcaccccctgctcaaccctctgcttctggccctcggcctgatggcccttctgctcaccacagtgatcgctctgacgtgccttgggggattcgcgagcccgggccccgtccctccctccaccgctctcagagagctgattgaggaacttgttaatatcacacagaaccaaaaggcccctctgtgtaatgggtctatggtgtggagcattaacctcaccgccggaatgtactgcgctgccctggaatcccttatcaatgtgtctggctgtagcgctattgagaaaacacagcggatgctgtccgggttttgcccccataaggtctctgccggacagttcagctccctccacgtgcgcgacaccaaaatcgaagttgcgcagtttgtgaaggatctgctgctccatctgaaaaagctgttcagagagggccggtttaactga

SEQ ID NO: 4208 - RNA, 441 nt, synthetic construct
  misc_feature 1..441: note = derived and/or modified sequence opt6 fromIL-13__Homo_sapiens__CAA48823
  source 1..441: mol_type = other RNA
atgcacccactactaaacccactactactagcactaggactaatggcactactactaacaacagtaatagcactaacatgcctaggaggattcgcatcaccaggaccagtaccaccatcaacagcactaagagaactaatagaagaactagtaaacataacacaaaaccaaaaagcaccactatgcaacggatcaatggtatggtcaataaacctaacagcaggaatgtactgcgcagcactagaatcactaataaacgtatcaggatgctcagcaatagaaaaaacacaaagaatgctatcaggattctgcccacacaaagtatcagcaggacaattctcatcactacacgtaagagacacaaaaatagaagtagcacaattcgtaaaagacctactactacacctaaaaaaactattccgagaaggaagattcaactaa

SEQ ID NO: 4209 - protein, 546 aa, synthetic construct
  REGION 1..546: note = IL-14__Homo_sapiens__P40222
MKNQDKKNGAAKQSNPKSSPGQPEAGPEGAQERPSQAAPAVEAEGPGSSQAPRKPEGAQARTAQSGALRDVSEELSRQLEDILSTYCVDNNQGGPGEDGAQGEPAEPEDAEKSRTYVARNGEPEPTPVVNGEKEPSKGDPNTEEIRQSDEVGDRDHRRPQEKKKAKGLGKEITLLMQTLNTLSTPEEKLAALCKKYAELLEEHRNSQKQMKLLQKKQSQLVQEKDHLRGEHSKAVLARSKLESLCRELQRHNRSLKEEGVQRAREEEEKRKEVTSHFQVTLNDIQLQMEQHNERNSKLRQENMELAERLKKLIEQYELREEHIDKVFKHKDLQQQLVDAKLQQAQEMLKEAEERHQREKDFLLKEAVESQRMCELMKQQETHLKQQLALYTEKFEEFQNTLSKSSEVFTTFKQEMEKMTKKIKKLEKETTMYRSRWESSNKALLEMAEEKTVRDKELEGLQVKIQRLEKLCRALQTERNDLNKRVQDLSAGGQGSLTDSGPERRPEGPGAQAPSSPRVTEAPCYPGAPSTEASGQTGPQEPTSARA

SEQ ID NO: 4210 - RNA, 1641 nt, synthetic construct
  misc_feature 1..1641: note = IL-14__Homo_sapiens__AAI03824
  source 1..1641: mol_type = other RNA
atgaagaaccaagacaaaaagaacggggctgccaaacaatccaatccaaaaagcagcccaggacaaccggaagcaggacccgagggagcccaggagcggcccagccaggcggctcctgcagtagaagcagaaggtcccggcagcagccaggctcctcggaagccggagggggctcaagccagaacggctcagtctggggcccttcgtgatgtctctgaggagctgagccgccaactggaagacatactgagcacatactgtgtggacaataaccaggggggccccggcgaggatggggcacagggtgagccggctgaacccgaagatgcagagaagtcccggacctatgtggcaaggaatggggagcctgaaccaactccagtagtcaatggagagaaggaaccctccaagggggatccaaacacagaagagatccggcagagtgacgaggtcggagaccgagaccatcgaaggccacaggagaagaaaaaagccaagggtttggggaaggagatcacgttgctgatgcagacattgaatactctgagtaccccagaggagaagctggctgctctgtgcaagaagtatgctgaactgctggaggagcaccggaattcacagaagcagatgaagctcctacagaaaaagcagagccagctggtgcaagagaaggaccacctgcgcggtgagcacagcaaggccgtcctggcccgcagcaagcttgagagcctatgccgtgagctgcagcggcacaaccgctccctcaaggaagaaggtgtgcagcgggcccgggaggaggaggagaagcgcaaggaggtgacctcgcacttccaggtgacactgaatgacattcagctgcagatggaacagcacaatgagcgcaactccaagctgcgccaagagaacatggagctggctgagaggctcaagaagctgattgagcagtatgagctgcgcgaggagcatatcgacaaagtcttcaaacacaaggacctacaacagcagctggtggatgccaagctccagcaggcccaggagatgctaaaggaggcagaagagcggcaccagcgggagaaggattttctcctgaaagaggcagtagagtcccagaggatgtgtgagctgatgaagcagcaagagacccacctgaagcaacagcttgccctatacacagagaagtttgaggagttccagaacacactttccaaaagcagcgaggtattcaccacattcaagcaggagatggaaaagatgactaagaagatcaagaagctggagaaagaaaccaccatgtaccggtcccggtgggagagcagcaacaaggccctgcttgagatggctgaggagaaaacagtccgggataaagaactggagggcctgcaggtaaaaatccaacggctggagaagctgtgccgggcactgcagacagagcgcaatgacctgaacaagagggtacaggacctgagtgctggtggccagggctccctcactgacagtggccctgagaggaggccagaggggcctggggctcaagcacccagctcccccagggtcacagaagcgccttgctacccaggagcaccgagcacagaagcatcaggccagactgggcctcaagagcccacctccgccagggcctag

SEQ ID NO: 4211 - RNA, 1641 nt, synthetic construct
  misc_feature 1..1641: note = derived and/or modified sequence opt1 fromIL-14__Homo_sapiens__AAI03824
  source 1..1641: mol_type = other RNA
atgaagaaccaggacaagaagaacggcgccgccaagcagagcaaccccaagtccagcccggggcagcccgaggcgggccccgagggggcccaggagcgcccctcccaggccgccccggccgtggaggcggagggccccgggagctcccaggcgccccggaagcccgagggcgcccaggcccgcaccgcccagagcggcgccctgcgggacgtctccgaggagctcagccgccagctggaggacatcctgtccacctactgcgtggacaacaaccagggcgggccgggggaggacggcgcccagggggagcccgccgagcccgaggacgccgagaagtcccggacgtacgtggcgcgcaacggcgagcccgagccgacccccgtcgtgaacggcgagaaggagcccagcaagggggaccccaacaccgaggagatccggcagagcgacgaggtgggcgaccgcgaccaccggcgcccgcaggagaagaagaaggccaaggggctcggcaaggagatcaccctgctgatgcagacgctcaacaccctgtccacccccgaggagaagctggccgccctctgcaagaagtacgccgagctgctggaggagcaccggaacagccagaagcagatgaagctcctgcagaagaagcagtcccagctggtccaggagaaggaccacctccgcggcgagcacagcaaggcggtgctggcccggtccaagctggagagcctctgccgcgagctgcagcggcacaaccgctccctgaaggaggagggggtgcagcgggcccgcgaggaggaggagaagcggaaggaggtcaccagccacttccaggtgacgctcaacgacatccagctgcagatggagcagcacaacgagcgcaacagcaagctgcggcaggagaacatggagctcgccgagcgcctgaagaagctgatcgagcagtacgagctccgcgaggagcacatcgacaaggtgttcaagcacaaggacctgcagcagcagctggtcgacgccaagctccagcaggcgcaggagatgctgaaggaggccgaggagcggcaccagcgcgagaaggacttcctgctcaaggaggccgtggagtcccagcggatgtgcgagctgatgaagcagcaggagacccacctgaagcagcagctcgccctgtacaccgagaagttcgaggagttccagaacaccctgagcaagtccagcgaggtgttcacgaccttcaagcaggagatggagaagatgaccaagaagatcaagaagctcgagaaggagaccacgatgtaccgctcccggtgggagagctccaacaaggccctgctggagatggcggaggagaagaccgtccgcgacaaggagctcgagggcctccaggtgaagatccagcggctggagaagctgtgccgcgccctgcagaccgagcggaacgacctgaacaagcgcgtgcaggacctcagcgccgggggccaggggtccctgaccgacagcggccccgagcggcgccccgagggcccgggggcccaggcgccctccagcccccgggtcacggaggccccctgctacccgggcgccccctccaccgaggccagcgggcagaccggcccccaggagcccacctccgcccgcgcgtga

SEQ ID NO: 4212 - RNA, 1641 nt, synthetic construct
  misc_feature 1..1641: note = derived and/or modified sequence opt2 fromIL-14__Homo_sapiens__AAI03824
  source 1..1641: mol_type = other RNA
atgaagaaccaggacaagaagaacggcgccgccaagcagtccaaccccaagtcctcccccggccagcccgaggccggccccgagggcgcccaggagcgcccctcccaggccgcccccgccgtcgaggccgagggccccggctcctcccaggccccccgcaagcccgagggcgcccaggcccgcaccgcccagtccggcgccctccgcgacgtctccgaggagctctcccgccagctcgaggacatcctctccacctactgcgtcgacaacaaccagggcggccccggcgaggacggcgcccagggcgagcccgccgagcccgaggacgccgagaagtcccgcacctacgtcgcccgcaacggcgagcccgagcccacccccgtcgtcaacggcgagaaggagccctccaagggcgaccccaacaccgaggagatccgccagtccgacgaggtcggcgaccgcgaccaccgccgcccccaggagaagaagaaggccaagggcctcggcaaggagatcaccctcctcatgcagaccctcaacaccctctccacccccgaggagaagctcgccgccctctgcaagaagtacgccgagctcctcgaggagcaccgcaactcccagaagcagatgaagctcctccagaagaagcagtcccagctcgtccaggagaaggaccacctccgcggcgagcactccaaggccgtcctcgcccgctccaagctcgagtccctctgccgcgagctccagcgccacaaccgctccctcaaggaggagggcgtccagcgcgcccgcgaggaggaggagaagcgcaaggaggtcacctcccacttccaggtcaccctcaacgacatccagctccagatggagcagcacaacgagcgcaactccaagctccgccaggagaacatggagctcgccgagcgcctcaagaagctcatcgagcagtacgagctccgcgaggagcacatcgacaaggtcttcaagcacaaggacctccagcagcagctcgtcgacgccaagctccagcaggcccaggagatgctcaaggaggccgaggagcgccaccagcgcgagaaggacttcctcctcaaggaggccgtcgagtcccagcgcatgtgcgagctcatgaagcagcaggagacccacctcaagcagcagctcgccctctacaccgagaagttcgaggagttccagaacaccctctccaagtcctccgaggtcttcaccaccttcaagcaggagatggagaagatgaccaagaagatcaagaagctcgagaaggagaccaccatgtaccgctcccgctgggagtcctccaacaaggccctcctcgagatggccgaggagaagaccgtccgcgacaaggagctcgagggcctccaggtcaagatccagcgcctcgagaagctctgccgcgccctccagaccgagcgcaacgacctcaacaagcgcgtccaggacctctccgccggcggccagggctccctcaccgactccggccccgagcgccgccccgagggccccggcgcccaggccccctcctccccccgcgtcaccgaggccccctgctaccccggcgccccctccaccgaggcctccggccagaccggcccccaggagcccacctccgcccgcgcctga

SEQ ID NO: 4213 - RNA, 1641 nt, synthetic construct
  misc_feature 1..1641: note = derived and/or modified sequence opt3 fromIL-14__Homo_sapiens__AAI03824
  source 1..1641: mol_type = other RNA
atgaagaaccaggacaaaaagaatggcgccgctaaacaaagcaaccccaagtcctctcctgggcagccagaggcaggaccggaaggtgcccaggagagaccctcacaggcggctcctgccgtggaagcagagggcccagggagtagccaagcccccaggaaacctgaaggagctcaggcacggaccgcccagtccggcgctctgcgcgatgtctctgaggagctctcgcgacagcttgaagacatcctgtcaacatactgcgttgataataaccaaggtgggccaggagaggacggcgcccagggcgaacccgcggagcctgaggatgcagaaaagagccgtacttatgtggccagaaatggggagccagaaccgacgcccgtagtgaacggagagaaggaacctagtaaaggtgacccaaataccgaggagattaggcagtccgatgaagtcggcgaccgggatcaccgcagaccccaggagaagaaaaaggctaaagggttgggaaaggaaataacattactgatgcaaactctaaacaccctctctacacctgaggaaaagctggccgcactttgtaaaaagtacgctgagctgttggaggaacataggaatagccagaaacagatgaagctcctgcagaaaaagcaatcccagctggtgcaggagaaagaccacctccggggcgaacattcaaaggccgttttagcgcgcagtaagctggagagcctttgccgagaattgcaaagacacaacaggtctctgaaagaggagggtgtgcagcgggcccgtgaagaggaagagaagcgcaaagaggtcacctcccatttccaggtgactctaaatgatatccagctccaaatggaacagcacaacgagagaaattcaaagctgaggcaggaaaacatggagcttgcagaacggctgaaaaagttgattgagcagtatgagctccgagaagaacacatcgacaaggtatttaaacataaggatctgcaacagcagttagttgacgctaaactgcagcaagcccaggaaatgctcaaggaggctgaggagcgccaccagagagagaaagacttccttctgaaggaagccgtggagagccaaaggatgtgtgaattgatgaagcagcaggagacacatctaaaacagcaactggcactctacaccgaaaagtttgaggagttccagaatacgctgagtaaatcttccgaagtctttactaccttcaagcaggagatggagaaaatgacaaagaagattaaaaagctggaaaaagagactaccatgtatcggagccgctgggaatcgtctaacaaggccctgttggagatggctgaagagaaaacagtgagagataaggaactcgaggggcttcaggtgaaaatccaaaggttagagaagctgtgccgtgcgctacagaccgaacggaacgacctcaataagcgagtccaggatctgtccgcaggaggccagggctcacttacggacagtgggccagagagaaggcccgaaggaccgggtgcccaagctcctagctctccccgcgttactgaggccccatgttaccctggcgcaccctccacagaagccagcgggcagaccggaccacaggagcccacttcagctcgggcctga

SEQ ID NO: 4214 - RNA, 1641 nt, synthetic construct
  misc_feature 1..1641: note = derived and/or modified sequence opt4 fromIL-14__Homo_sapiens__AAI03824
  source 1..1641: mol_type = other RNA
atgaagaaccaggacaagaagaacggcgccgccaagcagagcaaccccaagagcagccccggccagcccgaggccggccccgagggcgcccaggagagacccagccaggccgcccccgccgtggaggccgagggccccggcagcagccaggcccccagaaagcccgagggcgcccaggccagaaccgcccagagcggcgccctgagagacgtgagcgaggagctgagcagacagctggaggacatcctgagcacctactgcgtggacaacaaccagggcggccccggcgaggacggcgcccagggcgagcccgccgagcccgaggacgccgagaagagcagaacctacgtggccagaaacggcgagcccgagcccacccccgtggtgaacggcgagaaggagcccagcaagggcgaccccaacaccgaggagatcagacagagcgacgaggtgggcgacagagaccacagaagaccccaggagaagaagaaggccaagggcctgggcaaggagatcaccctgctgatgcagaccctgaacaccctgagcacccccgaggagaagctggccgccctgtgcaagaagtacgccgagctgctggaggagcacagaaacagccagaagcagatgaagctgctgcagaagaagcagagccagctggtgcaggagaaggaccacctgagaggcgagcacagcaaggccgtgctggccagaagcaagctggagagcctgtgcagagagctgcagagacacaacagaagcctgaaggaggagggcgtgcagagagccagagaggaggaggagaagagaaaggaggtgaccagccacttccaggtgaccctgaacgacatccagctgcagatggagcagcacaacgagagaaacagcaagctgagacaggagaacatggagctggccgagagactgaagaagctgatcgagcagtacgagctgagagaggagcacatcgacaaggtgttcaagcacaaggacctgcagcagcagctggtggacgccaagctgcagcaggcccaggagatgctgaaggaggccgaggagagacaccagagagagaaggacttcctgctgaaggaggccgtggagagccagagaatgtgcgagctgatgaagcagcaggagacccacctgaagcagcagctggccctgtacaccgagaagttcgaggagttccagaacaccctgagcaagagcagcgaggtgttcaccaccttcaagcaggagatggagaagatgaccaagaagatcaagaagctggagaaggagaccaccatgtacagaagcagatgggagagcagcaacaaggccctgctggagatggccgaggagaagaccgtgagagacaaggagctggagggcctgcaggtgaagatccagagactggagaagctgtgcagagccctgcagaccgagagaaacgacctgaacaagagagtgcaggacctgagcgccggcggccagggcagcctgaccgacagcggccccgagagaagacccgagggccccggcgcccaggcccccagcagccccagagtgaccgaggccccctgctaccccggcgcccccagcaccgaggccagcggccagaccggcccccaggagcccaccagcgccagagcctga

SEQ ID NO: 4215 - RNA, 1641 nt, synthetic construct
  misc_feature 1..1641: note = derived and/or modified sequence opt5 fromIL-14__Homo_sapiens__AAI03824
  source 1..1641: mol_type = other RNA
atgaagaaccaggacaaaaagaatggcgccgctaaacaaagcaaccccaagtcctctcctgggcagccggaggccggacccgaaggcgcgcaggagagacctagccaggctgcccccgccgtggaagctgaggggcctggatcctctcaagctccccggaaacctgaaggcgcccaggcccgcaccgcgcagagcggggccctgagagatgtctccgaggagctctctcggcagctggaagacatccttagcacatactgcgttgataataaccaaggaggcccgggcgaggacggggctcagggagaacccgccgagcctgaggatgctgaaaagtcccgcacgtatgtggccagaaatggcgagcccgaacctacccccgtggtcaacggggagaaggaaccgagcaaaggagaccctaatacagaggagattcggcagtctgatgaagtgggcgaccgcgatcacagacggccccaggagaagaaaaaggcgaaagggctgggaaaggaaatcaccctcctgatgcaaacacttaacaccctgtccacacctgaggaaaagctcgccgctctgtgtaaaaagtacgccgagctgctcgaggaacatcgcaatagccagaaacagatgaagctgcttcagaaaaagcaatctcagctggttcaggagaaagaccacctcagaggcgaacattccaaggctgtgctggcccggagcaaacttgagtctctgtgccgcgaactccaaagacacaaccggtccctgaaggaggagggcgtccagcgcgccagagaagaggaagagaagcggaaagaggtgaccagccatttccaggttacgctgaatgatattcagctccaaatggaacagcacaacgagagaaattccaagctgcgccaggaaaacatggagcttgctgaacggctgaaaaagctcatcgagcagtatgagctgagagaggaacacattgacaaggtgtttaaacataaggatcttcaacagcagctggtcgacgcgaaactccagcaagcccaggaaatgctgaaggaggctgaggaacgccaccagcgggagaaagacttcctgctcaaggaagccgtggagtctcaaagaatgtgtgaactgatgaagcagcaggagacccatcttaaacagcaactggccctctacacagaaaagtttgaggagttccagaataccctgagcaaatccagcgaagtgtttacaaccttcaagcaggagatggagaaaatgacgaagaagatcaagaaacttgaaaaagagacaaccatgtatcgctctcggtgggaatccagcaacaaggctctgctcgagatggccgaagagaaaacagtcagagataaggaactggaggggctgcaggttaaaatccaacgcctcgagaagctgtgccgggcgcttcagaccgaaagaaacgacctgaataagcgcgtgcaggatctctctgctggaggccaggggagcctgaccgactccggacccgagcggagacccgaaggccctggggcccaagccccgtctagcccccgggtgacagaggctccttgttaccccggagccccttccacggaagctagcggccagaccggcccccaggagccgacatctgcccgcgcgtga

SEQ ID NO: 4216 - RNA, 1641 nt, synthetic construct
  misc_feature 1..1641: note = derived and/or modified sequence opt6 fromIL-14__Homo_sapiens__AAI03824
  source 1..1641: mol_type = other RNA
atgaaaaaccaagacaaaaaaaatggcgcagcaaagcaaagcaaccctaaaagtagcccaggccaacccgaagcaggaccggaaggtgcacaagaaagaccaagccaagccgcaccagcagtagaagccgaaggcccaggaagctcacaagcaccaaggaaacccgaaggagcgcaagcacggacagcccaaagtggtgcactaagagatgtttcagaagaactatcacgacaactagaagacatcttatccacctattgcgtagataataaccaaggaggcccaggagaagatggagcccaaggcgaaccagcagaaccggaagacgcggaaaaatcaagaacttatgtcgcacgaaatggagaacccgaacccacgccagtagtaaacggcgaaaaagaaccaagcaaaggggacccgaatacagaagaaataagacaaagcgacgaagtaggagacagggatcacagaagacctcaagaaaaaaaaaaagccaaaggactgggaaaagaaattacattgctaatgcaaacactaaatacgttaagcacaccagaagagaaactcgcagcattgtgcaaaaaatatgccgaattactagaagaacacagaaactcacaaaaacaaatgaaattattacaaaaaaaacaaagccaattagtccaagaaaaggaccatttaagaggagaacactcaaaagcagtactagcacgaagtaaactcgaatcactttgtagggaattacaaaggcacaatagatcactaaaagaagaaggagtacaaagagcacgagaagaagaggagaaacgaaaagaagtaacgagtcatttccaagttacattaaatgatatccaattacaaatggaacaacacaacgaaagaaattcaaagttacgacaagaaaatatggaactagcagaaagattaaaaaaattaatagaacaatatgaactaagagaagaacatattgataaagtatttaaacataaagacttacaacaacaactagtagacgccaaactacaacaagcacaagaaatgttgaaagaagccgaagaacgacaccaaagagaaaaagatttcttattaaaggaagcagtagaaagtcagagaatgtgtgaattaatgaaacaacaagaaacccacttaaaacaacaacttgcattatacacagaaaaatttgaagaattccaaaacacattatcaaagtcaagtgaggtttttacaacatttaaacaagaaatggaaaaaatgaccaaaaagataaaaaaattagaaaaagaaaccacaatgtatagaagcagatgggaatcatcaaataaagcactactagaaatggcagaagaaaagacagtaagagataaagaattagaaggtttgcaagtgaaaatacaaagactagaaaaactatgcagagcactacaaacagaaaggaacgatttaaataaaagagtacaagacttatcagcaggaggacaaggaagtctaacagactcaggaccagaaagacgacctgaaggacctggcgcacaagcaccatcaagtcccagagtaacagaggcaccatgctaccccggagcacccagtacagaagctagcggacagacgggaccacaagaaccaacgtcagcaagagcgtaa

SEQ ID NO: 4217 - protein, 162 aa, synthetic construct
  REGION 1..162: note = IL-15__Homo_sapiens__P40933
MRISKPHLRSISIQCYLCLLLNSHFLTEAGIHVFILGCFSAGLPKTEANWVNVISDLKKIEDLIQSMHIDATLYTESDVHPSCKVTAMKCFLLELQVISLESGDASIHDTVENLIILANNSLSSNGNVTESGCKECEELEEKNIKEFLQSFVHIVQMFINTS

SEQ ID NO: 4218 - RNA, 489 nt, synthetic construct
  misc_feature 1..489: note = IL-15__Homo_sapiens__AAA21551
  source 1..489: mol_type = other RNA
atgagaatttcgaaaccacatttgagaagtatttccatccagtgctacttgtgtttacttctaaacagtcattttctaactgaagctggcattcatgtcttcattttgggctgtttcagtgcagggcttcctaaaacagaagccaactgggtgaatgtaataagtgatttgaaaaaaattgaagatcttattcaatctatgcatattgatgctactttatatacggaaagtgatgttcaccccagttgcaaagtaacagcaatgaagtgctttctcttggagttacaagttatttcacttgagtccggagatgcaagtattcatgatacagtagaaaatctgatcatcctagcaaacaacagtttgtcttctaatgggaatgtaacagaatctggatgcaaagaatgtgaggaactggaggaaaaaaatattaaagaatttttgcagagttttgtacatattgtccaaatgttcatcaacacttcttga

SEQ ID NO: 4219 - RNA, 489 nt, synthetic construct
  misc_feature 1..489: note = derived and/or modified sequence opt1 fromIL-15__Homo_sapiens__AAA21551
  source 1..489: mol_type = other RNA
atgcgcatcagcaagccccacctccggtccatcagcatccagtgctacctgtgcctgctgctcaactcccacttcctgaccgaggccggcatccacgtgttcatcctggggtgcttcagcgccggcctcccgaagaccgaggcgaactgggtcaacgtgatctccgacctgaagaagatcgaggacctgatccagagcatgcacatcgacgccacgctctacaccgagtccgacgtgcaccccagctgcaaggtcaccgccatgaagtgcttcctgctggagctccaggtgatctccctggagagcggggacgcctccatccacgacaccgtggagaacctgatcatcctcgccaacaacagcctgtccagcaacggcaacgtcacggagtccgggtgcaaggagtgcgaggagctggaggagaagaacatcaaggagttcctccagagcttcgtgcacatcgtgcagatgttcatcaacacctcctga

SEQ ID NO: 4220 - RNA, 489 nt, synthetic construct
  misc_feature 1..489: note = derived and/or modified sequence opt2 fromIL-15__Homo_sapiens__AAA21551
  source 1..489: mol_type = other RNA
atgcgcatctccaagccccacctccgctccatctccatccagtgctacctctgcctcctcctcaactcccacttcctcaccgaggccggcatccacgtcttcatcctcggctgcttctccgccggcctccccaagaccgaggccaactgggtcaacgtcatctccgacctcaagaagatcgaggacctcatccagtccatgcacatcgacgccaccctctacaccgagtccgacgtccacccctcctgcaaggtcaccgccatgaagtgcttcctcctcgagctccaggtcatctccctcgagtccggcgacgcctccatccacgacaccgtcgagaacctcatcatcctcgccaacaactccctctcctccaacggcaacgtcaccgagtccggctgcaaggagtgcgaggagctcgaggagaagaacatcaaggagttcctccagtccttcgtccacatcgtccagatgttcatcaacacctcctga

SEQ ID NO: 4221 - RNA, 489 nt, synthetic construct
  misc_feature 1..489: note = derived and/or modified sequence opt3 fromIL-15__Homo_sapiens__AAA21551
  source 1..489: mol_type = other RNA
atgagaatcagcaagccccacctgaggtccatttctatacagtgctacctctgtcttctgttgaactcacatttcttaaccgaagccggcatccacgtgtttattctggggtgcttcagtgctggactacctaaaacagaagcaaattgggtcaacgttatcagcgacctcaagaaaattgaggatctgatccaatccatgcatatagacgccactctttatacggaatctgatgtgcacccatcgtgtaaggtaaccgcgatgaaatgctttctgttggagctccaggtgatctcactggaaagcggtgacgctagtattcatgatacagtcgagaatctgatcattctcgccaacaattccttatctagcaacggcaatgtgactgagtccgggtgtaaggaatgcgaggaactggaggagaagaacatcaaagagttccttcagtcatttgttcacatagtgcagatgttcattaataccagttga

SEQ ID NO: 4222 - RNA, 489 nt, synthetic construct
  misc_feature 1..489: note = derived and/or modified sequence opt4 fromIL-15__Homo_sapiens__AAA21551
  source 1..489: mol_type = other RNA
atgagaatcagcaagccccacctgagaagcatcagcatccagtgctacctgtgcctgctgctgaacagccacttcctgaccgaggccggcatccacgtgttcatcctgggctgcttcagcgccggcctgcccaagaccgaggccaactgggtgaacgtgatcagcgacctgaagaagatcgaggacctgatccagagcatgcacatcgacgccaccctgtacaccgagagcgacgtgcaccccagctgcaaggtgaccgccatgaagtgcttcctgctggagctgcaggtgatcagcctggagagcggcgacgccagcatccacgacaccgtggagaacctgatcatcctggccaacaacagcctgagcagcaacggcaacgtgaccgagagcggctgcaaggagtgcgaggagctggaggagaagaacatcaaggagttcctgcagagcttcgtgcacatcgtgcagatgttcatcaacaccagctga

SEQ ID NO: 4223 - RNA, 489 nt, synthetic construct
  misc_feature 1..489: note = derived and/or modified sequence opt5 fromIL-15__Homo_sapiens__AAA21551
  source 1..489: mol_type = other RNA
atgagaatcagcaagccccatctgcggtccatttctatccagtgctacctctgtctgcttctgaacagccacttcctcaccgaagccggcattcacgtgtttatcctggggtgcttctccgctggacttcctaaaacagaagccaattgggtcaacgttatttctgacctgaagaaaatcgaggatctcatccaaagcatgcatattgacgcgacgctgtataccgaatccgatgtgcacccgtcttgtaaggtgacagctatgaaatgctttctgctcgagctgcaggtcatcagccttgaatccggcgacgccagcattcatgataccgtggagaatctgatcattctcgccaacaattctctgtccagcaacgggaatgttacagagtctggatgtaaggaatgcgaggaacttgaggagaagaacatcaaagagttcctgcagtcctttgtgcacattgtccagatgttcatcaataccagctga

SEQ ID NO: 4224 - RNA, 489 nt, synthetic construct
  misc_feature 1..489: note = derived and/or modified sequence opt6 fromIL-15__Homo_sapiens__AAA21551
  source 1..489: mol_type = other RNA
atgagaatatcaaaaccacacctcagatcaatatcaatacaatgctacttatgcctactactaaactcacacttcctaacagaagcaggaatacacgtattcatactcggatgcttcagcgcaggactaccaaaaacagaagcaaactgggtaaacgtaatatcagacctaaaaaaaatagaagacctaatacaatcaatgcacatagacgccacactatacacagaatcagacgtacacccatcatgcaaagtaacagcaatgaaatgcttcctactagaactacaagtaatatcactcgaatcaggagacgcatcaatacacgacacagtagaaaacctaataatactagcaaacaactcactatcatcaaacggaaacgtaacagaatcaggatgcaaagaatgcgaagaattagaagaaaaaaacataaaagaattcctacaatcattcgtacacatagtacaaatgttcataaacacatcataa

SEQ ID NO: 4225 - protein, 1332 aa, synthetic construct
  REGION 1..1332: note = IL-16__Homo_sapiens__Q14005
MESHSRAGKSRKSAKFRSISRSLMLCNAKTSDDGSSPDEKYPDPFEISLAQGKEGIFHSSVQLADTSEAGPSSVPDLALASEAAQLQAAGNDRGKTCRRIFFMKESSTASSREKPGKLEAQSSNFLFPKACHQRARSNSTSVNPYCTREIDFPMTKKSAAPTDRQPYSLCSNRKSLSQQLDCPAGKAAGTSRPTRSLSTAQLVQPSGGLQASVISNIVLMKGQAKGLGFSIVGGKDSIYGPIGIYVKTIFAGGAAAADGRLQEGDEILELNGESMAGLTHQDALQKFKQAKKGLLTLTVRTRLTAPPSLCSHLSPPLCRSLSSSTCITKDSSSFALESPSAPISTAKPNYRIMVEVSLQKEAGVGLGIGLCSVPYFQCISGIFVHTLSPGSVAHLDGRLRCGDEIVEISDSPVHCLTLNEVYTILSHCDPGPVPIIVSRHPDPQVSEQQLKEAVAQAVENTKFGKERHQWSLEGVKRLESSWHGRPTLEKEREKNSAPPHRRAQKVMIRSSSDSSYMSGSPGGSPGSGSAEKPSSDVDISTHSPSLPLAREPVVLSIASSRLPQESPPLPESRDSHPPLRLKKSFEILVRKPMSSKPKPPPRKYFKSDSDPQKSLEERENSSCSSGHTPPTCGQEARELLPLLLPQEDTAGRSPSASAGCPGPGIGPQTKSSTEGEPGWRRASPVTQTSPIKHPLLKRQARMDYSFDTTAEDPWVRISDCIKNLFSPIMSENHGHMPLQPNASLNEEEGTQGHPDGTPPKLDTANGTPKVYKSADSSTVKKGPPVAPKPAWFRQSLKGLRNRASDPRGLPDPALSTQPAPASREHLGSHIRASSSSSSIRQRISSFETFGSSQLPDKGAQRLSLQPSSGEAAKPLGKHEEGRFSGLLGRGAAPTLVPQQPEQVLSSGSPAASEARDPGVSESPPPGRQPNQKTLPPGPDPLLRLLSTQAEESQGPVLKMPSQRARSFPLTRSQSCETKLLDEKTSKLYSISSQVSSAVMKSLLCLPSSISCAQTPCIPKEGASPTSSSNEDSAANGSAETSALDTGFSLNLSELREYTEGLTEAKEDDDGDHSSLQSGQSVISLLSSEELKKLIEEVKVLDEATLKQLDGIHVTILHKEEGAGLGFSLAGGADLENKVITVHRVFPNGLASQEGTIQKGNEVLSINGKSLKGTTHHDALAILRQAREPRQAVIVTRKLTPEAMPDLNSSTDSAASASAASDVSVESTAEATVCTVTLEKMSAGLGFSLEGGKGSLHGDKPLTINRIFKGAASEQSETVQPGDEILQLGGTAMQGLTRFEAWNIIKALPDGPVTIVIRRKSLQSKETTAAGDS

SEQ ID NO: 4226 - RNA, 3999 nt, synthetic construct
  misc_feature 1..3999: note = IL-16__Homo_sapiens__CCDS42069.1
  source 1..3999: mol_type = other RNA
atggagtcgcacagccgcgctggaaagagcagaaaatctgcaaaatttcggtccatctccaggtccctgatgctctgtaatgctaagaccagtgatgatggctctagccctgatgagaaatatcctgatccctttgagatttccttggcccagggcaaggagggaattttccactcatctgtgcagctggcagacacatcggaggctgggcccagcagtgttcctgatctagcactggcctcggaggctgctcaactccaagcagctgggaatgatcgaggcaagacctgtaggaggatattcttcatgaaggaatcttccacagcttcctctcgagaaaagcctggaaaactagaagcacaaagtagtaacttcctgtttcctaaagcctgccaccaaagggcacgcagcaactcaaccagtgttaatccctattgcacaagagaaattgattttccaatgaccaagaaatctgcagcgcccacggacaggcagccttactctctctgcagtaacaggaagtccctctctcaacaattggactgtccagcaggaaaggctgcgggaacttcgagaccaacacggtccctgagcacagctcagctcgtgcagccatctgggggcctccaggcttcagtcatctccaacatcgtgctgatgaagggccaggctaagggtctgggcttcagcatcgttgggggaaaagacagcatttatggccccattgggatttacgtcaaaaccatttttgcagggggagcagcagcagccgatggaaggctacaggaaggtgatgaaattctggagctcaatggtgaatcaatggctggactaacacatcaggatgctttgcagaagttcaagcaagccaaaaaggggctcctcaccctcaccgtgagaacccgcctgacggcgcctccttccctgtgcagccacctgtctcccccactgtgccgctccctgagctccagcacttgtatcaccaaggacagcagctccttcgccttggaaagcccctcggctcccatcagcaccgccaagcccaattacagaatcatggtggaggtttctctgcagaaagaggccggcgtgggcctgggcatcggcctgtgcagcgttccctacttccaatgcatctctggcattttcgtccacacgctgtcaccaggatccgtggcgcacctggacggacgtctccggtgtggggacgagattgtggaaatcagtgattcccctgtgcactgcctgacgctcaatgaagtctacacgatcctgagtcactgtgatcccggtccagtccccatcattgttagccgacatccagacccacaggtctctgaacagcaactcaaagaagctgtggcccaggctgtggaaaacaccaagtttggaaaggagaggcatcagtggagtctggaaggtgtcaaaaggctggaaagcagttggcacgggcggcccaccttggagaaggaacgagagaagaactcagcacccccgcatcgcagggctcagaaggtcatgatccgctccagcagtgacagcagctacatgtctgggtccccagggggaagtcctgggagtggcagtgctgagaagccgtcctctgacgtggacatcagcacacacagccccagcttgcctctggcacgggagccagtggtgctttctatagcatcctccaggctgccccaggagagcccacccctcccagagagccgggacagccacccgccgctgagactgaagaaatcctttgagattttggtgagaaagcctatgtcctccaagcccaagcctccacccagaaaatactttaaaagtgacagtgaccctcagaagagtctggaagagagagagaactcctcatgctcttctgggcacaccccacccacctgtggccaggaagcgagagagctgctgccactgctgctaccacaggaagacacagcagggagaagccctagtgcctctgccggctgcccaggacctggtatcggcccacagaccaagtcctccacagagggcgagccagggtggagaagagccagcccagtgacccaaacatccccgataaaacacccactgcttaagaggcaggctcggatggactatagctttgataccacagccgaagacccttgggttaggatttctgactgcatcaaaaacttatttagccccatcatgagtgagaaccatggccacatgcctctacagcccaatgccagcctgaatgaagaagaagggacacagggccacccagatgggaccccaccaaagctggacaccgccaatggcactcccaaagtttacaagtcagcagacagcagcactgtgaagaaaggtcctcctgtggctcccaagccagcctggtttcgccaaagcttgaaaggtttgaggaatcgtgcttcagacccaagagggctccctgatcctgccttgtccacccagccagcacctgcttccagggagcacctaggatcacacatccgggcctcctcctcctcctcctccatcaggcagagaatcagctcctttgaaacctttggctcctctcaactgcctgacaaaggagcccagagactgagcctccagccctcctctggggaggcagcaaaacctcttgggaagcatgaggaaggacggttttctggactcttggggcgaggggctgcacccactcttgtgccccagcagcctgagcaagtactgtcctcggggtcccctgcagcctccgaggccagagacccaggtgtgtctgagtcccctcccccagggcggcagcccaatcagaaaactctcccccctggcccggacccgctcctaaggctgctgtcaacacaggctgaggaatctcaaggcccagtgctcaagatgcctagccagcgagcacggagcttccccctgaccaggtcccagtcctgtgagacgaagctacttgacgaaaagaccagcaaactctattctatcagcagccaagtgtcatcggctgtcatgaaatccttgctgtgccttccatcttctatctcctgtgcccagactccctgcatccccaaggaaggggcatctccaacatcatcatccaacgaagactcagctgcaaatggttctgctgaaacatctgccttggacacagggttctcgctcaacctttcagagctgagagaatatacagagggtctcacggaagccaaggaagacgatgatggggaccacagttcccttcagtctggtcagtccgttatctccctgctgagctcagaagaattaaaaaaactcatcgaggaggtgaaggttctggatgaagcaacattaaagcaattagacggcatccatgtcaccatcttacacaaggaggaaggtgctggtcttgggttcagcttggcaggaggagcagatctagaaaacaaggtgattacggttcacagagtgtttccaaatgggctggcctcccaggaagggactattcagaagggcaatgaggttctttccatcaacggcaagtctctcaaggggaccacgcaccatgatgccttggccatcctccgccaagctcgagagcccaggcaagctgtgattgtcacaaggaagctgactccagaggccatgcccgacctcaactcctccactgactctgcagcctcagcctctgcagccagtgatgtttctgtagaatctacagcagaggccacagtctgcacggtgacactggagaagatgtcggcagggctgggcttcagcctggaaggagggaagggctccctacacggagacaagcctctcaccattaacaggattttcaaaggagcagcctcagaacaaagtgagacagtccagcctggagatgaaatcttacagctgggtggcactgccatgcagggcctcacacggtttgaagcctggaacatcatcaaggcactgcctgatggacctgtcacgattgtcatcaggagaaaaagcctccagtccaaggaaaccacagctgctggagactcctag

SEQ ID NO: 4227 - RNA, 3999 nt, synthetic construct
  misc_feature 1..3999: note = derived and/or modified sequence opt1 fromIL-16__Homo_sapiens__CCDS42069.1
  source 1..3999: mol_type = other RNA
atggagagccactcccgcgccggcaagagccggaagtccgccaagttccgcagcatctcccggagcctgatgctctgcaacgcgaagacctccgacgacgggagctcccccgacgagaagtacccggaccccttcgagatcagcctggcccagggcaaggaggggatcttccactccagcgtgcagctggccgacacctccgaggccggccccagctccgtccccgacctcgccctggcgagcgaggccgcccagctgcaggccgcggggaacgaccgcggcaagacgtgccggcgcatcttcttcatgaaggagtccagcaccgcctccagccgggagaagccgggcaagctcgaggcccagagctccaacttcctgttccccaaggcctgccaccagcgcgcccggagcaactccaccagcgtgaacccctactgcacccgcgagatcgacttccccatgacgaagaagtccgcggccccgaccgaccggcagccctacagcctgtgctccaaccgcaagagcctctcccagcagctggactgccccgccgggaaggccgccggcaccagccggcccacccgctccctgagcacggcgcagctcgtgcagccgtccgggggcctgcaggccagcgtcatctccaacatcgtgctgatgaaggggcaggccaagggcctcggcttcagcatcgtggggggcaaggactccatctacgggcccatcggcatctacgtcaagaccatcttcgccggcggggccgcggccgccgacggccggctgcaggagggggacgagatcctggagctcaacggcgagagcatggccgggctgacccaccaggacgccctgcagaagttcaagcaggcgaagaagggcctcctgaccctgacggtgcgcacccggctcaccgcccccccctccctgtgcagccacctgagcccgcccctctgccgctccctgagctccagcacctgcatcacgaaggactccagctccttcgccctggagagcccctccgcccccatcagcaccgcgaagccgaactaccggatcatggtggaggtctccctccagaaggaggccggcgtggggctgggcatcgggctgtgcagcgtgccctacttccagtgcatctccggcatcttcgtccacaccctcagccccgggtccgtggcccacctggacggccgcctgcggtgcggcgacgagatcgtggagatcagcgactcccccgtccactgcctcaccctgaacgaggtgtacacgatcctgagccactgcgacccggggcccgtgcccatcatcgtcagccgccaccccgacccgcaggtgtccgagcagcagctcaaggaggccgtggcccaggcggtcgagaacaccaagttcggcaaggagcgccaccagtggagcctggagggggtgaagcggctggagtccagctggcacggccgccccaccctcgagaaggagcgggagaagaactccgcccccccgcaccgccgggcccagaaggtgatgatccgcagctccagcgactccagctacatgtccgggagccccggcggctcccccgggagcggctccgccgagaagcccagctccgacgtcgacatcagcacccactccccgagcctgcccctggcccgggagcccgtggtcctcagcatcgcgtccagccgcctgccccaggagtccccgcccctgcccgagagccgggactcccaccccccgctccgcctgaagaagagcttcgagatcctggtgcggaagcccatgtccagcaagcccaagcccccgccccgcaagtacttcaagtccgacagcgacccccagaagtccctggaggagcgggagaacagctcctgcagctccgggcacacgcccccgacctgcggccaggaggcccgcgagctcctgcccctgctcctgccccaggaggacaccgccggccggagcccctccgccagcgccgggtgcccgggccccgggatcggcccccagaccaagtccagcacggagggggagccgggctggcgccgggcgagccccgtgacccagacctcccccatcaagcaccccctgctcaagcgccaggcccggatggactacagcttcgacaccacggccgaggacccgtgggtccgcatctccgactgcatcaagaacctgttcagccccatcatgtccgagaaccacggccacatgcccctgcagcccaacgccagcctcaacgaggaggaggggacccagggccacccggacgggaccccccccaagctggacaccgcgaacggcacgcccaaggtgtacaagtccgccgacagctccaccgtgaagaaggggccgcccgtcgcccccaagcccgcctggttccgccagagcctgaagggcctccggaaccgcgcctccgacccgcggggcctgcccgaccccgcgctgagcacccagcccgccccggcctcccgcgagcacctcgggagccacatccgggcctccagctccagctccagcatccgccagcggatcagctccttcgagaccttcggcagctcccagctgcccgacaagggggcccagcgcctgagcctccagccctccagcggcgaggcggccaagcccctggggaagcacgaggagggccggttctccggcctgctcgggcgcggcgccgccccgaccctggtgccccagcagcccgagcaggtgctgagctccgggagccccgccgcgtccgaggcccgggacccgggcgtcagcgagtccccccccccggggcgccagcccaaccagaagacgctcccccccggcccggaccccctgctgcggctcctgagcacccaggccgaggagtcccagggccccgtgctgaagatgcccagccagcgcgcccggtccttcccgctcacccgcagccagtcctgcgagaccaagctgctggacgagaagacgagcaagctctacagcatctccagccaggtgtccagcgcggtcatgaagtccctgctgtgcctccccagctccatcagctgcgcccagaccccctgcatccccaaggagggggcctccccgaccagctccagcaacgaggactccgccgccaacggcagcgcggagacctccgccctggacacggggttcagcctgaacctctccgagctgcgggagtacaccgagggcctgaccgaggccaaggaggacgacgacggcgaccacagctccctccagagcgggcagagcgtgatctccctgctgagctccgaggagctcaagaagctgatcgaggaggtgaaggtcctggacgaggccaccctcaagcagctggacggcatccacgtgacgatcctgcacaaggaggagggggccggcctcgggttcagcctggcgggcggcgccgacctggagaacaaggtgatcaccgtccaccgcgtgttccccaacgggctcgcctcccaggagggcaccatccagaaggggaacgaggtgctgagcatcaacggcaagtccctgaaggggaccacgcaccacgacgccctcgccatcctgcggcaggcgcgcgagccccggcaggccgtcatcgtgacccgcaagctgacccccgaggccatgccggacctcaacagctccaccgacagcgccgcctccgcgagcgccgcctccgacgtgagcgtcgagtccacggccgaggcgaccgtgtgcaccgtgaccctggagaagatgagcgccggcctgggcttctccctcgaggggggcaaggggagcctgcacggcgacaagcccctgacgatcaaccgcatcttcaagggggccgccagcgagcagtccgagaccgtccagcccggcgacgagatcctccagctgggcgggaccgccatgcagggcctgacccggttcgaggcgtggaacatcatcaaggccctccccgacgggccggtgacgatcgtgatccgccggaagagcctgcagtccaaggagaccaccgccgccggcgacagctga

SEQ ID NO: 4228 - RNA, 3999 nt, synthetic construct
  misc_feature 1..3999: note = derived and/or modified sequence opt2 fromIL-16__Homo_sapiens__CCDS42069.1
  source 1..3999: mol_type = other RNA
atggagtcccactcccgcgccggcaagtcccgcaagtccgccaagttccgctccatctcccgctccctcatgctctgcaacgccaagacctccgacgacggctcctcccccgacgagaagtaccccgaccccttcgagatctccctcgcccagggcaaggagggcatcttccactcctccgtccagctcgccgacacctccgaggccggcccctcctccgtccccgacctcgccctcgcctccgaggccgcccagctccaggccgccggcaacgaccgcggcaagacctgccgccgcatcttcttcatgaaggagtcctccaccgcctcctcccgcgagaagcccggcaagctcgaggcccagtcctccaacttcctcttccccaaggcctgccaccagcgcgcccgctccaactccacctccgtcaacccctactgcacccgcgagatcgacttccccatgaccaagaagtccgccgcccccaccgaccgccagccctactccctctgctccaaccgcaagtccctctcccagcagctcgactgccccgccggcaaggccgccggcacctcccgccccacccgctccctctccaccgcccagctcgtccagccctccggcggcctccaggcctccgtcatctccaacatcgtcctcatgaagggccaggccaagggcctcggcttctccatcgtcggcggcaaggactccatctacggccccatcggcatctacgtcaagaccatcttcgccggcggcgccgccgccgccgacggccgcctccaggagggcgacgagatcctcgagctcaacggcgagtccatggccggcctcacccaccaggacgccctccagaagttcaagcaggccaagaagggcctcctcaccctcaccgtccgcacccgcctcaccgcccccccctccctctgctcccacctctccccccccctctgccgctccctctcctcctccacctgcatcaccaaggactcctcctccttcgccctcgagtccccctccgcccccatctccaccgccaagcccaactaccgcatcatggtcgaggtctccctccagaaggaggccggcgtcggcctcggcatcggcctctgctccgtcccctacttccagtgcatctccggcatcttcgtccacaccctctcccccggctccgtcgcccacctcgacggccgcctccgctgcggcgacgagatcgtcgagatctccgactcccccgtccactgcctcaccctcaacgaggtctacaccatcctctcccactgcgaccccggccccgtccccatcatcgtctcccgccaccccgacccccaggtctccgagcagcagctcaaggaggccgtcgcccaggccgtcgagaacaccaagttcggcaaggagcgccaccagtggtccctcgagggcgtcaagcgcctcgagtcctcctggcacggccgccccaccctcgagaaggagcgcgagaagaactccgcccccccccaccgccgcgcccagaaggtcatgatccgctcctcctccgactcctcctacatgtccggctcccccggcggctcccccggctccggctccgccgagaagccctcctccgacgtcgacatctccacccactccccctccctccccctcgcccgcgagcccgtcgtcctctccatcgcctcctcccgcctcccccaggagtccccccccctccccgagtcccgcgactcccacccccccctccgcctcaagaagtccttcgagatcctcgtccgcaagcccatgtcctccaagcccaagccccccccccgcaagtacttcaagtccgactccgacccccagaagtccctcgaggagcgcgagaactcctcctgctcctccggccacaccccccccacctgcggccaggaggcccgcgagctcctccccctcctcctcccccaggaggacaccgccggccgctccccctccgcctccgccggctgccccggccccggcatcggcccccagaccaagtcctccaccgagggcgagcccggctggcgccgcgcctcccccgtcacccagacctcccccatcaagcaccccctcctcaagcgccaggcccgcatggactactccttcgacaccaccgccgaggacccctgggtccgcatctccgactgcatcaagaacctcttctcccccatcatgtccgagaaccacggccacatgcccctccagcccaacgcctccctcaacgaggaggagggcacccagggccaccccgacggcaccccccccaagctcgacaccgccaacggcacccccaaggtctacaagtccgccgactcctccaccgtcaagaagggcccccccgtcgcccccaagcccgcctggttccgccagtccctcaagggcctccgcaaccgcgcctccgacccccgcggcctccccgaccccgccctctccacccagcccgcccccgcctcccgcgagcacctcggctcccacatccgcgcctcctcctcctcctcctccatccgccagcgcatctcctccttcgagaccttcggctcctcccagctccccgacaagggcgcccagcgcctctccctccagccctcctccggcgaggccgccaagcccctcggcaagcacgaggagggccgcttctccggcctcctcggccgcggcgccgcccccaccctcgtcccccagcagcccgagcaggtcctctcctccggctcccccgccgcctccgaggcccgcgaccccggcgtctccgagtcccccccccccggccgccagcccaaccagaagaccctcccccccggccccgaccccctcctccgcctcctctccacccaggccgaggagtcccagggccccgtcctcaagatgccctcccagcgcgcccgctccttccccctcacccgctcccagtcctgcgagaccaagctcctcgacgagaagacctccaagctctactccatctcctcccaggtctcctccgccgtcatgaagtccctcctctgcctcccctcctccatctcctgcgcccagaccccctgcatccccaaggagggcgcctcccccacctcctcctccaacgaggactccgccgccaacggctccgccgagacctccgccctcgacaccggcttctccctcaacctctccgagctccgcgagtacaccgagggcctcaccgaggccaaggaggacgacgacggcgaccactcctccctccagtccggccagtccgtcatctccctcctctcctccgaggagctcaagaagctcatcgaggaggtcaaggtcctcgacgaggccaccctcaagcagctcgacggcatccacgtcaccatcctccacaaggaggagggcgccggcctcggcttctccctcgccggcggcgccgacctcgagaacaaggtcatcaccgtccaccgcgtcttccccaacggcctcgcctcccaggagggcaccatccagaagggcaacgaggtcctctccatcaacggcaagtccctcaagggcaccacccaccacgacgccctcgccatcctccgccaggcccgcgagccccgccaggccgtcatcgtcacccgcaagctcacccccgaggccatgcccgacctcaactcctccaccgactccgccgcctccgcctccgccgcctccgacgtctccgtcgagtccaccgccgaggccaccgtctgcaccgtcaccctcgagaagatgtccgccggcctcggcttctccctcgagggcggcaagggctccctccacggcgacaagcccctcaccatcaaccgcatcttcaagggcgccgcctccgagcagtccgagaccgtccagcccggcgacgagatcctccagctcggcggcaccgccatgcagggcctcacccgcttcgaggcctggaacatcatcaaggccctccccgacggccccgtcaccatcgtcatccgccgcaagtccctccagtccaaggagaccaccgccgccggcgactcctga

SEQ ID NO: 4229 - RNA, 3999 nt, synthetic construct
  misc_feature 1..3999: note = derived and/or modified sequence opt3 fromIL-16__Homo_sapiens__CCDS42069.1
  source 1..3999: mol_type = other RNA
atggagagccactccagagccggcaagtctaggaaatcagctaagttccggagtatcagccgctccctgatgctctgcaacgcaaaaacctctgacgatgggtcgtcacccgacgaaaagtaccctgatccatttgagattagccttgcccagggaaaagaaggtatattccatagttccgtgcaactggcggacacatctgaggctggcccgagctccgtccccgatttggccttagcatcagaagccgctcagctgcaggcagccgggaatgaccgaggaaagacttgtcgtagaatctttttcatgaaggagagtagcacggcttcttccagggagaaacctggcaagctagaagcccagtcaagcaactttctcttcccaaaagcgtgccaccaacgggcacgcagtaattctacctccgttaacccctattgtacaagagagattgattttcctatgactaagaaaagcgccgctccaaccgacaggcagccctactcgctgtgctctaatcggaagtccctttcacagcagctggattgtcctgccggtaaggcagctgggacaagtcgcccaacccgaagcctttccactgcccaactcgtgcagccgtctggaggcctgcaggcgagcgtaatctcaaacattgtgctgatgaaaggccaggccaaggggctcggattcagtatcgtcggtggcaaagactccatatatgggcccatcggaatttacgtgaagacaatctttgcaggcggtgctgccgctgccgatgggagattacaagaaggagacgagattctggagcttaatggcgaaagcatggcaggcttgacccatcaggatgccctgcagaaattcaagcaagctaaaaaggggctactcacgctgactgttaggacccggcttacagcgcctccatctctgtgctcacacttgagtccccctctctgtcgtagcctgtcctcttcgacttgcatcaccaaggacagctcctcatttgcattagagagtccatctgcccccataagcacagctaaaccgaactatcgcattatggtggaagtctccctgcagaaggaggccggagtgggtctcggcatcgggctttgttcagtaccttacttccagtgcattagcggaatctttgttcataccctgtctcccggctccgtggcacacttggacggtagactaaggtgtggggatgaaatcgtcgagattagtgacagcccagtgcactgcctgacgctcaatgaggtgtatactatactgtctcattgcgatcctggccccgtcccaatcattgtttcccggcaccccgaccctcaggtgtcagaacaacagcttaaagaggccgtagctcaggccgtggaaaacacaaagttcggaaaagagcgacatcagtggagtctggaaggcgtcaagcgcttggagagctcgtggcacgggagaccaaccctcgagaaggaaagggagaaaaattccgcaccgccccaccggcgcgcgcaaaaggtgatgatcagatctagctcagatagttcctacatgtctggaagccctggtggctccccagggtcaggaagcgctgaaaaacccagttctgacgttgatatatccactcatagcccttcgctgccattagccagggagcccgtggtcctgtcaattgcatctagtcgtctaccgcaggaatcccctccactccccgagagccgggactctcaccctcccctgcgacttaagaaatccttcgagatcttggtgagaaagccaatgagctcaaagcctaaacccccaccgaggaagtactttaaaagtgatagcgaccctcagaagtctctggaggagcgcgaaaactcctcatgtagtagcggccatacacccccaacctgcggtcaggaggcccgggagctcctgccccttctgttgcctcaagaagatacggctgggagatccccatctgcctcggcaggctgtcccggacctggcatcgggccgcagaccaaaagctcaacagagggagaaccaggttggaggcgcgcttcccccgtaactcagaccagtcctattaagcacccactcctgaagcgacaggcccggatggactattctttcgacacaactgcggaggatccctgggttcgtatcagcgactgcattaaaaatttattttcccctataatgtcagaaaaccatggccacatgccgctgcaacccaatgcctctctaaacgaggaggaagggacccagggacacccagatggcacacctcccaagctcgacaccgctaacggtactccaaaagtgtacaagagcgcagatagttccacggtcaaaaaggggcctcccgtggccccaaaaccggcttggttcagacagagcctgaagggccttaggaatcgcgcctctgaccctcggggattgcccgatccagcactgtcaacacaacccgcgcctgcctccagagagcatctcggcagtcacatcagggctagctcgtcttccagctcaattcgacagcgcatcagttcttttgaaaccttcgggtccagccagctgccagacaagggagcccagcggttatcactgcaacccagtagcggcgaggcagctaaacctcttggtaagcatgaagaggggagattttccggattgctcggcaggggtgccgcaccgactctggtcccacagcagcccgaacaggtgctatctagcggctcccctgccgcttcagaagcgcgtgatcccggggtttctgagagtccacctcccggacgccaaccaaaccagaaaaccctgcctccgggccccgacccactcctgcggcttttgtcgacacaggccgaagagagccaggggcctgtgctgaagatgccctcccaaagagcaaggtctttcccattaacccgatcacagagctgtgaaactaaactcctggatgagaagacatccaagttgtatagtatctctagccaggtatcatccgctgtcatgaaaagtctgttgtgcctccctagctctatttcctgtgcccaaacgccctgcataccgaaggagggagcctcaccaaccagctcgtctaatgaagacagtgctgcaaacggctccgccgagactagcgcgctggatacaggtttttcactaaatctgtccgaactccgggagtacaccgaggggctgacagaagctaaagaggacgacgatggagaccactctagccttcagagtggccagtccgtgatcagcttgctgtcttcagaagagttaaagaaactcattgaagaggttaaggtgctggatgaggccactcttaagcagctggacggtatccacgtcaccattctacataaagaagagggcgcagggctcggattcagtctggccggcggggctgatttggaaaacaaggtgatcacggtacaccgcgtgtttcctaatggactggcatcccaagagggcaccatacagaaaggtaacgaagttttaagcatcaatgggaagtctctcaaaggaacaactcatcacgacgccctggcgattcttagacaggctagggagccccggcaggccgtcatcgtgacccgaaagctgacaccagaggcaatgcccgatttgaactcgtcaactgacagcgccgcttccgccagtgcagcttctgatgtgagcgtcgaatccaccgccgaggcgacggtttgtacagtgaccctcgaaaagatgtcagccggcctgggtttcagtctagagggcgggaaaggatctctgcatggcgacaagcctcttactattaatagaatctttaaaggggcagctagcgaacaatccgagacagtgcagccgggagatgagatactccagctgggcggtaccgccatgcaggggttgactcgcttcgaggcttggaacattatcaaggcactgcccgacggaccagtaaccattgtcatcaggcgtaaatcattacaaagcaaggaaacaacggccgccggcgattcttga

SEQ ID NO: 4230 - RNA, 3999 nt, synthetic construct
  misc_feature 1..3999: note = derived and/or modified sequence opt4 fromIL-16__Homo_sapiens__CCDS42069.1
  source 1..3999: mol_type = other RNA
atggagagccacagcagagccggcaagagcagaaagagcgccaagttcagaagcatcagcagaagcctgatgctgtgcaacgccaagaccagcgacgacggcagcagccccgacgagaagtaccccgaccccttcgagatcagcctggcccagggcaaggagggcatcttccacagcagcgtgcagctggccgacaccagcgaggccggccccagcagcgtgcccgacctggccctggccagcgaggccgcccagctgcaggccgccggcaacgacagaggcaagacctgcagaagaatcttcttcatgaaggagagcagcaccgccagcagcagagagaagcccggcaagctggaggcccagagcagcaacttcctgttccccaaggcctgccaccagagagccagaagcaacagcaccagcgtgaacccctactgcaccagagagatcgacttccccatgaccaagaagagcgccgcccccaccgacagacagccctacagcctgtgcagcaacagaaagagcctgagccagcagctggactgccccgccggcaaggccgccggcaccagcagacccaccagaagcctgagcaccgcccagctggtgcagcccagcggcggcctgcaggccagcgtgatcagcaacatcgtgctgatgaagggccaggccaagggcctgggcttcagcatcgtgggcggcaaggacagcatctacggccccatcggcatctacgtgaagaccatcttcgccggcggcgccgccgccgccgacggcagactgcaggagggcgacgagatcctggagctgaacggcgagagcatggccggcctgacccaccaggacgccctgcagaagttcaagcaggccaagaagggcctgctgaccctgaccgtgagaaccagactgaccgccccccccagcctgtgcagccacctgagcccccccctgtgcagaagcctgagcagcagcacctgcatcaccaaggacagcagcagcttcgccctggagagccccagcgcccccatcagcaccgccaagcccaactacagaatcatggtggaggtgagcctgcagaaggaggccggcgtgggcctgggcatcggcctgtgcagcgtgccctacttccagtgcatcagcggcatcttcgtgcacaccctgagccccggcagcgtggcccacctggacggcagactgagatgcggcgacgagatcgtggagatcagcgacagccccgtgcactgcctgaccctgaacgaggtgtacaccatcctgagccactgcgaccccggccccgtgcccatcatcgtgagcagacaccccgacccccaggtgagcgagcagcagctgaaggaggccgtggcccaggccgtggagaacaccaagttcggcaaggagagacaccagtggagcctggagggcgtgaagagactggagagcagctggcacggcagacccaccctggagaaggagagagagaagaacagcgcccccccccacagaagagcccagaaggtgatgatcagaagcagcagcgacagcagctacatgagcggcagccccggcggcagccccggcagcggcagcgccgagaagcccagcagcgacgtggacatcagcacccacagccccagcctgcccctggccagagagcccgtggtgctgagcatcgccagcagcagactgccccaggagagcccccccctgcccgagagcagagacagccacccccccctgagactgaagaagagcttcgagatcctggtgagaaagcccatgagcagcaagcccaagcccccccccagaaagtacttcaagagcgacagcgacccccagaagagcctggaggagagagagaacagcagctgcagcagcggccacaccccccccacctgcggccaggaggccagagagctgctgcccctgctgctgccccaggaggacaccgccggcagaagccccagcgccagcgccggctgccccggccccggcatcggcccccagaccaagagcagcaccgagggcgagcccggctggagaagagccagccccgtgacccagaccagccccatcaagcaccccctgctgaagagacaggccagaatggactacagcttcgacaccaccgccgaggacccctgggtgagaatcagcgactgcatcaagaacctgttcagccccatcatgagcgagaaccacggccacatgcccctgcagcccaacgccagcctgaacgaggaggagggcacccagggccaccccgacggcaccccccccaagctggacaccgccaacggcacccccaaggtgtacaagagcgccgacagcagcaccgtgaagaagggcccccccgtggcccccaagcccgcctggttcagacagagcctgaagggcctgagaaacagagccagcgaccccagaggcctgcccgaccccgccctgagcacccagcccgcccccgccagcagagagcacctgggcagccacatcagagccagcagcagcagcagcagcatcagacagagaatcagcagcttcgagaccttcggcagcagccagctgcccgacaagggcgcccagagactgagcctgcagcccagcagcggcgaggccgccaagcccctgggcaagcacgaggagggcagattcagcggcctgctgggcagaggcgccgcccccaccctggtgccccagcagcccgagcaggtgctgagcagcggcagccccgccgccagcgaggccagagaccccggcgtgagcgagagccccccccccggcagacagcccaaccagaagaccctgccccccggccccgaccccctgctgagactgctgagcacccaggccgaggagagccagggccccgtgctgaagatgcccagccagagagccagaagcttccccctgaccagaagccagagctgcgagaccaagctgctggacgagaagaccagcaagctgtacagcatcagcagccaggtgagcagcgccgtgatgaagagcctgctgtgcctgcccagcagcatcagctgcgcccagaccccctgcatccccaaggagggcgccagccccaccagcagcagcaacgaggacagcgccgccaacggcagcgccgagaccagcgccctggacaccggcttcagcctgaacctgagcgagctgagagagtacaccgagggcctgaccgaggccaaggaggacgacgacggcgaccacagcagcctgcagagcggccagagcgtgatcagcctgctgagcagcgaggagctgaagaagctgatcgaggaggtgaaggtgctggacgaggccaccctgaagcagctggacggcatccacgtgaccatcctgcacaaggaggagggcgccggcctgggcttcagcctggccggcggcgccgacctggagaacaaggtgatcaccgtgcacagagtgttccccaacggcctggccagccaggagggcaccatccagaagggcaacgaggtgctgagcatcaacggcaagagcctgaagggcaccacccaccacgacgccctggccatcctgagacaggccagagagcccagacaggccgtgatcgtgaccagaaagctgacccccgaggccatgcccgacctgaacagcagcaccgacagcgccgccagcgccagcgccgccagcgacgtgagcgtggagagcaccgccgaggccaccgtgtgcaccgtgaccctggagaagatgagcgccggcctgggcttcagcctggagggcggcaagggcagcctgcacggcgacaagcccctgaccatcaacagaatcttcaagggcgccgccagcgagcagagcgagaccgtgcagcccggcgacgagatcctgcagctgggcggcaccgccatgcagggcctgaccagattcgaggcctggaacatcatcaaggccctgcccgacggccccgtgaccatcgtgatcagaagaaagagcctgcagagcaaggagaccaccgccgccggcgacagctga

SEQ ID NO: 4231 - RNA, 3999 nt, synthetic construct
  misc_feature 1..3999: note = derived and/or modified sequence opt5 fromIL-16__Homo_sapiens__CCDS42069.1
  source 1..3999: mol_type = other RNA
atggagagccactccagagccggcaagtctcggaaaagcgctaagttccgctccatctctagaagcctgatgctctgcaacgccaaaacctccgacgatgggtctagccccgacgaaaagtaccctgatccgtttgagatttccctggcgcagggaaaagaaggcatcttccatagctctgtgcaacttgctgacacatccgaggccgggcccagctctgtccctgatctggccctcgcttccgaagccgctcagctgcaggccgcgggaaatgaccggggcaagacgtgtcgcagaatctttttcatgaaggagagctctaccgcctccagccgggagaaacccgggaaacttgaagctcagtcctctaactttctgttccctaaggcctgccaccaacgcgctagaagcaattccacaagcgttaacccctattgtacccgggagattgattttcctatgacaaagaaatctgccgcgccgaccgaccgccagccctactccctctgcagcaatagaaagtctctgagccagcagctggattgtcctgccggaaaggctgccggcacatcccggcccacccgctctctcagcacggctcaactggtgcagccttccggcgggcttcaggccagcgtgatttctaacatcgtcctgatgaaaggacaggccaagggcctcgggttctccatcgtgggaggcaaagacagcatttatgggcccatcggaatttacgttaagaccatctttgctggcggcgcggccgctgccgatgggagactgcaagaaggagacgagattcttgagctgaatggcgaatctatggccgggctcacacatcaggatgctctgcagaaattcaagcaagccaaaaagggactgctcaccctgacagtgcggacccgccttacggcgccgccttccctgtgcagccacctctcccctcccctgtgtagatctcttagctcctctacatgcatcaccaaggacagctccagctttgctctggagtctccctccgcccccattagcacagccaaacctaactatcggatcatggtcgaagtgtctctccagaaggaggctggcgttgggctgggaatcggcctgtgttccgtgccgtacttccagtgcattagcggcatctttgtccataccctctctcccgggagcgtggcccacctggacggaagacttcgctgtggcgatgaaattgtggagatctccgacagccctgtccactgcctgaccctcaatgaggtttatacaattctgtctcattgcgatcccgggcctgtgcccatcatcgtgtcccggcacccggaccctcaggtcagcgaacaacagcttaaagaggctgtggcccaggcggttgaaaacacgaagttcggaaaagagagacatcagtggtccctggaaggcgtgaagcgcctcgagtctagctggcacgggcggcccaccctggagaaggaaagagagaaaaattccgcccctccccaccgccgggctcaaaaggtcatgattagatctagctccgattctagctacatgtccggcagccctggaggctctcccgggtccggaagcgccgaaaaaccgtcttccgacgtggatatcagcacacattctccttccctgcccctcgctcgcgagcccgttgtgctgagcattgcctccagccggcttcctcaggaatctccgcccctgcctgagagcagagactcccatccccctctccgcctgaagaaatctttcgagatcctggtccggaagcccatgagctccaagcctaaacccccgcctagaaagtactttaaatctgatagcgacccccagaagtcccttgaggagcgggaaaactctagctgttccagcggccacacccctcccacatgcgggcaggaggcgcgcgagctcctgccgctgctcctgcctcaagaagataccgccggaagatctccctccgctagcgccggctgtcctgggcccggcattggaccccagacgaaatcttccacagagggcgaacctgggtggcggagagctagcccggtgacccagacctcccccatcaagcaccctcttctgaagcgccaggcccggatggactattctttcgacacaaccgccgaggatccctgggtcagaatcagcgactgcattaaaaatctcttttcccctatcatgagcgaaaaccatggacacatgcccctgcaacctaatgcttctctgaacgaggaggaaggcacacaggggcacccggatggaacgccccctaaacttgacaccgcgaacggcacacccaaggtgtacaagtccgccgatagctctaccgttaaaaaggggcctcccgtggctccgaaacctgcctggttccgccagagcctcaagggcctgagaaatcgggcctccgacccccgcggactgcccgatcctgctctctctacacaacccgcccctgcgagcagagagcatctgggctcccacattcgggcttctagctccagctcctccatccgccagagaattagctcctttgaaaccttcgggtctagccagcttccggacaagggagcccagcggctgtccctccaaccctctagcggcgaggccgctaaacctctggggaagcatgaagagggacgcttttccggcctgcttgggagaggcgccgcgcccacgctcgtccctcagcagcccgaacaggtgctgagctctggatccccggctgccagcgaagcccgggatcctggcgtttctgagtctccccctcccgggcgccaacctaaccagaaaaccctgcccccgggacctgaccccctcctgagacttctgagcacacaggctgaagagtctcagggccccgtgctcaagatgcctagccaacgggccagatccttcccgctgacccgctctcagagctgtgaaacaaaactgcttgatgagaagacctccaagctctatagcatctcctctcaggtcagctccgctgtgatgaaatctctgctgtgcctccccagctccatttcttgtgcccaaacgccttgcatccccaaggagggggcgagccctacatccagctctaatgaagactccgccgctaacggaagcgccgagacctctgctctggatacaggcttttcccttaatctgagcgaactccgggagtacaccgagggcctgaccgaagccaaagaggacgacgatggggaccactcttccctgcagagcggacagtccgtgatcagccttctgtctagcgaggaactcaagaaactgattgaagaggttaaggtcctcgatgaggccacactgaagcagcttgacggcatccacgtgacgattctgcataaagaagagggggctggactcggcttctccctggctgggggagccgatctggaaaacaaggtgatcaccgtccacagagtgtttcccaatggccttgcttctcaagagggcacaattcagaaagggaacgaagttctgagcatcaatggaaagtccctcaaaggcaccacacatcacgacgccctggccatcctccgccaggctcgggagcctagacaggccgtgattgtcacccgcaagctgacgccggaggcgatgcccgatcttaactctagcacagactccgctgcctctgccagcgctgcctccgatgtgagcgttgaatctaccgcggaggctaccgtgtgtacagtcaccctggaaaagatgtccgccgggctcggattcagcctggagggcgggaaaggatctctgcatggcgacaagcctcttacaatcaatcggatttttaaaggcgccgcttccgaacaaagcgagacggtgcagcccggggatgagatcctgcagctcggaggcaccgccatgcaggggctgacaagattcgaagcgtggaacattatcaaggccctccctgacggacccgttaccatcgtgattcgccggaaatccctgcaatctaaggagacaaccgcggccggcgatagctga

SEQ ID NO: 4232 - RNA, 3999 nt, synthetic construct
  misc_feature 1..3999: note = derived and/or modified sequence opt6 fromIL-16__Homo_sapiens__CCDS42069.1
  source 1..3999: mol_type = other RNA
atggaatcacattcaagagcgggtaaatctcgaaaatctgcgaaattccgctccatttcaagaagtctaatgttatgcaacgcgaaaacatcggatgacggcagctcgccagatgaaaaatatccagatcccttcgaaatttcgttagcccaaggaaaggaaggaatctttcatagctcagttcaactcgctgatacttctgaagccggacctagctcagtaccggacctcgctctcgctagcgaagctgcacaactgcaagccgcaggcaatgatcgaggaaaaacttgtaggagaatcttttttatgaaggagagcagtactgcctcatctagagaaaaacctggaaaattagaagcacaatcgtcaaattttttgttccctaaagcatgtcaccagcgagctcgatcaaattctacatcagtcaacccatactgtacacgagaaatagattttccgatgactaaaaaatcggcagctccaactgatcgacaaccttattcactatgctcaaatagaaaatctctgagtcaacaacttgattgtccagccggaaaagccgccggaacctcaaggccgacccgaagcctatctactgcacaattagtacaaccatcagggggtttacaagcctcggtaatttcaaatatagtgttaatgaaaggacaagcaaaggggttaggcttcagcattgtcggtggaaaggatagtatatatggcccgatagggatatacgtaaaaacaatttttgctgggggtgccgccgccgctgatggaagactccaagaaggagacgagatactagaactaaacggcgagagcatggccggattgacccaccaagacgctctacaaaaatttaaacaagctaaaaaagggctcttaacattaacggtaaggacaagactaacagcaccgccttcgctatgctcacaccttagtcctcccttatgtagatctctctccagttcaacatgtatcacaaaagatagttcatcttttgcactagaatcccctagtgctcccatctcaactgccaaaccaaattatagaattatggtagaagtaagcttacaaaaagaggcaggggtgggactaggaataggattatgcagcgtcccctacttccaatgcatatccggaatcttcgtccatacactatctcctggctcagtggcacacctcgatggaagacttagatgtggtgatgaaattgtagaaatatccgatagtcctgtacactgtctaactttaaatgaagtttacactatactttctcactgtgatccaggaccagtgcctatcatagtatctcgacacccagatccacaagtatcagaacaacaattgaaagaagcagtagcacaagcagtggaaaatactaaatttggaaaagaaagacaccagtggtcattagaaggcgtcaaacgcttggaatctagctggcatggcagaccaacattagagaaagagagagaaaagaactccgcacctccccatagaagagcacagaaagtaatgatccgtagcagcagcgacagttcatacatgtcaggtagtccaggaggtagtccaggaagtggatccgcagaaaaaccatcatcagatgtcgacataagtacccatagtccatcacttcccctagcaagggaacctgttgtattatcaatagcatccagccgattaccccaagaatcaccaccacttccagaatctagagattcacacccccccttacgcttaaaaaaatcgtttgaaattttagtacgcaaaccaatgtcttctaaaccaaaaccaccacctagaaaatattttaagtcagattcagacccacaaaaatctttagaagaacgcgaaaatagttcatgttcatccggccacacaccacccacgtgtggacaagaagctagagaactattaccacttcttctaccccaagaagatacagcaggtagatcaccatctgcatcagcgggctgtccaggcccgggaattggtcctcaaaccaaatcaagtacagaaggagaaccaggttggagaagagcaagtccagtcacacaaacaagccctataaaacatcctttactaaagcgacaggcgcgaatggactattcctttgatactacagctgaagacccatgggtccgaatatctgactgcataaagaatttgtttagtccaataatgtcagaaaaccatggacatatgccgttacaaccaaacgcatcattaaacgaagaagaaggaactcaaggtcatccagacggtactccacccaaattagatacagcaaatggaactccaaaagtatataaatcagcagattcaagtaccgtaaaaaagggtccaccagtagcacccaaacctgcatggttcaggcaaagtttgaaaggcctccgaaaccgagccagcgaccctagaggactgccagatcctgctctatcgactcaaccagctccagcatccagggaacacttaggttcacacattcgagcttctagtagttcctcatccattaggcaacgaatatctagtttcgaaacatttggaagttcccaactaccagacaaaggtgctcaacgcttgtccctacaaccctcctcaggcgaagcagcaaaaccattaggcaaacacgaagaaggtagattcagtggtctactagggagaggagcagcacccacactcgtaccacaacaaccagaacaagttttatccagtgggtcacccgcagcatcagaagcacgagatcccggcgttagtgagtctccacctccaggcagacagcctaatcaaaaaacactacctcctggtcctgatccactactaagattattatcaacccaagctgaagaatctcaaggcccggttttgaaaatgccttcgcagagggcaaggtcatttcctcttacccgatctcaaagctgcgagacaaaactactagatgaaaaaacctccaaattatattccatatcatcacaggtatctagtgcagttatgaaatctttactctgtctaccgagttcaatttcatgcgctcaaacaccatgtatccccaaagaaggcgcatcaccgacatcatccagtaatgaagattctgctgcaaacggatccgcagaaacatctgcattagacaccggcttttccctaaatttaagtgaactaagagaatacacagagggactaacagaagcaaaggaagacgacgatggtgatcattcatccctacaatccgggcagtccgtaataagtctattatcatctgaagaattaaaaaagctaattgaagaagtaaaagtattagatgaagctacacttaaacaattagacggaatccacgttaccattttgcataaagaagagggtgcaggactaggtttcagtctagcaggtggcgcagatttagaaaataaggttataaccgtacatagagtcttcccaaacggcttagcctctcaagaaggaacaatccaaaaaggaaatgaagttctatccatcaacggaaaaagcctaaaaggaacaacacaccatgacgcacttgccatactaagacaagcaagagaaccaagacaagcagtaatagtaacgcgtaaattaactcctgaagcaatgcccgatctcaattcgagtactgactcagcggcaagcgcctcagccgcaagtgatgtctcagtagaatcaacagccgaagcgacagtttgcacagtaacactcgaaaaaatgagtgcaggactgggattttcattagaaggaggcaagggtagcctacacggagataaaccactaacaataaatagaatttttaaaggagctgcatcagaacaaagtgaaaccgtacaaccgggtgacgaaattctacaattaggtgggacagccatgcaaggattaactaggttcgaagcatggaacataattaaagctctcccggacggaccagtcactatagtaataagaagaaaatcactccaatcgaaagaaacaactgcggcgggggactcctga

SEQ ID NO: 4233 - protein, 155 aa, synthetic construct
  REGION 1..155: note = IL-17A__Homo_sapiens__Q16552
MTPGKTSLVSLLLLLSLEAIVKAGITIPRNPGCPNSEDKNFPRTVMVNLNIHNRNTNTNPKRSSDYYNRSTSPWNLHRNEDPERYPSVIWEAKCRHLGCINADGNVDYHMNSVPIQQEILVLRREPPHCPNSFRLEKILVSVGCTCVTPIVHHVA

SEQ ID NO: 4234 - RNA, 468 nt, synthetic construct
  misc_feature 1..468: note = IL-17A__Homo_sapiens__AAC50341
  source 1..468: mol_type = other RNA
atgactcctgggaagacctcattggtgtcactgctactgctgctgagcctggaggccatagtgaaggcaggaatcacaatcccacgaaatccaggatgcccaaattctgaggacaagaacttcccccggactgtgatggtcaacctgaacatccataaccggaataccaataccaatcccaaaaggtcctcagattactacaaccgatccacctcaccttggaatctccaccgcaatgaggaccctgagagatatccctctgtgatctgggaggcaaagtgccgccacttgggctgcatcaacgctgatgggaacgtggactaccacatgaactctgtccccatccagcaagagatcctggtcctgcgcagggagcctccacactgccccaactccttccggctggagaagatactggtgtccgtgggctgcacctgtgtcaccccgattgtccaccatgtggcctaa

SEQ ID NO: 4235 - RNA, 468 nt, synthetic construct
  misc_feature 1..468: note = derived and/or modified sequence opt1 fromIL-17A__Homo_sapiens__AAC50341
  source 1..468: mol_type = other RNA
atgacccccggcaagaccagcctggtgtccctcctgctgctcctgagcctggaggccatcgtcaaggccgggatcaccatcccgcgcaaccccggctgccccaactccgaggacaagaacttcccccggaccgtgatggtgaacctcaacatccacaaccgcaacaccaacaccaacccgaagcggagctccgactactacaaccgcagcacgtccccctggaacctgcaccggaacgaggaccccgagcgctaccccagcgtcatctgggaggcgaagtgccggcacctggggtgcatcaacgccgacggcaacgtggactaccacatgaactccgtgccgatccagcaggagatcctcgtcctgcgccgggagccgccccactgccccaacagcttccgcctggagaagatcctcgtgtccgtggggtgcacgtgcgtcacccccatcgtgcaccacgtggcctga

SEQ ID NO: 4236 - RNA, 468 nt, synthetic construct
  misc_feature 1..468: note = derived and/or modified sequence opt2 fromIL-17A__Homo_sapiens__AAC50341
  source 1..468: mol_type = other RNA
atgacccccggcaagacctccctcgtctccctcctcctcctcctctccctcgaggccatcgtcaaggccggcatcaccatcccccgcaaccccggctgccccaactccgaggacaagaacttcccccgcaccgtcatggtcaacctcaacatccacaaccgcaacaccaacaccaaccccaagcgctcctccgactactacaaccgctccacctccccctggaacctccaccgcaacgaggaccccgagcgctacccctccgtcatctgggaggccaagtgccgccacctcggctgcatcaacgccgacggcaacgtcgactaccacatgaactccgtccccatccagcaggagatcctcgtcctccgccgcgagcccccccactgccccaactccttccgcctcgagaagatcctcgtctccgtcggctgcacctgcgtcacccccatcgtccaccacgtcgcctga

SEQ ID NO: 4237 - RNA, 468 nt, synthetic construct
  misc_feature 1..468: note = derived and/or modified sequence opt3 fromIL-17A__Homo_sapiens__AAC50341
  source 1..468: mol_type = other RNA
atgacccccggcaagacaagcctggtgtccctccttctgttgttatctctggaggccatcgtcaaagctgggattactatacctagaaacccaggatgccccaattcagaagacaagaacttcccgaggacggttatggtgaatctaaacatccacaatcggaacaccaatacaaaccctaaacgcagtagcgattactataatcgatccacttctccatggaacctccatcgtaatgaggaccccgaaagatacccttcggtaatttgggaggcaaagtgtaggcacctgggttgcatcaacgccgatggcaatgtggactatcatatgaactcagtcccaattcagcaagaaatccttgtgctgcggcgcgagccccctcactgtccaaatagctttagattggagaaaatactcgttagtgtggggtgcacctgtgtcacaccgatcgtgcatcacgtagcgtga

SEQ ID NO: 4238 - RNA, 468 nt, synthetic construct
  misc_feature 1..468: note = derived and/or modified sequence opt4 fromIL-17A__Homo_sapiens__AAC50341
  source 1..468: mol_type = other RNA
atgacccccggcaagaccagcctggtgagcctgctgctgctgctgagcctggaggccatcgtgaaggccggcatcaccatccccagaaaccccggctgccccaacagcgaggacaagaacttccccagaaccgtgatggtgaacctgaacatccacaacagaaacaccaacaccaaccccaagagaagcagcgactactacaacagaagcaccagcccctggaacctgcacagaaacgaggaccccgagagataccccagcgtgatctgggaggccaagtgcagacacctgggctgcatcaacgccgacggcaacgtggactaccacatgaacagcgtgcccatccagcaggagatcctggtgctgagaagagagcccccccactgccccaacagcttcagactggagaagatcctggtgagcgtgggctgcacctgcgtgacccccatcgtgcaccacgtggcctga

SEQ ID NO: 4239 - RNA, 468 nt, synthetic construct
  misc_feature 1..468: note = derived and/or modified sequence opt5 fromIL-17A__Homo_sapiens__AAC50341
  source 1..468: mol_type = other RNA
atgacccccggcaagacaagcctggtgtccctcctgcttctgctctctctggaggccatcgtcaaagctgggattacgatccctagaaacccgggatgccccaatagcgaagacaagaacttccctcggaccgttatggtgaatcttaacattcacaatcgcaacacaaataccaaccccaaaagatcctctgattactataatcggagcacatccccttggaacctgcatcgcaatgaggaccccgaaagatacccttctgtgatctgggaggccaagtgtcggcacctcggctgcattaacgcggatgggaatgtcgactatcatatgaacagcgtgccgatccagcaagaaatcctggttctgcgcagagagccccctcactgtcccaattcctttcggctcgagaaaattctggtgagcgtcggatgcacctgtgtgacacctatcgttcatcacgtggcttga

SEQ ID NO: 4240 - RNA, 468 nt, synthetic construct
  misc_feature 1..468: note = derived and/or modified sequence opt6 fromIL-17A__Homo_sapiens__AAC50341
  source 1..468: mol_type = other RNA
atgacaccaggaaaaacatcactagtatccctattactactactatcactagaagcaatagtaaaagcaggaataacaataccaagaaatccaggatgcccaaactcagaagacaaaaacttcccaagaacagtaatggtaaacctaaacatacacaacagaaacacaaacacaaacccaaaaagatcatccgactattacaacagatcaacatccccatggaacctacacagaaacgaagacccagaaagatacccatcagtaatatgggaagcaaaatgcagacacctaggatgcataaacgcagacggaaacgtagactaccacatgaactccgtaccaatacaacaagaaatactagtattaagacgagaaccaccacactgcccaaactcattcagactagaaaaaatactagtatcagtaggatgcacatgcgtaacaccaatagtacaccacgtagcataa

SEQ ID NO: 4241 - protein, 502 aa, synthetic construct
  REGION 1..502: note = IL-17B__Homo_sapiens__Q9NRM6
MSLVLLSLAALCRSAVPREPTVQCGSETGPSPEWMLQHDLIPGDLRDLRVEPVTTSVATGDYSILMNVSWVLRADASIRLLKATKICVTGKSNFQSYSCVRCNYTEAFQTQTRPSGGKWTFSYIGFPVELNTVYFIGAHNIPNANMNEDGPSMSVNFTSPGCLDHIMKYKKKCVKAGSLWDPNITACKKNEETVEVNFTTTPLGNRYMALIQHSTIIGFSQVFEPHQKKQTRASVVIPVTGDSEGATVQLTPYFPTCGSDCIRHKGTVVLCPQTGVPFPLDNNKSKPGGWLPLLLLSLLVATWVLVAGIYLMWRHERIKKTSFSTTTLLPPIKVLVVYPSEICFHHTICYFTEFLQNHCRSEVILEKWQKKKIAEMGPVQWLATQKKAADKVVFLLSNDVNSVCDGTCGKSEGSPSENSQDLFPLAFNLFCSDLRSQIHLHKYVVVYFREIDTKDDYNALSVCPKYHLMKDATAFCAELLHVKQQVSAGKRSQACHDGCCSL

SEQ ID NO: 4242 - RNA, 1509 nt, synthetic construct
  misc_feature 1..1509: note = IL-17B__Homo_sapiens__AAH00980
  source 1..1509: mol_type = other RNA
atgtcgctcgtgctgctaagcctggccgcgctgtgcaggagcgccgtaccccgagagccgaccgttcaatgtggctctgaaactgggccatctccagagtggatgctacaacatgatctaatcccgggagacttgagggacctccgagtagaacctgttacaactagtgttgcaacaggggactattcaattttgatgaatgtaagctgggtactccgggcagatgccagcatccgcttgttgaaggccaccaagatttgtgtgacgggcaaaagcaacttccagtcctacagctgtgtgaggtgcaattacacagaggccttccagactcagaccagaccctctggtggtaaatggacattttcctacatcggcttccctgtagagctgaacacagtctatttcattggggcccataatattcctaatgcaaatatgaatgaagatggcccttccatgtctgtgaatttcacctcaccaggctgcctagaccacataatgaaatataaaaaaaagtgtgtcaaggccggaagcctgtgggatccgaacatcactgcttgtaagaagaatgaggagacagtagaagtgaacttcacaaccactcccctgggaaacagatacatggctcttatccaacacagcactatcatcgggttttctcaggtgtttgagccacaccagaagaaacaaacgcgagcttcagtggtgattccagtgactggggatagtgaaggtgctacggtgcagctgactccatattttcctacttgtggcagcgactgcatccgacataaaggaacagttgtgctctgcccacaaacaggcgtccctttccctctggataacaacaaaagcaagccgggaggctggctgcctctcctcctgctgtctctgctggtggccacatgggtgctggtggcagggatctatctaatgtggaggcacgaaaggatcaagaagacttccttttctaccaccacactactgccccccattaaggttcttgtggtttacccatctgaaatatgtttccatcacacaatttgttacttcactgaatttcttcaaaaccattgcagaagtgaggtcatccttgaaaagtggcagaaaaagaaaatagcagagatgggtccagtgcagtggcttgccactcaaaagaaggcagcagacaaagtcgtcttccttctttccaatgacgtcaacagtgtgtgcgatggtacctgtggcaagagcgagggcagtcccagtgagaactctcaagacctcttcccccttgcctttaaccttttctgcagtgatctaagaagccagattcatctgcacaaatacgtggtggtctactttagagagattgatacaaaagacgattacaatgctctcagtgtctgccccaagtaccacctcatgaaggatgccactgctttctgtgcagaacttctccatgtcaagcagcaggtgtcagcaggaaaaagatcacaagcctgccacgatggctgctgctccttgtag

SEQ ID NO: 4243 - RNA, 1509 nt, synthetic construct
  misc_feature 1..1509: note = derived and/or modified sequence opt1 fromIL-17B__Homo_sapiens__AAH00980
  source 1..1509: mol_type = other RNA
atgagcctggtgctcctgtccctggccgccctctgccgcagcgcggtgccccgggagccgaccgtgcagtgcggctccgagaccgggcccagccccgagtggatgctgcagcacgacctgatccccggcgacctccgcgacctgcgggtggagccggtcacgacctccgtggccaccggggactacagcatcctgatgaacgtgtcctgggtcctccgcgccgacgccagcatccggctgctgaaggccaccaagatctgcgtgacgggcaagtccaacttccagagctactcctgcgtgcgctgcaactacaccgaggcgttccagacccagacccggcccagcgggggcaagtggacgttctcctacatcggcttccccgtcgagctcaacaccgtgtacttcatcggggcccacaacatccccaacgccaacatgaacgaggacggcccgagcatgtccgtgaacttcaccagccccgggtgcctggaccacatcatgaagtacaagaagaagtgcgtcaaggccggctccctgtgggaccccaacatcaccgcgtgcaagaagaacgaggagacggtggaggtgaacttcaccaccacgcccctcgggaaccgctacatggccctgatccagcacagcaccatcatcggcttctcccaggtcttcgagccgcaccagaagaagcagacccgggccagcgtggtgatccccgtcaccggcgacagcgagggggccaccgtgcagctgacgccctacttcccgacctgcggctccgactgcatccgccacaaggggaccgtggtcctctgcccccagaccggcgtgcccttccccctggacaacaacaagagcaagcccggcgggtggctgccgctcctgctgctctccctgctggtggccacgtgggtcctcgtggcgggcatctacctgatgtggcggcacgagcgcatcaagaagaccagcttctccaccaccacgctgctcccgcccatcaaggtcctggtggtgtaccccagcgagatctgcttccaccacaccatctgctacttcaccgagttcctgcagaaccactgccggtccgaggtcatcctcgagaagtggcagaagaagaagatcgccgagatggggcccgtgcagtggctggccacccagaagaaggccgccgacaaggtggtcttcctgctcagcaacgacgtgaactccgtgtgcgacggcacgtgcggcaagagcgaggggtcccccagcgagaactcccaggacctgttccccctggcgttcaacctcttctgcagcgacctgcgctcccagatccacctccacaagtacgtcgtggtgtacttccgggagatcgacaccaaggacgactacaacgccctgagcgtctgccccaagtaccacctgatgaaggacgccaccgccttctgcgccgagctgctccacgtgaagcagcaggtctccgcgggcaagcgcagccaggcctgccacgacgggtgctgctccctgtga

SEQ ID NO: 4244 - RNA, 1509 nt, synthetic construct
  misc_feature 1..1509: note = derived and/or modified sequence opt2 fromIL-17B__Homo_sapiens__AAH00980
  source 1..1509: mol_type = other RNA
atgtccctcgtcctcctctccctcgccgccctctgccgctccgccgtcccccgcgagcccaccgtccagtgcggctccgagaccggcccctcccccgagtggatgctccagcacgacctcatccccggcgacctccgcgacctccgcgtcgagcccgtcaccacctccgtcgccaccggcgactactccatcctcatgaacgtctcctgggtcctccgcgccgacgcctccatccgcctcctcaaggccaccaagatctgcgtcaccggcaagtccaacttccagtcctactcctgcgtccgctgcaactacaccgaggccttccagacccagacccgcccctccggcggcaagtggaccttctcctacatcggcttccccgtcgagctcaacaccgtctacttcatcggcgcccacaacatccccaacgccaacatgaacgaggacggcccctccatgtccgtcaacttcacctcccccggctgcctcgaccacatcatgaagtacaagaagaagtgcgtcaaggccggctccctctgggaccccaacatcaccgcctgcaagaagaacgaggagaccgtcgaggtcaacttcaccaccacccccctcggcaaccgctacatggccctcatccagcactccaccatcatcggcttctcccaggtcttcgagccccaccagaagaagcagacccgcgcctccgtcgtcatccccgtcaccggcgactccgagggcgccaccgtccagctcaccccctacttccccacctgcggctccgactgcatccgccacaagggcaccgtcgtcctctgcccccagaccggcgtccccttccccctcgacaacaacaagtccaagcccggcggctggctccccctcctcctcctctccctcctcgtcgccacctgggtcctcgtcgccggcatctacctcatgtggcgccacgagcgcatcaagaagacctccttctccaccaccaccctcctcccccccatcaaggtcctcgtcgtctacccctccgagatctgcttccaccacaccatctgctacttcaccgagttcctccagaaccactgccgctccgaggtcatcctcgagaagtggcagaagaagaagatcgccgagatgggccccgtccagtggctcgccacccagaagaaggccgccgacaaggtcgtcttcctcctctccaacgacgtcaactccgtctgcgacggcacctgcggcaagtccgagggctccccctccgagaactcccaggacctcttccccctcgccttcaacctcttctgctccgacctccgctcccagatccacctccacaagtacgtcgtcgtctacttccgcgagatcgacaccaaggacgactacaacgccctctccgtctgccccaagtaccacctcatgaaggacgccaccgccttctgcgccgagctcctccacgtcaagcagcaggtctccgccggcaagcgctcccaggcctgccacgacggctgctgctccctctga

SEQ ID NO: 4245 - RNA, 1509 nt, synthetic construct
  misc_feature 1..1509: note = derived and/or modified sequence opt3 fromIL-17B__Homo_sapiens__AAH00980
  source 1..1509: mol_type = other RNA
atgagcctggtgctcctttccctggccgctttgtgcagatctgcagtccccagggagcctaccgttcagtgtggctcagaaacagggccaagtccggagtggatgttacaacacgacctgatccccggagatctacgggacctccgcgtggaacctgtaactacgagcgtggccaccggtgattactccattctgatgaacgtctcttgggtgcttcgagcggacgcttcgatacgtctgttgaaggccacaaaaatctgcgttactggcaagtcaaatttccagagctatagttgtgtgagatgcaactacaccgaggcatttcagacacagaccaggccatccgggggaaaatggactttctcttatattggctttcccgtcgaactcaatacagtgtacttcatcggtgcccataacattcctaatgctaacatgaatgaggatgggccaagcatgtccgtaaactttacctcacccggatgtctggaccacatcatgaagtataaaaagaagtgcgttaaagcaggcagtctgtgggatcctaatataacggcctgtaagaaaaacgaggaaactgtggaggtcaatttcaccacaactccactcggcaaccggtacatggctttaatccaacatagcaccattatcgggttttctcaggtgttcgaaccgcaccagaagaaacagacacgcgcctccgtggtcattcccgttaccggagactcagagggtgcgacggtgcaactgactccttattttccaacatgcggcagcgattgtatcagacataaggggaccgtagtgctttgcccccagactggagtccctttcccattggacaataacaagagtaaacccggcggttggctgccgctactcctgctttctctgttggtggcaacatgggttctcgtggccgggatatacctgatgtggaggcacgagcggattaagaaaacctcctttagcacgaccacattactgcctcccatcaaggtcctcgtggtatacccatcggaaatttgtttccaccatactatctgctattttaccgagttccttcagaatcactgccgctctgaagttatcctggagaaatggcagaagaaaaagattgctgaaatgggacctgtgcaatggttggccacacagaagaaagcagctgataaggtcgtgttcctactgtccaacgacgtcaactcagtgtgtgatggcacttgcggcaaaagtgaggggagcccctccgaaaattctcaggacctctttccactggccttcaacctgttttgtagcgaccttcgatcacaaatacatttgcacaagtacgttgtggtatatttcagagagatcgataccaaagacgattacaatgcgctcagtgtctgccccaagtatcacctgatgaaggacgccacagcattttgtgctgagttactgcatgtgaaacagcaggtttccgccggaaagaggagccaggcttgccacgatggttgttgctctctatga

SEQ ID NO: 4246 - RNA, 1509 nt, synthetic construct
  misc_feature 1..1509: note = derived and/or modified sequence opt4 fromIL-17B__Homo_sapiens__AAH00980
  source 1..1509: mol_type = other RNA
atgagcctggtgctgctgagcctggccgccctgtgcagaagcgccgtgcccagagagcccaccgtgcagtgcggcagcgagaccggccccagccccgagtggatgctgcagcacgacctgatccccggcgacctgagagacctgagagtggagcccgtgaccaccagcgtggccaccggcgactacagcatcctgatgaacgtgagctgggtgctgagagccgacgccagcatcagactgctgaaggccaccaagatctgcgtgaccggcaagagcaacttccagagctacagctgcgtgagatgcaactacaccgaggccttccagacccagaccagacccagcggcggcaagtggaccttcagctacatcggcttccccgtggagctgaacaccgtgtacttcatcggcgcccacaacatccccaacgccaacatgaacgaggacggccccagcatgagcgtgaacttcaccagccccggctgcctggaccacatcatgaagtacaagaagaagtgcgtgaaggccggcagcctgtgggaccccaacatcaccgcctgcaagaagaacgaggagaccgtggaggtgaacttcaccaccacccccctgggcaacagatacatggccctgatccagcacagcaccatcatcggcttcagccaggtgttcgagccccaccagaagaagcagaccagagccagcgtggtgatccccgtgaccggcgacagcgagggcgccaccgtgcagctgaccccctacttccccacctgcggcagcgactgcatcagacacaagggcaccgtggtgctgtgcccccagaccggcgtgcccttccccctggacaacaacaagagcaagcccggcggctggctgcccctgctgctgctgagcctgctggtggccacctgggtgctggtggccggcatctacctgatgtggagacacgagagaatcaagaagaccagcttcagcaccaccaccctgctgccccccatcaaggtgctggtggtgtaccccagcgagatctgcttccaccacaccatctgctacttcaccgagttcctgcagaaccactgcagaagcgaggtgatcctggagaagtggcagaagaagaagatcgccgagatgggccccgtgcagtggctggccacccagaagaaggccgccgacaaggtggtgttcctgctgagcaacgacgtgaacagcgtgtgcgacggcacctgcggcaagagcgagggcagccccagcgagaacagccaggacctgttccccctggccttcaacctgttctgcagcgacctgagaagccagatccacctgcacaagtacgtggtggtgtacttcagagagatcgacaccaaggacgactacaacgccctgagcgtgtgccccaagtaccacctgatgaaggacgccaccgccttctgcgccgagctgctgcacgtgaagcagcaggtgagcgccggcaagagaagccaggcctgccacgacggctgctgcagcctgtga

SEQ ID NO: 4247 - RNA, 1509 nt, synthetic construct
  misc_feature 1..1509: note = derived and/or modified sequence opt5 fromIL-17B__Homo_sapiens__AAH00980
  source 1..1509: mol_type = other RNA
atgagcctggtgctcctgtcccttgccgctctgtgcagatctgccgtcccccgggagcctaccgttcagtgtggcagcgaaacagggccgtcccccgagtggatgctccaacacgacctgatccctggagatcttcgcgacctgagagtggaacccgtgacgacctctgtcgcgacaggcgattacagcattctcatgaacgtgtcctgggttctgcgggctgacgcctctatccgcctgctcaaggccaccaaaatttgcgtgacaggcaagagcaatttccagtcctatagctgtgtcagatgcaactacaccgaggcttttcagacacagacccggccttctggaggcaaatggacgttctcctatatcgggtttcccgtggaactgaataccgtttacttcattggagcccataacatccctaatgctaacatgaatgaggatggcccgagcatgtctgtgaactttacatcccccggctgtcttgaccacatcatgaagtataaaaagaagtgcgtcaaagccgggagcctgtgggatcctaatattaccgcgtgtaagaaaaacgaggaaacagtggaggtgaatttcaccacgacacccctcggaaaccgctacatggccctgatccaacattctaccattatcggcttttcccaggtcttcgaacctcaccagaagaaacagacaagagctagcgttgtgattcccgtgaccggggactccgagggagccaccgtccaacttacaccgtattttcctacgtgcggctctgattgtatccggcataaggggaccgtggttctgtgcccccagacaggagtgcctttccccctcgacaataacaagagcaaacccggcggctggctgcctctgctcctgctttccctgctcgtcgctacctgggtgctggttgccgggatttaccttatgtggcgccacgagagaatcaagaaaacatccttttctaccacgacactgctcccgcccatcaaggtgctggtcgtgtacccttccgaaatttgtttccaccataccatctgctattttaccgagttcctgcagaatcactgccggagcgaagtcattctcgagaaatggcagaagaaaaagatcgcggaaatgggacccgtgcaatggctggccacacagaagaaagctgccgataaggttgtgttccttctgtctaacgacgtcaacagcgtgtgtgatgggacctgcgggaaatccgagggatctcctagcgagaatagccaggacctctttcccctggctttcaacctgttttgtagcgaccttcgctctcaaattcatctccacaagtacgttgtggtctatttcagagaaatcgatacaaaagacgattacaatgccctgtccgtgtgcccgaagtatcacctgatgaaggacgccacggctttttgtgcggagctcctgcatgtgaaacagcaggttagcgccggcaagcggtctcaggcttgccacgatgggtgttgctccctttga

SEQ ID NO: 4248 - RNA, 1509 nt, synthetic construct
  misc_feature 1..1509: note = derived and/or modified sequence opt6 fromIL-17B__Homo_sapiens__AAH00980
  source 1..1509: mol_type = other RNA
atgtcattagtattattatcactagccgcactatgtcgatcggctgttccaagagaaccaaccgtacaatgcggatcagaaacaggtccatcaccagaatggatgttacaacacgacttaataccgggcgatcttagagatttaagagtagaaccagttacaacatctgtagctacaggtgattactcaattttaatgaacgtaagctgggtactaagagctgacgcctcaatacgcctgctaaaagcaacaaaaatttgcgtcaccggaaaatccaactttcaatcctactcatgtgtaagatgcaattataccgaagcttttcaaacacaaacacgcccatccggaggaaaatggacattttcatacataggatttcctgtagaattaaacacagtctactttataggtgcacataacattccaaacgcaaacatgaatgaagatggaccatcaatgtcagtcaacttcacatcacctggatgtctagaccatataatgaaatataaaaaaaaatgcgtaaaagctggatccctatgggacccaaacataactgcatgcaaaaaaaatgaagaaacagtagaagtcaatttcacaactacaccacttggaaatagatatatggctctaatacaacactcaacaataatcggattctcccaagtatttgaaccacaccaaaaaaaacaaacacgagcctcagtagtaatcccagtcacaggagactccgaaggagcaactgtacaattaaccccctactttcccacatgtggctccgactgtataagacataaaggaacagttgtcttatgcccacaaacaggtgtacccttccccctggacaataataaaagcaaacccggtggatggcttccattactcttactatcactactagtcgccacatgggtattagtagcaggaatctacttaatgtggcgtcatgaacgaataaaaaaaacatctttctccactacaacattacttccaccaataaaagtgttagtagtatacccctccgaaatatgctttcaccacacaatatgctattttacagaattcctacaaaaccattgcagaagtgaagtaatactcgaaaaatggcaaaaaaaaaagatcgcagaaatgggaccagtccaatggttagcaacacaaaaaaaagcagcagacaaagtagtattccttttatcaaatgacgtaaactcggtctgtgacggtacatgtggaaaatcagaaggatcaccatcagaaaactcacaagacctattcccactagcattcaatttattttgctcagacttaagatcacaaatacacttacacaaatatgtagtagtctactttagagaaatagacacaaaagacgattataacgcattaagtgtctgtccaaaataccacttaatgaaagacgcaacagcattttgtgctgaattactacacgttaaacagcaagtatctgccggtaaaagatcacaagcatgtcacgacggatgctgttccctataa

SEQ ID NO: 4249 - protein, 180 aa, synthetic construct
  REGION 1..180: note = IL-17B__Homo_sapiens__Q9UHF5
MDWPHNLLFLLTISIFLGLGQPRSPKSKRKGQGRPGPLAPGPHQVPLDLVSRMKPYARMEEYERNIEEMVAQLRNSSELAQRKCEVNLQLWMSNKRSLSPWGYSINHDPSRIPVDLPEARCLCLGCVNPFTMQEDRSMVSVPVFSQVPVRRRLCPPPPRTGPCRQRAVMETIAVGCTCIF

SEQ ID NO: 4250 - RNA, 543 nt, synthetic construct
  misc_feature 1..543: note = IL-17B__Homo_sapiens__AAF01318
  source 1..543: mol_type = other RNA
atggactggcctcacaacctgctgtttcttcttaccatttccatcttcctggggctgggccagcccaggagccccaaaagcaagaggaaggggcaagggcggcctgggcccctggcccctggccctcaccaggtgccactggacctggtgtcacggatgaaaccgtatgcccgcatggaggagtatgagaggaacatcgaggagatggtggcccagctgaggaacagctcagagctggcccagagaaagtgtgaggtcaacttgcagctgtggatgtccaacaagaggagcctgtctccctggggctacagcatcaaccacgaccccagccgtatccccgtggacctgccggaggcacggtgcctgtgtctgggctgtgtgaaccccttcaccatgcaggaggaccgcagcatggtgagcgtgccggtgttcagccaggttcctgtgcgccgccgcctctgcccgccaccgccccgcacagggccttgccgccagcgcgcagtcatggagaccatcgctgtgggctgcacctgcatcttctga

SEQ ID NO: 4251 - RNA, 543 nt, synthetic construct
  misc_feature 1..543: note = derived and/or modified sequence opt1 fromIL-17B__Homo_sapiens__AAF01318
  source 1..543: mol_type = other RNA
atggactggccccacaacctcctgttcctgctgaccatcagcatcttcctcggcctggggcagccccgctcccccaagagcaagcggaagggccaggggcgccccggccccctggccccggggccccaccaggtgcccctcgacctggtctcccggatgaagccctacgcccgcatggaggagtacgagcggaacatcgaggagatggtggcgcagctgcgcaacagctccgagctcgcccagcggaagtgcgaggtgaacctgcagctgtggatgagcaacaagcgctccctcagcccgtggggctactccatcaaccacgaccccagccggatccccgtcgacctgcccgaggcccgctgcctgtgcctcggctgcgtgaacccgttcaccatgcaggaggaccggtccatggtgagcgtccccgtgttctcccaggtgcccgtccgccggcgcctgtgcccgcccccgccccggaccgggccctgccgccagcgggccgtgatggagaccatcgccgtgggctgcacgtgcatcttctga

SEQ ID NO: 4252 - RNA, 543 nt, synthetic construct
  misc_feature 1..543: note = derived and/or modified sequence opt2 fromIL-17B__Homo_sapiens__AAF01318
  source 1..543: mol_type = other RNA
atggactggccccacaacctcctcttcctcctcaccatctccatcttcctcggcctcggccagccccgctcccccaagtccaagcgcaagggccagggccgccccggccccctcgcccccggcccccaccaggtccccctcgacctcgtctcccgcatgaagccctacgcccgcatggaggagtacgagcgcaacatcgaggagatggtcgcccagctccgcaactcctccgagctcgcccagcgcaagtgcgaggtcaacctccagctctggatgtccaacaagcgctccctctccccctggggctactccatcaaccacgacccctcccgcatccccgtcgacctccccgaggcccgctgcctctgcctcggctgcgtcaaccccttcaccatgcaggaggaccgctccatggtctccgtccccgtcttctcccaggtccccgtccgccgccgcctctgccccccccccccccgcaccggcccctgccgccagcgcgccgtcatggagaccatcgccgtcggctgcacctgcatcttctga

SEQ ID NO: 4253 - RNA, 543 nt, synthetic construct
  misc_feature 1..543: note = derived and/or modified sequence opt3 fromIL-17B__Homo_sapiens__AAF01318
  source 1..543: mol_type = other RNA
atggactggccccacaacctgttgttccttctgaccatcagcatttttctcggcttagggcagcctagatccccaaagtctaaaaggaagggacaaggtcggccgggccccctggcccctgggccacatcaggtgcccctagatctcgtctcacgcatgaaaccttacgctcgaatggaggaatatgagcgtaatatagaagagatggttgcacagctgagaaacagtagcgaacttgcccagaggaagtgcgaggtgaatctgcaattgtggatgtccaacaaacggtctctctcgccatggggatactcaatcaatcacgaccccagccgcattcctgtagatctgccagaggcgagatgtctgtgcctcggctgtgtgaacccgttcacaatgcaggaagacaggagtatggtctccgtgcccgtgttttctcaggttcctgtccggcgccgattatgcccaccccctccaagaactggtccctgtaggcagcgggctgtgatggagacgatcgccgtagggtgcacctgtattttctga

SEQ ID NO: 4254 - RNA, 543 nt, synthetic construct
  misc_feature 1..543: note = derived and/or modified sequence opt4 fromIL-17B__Homo_sapiens__AAF01318
  source 1..543: mol_type = other RNA
atggactggccccacaacctgctgttcctgctgaccatcagcatcttcctgggcctgggccagcccagaagccccaagagcaagagaaagggccagggcagacccggccccctggcccccggcccccaccaggtgcccctggacctggtgagcagaatgaagccctacgccagaatggaggagtacgagagaaacatcgaggagatggtggcccagctgagaaacagcagcgagctggcccagagaaagtgcgaggtgaacctgcagctgtggatgagcaacaagagaagcctgagcccctggggctacagcatcaaccacgaccccagcagaatccccgtggacctgcccgaggccagatgcctgtgcctgggctgcgtgaaccccttcaccatgcaggaggacagaagcatggtgagcgtgcccgtgttcagccaggtgcccgtgagaagaagactgtgcccccccccccccagaaccggcccctgcagacagagagccgtgatggagaccatcgccgtgggctgcacctgcatcttctga

SEQ ID NO: 4255 - RNA, 543 nt, synthetic construct
  misc_feature 1..543: note = derived and/or modified sequence opt5 fromIL-17B__Homo_sapiens__AAF01318
  source 1..543: mol_type = other RNA
atggactggccccacaacctcctgttcctgcttaccatcagcatttttctgggcctcgggcagcctagatccccgaagtctaaacggaagggacaaggccgccccgggcctctggcccccggacctcatcaggtgccccttgatctggtcagcagaatgaaaccttacgctcggatggaggaatatgagcgcaatatcgaagagatggttgcccagctcagaaactcctctgaactggcgcagcggaagtgcgaggtgaatctgcaactctggatgagcaacaaacgctccctgtctccgtggggctacagcattaatcacgacccctccagaatccctgtggatcttcccgaggctcggtgtctgtgcctcgggtgtgtcaaccctttcacaatgcaggaagaccgcagcatggtgtctgttcccgtgttttcccaggtcccggtgagacggcgcctgtgccctccccctcccagaacgggaccctgtcggcagcgcgccgttatggagaccattgccgtgggctgcacatgtatcttctga

SEQ ID NO: 4256 - RNA, 543 nt, synthetic construct
  misc_feature 1..543: note = derived and/or modified sequence opt6 fromIL-17B__Homo_sapiens__AAF01318
  source 1..543: mol_type = other RNA
atggactggccacataacttactatttttattaacaataagtatattcttaggattaggacaaccaagaagcccaaaatcaaaaagaaaaggacaaggaagaccaggaccactagcaccaggaccacatcaagtaccattagacttagtctcaagaatgaaaccatacgcaagaatggaagaatacgaaagaaatatagaagaaatggtagcacaattaagaaatagctcagaattagcacaaagaaaatgcgaagtaaatctacaactatggatgtcaaacaaaagatcgctatcaccatggggatatagcataaaccatgacccatcaagaataccagtagacttaccagaagcaagatgtctatgtctaggatgcgtaaacccattcacaatgcaagaagatagatcaatggtaagcgtaccagtattctcacaagtaccagtaagaagaagattatgcccaccaccaccaagaacaggaccatgcagacaaagagcagtcatggaaacaatagcagtaggatgcacatgcatattttaa

SEQ ID NO: 4257 - protein, 202 aa, synthetic construct
  REGION 1..202: note = IL-17D__Homo_sapiens__Q8TAD2
MLVAGFLLALPPSWAAGAPRAGRRPARPRGCADRPEELLEQLYGRLAAGVLSAFHHTLQLGPREQARNASCPAGGRPADRRFRPPTNLRSVSPWAYRISYDPARYPRYLPEAYCLCRGCLTGLFGEEDVRFRSAPVYMPTVVLRRTPACAGGRSVYTEAYVTIPVGCTCVPEPEKDADSINSSIDKQGAKLLLGPNDAPAGP

SEQ ID NO: 4258 - RNA, 609 nt, synthetic construct
  misc_feature 1..609: note = IL-17D__Homo_sapiens__AAH36243
  source 1..609: mol_type = other RNA
atgctggtagccggcttcctgctggcgctgccgccgagctgggccgcgggcgccccgagggcgggcaggcgccccgcgcggccgcggggctgcgcggaccggccggaggagctactggagcagctgtacgggcgcctggcggccggcgtgctcagtgccttccaccacacgctgcagctggggccgcgtgagcaggcgcgcaacgcgagctgcccggcagggggcaggcccgccgaccgccgcttccggccgcccaccaacctgcgcagcgtgtcgccctgggcctacagaatctcctacgacccggcgaggtaccccaggtacctgcctgaagcctactgcctgtgccggggctgcctgaccgggctgttcggcgaggaggacgtgcgcttccgcagcgcccctgtctacatgcccaccgtcgtcctgcgccgcacccccgcctgcgccggcggccgttccgtctacaccgaggcctacgtcaccatccccgtgggctgcacctgcgtccccgagccggagaaggacgcagacagcatcaactccagcatcgacaaacagggcgccaagctcctgctgggccccaacgacgcgcccgctggcccctga

SEQ ID NO: 4259 - RNA, 609 nt, synthetic construct
  misc_feature 1..609: note = derived and/or modified sequence opt1 fromIL-17D__Homo_sapiens__AAH36243
  source 1..609: mol_type = other RNA
atgctggtggccggcttcctcctggccctgcccccgagctgggcggccggggcgccccgcgccggccggcgccccgcccggccccgcgggtgcgccgaccggccggaggagctcctggagcagctgtacggccgcctcgccgccggggtcctgtccgccttccaccacaccctgcagctcggcccccgggagcaggcgcgcaacgccagctgccccgccggcgggcggcccgccgaccgccggttccgcccgcccaccaacctgcggtccgtgagcccctgggcctaccgcatctcctacgaccccgcgcggtacccgcgctacctgcccgaggcctactgcctctgccggggctgcctgaccgggctgttcggcgaggaggacgtgcgcttccggagcgcccccgtctacatgcccaccgtggtgctccgccggaccccggcctgcgccgggggccgctccgtctacaccgaggcgtacgtgacgatccccgtgggctgcacgtgcgtccccgagcccgagaaggacgccgacagcatcaactccagcatcgacaagcagggggccaagctgctgctcggcccgaacgacgcccccgccgggccctga

SEQ ID NO: 4260 - RNA, 609 nt, synthetic construct
  misc_feature 1..609: note = derived and/or modified sequence opt2 fromIL-17D__Homo_sapiens__AAH36243
  source 1..609: mol_type = other RNA
atgctcgtcgccggcttcctcctcgccctccccccctcctgggccgccggcgccccccgcgccggccgccgccccgcccgcccccgcggctgcgccgaccgccccgaggagctcctcgagcagctctacggccgcctcgccgccggcgtcctctccgccttccaccacaccctccagctcggcccccgcgagcaggcccgcaacgcctcctgccccgccggcggccgccccgccgaccgccgcttccgcccccccaccaacctccgctccgtctccccctgggcctaccgcatctcctacgaccccgcccgctacccccgctacctccccgaggcctactgcctctgccgcggctgcctcaccggcctcttcggcgaggaggacgtccgcttccgctccgcccccgtctacatgcccaccgtcgtcctccgccgcacccccgcctgcgccggcggccgctccgtctacaccgaggcctacgtcaccatccccgtcggctgcacctgcgtccccgagcccgagaaggacgccgactccatcaactcctccatcgacaagcagggcgccaagctcctcctcggccccaacgacgcccccgccggcccctga

SEQ ID NO: 4261 - RNA, 609 nt, synthetic construct
  misc_feature 1..609: note = derived and/or modified sequence opt3 fromIL-17D__Homo_sapiens__AAH36243
  source 1..609: mol_type = other RNA
atgctggtggccggcttcctccttgctctgccccctagctgggcagccggggcgccaagagctggaaggcggccggcccgcccccgaggttgcgcagaccgtcctgaggaattgttagagcagctgtacggcagactagccgctggggtcctctccgcatttcaccataccctgcaacttggaccaagggaacaggcccggaacgcttcttgtcccgccggcggtcgccctgcggatagaaggttccggccacccacaaatctgcgctcagttagtccttgggcatatcgaatcagctacgacccagccagatatccgaggtacttgcccgaggcttattgcctctgtcgggggtgcctgactggactgtttggcgaagaggatgtgcgtttccgctccgcccctgtatacatgccaacggtggtcctcagaaggacccccgcatgtgctggcgggcggtctgtgtatacagaggcctacgttactattcctgtgggatgcacctgtgtcccagaacccgagaaggacgcggattcgataaactcaagcatcgacaaacagggtgccaagttactgcttggcccgaatgatgctcctgcagggccctga

SEQ ID NO: 4262 - RNA, 609 nt, synthetic construct
  misc_feature 1..609: note = derived and/or modified sequence opt4 fromIL-17D__Homo_sapiens__AAH36243
  source 1..609: mol_type = other RNA
atgctggtggccggcttcctgctggccctgccccccagctgggccgccggcgcccccagagccggcagaagacccgccagacccagaggctgcgccgacagacccgaggagctgctggagcagctgtacggcagactggccgccggcgtgctgagcgccttccaccacaccctgcagctgggccccagagagcaggccagaaacgccagctgccccgccggcggcagacccgccgacagaagattcagaccccccaccaacctgagaagcgtgagcccctgggcctacagaatcagctacgaccccgccagataccccagatacctgcccgaggcctactgcctgtgcagaggctgcctgaccggcctgttcggcgaggaggacgtgagattcagaagcgcccccgtgtacatgcccaccgtggtgctgagaagaacccccgcctgcgccggcggcagaagcgtgtacaccgaggcctacgtgaccatccccgtgggctgcacctgcgtgcccgagcccgagaaggacgccgacagcatcaacagcagcatcgacaagcagggcgccaagctgctgctgggccccaacgacgcccccgccggcccctga

SEQ ID NO: 4263 - RNA, 609 nt, synthetic construct
  misc_feature 1..609: note = derived and/or modified sequence opt5 fromIL-17D__Homo_sapiens__AAH36243
  source 1..609: mol_type = other RNA
atgctggtggccggcttcctcctggcccttccccctagctgggctgcgggggctccgagagccggacggcgccccgccagacctcggggctgcgctgaccgccccgaggaactgctcgagcagctgtacgggagacttgccgctggagtcctgtccgcctttcaccataccctccaactgggccctcgggaacaggcgcgcaacgcctcttgtcccgctgggggaagacctgccgatcggcgcttcagaccgcccacaaatctgcggagcgtttccccttgggcttatcgcatctcttacgaccccgccagatatcctcggtacctccccgaggcgtattgcctgtgtcgcggctgccttacgggcctgtttggggaagaggatgtgagattccggagcgccccggtgtacatgcctaccgtcgtgctcagacgcacacccgcttgtgccggaggccggtccgtttataccgaggcttacgtgacaattcctgtcgggtgcacctgtgtgcccgaacccgagaaggacgccgattctatcaacagctccattgacaaacagggagccaagctgcttctgggccctaatgatgctccggcggggccctga

SEQ ID NO: 4264 - RNA, 609 nt, synthetic construct
  misc_feature 1..609: note = derived and/or modified sequence opt6 fromIL-17D__Homo_sapiens__AAH36243
  source 1..609: mol_type = other RNA
atgctagtagcaggctttttactagcattaccaccaagttgggcagcaggagcaccaagagcaggaagaagaccagcaagaccacgaggatgcgcagatagaccagaagaattattagaacaattatatggaagattagcagcaggagtattatcagcatttcatcatacattacaattaggaccaagagaacaagcaagaaatgcatcatgtccagcaggaggaagaccagcagacagaagatttagaccaccaacaaatctaagaagtgtatcaccatgggcatatagaatatcatacgatccagcaagatatcctagatacttaccagaagcatactgtttatgtagaggatgtttaactggactatttggagaagaagatgtaagatttagatcagcaccagtatatatgccaacagtagtattaagaagaacaccagcatgtgcaggaggtagatcagtatatacagaagcatatgttacaataccagtaggatgcacatgtgtaccagaaccagaaaaagatgcagatagtataaattcatcaatagacaaacaaggagcaaaattattattaggacctaacgatgcaccagcaggaccataa

SEQ ID NO: 4265 - protein, 163 aa, synthetic construct [sequence omitted]

SEQ ID NO: 4266 - RNA, 492 nt, synthetic construct
  misc_feature 1..492: note = IL-17F__Homo_sapiens__ADY18335
  source 1..492: mol_type = other RNA
atgacagtgaagaccctgcatggcccagccatggtcaagtacttgctgctgtcgatattggggcttgcctttctgagtgaggcggcagctcggaaaatccccaaagtaggacatacttttttccaaaagcctgagagttgcccgcctgtgccaggaggtagtatgaagcttgacattggcatcatcaatgaaaaccagcgcgtttccatgtcacgtaacatcgagagccgctccacctccccctggaattacactgtcacttgggaccccaaccggtaccccttggaagttgtacaggcccagtgtaggaacttgggctgcatcaatgctcaaggaaaggaagacatctccatgaattccgttcccatccagcaagagaccctggtcgtccggaggaagcaccaaggctgctctgtttctttccagttggagaaggtgctggtgactgttggctgcacctgcgtcacccctgtcatccaccatgtgcagtaa

SEQ ID NO: 4267 - RNA, 492 nt, synthetic construct
  misc_feature 1..492: note = derived and/or modified sequence opt1 fromIL-17F__Homo_sapiens__ADY18335
  source 1..492: mol_type = other RNA
atgaccgtgaagaccctgcacggccccgccatggtcaagtacctcctgctgagcatcctcgggctggccttcctgtccgaggcggccgcccgcaagatcccgaaggtgggccacaccttcttccagaagcccgagagctgcccgcccgtgcccgggggctccatgaagctcgacatcgggatcatcaacgagaaccagcgggtcagcatgtcccgcaacatcgagagccggtccaccagcccctggaactacaccgtgacctgggaccccaaccgctaccccctggaggtggtccaggcccagtgccggaacctgggctgcatcaacgcccagggcaaggaggacatctccatgaacagcgtgccgatccagcaggagacgctcgtggtccgccggaagcaccaggggtgctccgtgagcttccagctggagaaggtgctggtcaccgtgggctgcacgtgcgtgacccccgtcatccaccacgtgcagtga

SEQ ID NO: 4268 - RNA, 492 nt, synthetic construct
  misc_feature 1..492: note = derived and/or modified sequence opt2 fromIL-17F__Homo_sapiens__ADY18335
  source 1..492: mol_type = other RNA
atgaccgtcaagaccctccacggccccgccatggtcaagtacctcctcctctccatcctcggcctcgccttcctctccgaggccgccgcccgcaagatccccaaggtcggccacaccttcttccagaagcccgagtcctgcccccccgtccccggcggctccatgaagctcgacatcggcatcatcaacgagaaccagcgcgtctccatgtcccgcaacatcgagtcccgctccacctccccctggaactacaccgtcacctgggaccccaaccgctaccccctcgaggtcgtccaggcccagtgccgcaacctcggctgcatcaacgcccagggcaaggaggacatctccatgaactccgtccccatccagcaggagaccctcgtcgtccgccgcaagcaccagggctgctccgtctccttccagctcgagaaggtcctcgtcaccgtcggctgcacctgcgtcacccccgtcatccaccacgtccagtga

SEQ ID NO: 4269 - RNA, 492 nt, synthetic construct
  misc_feature 1..492: note = derived and/or modified sequence opt3 fromIL-17F__Homo_sapiens__ADY18335
  source 1..492: mol_type = other RNA
atgaccgtgaagacactgcacggccccgccatggtcaaatacctccttctgagcatcttggggttagctttcctgtccgaggcagccgcgagaaagattcctaaagttggacatacgtttttccagaagccagaatcttgcccgcccgtgcctggtggctcaatgaaactagacatagggatcattaacgagaatcaaagggtaagtatgagccggaacatcgaatcccgctctacttcgccatggaattataccgtgacatgggatcccaaccgataccctctcgaggtcgtgcaggctcagtgtcgtaatctgggatgcattaacgcccagggcaaggaagacatctcaatgaatagcgttccaatacaacaggagactcttgtggtcagaaggaagcaccagggttgtagtgtgtcctttcagctggagaaagtattggttaccgtggggtgcacatgtgtcacccccgtgatccatcacgtgcaatga

SEQ ID NO: 4270 - RNA, 492 nt, synthetic construct
  misc_feature 1..492: note = derived and/or modified sequence opt4 fromIL-17F__Homo_sapiens__ADY18335
  source 1..492: mol_type = other RNA
atgaccgtgaagaccctgcacggccccgccatggtgaagtacctgctgctgagcatcctgggcctggccttcctgagcgaggccgccgccagaaagatccccaaggtgggccacaccttcttccagaagcccgagagctgcccccccgtgcccggcggcagcatgaagctggacatcggcatcatcaacgagaaccagagagtgagcatgagcagaaacatcgagagcagaagcaccagcccctggaactacaccgtgacctgggaccccaacagataccccctggaggtggtgcaggcccagtgcagaaacctgggctgcatcaacgcccagggcaaggaggacatcagcatgaacagcgtgcccatccagcaggagaccctggtggtgagaagaaagcaccagggctgcagcgtgagcttccagctggagaaggtgctggtgaccgtgggctgcacctgcgtgacccccgtgatccaccacgtgcagtga

SEQ ID NO: 4271 - RNA, 492 nt, synthetic construct
  misc_feature 1..492: note = derived and/or modified sequence opt5 fromIL-17F__Homo_sapiens__ADY18335
  source 1..492: mol_type = other RNA
atgaccgtgaagacactgcacggccccgccatggtcaaatacctcctgcttagcatcctggggctcgctttcctgtccgaggccgcggctagaaagattcctaaagttggacatacgtttttccagaagccggaatcttgtccccctgtgcccggcgggagcatgaaacttgacatcggaattatcaatgagaatcaacgggtgtccatgtctcgcaacattgaaagcagatccacctctccttggaattatacagtcacctgggatcccaaccggtaccctctggaggtggttcaggcccagtgccgcaatctcggctgcatcaacgcccaggggaaggaagacatcagcatgaactccgtgccgattcaacaggagacactggtcgtgagacggaagcaccagggatgtagcgtttcttttcagctggagaaagtgctcgtcaccgtgggctgcacatgtgtgacccccgtcatccatcacgttcaatga

SEQ ID NO: 4272 - RNA, 492 nt, synthetic construct
  misc_feature 1..492: note = derived and/or modified sequence opt6 fromIL-17F__Homo_sapiens__ADY18335
  source 1..492: mol_type = other RNA
atgacagtaaaaaccctacacggaccagcaatggtaaaatacctactactatcaatactaggattagcatttctatcagaagcagcagcaagaaaaataccaaaagtaggacacacatttttccaaaaaccagaatcatgcccacccgtaccaggaggatcaatgaaactagacataggaataataaacgaaaaccaaagagtatcaatgtcaagaaacatagaatcacgatcaacatcaccatggaactacacagtaacatgggacccaaacagatacccactagaagtagtacaagcacaatgcagaaacctaggatgcataaacgcacaaggaaaagaagacatatcaatgaactcagttccaatacaacaagaaacattagtagtaagaagaaaacaccaaggatgctcagtatcattccaactagaaaaagtactagtaacagtaggatgcacatgcgtaacaccagtcatacaccacgtacaataa

SEQ ID NO: 4273 - protein, 163 aa, synthetic construct
  REGION 1..163: note = IL-17F__Homo_sapiens__Q96PD4
MTVKTLHGPAMVKYLLLSILGLAFLSEAAARKIPKVGHTFFQKPESCPPVPGGSMKLDIGIINENQRVSMSRNIESRSTSPWNYTVTWDPNRYPSEVVQAQCRNLGCINAQGKEDISMNSVPIQQETLVVRRKHQGCSVSFQLEKVLVTVGCTCVTPVIHHVQ

SEQ ID NO: 4274 - RNA, 492 nt, synthetic construct
  misc_feature 1..492: note = IL-17F__Homo_sapiens__AAK83350
  source 1..492: mol_type = other RNA
atgacagtgaagaccctgcatggcccagccatggtcaagtacttgctgctgtcgatattggggcttgcctttctgagtgaggcggcagctcggaaaatccccaaagtaggacatacttttttccaaaagcctgagagttgcccgcctgtgccaggaggtagtatgaagcttgacattggcatcatcaatgaaaaccagcgcgtttccatgtcacgtaacatcgagagccgctccacctccccctggaattacactgtcacttgggaccccaaccggtacccctcggaagttgtacaggcccagtgtaggaacttgggctgcatcaatgctcaaggaaaggaagacatctccatgaattccgttcccatccagcaagagaccctggtcgtccggaggaagcaccaaggctgctctgtttctttccagttggagaaggtgctggtgactgttggctgcacctgcgtcacccctgtcatccaccatgtgcagtaa

SEQ ID NO: 4275 - RNA, 492 nt, synthetic construct
  misc_feature 1..492: note = derived and/or modified sequence opt1 fromIL-17F__Homo_sapiens__AAK83350
  source 1..492: mol_type = other RNA
atgaccgtgaagaccctgcacggccccgccatggtcaagtacctcctgctgagcatcctcgggctggccttcctgtccgaggcggccgcccgcaagatcccgaaggtgggccacaccttcttccagaagcccgagagctgcccgcccgtgcccgggggctccatgaagctcgacatcgggatcatcaacgagaaccagcgggtcagcatgtcccgcaacatcgagagccggtccaccagcccctggaactacaccgtgacctgggaccccaaccgctacccctccgaggtggtccaggcccagtgccggaacctgggctgcatcaacgcccagggcaaggaggacatcagcatgaactccgtgccgatccagcaggagacgctggtggtccgccggaagcaccaggggtgcagcgtgtccttccagctcgagaaggtgctggtcaccgtgggctgcacgtgcgtgacccccgtcatccaccacgtgcagtga

SEQ ID NO: 4276 - RNA, 492 nt, synthetic construct
  misc_feature 1..492: note = derived and/or modified sequence opt2 fromIL-17F__Homo_sapiens__AAK83350
  source 1..492: mol_type = other RNA
atgaccgtcaagaccctccacggccccgccatggtcaagtacctcctcctctccatcctcggcctcgccttcctctccgaggccgccgcccgcaagatccccaaggtcggccacaccttcttccagaagcccgagtcctgcccccccgtccccggcggctccatgaagctcgacatcggcatcatcaacgagaaccagcgcgtctccatgtcccgcaacatcgagtcccgctccacctccccctggaactacaccgtcacctgggaccccaaccgctacccctccgaggtcgtccaggcccagtgccgcaacctcggctgcatcaacgcccagggcaaggaggacatctccatgaactccgtccccatccagcaggagaccctcgtcgtccgccgcaagcaccagggctgctccgtctccttccagctcgagaaggtcctcgtcaccgtcggctgcacctgcgtcacccccgtcatccaccacgtccagtga

SEQ ID NO: 4277 - RNA, 492 nt, synthetic construct
  misc_feature 1..492: note = derived and/or modified sequence opt3 fromIL-17F__Homo_sapiens__AAK83350
  source 1..492: mol_type = other RNA
atgaccgtgaagacactgcacggccccgccatggtcaaatacctccttctgagcatcttggggttagctttcctgtccgaggcagccgcgagaaagattcctaaagttggacatacgtttttccagaagccagaatcttgcccgcccgtgcctggtggctcaatgaaactagacatagggatcattaacgagaatcaaagggtaagtatgagccggaacatcgaatcccgctctacttcgccatggaattataccgtgacatgggatcccaaccgatacccttcagaggtcgtgcaggctcagtgtcgtaatctcggatgcattaacgcccagggcaaggaagacatcagcatgaatagtgttccaatacaacaggagactctggtggtcagaaggaagcaccagggttgttccgtgtcttttcagcttgagaaagtactggttaccgtggggtgcacatgtgtcacccccgtgatccatcacgtgcaatga

SEQ ID NO: 4278 - RNA, 492 nt, synthetic construct
  misc_feature 1..492: note = derived and/or modified sequence opt4 fromIL-17F__Homo_sapiens__AAK83350
  source 1..492: mol_type = other RNA
atgaccgtgaagaccctgcacggccccgccatggtgaagtacctgctgctgagcatcctgggcctggccttcctgagcgaggccgccgccagaaagatccccaaggtgggccacaccttcttccagaagcccgagagctgcccccccgtgcccggcggcagcatgaagctggacatcggcatcatcaacgagaaccagagagtgagcatgagcagaaacatcgagagcagaagcaccagcccctggaactacaccgtgacctgggaccccaacagataccccagcgaggtggtgcaggcccagtgcagaaacctgggctgcatcaacgcccagggcaaggaggacatcagcatgaacagcgtgcccatccagcaggagaccctggtggtgagaagaaagcaccagggctgcagcgtgagcttccagctggagaaggtgctggtgaccgtgggctgcacctgcgtgacccccgtgatccaccacgtgcagtga

SEQ ID NO: 4279 - RNA, 492 nt, synthetic construct
  misc_feature 1..492: note = derived and/or modified sequence opt5 fromIL-17F__Homo_sapiens__AAK83350
  source 1..492: mol_type = other RNA
atgaccgtgaagacactgcacggccccgccatggtcaaatacctcctgcttagcatcctggggctcgctttcctgtccgaggccgcggctagaaagattcctaaagttggacatacgtttttccagaagccggaatcttgtccccctgtgcccggcgggagcatgaaacttgacatcggaattatcaacgagaatcaacgggtgtccatgtctcgcaacattgaaagcagatccacctctccttggaattatacagtcacctgggatcccaaccggtaccctagcgaggtggttcaggcccagtgccgcaatctgggctgcatcaacgcccaggggaaggaagacatctccatgaatagcgtgccgattcaacaggagacactcgtcgtgagacggaagcaccagggatgttctgtttcctttcagctggagaaagtgctggtcaccgtgggctgcacatgtgtgacccccgtcatccatcacgttcaatga

SEQ ID NO: 4280 - RNA, 492 nt, synthetic construct
  misc_feature 1..492: note = derived and/or modified sequence opt6 fromIL-17F__Homo_sapiens__AAK83350
  source 1..492: mol_type = other RNA
atgacagtaaaaacactacacggaccagcaatggtcaaatacctactactatcaatactaggactagcattcctatcagaagcagcagcaagaaaaataccaaaagtaggacacacattcttccaaaaaccagaatcctgcccaccagtaccaggaggatcaatgaaactagacataggaataataaacgaaaaccaaagagtaagcatgtcaagaaacatagaatccagatcaacatccccatggaactacacagtaacctgggacccaaacagatacccatcagaagtagtacaagcacaatgcagaaacctaggctgcataaacgcacaaggaaaagaagacatatcaatgaactcagtaccaatacaacaagaaacattagtagtaagaagaaaacaccaaggatgctcagtatcattccaactagaaaaagtactagtaacagtaggatgcacatgcgtaactccagtaatacaccacgtacaataa

SEQ ID NO: 4281 - protein, 189 aa, synthetic construct
  REGION 1..189: note = IL-18__Homo_sapiens__A0A024R3E0
MAAEPVEDNCINFVAMKFIDNTLYFIENLESDYFGKLESKLSVIRNLNDQVLFIDQGNRPLFEDMTDSDCRDNAPRTIFIISMYKDSQPRGMAVTISVKCEKISTLSCENKIISFKEMNPPDNIKDTKSDIIFFQRSVPGHDNKMQFESSSYEGYFLACEKERDLFKLILKKEDELGDRSIMFTVQNED

SEQ ID NO: 4282 - RNA, 570 nt, synthetic construct
  misc_feature 1..570: note = IL-18__Homo_sapiens__EAW67185
  source 1..570: mol_type = other RNA
atggctgctgaaccagtagaagacaattgcatcaactttgtggcaatgaaatttattgacaatacgctttactttatagaaaacctggaatccgattactttggcaagcttgaatctaaattatcagtcataagaaatttgaatgaccaagttctcttcattgaccaaggaaatcggcctctatttgaagatatgactgattctgactgtagagataatgcaccccggaccatatttattataagtatgtataaagatagccagcctagaggtatggctgtaactatctctgtgaagtgtgagaaaatttcaactctctcctgtgagaacaaaattatttcctttaaggaaatgaatcctcctgataacatcaaggatacaaaaagtgacatcatattctttcagagaagtgtcccaggacatgataataagatgcaatttgaatcttcatcatacgaaggatactttctagcttgtgaaaaagagagagacctttttaaactcattttgaaaaaagaggatgaattgggggatagatctataatgttcactgttcaaaacgaagactag

SEQ ID NO: 4283 - RNA, 570 nt, synthetic construct
  misc_feature 1..570: note = derived and/or modified sequence opt1 fromIL-18__Homo_sapiens__EAW67185
  source 1..570: mol_type = other RNA
atggccgccgagcccgtggaggacaactgcatcaacttcgtcgccatgaagttcatcgacaacaccctgtacttcatcgagaacctcgagagcgactacttcggcaagctggagtccaagctgagcgtgatccgcaacctcaacgaccaggtgctgttcatcgaccaggggaaccggccgctgttcgaggacatgaccgactccgactgccgcgacaacgcgccccggacgatcttcatcatcagcatgtacaaggactcccagccccgcggcatggccgtcaccatcagcgtgaagtgcgagaagatctccaccctcagctgcgagaacaagatcatctccttcaaggagatgaacccgcccgacaacatcaaggacaccaagagcgacatcatcttcttccagcggtccgtgcccgggcacgacaacaagatgcagttcgagagctccagctacgagggctacttcctggcctgcgagaaggagcgcgacctgttcaagctcatcctgaagaaggaggacgagctgggggaccggtccatcatgttcacggtccagaacgaggactga

SEQ ID NO: 4284 - RNA, 570 nt, synthetic construct
  misc_feature 1..570: note = derived and/or modified sequence opt2 fromIL-18__Homo_sapiens__EAW67185
  source 1..570: mol_type = other RNA
atggccgccgagcccgtcgaggacaactgcatcaacttcgtcgccatgaagttcatcgacaacaccctctacttcatcgagaacctcgagtccgactacttcggcaagctcgagtccaagctctccgtcatccgcaacctcaacgaccaggtcctcttcatcgaccagggcaaccgccccctcttcgaggacatgaccgactccgactgccgcgacaacgccccccgcaccatcttcatcatctccatgtacaaggactcccagccccgcggcatggccgtcaccatctccgtcaagtgcgagaagatctccaccctctcctgcgagaacaagatcatctccttcaaggagatgaacccccccgacaacatcaaggacaccaagtccgacatcatcttcttccagcgctccgtccccggccacgacaacaagatgcagttcgagtcctcctcctacgagggctacttcctcgcctgcgagaaggagcgcgacctcttcaagctcatcctcaagaaggaggacgagctcggcgaccgctccatcatgttcaccgtccagaacgaggactga

SEQ ID NO: 4285 - RNA, 570 nt, synthetic construct
  misc_feature 1..570: note = derived and/or modified sequence opt3 fromIL-18__Homo_sapiens__EAW67185
  source 1..570: mol_type = other RNA
atggccgctgagcccgtggaagacaactgcatcaatttcgtcgcaatgaagtttattgataacaccctgtacttcatagagaatctcgaaagcgactattttggcaaacttgagtccaagctgtctgttatcagaaacttgaatgatcaggtgttattcattgaccaagggaacaggcctctgtttgaagatatgacagactcagattgtcgggacaatgccccacgcactatcttcattatcagtatgtacaaagatagccagccgcgaggaatggcggtaacgatatccgtgaagtgcgagaaaatctctaccctatcgtgtgagaacaagattatctcatttaaggaaatgaatccccctgacaacattaaagatacaaagagcgacatcatattctttcagcgtagtgtcccaggtcacgataataaaatgcagttcgagtcctctagctatgaaggctactttctcgcttgcgagaaggagagagacctgttcaaacttattctgaagaaggaagacgagttgggggataggtccatcatgtttactgtgcaaaacgaagactga

SEQ ID NO: 4286 - RNA, 570 nt, synthetic construct
  misc_feature 1..570: note = derived and/or modified sequence opt4 fromIL-18__Homo_sapiens__EAW67185
  source 1..570: mol_type = other RNA
atggccgccgagcccgtggaggacaactgcatcaacttcgtggccatgaagttcatcgacaacaccctgtacttcatcgagaacctggagagcgactacttcggcaagctggagagcaagctgagcgtgatcagaaacctgaacgaccaggtgctgttcatcgaccagggcaacagacccctgttcgaggacatgaccgacagcgactgcagagacaacgcccccagaaccatcttcatcatcagcatgtacaaggacagccagcccagaggcatggccgtgaccatcagcgtgaagtgcgagaagatcagcaccctgagctgcgagaacaagatcatcagcttcaaggagatgaacccccccgacaacatcaaggacaccaagagcgacatcatcttcttccagagaagcgtgcccggccacgacaacaagatgcagttcgagagcagcagctacgagggctacttcctggcctgcgagaaggagagagacctgttcaagctgatcctgaagaaggaggacgagctgggcgacagaagcatcatgttcaccgtgcagaacgaggactga

SEQ ID NO: 4287 - RNA, 570 nt, synthetic construct
  misc_feature 1..570: note = derived and/or modified sequence opt5 fromIL-18__Homo_sapiens__EAW67185
  source 1..570: mol_type = other RNA
atggccgctgagcccgtggaagacaactgcatcaatttcgtcgccatgaagtttattgataacaccctgtacttcatcgagaatctcgaaagcgactattttggcaaactggagtccaagctctctgttattagaaacctgaatgatcaggtgcttttcatcgaccaagggaaccggcctctgtttgaagatatgacagacagcgattgtcgcgacaatgcgccgagaacgattttcatcatctccatgtacaaagattctcagccccggggaatggctgtgaccattagcgtcaagtgcgagaaaatctccacactttcttgtgagaacaagattatcagctttaaggaaatgaatcctcccgacaacattaaagataccaagtccgacatcattttctttcagcgcagcgtgcctggccacgataataaaatgcagttcgagtcttccagctatgaagggtactttctggcctgcgagaaggagagagacctcttcaaactgatcctgaagaaggaagacgagctcggagatcggtctatcatgtttacagttcaaaacgaagactga

SEQ ID NO: 4288 - RNA, 570 nt, synthetic construct
  misc_feature 1..570: note = derived and/or modified sequence opt6 fromIL-18__Homo_sapiens__EAW67185
  source 1..570: mol_type = other RNA
atggcagcagaaccagtagaagacaactgcataaacttcgtagcaatgaaattcatagacaacacattatacttcatagaaaacctagaatcagactacttcggaaaactagaatcaaaactatcagtaatacgcaacttaaacgaccaagtactattcatagaccaaggaaacagacccctattcgaagacatgacagactcagactgcagagacaacgcaccaagaacaatattcataatatcaatgtacaaagacagccaaccaagaggaatggcagtaacaatatcagtaaaatgtgaaaaaatatcaacactaagctgcgaaaacaaaataataagcttcaaagaaatgaacccaccagacaacataaaagacacaaaatccgacataatattcttccaaagatcagtacccggacacgacaacaaaatgcaattcgaatcatcatcatacgaaggatacttcctagcatgcgaaaaagaacgagacctattcaaactaatactaaaaaaagaagatgaactaggagacagatcaataatgttcacagtacaaaacgaagactaa

SEQ ID NO: 4289 - protein, 193 aa, synthetic construct [sequence omitted]

SEQ ID NO: 4290 - RNA, 582 nt, synthetic construct
  misc_feature 1..582: note = IL-18__Homo_sapiens__ACA06006
  source 1..582: mol_type = other RNA
atggctgctgaaccagtagaagacaattgcatcaactttgtggcaatgaaatttattgacaatacgctttactttataggtgaactattaaaaaacctggaatcagattactttggcaagcttgaatctaaattatcagtcataagaaatttgaatgaccaagttctcttcattgaccaaggaaatcggcctctatttgaagatatgactgattctgactgtagagataatgcaccccggaccatatttattataagtatgtataaagatagccagcctagaggtatggctgtaactatctctgtgaagtgtgagaaaatttcaactctctcctgtgagaacaaaattatttcctttaaggaaatgaatcctcctgataacatcaaggatacaaaaagtgacatcatattctttcagagaagtgtcccaggacatgataataagatgcaatttgaatcttcatcatacgaaggatactttctagcttgtgaaaaagagagagacctttttaaactcattttgaaaaaagaggatgaattgggggatagatctataatgttcactgttcaaaacgaagactag

SEQ ID NO: 4291 - RNA, 582 nt, synthetic construct
  misc_feature 1..582: note = derived and/or modified sequence opt1 fromIL-18__Homo_sapiens__ACA06006
  source 1..582: mol_type = other RNA
atggccgccgagcccgtggaggacaactgcatcaacttcgtcgccatgaagttcatcgacaacaccctgtacttcatcggcgagctcctgaagaacctggagagcgactacttcgggaagctcgagtccaagctgagcgtgatccgcaacctgaacgaccaggtcctcttcatcgaccagggcaaccggccgctgttcgaggacatgaccgactccgactgccgcgacaacgcgccccggacgatcttcatcatcagcatgtacaaggactcccagccccgcgggatggccgtgaccatcagcgtgaagtgcgagaagatctccaccctgagctgcgagaacaagatcatctccttcaaggagatgaacccgcccgacaacatcaaggacaccaagagcgacatcatcttcttccagcggtccgtgcccggccacgacaacaagatgcagttcgagagctccagctacgaggggtacttcctcgcctgcgagaaggagcgcgacctgttcaagctgatcctcaagaaggaggacgagctgggcgaccggtccatcatgttcacggtccagaacgaggactga

SEQ ID NO: 4292 - RNA, 582 nt, synthetic construct
  misc_feature 1..582: note = derived and/or modified sequence opt2 fromIL-18__Homo_sapiens__ACA06006
  source 1..582: mol_type = other RNA
atggccgccgagcccgtcgaggacaactgcatcaacttcgtcgccatgaagttcatcgacaacaccctctacttcatcggcgagctcctcaagaacctcgagtccgactacttcggcaagctcgagtccaagctctccgtcatccgcaacctcaacgaccaggtcctcttcatcgaccagggcaaccgccccctcttcgaggacatgaccgactccgactgccgcgacaacgccccccgcaccatcttcatcatctccatgtacaaggactcccagccccgcggcatggccgtcaccatctccgtcaagtgcgagaagatctccaccctctcctgcgagaacaagatcatctccttcaaggagatgaacccccccgacaacatcaaggacaccaagtccgacatcatcttcttccagcgctccgtccccggccacgacaacaagatgcagttcgagtcctcctcctacgagggctacttcctcgcctgcgagaaggagcgcgacctcttcaagctcatcctcaagaaggaggacgagctcggcgaccgctccatcatgttcaccgtccagaacgaggactga

SEQ ID NO: 4293 - RNA, 582 nt, synthetic construct
  misc_feature 1..582: note = derived and/or modified sequence opt3 fromIL-18__Homo_sapiens__ACA06006
  source 1..582: mol_type = other RNA
atggccgctgagcccgtggaagacaactgcatcaatttcgtcgcaatgaagtttattgataacaccctgtacttcataggcgagctccttaaaaatctggaaagcgactattttgggaagttggagtccaaattatctgttatcagaaacctgaatgatcaggtgctattcattgaccaaggaaacaggcctctctttgaagatatgacagactcagattgtcgggacaatgccccacgcactatcttcattatcagtatgtacaaggatagccagccgcgaggtatggcggtaacgatatccgtgaaatgcgagaagatctctaccctgtcgtgtgagaacaagattatctcatttaaagaaatgaatccccctgacaacattaaggatacaaaaagcgacatcatattctttcagcgtagtgtcccaggccacgataataagatgcagttcgagtcctctagctatgaagggtactttcttgcttgcgagaaagagagagacctgttcaagttgattctcaagaaagaagacgagctgggagataggtccatcatgtttactgtgcaaaacgaagactga

SEQ ID NO: 4294 - RNA, 582 nt, synthetic construct
  misc_feature 1..582: note = derived and/or modified sequence opt4 fromIL-18__Homo_sapiens__ACA06006
  source 1..582: mol_type = other RNA
atggccgccgagcccgtggaggacaactgcatcaacttcgtggccatgaagttcatcgacaacaccctgtacttcatcggcgagctgctgaagaacctggagagcgactacttcggcaagctggagagcaagctgagcgtgatcagaaacctgaacgaccaggtgctgttcatcgaccagggcaacagacccctgttcgaggacatgaccgacagcgactgcagagacaacgcccccagaaccatcttcatcatcagcatgtacaaggacagccagcccagaggcatggccgtgaccatcagcgtgaagtgcgagaagatcagcaccctgagctgcgagaacaagatcatcagcttcaaggagatgaacccccccgacaacatcaaggacaccaagagcgacatcatcttcttccagagaagcgtgcccggccacgacaacaagatgcagttcgagagcagcagctacgagggctacttcctggcctgcgagaaggagagagacctgttcaagctgatcctgaagaaggaggacgagctgggcgacagaagcatcatgttcaccgtgcagaacgaggactga

SEQ ID NO: 4295 - RNA, 582 nt, synthetic construct
  misc_feature 1..582: note = derived and/or modified sequence opt5 fromIL-18__Homo_sapiens__ACA06006
  source 1..582: mol_type = other RNA
atggccgctgagcccgtggaagacaactgcatcaatttcgtcgccatgaagtttattgataacaccctgtacttcatcggcgagctcctgaaaaatcttgaaagcgactattttgggaagctggagtccaaactctctgttattagaaacctgaatgatcaggtgcttttcatcgaccaaggaaaccggcctctgtttgaagatatgacagacagcgattgtcgcgacaatgcgccgagaacgattttcatcatctccatgtacaaggattctcagccccggggcatggctgtgaccattagcgtcaaatgcgagaagatctccacactctcttgtgagaacaagattatcagctttaaagaaatgaatcctcccgacaacattaaggataccaaatccgacatcattttctttcagcgcagcgtgcctgggcacgataataagatgcagttcgagtcttccagctatgaaggatactttctggcctgcgagaaagagagagacctgttcaagctcatcctgaagaaagaagacgagcttggcgatcggtctatcatgtttacagttcaaaacgaagactga

SEQ ID NO: 4296 - RNA, 582 nt, synthetic construct
  misc_feature 1..582: note = derived and/or modified sequence opt6 fromIL-18__Homo_sapiens__ACA06006
  source 1..582: mol_type = other RNA
atggcagcagaaccagtagaagacaactgcataaacttcgtagcaatgaaattcatagacaacacactatacttcataggagaactactaaaaaacctagaatcagactacttcggaaaactagaatcaaaactatccgtaataagaaacctaaacgaccaagtactattcatagaccaaggaaacagaccactcttcgaagacatgacagactcagactgcagagacaacgcaccaagaacaatattcataatatcaatgtacaaagactcacaaccaagaggaatggcagtaaccatatcagtaaaatgcgaaaaaatatcaacactatcatgcgaaaacaaaataatatcattcaaagaaatgaacccaccagacaacataaaagacacaaaatcagacataatattcttccaaagatcagtaccaggacacgacaacaaaatgcaattcgaaagctcatcatacgaaggatacttcctagcatgcgaaaaagaaagagacctattcaaattaatactaaaaaaagaagacgaactaggagacagatcaataatgttcacagtccaaaacgaagactaa

SEQ ID NO: 4297 - protein, 193 aa, synthetic construct
  REGION 1..193: note = IL-18__Homo_sapiens__Q14116
MAAEPVEDNCINFVAMKFIDNTLYFIAEDDENLESDYFGKLESKLSVIRNLNDQVLFIDQGNRPLFEDMTDSDCRDNAPRTIFIISMYKDSQPRGMAVTISVKCEKISTLSCENKIISFKEMNPPDNIKDTKSDIIFFQRSVPGHDNKMQFESSSYEGYFLACEKERDLFKLILKKEDELGDRSIMFTVQNED

SEQ ID NO: 4298 - RNA, 582 nt, synthetic construct
  misc_feature 1..582: note = IL-18__Homo_sapiens__AAH07007
  source 1..582: mol_type = other RNA
atggctgctgaaccagtagaagacaattgcatcaactttgtggcaatgaaatttattgacaatacgctttactttatagctgaagatgatgaaaacctggaatccgattactttggcaagcttgaatctaaattatcagtcataagaaatttgaatgaccaagttctcttcattgaccaaggaaatcggcctctatttgaagatatgactgattctgactgtagagataatgcaccccggaccatatttattataagtatgtataaagatagccagcctagaggtatggctgtaactatctctgtgaagtgtgagaaaatttcaactctctcctgtgagaacaaaattatttcctttaaggaaatgaatcctcctgataacatcaaggatacaaaaagtgacatcatattctttcagagaagtgtcccaggacatgataataagatgcaatttgaatcttcatcatacgaaggatactttctagcttgtgaaaaagagagagacctttttaaactcattttgaaaaaagaggatgaattgggggatagatctataatgttcactgttcaaaacgaagactag

SEQ ID NO: 4299 - RNA, 582 nt, synthetic construct
  misc_feature 1..582: note = derived and/or modified sequence opt1 fromIL-18__Homo_sapiens__AAH07007
  source 1..582: mol_type = other RNA
atggccgccgagcccgtggaggacaactgcatcaacttcgtcgccatgaagttcatcgacaacaccctgtacttcatcgccgaggacgacgagaacctcgagagcgactacttcggcaagctggagtccaagctgagcgtgatccgcaacctcaacgaccaggtgctgttcatcgaccaggggaaccggccgctgttcgaggacatgaccgactccgactgccgcgacaacgcgccccggacgatcttcatcatcagcatgtacaaggactcccagccccgcggcatggccgtcaccatcagcgtgaagtgcgagaagatctccaccctcagctgcgagaacaagatcatctccttcaaggagatgaacccgcccgacaacatcaaggacaccaagagcgacatcatcttcttccagcggtccgtgcccgggcacgacaacaagatgcagttcgagagctccagctacgagggctacttcctggcctgcgagaaggagcgcgacctgttcaagctcatcctgaagaaggaggacgagctgggggaccggtccatcatgttcacggtccagaacgaggactga

SEQ ID NO: 4300 - RNA, 582 nt, synthetic construct
  misc_feature 1..582: note = derived and/or modified sequence opt2 fromIL-18__Homo_sapiens__AAH07007
  source 1..582: mol_type = other RNA
atggccgccgagcccgtcgaggacaactgcatcaacttcgtcgccatgaagttcatcgacaacaccctctacttcatcgccgaggacgacgagaacctcgagtccgactacttcggcaagctcgagtccaagctctccgtcatccgcaacctcaacgaccaggtcctcttcatcgaccagggcaaccgccccctcttcgaggacatgaccgactccgactgccgcgacaacgccccccgcaccatcttcatcatctccatgtacaaggactcccagccccgcggcatggccgtcaccatctccgtcaagtgcgagaagatctccaccctctcctgcgagaacaagatcatctccttcaaggagatgaacccccccgacaacatcaaggacaccaagtccgacatcatcttcttccagcgctccgtccccggccacgacaacaagatgcagttcgagtcctcctcctacgagggctacttcctcgcctgcgagaaggagcgcgacctcttcaagctcatcctcaagaaggaggacgagctcggcgaccgctccatcatgttcaccgtccagaacgaggactga

SEQ ID NO: 4301 - RNA, 582 nt, synthetic construct
  misc_feature 1..582: note = derived and/or modified sequence opt3 fromIL-18__Homo_sapiens__AAH07007
  source 1..582: mol_type = other RNA
atggccgctgagcccgtggaagacaactgcatcaatttcgtcgcaatgaagtttattgataacaccctgtacttcatagccgaggacgatgaaaatctcgagagcgactattttggcaaacttgaatccaagctgtctgttatcagaaacttgaatgatcaggtgttattcattgaccaagggaacaggcctctgtttgaggatatgacagactcagattgtcgggacaatgcgccacgcactatcttcattatcagtatgtacaaagatagccagccgcgaggaatggctgtaacgatatccgtgaagtgcgagaaaatctctaccctatcgtgtgaaaacaagattatctcatttaaggagatgaatccccctgacaacattaaagatacaaagagcgacatcatattctttcagcgtagtgtcccaggtcacgacaataaaatgcagttcgaatcctctagctatgagggctactttctcgcctgcgagaaggaaagagatctgttcaaacttattctgaagaaggaggacgaattgggggataggtccatcatgtttactgtgcaaaacgaggactga

SEQ ID NO: 4302 - RNA, 582 nt, synthetic construct
  misc_feature 1..582: note = derived and/or modified sequence opt4 fromIL-18__Homo_sapiens__AAH07007
  source 1..582: mol_type = other RNA
atggccgccgagcccgtggaggacaactgcatcaacttcgtggccatgaagttcatcgacaacaccctgtacttcatcgccgaggacgacgagaacctggagagcgactacttcggcaagctggagagcaagctgagcgtgatcagaaacctgaacgaccaggtgctgttcatcgaccagggcaacagacccctgttcgaggacatgaccgacagcgactgcagagacaacgcccccagaaccatcttcatcatcagcatgtacaaggacagccagcccagaggcatggccgtgaccatcagcgtgaagtgcgagaagatcagcaccctgagctgcgagaacaagatcatcagcttcaaggagatgaacccccccgacaacatcaaggacaccaagagcgacatcatcttcttccagagaagcgtgcccggccacgacaacaagatgcagttcgagagcagcagctacgagggctacttcctggcctgcgagaaggagagagacctgttcaagctgatcctgaagaaggaggacgagctgggcgacagaagcatcatgttcaccgtgcagaacgaggactga

SEQ ID NO: 4303 - RNA, 582 nt, synthetic construct
  misc_feature 1..582: note = derived and/or modified sequence opt5 fromIL-18__Homo_sapiens__AAH07007
  source 1..582: mol_type = other RNA
atggccgctgagcccgtggaagacaactgcatcaatttcgtcgccatgaagtttattgataacaccctgtacttcatcgcggaggacgatgaaaatctcgagagcgactattttggcaaactggaatccaagctctctgttattagaaacctgaatgatcaggtgcttttcatcgaccaagggaaccggcctctgtttgaggatatgacagacagcgattgtcgcgacaatgctccgagaacgattttcatcatctccatgtacaaagattctcagccccggggaatggccgtgaccattagcgtcaagtgcgagaaaatctccacactttcttgtgaaaacaagattatcagctttaaggagatgaatcctcccgacaacattaaagataccaagtccgacatcattttctttcagcgcagcgtgcctggccacgacaataaaatgcagttcgaatcttccagctatgaggggtactttctggcctgcgagaaggaaagagatctcttcaaactgatcctgaagaaggaggacgaactcggagatcggtctatcatgtttacagttcaaaacgaggactga

SEQ ID NO: 4304 - RNA, 582 nt, synthetic construct
  misc_feature 1..582: note = derived and/or modified sequence opt6 fromIL-18__Homo_sapiens__AAH07007
  source 1..582: mol_type = other RNA
atggcagcagaaccagtagaagacaactgcataaacttcgtagcaatgaaattcatcgacaacacactatacttcatagcagaagacgatgaaaacctagaaagcgactacttcggaaaattagaatcaaaactatcagtaataagaaacctaaacgaccaagtactattcatagaccaaggaaacagaccactattcgaagacatgacagactcagactgcagagacaacgcaccaagaacaatattcataatatcaatgtacaaagacagccaaccacgaggaatggcagtaacaataagcgtaaaatgcgaaaaaatatcaacactatcatgcgaaaacaaaataatatcattcaaagaaatgaacccaccagataacataaaagacacaaaatcagatataatattcttccaaagatcagtaccaggacacgacaacaaaatgcaattcgaatcatcatcatacgaaggatacttcctagcatgcgaaaaagaacgagacctattcaaactaatactaaaaaaagaagacgaattaggagacagatcaataatgttcacagtacaaaacgaagactaa

SEQ ID NO: 4305 - protein, 177 aa, synthetic construct
  REGION 1..177: note = IL-19__Homo_sapiens__Q9UHD0
MKLQCVSLWLLGTILILCSVDNHGLRRCLISTDMHHIEESFQEIKRAIQAKDTFPNVTILSTLETLQIIKPLDVCCVTKNLLAFYVDRVFKDHQEPNPKILRKISSIANSFLYMQKTLRQCQEQRQCHCRQEATNATRVIHDNYDQLEVHAAAIKSLGELDVFLAWINKNHEVMFSA

SEQ ID NO: 4306 - RNA, 534 nt, synthetic construct
  misc_feature 1..534: note = IL-19__Homo_sapiens__CCDS1469.1
  source 1..534: mol_type = other RNA
atgaagttacagtgtgtttccctttggctcctgggtacaatactgatattgtgctcagtagacaaccacggtctcaggagatgtctgatttccacagacatgcaccatatagaagagagtttccaagaaatcaaaagagccatccaagctaaggacaccttcccaaatgtcactatcctgtccacattggagactctgcagatcattaagcccttagatgtgtgctgcgtgaccaagaacctcctggcgttctacgtggacagggtgttcaaggatcatcaggagccaaaccccaaaatcttgagaaaaatcagcagcattgccaactctttcctctacatgcagaaaactctgcggcaatgtcaggaacagaggcagtgtcactgcaggcaggaagccaccaatgccaccagagtcatccatgacaactatgatcagctggaggtccacgctgctgccattaaatccctgggagagctcgacgtctttctagcctggattaataagaatcatgaagtaatgttctcagcttga

SEQ ID NO: 4307 - RNA, 534 nt, synthetic construct
  misc_feature 1..534: note = derived and/or modified sequence opt1 fromIL-19__Homo_sapiens__CCDS1469.1
  source 1..534: mol_type = other RNA
atgaagctgcagtgcgtgagcctctggctgctgggcaccatcctcatcctgtgctccgtcgacaaccacgggctgcgccggtgcctcatcagcaccgacatgcaccacatcgaggagtccttccaggagatcaagcgcgccatccaggccaaggacacgttccccaacgtgaccatcctgagcaccctggagaccctccagatcatcaagccgctggacgtgtgctgcgtcacgaagaacctgctcgcgttctacgtggaccgggtgttcaaggaccaccaggagcccaaccccaagatcctgcgcaagatctccagcatcgccaactccttcctgtacatgcagaagaccctccggcagtgccaggagcagcgccagtgccactgccggcaggaggccaccaacgccacccgcgtcatccacgacaactacgaccagctggaggtgcacgccgcggccatcaagagcctgggcgagctcgacgtgttcctggcctggatcaacaagaaccacgaggtcatgttctccgcctga

SEQ ID NO: 4308 - RNA, 534 nt, synthetic construct
  misc_feature 1..534: note = derived and/or modified sequence opt2 fromIL-19__Homo_sapiens__CCDS1469.1
  source 1..534: mol_type = other RNA
atgaagctccagtgcgtctccctctggctcctcggcaccatcctcatcctctgctccgtcgacaaccacggcctccgccgctgcctcatctccaccgacatgcaccacatcgaggagtccttccaggagatcaagcgcgccatccaggccaaggacaccttccccaacgtcaccatcctctccaccctcgagaccctccagatcatcaagcccctcgacgtctgctgcgtcaccaagaacctcctcgccttctacgtcgaccgcgtcttcaaggaccaccaggagcccaaccccaagatcctccgcaagatctcctccatcgccaactccttcctctacatgcagaagaccctccgccagtgccaggagcagcgccagtgccactgccgccaggaggccaccaacgccacccgcgtcatccacgacaactacgaccagctcgaggtccacgccgccgccatcaagtccctcggcgagctcgacgtcttcctcgcctggatcaacaagaaccacgaggtcatgttctccgcctga

SEQ ID NO: 4309 - RNA, 534 nt, synthetic construct
  misc_feature 1..534: note = derived and/or modified sequence opt3 fromIL-19__Homo_sapiens__CCDS1469.1
  source 1..534: mol_type = other RNA
atgaagctgcagtgcgtgagcctctggcttctgggcaccatcttgattttatgttccgtcgacaaccacgggctgagaaggtgcctaatatctacagatatgcatcacatcgaggaatcattccaagagattaaacgggccatccaggctaaggacacttttcccaatgttacgattctcagtaccctggaaacacttcagatcataaaacctctggatgtgtgttgcgtaactaagaacttgctcgcattctacgtggaccgcgtctttaaagatcatcaggagccaaatccgaagatcctgcgaaagattagctccatcgccaactctttcctgtatatgcagaaaaccctccgtcaatgtcaggaacagagacaatgccactgtaggcaggaggcgacaaatgctacccgggtgattcatgacaactacgatcagttagaggttcacgccgcagccatcaagtcgctgggagaacttgacgtgtttttggcttggataaataaaaaccacgaggtcatgttctcagcatga

SEQ ID NO: 4310 - RNA, 534 nt, synthetic construct
  misc_feature 1..534: note = derived and/or modified sequence opt4 fromIL-19__Homo_sapiens__CCDS1469.1
  source 1..534: mol_type = other RNA
atgaagctgcagtgcgtgagcctgtggctgctgggcaccatcctgatcctgtgcagcgtggacaaccacggcctgagaagatgcctgatcagcaccgacatgcaccacatcgaggagagcttccaggagatcaagagagccatccaggccaaggacaccttccccaacgtgaccatcctgagcaccctggagaccctgcagatcatcaagcccctggacgtgtgctgcgtgaccaagaacctgctggccttctacgtggacagagtgttcaaggaccaccaggagcccaaccccaagatcctgagaaagatcagcagcatcgccaacagcttcctgtacatgcagaagaccctgagacagtgccaggagcagagacagtgccactgcagacaggaggccaccaacgccaccagagtgatccacgacaactacgaccagctggaggtgcacgccgccgccatcaagagcctgggcgagctggacgtgttcctggcctggatcaacaagaaccacgaggtgatgttcagcgcctga

SEQ ID NO: 4311 - RNA, 534 nt, synthetic construct
  misc_feature 1..534: note = derived and/or modified sequence opt5 fromIL-19__Homo_sapiens__CCDS1469.1
  source 1..534: mol_type = other RNA
atgaagctgcagtgcgtgagcctctggctgcttggcaccatcctgattctctgttccgtcgacaaccacgggctgagacggtgccttatctctacagatatgcatcacattgaggagagcttccaagaaatcaaacgcgccattcaggctaaggacacgtttcccaatgttaccatcctgtccacactcgaaaccctgcagatcattaaacctctggatgtgtgttgcgtgacaaagaacctcctggccttctacgtcgacagagtgtttaaagatcatcaggagccgaatcccaagatccttcggaagatttctagcatcgcgaactccttcctgtatatgcagaaaaccctccgccaatgtcaggaacagagacaatgccactgtcggcaggaggctacaaatgccacccgcgttattcatgacaactacgatcagctggaggtgcacgccgctgccatcaagtctcttggagaactggacgtctttctcgcttggattaataaaaaccacgaggtgatgttcagcgcctga

SEQ ID NO: 4312 - RNA, 534 nt, synthetic construct
  misc_feature 1..534: note = derived and/or modified sequence opt6 fromIL-19__Homo_sapiens__CCDS1469.1
  source 1..534: mol_type = other RNA
atgaaactacaatgcgtatcactatggctactaggaacaatactaatactatgctcagtagacaatcacggactaagaagatgcctaatatcaacagacatgcaccacatagaagaatcatttcaagaaataaaaagagcaatacaagcaaaagacacattcccaaacgtaacaatactatcaacactagaaacactacaaataataaaaccactcgacgtatgctgcgtaacaaaaaacttactagcattctacgtagacagagtcttcaaagaccaccaagaaccaaacccaaaaatactaagaaaaatatcaagcatagccaactcattcctatacatgcaaaaaacactaagacaatgccaagaacaaagacaatgccactgcagacaagaagcaacaaacgcaacaagagtaatacacgacaactacgaccaattagaagtacacgcagcagcaataaaatcactaggagaactagacgtattcctagcatggataaacaaaaaccatgaagtaatgttctcagcataa

SEQ ID NO: 4313 - protein, 271 aa, synthetic construct
  REGION 1..271: note = IL-1_alpha__Homo_sapiens__P01583
MAKVPDMFEDLKNCYSENEEDSSSIDHLSLNQKSFYHVSYGPLHEGCMDQSVSLSISETSKTSKLTFKESMVVVATNGKVLKKRRLSLSQSITDDDLEAIANDSEEEIIKPRSAPFSFLSNVKYNFMRIIKYEFILNDALNQSIIRANDQYLTAAALHNLDEAVKFDMGAYKSSKDDAKITVILRISKTQLYVTAQDEDQPVLLKEMPEIPKTITGSETNLLFFWETHGTKNYFTSVAHPNLFIATKQDYWVCLAGGPPSITDFQILENQA

SEQ ID NO: 4314 - RNA, 816 nt, synthetic construct
  misc_feature 1..816: note = IL-1_alpha__Homo_sapiens__AAA59133
  source 1..816: mol_type = other RNA
atggccaaagttccagacatgtttgaagacctgaagaactgttacagtgaaaatgaagaagacagttcctccattgatcatctgtctctgaatcagaaatccttctatcatgtaagctatggcccactccatgaaggctgcatggatcaatctgtgtctctgagtatctctgaaacctctaaaacatccaagcttaccttcaaggagagcatggtggtagtagcaaccaacgggaaggttctgaagaagagacggttgagtttaagccaatccatcactgatgatgacctggaggccatcgccaatgactcagaggaagaaatcatcaagcctaggtcagcaccttttagcttcctgagcaatgtgaaatacaactttatgaggatcatcaaatacgaattcatcctgaatgacgccctcaatcaaagtataattcgagccaatgatcagtacctcacggctgctgcattacataatctggatgaagcagtgaaatttgacatgggtgcttataagtcatcaaaggatgatgctaaaattaccgtgattctaagaatctcaaaaactcaattgtatgtgactgcccaagatgaagaccaaccagtgctgctgaaggagatgcctgagatacccaaaaccatcacaggtagtgagaccaacctcctcttcttctgggaaactcacggcactaagaactatttcacatcagttgcccatccaaacttgtttattgccacaaagcaagactactgggtgtgcttggcaggggggccaccctctatcactgactttcagatactggaaaaccaggcgtag

SEQ ID NO: 4315 - RNA, 816 nt, synthetic construct
  misc_feature 1..816: note = derived and/or modified sequence opt1 fromIL-1_alpha__Homo_sapiens__AAA59133
  source 1..816: mol_type = other RNA
atggccaaggtgcccgacatgttcgaggacctgaagaactgctacagcgagaacgaggaggactccagctccatcgaccacctcagcctgaaccagaagtccttctaccacgtcagctacggcccgctgcacgagggctgcatggaccagtccgtgagcctctccatcagcgagacctccaagaccagcaagctgacgttcaaggagtccatggtggtcgtggccaccaacggcaaggtgctgaagaagcgccggctcagcctgtcccagagcatcaccgacgacgacctggaggcgatcgccaacgactccgaggaggagatcatcaagccccgcagcgcccccttctccttcctcagcaacgtcaagtacaacttcatgcggatcatcaagtacgagttcatcctgaacgacgccctgaaccagagcatcatccgcgccaacgaccagtacctcaccgcggccgccctgcacaacctggacgaggccgtgaagttcgacatgggggcgtacaagtccagcaaggacgacgccaagatcacggtgatcctccggatctccaagacccagctgtacgtcaccgcccaggacgaggaccagcccgtgctgctcaaggagatgccggagatccccaagaccatcacgggcagcgagaccaacctgctgttcttctgggagacccacgggaccaagaactacttcacgtccgtggcccaccccaacctcttcatcgccaccaagcaggactactgggtctgcctggcgggcgggcccccgagcatcaccgacttccagatcctggagaaccaggcctga

SEQ ID NO: 4316 - RNA, 816 nt, synthetic construct
  misc_feature 1..816: note = derived and/or modified sequence opt2 fromIL-1_alpha__Homo_sapiens__AAA59133
  source 1..816: mol_type = other RNA
atggccaaggtccccgacatgttcgaggacctcaagaactgctactccgagaacgaggaggactcctcctccatcgaccacctctccctcaaccagaagtccttctaccacgtctcctacggccccctccacgagggctgcatggaccagtccgtctccctctccatctccgagacctccaagacctccaagctcaccttcaaggagtccatggtcgtcgtcgccaccaacggcaaggtcctcaagaagcgccgcctctccctctcccagtccatcaccgacgacgacctcgaggccatcgccaacgactccgaggaggagatcatcaagccccgctccgcccccttctccttcctctccaacgtcaagtacaacttcatgcgcatcatcaagtacgagttcatcctcaacgacgccctcaaccagtccatcatccgcgccaacgaccagtacctcaccgccgccgccctccacaacctcgacgaggccgtcaagttcgacatgggcgcctacaagtcctccaaggacgacgccaagatcaccgtcatcctccgcatctccaagacccagctctacgtcaccgcccaggacgaggaccagcccgtcctcctcaaggagatgcccgagatccccaagaccatcaccggctccgagaccaacctcctcttcttctgggagacccacggcaccaagaactacttcacctccgtcgcccaccccaacctcttcatcgccaccaagcaggactactgggtctgcctcgccggcggccccccctccatcaccgacttccagatcctcgagaaccaggcctga

SEQ ID NO: 4317 - RNA, 816 nt, synthetic construct
  misc_feature 1..816: note = derived and/or modified sequence opt3 fromIL-1_alpha__Homo_sapiens__AAA59133
  source 1..816: mol_type = other RNA
atggccaaggtgcccgacatgttcgaggatctgaaaaactgctacagcgaaaatgaggaagactcctcttcaatcgatcacctcagtcttaaccaaaagagcttttatcatgtctcctacggccctctgcacgaggggtgtatggaccagtctgtttcgttgtcaattagcgaaaccagtaaaacatccaagttaactttcaaagagtctatggtggtagtggctacgaatggaaaggtcctgaagaaaagaaggctaagcctctcccagtcaataaccgatgacgatctggaggcaatcgccaacgacagtgaagaggaaattatcaagccacggagcgcgccgttttctttcctttccaatgtgaaatataactttatgcgcattatcaagtacgagttcatactgaatgatgctttgaaccagtcaatcattcgagccaatgaccagtatctcacagcagccgctctgcataacctggatgaggcagttaaatttgacatgggtgcctacaagagcagtaaggatgacgctaaaatcactgtgattctccgtatctctaagacccaattatatgtcacagcccaggacgaagatcagcccgtgctgcttaaagagatgcctgaaataccaaagaccattactggctccgagacaaatttgctgttcttttgggaaacccacgggacgaaaaactacttcactagcgtagcgcatcccaatctatttatcgcaaccaagcaggactactgggtttgcctcgccggaggccctccatcgattacagatttccaaatcctggagaaccaggcttga

SEQ ID NO: 4318 - RNA, 816 nt, synthetic construct
  misc_feature 1..816: note = derived and/or modified sequence opt4 fromIL-1_alpha__Homo_sapiens__AAA59133
  source 1..816: mol_type = other RNA
atggccaaggtgcccgacatgttcgaggacctgaagaactgctacagcgagaacgaggaggacagcagcagcatcgaccacctgagcctgaaccagaagagcttctaccacgtgagctacggccccctgcacgagggctgcatggaccagagcgtgagcctgagcatcagcgagaccagcaagaccagcaagctgaccttcaaggagagcatggtggtggtggccaccaacggcaaggtgctgaagaagagaagactgagcctgagccagagcatcaccgacgacgacctggaggccatcgccaacgacagcgaggaggagatcatcaagcccagaagcgcccccttcagcttcctgagcaacgtgaagtacaacttcatgagaatcatcaagtacgagttcatcctgaacgacgccctgaaccagagcatcatcagagccaacgaccagtacctgaccgccgccgccctgcacaacctggacgaggccgtgaagttcgacatgggcgcctacaagagcagcaaggacgacgccaagatcaccgtgatcctgagaatcagcaagacccagctgtacgtgaccgcccaggacgaggaccagcccgtgctgctgaaggagatgcccgagatccccaagaccatcaccggcagcgagaccaacctgctgttcttctgggagacccacggcaccaagaactacttcaccagcgtggcccaccccaacctgttcatcgccaccaagcaggactactgggtgtgcctggccggcggcccccccagcatcaccgacttccagatcctggagaaccaggcctga

SEQ ID NO: 4319 - RNA, 816 nt, synthetic construct
  misc_feature 1..816: note = derived and/or modified sequence opt5 fromIL-1_alpha__Homo_sapiens__AAA59133
  source 1..816: mol_type = other RNA
atggccaaggtgcccgacatgttcgaggatctgaaaaactgctacagcgaaaatgaggaagactcctctagcatcgatcacctctccctgaaccagaagtctttttatcatgtcagctacggccctcttcacgaggggtgtatggaccaatccgtttctctgagcatttccgaaaccagcaaaacatctaagctcacgttcaaagagtccatggtggtggtcgctaccaatggaaaggtgctgaagaaaagacggcttagcctgtctcagtccatcacagatgacgatctcgaggccattgcgaacgacagcgaagaggaaatcattaagccgcgctctgctcccttttccttcctgagcaatgttaaatataactttatgagaatcatcaagtacgagttcattctgaatgatgccctcaaccagtccatcattcgggccaatgaccagtatctgaccgctgccgcccttcataacctggatgaggctgtgaaatttgacatgggcgcgtacaagtctagcaaggatgacgccaaaatcacagtcattctccgcatctccaagacccaactgtatgtgacagctcaggacgaagatcagcctgttcttctgaaagagatgcccgaaattcctaagaccatcacggggagcgagaccaatctcctgttcttttgggaaacacacggaaccaaaaactacttcacatctgtggcccatcccaatctgtttatcgctaccaagcaggactactgggtctgcctcgccggcgggcctccgtccattacggatttccaaatcctggagaaccaggcgtga

SEQ ID NO: 4320 - RNA, 816 nt, synthetic construct
  misc_feature 1..816: note = derived and/or modified sequence opt6 fromIL-1_alpha__Homo_sapiens__AAA59133
  source 1..816: mol_type = other RNA
atggcaaaagtaccagacatgttcgaagacttaaaaaattgctactcagaaaacgaagaagactcatcatccatagaccacctatcactaaaccaaaaatccttctatcacgtatcatacggaccactacacgaaggatgcatggaccaatcagtatcactatctatatcagaaacatcaaaaacatcaaaactaacattcaaagaatcaatggtagtagtagcaacaaacggaaaagtattaaaaaaaagaagattatcactatcacaatccataacagacgacgacctagaagccatagcaaatgactcagaagaagaaataataaaaccacgatcagcaccattttcattcctatcaaatgtaaaatacaatttcatgcgaataataaaatacgaattcatattaaacgacgcactaaaccaatcaataataagagccaacgaccaatacctaactgcagcagcactacacaacctcgacgaagcagtaaaattcgacatgggagcctataaatcatcaaaagacgacgcaaaaataacagtcatattaagaatatcaaaaacacaattatacgtaacagcacaagacgaagaccaaccagtactactaaaagaaatgcctgaaataccaaaaacaataacaggatcagaaacaaacttattattcttctgggaaacacacggaacaaaaaactacttcacatctgtagcacacccaaacctattcatagcaaccaaacaagactactgggtatgcctagctggaggcccaccatccatcacagacttccaaatactagaaaaccaagcataa

SEQ ID NO: 4321 - protein, 269 aa, synthetic construct
  REGION 1..269: note = IL-1_beta__Homo_sapiens__P01584
MAEVPELASEMMAYYSGNEDDLFFEADGPKQMKCSFQDLDLCPLDGGIQLRISDHHYSKGFRQAASVVVAMDKLRKMLVPCPQTFQENDLSTFFPFIFEEEPIFFDTWDNEAYVHDAPVRSLNCTLRDSQQKSLVMSGPYELKALHLQGQDMEQQVVFSMSFVQGEESNDKIPVALGLKEKNLYLSCVLKDDKPTLQLESVDPKNYPKKKMEKRFVFNKIEINNKLEFESAQFPNWYISTSQAENMPVFLGGTKGGQDITDFTMQFVSS

SEQ ID NO: 4322 - RNA, 810 nt, synthetic construct
  misc_feature 1..810: note = IL-1_beta__Homo_sapiens__AAA59135
  source 1..810: mol_type = other RNA
atggcagaagtacctgagctcgccagtgaaatgatggcttattacagtggcaatgaggatgacttgttctttgaagctgatggccctaaacagatgaagtgctccttccaggacctggacctctgccctctggatggcggcatccagctacgaatctccgaccaccactacagcaagggcttcaggcaggccgcgtcagttgttgtggccatggacaagctgaggaagatgctggttccctgcccacagaccttccaggagaatgacctgagcaccttctttcccttcatctttgaagaagaacctatcttcttcgacacatgggataacgaggcttatgtgcacgatgcacctgtacgatcactgaactgcacgctccgggactcacagcaaaaaagcttggtgatgtctggtccatatgaactgaaagctctccacctccagggacaggatatggagcaacaagtggtgttctccatgtcctttgtacaaggagaagaaagtaatgacaaaatacctgtggccttgggcctcaaggaaaagaatctgtacctgtcctgcgtgttgaaagatgataagcccactctacagctggagagtgtagatcccaaaaattacccaaagaagaagatggaaaagcgatttgtcttcaacaagatagaaatcaataacaagctggaatttgagtctgcccagttccccaactggtacatcagcacctctcaagcagaaaacatgcccgtcttcctgggagggaccaaaggcggccaggatataactgacttcaccatgcaatttgtgtcttcctaa

SEQ ID NO: 4323 - RNA, 810 nt, synthetic construct
  misc_feature 1..810: note = derived and/or modified sequence opt1 fromIL-1_beta__Homo_sapiens__AAA59135
  source 1..810: mol_type = other RNA
atggccgaggtgcccgagctggccagcgagatgatggcgtactactccggcaacgaggacgacctcttcttcgaggccgacgggccgaagcagatgaagtgcagcttccaggacctggacctgtgccccctcgacggcgggatccagctgcgcatctccgaccaccactacagcaagggcttccggcaggccgcctccgtcgtggtggccatggacaagctgcgcaagatgctcgtcccctgcccccagaccttccaggagaacgacctgagcaccttcttcccgttcatcttcgaggaggagcccatcttcttcgacacgtgggacaacgaggcgtacgtgcacgacgcccccgtgcggtccctgaactgcaccctccgcgacagccagcagaagtccctggtcatgagcgggccctacgagctgaaggccctccacctccagggccaggacatggagcagcaggtcgtgttctccatgagcttcgtgcagggcgaggagtccaacgacaagatcccggtggccctggggctgaaggagaagaacctgtacctgagctgcgtgctcaaggacgacaagcccaccctgcagctggagtccgtcgaccccaagaactaccccaagaagaagatggagaagcggttcgtgttcaacaagatcgagatcaacaacaagctcgagttcgagagcgcgcagttcccgaactggtacatctccaccagccaggccgagaacatgcccgtgttcctgggcgggacgaagggcgggcaggacatcaccgacttcaccatgcagttcgtctccagctga

SEQ ID NO: 4324 - RNA, 810 nt, synthetic construct
  misc_feature 1..810: note = derived and/or modified sequence opt2 fromIL-1_beta__Homo_sapiens__AAA59135
  source 1..810: mol_type = other RNA
atggccgaggtccccgagctcgcctccgagatgatggcctactactccggcaacgaggacgacctcttcttcgaggccgacggccccaagcagatgaagtgctccttccaggacctcgacctctgccccctcgacggcggcatccagctccgcatctccgaccaccactactccaagggcttccgccaggccgcctccgtcgtcgtcgccatggacaagctccgcaagatgctcgtcccctgcccccagaccttccaggagaacgacctctccaccttcttccccttcatcttcgaggaggagcccatcttcttcgacacctgggacaacgaggcctacgtccacgacgcccccgtccgctccctcaactgcaccctccgcgactcccagcagaagtccctcgtcatgtccggcccctacgagctcaaggccctccacctccagggccaggacatggagcagcaggtcgtcttctccatgtccttcgtccagggcgaggagtccaacgacaagatccccgtcgccctcggcctcaaggagaagaacctctacctctcctgcgtcctcaaggacgacaagcccaccctccagctcgagtccgtcgaccccaagaactaccccaagaagaagatggagaagcgcttcgtcttcaacaagatcgagatcaacaacaagctcgagttcgagtccgcccagttccccaactggtacatctccacctcccaggccgagaacatgcccgtcttcctcggcggcaccaagggcggccaggacatcaccgacttcaccatgcagttcgtctcctcctga

SEQ ID NO: 4325 - RNA, 810 nt, synthetic construct
  misc_feature 1..810: note = derived and/or modified sequence opt3 fromIL-1_beta__Homo_sapiens__AAA59135
  source 1..810: mol_type = other RNA
atggccgaggtgcccgaactggctagcgagatgatggcatactattccggcaacgaagacgatctcttctttgaggccgacgggcctaagcagatgaaatgctctttccaagatcttgacctgtgtccattggatggaggtatccagttaagaatttcagaccaccattacagtaagggctttaggcaggcggctagcgtcgttgtggccatggataaactgcggaagatgctagtaccgtgcccccagaccttccaagaaaatgacctctccacatttttcccttttatattcgaggaggaaccaatctttttcgatacttgggacaacgaggcatatgtgcacgatgcccccgtccgctctctgaattgtacgcttcgagactcgcagcagaaatcactggtgatgagcgggccttacgaattgaaggctctccatctgcagggacaagatatggagcagcaggttgtgtttagtatgtccttcgtccagggcgaggaatctaacgacaagattccagtggcactgggtctcaaagagaagaatttatatctgagctgcgtacttaaagacgataagcccaccttgcaactggaatccgttgaccctaaaaactacccaaagaagaaaatggagaagcgttttgtgttcaataaaatcgaaattaacaataagctagagttcgagtcagcccagtttccgaactggtatatcagtacaagccaggctgaaaatatgcccgtcttcctcgggggaactaaaggcggccaagatataaccgactttacaatgcagttcgtgtcttcctga

SEQ ID NO: 4326 - RNA, 810 nt, synthetic construct
  misc_feature 1..810: note = derived and/or modified sequence opt4 fromIL-1_beta__Homo_sapiens__AAA59135
  source 1..810: mol_type = other RNA
atggccgaggtgcccgagctggccagcgagatgatggcctactacagcggcaacgaggacgacctgttcttcgaggccgacggccccaagcagatgaagtgcagcttccaggacctggacctgtgccccctggacggcggcatccagctgagaatcagcgaccaccactacagcaagggcttcagacaggccgccagcgtggtggtggccatggacaagctgagaaagatgctggtgccctgcccccagaccttccaggagaacgacctgagcaccttcttccccttcatcttcgaggaggagcccatcttcttcgacacctgggacaacgaggcctacgtgcacgacgcccccgtgagaagcctgaactgcaccctgagagacagccagcagaagagcctggtgatgagcggcccctacgagctgaaggccctgcacctgcagggccaggacatggagcagcaggtggtgttcagcatgagcttcgtgcagggcgaggagagcaacgacaagatccccgtggccctgggcctgaaggagaagaacctgtacctgagctgcgtgctgaaggacgacaagcccaccctgcagctggagagcgtggaccccaagaactaccccaagaagaagatggagaagagattcgtgttcaacaagatcgagatcaacaacaagctggagttcgagagcgcccagttccccaactggtacatcagcaccagccaggccgagaacatgcccgtgttcctgggcggcaccaagggcggccaggacatcaccgacttcaccatgcagttcgtgagcagctga

SEQ ID NO: 4327 - RNA, 810 nt, synthetic construct
  misc_feature 1..810: note = derived and/or modified sequence opt5 fromIL-1_beta__Homo_sapiens__AAA59135
  source 1..810: mol_type = other RNA
atggccgaggtgcccgaactggctagcgagatgatggcctactattccggcaacgaagacgatctcttctttgaggcggacgggcctaagcagatgaaatgctctttccaagatctggacctttgtccgctggatggaggcatccagctcagaattagcgaccaccattactccaaggggtttcggcaggctgcctctgtcgttgtggccatggataaactgcgcaagatgcttgtgccctgccctcagaccttccaagaaaatgacctgagcacatttttcccctttatcttcgaggaggaacctatctttttcgatacgtgggacaacgaggcttatgtccacgatgcccccgtgagatccctcaattgtaccctgcgggactctcagcagaaaagcctggttatgtccggaccttacgaactcaaggctctgcatcttcagggccaagatatggagcaacaggtggtctttagcatgtctttcgtgcagggggaggaatccaacgacaagattccggttgccctgggactcaaagagaagaatctgtatcttagctgcgtgctgaaagacgataagcccacactccagctggaatctgtcgaccctaaaaactaccccaagaagaaaatggagaagcgctttgtgttcaataaaattgaaatcaacaataagctggagttcgagtccgcgcagtttcctaactggtatatcagcacctctcaggccgaaaatatgcccgtgttcctcggcggcacaaaagggggacaagatattaccgactttacaatgcagttcgtctccagctga

SEQ ID NO: 4328 - RNA, 810 nt, synthetic construct
  misc_feature 1..810: note = derived and/or modified sequence opt6 fromIL-1_beta__Homo_sapiens__AAA59135
  source 1..810: mol_type = other RNA
atggcagaagtaccagaattagcatcagaaatgatggcatattactcaggaaacgaagatgatctattcttcgaagcagacggaccaaaacaaatgaaatgtagcttccaagacctagacctatgtccactagatggcggaatacaactaagaatatcagaccaccactactcaaaaggattccgacaagcagcatcagtagtagtagctatggacaaattaagaaaaatgctagtaccatgcccacaaacattccaagaaaacgacctatcaacattcttcccattcatattcgaagaagaaccaatattcttcgacacctgggacaacgaagcctatgtacacgacgcaccagtaagatcactaaactgcacattacgagactcacaacaaaaatcactagtcatgtcaggaccctacgaactaaaagcactacacttacaaggacaagacatggaacaacaagtagtattctcaatgtcatttgtacaaggagaagaatcaaacgataaaataccagtagcactaggactcaaagaaaaaaacctatatctatcatgtgtattaaaagatgacaaaccaacattacaactagaatcagtcgatccaaaaaactacccaaaaaaaaaaatggaaaaaagattcgtattcaacaaaatagaaataaacaataaactagaattcgaatccgcacaattcccaaactggtacatatcaacatcccaagcagaaaacatgccagtattcctaggaggaacaaaaggaggacaagacataacagacttcacaatgcaattcgtatcatcataa

SEQ ID NO: 4329 - protein, 159 aa, synthetic construct
  REGION 1..159: note = IL-1ra_(antagonist)__Homo_sapiens__P18510-2
MALETICRPSGRKSSKMQAFRIWDVNQKTFYLRNNQLVAGYLQGPNVNLEEKIDVVPIEPHALFLGIHGGKMCLSCVKSGDETRLQLEAVNITDLSENRKQDKRFAFIRSDSGPTTSFESAACPGWFLCTAMEADQPVSLTNMPDEGVMVTKFYFQEDE

SEQ ID NO: 4330 - RNA, 480 nt, synthetic construct
  misc_feature 1..480: note = IL-1ra_(antagonist)__Homo_sapiens__CCDS2113.1
  source 1..480: mol_type = other RNA
atggctttagagacgatctgccgaccctctgggagaaaatccagcaagatgcaagccttcagaatctgggatgttaaccagaagaccttctatctgaggaacaaccaactagttgctggatacttgcaaggaccaaatgtcaatttagaagaaaagatagatgtggtacccattgagcctcatgctctgttcttgggaatccatggagggaagatgtgcctgtcctgtgtcaagtctggtgatgagaccagactccagctggaggcagttaacatcactgacctgagcgagaacagaaagcaggacaagcgcttcgccttcatccgctcagacagtggccccaccaccagttttgagtctgccgcctgccccggttggttcctctgcacagcgatggaagctgaccagcccgtcagcctcaccaatatgcctgacgaaggcgtcatggtcaccaaattctacttccaggaggacgagtag

SEQ ID NO: 4331 - RNA, 480 nt, synthetic construct
  misc_feature 1..480: note = derived and/or modified sequence opt1 fromIL-1ra_(antagonist)__Homo_sapiens__CCDS2113.1
  source 1..480: mol_type = other RNA
atggccctggagaccatctgccgccccagcggccggaagtccagcaagatgcaggccttccgcatctgggacgtgaaccagaagaccttctacctccggaacaaccagctggtcgcggggtacctgcagggcccgaacgtgaacctcgaggagaagatcgacgtggtccccatcgagccccacgccctgttcctggggatccacggcgggaagatgtgcctctcctgcgtcaagagcggcgacgagacgcgcctgcagctggaggccgtgaacatcaccgacctctccgagaaccggaagcaggacaagcgcttcgccttcatccggagcgactccggccccaccaccagcttcgagtccgccgcgtgcccggggtggttcctgtgcacggccatggaggccgaccagcccgtgagcctgaccaacatgcccgacgagggcgtgatggtgaccaagttctacttccaggaggacgagtga

SEQ ID NO: 4332 - RNA, 480 nt, synthetic construct
  misc_feature 1..480: note = derived and/or modified sequence opt2 fromIL-1ra_(antagonist)__Homo_sapiens__CCDS2113.1
  source 1..480: mol_type = other RNA
atggccctcgagaccatctgccgcccctccggccgcaagtcctccaagatgcaggccttccgcatctgggacgtcaaccagaagaccttctacctccgcaacaaccagctcgtcgccggctacctccagggccccaacgtcaacctcgaggagaagatcgacgtcgtccccatcgagccccacgccctcttcctcggcatccacggcggcaagatgtgcctctcctgcgtcaagtccggcgacgagacccgcctccagctcgaggccgtcaacatcaccgacctctccgagaaccgcaagcaggacaagcgcttcgccttcatccgctccgactccggccccaccacctccttcgagtccgccgcctgccccggctggttcctctgcaccgccatggaggccgaccagcccgtctccctcaccaacatgcccgacgagggcgtcatggtcaccaagttctacttccaggaggacgagtga

SEQ ID NO: 4333 - RNA, 480 nt, synthetic construct
  misc_feature 1..480: note = derived and/or modified sequence opt3 fromIL-1ra_(antagonist)__Homo_sapiens__CCDS2113.1
  source 1..480: mol_type = other RNA
atggccctggagaccatctgcagacccagcggcaggaagtcctctaaaatgcaggctttccggatttgggacgtgaaccaaaagacattttacctccgcaataaccagcttgtcgcagggtatctgcagggacctaatgttaacttggaagagaaaatagatgtggtaccaatcgaaccgcacgccttattcctgggtattcatggcgggaagatgtgtctatcatgcgtgaaaagtggagacgagactcgactccagctggaagcggtcaatatcacggatcttagcgagaaccgtaagcaagacaagagatttgctttcattaggtccgattctggccccaccacatcgtttgagtcagccgcatgtcctggttggttcctgtgcactgccatggaagctgaccagccagtgagcttgaccaatatgcccgatgagggggttatggtgacaaaattttacttccaggaagacgagtga

SEQ ID NO: 4334 - RNA, 480 nt, synthetic construct
  misc_feature 1..480: note = derived and/or modified sequence opt4 fromIL-1ra_(antagonist)__Homo_sapiens__CCDS2113.1
  source 1..480: mol_type = other RNA
atggccctggagaccatctgcagacccagcggcagaaagagcagcaagatgcaggccttcagaatctgggacgtgaaccagaagaccttctacctgagaaacaaccagctggtggccggctacctgcagggccccaacgtgaacctggaggagaagatcgacgtggtgcccatcgagccccacgccctgttcctgggcatccacggcggcaagatgtgcctgagctgcgtgaagagcggcgacgagaccagactgcagctggaggccgtgaacatcaccgacctgagcgagaacagaaagcaggacaagagattcgccttcatcagaagcgacagcggccccaccaccagcttcgagagcgccgcctgccccggctggttcctgtgcaccgccatggaggccgaccagcccgtgagcctgaccaacatgcccgacgagggcgtgatggtgaccaagttctacttccaggaggacgagtga

SEQ ID NO: 4335 - RNA, 480 nt, synthetic construct
  misc_feature 1..480: note = derived and/or modified sequence opt5 fromIL-1ra_(antagonist)__Homo_sapiens__CCDS2113.1
  source 1..480: mol_type = other RNA
atggccctggagaccatctgcagacccagcggccggaagtcctctaaaatgcaggctttccgcatttgggacgtgaaccaaaagacattttacctcagaaataaccagctggtcgccgggtatcttcagggacctaatgttaacctggaagagaaaatcgatgtggtgccgattgaaccccacgctctcttcctgggcatccatgggggaaagatgtgtcttagctgcgtcaaatccggcgacgagacgcggctgcagctcgaagcggtgaatattaccgatctgtctgagaaccgcaagcaagacaagagatttgccttcatccggagcgattccgggcctacaacctcttttgagagcgccgcttgtcccggatggttcctgtgcacagccatggaagctgaccagcctgtttccctcaccaatatgcccgatgagggcgtgatggtcacaaaattttacttccaggaagacgagtga

SEQ ID NO: 4336 - RNA, 480 nt, synthetic construct
  misc_feature 1..480: note = derived and/or modified sequence opt6 fromIL-1ra_(antagonist)__Homo_sapiens__CCDS2113.1
  source 1..480: mol_type = other RNA
atggcactagaaacaatatgcagaccatcaggaagaaaatcatcaaaaatgcaagcattcagaatatgggacgtaaaccaaaaaacattctatttaagaaacaaccaactagtagcaggatacttacaaggaccaaacgtaaacctagaagaaaaaatagacgtagtaccaatagaaccacacgcactattcctaggaatacacggaggaaaaatgtgcctaagctgcgtaaaatcaggagacgaaacaagattacaattagaagccgtaaacataacagacctatcagaaaacagaaaacaagacaaaagattcgcattcataagatcagactcaggaccaacaacatcattcgaatcagcagcatgcccaggatggttcctatgtacagcaatggaagcagaccaaccagtatcactaacaaacatgccagacgaaggagtaatggtaacaaaattctacttccaagaagacgaataa

SEQ ID NO: 4337 - protein, 180 aa, synthetic construct
  REGION 1..180: note = IL-1ra_(antagonist)__Homo_sapiens__P18510-3
MALADLYEEGGGGGGEGEDNADSKETICRPSGRKSSKMQAFRIWDVNQKTFYLRNNQLVAGYLQGPNVNLEEKIDVVPIEPHALFLGIHGGKMCLSCVKSGDETRLQLEAVNITDLSENRKQDKRFAFIRSDSGPTTSFESAACPGWFLCTAMEADQPVSLTNMPDEGVMVTKFYFQEDE

SEQ ID NO: 4338 - RNA, 543 nt, synthetic construct
  misc_feature 1..543: note = IL-1ra_(antagonist)__Homo_sapiens__CCDS2114.1
  source 1..543: mol_type = other RNA
atggctttagctgacttgtatgaagaaggaggtggaggaggaggagaaggtgaagacaatgctgactcaaaggagacgatctgccgaccctctgggagaaaatccagcaagatgcaagccttcagaatctgggatgttaaccagaagaccttctatctgaggaacaaccaactagttgctggatacttgcaaggaccaaatgtcaatttagaagaaaagatagatgtggtacccattgagcctcatgctctgttcttgggaatccatggagggaagatgtgcctgtcctgtgtcaagtctggtgatgagaccagactccagctggaggcagttaacatcactgacctgagcgagaacagaaagcaggacaagcgcttcgccttcatccgctcagacagtggccccaccaccagttttgagtctgccgcctgccccggttggttcctctgcacagcgatggaagctgaccagcccgtcagcctcaccaatatgcctgacgaaggcgtcatggtcaccaaattctacttccaggaggacgagtag

SEQ ID NO: 4339 - RNA, 543 nt, synthetic construct
  misc_feature 1..543: note = derived and/or modified sequence opt1 fromIL-1ra_(antagonist)__Homo_sapiens__CCDS2114.1
  source 1..543: mol_type = other RNA
atggccctggccgacctctacgaggagggcgggggcgggggcggggagggcgaggacaacgcggacagcaaggagaccatctgccgcccctccggccgcaagagctccaagatgcaggccttccggatctgggacgtgaaccagaagaccttctacctgcggaacaaccagctggtcgccgggtacctccagggcccgaacgtgaacctggaggagaagatcgacgtggtccccatcgagccccacgccctgttcctcgggatccacggcgggaagatgtgcctgagctgcgtgaagtccggcgacgagacgcgcctgcagctcgaggccgtgaacatcaccgacctgagcgagaaccggaagcaggacaagcgcttcgcgttcatccggtccgacagcggccccaccacctccttcgagagcgccgcctgcccggggtggttcctgtgcacggccatggaggcggaccagcccgtctccctcaccaacatgcccgacgagggcgtgatggtgaccaagttctacttccaggaggacgagtga

SEQ ID NO: 4340 - RNA, 543 nt, synthetic construct
  misc_feature 1..543: note = derived and/or modified sequence opt2 fromIL-1ra_(antagonist)__Homo_sapiens__CCDS2114.1
  source 1..543: mol_type = other RNA
atggccctcgccgacctctacgaggagggcggcggcggcggcggcgagggcgaggacaacgccgactccaaggagaccatctgccgcccctccggccgcaagtcctccaagatgcaggccttccgcatctgggacgtcaaccagaagaccttctacctccgcaacaaccagctcgtcgccggctacctccagggccccaacgtcaacctcgaggagaagatcgacgtcgtccccatcgagccccacgccctcttcctcggcatccacggcggcaagatgtgcctctcctgcgtcaagtccggcgacgagacccgcctccagctcgaggccgtcaacatcaccgacctctccgagaaccgcaagcaggacaagcgcttcgccttcatccgctccgactccggccccaccacctccttcgagtccgccgcctgccccggctggttcctctgcaccgccatggaggccgaccagcccgtctccctcaccaacatgcccgacgagggcgtcatggtcaccaagttctacttccaggaggacgagtga

SEQ ID NO: 4341 - RNA, 543 nt, synthetic construct
  misc_feature 1..543: note = derived and/or modified sequence opt3 fromIL-1ra_(antagonist)__Homo_sapiens__CCDS2114.1
  source 1..543: mol_type = other RNA
atggccctggctgacctctacgaggaaggcgggggaggtggcggggagggagaagataacgcagacagcaaggagaccatctgcagaccctccggcaggaaatcttcaaagatgcaggccttccggatttgggatgtgaatcaaaagacattttatcttcgcaacaatcagctggtcgcgggttacttgcaggggcctaacgttaatttagaagagaagatagacgtggtaccaatcgagccgcacgctctgttcctaggcattcatggaggcaaaatgtgtctcagttgcgtgaaaagcggggatgaaactcgactgcagcttgaggccgtcaacatcacggacctgtccgaaaatcgtaagcaagataaaagatttgcattcattaggtctgactcgggacccaccacatcatttgagagcgccgcttgtcctggttggttcttgtgcactgcaatggaggccgatcagccagtgagtctcaccaacatgcccgacgaaggcgttatggtgacaaagttttatttccaggaggatgaatga

SEQ ID NO: 4342 - RNA, 543 nt, synthetic construct
  misc_feature 1..543: note = derived and/or modified sequence opt4 fromIL-1ra_(antagonist)__Homo_sapiens__CCDS2114.1
  source 1..543: mol_type = other RNA
atggccctggccgacctgtacgaggagggcggcggcggcggcggcgagggcgaggacaacgccgacagcaaggagaccatctgcagacccagcggcagaaagagcagcaagatgcaggccttcagaatctgggacgtgaaccagaagaccttctacctgagaaacaaccagctggtggccggctacctgcagggccccaacgtgaacctggaggagaagatcgacgtggtgcccatcgagccccacgccctgttcctgggcatccacggcggcaagatgtgcctgagctgcgtgaagagcggcgacgagaccagactgcagctggaggccgtgaacatcaccgacctgagcgagaacagaaagcaggacaagagattcgccttcatcagaagcgacagcggccccaccaccagcttcgagagcgccgcctgccccggctggttcctgtgcaccgccatggaggccgaccagcccgtgagcctgaccaacatgcccgacgagggcgtgatggtgaccaagttctacttccaggaggacgagtga

SEQ ID NO: 4343 - RNA, 543 nt, synthetic construct
  misc_feature 1..543: note = derived and/or modified sequence opt5 fromIL-1ra_(antagonist)__Homo_sapiens__CCDS2114.1
  source 1..543: mol_type = other RNA
atggccctggctgacctctacgaggaaggcgggggaggcgggggagagggcgaagataacgccgacagcaaggagaccatctgcagaccctccgggcggaaatctagcaagatgcaggcgttccgcatttgggatgtgaatcagaaaacattttatctgagaaacaatcaacttgtcgctggatacctgcagggccctaacgttaatctcgaagagaagatcgacgtggtgccgattgagccccacgccctgttccttggcatccatgggggaaaaatgtgtctgtcctgcgtcaagtctggcgatgaaacgcggctccagctggaggccgtgaacattaccgacctgagcgaaaatcgcaagcaagataaaagatttgctttcatccggtccgactctgggcctacaaccagctttgagtccgccgcttgtcccggatggttcctctgcacagccatggaggcggatcagcctgttagcctgaccaacatgcccgacgaaggcgtgatggtcacaaagttttatttccaggaggatgaatga

SEQ ID NO: 4344 - RNA, 543 nt, synthetic construct
  misc_feature 1..543: note = derived and/or modified sequence opt6 fromIL-1ra_(antagonist)__Homo_sapiens__CCDS2114.1
  source 1..543: mol_type = other RNA
atggcactagcagacttatacgaagaaggaggaggaggaggaggagaaggagaagataatgcagacagcaaagaaacaatatgtagaccaagcggaagaaaaagctcaaaaatgcaagcattcagaatatgggacgtaaaccaaaaaacattctatctaagaaacaatcaattagtagcaggatatttacaaggaccaaacgtaaacttagaagaaaaaatagacgtagtaccaatagaaccacatgcattattcttaggaatacacggaggaaaaatgtgtctatcatgcgtaaaatcaggagatgaaacaagattacaattagaagcagtaaatataacagacctaagtgaaaacagaaaacaagacaaaagatttgcatttataagaagcgacagcggaccaacaacaagtttcgaaagcgcagcatgtccaggatggtttctatgtacagcaatggaagcagatcaaccagtatcactaacaaacatgccagatgaaggagtaatggtaacaaaattttactttcaagaagacgaataa

SEQ ID NO: 4345 - protein, 177 aa, synthetic construct
  REGION 1..177: note = IL-1ra_(antagonist)__Homo_sapiens__P18510
MEICRGLRSHLITLLLFLFHSETICRPSGRKSSKMQAFRIWDVNQKTFYLRNNQLVAGYLQGPNVNLEEKIDVVPIEPHALFLGIHGGKMCLSCVKSGDETRLQLEAVNITDLSENRKQDKRFAFIRSDSGPTTSFESAACPGWFLCTAMEADQPVSLTNMPDEGVMVTKFYFQEDE

SEQ ID NO: 4346 - RNA, 534 nt, synthetic construct
  misc_feature 1..534: note = IL-1ra_(antagonist)__Homo_sapiens__CCDS46396.1
  source 1..534: mol_type = other RNA
atggaaatctgcagaggcctccgcagtcacctaatcactctcctcctcttcctgttccattcagagacgatctgccgaccctctgggagaaaatccagcaagatgcaagccttcagaatctgggatgttaaccagaagaccttctatctgaggaacaaccaactagttgctggatacttgcaaggaccaaatgtcaatttagaagaaaagatagatgtggtacccattgagcctcatgctctgttcttgggaatccatggagggaagatgtgcctgtcctgtgtcaagtctggtgatgagaccagactccagctggaggcagttaacatcactgacctgagcgagaacagaaagcaggacaagcgcttcgccttcatccgctcagacagtggccccaccaccagttttgagtctgccgcctgccccggttggttcctctgcacagcgatggaagctgaccagcccgtcagcctcaccaatatgcctgacgaaggcgtcatggtcaccaaattctacttccaggaggacgagtag

SEQ ID NO: 4347 - RNA, 534 nt, synthetic construct
  misc_feature 1..534: note = derived and/or modified sequence opt1 fromIL-1ra_(antagonist)__Homo_sapiens__CCDS46396.1
  source 1..534: mol_type = other RNA
atggagatctgccgcggcctgcggagccacctcatcaccctgctcctcttcctgttccactccgagaccatctgccgccccagcgggcggaagtccagcaagatgcaggccttccgcatctgggacgtgaaccagaagacgttctacctgcggaacaaccagctcgtcgccggctacctgcaggggccgaacgtgaacctggaggagaagatcgacgtggtccccatcgagccccacgcgctgttcctgggcatccacgggggcaagatgtgcctgtcctgcgtcaagagcggcgacgagacccgcctccagctggaggccgtgaacatcaccgacctgtccgagaaccggaagcaggacaagcgcttcgccttcatccggagcgactccgggcccaccacgagcttcgagtccgccgcctgcccgggctggttcctctgcaccgcgatggaggccgaccagcccgtgagcctgaccaacatgcccgacgagggggtgatggtgaccaagttctacttccaggaggacgagtga

SEQ ID NO: 4348 - RNA, 534 nt, synthetic construct
  misc_feature 1..534: note = derived and/or modified sequence opt2 fromIL-1ra_(antagonist)__Homo_sapiens__CCDS46396.1
  source 1..534: mol_type = other RNA
atggagatctgccgcggcctccgctcccacctcatcaccctcctcctcttcctcttccactccgagaccatctgccgcccctccggccgcaagtcctccaagatgcaggccttccgcatctgggacgtcaaccagaagaccttctacctccgcaacaaccagctcgtcgccggctacctccagggccccaacgtcaacctcgaggagaagatcgacgtcgtccccatcgagccccacgccctcttcctcggcatccacggcggcaagatgtgcctctcctgcgtcaagtccggcgacgagacccgcctccagctcgaggccgtcaacatcaccgacctctccgagaaccgcaagcaggacaagcgcttcgccttcatccgctccgactccggccccaccacctccttcgagtccgccgcctgccccggctggttcctctgcaccgccatggaggccgaccagcccgtctccctcaccaacatgcccgacgagggcgtcatggtcaccaagttctacttccaggaggacgagtga

SEQ ID NO: 4349 - RNA, 534 nt, synthetic construct
  misc_feature 1..534: note = derived and/or modified sequence opt3 fromIL-1ra_(antagonist)__Homo_sapiens__CCDS46396.1
  source 1..534: mol_type = other RNA
atggagatctgcagaggcctgaggagccacctcattacccttctgttgttcttatttcattccgaaacaatatgtcggccctctgggcgcaagtcaagtaaaatgcaggccttccgaatctgggacgtgaaccaaaagactttttacctgcgtaataaccagctagtcgctggatatctccagggtcctaatgttaacctggaggagaaaattgatgtggtaccaatcgaaccgcacgcacttttcctgggcattcatgggggaaagatgtgcttgagctgtgtgaaatccggcgacgaaacgagactccagctggaggccgtcaatatcaccgatctgtctgagaacaggaagcaagacaagcggtttgcgttcatacgctcggattcaggtcccacaactagctttgaaagtgctgcctgccctgggtggttcctctgtaccgcaatggaggccgaccagccagtgtccttaacaaatatgcccgatgaaggagttatggtgaccaaattttacttccaggaggacgagtga

SEQ ID NO: 4350 - RNA, 534 nt, synthetic construct
  misc_feature 1..534: note = derived and/or modified sequence opt4 fromIL-1ra_(antagonist)__Homo_sapiens__CCDS46396.1
  source 1..534: mol_type = other RNA
atggagatctgcagaggcctgagaagccacctgatcaccctgctgctgttcctgttccacagcgagaccatctgcagacccagcggcagaaagagcagcaagatgcaggccttcagaatctgggacgtgaaccagaagaccttctacctgagaaacaaccagctggtggccggctacctgcagggccccaacgtgaacctggaggagaagatcgacgtggtgcccatcgagccccacgccctgttcctgggcatccacggcggcaagatgtgcctgagctgcgtgaagagcggcgacgagaccagactgcagctggaggccgtgaacatcaccgacctgagcgagaacagaaagcaggacaagagattcgccttcatcagaagcgacagcggccccaccaccagcttcgagagcgccgcctgccccggctggttcctgtgcaccgccatggaggccgaccagcccgtgagcctgaccaacatgcccgacgagggcgtgatggtgaccaagttctacttccaggaggacgagtga

SEQ ID NO: 4351 - RNA, 534 nt, synthetic construct
  misc_feature 1..534: note = derived and/or modified sequence opt5 fromIL-1ra_(antagonist)__Homo_sapiens__CCDS46396.1
  source 1..534: mol_type = other RNA
atggagatctgcagaggcctgcggagccacctcattaccctgcttctgttcctctttcattccgaaacaatctgtcgcccctctgggagaaagagctccaaaatgcaggccttccggatttgggacgtgaaccaaaagacgttttacctgcgcaataaccagcttgtcgctggatatctgcagggccctaatgttaacctcgaggagaaaatcgatgtggtgccgattgaaccccacgccctgttcctggggatccatggaggcaagatgtgcctctcttgtgtcaaaagcggggacgaaaccagactgcagcttgaggcggtgaatatcacagatctgtccgagaaccggaagcaagacaagcgctttgctttcattagatctgatagcggacctaccacatcctttgaaagcgccgcctgccccggctggttcctctgtaccgctatggaggccgaccagcctgtttctctgacaaatatgcccgatgaaggcgtgatggtcaccaaattttacttccaggaggacgagtga

SEQ ID NO: 4352 - RNA, 534 nt, synthetic construct
  misc_feature 1..534: note = derived and/or modified sequence opt6 fromIL-1ra_(antagonist)__Homo_sapiens__CCDS46396.1
  source 1..534: mol_type = other RNA
atggaaatatgccgaggactaagatcacacttaataacactactactattcctattccacagcgaaacaatatgcagaccatcaggaagaaaatcatcaaaaatgcaagcattcagaatatgggacgtaaaccaaaaaacattctacctaagaaacaaccaactagtagcaggatacctacaaggaccaaacgtaaacctagaagaaaaaatagacgtagtaccaatagaaccacacgcactattcctaggaatacacggaggaaaaatgtgcctatcatgcgtaaaatcaggagacgaaacaagactacaactagaagcagtaaacataacagatctatcagaaaacagaaaacaagacaaaagattcgcattcataagatcagactcaggaccaacaacatcatttgaatcagcagcatgcccaggatggttcttatgcacagccatggaagcagatcaaccagtatcattaacaaacatgccagacgaaggagtaatggtaacaaaattctacttccaagaagacgaataa

SEQ ID NO: 4353 - protein, 176 aa, synthetic construct
  REGION 1..176: note = IL-20__Homo_sapiens__Q9NYY1
MKASSLAFSLLSAAFYLLWTPSTGLKTLNLGSCVIATNLQEIRNGFSEIRGSVQAKDGNIDIRILRRTESLQDTKPANRCCLLRHLLRLYLDRVFKNYQTPDHYTLRKISSLANSFLTIKKDLRLCHAHMTCHCGEEAMKKYSQILSHFEKLEPQAAVVKALGELDILLQWMEETE

SEQ ID NO: 4354 - RNA, 531 nt, synthetic construct
  misc_feature 1..531: note = IL-20__Homo_sapiens__AAH69311
  source 1..531: mol_type = other RNA
atgaaagcctctagtcttgccttcagccttctctctgctgcgttttatctcctatggactccttccactggactgaagacactcaatttgggaagctgtgtgatcgccacaaaccttcaggaaatacgaaatggattttctgagatacggggcagtgtgcaagccaaagatggaaacattgacatcagaatcttaaggaggactgagtctttgcaagacacaaagcctgcgaatcgatgctgcctcctgcgccatttgctaagactctatctggacagggtatttaaaaactaccagacccctgaccattatactctccggaagatcagcagcctcgccaattcctttcttaccatcaagaaggacctccggctctgtcatgcccacatgacatgccattgtggggaggaagcaatgaagaaatacagccagattctgagtcactttgaaaagctggaacctcaggcagcagttgtgaaggctttgggggaactagacattcttctgcaatggatggaggagacagaatag

SEQ ID NO: 4355 - RNA, 531 nt, synthetic construct
  misc_feature 1..531: note = derived and/or modified sequence opt1 fromIL-20__Homo_sapiens__AAH69311
  source 1..531: mol_type = other RNA
atgaaggccagctccctggccttcagcctcctgtccgcggccttctacctgctctggacccccagcaccggcctgaagacgctgaacctcgggtcctgcgtgatcgccaccaacctgcaggagatccgcaacggcttcagcgagatccgggggtccgtccaggccaaggacggcaacatcgacatccgcatcctgcggcgcaccgagagcctccaggacaccaagccggccaaccggtgctgcctgctgcgccacctcctgcggctgtacctcgaccgcgtgttcaagaactaccagacgcccgaccactacaccctgcggaagatctccagcctggcgaactccttcctcaccatcaagaaggacctgcgcctgtgccacgcccacatgacctgccactgcggggaggaggccatgaagaagtacagccagatcctctcccacttcgagaagctggagccccaggccgcggtggtcaaggccctgggcgagctcgacatcctgctgcagtggatggaggagacggagtga

SEQ ID NO: 4356 - RNA, 531 nt, synthetic construct
  misc_feature 1..531: note = derived and/or modified sequence opt2 fromIL-20__Homo_sapiens__AAH69311
  source 1..531: mol_type = other RNA
atgaaggcctcctccctcgccttctccctcctctccgccgccttctacctcctctggaccccctccaccggcctcaagaccctcaacctcggctcctgcgtcatcgccaccaacctccaggagatccgcaacggcttctccgagatccgcggctccgtccaggccaaggacggcaacatcgacatccgcatcctccgccgcaccgagtccctccaggacaccaagcccgccaaccgctgctgcctcctccgccacctcctccgcctctacctcgaccgcgtcttcaagaactaccagacccccgaccactacaccctccgcaagatctcctccctcgccaactccttcctcaccatcaagaaggacctccgcctctgccacgcccacatgacctgccactgcggcgaggaggccatgaagaagtactcccagatcctctcccacttcgagaagctcgagccccaggccgccgtcgtcaaggccctcggcgagctcgacatcctcctccagtggatggaggagaccgagtga

SEQ ID NO: 4357 - RNA, 531 nt, synthetic construct
  misc_feature 1..531: note = derived and/or modified sequence opt3 fromIL-20__Homo_sapiens__AAH69311
  source 1..531: mol_type = other RNA
atgaaggccagctccctggctttctctctcctttcagcagccttttacctgttgtggacccccagtacaggcttaaaaactctgaacctagggagctgcgtgatcgcgacgaatctccaggagattagaaacggattctccgaaataaggggttctgtccaagctaaggacggcaatatcgatattcggatcctgcgccgaaccgagtcgcttcaggacacaaaacctgccaaccgttgttgcctgttgagacacctcctgaggctgtatctcgatcgggtttttaagaattaccagactccagaccattataccttacgcaaaatttcaagcctggcaaacagtttccttacaatcaagaaggatttgagactgtgtcacgcccatatgacctgccactgtggggaagaggctatgaaaaagtactcccagatactatctcattttgaaaaactcgagccgcaagcagccgtggtaaaggctctgggagagcttgacatcctgttgcagtggatggaagagactgaatga

SEQ ID NO: 4358 - RNA, 531 nt, synthetic construct
  misc_feature 1..531: note = derived and/or modified sequence opt4 fromIL-20__Homo_sapiens__AAH69311
  source 1..531: mol_type = other RNA
atgaaggccagcagcctggccttcagcctgctgagcgccgccttctacctgctgtggacccccagcaccggcctgaagaccctgaacctgggcagctgcgtgatcgccaccaacctgcaggagatcagaaacggcttcagcgagatcagaggcagcgtgcaggccaaggacggcaacatcgacatcagaatcctgagaagaaccgagagcctgcaggacaccaagcccgccaacagatgctgcctgctgagacacctgctgagactgtacctggacagagtgttcaagaactaccagacccccgaccactacaccctgagaaagatcagcagcctggccaacagcttcctgaccatcaagaaggacctgagactgtgccacgcccacatgacctgccactgcggcgaggaggccatgaagaagtacagccagatcctgagccacttcgagaagctggagccccaggccgccgtggtgaaggccctgggcgagctggacatcctgctgcagtggatggaggagaccgagtga

SEQ ID NO: 4359 - RNA, 531 nt, synthetic construct
  misc_feature 1..531: note = derived and/or modified sequence opt5 fromIL-20__Homo_sapiens__AAH69311
  source 1..531: mol_type = other RNA
atgaaggccagctccctggctttctctctcctgagcgccgcgttttaccttctgtggaccccctccacaggcctcaaaacgctgaaccttgggtcttgcgtgatcgctaccaatctgcaggagattagaaacggattcagcgaaatccggggctccgtccaagccaaggacgggaatattgatatccgcattctcagacggacagagtctctgcaggacaccaaacctgccaaccgctgttgcctgctcagacatctgcttcggctgtatctcgatcgcgtttttaagaattaccagacaccggaccactataccctgagaaaaatcagctcccttgctaacagcttcctgacaatcaagaaggatctccggctgtgtcacgcccatatgacctgccactgtggagaagaggctatgaaaaagtactctcagattctgtcccattttgaaaaactcgagccccaagccgcggtggtgaaggccctgggcgagcttgacatcctgctccagtggatggaagagacggaatga

SEQ ID NO: 4360 - RNA, 531 nt, synthetic construct
  misc_feature 1..531: note = derived and/or modified sequence opt6 fromIL-20__Homo_sapiens__AAH69311
  source 1..531: mol_type = other RNA
atgaaagcatcatcactagcattctcattattatcagcagcattctacctactatggacaccatcaacaggactaaaaacactaaacttaggatcatgcgtaatagcaacaaacctacaagaaataagaaacggattctcagaaataagaggatcagtacaagcaaaagacggaaacatagacataagaatactaagaagaacagaatcactacaagacacaaaaccagcaaacagatgctgcctactaagacacctactaagactatatctagacagagtattcaaaaactaccaaacaccagaccactacacactaagaaaaatatcctcactagcaaactcattcctaacaataaaaaaagacctaagactatgccacgcccacatgacatgccactgcggagaagaagcaatgaaaaaatactcacaaatactatcacacttcgaaaaactagaaccacaagccgcagtagtaaaagcactaggagaactagacatactactacaatggatggaagaaacagaataa

SEQ ID NO: 4361 - protein, 153 aa, synthetic construct
  REGION 1..153: note = IL-21__Homo_sapiens__NP_001193935.1
MRSSPGNMERIVICLMVIFLGTLVHKSSSQGQDRHMIRMRQLIDIVDQLKNYVNDLVPEFLPAPEDVETNCEWSAFSCFQKAQLKSANTGNNERIINVSIKKLKRKPPSTNAGRRQKHRLTCPSCDSYEKKPPKEFLERFKSLLQKVSTLSFI

SEQ ID NO: 4362 - RNA, 462 nt, synthetic construct
  misc_feature 1..462: note = IL-21__Homo_sapiens__CCDS75189.1
  source 1..462: mol_type = other RNA
atgagatccagtcctggcaacatggagaggattgtcatctgtctgatggtcatcttcttggggacactggtccacaaatcaagctcccaaggtcaagatcgccacatgattagaatgcgtcaacttatagatattgttgatcagctgaaaaattatgtgaatgacttggtccctgaatttctgccagctccagaagatgtagagacaaactgtgagtggtcagctttttcctgctttcagaaggcccaactaaagtcagcaaatacaggaaacaatgaaaggataatcaatgtatcaattaaaaagctgaagaggaaaccaccttccacaaatgcagggagaagacagaaacacagactaacatgcccttcatgtgattcttatgagaaaaaaccacccaaagaattcctagaaagattcaaatcacttctccaaaaggtatctaccttaagtttcatttga

SEQ ID NO: 4363 - RNA, 462 nt, synthetic construct
  misc_feature 1..462: note = derived and/or modified sequence opt1 fromIL-21__Homo_sapiens__CCDS75189.1
  source 1..462: mol_type = other RNA
atgcgcagctcccccggcaacatggagcggatcgtgatctgcctgatggtcatcttcctcgggaccctggtgcacaagagctccagccagggccaggaccgccacatgatccggatgcgccagctgatcgacatcgtggaccagctcaagaactacgtcaacgacctggtgcccgagttcctgcccgcccccgaggacgtggagaccaactgcgagtggtccgccttcagctgcttccagaaggcgcagctcaagtccgccaacacggggaacaacgagcggatcatcaacgtcagcatcaagaagctgaagcgcaagcccccgtccaccaacgccggccggcgccagaagcaccggctgacctgccccagctgcgactcctacgagaagaagccgcccaaggagttcctcgagcgcttcaagagcctgctgcagaaggtgtccaccctcagcttcatctga

SEQ ID NO: 4364 - RNA, 462 nt, synthetic construct
  misc_feature 1..462: note = derived and/or modified sequence opt2 fromIL-21__Homo_sapiens__CCDS75189.1
  source 1..462: mol_type = other RNA
atgcgctcctcccccggcaacatggagcgcatcgtcatctgcctcatggtcatcttcctcggcaccctcgtccacaagtcctcctcccagggccaggaccgccacatgatccgcatgcgccagctcatcgacatcgtcgaccagctcaagaactacgtcaacgacctcgtccccgagttcctccccgcccccgaggacgtcgagaccaactgcgagtggtccgccttctcctgcttccagaaggcccagctcaagtccgccaacaccggcaacaacgagcgcatcatcaacgtctccatcaagaagctcaagcgcaagcccccctccaccaacgccggccgccgccagaagcaccgcctcacctgcccctcctgcgactcctacgagaagaagccccccaaggagttcctcgagcgcttcaagtccctcctccagaaggtctccaccctctccttcatctga

SEQ ID NO: 4365 - RNA, 462 nt, synthetic construct
  misc_feature 1..462: note = derived and/or modified sequence opt3 fromIL-21__Homo_sapiens__CCDS75189.1
  source 1..462: mol_type = other RNA
atgagaagctcccccggcaacatggagaggatcgtgatttgcctgatggtcatattcctcgggacccttgttcacaagtcttcaagtcagggacaagaccggcatatgatccgcatgcgacagctgattgatatcgtggaccagttgaaaaattacgtaaacgatttagtgcctgaatttctgccagccccggaggacgtcgaaacaaattgtgagtggagcgctttctcctgctttcagaaggcacaactaaaatctgccaacactggtaataacgaacgtattatcaatgtgtcgataaagaaactcaagagaaagcccccttcaacgaacgcgggcaggcggcagaaacaccgcctgacctgtccaagctgcgatagttatgagaagaaaccccctaaggagttccttgaaagatttaaatccctgttgcagaaggtttctacactcagcttcatctga

SEQ ID NO: 4366 - RNA, 462 nt, synthetic construct
  misc_feature 1..462: note = derived and/or modified sequence opt4 fromIL-21__Homo_sapiens__CCDS75189.1
  source 1..462: mol_type = other RNA
atgagaagcagccccggcaacatggagagaatcgtgatctgcctgatggtgatcttcctgggcaccctggtgcacaagagcagcagccagggccaggacagacacatgatcagaatgagacagctgatcgacatcgtggaccagctgaagaactacgtgaacgacctggtgcccgagttcctgcccgcccccgaggacgtggagaccaactgcgagtggagcgccttcagctgcttccagaaggcccagctgaagagcgccaacaccggcaacaacgagagaatcatcaacgtgagcatcaagaagctgaagagaaagccccccagcaccaacgccggcagaagacagaagcacagactgacctgccccagctgcgacagctacgagaagaagccccccaaggagttcctggagagattcaagagcctgctgcagaaggtgagcaccctgagcttcatctga

SEQ ID NO: 4367 - RNA, 462 nt, synthetic construct
  misc_feature 1..462: note = derived and/or modified sequence opt5 fromIL-21__Homo_sapiens__CCDS75189.1
  source 1..462: mol_type = other RNA
atgagaagctcccccggcaacatggagcggatcgtgatttgcctgatggtcatcttcctcgggaccctggttcacaagtctagctcccagggacaagaccgccatatgattagaatgcggcagcttatcgatattgtggaccagctgaaaaattacgtgaacgatctcgtccctgaatttctgccggcccccgaggacgtggaaacaaattgtgagtggtctgctttcagctgctttcagaaggcccaacttaaatccgcgaacacgggcaataacgaacgcatcatcaatgtttctattaagaaactgaagagaaagcctcccagcaccaacgctgggcggcgccagaaacacagactcacatgtccttcctgcgatagctatgagaagaaaccccctaaggagttcctggaacggtttaaatctctgctccagaaggtgtccaccctgagcttcatctga

SEQ ID NO: 4368 - RNA, 462 nt, synthetic construct
  misc_feature 1..462: note = derived and/or modified sequence opt6 fromIL-21__Homo_sapiens__CCDS75189.1
  source 1..462: mol_type = other RNA
atgagatcaagcccaggaaacatggaaagaatagtaatatgcttaatggtaatattcctaggaacactagtacacaaatcatcatcacaaggacaagacagacacatgataagaatgagacaactaatagacatagtagaccaactaaaaaactacgtaaacgacctagtaccagaattcctaccagcaccagaagacgtagaaacaaactgcgaatggtcagcattctcatgcttccaaaaagcacaactaaaaagcgcaaacacaggaaacaacgaaagaataataaacgtatcaataaaaaaactaaaaagaaaaccaccatcaacaaacgcaggaagaagacaaaaacacagactaacatgcccaagctgcgactcatacgaaaaaaaaccaccaaaagaattcttagaaagattcaaaagcctactacaaaaagtaagcacactatcattcatataa

SEQ ID NO: 4369 - protein, 162 aa, synthetic construct
  REGION 1..162: note = IL-21__Homo_sapiens__NP_068575.1
MRSSPGNMERIVICLMVIFLGTLVHKSSSQGQDRHMIRMRQLIDIVDQLKNYVNDLVPEFLPAPEDVETNCEWSAFSCFQKAQLKSANTGNNERIINVSIKKLKRKPPSTNAGRRQKHRLTCPSCDSYEKKPPKEFLERFKSLLQKMIHQHLSSRTHGSEDS

SEQ ID NO: 4370 - RNA, 489 nt, synthetic construct
  misc_feature 1..489: note = IL-21__Homo_sapiens__CCDS3727.1
  source 1..489: mol_type = other RNA
atgagatccagtcctggcaacatggagaggattgtcatctgtctgatggtcatcttcttggggacactggtccacaaatcaagctcccaaggtcaagatcgccacatgattagaatgcgtcaacttatagatattgttgatcagctgaaaaattatgtgaatgacttggtccctgaatttctgccagctccagaagatgtagagacaaactgtgagtggtcagctttttcctgctttcagaaggcccaactaaagtcagcaaatacaggaaacaatgaaaggataatcaatgtatcaattaaaaagctgaagaggaaaccaccttccacaaatgcagggagaagacagaaacacagactaacatgcccttcatgtgattcttatgagaaaaaaccacccaaagaattcctagaaagattcaaatcacttctccaaaagatgattcatcagcatctgtcctctagaacacacggaagtgaagattcctga

SEQ ID NO: 4371 - RNA, 489 nt, synthetic construct
  misc_feature 1..489: note = derived and/or modified sequence opt1 fromIL-21__Homo_sapiens__CCDS3727.1
  source 1..489: mol_type = other RNA
atgcgcagctcccccggcaacatggagcggatcgtgatctgcctgatggtcatcttcctcgggaccctggtgcacaagagctccagccagggccaggaccgccacatgatccggatgcgccagctgatcgacatcgtggaccagctcaagaactacgtcaacgacctggtgcccgagttcctgcccgcccccgaggacgtggagaccaactgcgagtggtccgccttcagctgcttccagaaggcgcagctcaagtccgccaacacggggaacaacgagcggatcatcaacgtcagcatcaagaagctgaagcgcaagcccccgtccaccaacgccggccggcgccagaagcaccggctgacctgccccagctgcgactcctacgagaagaagccgcccaaggagttcctcgagcgcttcaagagcctgctgcagaagatgatccaccagcacctctccagccggacccacgggtccgaggacagctga

SEQ ID NO: 4372 - RNA, 489 nt, synthetic construct
  misc_feature 1..489: note = derived and/or modified sequence opt2 fromIL-21__Homo_sapiens__CCDS3727.1
  source 1..489: mol_type = other RNA
atgcgctcctcccccggcaacatggagcgcatcgtcatctgcctcatggtcatcttcctcggcaccctcgtccacaagtcctcctcccagggccaggaccgccacatgatccgcatgcgccagctcatcgacatcgtcgaccagctcaagaactacgtcaacgacctcgtccccgagttcctccccgcccccgaggacgtcgagaccaactgcgagtggtccgccttctcctgcttccagaaggcccagctcaagtccgccaacaccggcaacaacgagcgcatcatcaacgtctccatcaagaagctcaagcgcaagcccccctccaccaacgccggccgccgccagaagcaccgcctcacctgcccctcctgcgactcctacgagaagaagccccccaaggagttcctcgagcgcttcaagtccctcctccagaagatgatccaccagcacctctcctcccgcacccacggctccgaggactcctga

SEQ ID NO: 4373 - RNA, 489 nt, synthetic construct
  misc_feature 1..489: note = derived and/or modified sequence opt3 fromIL-21__Homo_sapiens__CCDS3727.1
  source 1..489: mol_type = other RNA
atgagaagctcccccggcaacatggagaggatcgtgatttgcctgatggtcatattcctcgggacccttgttcacaagtcttcaagtcagggacaagaccggcatatgatccgcatgcgacagctgattgatatcgtggaccagttgaaaaattacgtaaacgatttagtgcctgaatttctgccagccccggaggacgtcgaaacaaattgtgagtggagcgctttctcctgctttcagaaggcacaactaaaatctgccaacactggtaataacgaacgtattatcaatgtgtcgataaagaaactcaagagaaagcccccttcaacgaacgcgggcaggcggcagaaacaccgcctgacctgtccaagctgcgatagttatgagaagaaaccccctaaggagttccttgaaagatttaaatccctgttgcagaagatgatccatcagcacctctctagcaggacacatgggtccgaggactcatga

SEQ ID NO: 4374 - RNA, 489 nt, synthetic construct
  misc_feature 1..489: note = derived and/or modified sequence opt4 fromIL-21__Homo_sapiens__CCDS3727.1
  source 1..489: mol_type = other RNA
atgagaagcagccccggcaacatggagagaatcgtgatctgcctgatggtgatcttcctgggcaccctggtgcacaagagcagcagccagggccaggacagacacatgatcagaatgagacagctgatcgacatcgtggaccagctgaagaactacgtgaacgacctggtgcccgagttcctgcccgcccccgaggacgtggagaccaactgcgagtggagcgccttcagctgcttccagaaggcccagctgaagagcgccaacaccggcaacaacgagagaatcatcaacgtgagcatcaagaagctgaagagaaagccccccagcaccaacgccggcagaagacagaagcacagactgacctgccccagctgcgacagctacgagaagaagccccccaaggagttcctggagagattcaagagcctgctgcagaagatgatccaccagcacctgagcagcagaacccacggcagcgaggacagctga

SEQ ID NO: 4375 - RNA, 489 nt, synthetic construct
  misc_feature 1..489: note = derived and/or modified sequence opt5 fromIL-21__Homo_sapiens__CCDS3727.1
  source 1..489: mol_type = other RNA
atgagaagctcccccggcaacatggagcggatcgtgatttgcctgatggtcatcttcctcgggaccctggttcacaagtctagctcccagggacaagaccgccatatgattagaatgcggcagcttatcgatattgtggaccagctgaaaaattacgtgaacgatctcgtccctgaatttctgccggcccccgaggacgtggaaacaaattgtgagtggtctgctttcagctgctttcagaaggcccaacttaaatccgcgaacacgggcaataacgaacgcatcatcaatgtttctattaagaaactgaagagaaagcctcccagcaccaacgctgggcggcgccagaaacacagactcacatgtccttcctgcgatagctatgagaagaaaccccctaaggagttcctggaacggtttaaatctctgctccagaagatgatccatcagcacctgtccagccgcacccatggatctgaggactcctga

SEQ ID NO: 4376 - RNA, 489 nt, synthetic construct
  misc_feature 1..489: note = derived and/or modified sequence opt6 fromIL-21__Homo_sapiens__CCDS3727.1
  source 1..489: mol_type = other RNA
atgagatcatcaccaggaaacatggaaagaatagtaatatgcctaatggtaatattcctcggaacactagtacacaaatcatcatcacaaggacaagacagacacatgataagaatgagacaactaatagacatagtagaccaactaaaaaactacgtaaacgacctagtaccagaattcctaccagcaccagaagacgtagaaacaaactgcgaatggtcagcattctcatgcttccaaaaagcacaactaaaatcagcaaacacaggaaacaacgaaagaataataaacgtatcaataaaaaaattaaaaagaaaaccaccatcaacaaacgcaggacgaagacaaaaacacagactcacatgcccatcatgcgactcatacgaaaaaaaaccaccaaaagaattcctagaaagattcaaatcactactacaaaaaatgatacaccaacacctatcatcaagaacacacggatcagaagacagctaa

SEQ ID NO: 4377 - protein, 179 aa, synthetic construct
  REGION 1..179: note = IL-22__Homo_sapiens__Q9GZX6
MAALQKSVSSFLMGTLATSCLLLLALLVQGGAAAPISSHCRLDKSNFQQPYITNRTFMLAKEASLADNNTDVRLIGEKLFHGVSMSERCYLMKQVLNFTLEEVLFPQSDRFQPYMQEVVPFLARLSNRLSTCHIEGDDLHIQRNVQKLKDTVKKLGESGEIKAIGELDLLFMSLRNACI

SEQ ID NO: 4378 - RNA, 540 nt, synthetic construct
  misc_feature 1..540: note = IL-22__Homo_sapiens__AAG22064
  source 1..540: mol_type = other RNA
atggccgccctgcagaaatctgtgagctctttccttatggggaccctggccaccagctgcctccttctcttggccctcttggtacagggaggagcagctgcgcccatcagctcccactgcaggcttgacaagtccaacttccagcagccctatatcaccaaccgcaccttcatgctggctaaggaggctagcttggctgataacaacacagacgttcgtctcattggggagaaactgttccacggagtcagtatgagtgagcgctgctatctgatgaagcaggtgctgaacttcacccttgaagaagtgctgttccctcaatctgataggttccagccttatatgcaggaggtggtgcccttcctggccaggctcagcaacaggctaagcacatgtcatattgaaggtgatgacctgcatatccagaggaatgtgcaaaagctgaaggacacagtgaaaaagcttggagagagtggagagatcaaagcaattggagaactggatttgctgtttatgtctctgagaaatgcctgcatttga

SEQ ID NO: 4379 - RNA, 540 nt, synthetic construct
  misc_feature 1..540: note = derived and/or modified sequence opt1 fromIL-22__Homo_sapiens__AAG22064
  source 1..540: mol_type = other RNA
atggccgccctgcagaagtccgtgagcagcttcctcatgggcaccctggcgacctcctgcctgctcctgctggccctcctggtccagggcggggccgccgcccccatcagctcccactgccgcctggacaagagcaacttccagcagccgtacatcacgaaccggaccttcatgctcgcgaaggaggcctccctggccgacaacaacaccgacgtgcgcctgatcggggagaagctgttccacggcgtgagcatgtccgagcggtgctacctcatgaagcaggtcctgaacttcaccctcgaggaggtgctgttcccccagagcgaccgcttccagccctacatgcaggaggtggtccccttcctggcccggctctccaaccgcctgagcacgtgccacatcgagggggacgacctgcacatccagcggaacgtgcagaagctcaaggacaccgtgaagaagctgggcgagtccggcgagatcaaggcgatcggggagctggacctcctgttcatgagcctgcgcaacgcctgcatctga

SEQ ID NO: 4380 - RNA, 540 nt, synthetic construct
  misc_feature 1..540: note = derived and/or modified sequence opt2 fromIL-22__Homo_sapiens__AAG22064
  source 1..540: mol_type = other RNA
atggccgccctccagaagtccgtctcctccttcctcatgggcaccctcgccacctcctgcctcctcctcctcgccctcctcgtccagggcggcgccgccgcccccatctcctcccactgccgcctcgacaagtccaacttccagcagccctacatcaccaaccgcaccttcatgctcgccaaggaggcctccctcgccgacaacaacaccgacgtccgcctcatcggcgagaagctcttccacggcgtctccatgtccgagcgctgctacctcatgaagcaggtcctcaacttcaccctcgaggaggtcctcttcccccagtccgaccgcttccagccctacatgcaggaggtcgtccccttcctcgcccgcctctccaaccgcctctccacctgccacatcgagggcgacgacctccacatccagcgcaacgtccagaagctcaaggacaccgtcaagaagctcggcgagtccggcgagatcaaggccatcggcgagctcgacctcctcttcatgtccctccgcaacgcctgcatctga

SEQ ID NO: 4381 - RNA, 540 nt, synthetic construct
  misc_feature 1..540: note = derived and/or modified sequence opt3 fromIL-22__Homo_sapiens__AAG22064
  source 1..540: mol_type = other RNA
atggccgctctgcagaaaagcgtgtcctctttcctcatgggcacccttgcaacatcatgcctgttgttactggccctactcgtccaagggggagcggctgcccccatcagtagccactgtagactggacaagtccaactttcagcagccttacattactaataggacgttcatgcttgcaaaggaggcctctctggctgataacaataccgacgttcggttgataggtgaaaaactctttcatggcgtgtcgatgtcagagcgctgctatctgatgaagcaggtactgaacttcacactcgaagaggtgttatttccacaaagcgatcgattccagccgtacatgcaggaagtcgtgccctttctggcacgtcttagtaatagattgtccacttgtcacatcgagggggacgatctgcatattcagaggaacgttcaaaaactaaaggacaccgtgaagaaactcggagagtctggcgaaatcaaggccattggtgagctggatcttctgttcatgagcttgcggaatgcttgcatctga

SEQ ID NO: 4382 - RNA, 540 nt, synthetic construct
  misc_feature 1..540: note = derived and/or modified sequence opt4 fromIL-22__Homo_sapiens__AAG22064
  source 1..540: mol_type = other RNA
atggccgccctgcagaagagcgtgagcagcttcctgatgggcaccctggccaccagctgcctgctgctgctggccctgctggtgcagggcggcgccgccgcccccatcagcagccactgcagactggacaagagcaacttccagcagccctacatcaccaacagaaccttcatgctggccaaggaggccagcctggccgacaacaacaccgacgtgagactgatcggcgagaagctgttccacggcgtgagcatgagcgagagatgctacctgatgaagcaggtgctgaacttcaccctggaggaggtgctgttcccccagagcgacagattccagccctacatgcaggaggtggtgcccttcctggccagactgagcaacagactgagcacctgccacatcgagggcgacgacctgcacatccagagaaacgtgcagaagctgaaggacaccgtgaagaagctgggcgagagcggcgagatcaaggccatcggcgagctggacctgctgttcatgagcctgagaaacgcctgcatctga

SEQ ID NO: 4383 - RNA, 540 nt, synthetic construct
  misc_feature 1..540: note = derived and/or modified sequence opt5 fromIL-22__Homo_sapiens__AAG22064
  source 1..540: mol_type = other RNA
atggccgctctgcagaaaagcgtgtcctctttcctcatgggcaccctggccacaagctgccttctgctcctggcgcttctggtccaagggggagctgccgcccccatctcctctcactgtagactcgacaagagcaactttcagcagccttacattacgaatcggaccttcatgctggctaaggaggcctccctggctgataacaatacagacgttcgcctcatcggcgaaaaactgtttcatggggtgtctatgagcgagagatgctatcttatgaaacaggtgctgaacttcaccctcgaagaggtcctgtttccgcaatccgatcggttccagccctacatgcaggaagtggttccttttcttgcccgcctgagcaatagactctctacatgtcacattgagggagacgatctgcatatccagcggaacgtgcaaaagctgaaggacaccgtcaagaaactcggcgagtccggggaaattaaggcgatcggagagctggatcttctgttcatgagcctccgcaatgcctgcatctga

SEQ ID NO: 4384 - RNA, 540 nt, synthetic construct
  misc_feature 1..540: note = derived and/or modified sequence opt6 fromIL-22__Homo_sapiens__AAG22064
  source 1..540: mol_type = other RNA
atggcagcactacaaaaatcagtatcatcattcctaatgggaacactagcaacatcatgcctactactactagcactactagtacaaggaggagcagcagcaccaatatcatcacactgcagattagacaaatcaaacttccaacaaccatacataacaaacagaacattcatgctagcaaaagaagcatcactagcagacaacaacacagacgtaagattaataggagaaaaacttttccacggagtatcaatgtcagaaagatgctacctaatgaaacaagtactaaacttcacattagaagaagtactattcccacaaagcgacagattccaaccatacatgcaagaagtagtaccattcctagcaagactatcaaacagactatccacatgccacatagaaggagacgacctacacatacaaagaaacgtacaaaaactaaaagacacagtaaaaaaactaggagaatcaggagaaataaaagcaataggagaactagacctactattcatgtcactaagaaacgcatgcatataa

SEQ ID NO: 4385 - protein, 189 aa, synthetic construct
  REGION 1..189: note = IL-23__Homo_sapiens__Q9NPF7
MLGSRAVMLLLLLPWTAQGRAVPGGSSPAWTQCQQLSQKLCTLAWSAHPLVGHMDLREEGDEETTNDVPHIQCGDGCDPQGLRDNSQFCLQRIHQGLIFYEKLLGSDIFTGEPSLLPDSPVGQLHASLLGLSQLLQPEGHHWETQQIPSLSPSQPWQRLLLRFKILRSLQAFVAVAARVFAHGAATLSP

SEQ ID NO: 4386 - RNA, 570 nt, synthetic construct
  misc_feature 1..570: note = IL-23__Homo_sapiens__AAH66268
  source 1..570: mol_type = other RNA
atgctggggagcagagctgtaatgctgctgttgctactgccctggacagctcagggcagagctgtgcctgggggcagcagccctgcctggactcagtgccagcagctttcacagaagctctgcacactggcctggagtgcacatccactagtgggacacatggatctaagagaagagggagatgaagagactacaaatgatgttccccatatccagtgtggagatggctgtgacccccaaggactcagggacaacagtcagttctgcttgcaaaggatccaccagggtctgattttttatgagaagctgctaggatcggatattttcacaggggagccttctctgctccctgatagccctgtgggccagcttcatgcctccctactgggcctcagccaactcctgcagcctgagggtcaccactgggagactcagcagattccaagcctcagtcccagccagccatggcagcgtctccttctccgcttcaagatccttcgcagcctccaggcctttgtggccgtagccgcccgggtctttgcccatggagcagcaaccctgagtccctaa

SEQ ID NO: 4387 - RNA, 570 nt, synthetic construct
  misc_feature 1..570: note = derived and/or modified sequence opt1 fromIL-23__Homo_sapiens__AAH66268
  source 1..570: mol_type = other RNA
atgctgggcagccgcgccgtgatgctcctgctgctcctgccctggaccgcccaggggcgggcggtcccgggcgggtccagccccgcctggacccagtgccagcagctgtcccagaagctctgcacgctggcctggagcgcccaccccctggtgggccacatggacctccgcgaggagggggacgaggagaccaccaacgacgtgccccacatccagtgcggcgacggctgcgacccgcaggggctgcgggacaactcccagttctgcctgcagcgcatccaccagggcctcatcttctacgagaagctgctggggagcgacatcttcaccggcgagccctccctcctgcccgacagccccgtcgggcagctgcacgcctccctcctgggcctgagccagctcctgcagccggagggccaccactgggagacgcagcagatcccctccctgagcccctcccagccctggcagcggctcctgctgcgcttcaagatcctccggagcctgcaggcgttcgtggccgtggccgcccgcgtcttcgcgcacggggccgccaccctgtccccgtga

SEQ ID NO: 4388 - RNA, 570 nt, synthetic construct
  misc_feature 1..570: note = derived and/or modified sequence opt2 fromIL-23__Homo_sapiens__AAH66268
  source 1..570: mol_type = other RNA
atgctcggctcccgcgccgtcatgctcctcctcctcctcccctggaccgcccagggccgcgccgtccccggcggctcctcccccgcctggacccagtgccagcagctctcccagaagctctgcaccctcgcctggtccgcccaccccctcgtcggccacatggacctccgcgaggagggcgacgaggagaccaccaacgacgtcccccacatccagtgcggcgacggctgcgacccccagggcctccgcgacaactcccagttctgcctccagcgcatccaccagggcctcatcttctacgagaagctcctcggctccgacatcttcaccggcgagccctccctcctccccgactcccccgtcggccagctccacgcctccctcctcggcctctcccagctcctccagcccgagggccaccactgggagacccagcagatcccctccctctccccctcccagccctggcagcgcctcctcctccgcttcaagatcctccgctccctccaggccttcgtcgccgtcgccgcccgcgtcttcgcccacggcgccgccaccctctccccctga

SEQ ID NO: 4389 - RNA, 570 nt, synthetic construct
  misc_feature 1..570: note = derived and/or modified sequence opt3 fromIL-23__Homo_sapiens__AAH66268
  source 1..570: mol_type = other RNA
atgctgggcagcagagccgtgatgctccttctgttgttaccctggaccgctcaggggagggcagtccctggaggttcctctccagcctggacacaatgccagcagctgtcacagaagctatgtactctcgcgtggagtgctcacccgctggttggccatatggaccttcgggaggaaggggatgaggaaacgaccaacgacgtgccccacatccaatgcggagatggctgtgaccctcagggtctgcgcgataatagccagttctgcttgcagcgtattcatcaagggctcatattttacgagaaactgctgggatccgacatcttcacaggcgaaccatctctcttacccgattcgcctgtaggccagctgcacgcctcacttttggggctgagccagctactccagccagagggacatcactgggagactcaacagattcccagtctgtccccttctcagccatggcaacgacttctgttgagatttaagatcctcaggagcctgcaggcattcgtggccgtcgctgcacgggtgtttgcccacggtgctgccaccttatccccgtga

SEQ ID NO: 4390 - RNA, 570 nt, synthetic construct
  misc_feature 1..570: note = derived and/or modified sequence opt4 fromIL-23__Homo_sapiens__AAH66268
  source 1..570: mol_type = other RNA
atgctgggcagcagagccgtgatgctgctgctgctgctgccctggaccgcccagggcagagccgtgcccggcggcagcagccccgcctggacccagtgccagcagctgagccagaagctgtgcaccctggcctggagcgcccaccccctggtgggccacatggacctgagagaggagggcgacgaggagaccaccaacgacgtgccccacatccagtgcggcgacggctgcgacccccagggcctgagagacaacagccagttctgcctgcagagaatccaccagggcctgatcttctacgagaagctgctgggcagcgacatcttcaccggcgagcccagcctgctgcccgacagccccgtgggccagctgcacgccagcctgctgggcctgagccagctgctgcagcccgagggccaccactgggagacccagcagatccccagcctgagccccagccagccctggcagagactgctgctgagattcaagatcctgagaagcctgcaggccttcgtggccgtggccgccagagtgttcgcccacggcgccgccaccctgagcccctga

SEQ ID NO: 4391 - RNA, 570 nt, synthetic construct
  misc_feature 1..570: note = derived and/or modified sequence opt5 fromIL-23__Homo_sapiens__AAH66268
  source 1..570: mol_type = other RNA
atgctgggcagcagagccgtgatgctcctgcttctgctcccctggaccgctcaggggcgggccgtccctggaggctcctctccggcgtggacacaatgccagcagctgagccagaagctgtgtacgcttgcttggtccgcccaccccctcgttgggcatatggacctgcgcgaggaaggagatgaggaaaccacaaacgacgtgcctcacatccaatgcggcgatgggtgtgacccccagggactgagagataattctcagttctgcctccagcggattcatcaaggcctgatcttttacgagaaacttctgggcagcgacattttcaccggggaaccttccctcctgcccgattctcctgtgggacagcttcacgccagcctgctcggcctgtcccagctgctccagccggaggggcatcactgggagacacaacagatccccagcctgtctccttcccagccctggcaacgccttctgctcagatttaagattctgcggagccttcaggctttcgtcgccgtggctgcccgcgtttttgcgcacggagccgctaccctgtctccttga

SEQ ID NO: 4392 - RNA, 570 nt, synthetic construct
  misc_feature 1..570: note = derived and/or modified sequence opt6 fromIL-23__Homo_sapiens__AAH66268
  source 1..570: mol_type = other RNA
atgctaggatcaagagcagtaatgctactattattactaccatggacagctcaaggaagagcagtaccaggaggatcatcaccagcatggacacaatgccaacaactatcacaaaaattatgtacactagcatggtcagcacacccactagtaggacacatggacttaagagaagaaggagacgaagaaacaacaaacgacgtaccacacatacaatgcggagacggatgcgacccacaaggactaagagacaactcacaattctgtctacaaagaatacaccaaggcctaatattctacgaaaaactattaggatcagacatattcacaggagaaccatcactattacccgactcaccagtaggacaattacacgcatcacttttaggactatcacaactactacaaccagaaggacatcactgggaaacccaacaaatcccatcattatcaccctcacaaccatggcaaagactactactaagatttaaaatactaagatcactacaagcattcgtagcagtagcagcaagagtattcgcacacggagcagcaacactatcaccataa

SEQ ID NO: 4393 - protein, 206 aa, synthetic construct
  REGION 1..206: note = IL-24__Homo_sapiens__Q13007
MNFQQRLQSLWTLARPFCPPLLATASQMQMVVLPCLGFTLLLWSQVSGAQGQEFHFGPCQVKGVVPQKLWEAFWAVKDTMQAQDNITSARLLQQEVLQNVSDAESCYLVHTLLEFYLKTVFKNYHNRTVEVRTLKSFSTLANNFVLIVSQLQPSQENEMFSIRDSAHRRFLLFRRAFKQLDVEAALTKALGEVDILLTWMQKFYKL

SEQ ID NO: 4394 - RNA, 621 nt, synthetic construct
  misc_feature 1..621: note = IL-24__Homo_sapiens__AAA91780
  source 1..621: mol_type = other RNA
atgaattttcaacagaggctgcaaagcctgtggactttagccagacccttctgccctcctttgctggcgacagcctctcaaatgcagatggttgtgctcccttgcctgggttttaccctgcttctctggagccaggtatcaggggcccagggccaagaattccactttgggccctgccaagtgaagggggttgttccccagaaactgtgggaagccttctgggctgtgaaagacactatgcaagctcaggataacatcacgagtgcccggctgctgcagcaggaggttctgcagaacgtctcggatgctgagagctgttaccttgtccacaccctgctggagttctacttgaaaactgttttcaaaaactaccacaatagaacagttgaagtcaggactctgaagtcattctctactctggccaacaactttgttctcatcgtgtcacaactgcaacccagtcaagaaaatgagatgttttccatcagagacagtgcacacaggcggtttctgctattccggagagcattcaaacagttggacgtagaagcagctctgaccaaagcccttggggaagtggacattcttctgacctggatgcagaaattctacaagctctga

SEQ ID NO: 4395 - RNA, 621 nt, synthetic construct
  misc_feature 1..621: note = derived and/or modified sequence opt1 fromIL-24__Homo_sapiens__AAA91780
  source 1..621: mol_type = other RNA
atgaacttccagcagcgcctgcagagcctctggaccctggcccggcccttctgcccgcccctgctcgccaccgcgtcccagatgcagatggtggtcctgccctgcctgggcttcacgctcctgctgtggagccaggtgtccggggcccagggccaggagttccacttcgggccctgccaggtgaagggcgtcgtgccgcagaagctctgggaggccttctgggccgtgaaggacaccatgcaggcccaggacaacatcaccagcgcgcgcctgctgcagcaggaggtcctccagaacgtgtccgacgccgagagctgctacctggtgcacaccctgctcgagttctacctgaagacggtcttcaagaactaccacaaccggaccgtggaggtgcgcaccctgaagtccttcagcaccctcgccaacaacttcgtcctgatcgtgtcccagctgcagcccagccaggagaacgagatgttctccatccgggacagcgcccaccgccggttcctcctgttccgccgggcgttcaagcagctggacgtggaggccgccctcacgaaggccctgggggaggtcgacatcctgctcacctggatgcagaagttctacaagctgtga

SEQ ID NO: 4396 - RNA, 621 nt, synthetic construct
  misc_feature 1..621: note = derived and/or modified sequence opt2 fromIL-24__Homo_sapiens__AAA91780
  source 1..621: mol_type = other RNA
atgaacttccagcagcgcctccagtccctctggaccctcgcccgccccttctgcccccccctcctcgccaccgcctcccagatgcagatggtcgtcctcccctgcctcggcttcaccctcctcctctggtcccaggtctccggcgcccagggccaggagttccacttcggcccctgccaggtcaagggcgtcgtcccccagaagctctgggaggccttctgggccgtcaaggacaccatgcaggcccaggacaacatcacctccgcccgcctcctccagcaggaggtcctccagaacgtctccgacgccgagtcctgctacctcgtccacaccctcctcgagttctacctcaagaccgtcttcaagaactaccacaaccgcaccgtcgaggtccgcaccctcaagtccttctccaccctcgccaacaacttcgtcctcatcgtctcccagctccagccctcccaggagaacgagatgttctccatccgcgactccgcccaccgccgcttcctcctcttccgccgcgccttcaagcagctcgacgtcgaggccgccctcaccaaggccctcggcgaggtcgacatcctcctcacctggatgcagaagttctacaagctctga

SEQ ID NO: 4397 - RNA, 621 nt, synthetic construct
  misc_feature 1..621: note = derived and/or modified sequence opt3 fromIL-24__Homo_sapiens__AAA91780
  source 1..621: mol_type = other RNA
atgaacttccagcaaagactgcagagcctctggacccttgccaggcccttttgccctccactgttggctacagcatcccagatgcagatggtggtcttaccgtgtctgggcttcactctactcctgtggtctcaagtttcaggggcccagggacaggagtttcacttcggtccctgccaggtgaagggcgtagtgcctcaaaaactttgggaagcgttttgggctgtcaaggacacgatgcaggcccaggataatatcaccagtgcacggctgttgcagcaagaggtgctccagaacgttagcgacgccgaatcctgttacctggtgcatacactgctcgagttctatttaaaaactgtctttaagaattaccacaaccgcaccgtggaagtacgaacactgaaatctttctcgacccttgctaataactttgttttgattgtgtcacagctgcaaccaagccaggagaatgagatgttcagtatacgtgattccgcacatagaaggtttctactcttccggcgcgcctttaagcagctggacgtcgaagctgcccttactaaggcgctgggggaggtggatatcttgctcacatggatgcagaaattctataagctgtga

SEQ ID NO: 4398 - RNA, 621 nt, synthetic construct
  misc_feature 1..621: note = derived and/or modified sequence opt4 fromIL-24__Homo_sapiens__AAA91780
  source 1..621: mol_type = other RNA
atgaacttccagcagagactgcagagcctgtggaccctggccagacccttctgcccccccctgctggccaccgccagccagatgcagatggtggtgctgccctgcctgggcttcaccctgctgctgtggagccaggtgagcggcgcccagggccaggagttccacttcggcccctgccaggtgaagggcgtggtgccccagaagctgtgggaggccttctgggccgtgaaggacaccatgcaggcccaggacaacatcaccagcgccagactgctgcagcaggaggtgctgcagaacgtgagcgacgccgagagctgctacctggtgcacaccctgctggagttctacctgaagaccgtgttcaagaactaccacaacagaaccgtggaggtgagaaccctgaagagcttcagcaccctggccaacaacttcgtgctgatcgtgagccagctgcagcccagccaggagaacgagatgttcagcatcagagacagcgcccacagaagattcctgctgttcagaagagccttcaagcagctggacgtggaggccgccctgaccaaggccctgggcgaggtggacatcctgctgacctggatgcagaagttctacaagctgtga

SEQ ID NO: 4399 - RNA, 621 nt, synthetic construct
  misc_feature 1..621: note = derived and/or modified sequence opt5 fromIL-24__Homo_sapiens__AAA91780
  source 1..621: mol_type = other RNA
atgaacttccagcaaagactgcagagcctctggaccctggcccggcccttttgccctccgcttctggctacagcctcccagatgcagatggtggtcctcccctgtctgggcttcacgcttctgctctggtctcaagttagcggggcgcagggacaggagtttcacttcggcccttgccaggtgaagggggtggtcccccaaaaactgtgggaggctttttgggccgtgaaggacaccatgcaggcccaggataatatcacatccgctcgcctgctccagcaagaagttctgcagaacgtgtctgacgccgaaagctgttaccttgtccataccctgctcgagttctatctgaaaacagtgtttaagaattaccacaacagaaccgttgaagtgcggacacttaaatccttctctaccctggctaataactttgtcctcattgtgagccagctgcaaccttcccaggagaatgagatgttcagcatccgcgattctgcccatagacggtttcttctcttccgcagagcgtttaagcagctggacgtggaagccgctcttacgaaggccctgggagaggtcgatattctcctgacctggatgcagaaattctataagctgtga

SEQ ID NO: 4400 - RNA, 621 nt, synthetic construct
  misc_feature 1..621: note = derived and/or modified sequence opt6 fromIL-24__Homo_sapiens__AAA91780
  source 1..621: mol_type = other RNA
atgaacttccaacaaagactacaatcactatggacattagcaagaccattctgcccaccactactagcaacagcatcacaaatgcaaatggtagtactcccatgcctaggattcacattactattatggtcacaagtatccggagcccaaggacaagaattccacttcggaccatgccaagtaaaaggagtagtaccacaaaaactatgggaagcattctgggcagtaaaagatacaatgcaagcacaagacaacataacatcagccagactactacaacaagaagtactacaaaacgtatcagacgcagaatcatgctacctagtacacacactcctagaattctacctaaaaacagtattcaaaaactatcacaacagaacagtagaagtaagaacactaaaatcattctcaacactagcaaacaacttcgtattaatagtttcacaactacaaccatcccaagaaaacgaaatgttctcaataagagattccgcacacagaagattcctactattcagaagagcattcaaacaactagacgtcgaagcagcactaacaaaagcactaggagaagtagacatactactaacatggatgcaaaaattctacaaattataa

SEQ ID NO: 4401 - protein, 51 aa, synthetic construct [sequence omitted]

SEQ ID NO: 4402 - RNA, 156 nt, synthetic construct
  misc_feature 1..156: note = IL-24__Homo_sapiens__AAV52800
  source 1..156: mol_type = other RNA
atgaattttcaacagaggctgcaaagcctgtggactttagccagcaagctcaggataacatcacgagtgcccggctgctgcaacaggaggttctgcagaacgtctcggatgctgagggctgttaccttgtccacaccctgctggagttctacttga

SEQ ID NO: 4403 - RNA, 156 nt, synthetic construct
  misc_feature 1..156: note = derived and/or modified sequence opt1 fromIL-24__Homo_sapiens__AAV52800
  source 1..156: mol_type = other RNA
atgaacttccagcagcgcctgcagagcctctggaccctggcctccaagctgcggatcaccagccgcgtgcccggctgctgcaaccggcgcttctgccggacgtcccgcatgctccgggccgtcaccctgagcaccccgtgctggtccagcacctga

SEQ ID NO: 4404 - RNA, 156 nt, synthetic construct
  misc_feature 1..156: note = derived and/or modified sequence opt2 fromIL-24__Homo_sapiens__AAV52800
  source 1..156: mol_type = other RNA
atgaacttccagcagcgcctccagtccctctggaccctcgcctccaagctccgcatcacctcccgcgtccccggctgctgcaaccgccgcttctgccgcacctcccgcatgctccgcgccgtcaccctctccaccccctgctggtcctccacctga

SEQ ID NO: 4405 - RNA, 156 nt, synthetic construct
  misc_feature 1..156: note = derived and/or modified sequence opt3 fromIL-24__Homo_sapiens__AAV52800
  source 1..156: mol_type = other RNA
atgaacttccagcaaagactgcagagcctctggacccttgcctccaagctgaggatcacatctcgggtgcccggctgctgtaatcgccgattttgccgtacttcaagaatgttgagggctgtcacgttaagtaccccttgttggagctccacatga

SEQ ID NO: 4406 - RNA, 156 nt, synthetic construct
  misc_feature 1..156: note = derived and/or modified sequence opt4 fromIL-24__Homo_sapiens__AAV52800
  source 1..156: mol_type = other RNA
atgaacttccagcagagactgcagagcctgtggaccctggccagcaagctgagaatcaccagcagagtgcccggctgctgcaacagaagattctgcagaaccagcagaatgctgagagccgtgaccctgagcaccccctgctggagcagcacctga

SEQ ID NO: 4407 - RNA, 156 nt, synthetic construct
  misc_feature 1..156: note = derived and/or modified sequence opt5 fromIL-24__Homo_sapiens__AAV52800
  source 1..156: mol_type = other RNA
atgaacttccagcaaagactgcagagcctctggaccctggcctccaagctgcggatcacatctcgcgtgcccggctgctgtaatagacggttttgccgcacgagcagaatgcttcgggctgtcaccctctccacaccttgttggtctagcacctga

SEQ ID NO: 4408 - RNA, 156 nt, synthetic construct
  misc_feature 1..156: note = derived and/or modified sequence opt6 fromIL-24__Homo_sapiens__AAV52800
  source 1..156: mol_type = other RNA
atgaactttcaacaaagactacaatcactatggacattagcatcaaaattaagaataacatcaagagtaccaggatgctgtaacagaagattctgcagaacatcaagaatgctaagagcagtaacattaagcacaccatgctggtcaagcacataa

SEQ ID NO: 4409 - protein, 173 aa, synthetic construct
  REGION 1..173: note = IL-25__Homo_sapiens__Q969H8
MAAPSGGWNGVGASLWAALLLGAVALRPAEAVSEPTTVAFDVRPGGVVHSFSHNVGPGDKYTCMFTYASQGGTNEQWQMSLGTSEDHQHFTCTIWRPQGKSYLYFTQFKAEVRGAEIEYAMAYSKAAFERESDVPLKTEEFEVTKTAVAHRPGAFKAELSKLVIVAKASRTEL

SEQ ID NO: 4410 - RNA, 522 nt, synthetic construct
  misc_feature 1..522: note = IL-25__Homo_sapiens__AAH10129
  source 1..522: mol_type = other RNA
atggcggcgcccagcggagggtggaacggcgtcggcgcgagcttgtgggccgcgctgctcctaggggccgtggcgctgaggccggcggaggcggtgtccgagcccacgacggtggcgtttgacgtgcggcccggcggcgtcgtgcattccttctcccataacgtgggcccgggggacaaatatacgtgtatgttcacttacgcctctcaaggagggaccaatgagcaatggcagatgagtctggggaccagcgaagaccaccagcacttcacctgcaccatctggaggccccaggggaagtcctatctgtacttcacacagttcaaggcagaggtgcggggcgctgagattgagtacgccatggcctactctaaagccgcatttgaaagggaaagtgatgtccctctgaaaactgaggaatttgaagtgaccaaaacagcagtggctcacaggcccggggcattcaaagctgagctgtccaagctggtgattgtggccaaggcatcgcgcactgagctgtga

SEQ ID NO: 4411 - RNA, 522 nt, synthetic construct
  misc_feature 1..522: note = derived and/or modified sequence opt1 fromIL-25__Homo_sapiens__AAH10129
  source 1..522: mol_type = other RNA
atggccgcccccagcggcgggtggaacggcgtgggggcgtccctgtgggccgccctcctgctgggcgccgtcgccctccgcccggcggaggccgtgagcgagcccaccaccgtggccttcgacgtccggcccgggggcgtggtgcactccttcagccacaacgtcggccccggggacaagtacacgtgcatgttcacctacgcctcccagggcgggaccaacgagcagtggcagatgagcctgggcacctccgaggaccaccagcacttcacgtgcaccatctggcgcccgcaggggaagtcctacctgtacttcacccagttcaaggcggaggtgcggggcgccgagatcgagtacgccatggcctacagcaaggccgcgttcgagcgcgagagcgacgtgcccctcaagaccgaggagttcgaggtcacgaagaccgccgtggcccaccggcccggcgccttcaaggccgagctgtccaagctggtgatcgtcgcgaaggccagccgcaccgagctctga

SEQ ID NO: 4412 - RNA, 522 nt, synthetic construct
  misc_feature 1..522: note = derived and/or modified sequence opt2 fromIL-25__Homo_sapiens__AAH10129
  source 1..522: mol_type = other RNA
atggccgccccctccggcggctggaacggcgtcggcgcctccctctgggccgccctcctcctcggcgccgtcgccctccgccccgccgaggccgtctccgagcccaccaccgtcgccttcgacgtccgccccggcggcgtcgtccactccttctcccacaacgtcggccccggcgacaagtacacctgcatgttcacctacgcctcccagggcggcaccaacgagcagtggcagatgtccctcggcacctccgaggaccaccagcacttcacctgcaccatctggcgcccccagggcaagtcctacctctacttcacccagttcaaggccgaggtccgcggcgccgagatcgagtacgccatggcctactccaaggccgccttcgagcgcgagtccgacgtccccctcaagaccgaggagttcgaggtcaccaagaccgccgtcgcccaccgccccggcgccttcaaggccgagctctccaagctcgtcatcgtcgccaaggcctcccgcaccgagctctga

SEQ ID NO: 4413 - RNA, 522 nt, synthetic construct
  misc_feature 1..522: note = derived and/or modified sequence opt3 fromIL-25__Homo_sapiens__AAH10129
  source 1..522: mol_type = other RNA
atggccgctcccagcggcgggtggaacggagtgggtgcatccctgtgggccgcgctccttctgggcgctgtcgccttgagacctgcagaggccgtttctgaaccaaccacagtggctttcgacgtaaggcccgggggagtggtccactcatttagtcataatgtgggcccgggtgataagtacacttgcatgttcacgtatgcaagccaagggggaaccaacgagcagtggcagatgtccttaggcacatctgaagaccaccagcattttacttgtaccatctggcggcctcagggcaaatcgtacctgtatttcacacaatttaaggccgaggttcgcggggctgaaattgagtacgccatggcgtattcaaaagcagccttcgagcgagaaagcgatgtgccactaaagaccgaggaatttgaggtcactaaaacagctgtggcccaccgtcccggagcattcaaggctgagctcagtaagctggtaatagttgccaaagcgtccagaaccgaactttga

SEQ ID NO: 4414 - RNA, 522 nt, synthetic construct
  misc_feature 1..522: note = derived and/or modified sequence opt4 fromIL-25__Homo_sapiens__AAH10129
  source 1..522: mol_type = other RNA
atggccgcccccagcggcggctggaacggcgtgggcgccagcctgtgggccgccctgctgctgggcgccgtggccctgagacccgccgaggccgtgagcgagcccaccaccgtggccttcgacgtgagacccggcggcgtggtgcacagcttcagccacaacgtgggccccggcgacaagtacacctgcatgttcacctacgccagccagggcggcaccaacgagcagtggcagatgagcctgggcaccagcgaggaccaccagcacttcacctgcaccatctggagaccccagggcaagagctacctgtacttcacccagttcaaggccgaggtgagaggcgccgagatcgagtacgccatggcctacagcaaggccgccttcgagagagagagcgacgtgcccctgaagaccgaggagttcgaggtgaccaagaccgccgtggcccacagacccggcgccttcaaggccgagctgagcaagctggtgatcgtggccaaggccagcagaaccgagctgtga

SEQ ID NO: 4415 - RNA, 522 nt, synthetic construct
  misc_feature 1..522: note = derived and/or modified sequence opt5 fromIL-25__Homo_sapiens__AAH10129
  source 1..522: mol_type = other RNA
atggccgctcccagcggcgggtggaacggagtgggcgcctccctgtgggcggctctcctgcttggggccgtcgccctgagacctgctgaggccgtttctgaaccgaccacagtggctttcgacgtgcggcccggaggcgtcgtgcacagcttttcccataatgttgggcctggagataagtacacgtgcatgttcacctatgcctctcagggcggcacaaacgagcaatggcagatgagcctcgggacctccgaagaccaccagcattttacatgtaccatctggcgcccccagggaaaatcttacctgtatttcacacaatttaaggcggaggtgagaggcgccgaaattgagtacgctatggcctatagcaaagctgccttcgagcgggaatccgatgtccctcttaagaccgaggaatttgaggtgacgaaaaccgcggttgcccaccgccccggggctttcaaggccgagctgagcaagctcgtgatcgtcgctaaagcctctagaacagaactgtga

SEQ ID NO: 4416 - RNA, 522 nt, synthetic construct
  misc_feature 1..522: note = derived and/or modified sequence opt6 fromIL-25__Homo_sapiens__AAH10129
  source 1..522: mol_type = other RNA
atggcagcaccatcaggaggatggaatggagtaggcgcatcattatgggcagcattattattaggagcagtagcattaagaccagcagaagcagtatcagaaccaacaacagtagcattcgatgtaagaccaggaggagttgtacattcattttcacataacgtaggaccaggagataaatatacatgtatgtttacatatgcatcacaaggaggaacaaacgaacaatggcaaatgtcattaggaacatcagaagatcatcaacatttcacatgcacaatatggagaccacaaggaaaatcatatttatactttacacaattcaaagcagaagtaagaggagcagaaatagaatatgcaatggcatattcaaaagcagcattcgaaagagaatcagatgtaccactaaaaacagaagaatttgaagtaacaaaaacagcagtagcacacagaccaggagcatttaaagcagaattatcaaaactagtaatagtagcaaaagcatcaagaacagaactataa

SEQ ID NO: 4417 - protein, 177 aa, synthetic construct
  REGION 1..177: note = IL-25__Homo_sapiens__Q9H293
MRERPRLGEDSSLISLFLQVVAFLAMVMGTHTYSHWPSCCPSKGQDTSEELLRWSTVPVPPLEPARPNRHPESCRASEDGPLNSRAISPWRYELDRDLNRLPQDLYHARCLCPHCVSLQTGSHMDPRGNSELLYHNQTVFYRRPCHGEKGTHKGYCLERRLYRVSLACVCVRPRVMG

SEQ ID NO: 4418 - RNA, 534 nt, synthetic construct
  misc_feature 1..534: note = IL-25__Homo_sapiens__AAG40848
  source 1..534: mol_type = other RNA
atgagggagcgacccagattaggtgaggacagttctctcattagccttttcctacaggtggttgcattcttggcaatggtcatgggaacccacacctacagccactggcccagctgctgccccagcaaagggcaggacacctctgaggagctgctgaggtggagcactgtgcctgtgcctcccctagagcctgctaggcccaaccgccacccagagtcctgtagggccagtgaagatggacccctcaacagcagggccatctccccctggagatatgagttggacagagacttgaaccggctcccccaggacctgtaccacgcccgttgcctgtgcccgcactgcgtcagcctacagacaggctcccacatggacccccggggcaactcggagctgctctaccacaaccagactgtcttctacaggcggccatgccatggcgagaagggcacccacaagggctactgcctggagcgcaggctgtaccgtgtttccttagcttgtgtgtgtgtgcggccccgtgtgatgggctag

SEQ ID NO: 4419 - RNA, 534 nt, synthetic construct
  misc_feature 1..534: note = derived and/or modified sequence opt1 fromIL-25__Homo_sapiens__AAG40848
  source 1..534: mol_type = other RNA
atgcgcgagcggccccgcctgggcgaggacagctccctcatcagcctgttcctgcaggtcgtcgccttcctcgccatggtgatggggacccacacctactcccactggccgagctgctgcccctccaagggccaggacacgagcgaggagctgctgcggtggtccaccgtgcccgtgcccccgctcgagcccgcgcgccccaaccggcaccccgagagctgccgcgcctccgaggacgggccgctgaacagccgggccatctccccctggcgctacgagctggaccgggacctcaaccgcctgccccaggacctgtaccacgcccggtgcctctgcccccactgcgtgagcctgcagaccggctcccacatggacccgcgcgggaacagcgagctgctctaccacaaccagaccgtgttctaccggcgcccctgccacggcgagaagggcacgcacaaggggtactgcctggagcggcgcctgtaccgggtctccctcgcctgcgtgtgcgtgcgcccccgggtcatgggctga

SEQ ID NO: 4420 - RNA, 534 nt, synthetic construct
  misc_feature 1..534: note = derived and/or modified sequence opt2 fromIL-25__Homo_sapiens__AAG40848
  source 1..534: mol_type = other RNA
atgcgcgagcgcccccgcctcggcgaggactcctccctcatctccctcttcctccaggtcgtcgccttcctcgccatggtcatgggcacccacacctactcccactggccctcctgctgcccctccaagggccaggacacctccgaggagctcctccgctggtccaccgtccccgtcccccccctcgagcccgcccgccccaaccgccaccccgagtcctgccgcgcctccgaggacggccccctcaactcccgcgccatctccccctggcgctacgagctcgaccgcgacctcaaccgcctcccccaggacctctaccacgcccgctgcctctgcccccactgcgtctccctccagaccggctcccacatggacccccgcggcaactccgagctcctctaccacaaccagaccgtcttctaccgccgcccctgccacggcgagaagggcacccacaagggctactgcctcgagcgccgcctctaccgcgtctccctcgcctgcgtctgcgtccgcccccgcgtcatgggctga

SEQ ID NO: 4421 - RNA, 534 nt, synthetic construct
  misc_feature 1..534: note = derived and/or modified sequence opt3 fromIL-25__Homo_sapiens__AAG40848
  source 1..534: mol_type = other RNA
atgagagagaggccccggctgggcgaagacagctccctcatctctcttttcctgcaagtggtcgcctttttggctatggttatggggacccacacatactcacattggcctagttgctgtccaagcaagggacaggatacttccgaggaattactgcgctggtctacggtgccggtaccccctctagagccagcacgacccaaccgtcaccctgaatcgtgcagagcctcagaggacggtccactcaatagcagggcgattagtccctggcggtatgagctggatcgcgaccttaacagactgcctcaggatttgtaccatgctaggtgtctctgcccacactgtgtgtccctgcagaccggctctcatatggacccgcgggggaatagcgaactgctctatcacaaccagacagtcttctaccgccgaccctgccacggagagaaaggcactcataagggttattgtttagaaagaaggctgtaccgggtgtcccttgcctgcgtttgtgtgcgtcctcgcgtcatggggtga

SEQ ID NO: 4422 - RNA, 534 nt, synthetic construct
  misc_feature 1..534: note = derived and/or modified sequence opt4 fromIL-25__Homo_sapiens__AAG40848
  source 1..534: mol_type = other RNA
atgagagagagacccagactgggcgaggacagcagcctgatcagcctgttcctgcaggtggtggccttcctggccatggtgatgggcacccacacctacagccactggcccagctgctgccccagcaagggccaggacaccagcgaggagctgctgagatggagcaccgtgcccgtgccccccctggagcccgccagacccaacagacaccccgagagctgcagagccagcgaggacggccccctgaacagcagagccatcagcccctggagatacgagctggacagagacctgaacagactgccccaggacctgtaccacgccagatgcctgtgcccccactgcgtgagcctgcagaccggcagccacatggaccccagaggcaacagcgagctgctgtaccacaaccagaccgtgttctacagaagaccctgccacggcgagaagggcacccacaagggctactgcctggagagaagactgtacagagtgagcctggcctgcgtgtgcgtgagacccagagtgatgggctga

SEQ ID NO: 4423 - RNA, 534 nt, synthetic construct
  misc_feature 1..534: note = derived and/or modified sequence opt5 fromIL-25__Homo_sapiens__AAG40848
  source 1..534: mol_type = other RNA
atgagagagcggccccgcctgggcgaagacagctccctcatctctctgttccttcaggtggtcgcctttctggctatggttatggggacccacacatacagccattggccttcctgctgtccgtctaagggacaagatacgagcgaggaactcctgagatggtccaccgtgcccgtgcctccccttgagcctgcccggcccaaccgccaccctgaatcttgcagagcgagcgaggacggcccgctcaattcccgggctattagcccctggcgctatgagctggatagagacctgaaccggctgcctcaggatctctaccatgcccgctgtctgtgcccccactgtgtctctcttcagacagggtcccatatggaccctagaggaaatagcgaactgctctatcacaaccagaccgtgttctaccggcgcccctgccacggcgagaaagggacacataagggatattgtctggaaagacggctttaccgcgtttctctggcctgcgtgtgtgtcagaccgcgggtgatgggctga

SEQ ID NO: 4424 - RNA, 534 nt, synthetic construct
  misc_feature 1..534: note = derived and/or modified sequence opt6 fromIL-25__Homo_sapiens__AAG40848
  source 1..534: mol_type = other RNA
atgagagaaagaccaagattaggagaagactcatcactaatatcactatttctacaagtagtagcatttttagcaatggtaatgggaacacatacatattcacattggccatcatgttgcccaagcaaaggacaagacacaagcgaagaactactaagatggtcaacagtaccagtaccaccactagaaccagcaagaccaaacagacacccagaatcatgcagagcatcagaagatggaccattaaattcaagagcaatatcaccatggagatacgaactagatagagatttaaatagattaccacaagacttataccatgcaagatgcttatgcccacactgtgtatcactacaaacaggatcacatatggatccaagaggaaattcagaattactataccataaccaaacagtattttatagaagaccatgtcacggagaaaaaggaacacacaaaggatattgcttagaaagaagattatacagagtatcactagcatgcgtatgcgtaagaccaagagtaatgggataa

SEQ ID NO: 4425 - protein, 171 aa, synthetic construct
  REGION 1..171: note = IL-26__Homo_sapiens__Q9NPH9
MLVNFILRCGLLLVTLSLAIAKHKQSSFTKSCYPRGTLSQAVDALYIKAAWLKATIPEDRIKNIRLLKKKTKKQFMKNCQFQEQLLSFFMEDVFGQLQLQGCKKIRFVEDFHSLRQKLSHCISCASSAREMKSITRMKRIFYRIGNKGIYKAISELDILLSWIKKLLESSQ

SEQ ID NO: 4426 - RNA, 516 nt, synthetic construct
  misc_feature 1..516: note = IL-26__Homo_sapiens__AAH66270
  source 1..516: mol_type = other RNA
atgctggtgaatttcattttgaggtgtgggttgctgttagtcactctgtctcttgccattgccaagcacaagcaatcttccttcaccaaaagttgttacccaaggggaacattgtcccaagctgttgacgctctctatatcaaagcagcatggctcaaagcaacgattccagaagaccgcataaaaaatatacgattattaaaaaagaaaacaaaaaagcagtttatgaaaaactgtcaatttcaagaacagcttctgtccttcttcatggaagacgtttttggtcaactgcaattgcaaggctgcaagaaaatacgctttgtggaggactttcatagccttaggcagaaattgagccactgtatttcctgtgcttcatcagctagagagatgaaatccattaccaggatgaaaagaatattttataggattggaaacaaaggaatctacaaagccatcagtgaactggatattcttctttcctggattaaaaaattattggaaagcagtcagtaa

SEQ ID NO: 4427 - RNA, 516 nt, synthetic construct
  misc_feature 1..516: note = derived and/or modified sequence opt1 fromIL-26__Homo_sapiens__AAH66270
  source 1..516: mol_type = other RNA
atgctggtgaacttcatcctccgctgcggcctgctgctcgtcaccctgagcctggccatcgccaagcacaagcagtccagcttcaccaagtcctgctacccccgggggacgctcagccaggcggtggacgccctgtacatcaaggccgcctggctgaaggccaccatcccggaggaccgcatcaagaacatccggctcctgaagaagaagaccaagaagcagttcatgaagaactgccagttccaggagcagctgctctccttcttcatggaggacgtgttcggccagctgcagctgcaggggtgcaagaagatccgcttcgtcgaggacttccacagcctccggcagaagctgtcccactgcatcagctgcgcgtccagcgcccgcgagatgaagtccatcacccggatgaagcgcatcttctaccggatcggcaacaaggggatctacaaggccatcagcgagctggacatcctcctgtcctggatcaagaagctgctcgagagctcccagtga

SEQ ID NO: 4428 - RNA, 516 nt, synthetic construct
  misc_feature 1..516: note = derived and/or modified sequence opt2 fromIL-26__Homo_sapiens__AAH66270
  source 1..516: mol_type = other RNA
atgctcgtcaacttcatcctccgctgcggcctcctcctcgtcaccctctccctcgccatcgccaagcacaagcagtcctccttcaccaagtcctgctacccccgcggcaccctctcccaggccgtcgacgccctctacatcaaggccgcctggctcaaggccaccatccccgaggaccgcatcaagaacatccgcctcctcaagaagaagaccaagaagcagttcatgaagaactgccagttccaggagcagctcctctccttcttcatggaggacgtcttcggccagctccagctccagggctgcaagaagatccgcttcgtcgaggacttccactccctccgccagaagctctcccactgcatctcctgcgcctcctccgcccgcgagatgaagtccatcacccgcatgaagcgcatcttctaccgcatcggcaacaagggcatctacaaggccatctccgagctcgacatcctcctctcctggatcaagaagctcctcgagtcctcccagtga

SEQ ID NO: 4429 - RNA, 516 nt, synthetic construct
  misc_feature 1..516: note = derived and/or modified sequence opt3 fromIL-26__Homo_sapiens__AAH66270
  source 1..516: mol_type = other RNA
atgctggtgaacttcatactcagatgcggccttctgttggtcaccttaagcctggccattgctaagcacaaacagtcctcttttacaaagtcatgttaccccagggggactctaagtcaagcagttgacgccctctatataaaagcggcttggctgaaggccacgatccctgaggatcggattaaaaatatccgccttctgaagaagaaaaccaagaaacagttcatgaagaactgccagtttcaggaacaattgctcagcttctttatggaggacgtgttcggacagctgcagctgcagggttgtaaaaagattcgatttgtagaagatttccattccctccgtcaaaagttatctcactgcatctcgtgtgcatcaagcgccagagagatgaaaagtataacaaggatgaagcggatcttttaccgcattggcaataaagggatctataaggctatttccgaactggacatccttttgtcttggatcaaaaagctgctagagagctcccagtga

SEQ ID NO: 4430 - RNA, 516 nt, synthetic construct
  misc_feature 1..516: note = derived and/or modified sequence opt4 fromIL-26__Homo_sapiens__AAH66270
  source 1..516: mol_type = other RNA
atgctggtgaacttcatcctgagatgcggcctgctgctggtgaccctgagcctggccatcgccaagcacaagcagagcagcttcaccaagagctgctaccccagaggcaccctgagccaggccgtggacgccctgtacatcaaggccgcctggctgaaggccaccatccccgaggacagaatcaagaacatcagactgctgaagaagaagaccaagaagcagttcatgaagaactgccagttccaggagcagctgctgagcttcttcatggaggacgtgttcggccagctgcagctgcagggctgcaagaagatcagattcgtggaggacttccacagcctgagacagaagctgagccactgcatcagctgcgccagcagcgccagagagatgaagagcatcaccagaatgaagagaatcttctacagaatcggcaacaagggcatctacaaggccatcagcgagctggacatcctgctgagctggatcaagaagctgctggagagcagccagtga

SEQ ID NO: 4431 - RNA, 516 nt, synthetic construct
  misc_feature 1..516: note = derived and/or modified sequence opt5 fromIL-26__Homo_sapiens__AAH66270
  source 1..516: mol_type = other RNA
atgctggtgaacttcatcctcagatgcggcctgcttctggtcaccctcagcctggccattgctaagcacaaacagtcctcttttacaaagagctgttacccccgggggacgctttcccaagccgttgacgcgctgtatatcaaagctgcctggctcaaggccaccattcctgaggatcgcatcaaaaatattagactgctgaagaagaaaacaaagaaacagttcatgaagaactgccagtttcaggaacaactcctgtctttctttatggaggacgtgttcggacagcttcagctgcagggctgtaaaaagatccggtttgtggaagatttccatagcctccgccaaaagctgtcccactgcatctcttgtgctagctccgccagagagatgaaaagcattacccggatgaagcgcatcttttacagaattgggaataaaggaatctataaggctatttctgaacttgacatcctgctctcctggattaaaaagctgctggagagctctcagtga

SEQ ID NO: 4432 - RNA, 516 nt, synthetic construct
  misc_feature 1..516: note = derived and/or modified sequence opt6 fromIL-26__Homo_sapiens__AAH66270
  source 1..516: mol_type = other RNA
atgctagtaaacttcatactaagatgcggactactactagtaaccctatcactagcaatagcaaaacacaaacaatcatcattcacaaaatcctgctacccaagaggaaccttatcacaagcagtagacgcattatacataaaagcagcatggctaaaagcaaccataccagaagacagaataaaaaacataagactactaaaaaaaaaaacaaaaaaacaattcatgaaaaactgccaattccaagaacaactactatcattcttcatggaagacgtattcggacaactacaactacaaggatgcaaaaaaataagattcgtagaagacttccactcactaagacaaaaactatcccactgcatatcatgcgcaagctcagcaagagaaatgaaatcaataacaagaatgaaaagaatattctacagaataggaaacaaaggaatatacaaagcaatatcagaactagacatactactatcatggatcaaaaaactactcgaatcatcacaataa

SEQ ID NO: 4433 - protein, 243 aa, synthetic construct
  REGION 1..243: note = IL-27A__Homo_sapiens__Q8NEV9
MGQTAGDLGWRLSLLLLPLLLVQAGVWGFPRPPGRPQLSLQELRREFTVSLHLARKLLSEVRGQAHRFAESHLPGVNLYLLPLGEQLPDVSLTFQAWRRLSDPERLCFISTTLQPFHALLGGLGTQGRWTNMERMQLWAMRLDLRDLQRHLRFQVLAAGFNLPEEEEEEEEEEEEERKGLLPGALGSALQGPAQVSWPQLLSTYRLLHSLELVLSRAVRELLLLSKAGHSVWPLGFPTLSPQP

SEQ ID NO: 4434 - RNA, 732 nt, synthetic construct
  misc_feature 1..732: note = IL-27A__Homo_sapiens__ABK41903
  source 1..732: mol_type = other RNA
atgggccagacggcaggcgaccttggctggcggctcagcctgttgctgcttcccttgctcctggttcaagctggtgtctggggattcccaaggcccccagggaggccccagctgagcctgcaggagctgcggagggagttcacagtcagcctgcatctcgccaggaagctgctctccgaggttcggggccaggcccaccgctttgcggaatctcacctgccaggagtgaacctgtacctcctgcccctgggagagcagctccctgatgtttccctgaccttccaggcctggcgccgcctctctgacccggagcgtctctgcttcatctccaccacgcttcagcccttccatgccctgctgggagggctggggacccagggccgctggaccaacatggagaggatgcagctgtgggccatgaggctggacctccgcgatctgcagcggcacctccgcttccaggtgctggctgcaggattcaacctcccggaggaggaggaggaggaagaggaggaggaggaggaggagaggaaggggctgctcccaggggcactgggcagcgccttacagggcccggcccaggtgtcctggccccagctcctctccacctaccgcctgctgcactccttggagctcgtcttatctcgggccgtgcgggagttgctgctgctgtccaaggctgggcactcagtctggcccttggggttcccaacattgagcccccagccctga

SEQ ID NO: 4435 - RNA, 732 nt, synthetic construct
  misc_feature 1..732: note = derived and/or modified sequence opt1 fromIL-27A__Homo_sapiens__ABK41903
  source 1..732: mol_type = other RNA
atgggccagaccgccggggacctgggctggcgcctctccctgctgctcctgcccctgctcctggtgcaggccggggtctggggcttcccgcggccgcccgggcgcccccagctgtccctccaggagctgcggcgcgagttcaccgtgagcctgcacctcgcgcggaagctgctgtccgaggtgcgcggccaggcccaccggttcgccgagagccacctccccggcgtcaacctgtacctgctccccctgggggagcagctgcccgacgtgtccctcacgttccaggcctggcgccggctgagcgaccccgagcgcctgtgcttcatctccaccaccctccagccgttccacgccctgctgggcgggctcggcacccaggggcggtggacgaacatggagcgcatgcagctgtgggcgatgcggctggacctccgcgacctgcagcggcacctccgcttccaggtgctggccgccggcttcaacctgcccgaggaggaggaggaggaggaggaggaggaggaggaggagcggaagggcctgctccccggggccctgggcagcgcgctgcaggggcccgcccaggtctcctggccgcagctcctgagcacctaccgcctgctccactccctggagctggtgctcagccgggccgtgcgcgagctgctgctcctgtccaaggccggccacagcgtctggcccctgggcttccccaccctgagcccccagccgtga

SEQ ID NO: 4436 - RNA, 732 nt, synthetic construct
  misc_feature 1..732: note = derived and/or modified sequence opt2 fromIL-27A__Homo_sapiens__ABK41903
  source 1..732: mol_type = other RNA
atgggccagaccgccggcgacctcggctggcgcctctccctcctcctcctccccctcctcctcgtccaggccggcgtctggggcttcccccgcccccccggccgcccccagctctccctccaggagctccgccgcgagttcaccgtctccctccacctcgcccgcaagctcctctccgaggtccgcggccaggcccaccgcttcgccgagtcccacctccccggcgtcaacctctacctcctccccctcggcgagcagctccccgacgtctccctcaccttccaggcctggcgccgcctctccgaccccgagcgcctctgcttcatctccaccaccctccagcccttccacgccctcctcggcggcctcggcacccagggccgctggaccaacatggagcgcatgcagctctgggccatgcgcctcgacctccgcgacctccagcgccacctccgcttccaggtcctcgccgccggcttcaacctccccgaggaggaggaggaggaggaggaggaggaggaggaggagcgcaagggcctcctccccggcgccctcggctccgccctccagggccccgcccaggtctcctggccccagctcctctccacctaccgcctcctccactccctcgagctcgtcctctcccgcgccgtccgcgagctcctcctcctctccaaggccggccactccgtctggcccctcggcttccccaccctctccccccagccctga

SEQ ID NO: 4437 - RNA, 732 nt, synthetic construct
  misc_feature 1..732: note = derived and/or modified sequence opt3 fromIL-27A__Homo_sapiens__ABK41903
  source 1..732: mol_type = other RNA
atgggccagaccgccggggacctgggatggagactcagccttctgttgttacccctgctactcgtgcaagctggtgtctggggcttccctaggccaccggggcggccccagctgtcccttcaggagctgcgccgagaatttacagtttctttgcacctcgcacgtaagctgctgtcagaggtgagaggacaggcccataggttcgcggaaagtcacctccctggcgtaaacttatacctgcttccattgggtgagcaactgcccgatgtgagcctaacttttcaggcttggcggcgcctctccgaccctgaaagactgtgcttcatctctacgacccttcagccatttcatgccctgttgggcggactcggcacacaggggaggtggactaatatggagcggatgcaactgtgggcaatgcgcttagatctgcgagacctccagagacaccttaggttccaggtcctggccgctgggtttaacttgcccgaggaagaggaagaggaggaagaggaagaggaagaggagcggaaaggactactgcctggtgcactcggctcggccctgcaggggccagctcaagtgtcatggccgcagcttctgagcacctatcgtttgctccatagtctggaattagttctgtcccgcgccgtgagagagctactcctgctttctaaggcgggacacagcgtctggcccttgggcttccctacactgtccccacagccctga

SEQ ID NO: 4438 - RNA, 732 nt, synthetic construct
  misc_feature 1..732: note = derived and/or modified sequence opt4 fromIL-27A__Homo_sapiens__ABK41903
  source 1..732: mol_type = other RNA
atgggccagaccgccggcgacctgggctggagactgagcctgctgctgctgcccctgctgctggtgcaggccggcgtgtggggcttccccagaccccccggcagaccccagctgagcctgcaggagctgagaagagagttcaccgtgagcctgcacctggccagaaagctgctgagcgaggtgagaggccaggcccacagattcgccgagagccacctgcccggcgtgaacctgtacctgctgcccctgggcgagcagctgcccgacgtgagcctgaccttccaggcctggagaagactgagcgaccccgagagactgtgcttcatcagcaccaccctgcagcccttccacgccctgctgggcggcctgggcacccagggcagatggaccaacatggagagaatgcagctgtgggccatgagactggacctgagagacctgcagagacacctgagattccaggtgctggccgccggcttcaacctgcccgaggaggaggaggaggaggaggaggaggaggaggaggagagaaagggcctgctgcccggcgccctgggcagcgccctgcagggccccgcccaggtgagctggccccagctgctgagcacctacagactgctgcacagcctggagctggtgctgagcagagccgtgagagagctgctgctgctgagcaaggccggccacagcgtgtggcccctgggcttccccaccctgagcccccagccctga

SEQ ID NO: 4439 - RNA, 732 nt, synthetic construct
  misc_feature 1..732: note = derived and/or modified sequence opt5 fromIL-27A__Homo_sapiens__ABK41903
  source 1..732: mol_type = other RNA
atgggccagaccgccggggacctgggatggagactcagcctgcttctgctccccctgcttctggtgcaagctggcgtctgggggttccctcggccgcccggacgccctcagctctccctgcaggagctgagacgggaatttacagtttctctccacctggcccgcaagctgctgagcgaggtgagaggccaggcgcatcggttcgctgaatcccacctccccggggtgaacctgtaccttctgcctctcggagagcaactgcccgatgtctctctgacgtttcaggcctggcgcagactcagcgaccctgaacggctgtgcttcatctccaccacacttcagccgtttcatgccctgctcggcggcctggggacccagggacgctggacaaatatggagagaatgcaactttgggctatgcggctggatctccgcgacctgcagagacaccttcggttccaggtgctcgccgctggctttaacctgcccgaggaagaggaagaggaggaagaggaagaggaagaggagcgcaaagggcttctgcctggagccctcggctctgcgctgcaggggcccgcccaagttagctggcctcagcttctgtccacctatagactcctgcatagcctggaactcgtgctgtctcgggctgtcagagagcttctgctcctgtccaaggccggacacagcgtgtggcccctgggcttcccgacactttctcctcagccctga

SEQ ID NO: 4440 - RNA, 732 nt, synthetic construct
  misc_feature 1..732: note = derived and/or modified sequence opt6 fromIL-27A__Homo_sapiens__ABK41903
  source 1..732: mol_type = other RNA
atgggacaaacagcaggagacttaggatggagattatcactactcttattaccactcctactagtacaagctggagtttggggattccctagaccaccaggaagaccacaattaagcttacaagaactaagaagagaatttactgtatcactacatctagcaagaaaattattatcagaagtaagaggacaagcacacagattcgcagaatcccatctaccaggagtaaacttatacttactaccactaggcgaacaactaccagacgtttcattaacctttcaagcttggagaagattatcagatccagaaagattatgctttatatccacaacactacaaccctttcacgcactattaggaggtctaggaacacaaggaagatggactaacatggaaagaatgcaattatgggccatgagattagacttaagagatctacaaagacatttaagattccaagtactagcagcaggatttaacctaccagaagaagaagaagaagaagaagaagaagaagaagaagaaagaaaaggccttctaccaggagcactaggaagcgcactacaaggaccagcccaagtatcatggccccaattactatcaacatatagattactacatagcctagaattagtattatcaagagcagtaagagaactattactattaagcaaagcaggacactctgtatggccactaggttttccaacactatctccacaaccataa

SEQ ID NO: 4441 - protein, 229 aa, synthetic construct
  REGION 1..229: note = IL-27B__Homo_sapiens__Q14213
MTPQLLLALVLWASCPPCSGRKGPPAALTLPRVQCRASRYPIAVDCSWTLPPAPNSTSPVSFIATYRLGMAARGHSWPCLQQTPTSTSCTITDVQLFSMAPYVLNVTAVHPWGSSSSFVPFITEHIIKPDPPEGVRLSPLAERQLQVQWEPPGSWPFPEIFSLKYWIRYKRQGAARFHRVGPIEATSFILRAVRPRARYYVQVAAQDLTDYGELSDWSLPATATMSLGK

SEQ ID NO: 4442 - RNA, 690 nt, synthetic construct
  misc_feature 1..690: note = IL-27B__Homo_sapiens__AAC33488
  source 1..690: mol_type = other RNA
atgaccccgcagcttctcctggcccttgtcctctgggccagctgcccgccctgcagtggaaggaaagggcccccagcagctctgacactgccccgggtgcaatgccgagcctctcggtacccgatcgccgtggattgctcctggaccctgccgcctgctccaaactccaccagccccgtgtccttcattgccacgtacaggctcggcatggctgcccggggccacagctggccctgcctgcagcagacgccaacgtccaccagctgcaccatcacggatgtccagctgttctccatggctccctacgtgctcaatgtcaccgccgtccacccctggggctccagcagcagcttcgtgcctttcataacagagcacatcatcaagcccgaccctccagaaggcgtgcgcctaagccccctcgctgagcgccagctacaggtgcagtgggagcctcccgggtcctggcccttcccagagatcttctcactgaagtactggatccgttacaagcgtcagggagctgcgcgcttccaccgggtggggcccattgaagccacgtccttcatcctcagggctgtgcggccccgagccaggtactacgtccaagtggcggctcaggacctcacagactacggggaactgagtgactggagtctccccgccactgccacaatgagcctgggcaagtag

SEQ ID NO: 4443 - RNA, 690 nt, synthetic construct
  misc_feature 1..690: note = derived and/or modified sequence opt1 fromIL-27B__Homo_sapiens__AAC33488
  source 1..690: mol_type = other RNA
atgacgccccagctgctcctggccctggtgctctgggccagctgcccgccctgctccggccgcaaggggccgcccgcggccctgaccctgccccgggtccagtgccgcgccagccggtaccccatcgccgtggactgctcctggaccctcccgcccgcccccaacagcacctcccccgtgagcttcatcgcgacctaccgcctgggcatggccgcccgggggcactcctggccctgcctgcagcagacccccacgagcacctcctgcaccatcaccgacgtccagctgttcagcatggccccgtacgtgctcaacgtgacggcggtccacccctggggctccagctccagcttcgtgcccttcatcaccgagcacatcatcaagcccgacccgcccgagggggtgcgcctgagccccctcgccgagcggcagctgcaggtccagtgggagcccccgggctcctggcccttccccgagatcttctccctgaagtactggatccgctacaagcggcagggcgccgcccgcttccaccgggtggggcccatcgaggccaccagcttcatcctccgcgcggtgcggccgcgcgcccggtactacgtccaggtggccgcccaggacctgaccgactacggcgagctgtccgactggagcctccccgccacggcgaccatgagcctggggaagtga

SEQ ID NO: 4444 - RNA, 690 nt, synthetic construct
  misc_feature 1..690: note = derived and/or modified sequence opt2 fromIL-27B__Homo_sapiens__AAC33488
  source 1..690: mol_type = other RNA
atgaccccccagctcctcctcgccctcgtcctctgggcctcctgccccccctgctccggccgcaagggcccccccgccgccctcaccctcccccgcgtccagtgccgcgcctcccgctaccccatcgccgtcgactgctcctggaccctcccccccgcccccaactccacctcccccgtctccttcatcgccacctaccgcctcggcatggccgcccgcggccactcctggccctgcctccagcagacccccacctccacctcctgcaccatcaccgacgtccagctcttctccatggccccctacgtcctcaacgtcaccgccgtccacccctggggctcctcctcctccttcgtccccttcatcaccgagcacatcatcaagcccgacccccccgagggcgtccgcctctcccccctcgccgagcgccagctccaggtccagtgggagccccccggctcctggcccttccccgagatcttctccctcaagtactggatccgctacaagcgccagggcgccgcccgcttccaccgcgtcggccccatcgaggccacctccttcatcctccgcgccgtccgcccccgcgcccgctactacgtccaggtcgccgcccaggacctcaccgactacggcgagctctccgactggtccctccccgccaccgccaccatgtccctcggcaagtga

SEQ ID NO: 4445 - RNA, 690 nt, synthetic construct
  misc_feature 1..690: note = derived and/or modified sequence opt3 fromIL-27B__Homo_sapiens__AAC33488
  source 1..690: mol_type = other RNA
atgacaccccagctgctccttgccctggtgttgtgggctagctgccctccatgttccggcagaaaggggccgcccgcagccttaaccctgcctagggtccaatgccgggcgtctcgctacccaatcgctgttgactgttcatggactctaccccctgccccaaacagtacgagccccgtgtccttcattgcaacctatcgactcggaatggccgctcgtggtcactcttggccttgcctgcagcagacaccaacttcgacctcatgtacaataaccgatgtacagctttttagcatggcaccgtacgtgctgaatgtcactgccgtgcatccctggggcagttcctctagcttcgttccttttatcacagagcacattatcaaaccagatccccctgaaggggtgagattgtccccactcgctgagaggcaactgcaggtccagtgggaacccccgggatcatggcctttccccgagatttttagtctgaagtattggatccggtacaaacgccagggcgccgcgagattccatagggtgggtccaatagaagcaaccagctttatcctccgggccgtacgccctcgagctagatattacgttcaagtggccgcacaggacttaacggactatggggagctgtctgattggtcccttcccgctactgccaccatgtcattgggaaagtga

SEQ ID NO: 4446 - RNA, 690 nt, synthetic construct
  misc_feature 1..690: note = derived and/or modified sequence opt4 fromIL-27B__Homo_sapiens__AAC33488
  source 1..690: mol_type = other RNA
atgaccccccagctgctgctggccctggtgctgtgggccagctgccccccctgcagcggcagaaagggcccccccgccgccctgaccctgcccagagtgcagtgcagagccagcagataccccatcgccgtggactgcagctggaccctgccccccgcccccaacagcaccagccccgtgagcttcatcgccacctacagactgggcatggccgccagaggccacagctggccctgcctgcagcagacccccaccagcaccagctgcaccatcaccgacgtgcagctgttcagcatggccccctacgtgctgaacgtgaccgccgtgcacccctggggcagcagcagcagcttcgtgcccttcatcaccgagcacatcatcaagcccgacccccccgagggcgtgagactgagccccctggccgagagacagctgcaggtgcagtgggagccccccggcagctggcccttccccgagatcttcagcctgaagtactggatcagatacaagagacagggcgccgccagattccacagagtgggccccatcgaggccaccagcttcatcctgagagccgtgagacccagagccagatactacgtgcaggtggccgcccaggacctgaccgactacggcgagctgagcgactggagcctgcccgccaccgccaccatgagcctgggcaagtga

SEQ ID NO: 4447 - RNA, 690 nt, synthetic construct
  misc_feature 1..690: note = derived and/or modified sequence opt5 fromIL-27B__Homo_sapiens__AAC33488
  source 1..690: mol_type = other RNA
atgacaccccagctgctcctggcccttgtgctgtgggctagctgccctccgtgttccggcagaaaggggccccctgccgcgctcaccctgccccgggtccaatgccgcgcttctagataccctatcgccgttgactgtagctggacgcttccccctgccccgaactccacctctcccgtgagcttcattgctacatatcggctgggaatggccgctcgcggccactcctggccttgcctccagcagacccccacatctaccagctgtacaatcaccgatgtgcagctgttttccatggccccttacgtcctgaatgtgacggcggttcatccctgggggtctagctccagcttcgtgccgtttattaccgagcacatcattaaacctgatccccctgaaggagtcagactctctcccctggccgagcggcaacttcaggtgcagtgggaaccccctggctcctggccgttccccgagatctttagcctgaagtattggatccgctacaaaagacagggggctgcccggttccatcgcgttggacctattgaagctacatcttttatcctcagagccgtgcggccccgcgcgagatattacgtccaagtggccgctcaggacctgaccgactatggcgagctttccgattggagcctgcctgccacagctaccatgtccctcggcaagtga

SEQ ID NO: 4448 - RNA, 690 nt, synthetic construct
  misc_feature 1..690: note = derived and/or modified sequence opt6 fromIL-27B__Homo_sapiens__AAC33488
  source 1..690: mol_type = other RNA
atgacaccacaactattattagcactagtactatgggcatcatgcccaccatgctcaggaagaaaaggacccccagctgcattaacactaccaagagtacaatgcagagcatcaagatacccaatagcagtagactgctcatggacactaccaccagccccaaactcaacatcaccagtatcattcatcgcaacatacagactaggaatggcagcaagaggacactcatggccatgcctacaacaaacacctacatcaacatcctgcacaataacagacgtacaattattttcaatggcaccatacgtactaaacgtaacagcagtacacccatggggatcatcaagctcattcgtcccattcataacagaacacataataaaaccagacccacccgaaggagtcagactatcaccattagcagaaagacaattacaagtacaatgggaaccaccaggatcttggccattcccagaaatattctccctaaaatattggatacgatacaaaagacaaggagcagcaagatttcatagagtaggaccaatagaagcaacatcattcatattaagagcagtaagaccaagagcaagatactacgtccaagtagctgcacaagacctaacagactacggagaactatcagactggtcattacctgcaacagcaacaatgtccctaggaaaataa

SEQ ID NO: 4449 - protein, 200 aa, synthetic construct
  REGION 1..200: note = IL-28A__Homo_sapiens__Q8IZJ0
MKLDMTGDCTPVLVLMAAVLTVTGAVPVARLHGALPDARGCHIAQFKSLSPQELQAFKRAKDALEESLLLKDCRCHSRLFPRTWDLRQLQVRERPMALEAELALTLKVLEATADTDPALVDVLDQPLHTLHHILSQFRACIQPQPTAGPRTRGRLHHWLYRLQEAPKKESPGCLEASVTFNLFRLLTRDLNCVASGDLCV

SEQ ID NO: 4450 - RNA, 603 nt, synthetic construct
  misc_feature 1..603: note = IL-28A__Homo_sapiens__AAI13582
  source 1..603: mol_type = other RNA
atgaaactagacatgactggggactgcacgccagtgctggtgctgatggccgcagtgctgaccgtgactggagcagttcctgtcgccaggctccacggggctctcccggatgcaaggggctgccacatagcccagttcaagtccctgtctccacaggagctgcaggcctttaagagggccaaagatgccttagaagagtcgcttctgctgaaggactgcaggtgccactcccgcctcttccccaggacctgggacctgaggcagctgcaggtgagggagcgccccatggctttggaggctgagctggccctgacgctgaaggttctggaggccaccgctgacactgacccagccctggtggacgtcttggaccagccccttcacaccctgcaccatatcctctcccagttccgggcctgtatccagcctcagcccacggcagggcccaggacccggggccgcctccaccattggctgtaccggctccaggaggccccaaaaaaggagtcccctggctgcctcgaggcctctgtcaccttcaacctcttccgcctcctcacgcgagacctgaattgtgttgccagtggggacctgtgtgtctga

SEQ ID NO: 4451 - RNA, 603 nt, synthetic construct
  misc_feature 1..603: note = derived and/or modified sequence opt1 fromIL-28A__Homo_sapiens__AAI13582
  source 1..603: mol_type = other RNA
atgaagctggacatgaccggcgactgcacccccgtgctcgtcctgatggccgccgtgctgacggtgaccggggcggtcccggtggcccgcctccacggcgccctgcccgacgcccgggggtgccacatcgcccagttcaagagcctgagcccccaggagctccaggcgttcaagcgcgccaaggacgccctggaggagtccctgctcctgaaggactgccggtgccactcccgcctgttcccccggacctgggacctccgccagctccaggtgcgggagcgcccgatggccctggaggcggagctggccctgaccctgaaggtcctcgaggccacggccgacaccgaccccgccctggtggacgtgctggaccagcccctccacaccctgcaccacatcctgagccagttccgggcgtgcatccagccccagccgaccgccggcccccgcacgcgggggcgcctccaccactggctgtaccggctgcaggaggcccccaagaaggagtcccccggctgcctcgaggccagcgtcaccttcaacctgttccgcctgctcacccgggacctgaactgcgtggcctccggcgacctgtgcgtgtga

SEQ ID NO: 4452 - RNA, 603 nt, synthetic construct
  misc_feature 1..603: note = derived and/or modified sequence opt2 fromIL-28A__Homo_sapiens__AAI13582
  source 1..603: mol_type = other RNA
atgaagctcgacatgaccggcgactgcacccccgtcctcgtcctcatggccgccgtcctcaccgtcaccggcgccgtccccgtcgcccgcctccacggcgccctccccgacgcccgcggctgccacatcgcccagttcaagtccctctccccccaggagctccaggccttcaagcgcgccaaggacgccctcgaggagtccctcctcctcaaggactgccgctgccactcccgcctcttcccccgcacctgggacctccgccagctccaggtccgcgagcgccccatggccctcgaggccgagctcgccctcaccctcaaggtcctcgaggccaccgccgacaccgaccccgccctcgtcgacgtcctcgaccagcccctccacaccctccaccacatcctctcccagttccgcgcctgcatccagccccagcccaccgccggcccccgcacccgcggccgcctccaccactggctctaccgcctccaggaggcccccaagaaggagtcccccggctgcctcgaggcctccgtcaccttcaacctcttccgcctcctcacccgcgacctcaactgcgtcgcctccggcgacctctgcgtctga

SEQ ID NO: 4453 - RNA, 603 nt, synthetic construct
  misc_feature 1..603: note = derived and/or modified sequence opt3 fromIL-28A__Homo_sapiens__AAI13582
  source 1..603: mol_type = other RNA
atgaagctggacatgaccggcgattgcacacccgtgctcgtccttatggccgctgttctgactgtgacgggggcagtacctgtggccagattgcacggagcgttaccagacgctaggggttgtcatatcgcccagttcaaaagcctgtccccgcaagagctacaggcatttaagcgggccaaagatgctctcgaagagtctctgcttctgaaggactgccgctgtcactcacgattgttcccccgtacctgggatctcagacagctgcaggtcagggaacggcctatggcactggaggccgaactcgctttaacactgaaagtgcttgaggccactgcggacaccgatccagcattggttgacgtgctggatcaacccctacatacactccaccatattctgagtcagtttcgcgcctgcatacagcctcagccaaccgctggccccagaactagggggcggcttcaccactggctgtaccgcttgcaagaggcccctaagaaggaaagcccaggatgtctcgaggcatccgtcacattcaacctgtttcgattactgaccagagacctcaattgcgtggcttctggcgatctttgtgtatga

SEQ ID NO: 4454 - RNA, 603 nt, synthetic construct
  misc_feature 1..603: note = derived and/or modified sequence opt4 fromIL-28A__Homo_sapiens__AAI13582
  source 1..603: mol_type = other RNA
atgaagctggacatgaccggcgactgcacccccgtgctggtgctgatggccgccgtgctgaccgtgaccggcgccgtgcccgtggccagactgcacggcgccctgcccgacgccagaggctgccacatcgcccagttcaagagcctgagcccccaggagctgcaggccttcaagagagccaaggacgccctggaggagagcctgctgctgaaggactgcagatgccacagcagactgttccccagaacctgggacctgagacagctgcaggtgagagagagacccatggccctggaggccgagctggccctgaccctgaaggtgctggaggccaccgccgacaccgaccccgccctggtggacgtgctggaccagcccctgcacaccctgcaccacatcctgagccagttcagagcctgcatccagccccagcccaccgccggccccagaaccagaggcagactgcaccactggctgtacagactgcaggaggcccccaagaaggagagccccggctgcctggaggccagcgtgaccttcaacctgttcagactgctgaccagagacctgaactgcgtggccagcggcgacctgtgcgtgtga

SEQ ID NO: 4455 - RNA, 603 nt, synthetic construct
  misc_feature 1..603: note = derived and/or modified sequence opt5 fromIL-28A__Homo_sapiens__AAI13582
  source 1..603: mol_type = other RNA
atgaagctggacatgaccggcgattgcacacccgtgctcgtcctgatggccgctgttcttacggtgaccggggccgtgcctgtcgcgagactgcacggagctctcccggacgcccggggctgtcatatcgcccagttcaaaagcctgtctccccaagagcttcaggcttttaagcgcgccaaagatgctctggaagagtccctcctgctgaaggactgcagatgtcacagccgcctcttccctcggacatgggatctgagacagcttcaggtgcgggaacgccccatggccctggaggcggaactcgccctgacccttaaagttctggaggctacagccgacaccgatcctgctctcgtggacgtcctggatcaacccctgcatacactccaccatattctgtcccagtttagagcctgcatccagcctcagccgaccgcggggccccggacgcgcggaagacttcaccactggctgtaccggctccaagaggcccctaagaaggaatctcccggctgtctggaggctagcgtgaccttcaacctttttcgcctgctcacaagagacctgaattgcgttgcctccggggatctgtgtgtgtga

SEQ ID NO: 4456 - RNA, 603 nt, synthetic construct
  misc_feature 1..603: note = derived and/or modified sequence opt6 fromIL-28A__Homo_sapiens__AAI13582
  source 1..603: mol_type = other RNA
atgaaattagacatgacaggagactgtacaccagtactcgtactaatggcagcagtactaacagttacaggagcagtaccagtagcaagactacacggagcactaccagacgcaagaggatgtcacatagcacaattcaaatcattatcaccacaagaactccaagcatttaaaagagccaaagacgcactagaagaatcattactattaaaagactgcagatgccactcacgactattcccaagaacatgggacctaagacaactacaagtaagagaaagaccaatggcattagaagccgaactagcattaacattaaaagtactagaagcaacagcagacacagatccagccctagtcgacgtactagaccaaccactacacacactacaccacatactatcacaatttagagcctgcatacaaccacaaccaacagcaggaccacgaacaagaggcagactacaccactggctatacagactacaagaagccccaaaaaaagaatcaccaggatgcctagaagcatcagtaacattcaacctattcagactattaacaagagacctaaactgcgtagcatcaggagacctatgcgtataa

SEQ ID NO: 4457 - protein, 196 aa, synthetic construct
  REGION 1..196: note = IL-28B__Homo_sapiens__Q8IZI9
MTGDCMPVLVLMAAVLTVTGAVPVARLRGALPDARGCHIAQFKSLSPQELQAFKRAKDALEESLLLKDCKCRSRLFPRTWDLRQLQVRERPVALEAELALTLKVLEATADTDPALGDVLDQPLHTLHHILSQLRACIQPQPTAGPRTRGRLHHWLHRLQEAPKKESPGCLEASVTFNLFRLLTRDLNCVASGDLCV

SEQ ID NO: 4458 - RNA, 591 nt, synthetic construct
  misc_feature 1..591: note = IL-28B__Homo_sapiens__AAI30315
  source 1..591: mol_type = other RNA
atgaccggggactgcatgccagtgctggtgctgatggccgcagtgctgaccgtgactggagcagttcctgtcgccaggctccgcggggctctcccggatgcaaggggctgccacatagcccagttcaagtccctgtctccacaggagctgcaggcctttaagagggccaaagatgccttagaagagtcgcttctgctgaaggactgcaagtgccgctcccgcctcttccccaggacctgggacctgaggcagctgcaggtgagggagcgccccgtggctttggaggctgagctggccctgacgctgaaggttctggaggccaccgctgacactgacccagccctgggggatgtcttggaccagccccttcacaccctgcaccatatcctctcccagctccgggcctgtatccagcctcagcccacggcagggcccaggacccggggccgcctccaccattggctgcaccggctccaggaggccccaaaaaaggagtcccctggctgcctcgaggcctctgtcaccttcaacctcttccgcctcctcacgcgagacctgaattgtgttgccagcggggacctgtgtgtctga

SEQ ID NO: 4459 - RNA, 591 nt, synthetic construct
  misc_feature 1..591: note = derived and/or modified sequence opt1 fromIL-28B__Homo_sapiens__AAI30315
  source 1..591: mol_type = other RNA
atgaccggcgactgcatgcccgtgctggtcctcatggccgccgtgctgaccgtgacgggggcggtcccggtggcccgcctgcggggcgccctccccgacgcccgcgggtgccacatcgcccagttcaagagcctgagcccccaggagctgcaggcgttcaagcgggccaaggacgccctcgaggagtccctgctgctcaaggactgcaagtgccgctcccggctgttcccccgcacctgggacctgcggcagctccaggtgcgcgagcggccggtcgccctggaggcggagctggccctcaccctgaaggtgctggaggccaccgccgacacggaccccgccctcggcgacgtgctggaccagcccctgcacaccctccaccacatcctgagccagctgcgcgcgtgcatccagccccagccgaccgccgggccccggacccgcggccggctccaccactggctgcaccgcctgcaggaggcccccaagaaggagtcccccggctgcctcgaggccagcgtcacgttcaacctgttccggctgctcacccgcgacctgaactgcgtggcctccggggacctgtgcgtgtga

SEQ ID NO: 4460 - RNA, 591 nt, synthetic construct
  misc_feature 1..591: note = derived and/or modified sequence opt2 fromIL-28B__Homo_sapiens__AAI30315
  source 1..591: mol_type = other RNA
atgaccggcgactgcatgcccgtcctcgtcctcatggccgccgtcctcaccgtcaccggcgccgtccccgtcgcccgcctccgcggcgccctccccgacgcccgcggctgccacatcgcccagttcaagtccctctccccccaggagctccaggccttcaagcgcgccaaggacgccctcgaggagtccctcctcctcaaggactgcaagtgccgctcccgcctcttcccccgcacctgggacctccgccagctccaggtccgcgagcgccccgtcgccctcgaggccgagctcgccctcaccctcaaggtcctcgaggccaccgccgacaccgaccccgccctcggcgacgtcctcgaccagcccctccacaccctccaccacatcctctcccagctccgcgcctgcatccagccccagcccaccgccggcccccgcacccgcggccgcctccaccactggctccaccgcctccaggaggcccccaagaaggagtcccccggctgcctcgaggcctccgtcaccttcaacctcttccgcctcctcacccgcgacctcaactgcgtcgcctccggcgacctctgcgtctga

SEQ ID NO: 4461 - RNA, 591 nt, synthetic construct
  misc_feature 1..591: note = derived and/or modified sequence opt3 fromIL-28B__Homo_sapiens__AAI30315
  source 1..591: mol_type = other RNA
atgaccggcgactgcatgcccgtgctggtcctcatggccgctgttcttacagtgactggggcagtacctgtggccagactgaggggagcgttgccagatgctcggggttgtcacatcgcccagttcaagagcttatccccgcaagagctgcaggcatttaaacgcgccaaggacgctctagaagagtctctcctgcttaaagattgcaagtgtcgatcacgtctgttccccagaacgtgggacttgaggcagctccaggtccgggaacgccctgtggcactggaggccgaactggctctcaccttaaaagttctggaggccacagcggatactgacccagcacttggcgatgtgttggaccaacccctgcataccctacaccatattctcagtcagctgagagcctgcatacagcctcagccaacagctgggcccaggacccggggacgccttcaccattggctgcaccgattgcaagaggcccctaagaaggaaagcccaggctgtctcgaggcatccgtcacttttaacctgttcagattactgacaagggatctcaattgcgtggcttctggtgacctttgtgtatga

SEQ ID NO: 4462 - RNA, 591 nt, synthetic construct
  misc_feature 1..591: note = derived and/or modified sequence opt4 fromIL-28B__Homo_sapiens__AAI30315
  source 1..591: mol_type = other RNA
atgaccggcgactgcatgcccgtgctggtgctgatggccgccgtgctgaccgtgaccggcgccgtgcccgtggccagactgagaggcgccctgcccgacgccagaggctgccacatcgcccagttcaagagcctgagcccccaggagctgcaggccttcaagagagccaaggacgccctggaggagagcctgctgctgaaggactgcaagtgcagaagcagactgttccccagaacctgggacctgagacagctgcaggtgagagagagacccgtggccctggaggccgagctggccctgaccctgaaggtgctggaggccaccgccgacaccgaccccgccctgggcgacgtgctggaccagcccctgcacaccctgcaccacatcctgagccagctgagagcctgcatccagccccagcccaccgccggccccagaaccagaggcagactgcaccactggctgcacagactgcaggaggcccccaagaaggagagccccggctgcctggaggccagcgtgaccttcaacctgttcagactgctgaccagagacctgaactgcgtggccagcggcgacctgtgcgtgtga

SEQ ID NO: 4463 - RNA, 591 nt, synthetic construct
  misc_feature 1..591: note = derived and/or modified sequence opt5 fromIL-28B__Homo_sapiens__AAI30315
  source 1..591: mol_type = other RNA
atgaccggcgactgcatgcccgtgctggtcctcatggccgctgttctgacagtgacgggggccgtgcctgtcgcgagacttcggggagctctgccggatgcccgcggctgtcacatcgcccagttcaagagcctctctccccaagagctgcaggcttttaaaagagccaaggacgctcttgaagagtccctgctcctgaaagattgcaagtgtcggagccgcctgttccctagaacctgggacctccggcagcttcaggtgcgcgaaagacccgttgccctggaggcggaactggccctcacactgaaagtgcttgaggctaccgccgatacagaccctgctctgggggatgtcctcgaccaacccctgcataccctgcaccatattctctcccagctgcgggcctgcatccagcctcagccgacagcgggaccccgcaccagaggccggcttcaccattggctgcaccgcctccaagaggcccctaagaaggaatctcccgggtgtctggaggctagcgtgacgtttaaccttttcagactgctcacccgggatctgaattgcgttgcctccggagacctgtgtgtgtga

SEQ ID NO: 4464 - RNA, 591 nt, synthetic construct
  misc_feature 1..591: note = derived and/or modified sequence opt6 fromIL-28B__Homo_sapiens__AAI30315
  source 1..591: mol_type = other RNA
atgacaggagactgtatgccagtactagtattaatggcagcagtattaacagtaacaggagcagtaccagtagcaagactaagaggagcattaccagacgcaagaggatgccacatagcacaattcaaaagtctatcaccacaagaactacaagcattcaaaagagcaaaagacgcactagaagaatcactattactaaaagactgtaaatgcagatcaagactattcccaagaacatgggatctaagacaattacaagtaagagaaagaccagtagcactagaagcagaattagcactaacattaaaagtactagaagcaacagcagacacagaccccgcattaggagacgtactagaccaaccattacacacactacaccacatattatcacaacttagagcatgcatacaaccacaaccaacagcaggaccaagaacaagaggaagactacaccactggctacacagactacaagaagcaccaaaaaaagaaagcccaggatgcctagaagcatcagtcacattcaacctcttcagactactaacaagagacttaaactgcgtagcatccggagacctatgtgtataa

SEQ ID NO: 4465 - protein, 200 aa, synthetic construct
  REGION 1..200: note = IL-29__Homo_sapiens__Q8IU54
MAAAWTVVLVTLVLGLAVAGPVPTSKPTTTGKGCHIGRFKSLSPQELASFKKARDALEESLKLKNWSCSSPVFPGNWDLRLLQVRERPVALEAELALTLKVLEAAAGPALEDVLDQPLHTLHHILSQLQACIQPQPTAGPRPRGRLHHWLHRLQEAPKKESAGCLEASVTFNLFRLLTRDLKYVADGNLCLRTSTHPEST

SEQ ID NO: 4466 - RNA, 603 nt, synthetic construct
  misc_feature 1..603: note = IL-29__Homo_sapiens__AAH74985
  source 1..603: mol_type = other RNA
atggctgcagcttggaccgtggtgctggtgactttggtgctaggcttggccgtggcaggccctgtccccacttccaagcccaccacaactgggaagggctgccacattggcaggttcaaatctctgtcaccacaggagctagcgagcttcaagaaggccagggacgccttggaagagtcactcaagctgaaaaactggagttgcagctctcctgtcttccccgggaattgggacctgaggcttctccaggtgagggagcgccctgtggccttggaggctgagctggccctgacgctgaaggtcctggaggccgctgctggcccagccctggaggacgtcctagaccagccccttcacaccctgcaccacatcctctcccagctccaggcctgtatccagcctcagcccacagcagggcccaggccccggggccgcctccaccactggctgcaccggctccaggaggcccccaaaaaggagtccgctggctgcctggaggcatctgtcaccttcaacctcttccgcctcctcacgcgagacctcaaatatgtggccgatgggaacctgtgtctgagaacgtcaacccaccctgagtccacctga

SEQ ID NO: 4467 - RNA, 603 nt, synthetic construct
  misc_feature 1..603: note = derived and/or modified sequence opt1 fromIL-29__Homo_sapiens__AAH74985
  source 1..603: mol_type = other RNA
atggccgccgcgtggaccgtggtcctggtgaccctcgtgctgggcctggccgtcgccgggcccgtgccgacgagcaagcccaccaccaccggcaaggggtgccacatcggccgcttcaagtccctcagcccccaggagctggcctccttcaagaaggcccgggacgcgctggaggagagcctcaagctgaagaactggtcctgcagctcccccgtgttcccggggaactgggacctgcgcctcctgcaggtccgggagcgccccgtggccctggaggccgagctcgccctgacgctgaaggtgctcgaggcggccgccggccccgccctggaggacgtcctggaccagcccctccacaccctgcaccacatcctgagccagctccaggcctgcatccagccgcagcccaccgcgggcccccggccccgcgggcggctgcaccactggctgcaccgcctccaggaggccccgaagaaggagtccgccggctgcctggaggccagcgtgaccttcaacctgttccggctcctgacgcgcgacctgaagtacgtggccgacgggaacctctgcctgcggacctccacccaccccgagagcacctga

SEQ ID NO: 4468 - RNA, 603 nt, synthetic construct
  misc_feature 1..603: note = derived and/or modified sequence opt2 fromIL-29__Homo_sapiens__AAH74985
  source 1..603: mol_type = other RNA
atggccgccgcctggaccgtcgtcctcgtcaccctcgtcctcggcctcgccgtcgccggccccgtccccacctccaagcccaccaccaccggcaagggctgccacatcggccgcttcaagtccctctccccccaggagctcgcctccttcaagaaggcccgcgacgccctcgaggagtccctcaagctcaagaactggtcctgctcctcccccgtcttccccggcaactgggacctccgcctcctccaggtccgcgagcgccccgtcgccctcgaggccgagctcgccctcaccctcaaggtcctcgaggccgccgccggccccgccctcgaggacgtcctcgaccagcccctccacaccctccaccacatcctctcccagctccaggcctgcatccagccccagcccaccgccggcccccgcccccgcggccgcctccaccactggctccaccgcctccaggaggcccccaagaaggagtccgccggctgcctcgaggcctccgtcaccttcaacctcttccgcctcctcacccgcgacctcaagtacgtcgccgacggcaacctctgcctccgcacctccacccaccccgagtccacctga

SEQ ID NO: 4469 - RNA, 603 nt, synthetic construct
  misc_feature 1..603: note = derived and/or modified sequence opt3 fromIL-29__Homo_sapiens__AAH74985
  source 1..603: mol_type = other RNA
atggccgctgcatggaccgtggtcctggttacactcgtgcttggcctggccgtagcggggcccgtgcctactagcaagccaacgaccacaggaaaaggttgccacatcggcagattcaagtccttgtctccgcaggagttagcttcatttaaaaaggccagggacgcactggaagagagtctaaaactcaagaactggagctgttcctctcccgtcttccctgggaattgggatctgcggcttctgcaagtgcgcgaacgaccagttgccttggaggctgaactcgcactgactctgaaggtgctcgaggccgctgccggacccgcgttagaggacgtcctggatcagcctcttcataccttgcaccatattctgtcgcagctacaggcatgcatacaaccacagcccacagccggccctcgtccaagaggtaggctccaccattggctgcaccggcttcaggaagctccgaaaaaggagtcagccgggtgtctggaagcaagcgtgacctttaacttgttccgcctcctgactagagacttaaaatacgtagctgatggaaatctgtgcctcaggacaagtacccaccccgagtccacgtga

SEQ ID NO: 4470 - RNA, 603 nt, synthetic construct
  misc_feature 1..603: note = derived and/or modified sequence opt4 fromIL-29__Homo_sapiens__AAH74985
  source 1..603: mol_type = other RNA
atggccgccgcctggaccgtggtgctggtgaccctggtgctgggcctggccgtggccggccccgtgcccaccagcaagcccaccaccaccggcaagggctgccacatcggcagattcaagagcctgagcccccaggagctggccagcttcaagaaggccagagacgccctggaggagagcctgaagctgaagaactggagctgcagcagccccgtgttccccggcaactgggacctgagactgctgcaggtgagagagagacccgtggccctggaggccgagctggccctgaccctgaaggtgctggaggccgccgccggccccgccctggaggacgtgctggaccagcccctgcacaccctgcaccacatcctgagccagctgcaggcctgcatccagccccagcccaccgccggccccagacccagaggcagactgcaccactggctgcacagactgcaggaggcccccaagaaggagagcgccggctgcctggaggccagcgtgaccttcaacctgttcagactgctgaccagagacctgaagtacgtggccgacggcaacctgtgcctgagaaccagcacccaccccgagagcacctga

SEQ ID NO: 4471 - RNA, 603 nt, synthetic construct
  misc_feature 1..603: note = derived and/or modified sequence opt5 fromIL-29__Homo_sapiens__AAH74985
  source 1..603: mol_type = other RNA
atggccgctgcctggaccgtggtcctggttacactcgtgctgggccttgcggtggctgggcccgtccctacgagcaagccgaccacaaccggaaaaggctgccacatcgggagattcaagtccctgtctccccaggagctcgccagctttaaaaaggcccgggacgctctggaagagtcccttaaactgaagaactggtcttgtagctcccctgtgttccccggaaattgggatctccgcctgctgcaagttagagaacggcctgtggccctcgaggctgaactggcccttacactgaaggtcctcgaggcggccgctggccccgccctggaggacgtgcttgatcagcctctgcataccctccaccatattctgtctcagctgcaggcttgcatccaaccgcagcccacagccgggcctcgccccagaggacggctccaccattggctgcaccgccttcaggaagcgcctaaaaaggagagcgccggctgtctggaggcttccgttacctttaacctcttcagactgcttacgcgggacctgaaatacgtggccgatggcaatctctgcctgcgcaccagcacacaccccgaatctacctga

SEQ ID NO: 4472 - RNA, 603 nt, synthetic construct
  misc_feature 1..603: note = derived and/or modified sequence opt6 fromIL-29__Homo_sapiens__AAH74985
  source 1..603: mol_type = other RNA
atggcagcagcatggacagtagtactagtaacactagtattaggactagcagtagcaggaccagtaccaacatcaaaaccaacaacaactggaaaaggatgtcacataggaagattcaaatcattatcaccacaagaactagcaagtttcaaaaaagcaagagacgcactagaagaatcactaaaattaaaaaactggagctgcagttcacccgtattcccaggaaactgggatctaagactactacaagtaagagaacgaccagtagcactagaagcagaactagcactaacattaaaagtattagaagcagcagccggcccagccttagaagacgtattagaccaaccactacatacactacaccatatactatctcaactacaagcatgcatacaaccacaaccaacagcaggaccaagaccacgaggaagactacaccactggttacacagactacaagaagcaccaaaaaaagaatcagcaggatgtttagaagcatcagtcacattcaacctattcagactactaacaagagacctaaaatacgtagcagacggaaacttatgcctaagaacctcaacacatcccgaatcaacataa

SEQ ID NO: 4473 - protein, 153 aa, synthetic construct
  REGION 1..153: note = IL-2__Homo_sapiens__P60568
MYRMQLLSCIALSLALVTNSAPTSSSTKKTQLQLEHLLLDLQMILNGINNYKNPKLTRMLTFKFYMPKKATELKHLQCLEEELKPLEEVLNLAQSKNFHLRPRDLISNINVIVLELKGSETTFMCEYADETATIVEFLNRWITFCQSIISTLT

SEQ ID NO: 4474 - RNA, 462 nt, synthetic construct
  misc_feature 1..462: note = IL-2__Homo_sapiens__AAA98792
  source 1..462: mol_type = other RNA
atgtacaggatgcaactcctgtcttgcattgcactaagtcttgcacttgtcacaaacagtgcacctacttcaagttctacaaagaaaacacagctacaactggagcatttactgctggatttacagatgattttgaatggaattaataattacaagaatcccaaactcaccaggatgctcacatttaagttttacatgcccaagaaggccacagaactgaaacatcttcagtgtctagaagaagaactcaaacctctggaggaagtgctaaatttagctcaaagcaaaaactttcacttaagacccagggacttaatcagcaatatcaacgtaatagttctggaactaaagggatctgaaacaacattcatgtgtgaatatgctgatgagacagcaaccattgtagaatttctgaacagatggattaccttttgtcaaagcatcatctcaacactgacttga

SEQ ID NO: 4475 - RNA, 462 nt, synthetic construct
  misc_feature 1..462: note = derived and/or modified sequence opt1 fromIL-2__Homo_sapiens__AAA98792
  source 1..462: mol_type = other RNA
atgtaccgcatgcagctgctcagctgcatcgccctgtccctggccctcgtgaccaacagcgcgcccacctccagctccacgaagaagacccagctgcagctggagcacctcctgctggacctccagatgatcctgaacggcatcaacaactacaagaacccgaagctgacccggatgctcaccttcaagttctacatgcccaagaaggccacggagctgaagcacctccagtgcctggaggaggagctgaagcccctggaggaggtcctcaacctggcccagagcaagaacttccacctccgcccccgggacctgatctccaacatcaacgtgatcgtgctggagctgaaggggagcgagaccaccttcatgtgcgagtacgccgacgagaccgccacgatcgtcgagttcctcaaccgctggatcaccttctgccagtccatcatcagcaccctgacctga

SEQ ID NO: 4476 - RNA, 462 nt, synthetic construct
  misc_feature 1..462: note = derived and/or modified sequence opt2 fromIL-2__Homo_sapiens__AAA98792
  source 1..462: mol_type = other RNA
atgtaccgcatgcagctcctctcctgcatcgccctctccctcgccctcgtcaccaactccgcccccacctcctcctccaccaagaagacccagctccagctcgagcacctcctcctcgacctccagatgatcctcaacggcatcaacaactacaagaaccccaagctcacccgcatgctcaccttcaagttctacatgcccaagaaggccaccgagctcaagcacctccagtgcctcgaggaggagctcaagcccctcgaggaggtcctcaacctcgcccagtccaagaacttccacctccgcccccgcgacctcatctccaacatcaacgtcatcgtcctcgagctcaagggctccgagaccaccttcatgtgcgagtacgccgacgagaccgccaccatcgtcgagttcctcaaccgctggatcaccttctgccagtccatcatctccaccctcacctga

SEQ ID NO: 4477 - RNA, 462 nt, synthetic construct
  misc_feature 1..462: note = derived and/or modified sequence opt3 fromIL-2__Homo_sapiens__AAA98792
  source 1..462: mol_type = other RNA
atgtacagaatgcagctgctcagctgcatcgccctttccctggctttggtgaccaactctgcacccacatcaagtagcactaagaaaacgcaattacagctggagcacctactcctggaccttcagatgattctgaatggcataaacaattataagaaccctaaattgaccaggatgctcacattcaagttttacatgccgaaaaaggccactgaactgaagcatctgcagtgtctcgaggaagagttaaaaccactggaagaggtccttaatttggcgcaatccaagaacttccacctacggccccgcgatctgatctctaatattaacgttatcgtgctcgagctgaaagggtcggaaaccacatttatgtgcgagtatgctgacgaaaccgccactattgtagagttccttaatcgatggatcacattttgtcagtcaataatcagcaccctgacgtga

SEQ ID NO: 4478 - RNA, 462 nt, synthetic construct
  misc_feature 1..462: note = derived and/or modified sequence opt4 fromIL-2__Homo_sapiens__AAA98792
  source 1..462: mol_type = other RNA
atgtacagaatgcagctgctgagctgcatcgccctgagcctggccctggtgaccaacagcgcccccaccagcagcagcaccaagaagacccagctgcagctggagcacctgctgctggacctgcagatgatcctgaacggcatcaacaactacaagaaccccaagctgaccagaatgctgaccttcaagttctacatgcccaagaaggccaccgagctgaagcacctgcagtgcctggaggaggagctgaagcccctggaggaggtgctgaacctggcccagagcaagaacttccacctgagacccagagacctgatcagcaacatcaacgtgatcgtgctggagctgaagggcagcgagaccaccttcatgtgcgagtacgccgacgagaccgccaccatcgtggagttcctgaacagatggatcaccttctgccagagcatcatcagcaccctgacctga

SEQ ID NO: 4479 - RNA, 462 nt, synthetic construct
  misc_feature 1..462: note = derived and/or modified sequence opt5 fromIL-2__Homo_sapiens__AAA98792
  source 1..462: mol_type = other RNA
atgtacagaatgcagctgctcagctgcatcgccctgtcccttgctctggtgaccaactctgcccccacaagctcctctacgaagaaaacccaactccagctggagcaccttctgctcgacctgcagatgattctgaatggcatcaacaattataagaaccctaaactcacacggatgctgaccttcaagttttacatgccgaaaaaggcgacagaacttaagcatctgcagtgtctcgaggaggaactgaaaccccttgaagaggtcctgaatctcgctcaaagcaagaacttccacctccgccctagagatctgatttccaatatcaacgttattgtgctggagctgaaagggtctgaaaccacatttatgtgcgagtatgccgacgaaaccgccacgatcgtggagttccttaatcggtggatcaccttttgtcagagcattatctccacactgacctga

SEQ ID NO: 4480 - RNA, 462 nt, synthetic construct
  misc_feature 1..462: note = derived and/or modified sequence opt6 fromIL-2__Homo_sapiens__AAA98792
  source 1..462: mol_type = other RNA
atgtacagaatgcaactactatcatgcatagcactatcactagcactagtaacaaactcagcaccaacatcatcatcaaccaaaaaaacacaactacaactcgaacacctcctcctcgacctacaaatgatactaaacggaataaacaactacaaaaacccaaaactaacaagaatgctaacattcaaattctacatgccaaaaaaagcaacagaactaaaacacctacaatgcctagaagaagaactcaaaccactagaagaagtactaaacctcgcacaatcaaaaaacttccacctacgaccaagagacctaatatcaaacataaacgtcatagtactagaactaaaaggatcagaaacaacattcatgtgcgaatatgcagacgaaacagcaacaatagtagaattcctaaacagatggataacattctgccaatcaataatatcaacactaacataa

SEQ ID NO: 4481 - protein, 153 aa, synthetic construct; identical to SEQ ID NO: 4473
  REGION 1..153: note = IL-2__Homo_sapiens__Q0GK43

SEQ ID NO: 4482 - RNA, 462 nt, synthetic construct; identical to SEQ ID NO: 4474
  misc_feature 1..462: note = IL-2__Homo_sapiens__ABI20697
  source 1..462: mol_type = other RNA

SEQ ID NO: 4483 - RNA, 462 nt, synthetic construct; identical to SEQ ID NO: 4475
  misc_feature 1..462: note = derived and/or modified sequence opt1 fromIL-2__Homo_sapiens__ABI20697
  source 1..462: mol_type = other RNA

SEQ ID NO: 4484 - RNA, 462 nt, synthetic construct; identical to SEQ ID NO: 4476
  misc_feature 1..462: note = derived and/or modified sequence opt2 fromIL-2__Homo_sapiens__ABI20697
  source 1..462: mol_type = other RNA

SEQ ID NO: 4485 - RNA, 462 nt, synthetic construct; identical to SEQ ID NO: 4477
  misc_feature 1..462: note = derived and/or modified sequence opt3 fromIL-2__Homo_sapiens__ABI20697
  source 1..462: mol_type = other RNA

SEQ ID NO: 4486 - RNA, 462 nt, synthetic construct; identical to SEQ ID NO: 4478
  misc_feature 1..462: note = derived and/or modified sequence opt4 fromIL-2__Homo_sapiens__ABI20697
  source 1..462: mol_type = other RNA

SEQ ID NO: 4487 - RNA, 462 nt, synthetic construct; identical to SEQ ID NO: 4479
  misc_feature 1..462: note = derived and/or modified sequence opt5 fromIL-2__Homo_sapiens__ABI20697
  source 1..462: mol_type = other RNA

SEQ ID NO: 4488 - RNA, 462 nt, synthetic construct
  misc_feature 1..462: note = derived and/or modified sequence opt6 fromIL-2__Homo_sapiens__ABI20697
  source 1..462: mol_type = other RNA
atgtacagaatgcaactcctatcatgcatagcactctcactagcactcgtaacaaactcagcaccaacatcatcatcaacaaaaaaaacacaactccaactagaacacctactactagacctacaaatgatactaaacggaataaacaactacaaaaacccaaaactaacaagaatgctaaccttcaaattctacatgccaaaaaaagcaacagaactaaaacacctccaatgcctagaagaagaactcaaaccactagaagaagtactaaacctagcacaatcaaaaaacttccacctaagaccaagagacctaatatcaaacataaacgtcatagtactcgaactaaaaggatcagaaacaacattcatgtgcgaatacgccgacgaaacagcaacaatagtagaattcctaaacagatggataacattctgccaatcaataatatcaacactaacataa

SEQ ID NO: 4489 - protein, 156 aa, synthetic construct
  REGION 1..156: note = IL-2__Homo_sapiens__Q13169
MYRMQLLSCIALILALVTNSAPTSSSTKKTKKTQLQLEHLLLDLQMILNGINNYKNPKLTRMLTFKFYMPKKATELKQLQCLEEELKPLEEVLNLAQSKNFHLRPRDLISNINVIVLELKGSETTFMCEYADETATIVEFLNRWITFCQSIISTLT

SEQ ID NO: 4490 - RNA, 471 nt, synthetic construct
  misc_feature 1..471: note = IL-2__Homo_sapiens__AAA70092
  source 1..471: mol_type = other RNA
atgtacaggatgcaactcctgtcttgcattgcactaattcttgcacttgtcacaaacagtgcacctacttcaagttcgacaaagaaaacaaagaaaacacagctacaactggagcatttactgctggatttacagatgattttgaatggaattaataattacaagaatcccaaactcaccaggatgctcacatttaagttttacatgcccaagaaggccacagaactgaaacagcttcagtgtctagaagaagaactcaaacctctggaggaagtgctgaatttagctcaaagcaaaaactttcacttaagacccagggacttaatcagcaatatcaacgtaatagttctggaactaaagggatctgaaacaacattcatgtgtgaatatgcagatgagacagcaaccattgtagaatttctgaacagatggattaccttttgtcaaagcatcatctcaacactaacttga

SEQ ID NO: 4491 - RNA, 471 nt, synthetic construct
  misc_feature 1..471: note = derived and/or modified sequence opt1 fromIL-2__Homo_sapiens__AAA70092
  source 1..471: mol_type = other RNA
atgtaccgcatgcagctgctcagctgcatcgccctgatcctggccctcgtgaccaactccgcgcccaccagctccagcacgaagaagaccaagaagacccagctgcagctggagcacctcctgctggacctccagatgatcctgaacggcatcaacaactacaagaacccgaagctgacccggatgctcacgttcaagttctacatgcccaagaaggccaccgagctgaagcagctgcagtgcctcgaggaggagctgaagcccctggaggaggtcctcaacctggcccagtccaagaacttccacctccgcccccgggacctgatcagcaacatcaacgtgatcgtgctggagctgaaggggtccgagaccaccttcatgtgcgagtacgccgacgagacggccaccatcgtcgagttcctcaaccgctggatcaccttctgccagagcatcatctccaccctgacgtga

SEQ ID NO: 4492 - RNA, 471 nt, synthetic construct
  misc_feature 1..471: note = derived and/or modified sequence opt2 fromIL-2__Homo_sapiens__AAA70092
  source 1..471: mol_type = other RNA
atgtaccgcatgcagctcctctcctgcatcgccctcatcctcgccctcgtcaccaactccgcccccacctcctcctccaccaagaagaccaagaagacccagctccagctcgagcacctcctcctcgacctccagatgatcctcaacggcatcaacaactacaagaaccccaagctcacccgcatgctcaccttcaagttctacatgcccaagaaggccaccgagctcaagcagctccagtgcctcgaggaggagctcaagcccctcgaggaggtcctcaacctcgcccagtccaagaacttccacctccgcccccgcgacctcatctccaacatcaacgtcatcgtcctcgagctcaagggctccgagaccaccttcatgtgcgagtacgccgacgagaccgccaccatcgtcgagttcctcaaccgctggatcaccttctgccagtccatcatctccaccctcacctga

SEQ ID NO: 4493 - RNA, 471 nt, synthetic construct
  misc_feature 1..471: note = derived and/or modified sequence opt3 fromIL-2__Homo_sapiens__AAA70092
  source 1..471: mol_type = other RNA
atgtacagaatgcagctgctcagctgcatcgcccttattctggctttggtgaccaactccgcacccacatcttcaagtactaagaaaacgaagaaaacccaattacagctggagcacctactcctggaccttcagatgatactgaatggcatcaacaattataagaaccctaaattgacaaggatgctcactttcaagttttacatgccaaagaaagccaccgaactgaagcagctgcaatgtctcgaggaagagttaaaaccgctggaagaggtccttaatttggcgcagagcaagaacttccatctgcggccccgcgatctaatttccaatatcaacgttattgtgctcgagctgaaagggtctgaaacaacctttatgtgcgagtatgctgacgaaactgccacaatcgtagagttccttaatcgatggataaccttttgtcagtcgatcatttcaacgctgacttga

SEQ ID NO: 4494 - RNA, 471 nt, synthetic construct
  misc_feature 1..471: note = derived and/or modified sequence opt4 fromIL-2__Homo_sapiens__AAA70092
  source 1..471: mol_type = other RNA
atgtacagaatgcagctgctgagctgcatcgccctgatcctggccctggtgaccaacagcgcccccaccagcagcagcaccaagaagaccaagaagacccagctgcagctggagcacctgctgctggacctgcagatgatcctgaacggcatcaacaactacaagaaccccaagctgaccagaatgctgaccttcaagttctacatgcccaagaaggccaccgagctgaagcagctgcagtgcctggaggaggagctgaagcccctggaggaggtgctgaacctggcccagagcaagaacttccacctgagacccagagacctgatcagcaacatcaacgtgatcgtgctggagctgaagggcagcgagaccaccttcatgtgcgagtacgccgacgagaccgccaccatcgtggagttcctgaacagatggatcaccttctgccagagcatcatcagcaccctgacctga

SEQ ID NO: 4495 - RNA, 471 nt, synthetic construct
  misc_feature 1..471: note = derived and/or modified sequence opt5 fromIL-2__Homo_sapiens__AAA70092
  source 1..471: mol_type = other RNA
atgtacagaatgcagctgctcagctgcatcgccctgattcttgctctggtgaccaactccgcccccacatctagctccacgaagaaaaccaagaaaacacaactccagctggagcaccttctgctcgacctgcagatgatcctgaatggcattaacaattataagaaccctaaactcacccggatgctgacattcaagttttacatgccgaagaaagcgaccgaacttaagcagctgcaatgtctcgaggaggaactgaaaccccttgaagaggtcctgaatctcgctcagtctaagaacttccatctgcgccctagagatctgatcagcaatattaacgttatcgtgctcgagctgaaagggtccgaaacaacctttatgtgcgagtatgccgacgaaacggccaccatcgtggagttccttaatcggtggattacattttgtcagtctatcattagcaccctgacatga

SEQ ID NO: 4496 - RNA, 471 nt, synthetic construct
  misc_feature 1..471: note = derived and/or modified sequence opt6 fromIL-2__Homo_sapiens__AAA70092
  source 1..471: mol_type = other RNA
atgtacagaatgcaactactatcatgcatagcactaatactagcactagtaaccaactcagcaccaacatcatcatcaacaaaaaaaaccaaaaaaacacaactacaactagaacacctactactagacctacaaatgatactcaacggaataaacaactacaaaaaccccaaactaacaagaatgctaacattcaaattctacatgccaaaaaaagcaacagaactaaaacaactacaatgcttagaagaagaactaaaaccactagaagaagtactaaacctagcccaatcaaaaaacttccacctaagaccaagagacctcatatcaaacataaacgtaatagtactagaactaaaaggatcagaaacaacattcatgtgcgaatacgcagacgaaaccgcaacaatagtagaattcctaaacagatggataacattctgccaatcaataatatcaacattaacataa

SEQ ID NO: 4497 - protein, 153 aa, synthetic construct [sequence omitted]

SEQ ID NO: 4498 - RNA, 462 nt, synthetic construct
  misc_feature 1..462: note = IL-2__Homo_sapiens__AAH66256
  source 1..462: mol_type = other RNA
atgtacaggatgcaactcctgtcttgcattgcactaagtcttgcacttgtcacaaacagtgcacttacttcaagttctacaaagaaaacacagctacaactggagcatttactgctggatttacagatgattttgaatggaattaataattacaagaatcccaaactcaccaggatgctcacatttaagttttacatgcccaagaaggccacagaactgaaacatcttcagtgtctagaagaagaactcaaacctctggaggaagtgctaaatttagctcaaagcaaaaactttcacttaagacccagggacttaatcagcaatatcaacgtaatagttctggaactaaagggatctgaaacaacattcatgtgtgaatatgctgatgagacagcaaccattgtagaatttctgaacagatggattaccttttgtcaaagcatcatctcaacactgacttga

SEQ ID NO: 4499 - RNA, 462 nt, synthetic construct
  misc_feature 1..462: note = derived and/or modified sequence opt1 fromIL-2__Homo_sapiens__AAH66256
  source 1..462: mol_type = other RNA
atgtaccgcatgcagctgctcagctgcatcgccctgtccctggccctcgtgaccaacagcgcgctgacctccagctccacgaagaagacccagctgcagctcgagcacctcctgctggacctgcagatgatcctgaacggcatcaacaactacaagaaccccaagctcacccggatgctgaccttcaagttctacatgccgaagaaggccacggagctgaagcacctccagtgcctggaggaggagctgaagcccctcgaggaggtcctgaacctggcccagagcaagaacttccacctccgcccccgggacctgatctccaacatcaacgtgatcgtgctggagctcaaggggagcgagaccaccttcatgtgcgagtacgccgacgagaccgccacgatcgtcgagttcctgaaccgctggatcaccttctgccagtccatcatcagcaccctgacctga

SEQ ID NO: 4500 - RNA, 462 nt, synthetic construct
  misc_feature 1..462: note = derived and/or modified sequence opt2 fromIL-2__Homo_sapiens__AAH66256
  source 1..462: mol_type = other RNA
atgtaccgcatgcagctcctctcctgcatcgccctctccctcgccctcgtcaccaactccgccctcacctcctcctccaccaagaagacccagctccagctcgagcacctcctcctcgacctccagatgatcctcaacggcatcaacaactacaagaaccccaagctcacccgcatgctcaccttcaagttctacatgcccaagaaggccaccgagctcaagcacctccagtgcctcgaggaggagctcaagcccctcgaggaggtcctcaacctcgcccagtccaagaacttccacctccgcccccgcgacctcatctccaacatcaacgtcatcgtcctcgagctcaagggctccgagaccaccttcatgtgcgagtacgccgacgagaccgccaccatcgtcgagttcctcaaccgctggatcaccttctgccagtccatcatctccaccctcacctga

SEQ ID NO: 4501 - RNA, 462 nt, synthetic construct
  misc_feature 1..462: note = derived and/or modified sequence opt3 fromIL-2__Homo_sapiens__AAH66256
  source 1..462: mol_type = other RNA
atgtacagaatgcagctgctcagctgcatcgccctttccctggctttggtgaccaactctgcattaacatcaagtagcactaagaaaacgcaactgcagctagagcacctcctgcttgacctgcagatgattttgaatggcataaacaattataagaaccccaaactcaccaggatgctgacattcaagttttacatgcctaaaaaggccactgaactgaagcatctccagtgtttagaggaggaactgaaaccacttgaagaggtcttgaatctggcgcaatccaagaacttccacctacggccgcgcgatctcatctctaatattaacgttatcgtgctggagcttaaagggtcggaaaccacatttatgtgcgagtatgctgacgaaaccgccactattgtagagttcctgaatcgatggatcacattttgtcagtcaataatcagcaccttgacgtga

SEQ ID NO: 4502 - RNA, 462 nt, synthetic construct
  misc_feature 1..462: note = derived and/or modified sequence opt4 fromIL-2__Homo_sapiens__AAH66256
  source 1..462: mol_type = other RNA
atgtacagaatgcagctgctgagctgcatcgccctgagcctggccctggtgaccaacagcgccctgaccagcagcagcaccaagaagacccagctgcagctggagcacctgctgctggacctgcagatgatcctgaacggcatcaacaactacaagaaccccaagctgaccagaatgctgaccttcaagttctacatgcccaagaaggccaccgagctgaagcacctgcagtgcctggaggaggagctgaagcccctggaggaggtgctgaacctggcccagagcaagaacttccacctgagacccagagacctgatcagcaacatcaacgtgatcgtgctggagctgaagggcagcgagaccaccttcatgtgcgagtacgccgacgagaccgccaccatcgtggagttcctgaacagatggatcaccttctgccagagcatcatcagcaccctgacctga

SEQ ID NO: 4503 - RNA, 462 nt, synthetic construct
  misc_feature 1..462: note = derived and/or modified sequence opt5 fromIL-2__Homo_sapiens__AAH66256
  source 1..462: mol_type = other RNA
atgtacagaatgcagctgctcagctgcatcgccctgtcccttgctctggtgaccaactctgccctcacaagctcctctacgaagaaaacccaactgcagcttgagcacctcctgctggacctgcagatgattctcaatggcatcaacaattataagaaccccaaactgacacggatgcttaccttcaagttttacatgcctaaaaaggcgacagaactgaagcacctccagtgtctggaggaggaacttaaaccgctggaagaggtcctcaatctggctcaaagcaagaacttccatctgcgccccagagatctcatttccaatatcaacgttattgtgctggagcttaaagggtctgaaaccacatttatgtgcgagtatgccgacgaaaccgccacgatcgtggagttcctgaatcggtggatcaccttttgtcagagcattatctccacactcacctga

SEQ ID NO: 4504 - RNA, 462 nt, synthetic construct
  misc_feature 1..462: note = derived and/or modified sequence opt6 fromIL-2__Homo_sapiens__AAH66256
  source 1..462: mol_type = other RNA
atgtaccgaatgcaactactatcatgcatagcactatccctagccttagtaacaaactcagcactaacatcatcctccacaaaaaaaacacaactacaactagaacacctactcctagacctacaaatgatactaaacggaataaacaactacaaaaacccaaaactcacaagaatgctaacattcaaattctacatgccaaaaaaagcaacagaactaaaacacctacaatgcctagaagaagaactaaaaccactagaagaagtactaaacctagcacaatcaaaaaacttccacctaagaccaagagacctaatatcaaacataaacgtaatagtactagaactaaaaggatcagaaacaacattcatgtgcgaatacgcagacgaaacagcaacaatagtagaattcctaaaccgatggataacattctgccaatcaataatatcaacactaacataa

SEQ ID NO: 4505 - protein, 153 aa, synthetic construct [sequence omitted]

SEQ ID NO: 4506 - RNA, 462 nt, synthetic construct
  misc_feature 1..462: note = IL-2__Homo_sapiens__AAH66254
  source 1..462: mol_type = other RNA
atgtacaggatgcaactcctgtcttgcattgcactaagtcttgcacttgtcgcaaacagtgcacctacttcaagttctacaaagaaaacacagctacaactggagcatttactgctggatttacagatgattttgaatggaattaataattacaagaatcccaaactcaccaggatgctcacatttaagttttacatgcccaagaaggccacagaactgaaacatcttcagtgtctagaagaagaactcaaacctctggaggaagtgctaaatttagctcaaagcaaaaactttcacttaagacccagggacttaatcagcaatatcaacgtaatagttctggaactaaagggatctgaaacaacattcatgtgtgaatatgctgatgagacagcaaccattgtagaatttctgaacagatggattaccttttgtcaaagcatcatctcaacactgacttga

SEQ ID NO: 4507 - RNA, 462 nt, synthetic construct
  misc_feature 1..462: note = derived and/or modified sequence opt1 fromIL-2__Homo_sapiens__AAH66254
  source 1..462: mol_type = other RNA
atgtaccgcatgcagctgctcagctgcatcgccctgtccctggccctcgtggcgaacagcgcccccacctccagctccaccaagaagacgcagctgcagctggagcacctcctgctggacctccagatgatcctgaacggcatcaacaactacaagaacccgaagctgacccggatgctcaccttcaagttctacatgcccaagaaggccaccgagctgaagcacctccagtgcctggaggaggagctgaagcccctggaggaggtcctcaacctggcccagagcaagaacttccacctccgcccccgggacctgatctccaacatcaacgtgatcgtgctggagctgaaggggagcgagacgaccttcatgtgcgagtacgccgacgagaccgcgaccatcgtcgagttcctcaaccgctggatcacgttctgccagtccatcatcagcaccctgacctga

SEQ ID NO: 4508 - RNA, 462 nt, synthetic construct
  misc_feature 1..462: note = derived and/or modified sequence opt2 fromIL-2__Homo_sapiens__AAH66254
  source 1..462: mol_type = other RNA
atgtaccgcatgcagctcctctcctgcatcgccctctccctcgccctcgtcgccaactccgcccccacctcctcctccaccaagaagacccagctccagctcgagcacctcctcctcgacctccagatgatcctcaacggcatcaacaactacaagaaccccaagctcacccgcatgctcaccttcaagttctacatgcccaagaaggccaccgagctcaagcacctccagtgcctcgaggaggagctcaagcccctcgaggaggtcctcaacctcgcccagtccaagaacttccacctccgcccccgcgacctcatctccaacatcaacgtcatcgtcctcgagctcaagggctccgagaccaccttcatgtgcgagtacgccgacgagaccgccaccatcgtcgagttcctcaaccgctggatcaccttctgccagtccatcatctccaccctcacctga

SEQ ID NO: 4509 - RNA, 462 nt, synthetic construct
  misc_feature 1..462: note = derived and/or modified sequence opt3 fromIL-2__Homo_sapiens__AAH66254
  source 1..462: mol_type = other RNA
atgtacagaatgcagctgctcagctgcatcgccctttccctggctttggtggcaaactctgcccccacctcaagtagcacaaagaaaactcaattacagctggagcacctactcctggaccttcagatgattctgaatggcataaacaattataagaaccctaaattgacgaggatgctcaccttcaagttttacatgccgaaaaaggcgacagaactgaagcatctgcagtgtctcgaggaagagttaaaaccactggaagaggtccttaatttggctcaatccaagaacttccacctacggccccgcgatctgatctctaatattaacgttatcgtgctcgagctgaaagggtcggaaactacctttatgtgcgagtatgccgacgaaacagcaaccattgtagagttccttaatcgatggatcactttttgtcagtcaataatcagcacactgacctga

SEQ ID NO: 4510 - RNA, 462 nt, synthetic construct
  misc_feature 1..462: note = derived and/or modified sequence opt4 fromIL-2__Homo_sapiens__AAH66254
  source 1..462: mol_type = other RNA
atgtacagaatgcagctgctgagctgcatcgccctgagcctggccctggtggccaacagcgcccccaccagcagcagcaccaagaagacccagctgcagctggagcacctgctgctggacctgcagatgatcctgaacggcatcaacaactacaagaaccccaagctgaccagaatgctgaccttcaagttctacatgcccaagaaggccaccgagctgaagcacctgcagtgcctggaggaggagctgaagcccctggaggaggtgctgaacctggcccagagcaagaacttccacctgagacccagagacctgatcagcaacatcaacgtgatcgtgctggagctgaagggcagcgagaccaccttcatgtgcgagtacgccgacgagaccgccaccatcgtggagttcctgaacagatggatcaccttctgccagagcatcatcagcaccctgacctga

SEQ ID NO: 4511 - RNA, 462 nt, synthetic construct
  misc_feature 1..462: note = derived and/or modified sequence opt5 fromIL-2__Homo_sapiens__AAH66254
  source 1..462: mol_type = other RNA
atgtacagaatgcagctgctcagctgcatcgccctgtcccttgctctggtggccaactctgcgcccaccagctcctctacaaagaaaacgcaactccagctggagcaccttctgctcgacctgcagatgattctgaatggcatcaacaattataagaaccctaaactcacccggatgctgacattcaagttttacatgccgaaaaaggctaccgaacttaagcatctgcagtgtctcgaggaggaactgaaaccccttgaagaggtcctgaatctcgcccaaagcaagaacttccacctccgccctagagatctgatttccaatatcaacgttattgtgctggagctgaaagggtctgaaacaacctttatgtgcgagtatgccgacgaaacagctaccatcgtggagttccttaatcggtggatcacgttttgtcagagcattatctccaccctgacatga

SEQ ID NO: 4512 - RNA, 462 nt, synthetic construct
  misc_feature 1..462: note = derived and/or modified sequence opt6 fromIL-2__Homo_sapiens__AAH66254
  source 1..462: mol_type = other RNA
atgtacagaatgcaactactatcatgcatagcactctcactagcactagtagcaaactcagcaccaacatcatcatcaacaaaaaaaacacaactacaactagaacacctactactagacctacaaatgatcctaaacggaataaacaactacaaaaacccaaaactaacaagaatgctaacattcaaattctacatgcccaaaaaagcaacagaactaaaacacctacaatgcctagaagaagaactaaaaccactagaagaagtactaaacctagcacaatccaaaaacttccacctaagaccaagagacctaatatcaaacataaacgtaatagtactagaactaaaaggatcagaaacaacattcatgtgcgaatacgcagacgaaacagccacaatagtagaattcctaaacagatggataacattctgccaatcaataatatcaacactaacctaa

SEQ ID NO: 4513 - protein, 164 aa, synthetic construct
  REGION 1..164: note = IL-31__Homo_sapiens__Q6EBC2
MASHSGPSTSVLFLFCCLGGWLASHTLPVRLLRPSDDVQKIVEELQSLSKMLLKDVEEEKGVLVSQNYTLPCLSPDAQPPNNIHSPAIRAYLKTIRQLDNKSVIDEIIEHLDKLIFQDAPETNISVPTDTHECKRFILTISQQFSECMDLALKSLTSGAQQATT

SEQ ID NO: 4514 - RNA, 495 nt, synthetic construct
  misc_feature 1..495: note = IL-31__Homo_sapiens__AAI32999
  source 1..495: mol_type = other RNA
atggcctctcactcaggcccctcgacgtctgtgctctttctgttctgctgcctgggaggctggctggcctcccacacgttgcccgtccgtttactacgaccaagtgatgatgtacagaaaatagtcgaggaattacagtccctctcgaagatgcttttgaaagatgtggaggaagagaagggcgtgctcgtgtcccagaattacacgctgccgtgtctcagccctgacgcccagccgccaaacaacatccacagcccagccatccgggcatatctcaagacaatcagacagctagacaacaaatctgttattgatgagatcatagagcacctcgacaaactcatatttcaagatgcaccagaaacaaacatttctgtgccaacagacacccatgaatgtaaacgcttcatcctgactatttctcaacagttttcagagtgcatggacctcgcactaaaatcattgacctctggagcccaacaggccaccacttaa

SEQ ID NO: 4515 - RNA, 495 nt, synthetic construct
  misc_feature 1..495: note = derived and/or modified sequence opt1 fromIL-31__Homo_sapiens__AAI32999
  source 1..495: mol_type = other RNA
atggccagccactccggccccagcacctccgtgctgttcctcttctgctgcctcgggggctggctggccagccacaccctgccggtccgcctgctgcggccctccgacgacgtgcagaagatcgtggaggagctccagagcctgtccaagatgctgctcaaggacgtcgaggaggagaagggggtgctggtgagccagaactacacgctgccctgcctctcccccgacgcgcagccgcccaacaacatccacagccccgccatccgcgcctacctgaagaccatccggcagctggacaacaagtccgtcatcgacgagatcatcgagcacctcgacaagctgatcttccaggacgcccccgagaccaacatcagcgtgccgaccgacacgcacgagtgcaagcgcttcatcctgaccatctcccagcagttcagcgagtgcatggacctcgccctgaagtccctgaccagcggcgcgcagcaggccaccacgtga

SEQ ID NO: 4516 - RNA, 495 nt, synthetic construct
  misc_feature 1..495: note = derived and/or modified sequence opt2 fromIL-31__Homo_sapiens__AAI32999
  source 1..495: mol_type = other RNA
atggcctcccactccggcccctccacctccgtcctcttcctcttctgctgcctcggcggctggctcgcctcccacaccctccccgtccgcctcctccgcccctccgacgacgtccagaagatcgtcgaggagctccagtccctctccaagatgctcctcaaggacgtcgaggaggagaagggcgtcctcgtctcccagaactacaccctcccctgcctctcccccgacgcccagccccccaacaacatccactcccccgccatccgcgcctacctcaagaccatccgccagctcgacaacaagtccgtcatcgacgagatcatcgagcacctcgacaagctcatcttccaggacgcccccgagaccaacatctccgtccccaccgacacccacgagtgcaagcgcttcatcctcaccatctcccagcagttctccgagtgcatggacctcgccctcaagtccctcacctccggcgcccagcaggccaccacctga

SEQ ID NO: 4517 - RNA, 495 nt, synthetic construct
  misc_feature 1..495: note = derived and/or modified sequence opt3 fromIL-31__Homo_sapiens__AAI32999
  source 1..495: mol_type = other RNA
atggccagccactccggcccctctacctcagtgctgttcctcttttgctgtcttgggggatggctggctagtcatacattgcctgtcagattactgaggccaagcgacgatgttcagaagatcgtggaggaactacaatccctctctaaaatgctgcttaaggacgtagaggaagagaaaggtgtgctggtctcgcagaactacactttgccgtgcctctcacccgatgcacagcctccaaataacattcacagccccgccatacgggcgtatctgaagacgatccgccagctggacaataaaagtgtgattgatgaaatcattgagcatctcgacaagttaatcttccaagatgctcctgagaccaacatatccgttccaacagacactcacgaatgtaagcgatttatcctgaccatttctcagcagttcagcgagtgcatggatcttgccttgaaatccctgacatcaggcgcacagcaagccaccacttga

SEQ ID NO: 4518 - RNA, 495 nt, synthetic construct
  misc_feature 1..495: note = derived and/or modified sequence opt4 fromIL-31__Homo_sapiens__AAI32999
  source 1..495: mol_type = other RNA
atggccagccacagcggccccagcaccagcgtgctgttcctgttctgctgcctgggcggctggctggccagccacaccctgcccgtgagactgctgagacccagcgacgacgtgcagaagatcgtggaggagctgcagagcctgagcaagatgctgctgaaggacgtggaggaggagaagggcgtgctggtgagccagaactacaccctgccctgcctgagccccgacgcccagccccccaacaacatccacagccccgccatcagagcctacctgaagaccatcagacagctggacaacaagagcgtgatcgacgagatcatcgagcacctggacaagctgatcttccaggacgcccccgagaccaacatcagcgtgcccaccgacacccacgagtgcaagagattcatcctgaccatcagccagcagttcagcgagtgcatggacctggccctgaagagcctgaccagcggcgcccagcaggccaccacctga

SEQ ID NO: 4519 - RNA, 495 nt, synthetic construct
  misc_feature 1..495: note = derived and/or modified sequence opt5 fromIL-31__Homo_sapiens__AAI32999
  source 1..495: mol_type = other RNA
atggccagccactccggcccctctaccagcgtgctgttcctcttttgctgtcttgggggatggctggcttcccatacactgcctgtcagactcctgcggccgtctgacgatgttcagaagatcgtggaggaacttcaaagcctgtccaaaatgctcctgaaggacgtggaggaagagaaaggcgtcctggtgtctcagaactacacgctcccctgcctgagccctgatgcccagccccctaataacattcactcccccgcgatccgcgcttatcttaagaccattagacagctggacaataaaagcgttatcgatgaaattatcgagcatctcgacaagctgatcttccaagatgcccctgagacaaacatttctgtgccgaccgacacacacgaatgtaagcggtttatccttaccatttcccagcagttcagcgagtgcatggatctggccctcaaatctctgacatccggggctcagcaagccaccacgtga

SEQ ID NO: 4520 - RNA, 495 nt, synthetic construct
  misc_feature 1..495: note = derived and/or modified sequence opt6 fromIL-31__Homo_sapiens__AAI32999
  source 1..495: mol_type = other RNA
atggcatcacactcaggaccatcaacctcagtattattcctattctgctgcttaggaggatggctcgcatcacacacactaccagtaagactactaagaccatccgacgacgtacaaaaaatagtagaagaactacaatcactatcaaaaatgctactcaaagacgtagaagaagaaaaaggagtactagtatcacaaaactacacactaccatgcctatcaccagacgcacaaccaccaaacaacatacactccccagcaataagagcatacttaaaaacaataagacaactagacaacaaatcagtaatagacgaaataatagaacacctagacaaactaatattccaagacgcaccagaaacaaacatatctgtaccaacagacacacacgaatgcaaaagattcatactaacaatatcacaacaattctcagaatgtatggacttagcactaaaatccttaacatcaggagcacaacaagcaacaacataa

SEQ ID NO: 4521 - protein, 234 aa, synthetic construct
  REGION 1..234: note = IL-32__Homo_sapiens__P24001
MCFPKVLSDDMKKLKARMVMLLPTSAQGLGAWVSACDTEDTVGHLGPWRDKDPALWCQLCLSSQHQAIERFYDKMQNAESGRGQVMSSLAELEDDFKEGYLETVAAYYEEQHPELTPLLEKERDGLRCRGNRSPVPDVEDPATEEPGESFCDKVMRWFQAMLQRLQTWWHGVLAWVKEKVVALVHAVQALWKQFQSFCCSLSELFMSSFQSYGAPRGDKEELTPQKCSEPQSSK

SEQ ID NO: 4522 - RNA, 705 nt, synthetic construct
  misc_feature 1..705: note = IL-32__Homo_sapiens__AAH09401
  source 1..705: mol_type = other RNA
atgtgcttcccgaaggtcctctctgatgacatgaagaagctgaaggcccgaatggtaatgctcctccctacttctgctcaggggttgggggcctgggtctcagcgtgtgacactgaggacactgtgggacacctgggaccctggagggacaaggatccggccctttggtgccaactctgcctctcttcacagcaccaggccatagaaagattttatgataaaatgcaaaatgcagaatcaggacgtggacaggtgatgtcgagcctggcagagctggaggacgacttcaaagagggctacctggagacagtggcggcttattatgaggagcagcacccagagctcactcctctacttgaaaaagaaagagatggattacggtgccgaggcaacagatcccctgtcccggatgttgaggatcccgcaaccgaggagcctggggagagcttttgtgacaaggtcatgagatggttccaggccatgctgcagcggctgcagacctggtggcacggggttctggcctgggtgaaggagaaggtggtggccctggtccatgcagtgcaggccctctggaaacagttccagagtttctgctgctctctgtcagagctcttcatgtcctctttccagtcctacggagccccacggggggacaaggaggagctgacaccccagaagtgctctgaaccccaatcctcaaaatga

SEQ ID NO: 4523 - RNA, 705 nt, synthetic construct
  misc_feature 1..705: note = derived and/or modified sequence opt1 fromIL-32__Homo_sapiens__AAH09401
  source 1..705: mol_type = other RNA
atgtgcttccccaaggtgctgagcgacgacatgaagaagctcaaggcccgcatggtcatgctgctgccgacctccgcccagggcctcggggcgtgggtgagcgcctgcgacaccgaggacaccgtgggccacctggggccctggcgggacaaggaccccgccctgtggtgccagctctgcctgtccagccagcaccaggccatcgagcgcttctacgacaagatgcagaacgccgagtccggccgggggcaggtcatgagctccctggcggagctcgaggacgacttcaaggagggctacctggagaccgtggccgcctactacgaggagcagcaccccgagctgaccccgctcctggagaaggagcgcgacggcctgcggtgccgcgggaaccggagccccgtgcccgacgtcgaggaccccgccaccgaggagccgggcgagtccttctgcgacaaggtgatgcgctggttccaggcgatgctccagcggctgcagacgtggtggcacggggtgctggcctgggtcaaggagaaggtggtggccctcgtccacgccgtgcaggccctgtggaagcagttccagagcttctgctgctccctgagcgagctgttcatgtccagcttccagtcctacggcgcgccccgcggggacaaggaggagctcacgccccagaagtgcagcgagccccagtccagcaagtga

SEQ ID NO: 4524 - RNA, 705 nt, synthetic construct
  misc_feature 1..705: note = derived and/or modified sequence opt2 fromIL-32__Homo_sapiens__AAH09401
  source 1..705: mol_type = other RNA
atgtgcttccccaaggtcctctccgacgacatgaagaagctcaaggcccgcatggtcatgctcctccccacctccgcccagggcctcggcgcctgggtctccgcctgcgacaccgaggacaccgtcggccacctcggcccctggcgcgacaaggaccccgccctctggtgccagctctgcctctcctcccagcaccaggccatcgagcgcttctacgacaagatgcagaacgccgagtccggccgcggccaggtcatgtcctccctcgccgagctcgaggacgacttcaaggagggctacctcgagaccgtcgccgcctactacgaggagcagcaccccgagctcacccccctcctcgagaaggagcgcgacggcctccgctgccgcggcaaccgctcccccgtccccgacgtcgaggaccccgccaccgaggagcccggcgagtccttctgcgacaaggtcatgcgctggttccaggccatgctccagcgcctccagacctggtggcacggcgtcctcgcctgggtcaaggagaaggtcgtcgccctcgtccacgccgtccaggccctctggaagcagttccagtccttctgctgctccctctccgagctcttcatgtcctccttccagtcctacggcgccccccgcggcgacaaggaggagctcaccccccagaagtgctccgagccccagtcctccaagtga

SEQ ID NO: 4525 - RNA, 705 nt, synthetic construct
  misc_feature 1..705: note = derived and/or modified sequence opt3 fromIL-32__Homo_sapiens__AAH09401
  source 1..705: mol_type = other RNA
atgtgcttccccaaggtgctgagcgacgatatgaaaaagctcaaagccagaatggtcatgcttctgcctacctccgctcagggcttgggggcatgggtttctgcctgtgacacagaggatactgtgggacacttaggtccatggagggacaaggatccggcgctgtggtgccaactatgtctctcaagtcagcatcaggctatcgaacggttttacgacaaaatgcagaacgccgagagcggccgcgggcaagtaatgtcctctctggcagaacttgaggatgacttcaaggaaggatatctggagacggtggccgcttactatgaggaacagcaccccgagttgacccctctcctggaaaaggagcgagatggcctgcgttgcagaggtaataggtcgccagtccccgacgtggaggatcctgcaacagaggaaccaggggaatcattttgtgacaaagttatgcggtggttccaggccatgctccagcgcttacaaacttggtggcatggagtgctggcttgggtcaaggagaaagtggtagcccttgttcacgcggtgcaggcattgtggaagcagtttcagagcttctgctgtagtctgtccgaactatttatgtctagcttccaatcctacggcgcccccagaggcgataaagaggagctcacccctcagaagtgctcagaaccacagagtagcaagtga

SEQ ID NO: 4526 - RNA, 705 nt, synthetic construct
  misc_feature 1..705: note = derived and/or modified sequence opt4 fromIL-32__Homo_sapiens__AAH09401
  source 1..705: mol_type = other RNA
atgtgcttccccaaggtgctgagcgacgacatgaagaagctgaaggccagaatggtgatgctgctgcccaccagcgcccagggcctgggcgcctgggtgagcgcctgcgacaccgaggacaccgtgggccacctgggcccctggagagacaaggaccccgccctgtggtgccagctgtgcctgagcagccagcaccaggccatcgagagattctacgacaagatgcagaacgccgagagcggcagaggccaggtgatgagcagcctggccgagctggaggacgacttcaaggagggctacctggagaccgtggccgcctactacgaggagcagcaccccgagctgacccccctgctggagaaggagagagacggcctgagatgcagaggcaacagaagccccgtgcccgacgtggaggaccccgccaccgaggagcccggcgagagcttctgcgacaaggtgatgagatggttccaggccatgctgcagagactgcagacctggtggcacggcgtgctggcctgggtgaaggagaaggtggtggccctggtgcacgccgtgcaggccctgtggaagcagttccagagcttctgctgcagcctgagcgagctgttcatgagcagcttccagagctacggcgcccccagaggcgacaaggaggagctgaccccccagaagtgcagcgagccccagagcagcaagtga

SEQ ID NO: 4527 - RNA, 705 nt, synthetic construct
  misc_feature 1..705: note = derived and/or modified sequence opt5 fromIL-32__Homo_sapiens__AAH09401
  source 1..705: mol_type = other RNA
atgtgcttccccaaggtgctgagcgacgatatgaaaaagctcaaagccagaatggtcatgctgcttcctacctccgcccagggcctgggggcctgggtttctgcgtgtgacacagaggatacggtgggacacctcggcccgtggcgggacaaggatcccgctctgtggtgccaactttgtctgagctcccagcatcaggccatcgaacgcttttacgacaaaatgcagaacgccgagtctgggagaggacaagtgatgagctccctcgctgaactggaggatgacttcaaggaaggctatctggagaccgtcgccgcttactatgaggaacagcaccctgagctcacacccctgcttgaaaaggagcgggatgggctgcgctgcagaggaaatcggtctcctgtgcccgacgttgaggatcctgccaccgaagaaccgggcgagagcttttgtgacaaagtgatgcgctggttccaggcgatgctccagagactgcaaacatggtggcatggcgtccttgcctgggtgaaggagaaagttgtggctctggtccacgccgtgcaggctctctggaagcagtttcagtccttctgctgtagcctgtctgaactgtttatgtccagcttccaatcttacggggctccccggggagataaagaggagctcacccctcagaagtgctccgaaccccagagctctaagtga

SEQ ID NO: 4528 - RNA, 705 nt, synthetic construct
  misc_feature 1..705: note = derived and/or modified sequence opt6 fromIL-32__Homo_sapiens__AAH09401
  source 1..705: mol_type = other RNA
atgtgtttcccaaaagtattatcagacgatatgaaaaaattaaaagctagaatggtaatgctattaccaacatcagcacaaggattaggagcatgggtatcagcatgtgatacagaagatacagtaggacatctaggaccatggagagataaagatccagcattatggtgccaattatgtctatcatcacaacaccaagccatagaaagattctatgataaaatgcaaaacgcagaaagtggaaggggacaagtaatgagctcactagcagaattagaagatgacttcaaagaaggatatctagaaacagtagccgcatactatgaagaacaacatccagaactaacaccattactagaaaaagaaagagatggattaagatgtcgaggaaatagaagcccagtaccagacgtagaagatccagcaacagaagaaccaggagaaagcttttgcgataaagttatgcgatggtttcaagcaatgttacaaagactacaaacctggtggcatggcgttctcgcatgggtaaaagaaaaagtagtagcactagtacacgcagtacaagcactatggaaacaatttcaatcattctgttgctcattaagcgaattattcatgagcagtttccaaagctatggagcaccaagaggagataaagaagaattaacaccacaaaaatgctcagaaccacaatcaagcaaataa

SEQ ID NO: 4529 - protein, 270 aa, synthetic construct
  REGION 1..270: note = IL-33__Homo_sapiens__O95760
MKPKMKYSTNKISTAKWKNTASKALCFKLGKSQQKAKEVCPMYFMKLRSGLMIKKEACYFRRETTKRPSLKTGRKHKRHLVLAACQQQSTVECFAFGISGVQKYTRALHDSSITGISPITEYLASLSTYNDQSITFALEDESYEIYVEDLKKDEKKDKVLLSYYESQHPSNESGDGVDGKMLMVTLSPTKDFWLHANNKEHSVELHKCEKPLPDQAFFVLHNMHSNCVSFECKTDPGVFIGVKDNHLALIKVDSSENLCTENILFKLSET

SEQ ID NO: 4530 - RNA, 813 nt, synthetic construct
  misc_feature 1..813: note = IL-33__Homo_sapiens__AAH47085
  source 1..813: mol_type = other RNA
atgaagcctaaaatgaagtattcaaccaacaaaatttccacagcaaagtggaagaacacagcaagcaaagccttgtgtttcaagctgggaaaatcccaacagaaggccaaagaagtttgccccatgtactttatgaagctccgctctggccttatgataaaaaaggaggcctgttactttaggagagaaaccaccaaaaggccttcactgaaaacaggtagaaagcacaaaagacatctggtactcgctgcctgtcaacagcagtctactgtggagtgctttgcctttggtatatcaggggtccagaaatatactagagcacttcatgattcaagtatcacaggaatttcacctattacagagtatcttgcttctctaagcacatacaatgatcaatccattacttttgctttggaggatgaaagttatgagatatatgttgaagacttgaaaaaagatgaaaagaaagataaggtgttactgagttactatgagtctcaacacccctcaaatgaatcaggtgacggtgttgatggtaagatgttaatggtaaccctgagtcctacaaaagacttctggttgcatgccaacaacaaggaacactctgtggagctccataagtgtgaaaaaccactgccagaccaggccttctttgtccttcataatatgcactccaactgtgtttcatttgaatgcaagactgatcctggagtgtttataggtgtaaaggataatcatcttgctctgattaaagtagactcttctgagaatttgtgtactgaaaatatcttgtttaagctctctgaaacttag

SEQ ID NO: 4531 - RNA, 813 nt, synthetic construct
  misc_feature 1..813: note = derived and/or modified sequence opt1 fromIL-33__Homo_sapiens__AAH47085
  source 1..813: mol_type = other RNA
atgaagcccaagatgaagtacagcaccaacaagatctccaccgccaagtggaagaacacggccagcaaggcgctgtgcttcaagctcggcaagtcccagcagaaggccaaggaggtgtgcccgatgtacttcatgaagctgcgcagcgggctgatgatcaagaaggaggcctgctacttccggcgcgagaccaccaagcggccctccctcaagaccggccgcaagcacaagcggcacctggtcctggccgcctgccagcagcagagcacggtggagtgcttcgcgttcgggatctccggcgtgcagaagtacacccgcgccctccacgacagctccatcaccgggatcagccccatcaccgagtacctggcctccctgagcacgtacaacgaccagtccatcaccttcgccctcgaggacgagagctacgagatctacgtcgaggacctgaagaaggacgagaagaaggacaaggtgctgctctcctactacgagagccagcacccctccaacgagagcggcgacggcgtggacgggaagatgctgatggtcaccctgtccccgaccaaggacttctggctccacgcgaacaacaaggagcacagcgtggagctgcacaagtgcgagaagcccctgcccgaccaggccttcttcgtgctccacaacatgcacagcaactgcgtctccttcgagtgcaagacggaccccggcgtgttcatcggggtgaaggacaaccacctggccctgatcaaggtcgacagctccgagaacctctgcaccgagaacatcctgttcaagctgagcgagacctga

SEQ ID NO: 4532 - RNA, 813 nt, synthetic construct
  misc_feature 1..813: note = derived and/or modified sequence opt2 fromIL-33__Homo_sapiens__AAH47085
  source 1..813: mol_type = other RNA
atgaagcccaagatgaagtactccaccaacaagatctccaccgccaagtggaagaacaccgcctccaaggccctctgcttcaagctcggcaagtcccagcagaaggccaaggaggtctgccccatgtacttcatgaagctccgctccggcctcatgatcaagaaggaggcctgctacttccgccgcgagaccaccaagcgcccctccctcaagaccggccgcaagcacaagcgccacctcgtcctcgccgcctgccagcagcagtccaccgtcgagtgcttcgccttcggcatctccggcgtccagaagtacacccgcgccctccacgactcctccatcaccggcatctcccccatcaccgagtacctcgcctccctctccacctacaacgaccagtccatcaccttcgccctcgaggacgagtcctacgagatctacgtcgaggacctcaagaaggacgagaagaaggacaaggtcctcctctcctactacgagtcccagcacccctccaacgagtccggcgacggcgtcgacggcaagatgctcatggtcaccctctcccccaccaaggacttctggctccacgccaacaacaaggagcactccgtcgagctccacaagtgcgagaagcccctccccgaccaggccttcttcgtcctccacaacatgcactccaactgcgtctccttcgagtgcaagaccgaccccggcgtcttcatcggcgtcaaggacaaccacctcgccctcatcaaggtcgactcctccgagaacctctgcaccgagaacatcctcttcaagctctccgagacctga

SEQ ID NO: 4533 - RNA, 813 nt, synthetic construct
  misc_feature 1..813: note = derived and/or modified sequence opt3 fromIL-33__Homo_sapiens__AAH47085
  source 1..813: mol_type = other RNA
atgaagcccaaaatgaagtacagcaccaacaaaatctccacagccaagtggaaaaatactgcttctaaggcactgtgcttcaagctcggcaaatcacagcaaaaggccaaagaggtgtgtcctatgtattttatgaagttgagaagtgggctgatgattaaaaaggaagcgtgctacttcaggcgggagacgaccaagcgcccaagccttaaaacaggacgaaagcacaaacgtcatttagtcctggctgcctgtcagcagcagtccactgttgaatgctttgcattcggtatatctggcgtgcaaaagtataccagagccctacacgactcgtcaatcacagggattagcccgatcaccgagtacctcgctagtctgtccacttataacgatcagtctattacatttgcacttgaagacgagagctacgagatctatgtagaagatctgaaaaaggacgagaaaaaggataaggtgttgctctcctactacgaatcacagcatcccagtaatgagagcggagacggcgtcgatggtaaaatgctgatggtgaccctgtctcctacgaaggacttctggctccacgccaacaataaagagcattccgttgaattacacaagtgtgagaaaccactgcccgatcaggcctttttcgtgcttcacaacatgcattcaaattgcgtcagctttgaatgtaagactgaccctggggtgttcataggagtaaaggataaccacttggctctgatcaaagttgacagttctgagaatctatgcaccgaaaacattctctttaagctgtccgagacatga

SEQ ID NO: 4534 - RNA, 813 nt, synthetic construct
  misc_feature 1..813: note = derived and/or modified sequence opt4 fromIL-33__Homo_sapiens__AAH47085
  source 1..813: mol_type = other RNA
atgaagcccaagatgaagtacagcaccaacaagatcagcaccgccaagtggaagaacaccgccagcaaggccctgtgcttcaagctgggcaagagccagcagaaggccaaggaggtgtgccccatgtacttcatgaagctgagaagcggcctgatgatcaagaaggaggcctgctacttcagaagagagaccaccaagagacccagcctgaagaccggcagaaagcacaagagacacctggtgctggccgcctgccagcagcagagcaccgtggagtgcttcgccttcggcatcagcggcgtgcagaagtacaccagagccctgcacgacagcagcatcaccggcatcagccccatcaccgagtacctggccagcctgagcacctacaacgaccagagcatcaccttcgccctggaggacgagagctacgagatctacgtggaggacctgaagaaggacgagaagaaggacaaggtgctgctgagctactacgagagccagcaccccagcaacgagagcggcgacggcgtggacggcaagatgctgatggtgaccctgagccccaccaaggacttctggctgcacgccaacaacaaggagcacagcgtggagctgcacaagtgcgagaagcccctgcccgaccaggccttcttcgtgctgcacaacatgcacagcaactgcgtgagcttcgagtgcaagaccgaccccggcgtgttcatcggcgtgaaggacaaccacctggccctgatcaaggtggacagcagcgagaacctgtgcaccgagaacatcctgttcaagctgagcgagacctga

SEQ ID NO: 4535 - RNA, 813 nt, synthetic construct
  misc_feature 1..813: note = derived and/or modified sequence opt5 fromIL-33__Homo_sapiens__AAH47085
  source 1..813: mol_type = other RNA
atgaagcccaaaatgaagtacagcaccaacaaaatctccacagccaagtggaaaaatacggcttctaaggccctgtgcttcaagctcggcaaaagccagcaaaaggcgaaagaggtgtgtcctatgtattttatgaagctgagatccgggcttatgattaaaaaggaggcttgctacttccggcgcgaaaccacaaagagaccgtctctgaaaaccggacggaagcacaaacgccatctcgtcctggccgcctgtcagcagcagagcacagttgaatgctttgctttcggcatctccggggtgcaaaagtataccagagcccttcacgactctagcattacaggaatctcccccattaccgagtacctggctagcctctctacgtataacgatcagtccatcacctttgccctggaagacgagagctacgagatctatgtggaagatctgaaaaaggacgagaaaaaggataaggtcctcctgtcttactacgaatcccagcatcctagcaatgagtctggcgacggggtggatggaaaaatgcttatggttacactgtcccccaccaaggacttctggctccacgcgaacaataaagagcatagcgtggaactgcacaagtgtgagaaacctcttcccgatcaggcctttttcgtcctgcacaacatgcattccaattgcgtgtcttttgaatgtaagacagaccctggcgttttcattggcgtgaaggataaccacctcgctctgatcaaagtcgacagctccgagaatctgtgcaccgaaaacattctctttaagctgagcgagacgtga

SEQ ID NO: 4536 - RNA, 813 nt, synthetic construct
  misc_feature 1..813: note = derived and/or modified sequence opt6 fromIL-33__Homo_sapiens__AAH47085
  source 1..813: mol_type = other RNA
atgaaaccaaaaatgaaatactcaacaaacaaaatatcaacagcaaaatggaaaaacacagcatcaaaagcactatgcttcaaattaggaaaatcacaacaaaaagcaaaagaagtctgcccaatgtatttcatgaaactaagatcaggactaatgataaaaaaagaagcttgctatttcagaagagaaacaacaaaaagaccatcactaaaaacaggaagaaaacacaaacgacacctagtactagcagcctgccaacaacaatccacagtagaatgcttcgcattcggaatatcaggcgtacaaaaatacacaagagcactccacgactcatccataacaggaatatcaccaatcacagaatacctagcatccctatcaacatacaacgatcaatctataacattcgcactcgaagacgaatcatacgaaatatacgtagaagacctaaaaaaagacgaaaaaaaagacaaagtattattaagctactacgaaagccaacacccatcaaacgaatcaggagacggagtagacggaaaaatgctaatggtaacattatcaccaacaaaagatttctggttacatgcaaacaacaaagaacactcagtcgaattacacaaatgcgaaaaaccactaccagaccaagcattcttcgtattacacaacatgcactcaaactgcgtatcattcgaatgcaaaacagacccaggagtattcataggagtaaaagataaccacttagcattaataaaagtagactcatcagaaaacctatgcacagaaaacatactattcaaattatcagaaacataa

SEQ ID NO: 4537 - protein, 218 aa, synthetic construct
  REGION 1..218: note = IL-37__Homo_sapiens__Q9NZH6
MSFVGENSGVKMGSEDWEKDEPQCCLEDPAGSPLEPGPSLPTMNFVHTSPKVKNLNPKKFSIHDQDHKVLVLDSGNLIAVPDKNYIRPEIFFALASSLSSASAEKGSPILLGVSKGEFCLYCDKDKGQSHPSLQLKKEKLMKLAAQKESARRPFIFYRAQVGSWNMLESAAHPGWFICTSCNCNEPVGVTDKFENRKHIEFSFQPVCKAEMSPSEVSD

SEQ ID NO: 4538 - RNA, 657 nt, synthetic construct
  misc_feature 1..657: note = IL-37__Homo_sapiens__AAF69252
  source 1..657: mol_type = other RNA
atgtcctttgtgggggagaactcaggagtgaaaatgggctctgaggactgggaaaaagatgaaccccagtgctgcttagaagacccggctggaagccccctggaaccaggcccaagcctccccaccatgaattttgttcacacaagtccaaaggtgaagaacttaaacccgaagaaattcagcattcatgaccaggatcacaaagtactggtcctggactctgggaatctcatagcagttccagataaaaactacatacgcccagagatcttctttgcattagcctcatccttgagctcagcctctgcggagaaaggaagtccgattctcctgggggtctctaaaggggagttttgtctctactgtgacaaggataaaggacaaagtcatccatcccttcagctgaagaaggagaaactgatgaagctggctgcccaaaaggaatcagcacgccggcccttcatcttttatagggctcaggtgggctcctggaacatgctggagtcggcggctcaccccggatggttcatctgcacctcctgcaattgtaatgagcctgttggggtgacagataaatttgagaacaggaaacacattgaattttcatttcaaccagtttgcaaagctgaaatgagccccagtgaggtcagcgattag

SEQ ID NO: 4539 - RNA, 657 nt, synthetic construct
  misc_feature 1..657: note = derived and/or modified sequence opt1 fromIL-37__Homo_sapiens__AAF69252
  source 1..657: mol_type = other RNA
atgagcttcgtgggcgagaactccggggtcaagatgggcagcgaggactgggagaaggacgagccccagtgctgcctggaggacccggccgggagccccctcgagcccggcccctccctgccgaccatgaacttcgtgcacacctcccccaaggtgaagaacctgaaccccaagaagttcagcatccacgaccaggaccacaaggtcctcgtgctggactccgggaacctgatcgccgtgcccgacaagaactacatccgcccggagatcttcttcgcgctcgccagctccctgagctccgccagcgccgagaagggctcccccatcctgctcggcgtcagcaagggggagttctgcctgtactgcgacaaggacaagggccagtcccaccccagcctgcagctcaagaaggagaagctgatgaagctggccgcgcagaaggagtccgcccggcgccccttcatcttctaccgggcccaggtggggagctggaacatgctcgagtccgccgcgcacccgggctggttcatctgcacgagctgcaactgcaacgagcccgtgggggtcaccgacaagttcgagaaccgcaagcacatcgagttcagcttccagcccgtgtgcaaggccgagatgtcccccagcgaggtgtccgactga

SEQ ID NO: 4540 - RNA, 657 nt, synthetic construct
  misc_feature 1..657: note = derived and/or modified sequence opt2 fromIL-37__Homo_sapiens__AAF69252
  source 1..657: mol_type = other RNA
atgtccttcgtcggcgagaactccggcgtcaagatgggctccgaggactgggagaaggacgagccccagtgctgcctcgaggaccccgccggctcccccctcgagcccggcccctccctccccaccatgaacttcgtccacacctcccccaaggtcaagaacctcaaccccaagaagttctccatccacgaccaggaccacaaggtcctcgtcctcgactccggcaacctcatcgccgtccccgacaagaactacatccgccccgagatcttcttcgccctcgcctcctccctctcctccgcctccgccgagaagggctcccccatcctcctcggcgtctccaagggcgagttctgcctctactgcgacaaggacaagggccagtcccacccctccctccagctcaagaaggagaagctcatgaagctcgccgcccagaaggagtccgcccgccgccccttcatcttctaccgcgcccaggtcggctcctggaacatgctcgagtccgccgcccaccccggctggttcatctgcacctcctgcaactgcaacgagcccgtcggcgtcaccgacaagttcgagaaccgcaagcacatcgagttctccttccagcccgtctgcaaggccgagatgtccccctccgaggtctccgactga

SEQ ID NO: 4541 - RNA, 657 nt, synthetic construct
  misc_feature 1..657: note = derived and/or modified sequence opt3 fromIL-37__Homo_sapiens__AAF69252
  source 1..657: mol_type = other RNA
atgagcttcgtgggcgagaactccggggtcaagatgggatctgaagactgggagaaagatgaaccccagtgctgtctggaggaccctgccggttcaccactcgaaccgggccccagtcttcctaccatgaattttgttcacacaagcccaaaggtgaaaaacctgaatcccaagaaattctccatccatgatcaagaccacaaggtattggtgttagattctgggaacctgattgctgtccctgacaagaattacataagaccagagatctttttcgcactagcctcgtcactcagcagtgcgtccgctgagaaaggatctcccattctgcttggcgtgagcaagggtgaattttgcctgtattgtgataaagacaaggggcagtcccatccttcattgcagctcaaaaaggagaagctgatgaaactggccgcacagaaggaaagtgccaggcggccattcatcttttaccgcgctcaagttggaagctggaacatgctcgagtctgcagcccacccgggctggttcatttgcacttcctgtaattgcaacgagcccgtgggcgtcacggataaatttgaaaatcgaaagcatatcgagttctcatttcagcctgtgtgtaaagctgaaatgagcccaagtgaggtatctgactga

SEQ ID NO: 4542 - RNA, 657 nt, synthetic construct
  misc_feature 1..657: note = derived and/or modified sequence opt4 fromIL-37__Homo_sapiens__AAF69252
  source 1..657: mol_type = other RNA
atgagcttcgtgggcgagaacagcggcgtgaagatgggcagcgaggactgggagaaggacgagccccagtgctgcctggaggaccccgccggcagccccctggagcccggccccagcctgcccaccatgaacttcgtgcacaccagccccaaggtgaagaacctgaaccccaagaagttcagcatccacgaccaggaccacaaggtgctggtgctggacagcggcaacctgatcgccgtgcccgacaagaactacatcagacccgagatcttcttcgccctggccagcagcctgagcagcgccagcgccgagaagggcagccccatcctgctgggcgtgagcaagggcgagttctgcctgtactgcgacaaggacaagggccagagccaccccagcctgcagctgaagaaggagaagctgatgaagctggccgcccagaaggagagcgccagaagacccttcatcttctacagagcccaggtgggcagctggaacatgctggagagcgccgcccaccccggctggttcatctgcaccagctgcaactgcaacgagcccgtgggcgtgaccgacaagttcgagaacagaaagcacatcgagttcagcttccagcccgtgtgcaaggccgagatgagccccagcgaggtgagcgactga

SEQ ID NO: 4543 - RNA, 657 nt, synthetic construct
  misc_feature 1..657: note = derived and/or modified sequence opt5 fromIL-37__Homo_sapiens__AAF69252
  source 1..657: mol_type = other RNA
atgagcttcgtgggcgagaactccggggtcaagatgggatctgaagactgggagaaagatgaaccccagtgctgtctggaggaccctgccggcagcccgctcgaacccgggccttccctgcccaccatgaattttgttcacacatctcctaaggtgaaaaaccttaatcccaagaaattcagcatccatgatcaagaccacaaggtgctggtcctcgattccggaaacctgattgctgtgcctgacaagaattacatcagaccggagatctttttcgcccttgcgtctagcctgtccagcgcttctgccgagaaaggctcccccattctcctgggggttagcaagggagaattttgcctgtattgtgataaagacaagggccagtctcatccttccctccagctgaaaaaggagaaacttatgaagctggccgctcagaaggaaagcgcccggcgccccttcatcttttacagagctcaagtgggctcttggaacatgctcgagtccgccgcgcaccctgggtggttcatttgcacgagctgtaattgcaacgagcccgtcggagtgaccgataaatttgaaaatcggaagcatatcgagttctcctttcagccggtttgtaaagccgaaatgtctcctagcgaggtgtccgactga

SEQ ID NO: 4544 - RNA, 657 nt, synthetic construct
  misc_feature 1..657: note = derived and/or modified sequence opt6 fromIL-37__Homo_sapiens__AAF69252
  source 1..657: mol_type = other RNA
atgtcattcgtaggagaaaattcaggagtaaaaatgggatcagaagactgggaaaaagacgaaccacaatgctgcctagaagaccctgcaggctcaccactagaaccaggaccatcattaccaacaatgaacttcgtacacacatccccaaaagtaaaaaacctaaacccaaaaaaattctcaatacacgatcaagaccacaaagtactagtactagactcaggaaacctaatagcagtaccagataaaaactacataagaccagaaatattcttcgcactagcatcatcactatcaagcgcatcagcagaaaaaggatcaccaatactactaggagtatcaaaaggagaattctgcttatactgcgacaaagacaaaggacaatcacacccatcactacaactaaaaaaagaaaaattaatgaaactagcagcacaaaaagaatcagcaagaagaccattcatattctatagagcacaagtaggatcatggaacatgttagaatcagcagcccacccaggatggttcatatgtacatcatgcaactgcaacgaaccagtaggagtaacagacaaattcgaaaacagaaaacacatagaattctcattccaaccagtatgcaaagcagaaatgtcaccaagtgaagtatcagactaa

SEQ ID NO: 4545 - protein, 152 aa, synthetic construct
  REGION 1..152: note = IL-3__Homo_sapiens__P08700
MSRLPVLLLLQLLVRPGLQAPMTQTTPLKTSWVNCSNMIDEIITHLKQPPLPLLDFNNLNGEDQDILMENNLRRPNLEAFNRAVKSLQNASAIESILKNLLPCLPLATAAPTRHPIHIKDGDWNEFRRKLTFYLKTLENAQAQQTTLSLAIF

SEQ ID NO: 4546 - RNA, 459 nt, synthetic construct
  misc_feature 1..459: note = IL-3__Homo_sapiens__AAA35725
  source 1..459: mol_type = other RNA
atgagccgcctgcccgtcctgctcctgctccaactcctggtccgccccggactccaagctcccatgacccagacaacgcccttgaagacaagctgggttaactgctctaacatgatcgatgaaattataacacacttaaagcagccacctttgcctttgctggacttcaacaacctcaatggggaagaccaagacattctgatggaaaataaccttcgaaggccaaacctggaggcattcaacagggctgtcaagagtttacagaacgcatcagcaattgagagcattcttaaaaatctcctgccatgtctgcccctggccacggccgcacccacgcgacatccaatccatatcaaggacggtgactggaatgaattccggaggaaactgacgttctatctgaaaacccttgagaatgcgcaggctcaacagacgactttgagcctcgcgatcttttga

SEQ ID NO: 4547 - RNA, 459 nt, synthetic construct
  misc_feature 1..459: note = derived and/or modified sequence opt1 fromIL-3__Homo_sapiens__AAA35725
  source 1..459: mol_type = other RNA
atgagccgcctgcccgtgctcctgctgctccagctgctggtccggccgggcctccaggcccccatgacccagaccacgcccctgaagacctcctgggtgaactgcagcaacatgatcgacgagatcatcacccacctgaagcagcccccgctccccctgctggacttcaacaacctcaacggggaggaccaggacatcctgatggagaacaacctgcgccggcccaacctcgaggccttcaaccgcgcggtgaagtccctgcagaacgccagcgccatcgagtccatcctgaagaacctcctgccctgcctgccgctcgccaccgccgcgcccacgcggcaccccatccacatcaaggacggcgactggaacgagttccgccggaagctgaccttctacctgaagaccctcgagaacgcccaggcccagcagaccacgctgagcctggccatcttctga

SEQ ID NO: 4548 - RNA, 459 nt, synthetic construct
  misc_feature 1..459: note = derived and/or modified sequence opt2 fromIL-3__Homo_sapiens__AAA35725
  source 1..459: mol_type = other RNA
atgtcccgcctccccgtcctcctcctcctccagctcctcgtccgccccggcctccaggcccccatgacccagaccacccccctcaagacctcctgggtcaactgctccaacatgatcgacgagatcatcacccacctcaagcagccccccctccccctcctcgacttcaacaacctcaacggcgaggaccaggacatcctcatggagaacaacctccgccgccccaacctcgaggccttcaaccgcgccgtcaagtccctccagaacgcctccgccatcgagtccatcctcaagaacctcctcccctgcctccccctcgccaccgccgcccccacccgccaccccatccacatcaaggacggcgactggaacgagttccgccgcaagctcaccttctacctcaagaccctcgagaacgcccaggcccagcagaccaccctctccctcgccatcttctga

SEQ ID NO: 4549 - RNA, 459 nt, synthetic construct
  misc_feature 1..459: note = derived and/or modified sequence opt3 fromIL-3__Homo_sapiens__AAA35725
  source 1..459: mol_type = other RNA
atgagcagactgcccgtgctccttctgttgcagttactggtcaggcctggcctacaagccccaatgacccagacaactccgctcaagacgtcctgggttaactgctctaatatgatcgacgagattataacccacctgaaacagccccctcttccactgttggatttcaacaatctcaacggggaagaccaggatatcctgatggagaataacctgcggcgccccaatctcgaggcttttaaccgagcagtgaagtcattacaaaatgccagtgcgattgaaagcatcctgaaaaaccttttgccttgtctgccactagctacagccgcacccactcgtcatcctattcacatcaaggacggagattggaatgagttcagaaggaaactcaccttttacctgaagacacttgaaaacgcccaggctcagcagaccactctgtccttggcaatattctga

SEQ ID NO: 4550 - RNA, 459 nt, synthetic construct
  misc_feature 1..459: note = derived and/or modified sequence opt4 fromIL-3__Homo_sapiens__AAA35725
  source 1..459: mol_type = other RNA
atgagcagactgcccgtgctgctgctgctgcagctgctggtgagacccggcctgcaggcccccatgacccagaccacccccctgaagaccagctgggtgaactgcagcaacatgatcgacgagatcatcacccacctgaagcagccccccctgcccctgctggacttcaacaacctgaacggcgaggaccaggacatcctgatggagaacaacctgagaagacccaacctggaggccttcaacagagccgtgaagagcctgcagaacgccagcgccatcgagagcatcctgaagaacctgctgccctgcctgcccctggccaccgccgcccccaccagacaccccatccacatcaaggacggcgactggaacgagttcagaagaaagctgaccttctacctgaagaccctggagaacgcccaggcccagcagaccaccctgagcctggccatcttctga

SEQ ID NO: 4551 - RNA, 459 nt, synthetic construct
  misc_feature 1..459: note = derived and/or modified sequence opt5 fromIL-3__Homo_sapiens__AAA35725
  source 1..459: mol_type = other RNA
atgagcagactgcccgtgctcctgcttctgcagctcctggtgcggcctggccttcaagccccgatgacccagacaacgcccctgaagacctcctgggttaactgctctaatatgatcgacgagattatcacacacctcaaacagcctcccctgcctctgctcgatttcaacaatctgaacggggaagaccaggatattcttatggagaataacctgcgcagacccaatctcgaggcttttaaccgggccgtcaagagcctgcaaaatgcgtccgctatcgaatctattcttaaaaacctgctcccttgtctgccgctggccaccgccgctcccacacgccatcctatccacatcaaggacggagattggaatgagttcagacggaaactcaccttttacctgaagacacttgaaaacgcccaggctcagcagaccacgctgagcctcgccattttctga

SEQ ID NO: 4552 - RNA, 459 nt, synthetic construct
  misc_feature 1..459: note = derived and/or modified sequence opt6 fromIL-3__Homo_sapiens__AAA35725
  source 1..459: mol_type = other RNA
atgtcaagactacccgtactactactactacaactactagtaagaccaggactacaagcaccaatgacacaaacaacaccactaaaaacatcctgggtaaactgctcaaacatgatagacgaaataatcacacacctaaaacaaccaccactaccactactagacttcaacaacctaaacggagaagaccaagacatactcatggaaaacaacctaagaagaccaaacctagaagcattcaacagagccgtaaaatcactacaaaacgcatcagcaatagaatcaatactaaaaaacctactaccatgcctcccactagcaacagcagcaccaacaagacacccaatacacataaaagacggagactggaacgaattcagaagaaaactaacattctacctaaaaacactagaaaacgcacaagcacaacaaacaacactctcactagcaatattctaa

SEQ ID NO: 4553 - protein, 152 aa, synthetic construct [sequence omitted]

SEQ ID NO: 4554 - RNA, 459 nt, synthetic construct
  misc_feature 1..459: note = IL-3__Homo_sapiens__AAH66275
  source 1..459: mol_type = other RNA
atgagccgcctgcccgtcctgctcctgctccaactcctggtccgccccggactccaagctcccatgacccagacaacgtccttgaagacaagctgggttaactgctctaacatgatcgatgaaattataacacacttaaagcagccacctttgcctttgctggacttcaacagcctcaatggggaagaccaagacattctgatggaaaataaccttcgaaggccaaacctggaggcattcaacagggctgtcaagagtttacagaacgcatcagcaattgagagcattcttaaaaatctcctgccatgtctgcccctggccacggccgcacccacgcgacatccaatccatatcaaggacggtgactggaatgaattccggaggaaactgacgttctatctgaaaacccttgagaatgcgcaggctcaacagacgactttgagcctcgcgatcttttga

SEQ ID NO: 4555 - RNA, 459 nt, synthetic construct
  misc_feature 1..459: note = derived and/or modified sequence opt1 fromIL-3__Homo_sapiens__AAH66275
  source 1..459: mol_type = other RNA
atgagccgcctgcccgtgctcctgctgctccagctgctggtccggccgggcctccaggcccccatgacccagaccacgtccctgaagaccagctgggtgaactgctccaacatgatcgacgagatcatcacccacctgaagcagccgcccctccccctgctggacttcaacagcctcaacggggaggaccaggacatcctgatggagaacaacctgcgccggcccaacctcgaggccttcaaccgcgcggtgaagtccctgcagaacgccagcgccatcgagtccatcctgaagaacctcctgccctgcctgcccctcgccaccgccgcgccgacgcggcaccccatccacatcaaggacggcgactggaacgagttccgccggaagctgaccttctacctgaagaccctcgagaacgcccaggcccagcagaccacgctgagcctggccatcttctga

SEQ ID NO: 4556 - RNA, 459 nt, synthetic construct
  misc_feature 1..459: note = derived and/or modified sequence opt2 fromIL-3__Homo_sapiens__AAH66275
  source 1..459: mol_type = other RNA
atgtcccgcctccccgtcctcctcctcctccagctcctcgtccgccccggcctccaggcccccatgacccagaccacctccctcaagacctcctgggtcaactgctccaacatgatcgacgagatcatcacccacctcaagcagccccccctccccctcctcgacttcaactccctcaacggcgaggaccaggacatcctcatggagaacaacctccgccgccccaacctcgaggccttcaaccgcgccgtcaagtccctccagaacgcctccgccatcgagtccatcctcaagaacctcctcccctgcctccccctcgccaccgccgcccccacccgccaccccatccacatcaaggacggcgactggaacgagttccgccgcaagctcaccttctacctcaagaccctcgagaacgcccaggcccagcagaccaccctctccctcgccatcttctga

SEQ ID NO: 4557 - RNA, 459 nt, synthetic construct
  misc_feature 1..459: note = derived and/or modified sequence opt3 fromIL-3__Homo_sapiens__AAH66275
  source 1..459: mol_type = other RNA
atgagcagactgcccgtgctccttctgttgcagttactggtgaggcctggcctacaagccccaatgacccagacaacttccctcaagacgtcttgggttaactgctcaaatatgatcgacgagattataacccacctgaaacagccgccccttcctctgttggatttcaacagtctcaatggggaagaccaggatatcctgatggagaacaatctgcggcgcccaaacctcgaggcttttaatcgagcagtcaagagcttacaaaacgcctccgcgattgaatctatcctgaaaaatcttttgccctgtctgcctctagctacagccgcaccaactcgtcatcccattcacatcaaggacggagattggaacgagttcagaaggaaactcaccttttacctgaagacacttgaaaatgcccaggctcagcagaccactctgtcgttggcaatattctga

SEQ ID NO: 4558 - RNA, 459 nt, synthetic construct
  misc_feature 1..459: note = derived and/or modified sequence opt4 fromIL-3__Homo_sapiens__AAH66275
  source 1..459: mol_type = other RNA
atgagcagactgcccgtgctgctgctgctgcagctgctggtgagacccggcctgcaggcccccatgacccagaccaccagcctgaagaccagctgggtgaactgcagcaacatgatcgacgagatcatcacccacctgaagcagccccccctgcccctgctggacttcaacagcctgaacggcgaggaccaggacatcctgatggagaacaacctgagaagacccaacctggaggccttcaacagagccgtgaagagcctgcagaacgccagcgccatcgagagcatcctgaagaacctgctgccctgcctgcccctggccaccgccgcccccaccagacaccccatccacatcaaggacggcgactggaacgagttcagaagaaagctgaccttctacctgaagaccctggagaacgcccaggcccagcagaccaccctgagcctggccatcttctga

SEQ ID NO: 4559 - RNA, 459 nt, synthetic construct
  misc_feature 1..459: note = derived and/or modified sequence opt5 fromIL-3__Homo_sapiens__AAH66275
  source 1..459: mol_type = other RNA
atgagcagactgcccgtgctcctgcttctgcagctcctggtccggcctggccttcaagccccgatgacccagacaacgtccctgaagacctcttgggttaactgcagcaatatgatcgacgagattatcacacacctcaaacagccccctctgcccctgctcgatttcaactccctgaatggggaagaccaggatattcttatggagaacaatctgcgcagacctaacctcgaggcttttaatcgggccgtgaagtctctgcaaaacgcgagcgctatcgaatccattcttaaaaatctgctcccctgtctgcctctggccaccgccgctccgacacgccatcccatccacatcaaggacggagattggaacgagttcagacggaaactcaccttttacctgaagacacttgaaaatgcccaggctcagcagaccacgctgtctctcgccattttctga

SEQ ID NO: 4560 - RNA, 459 nt, synthetic construct
  misc_feature 1..459: note = derived and/or modified sequence opt6 fromIL-3__Homo_sapiens__AAH66275
  source 1..459: mol_type = other RNA
atgtcaagactaccagtactactactcctacaattactagtaagaccaggactacaagcaccaatgacacaaaccacatccctaaaaacatcatgggtaaactgctcaaacatgatcgacgaaataataacacacttaaaacaaccaccactaccactactagacttcaactcactaaacggagaagaccaagacatactcatggaaaacaacctaagaagaccaaacctagaagcattcaacagagcagtaaaatcactacaaaacgcatcagcaatagaatccatactaaaaaacctactcccatgcctaccactagcaacagcagcaccaacaagacacccaatacacataaaagacggagactggaacgaattcagacgaaaactaacattctacctaaaaacactagaaaacgcacaagcacaacaaacaacactatcactagcaatattctaa

SEQ ID NO: 4561 - protein, 152 aa, synthetic construct [sequence omitted]

SEQ ID NO: 4562 - RNA, 459 nt, synthetic construct
  misc_feature 1..459: note = IL-3__Homo_sapiens__AAH66274
  source 1..459: mol_type = other RNA
atgagccgcctgcccgtcctgctcctgctccaactcctggtccgccccggactccaagctcccatgacccagacaacgtccttgaagacaagctgggttaactgctctaacatgatcgatgaaattataacacgcttaaagcagccacctttgcctttgctggacttcaacaacctcaatggggaagaccaagacattctgatggaaaataaccttcgaaggccaaacctggaggcattcaacagggctgtcaagagtttacagaacgcatcagcaattgagagcattcttaaaaatctcctgccatgtctgcccctggccacggccgcacccacgcgacatccaatccatatcaaggacggtgactggaatgaattccggaggaaactgacgttctatctgaaaacccttgagaatgcgcaggctcaacagacgactttgagcctcgcgatcttttga

SEQ ID NO: 4563 - RNA, 459 nt, synthetic construct
  misc_feature 1..459: note = derived and/or modified sequence opt1 fromIL-3__Homo_sapiens__AAH66274
  source 1..459: mol_type = other RNA
atgagccgcctgcccgtgctcctgctgctccagctgctggtgcggccgggcctccaggcccccatgacccagaccacgtccctgaagaccagctgggtgaactgctccaacatgatcgacgagatcatcacccgcctgaagcagccgcccctccccctgctggacttcaacaacctcaacggggaggaccaggacatcctgatggagaacaacctgcggcgccccaacctcgaggccttcaaccgggcggtcaagagcctgcagaacgcctccgccatcgagagcatcctgaagaacctcctgccctgcctgcccctcgccaccgccgcgccgacgcgccaccccatccacatcaaggacggcgactggaacgagttccggcgcaagctgaccttctacctgaagaccctcgagaacgcccaggcccagcagaccacgctgtccctggccatcttctga

SEQ ID NO: 4564 - RNA, 459 nt, synthetic construct
  misc_feature 1..459: note = derived and/or modified sequence opt2 fromIL-3__Homo_sapiens__AAH66274
  source 1..459: mol_type = other RNA
atgtcccgcctccccgtcctcctcctcctccagctcctcgtccgccccggcctccaggcccccatgacccagaccacctccctcaagacctcctgggtcaactgctccaacatgatcgacgagatcatcacccgcctcaagcagccccccctccccctcctcgacttcaacaacctcaacggcgaggaccaggacatcctcatggagaacaacctccgccgccccaacctcgaggccttcaaccgcgccgtcaagtccctccagaacgcctccgccatcgagtccatcctcaagaacctcctcccctgcctccccctcgccaccgccgcccccacccgccaccccatccacatcaaggacggcgactggaacgagttccgccgcaagctcaccttctacctcaagaccctcgagaacgcccaggcccagcagaccaccctctccctcgccatcttctga

SEQ ID NO: 4565 - RNA, 459 nt, synthetic construct
  misc_feature 1..459: note = derived and/or modified sequence opt3 fromIL-3__Homo_sapiens__AAH66274
  source 1..459: mol_type = other RNA
atgagcagactgcccgtgctccttctgttgcagttactggtcaggcctggcctacaagccccaatgacccagacaacttccctcaagacgtcttgggttaactgctcaaatatgatcgacgagattataacccggctgaaacagccgccccttcctctgttggatttcaacaatctcaacggggaagaccaggatatcctgatggagaataacctgcgccgaccaaatctcgaggcttttaaccgtgcagtgaagagtttacaaaatgccagcgcgattgaatccatcctgaaaaaccttttgccctgtctgcctctagctacagccgcaccaactagacaccccattcatatcaaggacggagattggaatgagttcaggcggaaactcaccttttacctgaagacacttgaaaacgcccaggctcagcagaccactctgtctttggcaatattctga

SEQ ID NO: 4566 - RNA, 459 nt, synthetic construct
  misc_feature 1..459: note = derived and/or modified sequence opt4 fromIL-3__Homo_sapiens__AAH66274
  source 1..459: mol_type = other RNA
atgagcagactgcccgtgctgctgctgctgcagctgctggtgagacccggcctgcaggcccccatgacccagaccaccagcctgaagaccagctgggtgaactgcagcaacatgatcgacgagatcatcaccagactgaagcagccccccctgcccctgctggacttcaacaacctgaacggcgaggaccaggacatcctgatggagaacaacctgagaagacccaacctggaggccttcaacagagccgtgaagagcctgcagaacgccagcgccatcgagagcatcctgaagaacctgctgccctgcctgcccctggccaccgccgcccccaccagacaccccatccacatcaaggacggcgactggaacgagttcagaagaaagctgaccttctacctgaagaccctggagaacgcccaggcccagcagaccaccctgagcctggccatcttctga

SEQ ID NO: 4567 - RNA, 459 nt, synthetic construct
  misc_feature 1..459: note = derived and/or modified sequence opt5 fromIL-3__Homo_sapiens__AAH66274
  source 1..459: mol_type = other RNA
atgagcagactgcccgtgctcctgcttctgcagctcctggtccggcctggccttcaagccccgatgacccagacaacgtccctgaagacctcttgggttaactgcagcaatatgatcgacgagattatcacacgcctcaaacagccccctctgcccctgctcgatttcaacaatctgaacggggaagaccaggatattcttatggagaataacctgagacggcctaatctcgaggcttttaaccgcgccgtgaagtccctgcaaaatgcgtctgctatcgaaagcattcttaaaaacctgctcccctgtctgcctctggccaccgccgctccgacaagacaccccatccatatcaaggacggagattggaatgagttccggcgcaaactcaccttttacctgaagacacttgaaaacgcccaggctcagcagaccacgctgtccctcgccattttctga

SEQ ID NO: 4568 - RNA, 459 nt, synthetic construct
  misc_feature 1..459: note = derived and/or modified sequence opt6 fromIL-3__Homo_sapiens__AAH66274
  source 1..459: mol_type = other RNA
atgtcaagactaccagtactactactactacaactactagtaagaccaggactacaagcaccaatgacccaaacaacatcactaaaaacatcctgggtaaactgctcaaacatgatagacgaaataataacaagactaaaacaaccaccactaccactactagacttcaacaacctaaacggagaagaccaagacatactaatggaaaacaacctaagaagaccaaacctagaagcattcaaccgagcagtaaaatcactacaaaacgcatcagcaatagaatccatactaaaaaacctactaccatgcctaccactagcaacagcagcaccaacaagacacccaatacacataaaagacggagactggaacgaattcagaagaaaactaacattctacctaaaaacactagaaaacgcacaagcacaacaaacaacactctcactagcaatattctaa

SEQ ID NO: 4569 - protein, 137 aa, synthetic construct
  REGION 1..137: note = IL-4__Homo_sapiens__P05112-2
MGLTSQLLPPLFFLLACAGNFVHGHKCDITLQEIIKTLNSLTEQKNTTEKETFCRAATVLRQFYSHHEKDTRCLGATAQQFHRHKQLIRFLKRLDRNLWGLAGLNSCPVKEANQSTLENFLERLKTIMREKYSKCSS

SEQ ID NO: 4570 - RNA, 414 nt, synthetic construct
  misc_feature 1..414: note = IL-4__Homo_sapiens__CCDS4159.1
  source 1..414: mol_type = other RNA
atgggtctcacctcccaactgcttccccctctgttcttcctgctagcatgtgccggcaactttgtccacggacacaagtgcgatatcaccttacaggagatcatcaaaactttgaacagcctcacagagcagaagaacacaactgagaaggaaaccttctgcagggctgcgactgtgctccggcagttctacagccaccatgagaaggacactcgctgcctgggtgcgactgcacagcagttccacaggcacaagcagctgatccgattcctgaaacggctcgacaggaacctctggggcctggcgggcttgaattcctgtcctgtgaaggaagccaaccagagtacgttggaaaacttcttggaaaggctaaagacgatcatgagagagaaatattcaaagtgttcgagctga

SEQ ID NO: 4571 - RNA, 414 nt, synthetic construct
  misc_feature 1..414: note = derived and/or modified sequence opt1 fromIL-4__Homo_sapiens__CCDS4159.1
  source 1..414: mol_type = other RNA
atgggcctgaccagccagctcctgcccccgctgttcttcctcctggcctgcgccgggaacttcgtgcacggccacaagtgcgacatcaccctgcaggagatcatcaagacgctcaactccctgaccgagcagaagaacaccaccgagaaggagacgttctgccgcgcggccaccgtcctgcggcagttctacagccaccacgagaaggacacccgctgcctcggggccaccgcccagcagttccaccggcacaagcagctgatccgcttcctgaagcggctcgaccgcaacctgtggggcctggccgggctcaactcctgccccgtgaaggaggcgaaccagagcacgctggagaacttcctggagcggctcaagaccatcatgcgcgagaagtactccaagtgcagctcctga

SEQ ID NO: 4572 - RNA, 414 nt, synthetic construct
  misc_feature 1..414: note = derived and/or modified sequence opt2 fromIL-4__Homo_sapiens__CCDS4159.1
  source 1..414: mol_type = other RNA
atgggcctcacctcccagctcctcccccccctcttcttcctcctcgcctgcgccggcaacttcgtccacggccacaagtgcgacatcaccctccaggagatcatcaagaccctcaactccctcaccgagcagaagaacaccaccgagaaggagaccttctgccgcgccgccaccgtcctccgccagttctactcccaccacgagaaggacacccgctgcctcggcgccaccgcccagcagttccaccgccacaagcagctcatccgcttcctcaagcgcctcgaccgcaacctctggggcctcgccggcctcaactcctgccccgtcaaggaggccaaccagtccaccctcgagaacttcctcgagcgcctcaagaccatcatgcgcgagaagtactccaagtgctcctcctga

SEQ ID NO: 4573 - RNA, 414 nt, synthetic construct
  misc_feature 1..414: note = derived and/or modified sequence opt3 fromIL-4__Homo_sapiens__CCDS4159.1
  source 1..414: mol_type = other RNA
atgggcctgaccagccagctccttccccctctgttctttttgttagcctgcgctgggaacttcgtgcacggacataagtgtgacatcacactgcaagagattataaaaactctaaattccctcacggaacagaagaacaccacagagaaagaaactttttgcagagcagccaccgtcctgaggcagttctactctcaccatgagaaggatacacggtgtcttggtgcgaccgctcagcaatttcaccgccataaacagctgatccgattcttgaagcgtctcgacagaaatctgtggggcctggccgggctcaactcatgcccagttaaggaagcaaatcagagtactttagagaactttctggagaggcttaaaacaattatgcgggaaaagtatagcaaatgttcctcttga

SEQ ID NO: 4574 - RNA, 414 nt, synthetic construct
  misc_feature 1..414: note = derived and/or modified sequence opt4 fromIL-4__Homo_sapiens__CCDS4159.1
  source 1..414: mol_type = other RNA
atgggcctgaccagccagctgctgccccccctgttcttcctgctggcctgcgccggcaacttcgtgcacggccacaagtgcgacatcaccctgcaggagatcatcaagaccctgaacagcctgaccgagcagaagaacaccaccgagaaggagaccttctgcagagccgccaccgtgctgagacagttctacagccaccacgagaaggacaccagatgcctgggcgccaccgcccagcagttccacagacacaagcagctgatcagattcctgaagagactggacagaaacctgtggggcctggccggcctgaacagctgccccgtgaaggaggccaaccagagcaccctggagaacttcctggagagactgaagaccatcatgagagagaagtacagcaagtgcagcagctga

SEQ ID NO: 4575 - RNA, 414 nt, synthetic construct
  misc_feature 1..414: note = derived and/or modified sequence opt5 fromIL-4__Homo_sapiens__CCDS4159.1
  source 1..414: mol_type = other RNA
atgggcctgaccagccagctcctgccccctcttttctttctgctcgcctgcgctgggaacttcgtgcacggacataagtgtgacatcacactgcaagagattatcaaaacgcttaattccctgaccgaacagaagaacacaaccgagaaagaaacattttgcagagccgcgaccgtcctccggcagttctactctcaccatgagaaggatacacgctgtctgggcgctaccgcccagcaatttcacagacataaacagctgattcggttcctcaagcgcctggacagaaatctttgggggctggccggactcaacagctgcccggttaaggaagctaatcagtccacgctggagaactttcttgagcggctgaaaaccatcatgcgcgaaaagtattctaaatgtagctcctga

SEQ ID NO: 4576 - RNA, 414 nt, synthetic construct
  misc_feature 1..414: note = derived and/or modified sequence opt6 fromIL-4__Homo_sapiens__CCDS4159.1
  source 1..414: mol_type = other RNA
atgggactaacaagccaactactaccaccactattcttcctactcgcatgcgcaggaaacttcgtacacggacacaaatgcgacataacactacaagaaataataaaaacactaaactcactaacagaacaaaaaaacacaacagaaaaagaaacattctgcagagcagcaacagtattaagacaattctacagccaccacgaaaaagacacaagatgcctaggagcaacagcacaacaattccacagacacaaacaactaatacgattcctcaaaagactagacagaaacctatggggactagcaggactaaactcatgcccagtaaaagaagcaaaccaaagcacactagaaaactttctagaaagactaaaaacaataatgagagaaaaatacagcaaatgctcaagctaa

SEQ ID NO: 4577 - protein, 153 aa, synthetic construct [sequence omitted]

SEQ ID NO: 4578 - RNA, 462 nt, synthetic construct
  misc_feature 1..462: note = IL-4__Homo_sapiens__CCDS4158.1
  source 1..462: mol_type = other RNA
atgggtctcacctcccaactgcttccccctctgttcttcctgctagcatgtgccggcaactttgtccacggacacaagtgcgatatcaccttacaggagatcatcaaaactttgaacagcctcacagagcagaagactctgtgcaccgagttgaccgtaacagacatctttgctgcctccaagaacacaactgagaaggaaaccttctgcagggctgcgactgtgctccggcagttctacagccaccatgagaaggacactcgctgcctgggtgcgactgcacagcagttccacaggcacaagcagctgatccgattcctgaaacggctcgacaggaacctctggggcctggcgggcttgaattcctgtcctgtgaaggaagccaaccagagtacgttggaaaacttcttggaaaggctaaagacgatcatgagagagaaatattcaaagtgttcgagctga

SEQ ID NO: 4579 - RNA, 462 nt, synthetic construct
  misc_feature 1..462: note = derived and/or modified sequence opt1 fromIL-4__Homo_sapiens__CCDS4158.1
  source 1..462: mol_type = other RNA
atgggcctgaccagccagctcctgcccccgctgttcttcctcctggcctgcgccgggaacttcgtgcacggccacaagtgcgacatcaccctgcaggagatcatcaagacgctcaactccctgaccgagcagaagaccctgtgcaccgagctcacggtcaccgacatcttcgcggccagcaagaacaccaccgagaaggagacgttctgccgcgccgccaccgtgctgcggcagttctactcccaccacgagaaggacacccgctgcctgggggccaccgcgcagcagttccaccggcacaagcagctcatccgcttcctgaagcggctggaccgcaacctctggggcctggccgggctgaacagctgccccgtgaaggaggccaaccagtccacgctcgagaacttcctggagcggctgaagaccatcatgcgcgagaagtacagcaagtgctccagctga

SEQ ID NO: 4580 - RNA, 462 nt, synthetic construct
  misc_feature 1..462: note = derived and/or modified sequence opt2 fromIL-4__Homo_sapiens__CCDS4158.1
  source 1..462: mol_type = other RNA
atgggcctcacctcccagctcctcccccccctcttcttcctcctcgcctgcgccggcaacttcgtccacggccacaagtgcgacatcaccctccaggagatcatcaagaccctcaactccctcaccgagcagaagaccctctgcaccgagctcaccgtcaccgacatcttcgccgcctccaagaacaccaccgagaaggagaccttctgccgcgccgccaccgtcctccgccagttctactcccaccacgagaaggacacccgctgcctcggcgccaccgcccagcagttccaccgccacaagcagctcatccgcttcctcaagcgcctcgaccgcaacctctggggcctcgccggcctcaactcctgccccgtcaaggaggccaaccagtccaccctcgagaacttcctcgagcgcctcaagaccatcatgcgcgagaagtactccaagtgctcctcctga

SEQ ID NO: 4581 - RNA, 462 nt, synthetic construct
  misc_feature 1..462: note = derived and/or modified sequence opt3 fromIL-4__Homo_sapiens__CCDS4158.1
  source 1..462: mol_type = other RNA
atgggcctgaccagccagctccttccccctctgttctttttgttagcctgcgctgggaacttcgtgcacggacataagtgcgacatcacactgcaagagattataaaaactctaaattccctcacggaacagaagaccctgtgcacagagcttactgtcaccgatatctttgcagcctctaaaaacacaaccgaaaaggagactttctgtagagcggctacagttctgaggcagttttactcacaccatgaaaaagacacccggtgcttgggtgccacggcacagcaattccaccgccataagcagctcattcgatttctgaagcgtctggatagaaatctctggggcttagccgggctgaacagttgtccagtgaaagaggctaatcagagcactcttgagaacttcttggaaaggctgaagaccatcatgcgggagaaatattccaagtgttcttcgtga

SEQ ID NO: 4582 - RNA, 462 nt, synthetic construct
  misc_feature 1..462: note = derived and/or modified sequence opt4 fromIL-4__Homo_sapiens__CCDS4158.1
  source 1..462: mol_type = other RNA
atgggcctgaccagccagctgctgccccccctgttcttcctgctggcctgcgccggcaacttcgtgcacggccacaagtgcgacatcaccctgcaggagatcatcaagaccctgaacagcctgaccgagcagaagaccctgtgcaccgagctgaccgtgaccgacatcttcgccgccagcaagaacaccaccgagaaggagaccttctgcagagccgccaccgtgctgagacagttctacagccaccacgagaaggacaccagatgcctgggcgccaccgcccagcagttccacagacacaagcagctgatcagattcctgaagagactggacagaaacctgtggggcctggccggcctgaacagctgccccgtgaaggaggccaaccagagcaccctggagaacttcctggagagactgaagaccatcatgagagagaagtacagcaagtgcagcagctga

SEQ ID NO: 4583 - RNA, 462 nt, synthetic construct
  misc_feature 1..462: note = derived and/or modified sequence opt5 fromIL-4__Homo_sapiens__CCDS4158.1
  source 1..462: mol_type = other RNA
atgggcctgaccagccagctcctgccccctcttttctttctgctcgcctgcgctgggaacttcgtgcacggacataagtgtgacatcacactgcaagagattatcaaaacgcttaattccctgaccgaacagaagacactctgcaccgagctgacagtcaccgatatttttgccgcgtctaaaaacacaaccgaaaaggagacgttctgtagagctgccaccgttctgcggcagttttacagccaccatgaaaaagacacacgctgcctcggcgccaccgctcagcaattccacagacataagcagctgatccggtttcttaagcgcctggatagaaatctctgggggctggccggacttaactcctgtccggtgaaagaggctaatcagtctacactggagaacttcctcgaacggctgaagaccattatgcgcgagaaatatagcaagtgctcctcttga

SEQ ID NO: 4584 - RNA, 462 nt, synthetic construct
  misc_feature 1..462: note = derived and/or modified sequence opt6 fromIL-4__Homo_sapiens__CCDS4158.1
  source 1..462: mol_type = other RNA
atgggactaacatcacaactactaccaccactattcttcctactagcatgcgcaggaaacttcgtccacggacacaaatgcgacataacactacaagaaataataaaaacactaaactcactaacagaacaaaaaacactatgcacagaactaacagtaacagacatattcgcagcatcaaaaaacacaacagaaaaagaaacattctgcagagcagcaacagtattacgacaattctactcacaccacgaaaaagacacaagatgcctaggagcaacagcacaacaattccaccgacacaaacaactaataagattcctaaaaagactagacagaaacctatggggactagcaggattaaactcatgcccagtaaaagaagcaaaccaaagcacactagaaaacttcctagaaagactaaaaacaataatgagagaaaaatactcaaaatgctcatcataa

SEQ ID NO: 4585 - protein, 134 aa, synthetic construct
  REGION 1..134: note = IL-5__Homo_sapiens__P05113
MRMLLHLSLLALGAAYVYAIPTEIPTSALVKETLALLSTHRTLLIANETLRIPVPVHKNHQLCTEEIFQGIGTLESQTVQGGTVERLFKNLSLIKKYIDGQKKKCGEERRRVNQFLDYLQEFLGVMNTEWIIES

SEQ ID NO: 4586 - RNA, 405 nt, synthetic construct
  misc_feature 1..405: note = IL-5__Homo_sapiens__AAA74469
  source 1..405: mol_type = other RNA
atgaggatgcttctgcatttgagtttgctagctcttggagctgcctacgtgtatgccatccccacagaaattcccacaagtgcattggtgaaagagaccttggcactgctttctactcatcgaactctgctgatagccaatgagactctgaggattcctgttcctgtacataaaaatcaccaactgtgcactgaagaaatctttcagggaataggcacactggagagtcaaactgtgcaagggggtactgtggaaagactattcaaaaacttgtccttaataaagaaatacattgacggccaaaaaaaaaagtgtggagaagaaagacggagagtaaaccaattcctagactacctgcaagagtttcttggtgtaatgaacaccgagtggataatagaaagttga

SEQ ID NO: 4587 - RNA, 405 nt, synthetic construct
  misc_feature 1..405: note = derived and/or modified sequence opt1 fromIL-5__Homo_sapiens__AAA74469
  source 1..405: mol_type = other RNA
atgcgcatgctgctccacctgagcctgctcgccctgggcgccgcgtacgtgtacgccatccccaccgagatcccgacctccgccctggtcaaggagacgctcgccctgctgagcacccaccggaccctcctgatcgccaacgagaccctgcgcatccccgtgcccgtgcacaagaaccaccagctctgcacggaggagatcttccaggggatcggcaccctggagtcccagaccgtccagggcgggaccgtggagcggctgttcaagaacctcagcctgatcaagaagtacatcgacgggcagaagaagaagtgcggcgaggagcgccggcgcgtgaaccagttcctggactacctccaggagttcctgggcgtcatgaacacggagtggatcatcgagtcctga

SEQ ID NO: 4588 - RNA, 405 nt, synthetic construct
  misc_feature 1..405: note = derived and/or modified sequence opt2 fromIL-5__Homo_sapiens__AAA74469
  source 1..405: mol_type = other RNA
atgcgcatgctcctccacctctccctcctcgccctcggcgccgcctacgtctacgccatccccaccgagatccccacctccgccctcgtcaaggagaccctcgccctcctctccacccaccgcaccctcctcatcgccaacgagaccctccgcatccccgtccccgtccacaagaaccaccagctctgcaccgaggagatcttccagggcatcggcaccctcgagtcccagaccgtccagggcggcaccgtcgagcgcctcttcaagaacctctccctcatcaagaagtacatcgacggccagaagaagaagtgcggcgaggagcgccgccgcgtcaaccagttcctcgactacctccaggagttcctcggcgtcatgaacaccgagtggatcatcgagtcctga

SEQ ID NO: 4589 - RNA, 405 nt, synthetic construct
  misc_feature 1..405: note = derived and/or modified sequence opt3 fromIL-5__Homo_sapiens__AAA74469
  source 1..405: mol_type = other RNA
atgagaatgctgctccaccttagcctgttggccttaggcgctgcatacgtgtatgccatccccaccgagattcctacatccgcgctggtcaaggaaactctagctctcctgtctacgcataggacccttctgatagccaacgagacattgcggatcccagttccggtgcacaaaaatcatcagctctgcactgaagagattttccaagggatcggaaccctggaatcacagacagtacagggtggcaccgtggagcgcctgtttaagaacctcagtttaattaaaaagtacatcgacgggcagaaaaagaagtgtggagaggaacgacgtagagtcaatcaattcctggattatcttcaggagtttttgggcgtgatgaacactgaatggataatcgagagctga

SEQ ID NO: 4590 - RNA, 405 nt, synthetic construct
  misc_feature 1..405: note = derived and/or modified sequence opt4 fromIL-5__Homo_sapiens__AAA74469
  source 1..405: mol_type = other RNA
atgagaatgctgctgcacctgagcctgctggccctgggcgccgcctacgtgtacgccatccccaccgagatccccaccagcgccctggtgaaggagaccctggccctgctgagcacccacagaaccctgctgatcgccaacgagaccctgagaatccccgtgcccgtgcacaagaaccaccagctgtgcaccgaggagatcttccagggcatcggcaccctggagagccagaccgtgcagggcggcaccgtggagagactgttcaagaacctgagcctgatcaagaagtacatcgacggccagaagaagaagtgcggcgaggagagaagaagagtgaaccagttcctggactacctgcaggagttcctgggcgtgatgaacaccgagtggatcatcgagagctga

SEQ ID NO: 4591 - RNA, 405 nt, synthetic construct
  misc_feature 1..405: note = derived and/or modified sequence opt5 fromIL-5__Homo_sapiens__AAA74469
  source 1..405: mol_type = other RNA
atgagaatgctgctccacctgagccttctggccctcggcgctgcctacgtgtatgcgatccccaccgagattcctacatccgctctggtcaaggaaacgcttgccctgctctctacccatcggacactgctgatcgccaacgagaccctccgcattccggttcccgtgcacaaaaatcatcagctgtgcacagaagagatcttccaagggattggaacccttgaaagccagacagtgcagggcgggaccgtcgagagactgtttaagaacctctccctgatcaaaaagtacatcgacggacagaaaaagaagtgtggcgaggaacggcgcagagtgaatcaattccttgattatctgcaggagtttctcggggttatgaacacggaatggattatcgagtcttga

SEQ ID NO: 4592 - RNA, 405 nt, synthetic construct
  misc_feature 1..405: note = derived and/or modified sequence opt6 fromIL-5__Homo_sapiens__AAA74469
  source 1..405: mol_type = other RNA
atgagaatgctactacacctatcactactagcactaggagcagcatacgtatacgcaataccaacagaaataccaacatcagcactagtcaaagaaacactagcactactatcaacacacagaacactattaatagcaaacgaaaccctaagaataccagtaccagtacacaaaaaccaccaactatgcacagaagaaatattccaaggaataggaacactagaatcacaaacagtacaaggaggaacagtagaaagactattcaaaaacctatcattaataaaaaaatacatagacggacaaaaaaaaaaatgcggagaagaaagacgaagagtaaaccaattcctagactacttacaagaattcctaggagtaatgaacacagaatggataatagaatcataa

SEQ ID NO: 4593 - protein, 212 aa, synthetic construct
  REGION 1..212: note = IL-6__Homo_sapiens__P05231
MNSFSTSAFGPVAFSLGLLLVLPAAFPAPVPPGEDSKDVAAPHRQPLTSSERIDKQIRYILDGISALRKETCNKSNMCESSKEALAENNLNLPKMAEKDGCFQSGFNEETCLVKIITGLLEFEVYLEYLQNRFESSEEQARAVQMSTKVLIQFLQKKAKNLDAITTPDPTTNASLLTKLQAQNQWLQDMTTHLILRSFKEFLQSSLRALRQM

SEQ ID NO: 4594 - RNA, 639 nt, synthetic construct
  misc_feature 1..639: note = IL-6__Homo_sapiens__AAA52728
  source 1..639: mol_type = other RNA
atgaactccttctccacaagcgccttcggtccagttgccttctccctggggctgctcctggtgttgcctgctgccttccctgccccagtacccccaggagaagattccaaagatgtagccgccccacacagacagccactcacctcttcagaacgaattgacaaacaaattcggtacatcctcgacggcatctcagccctgagaaaggagacatgtaacaagagtaacatgtgtgaaagcagcaaagaggcactggcagaaaacaacctgaaccttccaaagatggctgaaaaagatggatgcttccaatctggattcaatgaggagacttgcctggtgaaaatcatcactggtcttttggagtttgaggtatacctagagtacctccagaacagatttgagagtagtgaggaacaagccagagctgtccagatgagtacaaaagtcctgatccagttcctgcagaaaaaggcaaagaatctagatgcaataaccacccctgacccaaccacaaatgccagcctgctgacgaagctgcaggcacagaaccagtggctgcaggacatgacaactcatctcattctgcgcagctttaaggagttcctgcagtccagcctgagggctcttcggcaaatgtag

SEQ ID NO: 4595 - RNA, 639 nt, synthetic construct
  misc_feature 1..639: note = derived and/or modified sequence opt1 fromIL-6__Homo_sapiens__AAA52728
  source 1..639: mol_type = other RNA
atgaacagcttctccaccagcgccttcggccccgtggccttctccctggggctcctgctggtcctcccggcggccttccccgcccccgtgcccccgggcgaggacagcaaggacgtggccgcgccccaccgccagcccctgacctccagcgagcggatcgacaagcagatccgctacatcctggacgggatctccgccctccggaaggagacgtgcaacaagagcaacatgtgcgagtccagcaaggaggccctggccgagaacaacctgaacctccccaagatggccgagaaggacggctgcttccagtccgggttcaacgaggagacctgcctggtcaagatcatcaccggcctgctcgagttcgaggtgtacctggagtacctgcagaaccgcttcgagagctccgaggagcaggcgcgggccgtgcagatgagcaccaaggtcctcatccagttcctgcagaagaaggccaagaacctggacgccatcacgaccccggaccccaccaccaacgcctccctcctgacgaagctgcaggcgcagaaccagtggctccaggacatgaccacccacctgatcctgcgcagcttcaaggagttcctccagtccagcctgcgggccctgcgccagatgtga

SEQ ID NO: 4596 - RNA, 639 nt, synthetic construct
  misc_feature 1..639: note = derived and/or modified sequence opt2 fromIL-6__Homo_sapiens__AAA52728
  source 1..639: mol_type = other RNA
atgaactccttctccacctccgccttcggccccgtcgccttctccctcggcctcctcctcgtcctccccgccgccttccccgcccccgtcccccccggcgaggactccaaggacgtcgccgccccccaccgccagcccctcacctcctccgagcgcatcgacaagcagatccgctacatcctcgacggcatctccgccctccgcaaggagacctgcaacaagtccaacatgtgcgagtcctccaaggaggccctcgccgagaacaacctcaacctccccaagatggccgagaaggacggctgcttccagtccggcttcaacgaggagacctgcctcgtcaagatcatcaccggcctcctcgagttcgaggtctacctcgagtacctccagaaccgcttcgagtcctccgaggagcaggcccgcgccgtccagatgtccaccaaggtcctcatccagttcctccagaagaaggccaagaacctcgacgccatcaccacccccgaccccaccaccaacgcctccctcctcaccaagctccaggcccagaaccagtggctccaggacatgaccacccacctcatcctccgctccttcaaggagttcctccagtcctccctccgcgccctccgccagatgtga

SEQ ID NO: 4597 - RNA, 639 nt, synthetic construct
  misc_feature 1..639: note = derived and/or modified sequence opt3 fromIL-6__Homo_sapiens__AAA52728
  source 1..639: mol_type = other RNA
atgaacagcttctccacctctgcctttggccccgtggctttctcactggggctccttctggtcttgcctgcagcctttccagcgccggttccccctggagaggacagtaaggatgtggctgccccacacagacagcccttaacaagctccgaaaggatcgacaaacaaattcggtacatactggatggtatctctgcactacgcaaggagacttgcaataaatcgaacatgtgtgaatcaagcaaggaggccctcgctgaaaataacctgaatcttcctaaaatggcagagaaggacggctgcttccagagtgggtttaacgaggaaacgtgtctggtaaagattatcaccggattgctcgagttcgaagtgtatctggagtacctgcagaatcgatttgagtcctctgaagaacaggcccgtgctgtccaaatgagcacaaaagtgctcattcagttcttacagaagaaagccaagaacctggatgcgatcactaccccagaccccacaaccaatgcatcccttttgactaaactgcaggcccaaaaccagtggctacaggatatgacaacccatctcatactgagatcatttaaggagttccttcagagtagcctgagggctttgcggcaaatgtga

SEQ ID NO: 4598 - RNA, 639 nt, synthetic construct
  misc_feature 1..639: note = derived and/or modified sequence opt4 fromIL-6__Homo_sapiens__AAA52728
  source 1..639: mol_type = other RNA
atgaacagcttcagcaccagcgccttcggccccgtggccttcagcctgggcctgctgctggtgctgcccgccgccttccccgcccccgtgccccccggcgaggacagcaaggacgtggccgccccccacagacagcccctgaccagcagcgagagaatcgacaagcagatcagatacatcctggacggcatcagcgccctgagaaaggagacctgcaacaagagcaacatgtgcgagagcagcaaggaggccctggccgagaacaacctgaacctgcccaagatggccgagaaggacggctgcttccagagcggcttcaacgaggagacctgcctggtgaagatcatcaccggcctgctggagttcgaggtgtacctggagtacctgcagaacagattcgagagcagcgaggagcaggccagagccgtgcagatgagcaccaaggtgctgatccagttcctgcagaagaaggccaagaacctggacgccatcaccacccccgaccccaccaccaacgccagcctgctgaccaagctgcaggcccagaaccagtggctgcaggacatgaccacccacctgatcctgagaagcttcaaggagttcctgcagagcagcctgagagccctgagacagatgtga

SEQ ID NO: 4599 - RNA, 639 nt, synthetic construct
  misc_feature 1..639: note = derived and/or modified sequence opt5 fromIL-6__Homo_sapiens__AAA52728
  source 1..639: mol_type = other RNA
atgaacagcttctccacctctgcctttggccccgtggctttcagcctggggctcctgcttgtcctgcctgccgcgtttccggctcccgttcctcccggagaggactccaaggatgtggccgcccctcacagacagcccctcacatctagcgaacggatcgacaaacaaattcgctacatcctggatggcatttccgctcttagaaaggagacgtgcaataaatctaacatgtgtgaaagctccaaggaggccctggctgaaaataacctcaatctgcctaaaatggccgagaaggacgggtgcttccagagcggatttaacgaggaaacctgtctggtgaagatcattacaggcctcctggagttcgaagtctatcttgagtacctgcagaatcggtttgagtcttccgaagaacaggcgcgcgccgtgcaaatgagcaccaaagttctcatccagttcctgcagaagaaagctaagaaccttgatgccatcacaaccccggaccccacaaccaatgcttctctgctcacgaaactgcaggcccaaaaccagtggctgcaggatatgaccacacatctcattctgagatcctttaaggagttccttcagagctctctgcgggcgctccgccaaatgtga

SEQ ID NO: 4600 - RNA, 639 nt, synthetic construct
  misc_feature 1..639: note = derived and/or modified sequence opt6 fromIL-6__Homo_sapiens__AAA52728
  source 1..639: mol_type = other RNA
atgaactccttctcaacatcagcattcggaccagtagcattctccctcggactattactagtattacccgcagcattcccagcaccagtacccccaggagaagattcaaaagatgtagcagcaccacatcgacaaccactaacatcatccgaaagaatagacaaacaaataagatacatcctagatggaatctccgctctaagaaaagaaacctgcaataaatccaacatgtgcgaatcatcaaaagaagcattagcagaaaacaacctaaatctaccaaaaatggcagaaaaagacggatgcttccaatcaggattcaacgaagaaacatgcctagtaaaaataataacaggattattagaattcgaagtatacctagaatacctacaaaacagattcgaatcttcagaagaacaagcaagagcagtacaaatgtccaccaaagtactaatacaattcttacaaaaaaaagcaaaaaacttagacgcaataacaaccccagaccccacaacaaacgcatcactactcacaaaattacaagcccaaaaccaatggctacaagacatgacaacacacttaatactaagatcattcaaagaattcctacaatcctcactaagagcactaagacaaatgtaa

SEQ ID NO: 4601 - protein, 177 aa, synthetic construct [sequence omitted]

SEQ ID NO: 4602 - RNA, 534 nt, synthetic construct
  misc_feature 1..534: note = IL-7__Homo_sapiens__BAF84227
  source 1..534: mol_type = other RNA
atgttccatgtttcttttaggtatatctttggacttcctcccctgatccttgttctgttgccagtagcatcatctgattgtgatattgaaggtaaagatagcaaacaatatgagagtgttctaatggtcagcatcgatcaattattggacagcatgaaagaaattggtagcaattgcctgaataatgaatttaacttttttaaaagacatatctgtgatgctaataaggaaggtatgtttttattccgtgctgctcgcaagttgaggcaatttcttaaaatgaatagcactggtgattttgatctccacttattaaaagtttcagaaggcacaacaatactgttgaactgcactggccaggttaaaggaagaaaaccagctgccctgggtgaagcccaaccaacaaagagtttggaagaaaataaatctttaaaggaacagaaaaaactgaatgacttgtgtttcctaaagagactattacaagagataaaaacttgttggaataaaattttgatgggcactaaagaacactga

SEQ ID NO: 4603 - RNA, 534 nt, synthetic construct
  misc_feature 1..534: note = derived and/or modified sequence opt1 fromIL-7__Homo_sapiens__BAF84227
  source 1..534: mol_type = other RNA
atgttccacgtgagcttccgctacatcttcggcctgcccccgctcatcctggtcctgctccccgtggcctccagcgactgcgacatcgaggggaaggactccaagcagtacgagagcgtgctgatggtctccatcgaccagctgctcgacagcatgaaggagatcggctccaactgcctgaacaacgagttcaacttcttcaagcggcacatctgcgacgccaacaaggaggggatgttcctgttccgcgcggcccggaagctccgccagttcctgaagatgaacagcaccggcgacttcgacctgcacctcctgaaggtgtccgaggggaccacgatcctgctcaactgcaccggccaggtgaagggccggaagcccgccgccctgggggaggcccagcccaccaagagcctggaggagaacaagtccctcaaggagcagaagaagctgaacgacctgtgcttcctcaagcgcctgctgcaggagatcaagacctgctggaacaagatcctcatgggcacgaaggagcactga

SEQ ID NO: 4604 - RNA, 534 nt, synthetic construct
  misc_feature 1..534: note = derived and/or modified sequence opt2 fromIL-7__Homo_sapiens__BAF84227
  source 1..534: mol_type = other RNA
atgttccacgtctccttccgctacatcttcggcctcccccccctcatcctcgtcctcctccccgtcgcctcctccgactgcgacatcgagggcaaggactccaagcagtacgagtccgtcctcatggtctccatcgaccagctcctcgactccatgaaggagatcggctccaactgcctcaacaacgagttcaacttcttcaagcgccacatctgcgacgccaacaaggagggcatgttcctcttccgcgccgcccgcaagctccgccagttcctcaagatgaactccaccggcgacttcgacctccacctcctcaaggtctccgagggcaccaccatcctcctcaactgcaccggccaggtcaagggccgcaagcccgccgccctcggcgaggcccagcccaccaagtccctcgaggagaacaagtccctcaaggagcagaagaagctcaacgacctctgcttcctcaagcgcctcctccaggagatcaagacctgctggaacaagatcctcatgggcaccaaggagcactga

SEQ ID NO: 4605 - RNA, 534 nt, synthetic construct
  misc_feature 1..534: note = derived and/or modified sequence opt3 fromIL-7__Homo_sapiens__BAF84227
  source 1..534: mol_type = other RNA
atgttccacgtgagctttagatacatcttcggcctgccccctctcattcttgtcctgttgccagttgcctcctctgactgcgatatagaggggaaggactcaaaacagtatgaaagtgtgttaatggtaagcatcgatcaactgctagactccatgaaggagattggatctaactgtctcaataacgaatttaatttctttaaaaggcatatctgcgatgctaacaaggagggtatgttcctgtttcgggcagcccgcaaacttcgacagttcctgaagatgaactcgaccggcgactttgatttgcacctcctgaaggtgtcagaagggacaactattctgctcaattgtacgggacaggtcaaaggccgtaagccggcggctttaggtgaggcccagcccaccaaaagcctggaggaaaataagagtcttaaagagcaaaagaagttgaacgacctgtgcttcctaaaaagactcctgcaggaaatcaagacatgttggaataaaatacttatggggactaaggagcattga

SEQ ID NO: 4606 - RNA, 534 nt, synthetic construct
  misc_feature 1..534: note = derived and/or modified sequence opt4 fromIL-7__Homo_sapiens__BAF84227
  source 1..534: mol_type = other RNA
atgttccacgtgagcttcagatacatcttcggcctgccccccctgatcctggtgctgctgcccgtggccagcagcgactgcgacatcgagggcaaggacagcaagcagtacgagagcgtgctgatggtgagcatcgaccagctgctggacagcatgaaggagatcggcagcaactgcctgaacaacgagttcaacttcttcaagagacacatctgcgacgccaacaaggagggcatgttcctgttcagagccgccagaaagctgagacagttcctgaagatgaacagcaccggcgacttcgacctgcacctgctgaaggtgagcgagggcaccaccatcctgctgaactgcaccggccaggtgaagggcagaaagcccgccgccctgggcgaggcccagcccaccaagagcctggaggagaacaagagcctgaaggagcagaagaagctgaacgacctgtgcttcctgaagagactgctgcaggagatcaagacctgctggaacaagatcctgatgggcaccaaggagcactga

SEQ ID NO: 4607 - RNA, 534 nt, synthetic construct
  misc_feature 1..534: note = derived and/or modified sequence opt5 fromIL-7__Homo_sapiens__BAF84227
  source 1..534: mol_type = other RNA
atgttccacgtgagctttagatacatcttcggcctgccccctctcattctggtccttctgccggttgcctcctctgactgcgatatcgaggggaaggacagcaaacagtatgaatccgtgctcatggtgtctattgatcaactgcttgacagcatgaaggagatcggatccaactgtctgaataacgaatttaatttctttaaacggcatatttgcgatgctaacaaggagggcatgttcctctttcgcgccgcgagaaaactgcggcagttcctgaagatgaactctaccggggactttgatctccatctgcttaaggtcagcgaaggaacaacgatcctgctcaattgtaccggccaggtgaaagggcgcaagcccgctgccctgggagaggcccagcctacaaaatcccttgaggaaaataagagcctgaaagagcaaaagaagctcaacgacctgtgcttcctgaaaagactcctgcaggaaatcaagacctgttggaataaaattcttatgggcacaaaggagcactga

SEQ ID NO: 4608 - RNA, 534 nt, synthetic construct
  misc_feature 1..534: note = derived and/or modified sequence opt6 fromIL-7__Homo_sapiens__BAF84227
  source 1..534: mol_type = other RNA
atgttccacgtatcatttagatacatattcggactacccccactaatactagtactactaccagtagcatcatcagactgcgacatagaaggaaaagactccaaacaatacgaaagcgtactaatggtatcaatagatcaactactagactcaatgaaagaaataggatcaaactgcctaaacaacgaattcaacttcttcaaaagacacatctgcgacgcaaacaaagaaggaatgttcctattcagagcagcaagaaaactacgacaattcctaaaaatgaactcaacaggagacttcgacctacacctactaaaagtatcagaaggaacaacaatactattaaactgcacaggacaagtaaaaggaagaaaaccagcagcactaggagaagcacaaccaacaaaatcactagaagaaaacaaaagcctcaaagaacaaaaaaaactaaacgacctatgcttcctaaaaagactattacaagaaataaaaacatgctggaacaaaatactaatgggaacaaaagaacactaa

SEQ ID NO: 4609 - protein, 177 aa, synthetic construct
  REGION 1..177: note = IL-7__Homo_sapiens__P13232
MFHVSFRYIFGLPPLILVLLPVASSDCDIEGKDGKQYESVLMVSIDQLLDSMKEIGSNCLNNEFNFFKRHICDANKEGMFLFRAARKLRQFLKMNSTGDFDLHLLKVSEGTTILLNCTGQVKGRKPAALGEAQPTKSLEENKSLKEQKKLNDLCFLKRLLQEIKTCWNKILMGTKEH

SEQ ID NO: 4610 - RNA, 534 nt, synthetic construct
  misc_feature 1..534: note = IL-7__Homo_sapiens__AAA59156
  source 1..534: mol_type = other RNA
atgttccatgtttcttttaggtatatctttggacttcctcccctgatccttgttctgttgccagtagcatcatctgattgtgatattgaaggtaaagatggcaaacaatatgagagtgttctaatggtcagcatcgatcaattattggacagcatgaaagaaattggtagcaattgcctgaataatgaatttaacttttttaaaagacatatctgtgatgctaataaggaaggtatgtttttattccgtgctgctcgcaagttgaggcaatttcttaaaatgaatagcactggtgattttgatctccacttattaaaagtttcagaaggcacaacaatactgttgaactgcactggccaggttaaaggaagaaaaccagctgccctgggtgaagcccaaccaacaaagagtttggaagaaaataaatctttaaaggaacagaaaaaactgaatgacttgtgtttcctaaagagactattacaagagataaaaacttgttggaataaaattttgatgggcactaaagaacactga

SEQ ID NO: 4611 - RNA, 534 nt, synthetic construct
  misc_feature 1..534: note = derived and/or modified sequence opt1 fromIL-7__Homo_sapiens__AAA59156
  source 1..534: mol_type = other RNA
atgttccacgtgagcttccgctacatcttcggcctgcccccgctcatcctggtcctgctccccgtggcctccagcgactgcgacatcgaggggaaggacggcaagcagtacgagtccgtgctgatggtcagcatcgaccagctgctcgactccatgaaggagatcgggagcaactgcctgaacaacgagttcaacttcttcaagcggcacatctgcgacgccaacaaggagggcatgttcctgttccgcgcggcccggaagctccgccagttcctgaagatgaactccaccggggacttcgacctgcacctcctgaaggtgagcgagggcaccacgatcctgctcaactgcaccggccaggtgaaggggcggaagcccgccgccctgggcgaggcccagcccaccaagtccctggaggagaacaagagcctcaaggagcagaagaagctgaacgacctgtgcttcctcaagcgcctgctgcaggagatcaagacctgctggaacaagatcctcatggggacgaaggagcactga

SEQ ID NO: 4612 - RNA, 534 nt, synthetic construct
  misc_feature 1..534: note = derived and/or modified sequence opt2 fromIL-7__Homo_sapiens__AAA59156
  source 1..534: mol_type = other RNA
atgttccacgtctccttccgctacatcttcggcctcccccccctcatcctcgtcctcctccccgtcgcctcctccgactgcgacatcgagggcaaggacggcaagcagtacgagtccgtcctcatggtctccatcgaccagctcctcgactccatgaaggagatcggctccaactgcctcaacaacgagttcaacttcttcaagcgccacatctgcgacgccaacaaggagggcatgttcctcttccgcgccgcccgcaagctccgccagttcctcaagatgaactccaccggcgacttcgacctccacctcctcaaggtctccgagggcaccaccatcctcctcaactgcaccggccaggtcaagggccgcaagcccgccgccctcggcgaggcccagcccaccaagtccctcgaggagaacaagtccctcaaggagcagaagaagctcaacgacctctgcttcctcaagcgcctcctccaggagatcaagacctgctggaacaagatcctcatgggcaccaaggagcactga

SEQ ID NO: 4613 - RNA, 534 nt, synthetic construct
  misc_feature 1..534: note = derived and/or modified sequence opt3 fromIL-7__Homo_sapiens__AAA59156
  source 1..534: mol_type = other RNA
atgttccacgtgagctttagatacatcttcggcctgccccctctcattcttgtcctgttgccagttgcctcctctgactgcgatatagaggggaaggacggaaaacagtatgaatcagtgttaatggtaagtatcgatcaactgctagacagcatgaaggagattggttccaactgtctcaataacgaatttaatttctttaaaaggcatatctgcgatgctaacaaggagggcatgttcctgtttcgggcagcccgcaaacttcgacagttcctgaagatgaactctaccggggactttgatttgcacctcctgaaggtgtcggaaggaacaactattctgctcaattgtacgggccaggtcaaaggtcgtaagccggcggctttaggggaggcccagcccaccaaatcactggaggaaaataagagccttaaagagcaaaagaagttgaacgacctgtgcttcctaaaaagactcctgcaggaaatcaagacatgttggaataaaatacttatgggaactaaggagcattga

SEQ ID NO: 4614 - RNA, 534 nt, synthetic construct
  misc_feature 1..534: note = derived and/or modified sequence opt4 fromIL-7__Homo_sapiens__AAA59156
  source 1..534: mol_type = other RNA
atgttccacgtgagcttcagatacatcttcggcctgccccccctgatcctggtgctgctgcccgtggccagcagcgactgcgacatcgagggcaaggacggcaagcagtacgagagcgtgctgatggtgagcatcgaccagctgctggacagcatgaaggagatcggcagcaactgcctgaacaacgagttcaacttcttcaagagacacatctgcgacgccaacaaggagggcatgttcctgttcagagccgccagaaagctgagacagttcctgaagatgaacagcaccggcgacttcgacctgcacctgctgaaggtgagcgagggcaccaccatcctgctgaactgcaccggccaggtgaagggcagaaagcccgccgccctgggcgaggcccagcccaccaagagcctggaggagaacaagagcctgaaggagcagaagaagctgaacgacctgtgcttcctgaagagactgctgcaggagatcaagacctgctggaacaagatcctgatgggcaccaaggagcactga

SEQ ID NO: 4615 - RNA, 534 nt, synthetic construct
  misc_feature 1..534: note = derived and/or modified sequence opt5 fromIL-7__Homo_sapiens__AAA59156
  source 1..534: mol_type = other RNA
atgttccacgtgagctttagatacatcttcggcctgccccctctcattctggtccttctgccggttgcctcctctgactgcgatatcgaggggaaggacggaaaacagtatgaaagcgtgctcatggtgtccattgatcaactgcttgactctatgaaggagatcggcagcaactgtctgaataacgaatttaatttctttaaacggcatatttgcgatgctaacaaggaggggatgttcctctttcgcgccgcgagaaaactgcggcagttcctgaagatgaactccaccggagactttgatctccatctgcttaaggtctctgaaggcacaacgatcctgctcaattgtaccggacaggtgaaagggcgcaagcccgctgccctgggcgaggcccagcctacaaaaagccttgaggaaaataagtccctgaaagagcaaaagaagctcaacgacctgtgcttcctgaaaagactcctgcaggaaatcaagacctgttggaataaaattcttatgggcacaaaggagcactga

SEQ ID NO: 4616 - RNA, 534 nt, synthetic construct
  misc_feature 1..534: note = derived and/or modified sequence opt6 fromIL-7__Homo_sapiens__AAA59156
  source 1..534: mol_type = other RNA
atgttccacgtatcattcagatacatattcggactaccaccactaatactagtactactaccagtagcatcatcagactgcgacatagaaggaaaagacggcaaacaatacgaatcagtactaatggtctcaatagatcaattactagactcaatgaaagaaataggatcaaactgcctaaacaacgaattcaacttcttcaaaagacacatatgcgacgcaaacaaagaaggaatgttcctattcagagcagcaagaaaactaagacaattcctaaaaatgaactcaacaggagacttcgacctacacttactaaaagtatcagaaggaacaacaatactactaaactgcacaggacaagtaaaaggaagaaaaccagcagcactcggagaagcacaaccaacaaaatcattagaagaaaacaaatcactaaaagaacaaaaaaaactaaacgatttatgcttcttaaaaagactactacaagaaataaaaacatgctggaacaaaatactaatgggaacaaaagaacactaa

SEQ ID NO: 4617 - protein, 144 aa, synthetic construct
  REGION 1..144: note = IL-9__Homo_sapiens__P15248
MLLAMVLTSALLLCSVAGQGCPTLAGILDINFLINKMQEDPASKCHCSANVTSCLCLGIPSDNCTRPCFSERLSQMTNTTMQTRYPLIFSRVKKSVEVLKNNKCPYFSCEQPCNQTTAGNALTFLKSLLEIFQKEKMRGMRGKI

SEQ ID NO: 4618 - RNA, 435 nt, synthetic construct
  misc_feature 1..435: note = IL-9__Homo_sapiens__AAA35887
  source 1..435: mol_type = other RNA
atgcttctggccatggtccttacctctgccctgctcctgtgctccgtggcaggccaggggtgtccaaccttggcggggatcctggacatcaacttcctcatcaacaagatgcaggaagatccagcttccaagtgccactgcagtgctaatgtgaccagttgtctctgtttgggcattccctctgacaactgcaccagaccatgcttcagtgagagactgtctcagatgaccaataccaccatgcaaacaagatacccactgattttcagtcgggtgaaaaaatcagttgaagtactaaagaacaacaagtgtccatatttttcctgtgaacagccatgcaaccaaaccacggcaggcaacgcgctgacatttctgaagagtcttctggaaattttccagaaagaaaagatgagagggatgagaggcaagatatga

SEQ ID NO: 4619 - RNA, 435 nt, synthetic construct
  misc_feature 1..435: note = derived and/or modified sequence opt1 fromIL-9__Homo_sapiens__AAA35887
  source 1..435: mol_type = other RNA
atgctgctcgccatggtgctgaccagcgccctgctcctgtgctccgtcgcgggccaggggtgccccaccctggccggcatcctcgacatcaacttcctgatcaacaagatgcaggaggacccggccagcaagtgccactgctccgccaacgtgacgagctgcctgtgcctcgggatcccctccgacaactgcacccgcccctgcttcagcgagcggctgtcccagatgaccaacaccacgatgcagacccgctaccccctgatcttcagccgggtgaagaagtccgtcgaggtgctcaagaacaacaagtgcccgtacttcagctgcgagcagccctgcaaccagaccaccgccggcaacgcgctgacgttcctgaagtccctcctggagatcttccagaaggagaagatgcgcgggatgcggggcaagatctga

SEQ ID NO: 4620 - RNA, 435 nt, synthetic construct
  misc_feature 1..435: note = derived and/or modified sequence opt2 fromIL-9__Homo_sapiens__AAA35887
  source 1..435: mol_type = other RNA
atgctcctcgccatggtcctcacctccgccctcctcctctgctccgtcgccggccagggctgccccaccctcgccggcatcctcgacatcaacttcctcatcaacaagatgcaggaggaccccgcctccaagtgccactgctccgccaacgtcacctcctgcctctgcctcggcatcccctccgacaactgcacccgcccctgcttctccgagcgcctctcccagatgaccaacaccaccatgcagacccgctaccccctcatcttctcccgcgtcaagaagtccgtcgaggtcctcaagaacaacaagtgcccctacttctcctgcgagcagccctgcaaccagaccaccgccggcaacgccctcaccttcctcaagtccctcctcgagatcttccagaaggagaagatgcgcggcatgcgcggcaagatctga

SEQ ID NO: 4621 - RNA, 435 nt, synthetic construct
  misc_feature 1..435: note = derived and/or modified sequence opt3 fromIL-9__Homo_sapiens__AAA35887
  source 1..435: mol_type = other RNA
atgctgctcgccatggtgcttaccagcgctctgttgttatgctccgtcgcaggccaggggtgtcccacactggccggaatcctagacattaacttcctcataaataagatgcaagaagatcctgcgtctaaatgccactgttcagctaacgttacgagttgcctgtgtcttggtatcccaagcgacaattgcactagaccgtgtttttccgaaaggctgtctcagatgaccaacacaactatgcagacccggtaccccttgattttctcgcgcgtgaagaaatcagtagaggtgctcaagaataacaaatgcccttattttagctgtgaacagccatgcaatcaaacaaccgccggcaacgcactgactttcctgaagagtctcttagagatctttcagaaggagaaaatgcgagggatgcgtggaaagatttga

SEQ ID NO: 4622 - RNA, 435 nt, synthetic construct
  misc_feature 1..435: note = derived and/or modified sequence opt4 fromIL-9__Homo_sapiens__AAA35887
  source 1..435: mol_type = other RNA
atgctgctggccatggtgctgaccagcgccctgctgctgtgcagcgtggccggccagggctgccccaccctggccggcatcctggacatcaacttcctgatcaacaagatgcaggaggaccccgccagcaagtgccactgcagcgccaacgtgaccagctgcctgtgcctgggcatccccagcgacaactgcaccagaccctgcttcagcgagagactgagccagatgaccaacaccaccatgcagaccagataccccctgatcttcagcagagtgaagaagagcgtggaggtgctgaagaacaacaagtgcccctacttcagctgcgagcagccctgcaaccagaccaccgccggcaacgccctgaccttcctgaagagcctgctggagatcttccagaaggagaagatgagaggcatgagaggcaagatctga

SEQ ID NO: 4623 - RNA, 435 nt, synthetic construct
  misc_feature 1..435: note = derived and/or modified sequence opt5 fromIL-9__Homo_sapiens__AAA35887
  source 1..435: mol_type = other RNA
atgctgctcgccatggtgctgaccagcgctctgctgctctgctccgtcgccggccaggggtgtcccacactggcgggaatccttgacattaacttcctgatcaataagatgcaagaagatcctgcttctaaatgccactgtagcgccaacgttacgtcctgcctctgtctgggcattccgtctgacaattgcaccagaccctgttttagcgaacggctgtcccagatgacaaacaccacaatgcagacccgctaccctctcatcttctctagagtgaagaaaagcgtggaggtcctgaagaataacaaatgcccctatttttcctgtgaacagccttgcaatcaaacaaccgccgggaacgctcttacgttccttaagagcctcctggagatttttcagaaggagaaaatgcggggaatgcgcggcaagatctga

SEQ ID NO: 4624 - RNA, 435 nt, synthetic construct
  misc_feature 1..435: note = derived and/or modified sequence opt6 fromIL-9__Homo_sapiens__AAA35887
  source 1..435: mol_type = other RNA
atgctactagcaatggtactaacatcagcactactactatgctcagtagcaggacaaggatgcccaacattagcaggaatattagacataaacttcctaataaacaaaatgcaagaagacccagcatcaaaatgccactgctcagcaaacgtaacatcatgcctatgcctaggaataccatcagacaactgcacaagaccatgcttctccgaaagactatcacaaatgacaaacacaacaatgcaaacacgatacccactaatattctcaagagtaaaaaaatcagtagaagtactaaaaaacaacaaatgcccatacttctcatgcgaacaaccatgcaaccaaacaacagcaggaaacgcactaacattcctaaaatcactactagaaatcttccaaaaagaaaaaatgagaggaatgagaggaaaaatataa

SEQ ID NO: 4625 - protein, 202 aa, synthetic construct
  REGION 1..202: note = LIF__Homo_sapiens__P15018
MKVLAAGVVPLLLVLHWKHGAGSPLPITPVNATCAIRHPCHNNLMNQIRSQLAQLNGSANALFILYYTAQGEPFPNNLDKLCGPNVTDFPPFHANGTEKAKLVELYRIVVYLGTSLGNITRDQKILNPSALSLHSKLNATADILRGLLSNVLCRLCSKYHVGHVDVTYGPDTSGKDVFQKKKLGCQLLGKYKQIIAVLAQAF

SEQ ID NO: 4626 - RNA, 609 nt, synthetic construct
  misc_feature 1..609: note = LIF__Homo_sapiens__AAA51699
  source 1..609: mol_type = other RNA
atgaaggtcttggcggcaggagttgtgcccctgctgttggttctgcactggaaacatggggcggggagccccctccccatcacccctgtcaacgccacctgtgccatacgccacccatgtcacaacaacctcatgaaccagatcaggagccaactggcacagctcaatggcagtgccaatgccctctttattctctattacacagcccagggggagccgttccccaacaacctggacaagctatgtggccccaacgtgacggacttcccgcccttccacgccaacggcacggagaaggccaagctggtggagctgtaccgcatagtcgtgtaccttggcacctccctgggcaacatcacccgggaccagaagatcctcaaccccagtgccctcagcctccacagcaagctcaacgccaccgccgacatcctgcgaggcctccttagcaacgtgctgtgccgcctgtgcagcaagtaccacgtgggccatgtggacgtgacctacggccctgacacctcgggtaaggatgtcttccagaagaagaagctgggctgtcaactcctggggaagtataagcagatcatcgccgtgttggcccaggccttctag

SEQ ID NO: 4627 - RNA, 609 nt, synthetic construct
  misc_feature 1..609: note = derived and/or modified sequence opt1 fromLIF__Homo_sapiens__AAA51699
  source 1..609: mol_type = other RNA
atgaaggtgctggccgccggcgtcgtgcccctcctgctggtgctccactggaagcacggggcgggcagcccgctgcccatcacccccgtcaacgcgacctgcgccatccgccacccctgccacaacaacctgatgaaccagatccggtcccagctcgcccagctgaacgggagcgccaacgccctgttcatcctctactacacggcccagggcgagccgttccccaacaacctggacaagctgtgcgggcccaacgtgaccgacttcccgcccttccacgccaacggcaccgagaaggccaagctcgtggagctgtaccgcatcgtcgtgtacctgggcacctccctcgggaacatcacgcgggaccagaagatcctgaaccccagcgcgctgtccctccacagcaagctgaacgccaccgccgacatcctgcgcggcctcctgtccaacgtgctgtgccggctctgcagcaagtaccacgtcgggcacgtggacgtgacctacggccccgacacctccgggaaggacgtcttccagaagaagaagctgggctgccagctgctcggcaagtacaagcagatcatcgccgtgctggcccaggcgttctga

SEQ ID NO: 4628 - RNA, 609 nt, synthetic construct
  misc_feature 1..609: note = derived and/or modified sequence opt2 fromLIF__Homo_sapiens__AAA51699
  source 1..609: mol_type = other RNA
atgaaggtcctcgccgccggcgtcgtccccctcctcctcgtcctccactggaagcacggcgccggctcccccctccccatcacccccgtcaacgccacctgcgccatccgccacccctgccacaacaacctcatgaaccagatccgctcccagctcgcccagctcaacggctccgccaacgccctcttcatcctctactacaccgcccagggcgagcccttccccaacaacctcgacaagctctgcggccccaacgtcaccgacttcccccccttccacgccaacggcaccgagaaggccaagctcgtcgagctctaccgcatcgtcgtctacctcggcacctccctcggcaacatcacccgcgaccagaagatcctcaacccctccgccctctccctccactccaagctcaacgccaccgccgacatcctccgcggcctcctctccaacgtcctctgccgcctctgctccaagtaccacgtcggccacgtcgacgtcacctacggccccgacacctccggcaaggacgtcttccagaagaagaagctcggctgccagctcctcggcaagtacaagcagatcatcgccgtcctcgcccaggccttctga

SEQ ID NO: 4629 - RNA, 609 nt, synthetic construct
  misc_feature 1..609: note = derived and/or modified sequence opt3 fromLIF__Homo_sapiens__AAA51699
  source 1..609: mol_type = other RNA
atgaaggtgctggccgctggcgtcgttcccctccttctggtgttgcactggaaacatggggcaggaagccctttaccaatcaccccggtaaacgccacatgcgcgattagacacccctgtcataataacctgatgaatcagataaggtcccaactagctcagctcaacggttctgccaatgcactgttcatcctttactatactgcccagggcgagccttttccaaacaatctggacaagttgtgcgggcccaacgtgacggatttccctccatttcacgctaatggaaccgaaaaagcaaagctcgtcgagctgtaccggattgtggtttatctgggcacatcactcggtaacatcactcgcgaccagaaaattttaaatcccagtgccctgagccttcattccaagttgaacgctaccgccgatatcctgcgagggctactctctaatgtgctgtgtcgtctttgctcgaagtaccacgtcggacacgtggacgtaacatatggccctgatacctcaggcaaagacgttttccaaaagaaaaagctggggtgtcagttgctcggaaaatacaagcagataatcgcggtgctggcacaggccttttga

SEQ ID NO: 4630 - RNA, 609 nt, synthetic construct
  misc_feature 1..609: note = derived and/or modified sequence opt4 fromLIF__Homo_sapiens__AAA51699
  source 1..609: mol_type = other RNA
atgaaggtgctggccgccggcgtggtgcccctgctgctggtgctgcactggaagcacggcgccggcagccccctgcccatcacccccgtgaacgccacctgcgccatcagacacccctgccacaacaacctgatgaaccagatcagaagccagctggcccagctgaacggcagcgccaacgccctgttcatcctgtactacaccgcccagggcgagcccttccccaacaacctggacaagctgtgcggccccaacgtgaccgacttcccccccttccacgccaacggcaccgagaaggccaagctggtggagctgtacagaatcgtggtgtacctgggcaccagcctgggcaacatcaccagagaccagaagatcctgaaccccagcgccctgagcctgcacagcaagctgaacgccaccgccgacatcctgagaggcctgctgagcaacgtgctgtgcagactgtgcagcaagtaccacgtgggccacgtggacgtgacctacggccccgacaccagcggcaaggacgtgttccagaagaagaagctgggctgccagctgctgggcaagtacaagcagatcatcgccgtgctggcccaggccttctga

SEQ ID NO: 4631 - RNA, 609 nt, synthetic construct
  misc_feature 1..609: note = derived and/or modified sequence opt5 fromLIF__Homo_sapiens__AAA51699
  source 1..609: mol_type = other RNA
atgaaggtgctggccgctggcgtcgttcccctcctgcttgtgctgcactggaaacatggggccggaagccctctcccgatcacccccgtgaacgcgacatgcgctattagacacccttgtcataataacctgatgaatcagatccggtcccaacttgcccagctgaacggctctgccaatgctctcttcattctgtactatacggcccagggggagccctttcctaacaatctggacaagctctgcggacccaacgtcaccgatttccctccgtttcacgctaatggcacagaaaaagccaagctggtggagctttaccgcatcgttgtgtatctggggaccagcctcggaaacattacaagagaccagaaaatcctgaatccctccgcgctttctctgcatagcaagctcaacgccaccgctgatatcctgcggggcctgctctccaatgtcctgtgtcgcctttgctctaagtaccacgtgggccacgttgacgtgacatatgggcctgataccagcggaaaagacgtcttccaaaagaaaaagctgggctgtcagctcctggggaaatacaagcagattatcgccgtgcttgctcaggccttttga

SEQ ID NO: 4632 - RNA, 609 nt, synthetic construct
  misc_feature 1..609: note = derived and/or modified sequence opt6 fromLIF__Homo_sapiens__AAA51699
  source 1..609: mol_type = other RNA
atgaaagtactagcagccggagtcgtaccactactattagtactacactggaaacacggagcaggatcacctctaccaataacaccagtaaacgcaacttgcgcaataagacacccatgccacaacaacctaatgaaccaaataagatcacaactagcacaactaaacggatcagcaaacgcactattcatattatactacacagcacaaggagaaccattcccaaacaacctagacaaactatgcggaccaaacgtaacagacttcccaccatttcacgcaaacggaacagaaaaagcaaaattagtagaactatacagaatagtagtatacctaggaacatcactaggaaacataacaagagaccaaaaaatattaaacccatcagcactatcactacactcaaaactaaacgcaacagcagacatattaagaggactactatccaacgtattatgcagactatgctcaaaataccacgtaggacatgtagacgtaacatacggaccagacacatcaggtaaagacgtattccaaaaaaaaaaattaggatgccaattactaggaaaatacaaacaaataatagcagtactagcacaagcattttaa

SEQ ID NO: 4633 - protein, 240 aa, synthetic construct
  REGION 1..240: note = LIGHT__Homo_sapiens__O43557
MEESVVRPSVFVVDGQTDIPFTRLGRSHRRQSCSVARVGLGLLLLLMGAGLAVQGWFLLQLHWRLGEMVTRLPDGPAGSWEQLIQERRSHEVNPAAHLTGANSSLTGSGGPLLWETQLGLAFLRGLSYHDGALVVTKAGYYYIYSKVQLGGVGCPLGLASTITHGLYKRTPRYPEELELLVSQQSPCGRATSSSRVWWDSSFLGGVVHLEAGEKVVVRVLDERLVRLRDGTRSYFGAFMV

SEQ ID NO: 4634 - RNA, 723 nt, synthetic construct
  misc_feature 1..723: note = LIGHT__Homo_sapiens__AAC25169
  source 1..723: mol_type = other RNA
atggaggagagtgtcgtacggccctcagtgtttgtggtggatggacagaccgacatcccattcacgaggctgggacgaagccaccggagacagtcgtgcagtgtggcccgggtgggtctgggtctcttgctgttgctgatgggggctgggctggccgtccaaggctggttcctcctgcagctgcactggcgtctaggagagatggtcacccgcctgcctgacggacctgcaggctcctgggagcagctgatacaagagcgaaggtctcacgaggtcaacccagcagcgcatctcacaggggccaactccagcttgaccggcagcggggggccgctgttatgggagactcagctgggcctggccttcctgaggggcctcagctaccacgatggggcccttgtggtcaccaaagctggctactactacatctactccaaggtgcagctgggcggtgtgggctgcccgctgggcctggccagcaccatcacccacggcctctacaagcgcacaccccgctaccccgaggagctggagctgttggtcagccagcagtcaccctgcggacgggccaccagcagctcccgggtctggtgggacagcagcttcctgggtggtgtggtacacctggaggctggggagaaggtggtcgtccgtgtgctggatgaacgcctggttcgactgcgtgatggtacccggtcttacttcggggctttcatggtgtga

SEQ ID NO: 4635 - RNA, 723 nt, synthetic construct
  misc_feature 1..723: note = derived and/or modified sequence opt1 fromLIGHT__Homo_sapiens__AAC25169
  source 1..723: mol_type = other RNA
atggaggagagcgtggtccgcccctccgtgttcgtggtcgacggccagaccgacatcccgttcacccggctggggcgcagccaccggcgccagtcctgcagcgtggcccgggtgggcctcgggctgctgctcctgctgatgggcgccgggctcgcggtccagggctggttcctgctgcagctccactggcgcctgggcgagatggtgacgcggctgcccgacgggcccgccggctcctgggagcagctcatccaggagcgccggagccacgaggtgaaccccgccgcccacctgaccggggccaactccagcctgaccggctccgggggcccgctcctgtgggagacccagctgggcctcgcgttcctgcgcgggctgagctaccacgacggcgccctcgtcgtgacgaaggccgggtactactacatctactccaaggtgcagctgggcggcgtcgggtgccccctgggcctcgccagcaccatcacccacgggctgtacaagcggacgccccgctaccccgaggagctggagctcctggtgtcccagcagagcccgtgcggccgggcgacctccagctcccgcgtgtggtgggacagctccttcctcgggggcgtcgtgcacctggaggccggcgagaaggtggtcgtgcgggtgctggacgagcgcctggtccggctccgcgacgggacccggagctacttcggcgccttcatggtgtga

SEQ ID NO: 4636 - RNA, 723 nt, synthetic construct
  misc_feature 1..723: note = derived and/or modified sequence opt2 fromLIGHT__Homo_sapiens__AAC25169
  source 1..723: mol_type = other RNA
atggaggagtccgtcgtccgcccctccgtcttcgtcgtcgacggccagaccgacatccccttcacccgcctcggccgctcccaccgccgccagtcctgctccgtcgcccgcgtcggcctcggcctcctcctcctcctcatgggcgccggcctcgccgtccagggctggttcctcctccagctccactggcgcctcggcgagatggtcacccgcctccccgacggccccgccggctcctgggagcagctcatccaggagcgccgctcccacgaggtcaaccccgccgcccacctcaccggcgccaactcctccctcaccggctccggcggccccctcctctgggagacccagctcggcctcgccttcctccgcggcctctcctaccacgacggcgccctcgtcgtcaccaaggccggctactactacatctactccaaggtccagctcggcggcgtcggctgccccctcggcctcgcctccaccatcacccacggcctctacaagcgcaccccccgctaccccgaggagctcgagctcctcgtctcccagcagtccccctgcggccgcgccacctcctcctcccgcgtctggtgggactcctccttcctcggcggcgtcgtccacctcgaggccggcgagaaggtcgtcgtccgcgtcctcgacgagcgcctcgtccgcctccgcgacggcacccgctcctacttcggcgccttcatggtctga

SEQ ID NO: 4637 - RNA, 723 nt, synthetic construct
  misc_feature 1..723: note = derived and/or modified sequence opt3 fromLIGHT__Homo_sapiens__AAC25169
  source 1..723: mol_type = other RNA
atggaggaaagcgtggtcagaccctccgttttcgtggtagacggccagaccgatatcccttttacaaggctggggcggtctcaccgccgacaatcatgcagtgtggcccgtgtcggactcggtcttctgttgttactgatgggcgctgggctagcagtgcagggatggttcctcctgcagcttcattggagactgggcgagatggttactaggttgccagacggtccggccgggagctgggaacagctcattcaagagcggcgctcccacgaagtgaaccccgcggctcatctgacgggagccaattcttcgctgaccggctcaggcgggcctctcttatgggagacacagctgggacttgcatttttgagaggtctgagctaccacgatggcgccctagtcgtgactaaggctgggtattactatatatacagtaaagtacagctcggaggcgttggttgtccactggggcttgcatccaccatcacacatggactgtataagaggactccccggtaccctgaggaattggagctcctggtgtctcagcaaagcccatgcggccgcgccacctcctcaagtcgagtctggtgggacagctctttcttaggcggggtggtgcacctggaagctggagagaaagtcgttgtgagagtactcgatgagaggcttgtgcggctgcgtgacggtacacgctcctattttggcgccttcatggtctga

SEQ ID NO: 4638 - RNA, 723 nt, synthetic construct
  misc_feature 1..723: note = derived and/or modified sequence opt4 fromLIGHT__Homo_sapiens__AAC25169
  source 1..723: mol_type = other RNA
atggaggagagcgtggtgagacccagcgtgttcgtggtggacggccagaccgacatccccttcaccagactgggcagaagccacagaagacagagctgcagcgtggccagagtgggcctgggcctgctgctgctgctgatgggcgccggcctggccgtgcagggctggttcctgctgcagctgcactggagactgggcgagatggtgaccagactgcccgacggccccgccggcagctgggagcagctgatccaggagagaagaagccacgaggtgaaccccgccgcccacctgaccggcgccaacagcagcctgaccggcagcggcggccccctgctgtgggagacccagctgggcctggccttcctgagaggcctgagctaccacgacggcgccctggtggtgaccaaggccggctactactacatctacagcaaggtgcagctgggcggcgtgggctgccccctgggcctggccagcaccatcacccacggcctgtacaagagaacccccagataccccgaggagctggagctgctggtgagccagcagagcccctgcggcagagccaccagcagcagcagagtgtggtgggacagcagcttcctgggcggcgtggtgcacctggaggccggcgagaaggtggtggtgagagtgctggacgagagactggtgagactgagagacggcaccagaagctacttcggcgccttcatggtgtga

SEQ ID NO: 4639 - RNA, 723 nt, synthetic construct
  misc_feature 1..723: note = derived and/or modified sequence opt5 fromLIGHT__Homo_sapiens__AAC25169
  source 1..723: mol_type = other RNA
atggaggaaagcgtggtcagaccctccgttttcgtggtggacggccagaccgatatcccttttacacggctggggcgctctcacagacggcaaagctgctccgtcgcccgcgtgggactcggcctgcttctgctcctgatgggggctggacttgccgttcagggctggttcctgctccagctgcattggagactgggggagatggtgacgcggctcccggacggacccgcgggctcttgggaacagctgattcaagagcgcagaagccacgaagtcaaccctgctgcccatcttaccggcgccaattcctctctgacagggagcggaggccccctcctgtgggagacccagcttgggctggcttttctccggggactgtcctaccacgatggcgccctggtggttacaaaggctgggtattactatatctacagcaaagtgcagctcggaggcgtcggctgtcctctggggcttgcctctaccattacacatggactgtataagcgcacccccagataccctgaggaactcgagctgcttgtgtcccagcaaagcccgtgcggccgggcgacgtcttccagccgcgtgtggtgggactcttccttcctcgggggagtcgttcacctggaagccggcgagaaagtggtggtcagagtgctggatgagcggctggttcgcctcagagacgggacccggagctattttggagctttcatggtgtga

SEQ ID NO: 4640 - RNA, 723 nt, synthetic construct
  misc_feature 1..723: note = derived and/or modified sequence opt6 fromLIGHT__Homo_sapiens__AAC25169
  source 1..723: mol_type = other RNA
atggaagaaagtgtagtaagaccaagtgtttttgtagtagatggacaaacagatataccatttacaagattaggaagatcacatcgaagacaaagttgtagtgtggcaagagtaggattaggattattattattactaatgggtgcgggattagcagtacaaggatggtttttattacaattgcattggaggttaggtgaaatggtgactagattaccggacggacctgcaggaagttgggaacaactaatacaagaaagaagatcacacgaagtaaatccagcagcacacctaacaggagcaaatagttcattaacaggaagtggaggtccattgttatgggaaacacaattaggtttagcatttttaagaggattaagttatcatgatggagcattagtagtaacaaaagcaggatattattatatatattcaaaagtacaattaggaggagttgggtgtccattaggattagcgagcacgataacacatggattatacaaaaggacaccaagatatcctgaagaattagaattactagtaagtcaacaatcaccatgtggaagagcaacaagttcaagtagagtatggtgggatagttcatttctaggaggagtagtacatttagaagcaggagaaaaagtagttgtaagagtattagatgaaaggttagtaagactaagagatggtacaagatcatattttggagcatttatggtataa

SEQ ID NO: 4641 - protein, 561 aa, synthetic construct [sequence omitted]

SEQ ID NO: 4642 - RNA, 1686 nt, synthetic construct
  misc_feature 1..1686: note = LTalpha__Homo_sapiens__BAG62860
  source 1..1686: mol_type = other RNA
atgcccgagatagtggatacaaaggaccttacaatagaaaaagtagtgatcaatggacaagaagtcaaatatgctcttggagaaagacaaagttacaagggatcgccaatggaaatctctcttcctatcgctttgagcaaaaatcaagaaattgttatagaaatttcttttgagacctctccaaaatcttctgctctccagtggctcactcctgaacagacttctgggaaggaacacccatatctctttagtcagtgccaggccatccactgcagagcaatccttccttgtcaggacactccttctgtgaaattaacctatactgcagaggtgtctgtccctaaagaactggtggcacttatgagtgctattcgtgatggagaaacacctgacccagaagacccaagcaggaaaatatacaaattcatccaaaaagttccaataccctgctacctgattgctttagttgttggagctttagaaagcaggcaaattggcccaagaactttggtgtggtctgagaaagagcaggtggaaaagtctgcttatgagttttctgagactgaatctatgcttaaaatagcagaagatctgggaggaccgtatgtatggggacagtatgacctattggtcctgccaccatccttcccttatggtggcatggagaatccttgccttacttttgtaactcctactctactggcaggcgacaagtcactctccaatgtcattgcacatgaaatatctcatagctggacagggaatctagtgaccaacaaaacttgggatcacttttggttaaatgagggacatactgtgtacttggaacgccacatttgcggacgattgtttggtgaaaagttcagacattttaatgctctgggaggatggggagaactacagaattcggtaaagacatttggggagacacatcctttcaccaaacttgtggttgatctgacagatatagaccctgatgtagcttattcttcagttccctatgagaagggctttgctttacttttttaccttgaacaactgcttggaggaccagagattttcctaggattcttaaaagcttatgttgagaagttttcctataagagcataactactgatgactggaaggatttcctgtattcctattttaaagataaggttgatgttctcaatcaagttgattggaatgcctggctctactctcctggactgcctcccataaagcccaattatgatatgactctgacaaatgcttgtattgccttaagtcaaagatggattactgccaaagaagatgatttaaattcattcaatgccacagacctgaaggatctctcttctcatcaattgaatgagtttttagcacagacgctccagagggcacctcttccattggggcacataaagcgaatgcaagaggtgtacaacttcaatgccattaacaattctgaaatacgattcagatggctgcggctctgcattcaatccaagtgggaggacgcaattcctttggcgctaaagatggcaactgaacaaggaagaatgaagtttacccggcccttattcaaggatcttgctgcctttgacaaatcccatgatcaagctgtccgaacctaccaagagcacaaagcaagcatgcatcccgtgactgcaatgctggtggggaaagacttaaaagtggattaa

SEQ ID NO: 4643 - RNA, 1686 nt, synthetic construct
  misc_feature 1..1686: note = derived and/or modified sequence opt1 fromLTalpha__Homo_sapiens__BAG62860
  source 1..1686: mol_type = other RNA
atgcccgagatcgtggacaccaaggacctgaccatcgagaaggtcgtgatcaacggccaggaggtgaagtacgccctcggggagcgccagagctacaagggctccccgatggagatcagcctgcccatcgccctgtccaagaaccaggagatcgtcatcgagatcagcttcgagacgtcccccaagagctccgcgctccagtggctgacccccgagcagaccagcgggaaggagcacccgtacctgttctcccagtgccaggccatccactgccgggccatcctcccctgccaggacacccccagcgtgaagctgacgtacaccgccgaggtgtccgtccccaaggagctggtggccctcatgagcgcgatccgcgacggcgagaccccggaccccgaggacccctcccggaagatctacaagttcatccagaaggtgcccatcccgtgctacctgatcgccctggtcgtgggggccctcgagagccgccagatcggcccccggaccctggtgtggtccgagaaggagcaggtcgagaagtccgcctacgagttcagcgagacggagagcatgctgaagatcgcggaggacctcggcgggccctacgtgtggggccagtacgacctgctggtgctgcccccgtccttcccctacgggggcatggagaacccctgcctgaccttcgtcacccccaccctgctcgccggggacaagagcctgagcaacgtgatcgcccacgagatctcccacagctggacgggcaacctggtgaccaacaagacctgggaccacttctggctcaacgagggccacaccgtctacctggagcgccacatctgcgggcggctgttcggcgagaagttccgccacttcaacgccctcgggggctggggcgagctgcagaactccgtgaagacgttcggggagacccacccgttcaccaagctggtggtcgacctcaccgacatcgaccccgacgtggcctacagctccgtgccctacgagaagggcttcgcgctgctgttctacctcgagcagctgctcgggggccccgagatcttcctcgggttcctgaaggcctacgtcgagaagttcagctacaagtccatcacgaccgacgactggaaggacttcctgtacagctacttcaaggacaaggtggacgtcctcaaccaggtggactggaacgcctggctgtactccccgggcctgccgcccatcaagcccaactacgacatgaccctcaccaacgcctgcatcgccctgagccagcggtggatcacggcgaaggaggacgacctgaactccttcaacgccaccgacctcaaggacctgagctcccaccagctgaacgagttcctcgcccagaccctgcagcgcgcgcccctgcccctgggccacatcaagcggatgcaggaggtgtacaacttcaacgccatcaacaacagcgagatccgcttccggtggctccgcctgtgcatccagtccaagtgggaggacgccatccccctggccctcaagatggccaccgagcaggggcggatgaagttcacgcgcccgctgttcaaggacctggccgccttcgacaagagccacgaccaggcggtccggacctaccaggagcacaaggcctccatgcaccccgtgaccgccatgctcgtgggcaaggacctgaaggtcgactga

SEQ ID NO: 4644 - RNA, 1686 nt, synthetic construct
  misc_feature 1..1686: note = derived and/or modified sequence opt2 fromLTalpha__Homo_sapiens__BAG62860
  source 1..1686: mol_type = other RNA
atgcccgagatcgtcgacaccaaggacctcaccatcgagaaggtcgtcatcaacggccaggaggtcaagtacgccctcggcgagcgccagtcctacaagggctcccccatggagatctccctccccatcgccctctccaagaaccaggagatcgtcatcgagatctccttcgagacctcccccaagtcctccgccctccagtggctcacccccgagcagacctccggcaaggagcacccctacctcttctcccagtgccaggccatccactgccgcgccatcctcccctgccaggacaccccctccgtcaagctcacctacaccgccgaggtctccgtccccaaggagctcgtcgccctcatgtccgccatccgcgacggcgagacccccgaccccgaggacccctcccgcaagatctacaagttcatccagaaggtccccatcccctgctacctcatcgccctcgtcgtcggcgccctcgagtcccgccagatcggcccccgcaccctcgtctggtccgagaaggagcaggtcgagaagtccgcctacgagttctccgagaccgagtccatgctcaagatcgccgaggacctcggcggcccctacgtctggggccagtacgacctcctcgtcctccccccctccttcccctacggcggcatggagaacccctgcctcaccttcgtcacccccaccctcctcgccggcgacaagtccctctccaacgtcatcgcccacgagatctcccactcctggaccggcaacctcgtcaccaacaagacctgggaccacttctggctcaacgagggccacaccgtctacctcgagcgccacatctgcggccgcctcttcggcgagaagttccgccacttcaacgccctcggcggctggggcgagctccagaactccgtcaagaccttcggcgagacccaccccttcaccaagctcgtcgtcgacctcaccgacatcgaccccgacgtcgcctactcctccgtcccctacgagaagggcttcgccctcctcttctacctcgagcagctcctcggcggccccgagatcttcctcggcttcctcaaggcctacgtcgagaagttctcctacaagtccatcaccaccgacgactggaaggacttcctctactcctacttcaaggacaaggtcgacgtcctcaaccaggtcgactggaacgcctggctctactcccccggcctcccccccatcaagcccaactacgacatgaccctcaccaacgcctgcatcgccctctcccagcgctggatcaccgccaaggaggacgacctcaactccttcaacgccaccgacctcaaggacctctcctcccaccagctcaacgagttcctcgcccagaccctccagcgcgcccccctccccctcggccacatcaagcgcatgcaggaggtctacaacttcaacgccatcaacaactccgagatccgcttccgctggctccgcctctgcatccagtccaagtgggaggacgccatccccctcgccctcaagatggccaccgagcagggccgcatgaagttcacccgccccctcttcaaggacctcgccgccttcgacaagtcccacgaccaggccgtccgcacctaccaggagcacaaggcctccatgcaccccgtcaccgccatgctcgtcggcaaggacctcaaggtcgactga

SEQ ID NO: 4645 - RNA, 1686 nt, synthetic construct
  misc_feature 1..1686: note = derived and/or modified sequence opt3 fromLTalpha__Homo_sapiens__BAG62860
  source 1..1686: mol_type = other RNA
atgcccgagatcgtggacaccaaggatctgacaattgaaaaagtcgttataaacggccaggaggtgaagtacgccctcggggaaagacaaagctataaaggatcccctatggagatctctcttccaattgctctgtcaaagaatcaggaaatcgtaattgagatcagtttcgagactagcccgaaatcctctgcattgcagtggttaacgcccgaacagacctcgggtaaggagcacccttacctgttttcacaatgccaggccatacattgtagggcgatcctaccatgccaggacacacccagcgtgaagctcacttataccgctgaagtcagtgtgcctaaagagctggttgcccttatgtccgcaattcgggatggcgagacaccagaccccgaagatccttctcgcaagatctacaaattcattcagaaggtgccaatcccgtgttatctgatagccttggtcgtgggggctctcgagagccgacaaattggaccccgtaccctggtatggtccgaaaaagagcaggttgaaaagtcagcatacgagtttagtgagactgaaagcatgctgaagatcgccgaggacctcggcggtccttatgtgtgggggcagtacgatttactggtccttccaccctctttcccttacggaggcatggaaaacccatgcttgacatttgtgacccccacgctgctagctggcgacaaatccctctcaaatgtgattgcccacgagatcagccatagttggactgggaacctggtcaccaataagacatgggatcacttctggcttaacgaaggacatactgtttatctggagagacacatctgtggtaggttgtttggcgagaaattccggcactttaatgcgctcgggggatggggcgaactgcagaactctgtgaagaccttcggtgagacacatccgtttaccaaattagtagtggacctgacggatattgaccctgatgtcgcatactccagcgtgccctatgaaaaggggttcgccctcctgttttaccttgagcaattgctaggaggcccagaaatattcctgggcttcctcaaggcttatgttgagaaattttcgtacaagtctatcactacagacgactggaaagatttcctgtattcctactttaaggacaaagtggatgtccttaatcaggtggactggaacgcctggctgtactcacctgggttgcccccaattaagcccaattatgatatgaccctcactaacgcatgcatcgctctgagtcagcgctggataacagccaaagaggacgatttaaatagcttcaacgcgaccgacctgaaggatctatcctctcaccaactcaatgaatttctggcccagacgcttcagagagcacctttgccactgggacatattaagaggatgcaggaggtatacaacttcaacgctatcaataacagcgaaatccggtttcgctggctccgactgtgtattcaatcaaaatgggaggacgccatcccgcttgctctgaagatggccaccgagcagggtagaatgaaattcacaaggcccttgtttaaggatctcgcagccttcgacaaaagtcacgaccaggctgttcggacttatcaggaacacaaggcgtccatgcatcctgtgaccgcaatgctggtcggcaaggatttaaaagtggactga

SEQ ID NO: 4646 - RNA, 1686 nt, synthetic construct
  misc_feature 1..1686: note = derived and/or modified sequence opt4 fromLTalpha__Homo_sapiens__BAG62860
  source 1..1686: mol_type = other RNA
atgcccgagatcgtggacaccaaggacctgaccatcgagaaggtggtgatcaacggccaggaggtgaagtacgccctgggcgagagacagagctacaagggcagccccatggagatcagcctgcccatcgccctgagcaagaaccaggagatcgtgatcgagatcagcttcgagaccagccccaagagcagcgccctgcagtggctgacccccgagcagaccagcggcaaggagcacccctacctgttcagccagtgccaggccatccactgcagagccatcctgccctgccaggacacccccagcgtgaagctgacctacaccgccgaggtgagcgtgcccaaggagctggtggccctgatgagcgccatcagagacggcgagacccccgaccccgaggaccccagcagaaagatctacaagttcatccagaaggtgcccatcccctgctacctgatcgccctggtggtgggcgccctggagagcagacagatcggccccagaaccctggtgtggagcgagaaggagcaggtggagaagagcgcctacgagttcagcgagaccgagagcatgctgaagatcgccgaggacctgggcggcccctacgtgtggggccagtacgacctgctggtgctgccccccagcttcccctacggcggcatggagaacccctgcctgaccttcgtgacccccaccctgctggccggcgacaagagcctgagcaacgtgatcgcccacgagatcagccacagctggaccggcaacctggtgaccaacaagacctgggaccacttctggctgaacgagggccacaccgtgtacctggagagacacatctgcggcagactgttcggcgagaagttcagacacttcaacgccctgggcggctggggcgagctgcagaacagcgtgaagaccttcggcgagacccaccccttcaccaagctggtggtggacctgaccgacatcgaccccgacgtggcctacagcagcgtgccctacgagaagggcttcgccctgctgttctacctggagcagctgctgggcggccccgagatcttcctgggcttcctgaaggcctacgtggagaagttcagctacaagagcatcaccaccgacgactggaaggacttcctgtacagctacttcaaggacaaggtggacgtgctgaaccaggtggactggaacgcctggctgtacagccccggcctgccccccatcaagcccaactacgacatgaccctgaccaacgcctgcatcgccctgagccagagatggatcaccgccaaggaggacgacctgaacagcttcaacgccaccgacctgaaggacctgagcagccaccagctgaacgagttcctggcccagaccctgcagagagcccccctgcccctgggccacatcaagagaatgcaggaggtgtacaacttcaacgccatcaacaacagcgagatcagattcagatggctgagactgtgcatccagagcaagtgggaggacgccatccccctggccctgaagatggccaccgagcagggcagaatgaagttcaccagacccctgttcaaggacctggccgccttcgacaagagccacgaccaggccgtgagaacctaccaggagcacaaggccagcatgcaccccgtgaccgccatgctggtgggcaaggacctgaaggtggactga

SEQ ID NO: 4647 - RNA, 1686 nt, synthetic construct
  misc_feature 1..1686: note = derived and/or modified sequence opt5 fromLTalpha__Homo_sapiens__BAG62860
  source 1..1686: mol_type = other RNA
atgcccgagatcgtggacaccaaggatctgacaattgaaaaagtcgttatcaacggccaggaggtgaagtacgccctcggggaaagacaaagctataaaggatcccctatggagatttctctgccgatcgctcttagcaagaatcaggaaattgtgatcgagatctccttcgagacgtctcccaaaagctccgccctgcagtggctcacccctgaacagacatctggcaaggagcacccctacctgtttagccaatgccaggcgattcattgtcgggctatccttccttgccaggacaccccctccgtcaagctgacatataccgccgaagtgagcgttcctaaagagctcgtggccctgatgtctgctattcgcgatggggagacaccggaccccgaagatccttccagaaagatctacaaattcattcagaaggtccccatcccttgttatctgattgccctcgtggttggagctctggagagccggcaaatcggcccccgcacccttgtgtggtctgaaaaagagcaggtcgaaaagtccgcctacgagtttagcgagacggaatctatgctgaagatcgcggaggacctcgggggaccgtatgtgtggggccagtacgatctgcttgtgctgcctccctccttcccttacggcgggatggaaaacccctgcctcacctttgtcacacccaccctgctggccggagacaaaagcctctccaatgttattgctcacgagatctctcatagctggacaggcaacctggtgaccaataagacgtgggatcacttctggcttaacgaagggcatacagtgtatctggagagacacatttgtggacggctctttggcgagaaattccgccactttaatgcccttgggggatggggcgaactgcagaactccgtcaagaccttcggcgagacacatccttttaccaaactggtggttgacctcaccgatatcgacccggatgtggcttacagctctgtcccctatgaaaaggggttcgccctgctgttttacctcgagcaactgcttggaggccctgaaattttcctggggttcctcaaagcgtatgtggagaagttttcctacaagagcatcacaacggacgactggaaagatttcctgtattcttactttaaggacaaagttgatgtgcttaatcaggtcgactggaacgcctggctgtacagccccggactccctcccatcaagccgaattatgatatgaccctgacaaacgcttgcattgccctgtcccagagatggatcaccgctaaagaggacgatctcaattctttcaacgccacagacctgaaggatcttagctcccaccaactgaatgaatttctcgcccagaccctgcagcgggctcctctgccccttggccatattaagcgcatgcaggaggtgtacaacttcaacgcgatcaataacagcgaaattagatttcggtggctccgcctgtgtatccaatctaaatgggaggacgccatccctctggctctcaagatggccacggagcaggggagaatgaaattcacacggcccctgtttaaggatcttgccgctttcgacaaatcccacgaccaggccgtccgcacctatcaggaacacaaggcgagcatgcatcctgtgaccgctatgctggttggaaaggatctcaaagtggactga

SEQ ID NO: 4648 - RNA, 1686 nt, synthetic construct
  misc_feature 1..1686: note = derived and/or modified sequence opt6 fromLTalpha__Homo_sapiens__BAG62860
  source 1..1686: mol_type = other RNA
atgccagaaatagtagacacaaaagacctcacaatagaaaaagttgtcataaatggacaagaagtcaaatatgcactcggagaaagacaatcatacaaaggatcaccaatggaaatatcattaccaatagcattaagtaaaaaccaagaaatcgtaatagaaataagtttcgaaacatctccaaaatcatccgccttacaatggctgaccccggaacaaacatcaggaaaagaacatccatacctattttcacaatgtcaagcaatacactgcagagctatactaccatgccaagacacaccatcagtaaaactaacatataccgcagaagtctcagtcccaaaagaattagttgcactaatgtccgcaataagagacggtgaaacacctgatccagaagacccatctcgaaaaatatacaaattcatacaaaaagtaccaatcccatgctatttaatagcactcgtagtaggagcactcgaaagccgacagataggcccacgaacactagtatggtcagaaaaagaacaagtagaaaaatcagcatacgaattttcagaaacagaatcaatgctaaaaatagcagaagacctcgggggaccatacgtgtggggacaatacgaccttctagtactaccaccaagtttcccatacggaggaatggaaaatccctgtctcacctttgtaacaccaaccttattagcaggagataaatcactgagcaatgtaatagcgcatgaaatatcacactcatggacaggaaatctcgtaacaaataaaacatgggatcatttttggctaaacgaaggtcacacagtttatcttgaacgacatatttgcggacgtctattcggagaaaaatttagacacttcaatgcattaggaggatggggagaacttcaaaactcggtaaaaacctttggagaaacacacccattcaccaaactagtagtcgatttaacagatatagatccagacgtagcatattcaagtgtaccatacgaaaaaggattcgcactcctattctacctcgagcaactcctcggtggccctgaaatatttctaggattcttaaaagcatatgtagaaaaatttagctacaaatcgataacaacagatgattggaaagatttcctttattcctacttcaaagacaaagtagacgtattaaaccaagtcgattggaacgcatggctatactccccaggtttaccacctataaaaccaaactacgatatgactctcacaaacgcttgcatagcactctcacaaagatggatcactgcaaaagaagacgacctaaattccttcaacgcaacagacttaaaagacctcagctcacaccaattaaacgaattcctcgcacaaacgctccaaagagcacccttaccattgggtcacataaaacgaatgcaagaagtatacaacttcaacgctataaacaactccgaaatcagattccgatggctaagattatgtatccaatcaaaatgggaagacgcaataccactagccttaaaaatggcaactgaacaaggacgaatgaaattcactagacccttattcaaagacttagcagcattcgacaaatcacatgaccaggcagtaagaacataccaagaacacaaagcttctatgcaccccgtaactgcaatgttagtaggaaaagatctcaaagtcgactaa

SEQ ID NO: 4649 - protein, 205 aa, synthetic construct
  REGION 1..205: note = LTalpha__Homo_sapiens__P01374
MTPPERLFLPRVCGTTLHLLLLGLLLVLLPGAQGLPGVGLTPSAAQTARQHPKMHLAHSTLKPAAHLIGDPSKQNSLLWRANTDRAFLQDGFSLSNNSLLVPTSGIYFVYSQVVFSGKAYSPKATSSPLYLAHEVQLFSSQYPFHVPLLSSQKMVYPGLQEPWLHSMYHGAAFQLTQGDQLSTHTDGIPHLVLSPSTVFFGAFAL

SEQ ID NO: 4650 - RNA, 618 nt, synthetic construct
  misc_feature 1..618: note = LTalpha__Homo_sapiens__AAA61199
  source 1..618: mol_type = other RNA
atgacaccacctgaacgtctcttcctcccaagggtgtgtggcaccaccctacacctcctccttctggggctgctgctggttctgctgcctggggcccaggggctccctggtgttggcctcacaccttcagctgcccagactgcccgtcagcaccccaagatgcatcttgcccacagcaccctcaaacctgctgctcacctcattggagaccccagcaagcagaactcactgctctggagagcaaacacggaccgtgccttcctccaggatggtttctccttgagcaacaattctctcctggtccccaccagtggcatctacttcgtctactcccaggtggtcttctctgggaaagcctactctcccaaggccacctcctccccactctacctggcccatgaggtccagctcttctcctcccagtaccccttccatgtgcctctcctcagctcccagaagatggtgtatccagggctgcaggaaccctggctgcactcgatgtaccacggggctgcgttccagctcacccagggagaccagctatccacccacacagatggcatcccccacctagtcctcagccctagtactgtcttctttggagccttcgctctgtag

SEQ ID NO: 4651 - RNA, 618 nt, synthetic construct
  misc_feature 1..618: note = derived and/or modified sequence opt1 fromLTalpha__Homo_sapiens__AAA61199
  source 1..618: mol_type = other RNA
atgacgcccccggagcgcctgttcctcccccgggtgtgcggcaccaccctgcacctcctcctgctggggctcctgctggtcctcctgcccggcgcccaggggctgcccggcgtggggctcaccccgagcgccgcgcagaccgcccgccagcaccccaagatgcacctggcccactccaccctgaagcccgccgcccacctcatcggcgaccccagcaagcagaactccctgctgtggcgggcgaacacggaccgcgccttcctccaggacggcttcagcctgtccaacaacagcctgctcgtgccgacctccgggatctacttcgtctacagccaggtggtgttctccggcaaggcctacagccccaaggccacctccagccccctgtacctggcgcacgaggtccagctgttctccagccagtaccccttccacgtgccgctgctgtccagccagaagatggtgtaccccgggctccaggagccctggctgcactccatgtaccacggcgccgccttccagctgacccagggggaccagctcagcacgcacaccgacggcatcccccacctggtcctgtccccgagcaccgtgttcttcggcgccttcgccctctga

SEQ ID NO: 4652 - RNA, 618 nt, synthetic construct
  misc_feature 1..618: note = derived and/or modified sequence opt2 fromLTalpha__Homo_sapiens__AAA61199
  source 1..618: mol_type = other RNA
atgaccccccccgagcgcctcttcctcccccgcgtctgcggcaccaccctccacctcctcctcctcggcctcctcctcgtcctcctccccggcgcccagggcctccccggcgtcggcctcaccccctccgccgcccagaccgcccgccagcaccccaagatgcacctcgcccactccaccctcaagcccgccgcccacctcatcggcgacccctccaagcagaactccctcctctggcgcgccaacaccgaccgcgccttcctccaggacggcttctccctctccaacaactccctcctcgtccccacctccggcatctacttcgtctactcccaggtcgtcttctccggcaaggcctactcccccaaggccacctcctcccccctctacctcgcccacgaggtccagctcttctcctcccagtaccccttccacgtccccctcctctcctcccagaagatggtctaccccggcctccaggagccctggctccactccatgtaccacggcgccgccttccagctcacccagggcgaccagctctccacccacaccgacggcatcccccacctcgtcctctccccctccaccgtcttcttcggcgccttcgccctctga

SEQ ID NO: 4653 - RNA, 618 nt, synthetic construct
  misc_feature 1..618: note = derived and/or modified sequence opt3 fromLTalpha__Homo_sapiens__AAA61199
  source 1..618: mol_type = other RNA
atgacaccccctgagagactgttcctcccaagggtgtgcggcaccactcttcacctgttgttactggggctactcctggtccttctgccgggagcccagggtttgcccggcgttgggctcacgcctagcgctgcacaaaccgcccggcagcatccaaagatgcacctggcgcattccacactgaaacccgctgcccacctcatcggagacccttctaagcagaactcattactgtggcgcgcaaatactgatcgagcctttcttcaggacggcttcagtttgagcaacaattccctgctagtgccaacctctggtatttactttgtatattcgcaagtggtcttctcagggaaggcttacagccccaaagcaacaagttcccctctctatctggcccatgaagtgcagctgttttctagccagtacccattccacgttccgcttttgtcctcacagaaaatggtgtatcccggactccaagagccttggctgcacagtatgtaccatggcgctgcctttcagttaacccagggcgatcagctgagcactcacacagacgggataccacatctcgtcctttctccctccaccgtgttctttggagcgttcgcactgtga

SEQ ID NO: 4654 - RNA, 618 nt, synthetic construct
  misc_feature 1..618: note = derived and/or modified sequence opt4 fromLTalpha__Homo_sapiens__AAA61199
  source 1..618: mol_type = other RNA
atgaccccccccgagagactgttcctgcccagagtgtgcggcaccaccctgcacctgctgctgctgggcctgctgctggtgctgctgcccggcgcccagggcctgcccggcgtgggcctgacccccagcgccgcccagaccgccagacagcaccccaagatgcacctggcccacagcaccctgaagcccgccgcccacctgatcggcgaccccagcaagcagaacagcctgctgtggagagccaacaccgacagagccttcctgcaggacggcttcagcctgagcaacaacagcctgctggtgcccaccagcggcatctacttcgtgtacagccaggtggtgttcagcggcaaggcctacagccccaaggccaccagcagccccctgtacctggcccacgaggtgcagctgttcagcagccagtaccccttccacgtgcccctgctgagcagccagaagatggtgtaccccggcctgcaggagccctggctgcacagcatgtaccacggcgccgccttccagctgacccagggcgaccagctgagcacccacaccgacggcatcccccacctggtgctgagccccagcaccgtgttcttcggcgccttcgccctgtga

SEQ ID NO: 4655 - RNA, 618 nt, synthetic construct
  misc_feature 1..618: note = derived and/or modified sequence opt5 fromLTalpha__Homo_sapiens__AAA61199
  source 1..618: mol_type = other RNA
atgacaccccctgagagactgttcctcccgcgggtgtgcggcaccacgctgcaccttctgctcctggggcttctgctcgtcctgctgcccggagcccagggcctccctggggttggactgacccccagcgctgcccaaacagcgcgccagcatcctaagatgcaccttgctcattccaccctgaaacccgccgcccacctcatcggcgacccttctaagcagaacagcctgctttggagagctaatacagatcgggcctttctgcaggacgggttctccctctctaacaatagcctgctggtgccgacctccggaatttactttgtgtattctcaagtcgtgttcagcggcaaggcttactcccccaaagccacaagctctcctctctatctggcgcatgaagttcagctgttttccagccagtaccccttccacgtgcctcttctctcttcccagaaaatggtctatcccggcctgcaagagccgtggcttcacagcatgtaccatggggccgcttttcagctgacccagggagatcagctctctacgcacaccgacggcatccctcatctggtgctgtcccccagcacagttttctttggggccttcgctctctga

SEQ ID NO: 4656 - RNA, 618 nt, synthetic construct
  misc_feature 1..618: note = derived and/or modified sequence opt6 fromLTalpha__Homo_sapiens__AAA61199
  source 1..618: mol_type = other RNA
atgacaccaccagaaagactattcctaccacgcgtctgcggaacaacattacacctcttactactaggactactattagtattactaccaggagcacaaggcctaccaggagtaggactaacaccatcagctgcacaaacagcacgccaacacccaaaaatgcacttagcacactcaactttaaaaccagcagcacatctaataggagacccatcaaaacaaaactcactattatggagagcaaacacagacagagcattcctacaagacggattctccttatcaaacaactcactcctagtaccaacatcaggaatatacttcgtatactcacaagtagtattttcaggaaaagcatactcacccaaagcaacatcatcacccctatacctagcacacgaagtacaactattctcatctcaatacccattccacgtacccttactatcttcacaaaaaatggtatacccaggcctacaagaaccatggttacactcaatgtaccacggagcagcattccaactaacacaaggcgaccaattatcaacacacacagacggaataccacacctagtactatcaccatcaacagtcttcttcggagcattcgcactataa

SEQ ID NO: 4657 - protein, 611 aa, synthetic construct
  REGION 1..611: note = LTalpha__Homo_sapiens__P09960
MPEIVDTCSLASPASVCRTKHLHLRCSVDFTRRTLTGTAALTVQSQEDNLRSLVLDTKDLTIEKVVINGQEVKYALGERQSYKGSPMEISLPIALSKNQEIVIEISFETSPKSSALQWLTPEQTSGKEHPYLFSQCQAIHCRAILPCQDTPSVKLTYTAEVSVPKELVALMSAIRDGETPDPEDPSRKIYKFIQKVPIPCYLIALVVGALESRQIGPRTLVWSEKEQVEKSAYEFSETESMLKIAEDLGGPYVWGQYDLLVLPPSFPYGGMENPCLTFVTPTLLAGDKSLSNVIAHEISHSWTGNLVTNKTWDHFWLNEGHTVYLERHICGRLFGEKFRHFNALGGWGELQNSVKTFGETHPFTKLVVDLTDIDPDVAYSSVPYEKGFALLFYLEQLLGGPEIFLGFLKAYVEKFSYKSITTDDWKDFLYSYFKDKVDVLNQVDWNAWLYSPGLPPIKPNYDMTLTNACIALSQRWITAKEDDLNSFNATDLKDLSSHQLNEFLAQTLQRAPLPLGHIKRMQEVYNFNAINNSEIRFRWLRLCIQSKWEDAIPLALKMATEQGRMKFTRPLFKDLAAFDKSHDQAVRTYQEHKASMHPVTAMLVGKDLKVD

SEQ ID NO: 4658 - RNA, 1836 nt, synthetic construct
  misc_feature 1..1836: note = LTalpha__Homo_sapiens__AAA36176
  source 1..1836: mol_type = other RNA
atgcccgagatagtggatacctgttcgttggcctctccggcttccgtctgccggaccaagcacctgcacctgcgctgcagcgtcgactttactcgccggacgctgaccgggactgctgctctcacggtccagtctcaggaggacaatctgcgcagcctggttttggatacaaaggaccttacaatagaaaaagtagtgatcaatggacaagaagtcaaatatgctcttggagaaagacaaagttacaagggatcgccaatggaaatctctcttcctatcgctttgagcaaaaatcaagaaattgttatagaaatttcttttgagacctctccaaaatcttctgctctccagtggctcactcctgaacagacttctgggaaggaacacccatatctctttagtcagtgccaggccatccactgcagagcaatccttccttgtcaggacactccttctgtgaaattaacctatactgcagaggtgtctgtccctaaagaactggtggcacttatgagtgctattcgtgatggagaaacacctgacccagaagacccaagcaggaaaatatacaaattcatccaaaaagttccaataccctgctacctgattgctttagttgttggagctttagaaagcaggcaaattggcccaagaactttggtgtggtctgagaaagagcaggtggaaaagtctgcttatgagttttctgagactgaatctatgcttaaaatagcagaagatctgggaggaccgtatgtatggggacagtatgacctattggtcctgccaccatccttcccttatggtggcatggagaatccttgccttacttttgtaactcctactctactggcaggcgacaagtcactctccaatgtcattgcacatgaaatatctcatagctggacagggaatctagtgaccaacaaaacttgggatcacttttggttaaatgagggacatactgtgtacttggaacgccacatttgcggacgattgtttggtgaaaagttcagacattttaatgctctgggaggatggggagaactacagaattcggtaaagacatttggggagacacatcctttcaccaaacttgtggttgatctgacagatatagaccctgatgtagcttattcttcagttccctatgagaagggctttgctttacttttttaccttgaacaactgcttggaggaccagagattttcctaggattcttaaaagcttatgttgagaagttttcctataagagcataactactgatgactggaaggatttcctgtattcctattttaaagataaggttgatgttctcaatcaagttgattggaatgcctggctctactctcctggactgcctcccataaagcccaattatgatatgactctgacaaatgcttgtattgccttaagtcaaagatggattactgccaaagaagatgatttaaattcattcaatgccacagacctgaaggatctctcttctcatcaattgaatgagtttttagcacagacgctccagagggcacctcttccattggggcacataaagcgaatgcaagaggtgtacaacttcaatgccattaacaattctgaaatacgattcagatggctgcggctctgcattcaatccaagtgggaggacgcaattcctttggcgctaaagatggcaactgaacaaggaagaatgaagtttacccggcccttattcaaggatcttgctgcctttgacaaatcccatgatcaagctgtccgaacctaccaagagcacaaagcaagcatgcatcccgtgactgcaatgctggtggggaaagacttaaaagtggattaa

SEQ ID NO: 4659 - RNA, 1836 nt, synthetic construct
  misc_feature 1..1836: note = derived and/or modified sequence opt1 fromLTalpha__Homo_sapiens__AAA36176
  source 1..1836: mol_type = other RNA
atgcccgagatcgtggacacgtgcagcctggcctccccggccagcgtctgccgcaccaagcacctccacctccggtgctccgtggacttcacccgccggaccctgaccggcaccgcggccctgacggtgcagagccaggaggacaacctgcgctccctggtcctcgacaccaaggacctgaccatcgagaaggtggtgatcaacgggcaggaggtcaagtacgccctgggcgagcggcagagctacaaggggtcccccatggagatcagcctccccatcgccctgtccaagaaccaggagatcgtgatcgagatcagcttcgagacctcccccaagagctccgccctgcagtggctcacgccggagcagaccagcggcaaggagcacccctacctgttctcccagtgccaggcgatccactgccgcgccatcctgccctgccaggacacccccagcgtgaagctcacctacacggccgaggtctccgtgccgaaggagctggtggccctgatgagcgcgatccgggacggggagacccccgaccccgaggacccctcccgcaagatctacaagttcatccagaaggtcccgatcccctgctacctcatcgccctggtggtgggcgccctggagagccggcagatcggcccccgcaccctcgtctggagcgagaaggagcaggtcgagaagtccgcctacgagttcagcgagaccgagtccatgctgaagatcgccgaggacctcgggggcccctacgtgtgggggcagtacgacctgctggtgctgccgcccagcttcccctacggcgggatggagaacccctgcctcacgttcgtgaccccgaccctgctggcgggcgacaagtccctcagcaacgtgatcgcccacgagatctcccacagctggaccggcaacctggtcacgaacaagacctgggaccacttctggctgaacgaggggcacaccgtgtacctcgagcggcacatctgcggccgcctgttcggggagaagttccggcacttcaacgccctgggcggctggggcgagctccagaactccgtgaagaccttcggggagacgcaccccttcaccaagctggtcgtggacctgaccgacatcgaccccgacgtcgcctacagctccgtgccctacgagaaggggttcgccctcctgttctacctggagcagctcctgggcgggccggagatcttcctgggcttcctcaaggcgtacgtggagaagttcagctacaagtccatcaccacggacgactggaaggacttcctgtacagctacttcaaggacaaggtcgacgtgctgaaccaggtggactggaacgcctggctctactcccccggcctgccgcccatcaagcccaactacgacatgaccctgaccaacgcctgcatcgccctgagccagcgctggatcaccgccaaggaggacgacctcaactccttcaacgcgacggacctgaaggacctgagctcccaccagctcaacgagttcctggcccagaccctgcagcgggcgcccctccccctggggcacatcaagcgcatgcaggaggtctacaacttcaacgccatcaacaacagcgagatccggttccgctggctgcggctctgcatccagagcaagtgggaggacgccatcccgctggccctgaagatggccaccgagcagggccgcatgaagttcacccggcccctcttcaaggacctggccgccttcgacaagtcccacgaccaggcggtgcgcacgtaccaggagcacaaggccagcatgcaccccgtgaccgccatgctggtcgggaaggacctcaaggtggactga

SEQ ID NO: 4660 - RNA, 1836 nt, synthetic construct
  misc_feature 1..1836: note = derived and/or modified sequence opt2 fromLTalpha__Homo_sapiens__AAA36176
  source 1..1836: mol_type = other RNA
atgcccgagatcgtcgacacctgctccctcgcctcccccgcctccgtctgccgcaccaagcacctccacctccgctgctccgtcgacttcacccgccgcaccctcaccggcaccgccgccctcaccgtccagtcccaggaggacaacctccgctccctcgtcctcgacaccaaggacctcaccatcgagaaggtcgtcatcaacggccaggaggtcaagtacgccctcggcgagcgccagtcctacaagggctcccccatggagatctccctccccatcgccctctccaagaaccaggagatcgtcatcgagatctccttcgagacctcccccaagtcctccgccctccagtggctcacccccgagcagacctccggcaaggagcacccctacctcttctcccagtgccaggccatccactgccgcgccatcctcccctgccaggacaccccctccgtcaagctcacctacaccgccgaggtctccgtccccaaggagctcgtcgccctcatgtccgccatccgcgacggcgagacccccgaccccgaggacccctcccgcaagatctacaagttcatccagaaggtccccatcccctgctacctcatcgccctcgtcgtcggcgccctcgagtcccgccagatcggcccccgcaccctcgtctggtccgagaaggagcaggtcgagaagtccgcctacgagttctccgagaccgagtccatgctcaagatcgccgaggacctcggcggcccctacgtctggggccagtacgacctcctcgtcctccccccctccttcccctacggcggcatggagaacccctgcctcaccttcgtcacccccaccctcctcgccggcgacaagtccctctccaacgtcatcgcccacgagatctcccactcctggaccggcaacctcgtcaccaacaagacctgggaccacttctggctcaacgagggccacaccgtctacctcgagcgccacatctgcggccgcctcttcggcgagaagttccgccacttcaacgccctcggcggctggggcgagctccagaactccgtcaagaccttcggcgagacccaccccttcaccaagctcgtcgtcgacctcaccgacatcgaccccgacgtcgcctactcctccgtcccctacgagaagggcttcgccctcctcttctacctcgagcagctcctcggcggccccgagatcttcctcggcttcctcaaggcctacgtcgagaagttctcctacaagtccatcaccaccgacgactggaaggacttcctctactcctacttcaaggacaaggtcgacgtcctcaaccaggtcgactggaacgcctggctctactcccccggcctcccccccatcaagcccaactacgacatgaccctcaccaacgcctgcatcgccctctcccagcgctggatcaccgccaaggaggacgacctcaactccttcaacgccaccgacctcaaggacctctcctcccaccagctcaacgagttcctcgcccagaccctccagcgcgcccccctccccctcggccacatcaagcgcatgcaggaggtctacaacttcaacgccatcaacaactccgagatccgcttccgctggctccgcctctgcatccagtccaagtgggaggacgccatccccctcgccctcaagatggccaccgagcagggccgcatgaagttcacccgccccctcttcaaggacctcgccgccttcgacaagtcccacgaccaggccgtccgcacctaccaggagcacaaggcctccatgcaccccgtcaccgccatgctcgtcggcaaggacctcaaggtcgactga

SEQ ID NO: 4661 - RNA, 1836 nt, synthetic construct
  misc_feature 1..1836: note = derived and/or modified sequence opt3 fromLTalpha__Homo_sapiens__AAA36176
  source 1..1836: mol_type = other RNA
atgcccgagatcgtggatacctgcagcctggcctcccctgcttctgtctgtagaacaaagcacctccatcttaggtgctcagttgacttcactcggcgcacgctgaccggcacagcagccttgactgtgcagagtcaagaagacaacttacgaagcctggtactagataccaaagacctcacaattgagaaggtggtcataaatgggcaggaagtgaaatacgcgctgggagagcgtcagtcctataagggttctccaatggaaatctcgcttccgattgctctgtcaaagaaccaggagatcgttattgagatcagctttgaaaccagtcccaagtcctctgccttgcaatggctcactcctgagcagacaagcggcaaggaacacccatacctgttctcccagtgtcaggcaatacattgcagagccatcctgccctgtcaagataccccttcagtgaaactcacgtatactgctgaggtcagtgtgccaaaggagttagtagcactgatgagcgccattagggacggggaaacccccgatcctgaggacccatctcggaaaatctacaagtttattcagaaagttccgatcccctgctatcttatagctttggtggtcggagccctggaatcccgccagattggccctagaacacttgtgtggtcagagaaggaacaggtggagaaaagcgcgtacgagttcagtgaaactgagtctatgctcaaaatcgcagaagatctgggtgggccatatgtctggggacaatacgaccttctggttttgcccccttcctttccatacggcggcatggagaatccctgtctcaccttcgtgacaccgaccctgttagccggggataagagcctgtcgaacgtaattgctcacgaaatctctcattcctggacgggaaatctcgtgactaacaaaacatgggaccacttttggcttaatgagggtcacaccgtctatctggagaggcatatctgcggccggttgttcggggaaaagtttcgccacttcaacgccctaggaggctggggtgagctgcaaaattcagtgaaaacttttggggaaacacatcctttcaccaagctcgttgtggatctgacggacattgaccccgatgtcgcatacagtagcgtgccatatgagaaaggatttgctctactgttctacttggaacagctcctgggcggccctgagatattcttagggtttctgaaggcctatgtagagaagttctcctacaaatctatcaccacagacgattggaaggactttctatatagctacttcaaagataaggttgacgtgctcaaccaggtcgattggaatgcgtggctgtactcacccggacttccacccattaaacctaactatgacatgactttgaccaatgcctgtatcgcactgagtcagcgatggataacagctaaggaagatgacctcaactcctttaatgccactgatctgaaggaccttagctctcaccagctgaacgagttcttggctcagaccctccaaagagccccactgccgttaggtcacattaaaaggatgcaggaagtgtacaactttaatgcaatcaacaattcagagatccggttccgttggctgcgcctatgcattcagagtaagtgggaggacgccatccccctcgctctgaaaatggcgacagaacagggcagaatgaagtttaccaggcctcttttcaaagatttggcagcctttgacaagagccatgatcaagctgtccggacttatcaggagcacaaggcctccatgcatccagtgacggcaatgctggttgggaaagacctcaaggtggattga

SEQ ID NO: 4662 - RNA, 1836 nt, synthetic construct
  misc_feature 1..1836: note = derived and/or modified sequence opt4 fromLTalpha__Homo_sapiens__AAA36176
  source 1..1836: mol_type = other RNA
atgcccgagatcgtggacacctgcagcctggccagccccgccagcgtgtgcagaaccaagcacctgcacctgagatgcagcgtggacttcaccagaagaaccctgaccggcaccgccgccctgaccgtgcagagccaggaggacaacctgagaagcctggtgctggacaccaaggacctgaccatcgagaaggtggtgatcaacggccaggaggtgaagtacgccctgggcgagagacagagctacaagggcagccccatggagatcagcctgcccatcgccctgagcaagaaccaggagatcgtgatcgagatcagcttcgagaccagccccaagagcagcgccctgcagtggctgacccccgagcagaccagcggcaaggagcacccctacctgttcagccagtgccaggccatccactgcagagccatcctgccctgccaggacacccccagcgtgaagctgacctacaccgccgaggtgagcgtgcccaaggagctggtggccctgatgagcgccatcagagacggcgagacccccgaccccgaggaccccagcagaaagatctacaagttcatccagaaggtgcccatcccctgctacctgatcgccctggtggtgggcgccctggagagcagacagatcggccccagaaccctggtgtggagcgagaaggagcaggtggagaagagcgcctacgagttcagcgagaccgagagcatgctgaagatcgccgaggacctgggcggcccctacgtgtggggccagtacgacctgctggtgctgccccccagcttcccctacggcggcatggagaacccctgcctgaccttcgtgacccccaccctgctggccggcgacaagagcctgagcaacgtgatcgcccacgagatcagccacagctggaccggcaacctggtgaccaacaagacctgggaccacttctggctgaacgagggccacaccgtgtacctggagagacacatctgcggcagactgttcggcgagaagttcagacacttcaacgccctgggcggctggggcgagctgcagaacagcgtgaagaccttcggcgagacccaccccttcaccaagctggtggtggacctgaccgacatcgaccccgacgtggcctacagcagcgtgccctacgagaagggcttcgccctgctgttctacctggagcagctgctgggcggccccgagatcttcctgggcttcctgaaggcctacgtggagaagttcagctacaagagcatcaccaccgacgactggaaggacttcctgtacagctacttcaaggacaaggtggacgtgctgaaccaggtggactggaacgcctggctgtacagccccggcctgccccccatcaagcccaactacgacatgaccctgaccaacgcctgcatcgccctgagccagagatggatcaccgccaaggaggacgacctgaacagcttcaacgccaccgacctgaaggacctgagcagccaccagctgaacgagttcctggcccagaccctgcagagagcccccctgcccctgggccacatcaagagaatgcaggaggtgtacaacttcaacgccatcaacaacagcgagatcagattcagatggctgagactgtgcatccagagcaagtgggaggacgccatccccctggccctgaagatggccaccgagcagggcagaatgaagttcaccagacccctgttcaaggacctggccgccttcgacaagagccacgaccaggccgtgagaacctaccaggagcacaaggccagcatgcaccccgtgaccgccatgctggtgggcaaggacctgaaggtggactga

SEQ ID NO: 4663 - RNA, 1836 nt, synthetic construct
  misc_feature 1..1836: note = derived and/or modified sequence opt5 fromLTalpha__Homo_sapiens__AAA36176
  source 1..1836: mol_type = other RNA
atgcccgagatcgtggatacctgcagcctggcctcccctgcttctgtctgtagaacaaagcacctccatctgcggtgcagcgttgacttcacgcgcagaacccttacaggcaccgccgcgctgacagtgcagtcccaagaagacaacctccggtctctggtgcttgataccaaagacctgacaattgagaaggtcgtgatcaatgggcaggaagttaaatacgctctcggagagcgccagagctataagggctccccgatggaaatttctctgcccatcgccctgagcaaaaaccaggagattgtgatcgagatctcctttgaaaccagccctaagtcttccgccctccaatggctgacgcccgagcagaccagcgggaaggaacacccttaccttttctctcagtgtcaggctattcattgcagagccatcctgccctgtcaagatacaccttccgtcaaactcacctatacagctgaggtgagcgttccgaaggagctggtggcccttatgtctgcgattcgggacggagaaacccccgatcctgaggacccctcccgcaaaatctacaagtttattcagaaagtccctatcccctgctatctgattgccctcgtggtgggcgctctggaaagcagacagatcgggccgcggacgctggtctggtccgagaaggaacaggttgagaagtctgcctacgagttcagcgaaacagagtccatgctcaaaatcgctgaagatctgggaggcccttatgtgtggggccaatacgaccttctggtgctgccccctagctttccctacgggggaatggagaatccctgtctcaccttcgtcacacctacccttctggccggcgataagtctctctccaacgtgattgcgcacgaaatcagccattcttggaccgggaatctggttacaaacaaaacgtgggaccacttttggctgaatgagggacacaccgtgtatctcgagcgccatatttgcggcagactgttcggggaaaagtttcggcacttcaacgcccttggaggctggggcgagctgcagaatagcgtcaaaacatttggggaaacccatccgttcacaaagctcgtggttgatctgaccgacatcgaccccgatgtggcttactcctctgtcccttatgagaaaggatttgcccttctgttctacctcgaacagctgctgggcgggcccgagattttcctcggatttctgaaggcttatgtggagaagttcagctacaaatccatcacgacagacgattggaaggactttctttatagctacttcaaagataaggtcgacgtgctgaaccaagttgattggaatgcctggctctactctcctggcctgcccccgatcaaacctaactatgacatgaccctgaccaatgcctgtattgctctttcccagcgctggatcacagcgaaggaagatgacctcaacagctttaatgccaccgatctgaaggacctgtcttcccaccagctcaacgagttcctggctcagacacttcaaagagctcccctgcctctcgggcacattaaacggatgcaggaagtgtacaactttaatgccatcaacaatagcgagattcgcttcagatggctgcggctgtgcatccagtccaagtgggaggacgccatcccccttgccctcaaaatggcgacggaacagggaagaatgaagtttacccgccctctgttcaaagatctggctgcctttgacaagtctcatgatcaagccgtccggacatatcaggagcacaaggctagcatgcatcccgtgaccgccatgctcgttggcaaagacctgaaggtggattga

SEQ ID NO: 4664 - RNA, 1836 nt, synthetic construct
  misc_feature 1..1836: note = derived and/or modified sequence opt6 fromLTalpha__Homo_sapiens__AAA36176
  source 1..1836: mol_type = other RNA
atgccagaaatagtagatacttgttcactagcaagcccagcatctgtctgtagaactaaacacctacacctcaggtgctctgtagatttcacacgacgaacattaacaggcacagctgcacttacagtacaatcacaagaagataacttaagaagcttagtactagacacaaaagacttaactatagagaaagttgtaataaatggtcaagaagtaaaatatgcacttggtgaacgtcaatcatacaaaggatctcctatggaaatatcattacccatcgctttaagcaaaaaccaagaaattgtcattgaaatctccttcgaaacaagcccaaaatcatcagcactacaatggctaacccctgagcaaacttcaggcaaagaacacccctacttattctcacaatgtcaagcaatacactgtagggcaatattaccatgtcaagacacaccatcagttaaactaacttataccgcagaagtatcagtacccaaagaattagtagccttaatgtcagcaataagagatggagaaactcccgacccagaagatcccagccgtaaaatttataaattcattcagaaagtacctataccttgttacctaattgccctagtcgtcggagccctagaaagcagacaaataggaccaagaacactagtatggagtgagaaagaacaagtagaaaaatccgcctatgaattttcagaaacagaatcaatgttaaaaatagcagaggatctcggaggaccatacgtttggggtcaatacgatctcctagtattacctccatcattcccctacggaggaatggaaaatccctgtctaacattcgtaaccccaacattactagcaggagataaatcgctatccaacgtaattgcacatgaaatatcacattcatggacaggtaacctagtaacaaacaaaacatgggatcacttctggttaaatgaaggacatacagtatacctagaacgtcatatatgcggcagacttttcggagaaaagtttcgacactttaacgcactaggtggctggggggaactccaaaactcagttaaaacatttggagaaacacatcccttcacaaaactagtagtagatctaaccgatattgacccagacgttgcttattcatcagttccatacgaaaaaggattcgcactactattttacctagaacaacttttaggcggacctgaaattttcttaggctttctaaaagcatacgtagaaaaatttagttataaatcaatcacaacagatgactggaaagatttcttatattcgtacttcaaggataaagtagacgtactaaatcaagtagactggaacgcatggctatactctccaggactccctccaattaaacccaactacgatatgacattaacaaacgcatgtatagcactatcacaaagatggattacagctaaagaagacgaccttaattcattcaacgcaacagatttaaaagacctatcatctcatcaactcaacgaattcctagcacaaaccttacaaagagcaccactaccactaggacacataaaaagaatgcaagaagtctataactttaacgcaataaataactcagaaattagatttagatggctcagactctgtatacaatcaaaatgggaggatgcaataccattagcactaaaaatggcaacagaacaaggtagaatgaaatttacaagacctctttttaaagacctcgccgcattcgacaaatcacacgaccaagcagtaagaacttatcaagaacacaaggcctcaatgcatccagtaacagcaatgctagttggaaaagatttaaaagtcgattaa

SEQ ID NO: 4665 - protein, 205 aa, synthetic construct
  REGION 1..205: note = LTalpha__Homo_sapiens__Q5ST95
MTPPERLFLPRVCGTTLHLLLLGLLLVLLPGAQGLPGVGLTPSAAQTARQHPKMHLAHSNLKPAAHLIGDPSKQNSLLWRANTDRAFLQDGFSLSNNSLLVPTSGIYFVYSQVVFSGKAYSPKATSSPLYLAHEVQLFSSQYPFHVPLLSSQKMVYPGLQEPWLHSMYHGAAFQLTQGDQLSTHTDGIPHLVLSPSTVFFGAFAL

SEQ ID NO: 4666 - RNA, 618 nt, synthetic construct
  misc_feature 1..618: note = LTalpha__Homo_sapiens__BAE78638
  source 1..618: mol_type = other RNA
atgacaccacctgaacgtctcttcctcccaagggtgtgtggcaccaccctacacctcctccttctggggctgctgctggttctgctgcctggggcccaggggctccctggtgttggcctcacaccttcagctgcccagactgcccgtcagcaccccaagatgcatcttgcccacagcaacctcaaacctgctgctcacctcattggagaccccagcaagcagaactcactgctctggagagcaaacacggaccgtgccttcctccaggatggtttctccttgagcaacaattctctcctggtccccaccagtggcatctacttcgtctactcccaggtggtcttctctgggaaagcctactctcccaaggccacctcctccccactctacctggcccatgaggtccagctcttctcctcccagtaccccttccatgtgcctctcctcagctcccagaagatggtgtatccagggctgcaggaaccctggctgcactcgatgtaccacggggctgcgttccagctcacccagggagaccagctatccacccacacagatggcatcccccacctagtcctcagccctagtactgtcttctttggagccttcgctctgtag

SEQ ID NO: 4667 - RNA, 618 nt, synthetic construct
  misc_feature 1..618: note = derived and/or modified sequence opt1 fromLTalpha__Homo_sapiens__BAE78638
  source 1..618: mol_type = other RNA
atgacgcccccggagcgcctgttcctcccccgggtgtgcggcaccaccctgcacctcctcctgctggggctcctgctggtcctcctgcccggcgcccaggggctgcccggcgtggggctcaccccgagcgccgcgcagaccgcccgccagcaccccaagatgcacctggcccactccaacctgaagcccgccgcccacctcatcggcgaccccagcaagcagaactccctgctgtggcgggcgaacaccgaccgcgccttcctccaggacggcttcagcctgtccaacaacagcctgctcgtgccgacgtccgggatctacttcgtctacagccaggtggtgttctccggcaaggcctacagccccaaggccacctccagccccctgtacctggcgcacgaggtccagctgttctccagccagtaccccttccacgtgccgctgctgtccagccagaagatggtgtaccccgggctccaggagccctggctgcactccatgtaccacggcgccgccttccagctgacccagggggaccagctcagcacccacacggacggcatcccccacctggtcctgtccccgagcaccgtgttcttcggcgccttcgccctctga

SEQ ID NO: 4668 - RNA, 618 nt, synthetic construct
  misc_feature 1..618: note = derived and/or modified sequence opt2 fromLTalpha__Homo_sapiens__BAE78638
  source 1..618: mol_type = other RNA
atgaccccccccgagcgcctcttcctcccccgcgtctgcggcaccaccctccacctcctcctcctcggcctcctcctcgtcctcctccccggcgcccagggcctccccggcgtcggcctcaccccctccgccgcccagaccgcccgccagcaccccaagatgcacctcgcccactccaacctcaagcccgccgcccacctcatcggcgacccctccaagcagaactccctcctctggcgcgccaacaccgaccgcgccttcctccaggacggcttctccctctccaacaactccctcctcgtccccacctccggcatctacttcgtctactcccaggtcgtcttctccggcaaggcctactcccccaaggccacctcctcccccctctacctcgcccacgaggtccagctcttctcctcccagtaccccttccacgtccccctcctctcctcccagaagatggtctaccccggcctccaggagccctggctccactccatgtaccacggcgccgccttccagctcacccagggcgaccagctctccacccacaccgacggcatcccccacctcgtcctctccccctccaccgtcttcttcggcgccttcgccctctga

SEQ ID NO: 4669 - RNA, 618 nt, synthetic construct
  misc_feature 1..618: note = derived and/or modified sequence opt3 fromLTalpha__Homo_sapiens__BAE78638
  source 1..618: mol_type = other RNA
atgacaccccctgagagactgttcctcccaagggtgtgcggcaccactcttcacctgttgttactggggctactcctggtccttctgccgggagcccagggtttgcccggcgttgggctcacgcctagcgctgcacaaaccgcccggcagcatccaaagatgcacctggcgcattccaacctgaaacccgctgcccacctcatcggagacccttctaagcagaactcattactgtggcgcgcaaatacagatcgagcctttcttcaggacggcttcagtttgagcaataactccctgctagtgccaacttctggtatttactttgtatattcgcaagtggtcttctcagggaaggcttacagccccaaagcaaccagttcccctctctatctggcccatgaagtgcagctgttttctagccagtacccattccacgttccgcttttgtcctcacagaaaatggtgtatcccggactccaagagccttggctgcacagtatgtaccatggcgctgcctttcagttaacacagggcgatcagctgagcacccacactgacgggataccacatctcgtcctttctccctccacagtgttctttggagcgttcgcactgtga

SEQ ID NO: 4670 - RNA, 618 nt, synthetic construct
  misc_feature 1..618: note = derived and/or modified sequence opt4 fromLTalpha__Homo_sapiens__BAE78638
  source 1..618: mol_type = other RNA
atgaccccccccgagagactgttcctgcccagagtgtgcggcaccaccctgcacctgctgctgctgggcctgctgctggtgctgctgcccggcgcccagggcctgcccggcgtgggcctgacccccagcgccgcccagaccgccagacagcaccccaagatgcacctggcccacagcaacctgaagcccgccgcccacctgatcggcgaccccagcaagcagaacagcctgctgtggagagccaacaccgacagagccttcctgcaggacggcttcagcctgagcaacaacagcctgctggtgcccaccagcggcatctacttcgtgtacagccaggtggtgttcagcggcaaggcctacagccccaaggccaccagcagccccctgtacctggcccacgaggtgcagctgttcagcagccagtaccccttccacgtgcccctgctgagcagccagaagatggtgtaccccggcctgcaggagccctggctgcacagcatgtaccacggcgccgccttccagctgacccagggcgaccagctgagcacccacaccgacggcatcccccacctggtgctgagccccagcaccgtgttcttcggcgccttcgccctgtga

SEQ ID NO: 4671 - RNA, 618 nt, synthetic construct
  misc_feature 1..618: note = derived and/or modified sequence opt5 fromLTalpha__Homo_sapiens__BAE78638
  source 1..618: mol_type = other RNA
atgacaccccctgagagactgttcctcccgcgggtgtgcggcaccacgctgcaccttctgctcctggggcttctgctcgtcctgctgcccggagcccagggcctccctggggttggactgacccccagcgctgcccaaacagcgcgccagcatcctaagatgcaccttgctcattccaacctgaaacccgccgcccacctcatcggcgacccttctaagcagaatagcctgctttggagagctaacaccgatcgggcctttctgcaggacgggttctccctctctaataacagcctgctggtgccgacatccggaatttactttgtgtattctcaagtcgtgttcagcggcaaggcttactcccccaaagccaccagctctcctctctatctggcgcatgaagttcagctgttttccagccagtaccccttccacgtgcctcttctctcttcccagaaaatggtctatcccggcctgcaagagccgtggcttcacagcatgtaccatggggccgcttttcagctgacacagggagatcagctctctacccacacggacggcatccctcatctggtgctgtcccccagcaccgttttctttggggccttcgctctctga

SEQ ID NO: 4672 - RNA, 618 nt, synthetic construct
  misc_feature 1..618: note = derived and/or modified sequence opt6 fromLTalpha__Homo_sapiens__BAE78638
  source 1..618: mol_type = other RNA
atgacaccaccagaaagactattcctaccaagagtatgcggaacaacattacacctactactactaggattactactagtattattacccggagcacaaggcctaccaggagttggactaacaccatcagcagcacaaacagcaagacaacacccaaaaatgcacctagcacactcaaatctaaaacccgcagcacacctaatcggagacccctccaaacaaaactcacttctatggagagcaaatacagatagagcattcctacaagacggcttctcattatcaaacaactcactactagtaccaacatctggaatatacttcgtatattcccaagtagtattctcaggaaaagcatactcaccaaaagcaacatcatccccactatacttagcacacgaagtacaattattttcatcccaatacccatttcacgtcccactactatcatcccaaaaaatggtatatccaggactacaagaaccatggctacactcaatgtaccacggcgcagcatttcaattaacacaaggcgaccaactatcaacacacacagacggcataccacacctagtactatcaccatcaacagtattcttcggcgcattcgcactataa

SEQ ID NO: 4673 - protein, 205 aa, synthetic construct; identical to SEQ ID NO: 4649
  REGION 1..205: note = LTalpha__Homo_sapiens__Q5STV3

SEQ ID NO: 4674 - RNA, 618 nt, synthetic construct; identical to SEQ ID NO: 4650
  misc_feature 1..618: note = LTalpha__Homo_sapiens__BAC54943
  source 1..618: mol_type = other RNA

SEQ ID NO: 4675 - RNA, 618 nt, synthetic construct; identical to SEQ ID NO: 4651
  misc_feature 1..618: note = derived and/or modified sequence opt1 fromLTalpha__Homo_sapiens__BAC54943
  source 1..618: mol_type = other RNA

SEQ ID NO: 4676 - RNA, 618 nt, synthetic construct; identical to SEQ ID NO: 4652
  misc_feature 1..618: note = derived and/or modified sequence opt2 fromLTalpha__Homo_sapiens__BAC54943
  source 1..618: mol_type = other RNA

SEQ ID NO: 4677 - RNA, 618 nt, synthetic construct; identical to SEQ ID NO: 4653
  misc_feature 1..618: note = derived and/or modified sequence opt3 fromLTalpha__Homo_sapiens__BAC54943
  source 1..618: mol_type = other RNA

SEQ ID NO: 4678 - RNA, 618 nt, synthetic construct; identical to SEQ ID NO: 4654
  misc_feature 1..618: note = derived and/or modified sequence opt4 fromLTalpha__Homo_sapiens__BAC54943
  source 1..618: mol_type = other RNA

SEQ ID NO: 4679 - RNA, 618 nt, synthetic construct; identical to SEQ ID NO: 4655
  misc_feature 1..618: note = derived and/or modified sequence opt5 fromLTalpha__Homo_sapiens__BAC54943
  source 1..618: mol_type = other RNA

SEQ ID NO: 4680 - RNA, 618 nt, synthetic construct
  misc_feature 1..618: note = derived and/or modified sequence opt6 fromLTalpha__Homo_sapiens__BAC54943
  source 1..618: mol_type = other RNA
atgacaccaccagaacgcctatttttaccaagagtatgcggaacaacactacatctactactactaggactactactagtattactaccaggagcacaaggattaccaggagtaggactaacaccatcagcagcacaaacagcaagacaacacccaaaaatgcatctagcacactctacactaaaaccagcagcacacctcataggagacccatcaaaacaaaactcactattatggagagcaaacacagacagagcattcctacaagacggattttcactatcaaacaactcactactagtcccaacatcaggaatatacttcgtatactcacaagtagtattctcaggcaaagcatattcaccaaaagcaacctcatcaccactatacctagcacacgaagtccaactattctcatcacaatacccattccacgtaccattactatcatcacaaaaaatggtatatccaggactacaagaaccatggctacactcaatgtaccacggagccgcattccaactaacacaaggcgaccaactatcaacacacacagatggaataccacacttagtattatcaccctcaaccgtcttcttcggagcattcgcactataa

SEQ ID NO: 4681 - protein, 205 aa, synthetic construct
  REGION 1..205: note = LTalpha__Homo_sapiens__Q6FG55
MTPPERLFLPRVRGTTLHLLLLGLLLVLLPGAQGLPGVGLTPSAAQTARQHPKMHLAHSTLKPAAHLIGDPSKQNSLLWRANTDRAFLQDGFSLSNNSLLVPTSGIYFVYSQVVFSGKAYSPKATSSPLYLAHEVQLFSSQYPFHVPLLSSQKMVYPGLQEPWLHSMYHGAAFQLTQGDQLSTHTDGIPHLVLSPSTVFFGAFAL

SEQ ID NO: 4682 - RNA, 618 nt, synthetic construct
  misc_feature 1..618: note = LTalpha__Homo_sapiens__CAG47049
  source 1..618: mol_type = other RNA
atgacaccacctgaacgtctcttcctcccaagggtgcgtggcaccaccctacacctcctccttctggggctgctgctggttctgctgcctggggcccaggggctccctggtgttggcctcacaccttcagctgcccagactgcccgtcagcaccccaagatgcatcttgcccacagcaccctcaaacctgctgctcacctcattggagaccccagcaagcagaactcactgctctggagagcaaacacggaccgtgccttcctccaggatggtttctccttgagcaacaattctctcctggtccccaccagtggcatctacttcgtctactcccaggtggtcttctctgggaaagcctactctcccaaggccacctcctccccactctacctggcccatgaggtccagctcttctcctcccagtaccccttccatgtgcctctcctcagctcccagaagatggtgtatccagggctgcaggaaccctggctgcactcgatgtaccacggggctgcgttccagctcacccagggagaccagctatccacccacacagatggcatcccccacctagtcctcagccctagtactgtcttctttggagccttcgctctgtag

SEQ ID NO: 4683 - RNA, 618 nt, synthetic construct
  misc_feature 1..618: note = derived and/or modified sequence opt1 fromLTalpha__Homo_sapiens__CAG47049
  source 1..618: mol_type = other RNA
atgacgcccccggagcgcctgttcctcccccgggtgcgcggcaccaccctgcacctcctcctgctggggctcctgctggtcctcctgcccggcgcccaggggctgcccggcgtggggctcaccccgagcgccgcgcagaccgcccggcagcaccccaagatgcacctggcccactccaccctgaagcccgccgcccacctcatcggcgaccccagcaagcagaactccctgctgtggcgcgcgaacacggaccgggccttcctccaggacggcttcagcctgtccaacaacagcctgctcgtgccgacctccgggatctacttcgtctacagccaggtggtgttctccggcaaggcctacagccccaaggccacctccagccccctgtacctggcgcacgaggtccagctgttctccagccagtaccccttccacgtgccgctgctgtccagccagaagatggtgtaccccgggctccaggagccctggctgcactccatgtaccacggcgccgccttccagctgacccagggggaccagctcagcacgcacaccgacggcatcccccacctggtcctgtccccgagcaccgtgttcttcggcgccttcgccctctga

SEQ ID NO: 4684 - RNA, 618 nt, synthetic construct
  misc_feature 1..618: note = derived and/or modified sequence opt2 fromLTalpha__Homo_sapiens__CAG47049
  source 1..618: mol_type = other RNA
atgaccccccccgagcgcctcttcctcccccgcgtccgcggcaccaccctccacctcctcctcctcggcctcctcctcgtcctcctccccggcgcccagggcctccccggcgtcggcctcaccccctccgccgcccagaccgcccgccagcaccccaagatgcacctcgcccactccaccctcaagcccgccgcccacctcatcggcgacccctccaagcagaactccctcctctggcgcgccaacaccgaccgcgccttcctccaggacggcttctccctctccaacaactccctcctcgtccccacctccggcatctacttcgtctactcccaggtcgtcttctccggcaaggcctactcccccaaggccacctcctcccccctctacctcgcccacgaggtccagctcttctcctcccagtaccccttccacgtccccctcctctcctcccagaagatggtctaccccggcctccaggagccctggctccactccatgtaccacggcgccgccttccagctcacccagggcgaccagctctccacccacaccgacggcatcccccacctcgtcctctccccctccaccgtcttcttcggcgccttcgccctctga

SEQ ID NO: 4685 - RNA, 618 nt, synthetic construct
  misc_feature 1..618: note = derived and/or modified sequence opt3 fromLTalpha__Homo_sapiens__CAG47049
  source 1..618: mol_type = other RNA
atgacaccccctgagagactgttcctcccaagggtgcggggcaccactcttcacctgttgttactggggctactcctggtccttctgccgggagcccagggtttgcccggcgttgggctcacgcctagcgctgcacaaaccgcccgccagcatccaaagatgcacctggcgcattccacactgaaacccgctgcccacctcatcggagacccttctaagcagaactcattactgtggcgagcaaatactgatcgtgcctttcttcaggacggcttcagtttgagcaacaattccctgctagtgccaacctctggtatttactttgtatattcgcaagtggtcttctcagggaaggcttacagccccaaagcaacaagttcccctctctatctggcccatgaagtgcagctgttttctagccagtacccattccacgttccgcttttgtcctcacagaaaatggtgtatcccggactccaagagccttggctgcacagtatgtaccatggcgctgcctttcagttaacccagggcgatcagctgagcactcacacagacgggataccacatctcgtcctttctccctccaccgtgttctttggagcgttcgcactgtga

SEQ ID NO: 4686 - RNA, 618 nt, synthetic construct
  misc_feature 1..618: note = derived and/or modified sequence opt4 fromLTalpha__Homo_sapiens__CAG47049
  source 1..618: mol_type = other RNA
atgaccccccccgagagactgttcctgcccagagtgagaggcaccaccctgcacctgctgctgctgggcctgctgctggtgctgctgcccggcgcccagggcctgcccggcgtgggcctgacccccagcgccgcccagaccgccagacagcaccccaagatgcacctggcccacagcaccctgaagcccgccgcccacctgatcggcgaccccagcaagcagaacagcctgctgtggagagccaacaccgacagagccttcctgcaggacggcttcagcctgagcaacaacagcctgctggtgcccaccagcggcatctacttcgtgtacagccaggtggtgttcagcggcaaggcctacagccccaaggccaccagcagccccctgtacctggcccacgaggtgcagctgttcagcagccagtaccccttccacgtgcccctgctgagcagccagaagatggtgtaccccggcctgcaggagccctggctgcacagcatgtaccacggcgccgccttccagctgacccagggcgaccagctgagcacccacaccgacggcatcccccacctggtgctgagccccagcaccgtgttcttcggcgccttcgccctgtga

SEQ ID NO: 4687 - RNA, 618 nt, synthetic construct
  misc_feature 1..618: note = derived and/or modified sequence opt5 fromLTalpha__Homo_sapiens__CAG47049
  source 1..618: mol_type = other RNA
atgacaccccctgagagactgttcctcccgcgggtgcgcggcaccacgctgcaccttctgctcctggggcttctgctcgtcctgctgcccggagcccagggcctccctggggttggactgacccccagcgctgcccaaacagcgagacagcatcctaagatgcaccttgctcattccaccctgaaacccgccgcccacctcatcggcgacccttctaagcagaacagcctgctttggcgggctaatacagatcgcgcctttctgcaggacgggttctccctctctaacaatagcctgctggtgccgacctccggaatttactttgtgtattctcaagtcgtgttcagcggcaaggcttactcccccaaagccacaagctctcctctctatctggcgcatgaagttcagctgttttccagccagtaccccttccacgtgcctcttctctcttcccagaaaatggtctatcccggcctgcaagagccgtggcttcacagcatgtaccatggggccgcttttcagctgacccagggagatcagctctctacgcacaccgacggcatccctcatctggtgctgtcccccagcacagttttctttggggccttcgctctctga

SEQ ID NO: 4688 - RNA, 618 nt, synthetic construct
  misc_feature 1..618: note = derived and/or modified sequence opt6 fromLTalpha__Homo_sapiens__CAG47049
  source 1..618: mol_type = other RNA
atgaccccaccagaaagactatttctaccaagagtaagaggaacaacactacatctactactactaggactactactagtattactaccaggagcacaaggtctaccaggagtaggattaacaccttcagcagcccaaacagcaagacaacacccaaaaatgcacctagcacactcaacactaaaaccagcagcacacttaataggagacccatcaaaacaaaactccctcctatggagagcaaacacagacagagcattcctacaagatggattctcactctcaaataactcattactagtcccaacatcaggaatatacttcgtatactcacaagtagtattctcaggaaaagcatactcaccaaaagcaacatcatcaccactatacctagcccacgaagtacaactattttcatcccaatacccatttcacgtaccactactatcatcacaaaaaatggtatacccaggactacaagaaccatggctacactcaatgtaccacggtgcagcattccaattaacccaaggagaccaattatcaacacatacagacggaatcccacacctagtcctatcaccatcaacagtcttcttcggagcattcgcattataa

SEQ ID NO: 4689 - protein, 244 aa, synthetic construct
  REGION 1..244: note = LTbeta__Homo_sapiens__Q06643
MGALGLEGRGGRLQGRGSLLLAVAGATSLVTLLLAVPITVLAVLALVPQDQGGLVTETADPGAQAQQGLGFQKLPEEEPETDLSPGLPAAHLIGAPLKGQGLGWETTKEQAFLTSGTQFSDAEGLALPQDGLYYLYCLVGYRGRAPPGGGDPQGRSVTLRSSLYRAGGAYGPGTPELLLEGAETVTPVLDPARRQGYGPLWYTSVGFGGLVQLRRGERVYVNISHPDMVDFARGKTFFGAVMVG

SEQ ID NO: 4690 - RNA, 735 nt, synthetic construct
  misc_feature 1..735: note = LTbeta__Homo_sapiens__AAA36191
  source 1..735: mol_type = other RNA
atgggggcactggggctggagggcaggggtgggaggctccaggggaggggttccctcctgctagctgtggcaggagccacttctctggtgaccttgttgctggcggtgcctatcactgtcctggctgtgctggccttagtgccccaggatcagggaggactggtaacggagacggccgaccccggggcacaggcccagcaaggactggggtttcagaagctgccagaggaggagccagaaacagatctcagccccgggctcccagctgcccacctcataggcgctccgctgaaggggcaggggctaggctgggagacgacgaaggaacaggcgtttctgacgagcgggacgcagttctcggacgccgaggggctggcgctcccgcaggacggcctctattacctctactgtctcgtcggctaccggggccgggcgccccctggcggcggggacccccagggccgctcggtcacgctgcgcagctctctgtaccgggcggggggcgcctacgggccgggcactcccgagctgctgctcgagggcgccgagacggtgactccagtgctggacccggccaggagacaagggtacgggcctctctggtacacgagcgtggggttcggcggcctggtgcagctccggaggggcgagagggtgtacgtcaacatcagtcaccccgatatggtggacttcgcgagagggaagaccttctttggggccgtgatggtggggtga

SEQ ID NO: 4691 - RNA, 735 nt, synthetic construct
  misc_feature 1..735: note = derived and/or modified sequence opt1 fromLTbeta__Homo_sapiens__AAA36191
  source 1..735: mol_type = other RNA
atgggcgccctggggctcgagggccgcgggggccggctgcaggggcgcggcagcctgctcctggccgtggcgggcgccacctccctggtcaccctcctgctggccgtgcccatcacggtgctcgccgtcctggccctggtgccgcaggaccagggcgggctcgtgaccgagaccgcggaccccggggcccaggcccagcagggcctggggttccagaagctgcccgaggaggagcccgagaccgacctcagcccgggcctgcccgccgcgcacctgatcggcgcgcccctcaaggggcagggcctggggtgggagacgaccaaggagcaggccttcctgacctccggcacccagttcagcgacgccgagggcctcgccctgccccaggacgggctgtactacctctactgcctggtcggctaccgggggcgcgccccgcccggcgggggcgacccccagggccggtccgtgacgctgcgcagctccctctaccgggccgggggcgcctacgggcccggcaccccggagctgctgctcgagggggccgagaccgtgacccccgtcctggaccccgcccgccggcagggctacggccccctgtggtacacgagcgtggggttcggcgggctcgtgcagctgcgccggggcgagcgcgtctacgtgaacatctcccacccggacatggtggacttcgcgcgggggaagaccttcttcggcgccgtcatggtgggctga

SEQ ID NO: 4692 - RNA, 735 nt, synthetic construct
  misc_feature 1..735: note = derived and/or modified sequence opt2 fromLTbeta__Homo_sapiens__AAA36191
  source 1..735: mol_type = other RNA
atgggcgccctcggcctcgagggccgcggcggccgcctccagggccgcggctccctcctcctcgccgtcgccggcgccacctccctcgtcaccctcctcctcgccgtccccatcaccgtcctcgccgtcctcgccctcgtcccccaggaccagggcggcctcgtcaccgagaccgccgaccccggcgcccaggcccagcagggcctcggcttccagaagctccccgaggaggagcccgagaccgacctctcccccggcctccccgccgcccacctcatcggcgcccccctcaagggccagggcctcggctgggagaccaccaaggagcaggccttcctcacctccggcacccagttctccgacgccgagggcctcgccctcccccaggacggcctctactacctctactgcctcgtcggctaccgcggccgcgccccccccggcggcggcgacccccagggccgctccgtcaccctccgctcctccctctaccgcgccggcggcgcctacggccccggcacccccgagctcctcctcgagggcgccgagaccgtcacccccgtcctcgaccccgcccgccgccagggctacggccccctctggtacacctccgtcggcttcggcggcctcgtccagctccgccgcggcgagcgcgtctacgtcaacatctcccaccccgacatggtcgacttcgcccgcggcaagaccttcttcggcgccgtcatggtcggctga

SEQ ID NO: 4693 - RNA, 735 nt, synthetic construct
  misc_feature 1..735: note = derived and/or modified sequence opt3 fromLTbeta__Homo_sapiens__AAA36191
  source 1..735: mol_type = other RNA
atgggcgccctggggctcgagggaagaggtggcaggcttcaggggcggggaagcctgttgttagctgtggcaggcgccacctccctggtcacactactcctggcggttcccatcactgtgcttgctgtactggccttggtgcctcaagaccagggtgggctcgtcacggaaaccgcagatccaggagcccaggctcagcaaggcctgggcttccagaagctgccggaggaggaacccgaaacagacctctctcctgggttaccagcagcccacctgattggagctccccttaaaggtcagggcttggggtgggagactaccaaggagcaggcctttctgacatcaggaacccaattcagtgatgcggaaggcctagcactccctcaggacggtctgtactatctttactgcctggtggggtatcgcggacgagccccacccggcggcggggatcctcagggacgtagcgttactttgagatcctctctctacagggctggtggcgcctatgggccaggaacaccggagctgttactggaaggcgcagagaccgtgacgcccgtcctcgaccctgctcggcgccagggttacgggccactttggtatacttcggtgggctttggaggcctggtacaattgagaaggggagagcgggtttacgtgaacatatcacatcccgatatggtcgacttcgcccgcgggaaaacctttttcggtgcggtgatggtgggctga

SEQ ID NO: 4694 - RNA, 735 nt, synthetic construct
  misc_feature 1..735: note = derived and/or modified sequence opt4 fromLTbeta__Homo_sapiens__AAA36191
  source 1..735: mol_type = other RNA
atgggcgccctgggcctggagggcagaggcggcagactgcagggcagaggcagcctgctgctggccgtggccggcgccaccagcctggtgaccctgctgctggccgtgcccatcaccgtgctggccgtgctggccctggtgccccaggaccagggcggcctggtgaccgagaccgccgaccccggcgcccaggcccagcagggcctgggcttccagaagctgcccgaggaggagcccgagaccgacctgagccccggcctgcccgccgcccacctgatcggcgcccccctgaagggccagggcctgggctgggagaccaccaaggagcaggccttcctgaccagcggcacccagttcagcgacgccgagggcctggccctgccccaggacggcctgtactacctgtactgcctggtgggctacagaggcagagccccccccggcggcggcgacccccagggcagaagcgtgaccctgagaagcagcctgtacagagccggcggcgcctacggccccggcacccccgagctgctgctggagggcgccgagaccgtgacccccgtgctggaccccgccagaagacagggctacggccccctgtggtacaccagcgtgggcttcggcggcctggtgcagctgagaagaggcgagagagtgtacgtgaacatcagccaccccgacatggtggacttcgccagaggcaagaccttcttcggcgccgtgatggtgggctga

SEQ ID NO: 4695 - RNA, 735 nt, synthetic construct
  misc_feature 1..735: note = derived and/or modified sequence opt5 fromLTbeta__Homo_sapiens__AAA36191
  source 1..735: mol_type = other RNA
atgggcgccctggggctcgagggaagaggcgggcggctgcagggacgcggcagccttctgctcgctgtggccggggcgacctccctggtcacacttctgctcgctgttcccatcacggtgctggccgtgctggccctcgtccctcaagaccagggaggcctggtgaccgaaacagctgatccgggcgcccaggctcagcaagggcttggattccagaagctgcccgaggaggaacctgaaaccgacctctctcccggcctgcctgccgcgcaccttattggggcgcccctgaaaggacagggcctcgggtgggagacaaccaaggagcaggcttttctgacaagcggaacccaattctccgatgccgaaggcctggctctccctcaggacggcctgtactatctttactgcctggttgggtatagaggacgggccccgcccggcgggggagatcctcagggccgctctgtgacgctcagaagctccctgtaccgggccgggggagcctatggccccggcacccctgagcttctgctcgaaggggctgagacagtcacccccgtgctggacccggcccgcagacagggatacggccctctgtggtatacatctgttgggtttggaggcctcgtgcaactgcggcgcggggagagagtctacgtgaacatcagccatcccgatatggtggacttcgctcggggcaaaacctttttcggagccgtcatggttggctga

SEQ ID NO: 4696 - RNA, 735 nt, synthetic construct
  misc_feature 1..735: note = derived and/or modified sequence opt6 fromLTbeta__Homo_sapiens__AAA36191
  source 1..735: mol_type = other RNA
atgggagcattaggattagaaggtagaggaggaagattacaaggaagaggaagtctgcttctagcagttgcaggagcaacaagtttagtaacactactattagcagtaccaattacagtattagcagtattagcactagtaccacaagatcaaggaggattagtaacagaaacagcagatccaggtgcacaagcacaacagggtctaggatttcaaaaattaccagaagaagaaccagaaacagatttaagtccgggattacctgcagctcatttaataggtgcaccattaaaaggacaaggattaggatgggaaacaacaaaagaacaagcatttttaacaagtggtacacaatttagtgatgcagaaggtttagcattacctcaagacggattatattatttatattgcttagttggatatagaggaagagcaccaccaggtggaggagatccacaaggaagaagtgtaacattaagatcatcattatatagagcaggaggagcatacggaccaggaacaccagaactacttttagaaggagcagaaacagtaacaccagtattagatccagcaagaagacaaggatatggaccattatggtatacaagtgtaggatttggaggattagttcaattaagaagaggagaaagagtatatgtaaatataagccatcctgatatggtagattttgcaagaggaaaaacattttttggagcagtaatggtaggataa

SEQ ID NO: 4697 - protein, 244 aa, synthetic construct; identical to SEQ ID NO: 4689
  REGION 1..244: note = LTbeta__Homo_sapiens__Q5STB2

SEQ ID NO: 4698 - RNA, 735 nt, synthetic construct; identical to SEQ ID NO: 4690
  misc_feature 1..735: note = LTbeta__Homo_sapiens__BAC54938
  source 1..735: mol_type = other RNA

SEQ ID NO: 4699 - RNA, 735 nt, synthetic construct; identical to SEQ ID NO: 4691
  misc_feature 1..735: note = derived and/or modified sequence opt1 fromLTbeta__Homo_sapiens__BAC54938
  source 1..735: mol_type = other RNA

SEQ ID NO: 4700 - RNA, 735 nt, synthetic construct; identical to SEQ ID NO: 4692
  misc_feature 1..735: note = derived and/or modified sequence opt2 fromLTbeta__Homo_sapiens__BAC54938
  source 1..735: mol_type = other RNA

SEQ ID NO: 4701 - RNA, 735 nt, synthetic construct; identical to SEQ ID NO: 4693
  misc_feature 1..735: note = derived and/or modified sequence opt3 fromLTbeta__Homo_sapiens__BAC54938
  source 1..735: mol_type = other RNA

SEQ ID NO: 4702 - RNA, 735 nt, synthetic construct; identical to SEQ ID NO: 4694
  misc_feature 1..735: note = derived and/or modified sequence opt4 fromLTbeta__Homo_sapiens__BAC54938
  source 1..735: mol_type = other RNA

SEQ ID NO: 4703 - RNA, 735 nt, synthetic construct; identical to SEQ ID NO: 4695
  misc_feature 1..735: note = derived and/or modified sequence opt5 fromLTbeta__Homo_sapiens__BAC54938
  source 1..735: mol_type = other RNA

SEQ ID NO: 4704 - RNA, 735 nt, synthetic construct
  misc_feature 1..735: note = derived and/or modified sequence opt6 fromLTbeta__Homo_sapiens__BAC54938
  source 1..735: mol_type = other RNA
atgggtgcactaggattagaaggaagaggaggtagattacaaggaagaggaagtttactattagcagtagcaggggcaacaagtctagtaactttattactagcagtaccaataacagtattagcagtattagcattggtaccacaagatcaaggtggattagtaacagaaactgcagatccaggagcacaagcacaacaaggattaggatttcaaaaattaccagaagaagaacctgaaactgatttaagtccaggattaccagcagcacatttaataggagcaccactaaaaggacaaggattaggatgggaaacaacaaaagaacaagcatttctaacaagtggaacacaattctcagatgcagaaggattagcattaccacaagatggattatactatttatactgtttagtaggatatagaggaagagcaccgcctggaggaggagatccacaaggaagatcagtaacactacgcagtagcttatatagagcaggaggagcatacggtccaggaacaccagaattattgttagaaggagccgaaacagtaacaccagttttagatccagcaagaagacaaggatatggtccattatggtatacaagtgtaggttttggtggattagtacaactaagaagaggagaaagagtatatgtaaatatatcacatccagatatggtcgattttgcaagaggaaaaacattttttggagcagtaatggtaggataa

SEQ ID NO: 4705 - protein, 554 aa, synthetic construct
  REGION 1..554: note = M-CSF__Homo_sapiens__P09603
MTAPGAAGRCPPTTWLGSLLLLVCLLASRSITEEVSEYCSHMIGSGHLQSLQRLIDSQMETSCQITFEFVDQEQLKDPVCYLKKAFLLVQDIMEDTMRFRDNTPNAIAIVQLQELSLRLKSCFTKDYEEHDKACVRTFYETPLQLLEKVKNVFNETKNLLDKDWNIFSKNCNNSFAECSSQDVVTKPDCNCLYPKAIPSSDPASVSPHQPLAPSMAPVAGLTWEDSEGTEGSSLLPGEQPLHTVDPGSAKQRPPRSTCQSFEPPETPVVKDSTIGGSPQPRPSVGAFNPGMEDILDSAMGTNWVPEEASGEASEIPVPQGTELSPSRPGGGSMQTEPARPSNFLSASSPLPASAKGQQPADVTGTALPRVGPVRPTGQDWNHTPQKTDHPSALLRDPPEPGSPRISSLRPQGLSNPSTLSAQPQLSRSHSSGSVLPLGELEGRRSTRDRRSPAEPEGGPASEGAARPLPRFNSVPLTDTGHERQSEGSFSPQLQESVFHLLVPSVILVLLAVGGLLFYRWRRRSHQEPQRADSPLEQPEGSPLTQDDRQVELPV

SEQ ID NO: 4706 - RNA, 1665 nt, synthetic construct
  misc_feature 1..1665: note = M-CSF__Homo_sapiens__CCDS816.1
  source 1..1665: mol_type = other RNA
atgaccgcgccgggcgccgccgggcgctgccctcccacgacatggctgggctccctgctgttgttggtctgtctcctggcgagcaggagtatcaccgaggaggtgtcggagtactgtagccacatgattgggagtggacacctgcagtctctgcagcggctgattgacagtcagatggagacctcgtgccaaattacatttgagtttgtagaccaggaacagttgaaagatccagtgtgctaccttaagaaggcatttctcctggtacaagacataatggaggacaccatgcgcttcagagataacacccccaatgccatcgccattgtgcagctgcaggaactctctttgaggctgaagagctgcttcaccaaggattatgaagagcatgacaaggcctgcgtccgaactttctatgagacacctctccagttgctggagaaggtcaagaatgtctttaatgaaacaaagaatctccttgacaaggactggaatattttcagcaagaactgcaacaacagctttgctgaatgctccagccaagatgtggtgaccaagcctgattgcaactgcctgtaccccaaagccatccctagcagtgacccggcctctgtctcccctcatcagcccctcgccccctccatggcccctgtggctggcttgacctgggaggactctgagggaactgagggcagctccctcttgcctggtgagcagcccctgcacacagtggatccaggcagtgccaagcagcggccacccaggagcacctgccagagctttgagccgccagagaccccagttgtcaaggacagcaccatcggtggctcaccacagcctcgcccctctgtcggggccttcaaccccgggatggaggatattcttgactctgcaatgggcactaattgggtcccagaagaagcctctggagaggccagtgagattcccgtaccccaagggacagagctttccccctccaggccaggagggggcagcatgcagacagagcccgccagacccagcaacttcctctcagcatcttctccactccctgcatcagcaaagggccaacagccggcagatgtaactggtaccgccttgcccagggtgggccccgtgaggcccactggccaggactggaatcacaccccccagaagacagaccatccatctgccctgctcagagaccccccggagccaggctctcccaggatctcatcactgcgcccccagggcctcagcaacccctccaccctctctgctcagccacagctttccagaagccactcctcgggcagcgtgctgccccttggggagctggagggcaggaggagcaccagggatcggaggagccccgcagagccagaaggaggaccagcaagtgaaggggcagccaggcccctgccccgttttaactccgttcctttgactgacacaggccatgagaggcagtccgagggatccttcagcccgcagctccaggagtctgtcttccacctgctggtgcccagtgtcatcctggtcttgctggccgtcggaggcctcttgttctacaggtggaggcggcggagccatcaagagcctcagagagcggattctcccttggagcaaccagagggcagccccctgactcaggatgacagacaggtggaactgccagtgtag

SEQ ID NO: 4707 - RNA, 1665 nt, synthetic construct
  misc_feature 1..1665: note = derived and/or modified sequence opt1 fromM-CSF__Homo_sapiens__CCDS816.1
  source 1..1665: mol_type = other RNA
atgaccgcccccggcgccgcggggcgctgcccgcccaccacgtggctgggcagcctcctgctgctcgtgtgcctgctggcctcccggagcatcaccgaggaggtctccgagtactgcagccacatgatcgggtccggccacctccagagcctgcagcgcctgatcgactcccagatggagaccagctgccagatcaccttcgagttcgtggaccaggagcagctcaaggaccccgtgtgctacctgaagaaggccttcctgctcgtccaggacatcatggaggacacgatgcggttccgcgacaacacccccaacgccatcgccatcgtgcagctgcaggagctgtccctccggctgaagtcctgcttcaccaaggactacgaggagcacgacaaggcgtgcgtgcgcaccttctacgagacgccgctgcagctcctggagaaggtcaagaacgtgttcaacgagaccaagaacctgctcgacaaggactggaacatcttctccaagaactgcaacaacagcttcgccgagtgctccagccaggacgtggtcaccaagcccgactgcaactgcctgtaccccaaggccatcccctccagcgacccggcctccgtgagcccccaccagcccctggcgccctccatggccccggtggccgggctcacctgggaggacagcgagggcacggagggcagctccctgctgcccggggagcagcccctccacaccgtcgaccccggcagcgccaagcagcggccgccccgctccacgtgccagagcttcgagccgcccgagacccccgtggtgaaggactccaccatcgggggcagcccccagccccggccctccgtcggggccttcaacccgggcatggaggacatcctggacagcgcgatgggcaccaactgggtgcccgaggaggcctccggggaggccagcgagatccccgtgccccagggcaccgagctgtccccgagccgccccgggggcggctccatgcagaccgagcccgcccggccgagcaacttcctctccgccagctccccgctgcccgcgagcgccaaggggcagcagcccgccgacgtcacgggcaccgccctgccccgcgtggggcccgtgcggcccaccggccaggactggaaccacacgccccagaagaccgaccacccgtccgccctcctgcgcgacccgcccgagcccgggagcccccggatcagctccctgcgcccccagggcctcagcaacccctccaccctgagcgcgcagccccagctgtcccggagccactccagcggctccgtcctcccgctgggggagctggagggccgccggagcacccgcgaccggcgctcccccgccgagcccgagggcgggcccgccagcgagggggccgcccgcccgctcccccggttcaactccgtgcccctgaccgacacgggccacgagcgccagagcgagggctccttcagcccccagctgcaggagtccgtgttccacctcctggtcccgagcgtgatcctggtcctcctggcggtcgggggcctgctgttctaccggtggcgccggcgcagccaccaggagccccagcgggccgacagccccctcgagcagccggaggggagccccctgacccaggacgaccgccaggtggagctgcccgtgtga

SEQ ID NO: 4708 - RNA, 1665 nt, synthetic construct
  misc_feature 1..1665: note = derived and/or modified sequence opt2 fromM-CSF__Homo_sapiens__CCDS816.1
  source 1..1665: mol_type = other RNA
atgaccgcccccggcgccgccggccgctgcccccccaccacctggctcggctccctcctcctcctcgtctgcctcctcgcctcccgctccatcaccgaggaggtctccgagtactgctcccacatgatcggctccggccacctccagtccctccagcgcctcatcgactcccagatggagacctcctgccagatcaccttcgagttcgtcgaccaggagcagctcaaggaccccgtctgctacctcaagaaggccttcctcctcgtccaggacatcatggaggacaccatgcgcttccgcgacaacacccccaacgccatcgccatcgtccagctccaggagctctccctccgcctcaagtcctgcttcaccaaggactacgaggagcacgacaaggcctgcgtccgcaccttctacgagacccccctccagctcctcgagaaggtcaagaacgtcttcaacgagaccaagaacctcctcgacaaggactggaacatcttctccaagaactgcaacaactccttcgccgagtgctcctcccaggacgtcgtcaccaagcccgactgcaactgcctctaccccaaggccatcccctcctccgaccccgcctccgtctccccccaccagcccctcgccccctccatggcccccgtcgccggcctcacctgggaggactccgagggcaccgagggctcctccctcctccccggcgagcagcccctccacaccgtcgaccccggctccgccaagcagcgccccccccgctccacctgccagtccttcgagccccccgagacccccgtcgtcaaggactccaccatcggcggctccccccagccccgcccctccgtcggcgccttcaaccccggcatggaggacatcctcgactccgccatgggcaccaactgggtccccgaggaggcctccggcgaggcctccgagatccccgtcccccagggcaccgagctctccccctcccgccccggcggcggctccatgcagaccgagcccgcccgcccctccaacttcctctccgcctcctcccccctccccgcctccgccaagggccagcagcccgccgacgtcaccggcaccgccctcccccgcgtcggccccgtccgccccaccggccaggactggaaccacaccccccagaagaccgaccacccctccgccctcctccgcgacccccccgagcccggctccccccgcatctcctccctccgcccccagggcctctccaacccctccaccctctccgcccagccccagctctcccgctcccactcctccggctccgtcctccccctcggcgagctcgagggccgccgctccacccgcgaccgccgctcccccgccgagcccgagggcggccccgcctccgagggcgccgcccgccccctcccccgcttcaactccgtccccctcaccgacaccggccacgagcgccagtccgagggctccttctccccccagctccaggagtccgtcttccacctcctcgtcccctccgtcatcctcgtcctcctcgccgtcggcggcctcctcttctaccgctggcgccgccgctcccaccaggagccccagcgcgccgactcccccctcgagcagcccgagggctcccccctcacccaggacgaccgccaggtcgagctccccgtctga

SEQ ID NO: 4709 - RNA, 1665 nt, synthetic construct
  misc_feature 1..1665: note = derived and/or modified sequence opt3 fromM-CSF__Homo_sapiens__CCDS816.1
  source 1..1665: mol_type = other RNA
atgaccgcccccggcgctgcagggagatgccctccaacaacttggctgggaagcctccttctgttggtgtgtttactggcctccaggtctatcacggaggaagtctcagagtactgcagtcacatgattggtagcggccatctacagtccctccaacggctgatagactctcagatggaaacctcgtgtcagatcacattcgagtttgttgatcaggaacaacttaaggacccggtgtgctatctgaaaaaggcgttcttgctcgtacaggatattatggaggacactatgcgctttcgagataacacccccaatgctatcgccattgtgcagctgcaggagctgtcactccgtttaaaaagctgtttcacaaaggactacgaagaacacgataaagcatgcgtcagaaccttttatgaaactcctctgcaacttttggagaaggtgaagaacgttttcaatgagaccaaaaacctgctagacaaggattggaatatctttagtaaaaactgtaataactccttcgccgaatgctctagccaggacgtggtcacaaagccagattgtaattgcctctaccccaaagctataccttcctcagacccagcaagtgtgagcccccatcagcctctggccccatctatggctccggtagccgggcttacgtgggaggattccgaaggaactgagggctcaagcctgttgcccggtgaacagcctctccacaccgttgacccagggagtgcgaagcaaaggccccctcggtctacatgtcagtcctttgagccacccgagactccggtggtcaaggacagcaccatcggaggctcgcctcagccccgcccatctgtgggcgcattcaaccctgggatggaagatattctggactccgccatgggaacaaattgggtgcccgaggaggcttcaggtgaggccagtgaaatcccagtcccccaaggcaccgagttaagcccttccagaccagggggaggctctatgcagacggagccggcaaggcccagcaactttctgtcagctagttcccctctcccagccagcgcgaaaggtcagcagcccgccgatgttactgggacagcacttcctcgggtgggaccagtacgccccaccggccaagactggaatcatactccgcagaagacagatcacccttctgctctgttgcgagacccacccgaacctggctcacccagaattagtagcctaaggccacaggggctgtccaacccttctaccctctcggcccagccccaactgagccggtcccactcaagtggatctgtgcttccactgggtgagttggaaggccgtcgcagcacgagagataggcggtccccggctgagcctgaagggggacccgcctcagagggcgcagcccgaccactcccccgcttcaatagcgtccctctgaccgacacaggtcatgagagacagtctgaagggtcctttagtccacagttacaggagagcgtgttccatctgctagttccctctgtgatcctcgtcctgcttgctgtgggcggattgctgttctataggtggcggcgcagatcccaccaagaacctcagagggcggattcaccgctcgagcagccagagggcagtcccctgactcaggacgatcgtcaagtagaacttcctgtttga

SEQ ID NO: 4710 - RNA, 1665 nt, synthetic construct
  misc_feature 1..1665: note = derived and/or modified sequence opt4 fromM-CSF__Homo_sapiens__CCDS816.1
  source 1..1665: mol_type = other RNA
atgaccgcccccggcgccgccggcagatgcccccccaccacctggctgggcagcctgctgctgctggtgtgcctgctggccagcagaagcatcaccgaggaggtgagcgagtactgcagccacatgatcggcagcggccacctgcagagcctgcagagactgatcgacagccagatggagaccagctgccagatcaccttcgagttcgtggaccaggagcagctgaaggaccccgtgtgctacctgaagaaggccttcctgctggtgcaggacatcatggaggacaccatgagattcagagacaacacccccaacgccatcgccatcgtgcagctgcaggagctgagcctgagactgaagagctgcttcaccaaggactacgaggagcacgacaaggcctgcgtgagaaccttctacgagacccccctgcagctgctggagaaggtgaagaacgtgttcaacgagaccaagaacctgctggacaaggactggaacatcttcagcaagaactgcaacaacagcttcgccgagtgcagcagccaggacgtggtgaccaagcccgactgcaactgcctgtaccccaaggccatccccagcagcgaccccgccagcgtgagcccccaccagcccctggcccccagcatggcccccgtggccggcctgacctgggaggacagcgagggcaccgagggcagcagcctgctgcccggcgagcagcccctgcacaccgtggaccccggcagcgccaagcagagaccccccagaagcacctgccagagcttcgagccccccgagacccccgtggtgaaggacagcaccatcggcggcagcccccagcccagacccagcgtgggcgccttcaaccccggcatggaggacatcctggacagcgccatgggcaccaactgggtgcccgaggaggccagcggcgaggccagcgagatccccgtgccccagggcaccgagctgagccccagcagacccggcggcggcagcatgcagaccgagcccgccagacccagcaacttcctgagcgccagcagccccctgcccgccagcgccaagggccagcagcccgccgacgtgaccggcaccgccctgcccagagtgggccccgtgagacccaccggccaggactggaaccacaccccccagaagaccgaccaccccagcgccctgctgagagacccccccgagcccggcagccccagaatcagcagcctgagaccccagggcctgagcaaccccagcaccctgagcgcccagccccagctgagcagaagccacagcagcggcagcgtgctgcccctgggcgagctggagggcagaagaagcaccagagacagaagaagccccgccgagcccgagggcggccccgccagcgagggcgccgccagacccctgcccagattcaacagcgtgcccctgaccgacaccggccacgagagacagagcgagggcagcttcagcccccagctgcaggagagcgtgttccacctgctggtgcccagcgtgatcctggtgctgctggccgtgggcggcctgctgttctacagatggagaagaagaagccaccaggagccccagagagccgacagccccctggagcagcccgagggcagccccctgacccaggacgacagacaggtggagctgcccgtgtga

SEQ ID NO: 4711 - RNA, 1665 nt, synthetic construct
  misc_feature 1..1665: note = derived and/or modified sequence opt5 fromM-CSF__Homo_sapiens__CCDS816.1
  source 1..1665: mol_type = other RNA
atgaccgcccccggcgctgccgggagatgccctccgacaacgtggctgggaagcctcctgcttctggtgtgtctcctggcgtcccggtctatcaccgaggaagtcagcgagtactgctcccacatgattggctctgggcatcttcagagcctgcaacgcctcatcgactcccagatggaaacatcttgtcagattaccttcgagtttgttgatcaggaacaactgaaggaccccgtgtgctatctgaaaaaggctttcctcctggtgcaggatatcatggaggacacaatgagatttcgggataacacccctaatgccattgccatcgtccagcttcaggagctgagcctccgcctgaaatcctgtttcacaaaggactacgaggaacacgataaggcttgcgtgagaaccttttatgaaacgccccttcaactgctcgagaaagttaagaacgtgttcaatgagaccaaaaacctgctggacaaggattggaatatctttagcaaaaactgtaataactctttcgccgaatgctccagccaggacgtcgtgacaaagcctgattgtaattgcctctaccccaaagctattccttcttccgacccggccagcgtttctccccatcagcctctggcgccctccatggcccctgtggctggacttacctgggaggatagcgaaggcacagaggggtcctctctgctccccggagaacagccgctgcacaccgtcgaccctggcagcgccaagcaacggccccctcgctccacgtgtcagagctttgagcctcccgagacacccgtggtgaaggactctaccatcggcgggtccccgcagcccagacctagcgtcggagctttcaaccccggcatggaagatattcttgactctgccatggggacaaattgggttcctgaggaagcgagcggagaggcctccgaaatccccgtgccgcaaggcaccgagctgtctcctagccggcccgggggaggctccatgcagaccgagcctgctcgccccagcaactttctctctgcctccagccctctgcccgcttctgccaaaggccagcagccggccgatgtgacagggacggctctgcctagagtcggacccgtgcggcccaccggccaagactggaatcatacacctcagaagaccgatcacccgtccgcgctcctgcgcgatccccctgaacccgggagccctagaatttcctctcttcggccccagggactgagcaacccttccacactctctgcccagccccaactgagccgctcccacagctctggctccgttcttccgctgggggagctcgaaggaagacggagcaccagagaccgccggtctcctgctgagcccgaaggcggccctgcctccgagggggccgctagacccctgccgcgcttcaatagcgtgcctctgacggacacaggacatgagcggcagtctgaaggcagctttagcccccagctccaggagtccgtcttccatctgcttgtgccttctgttatcctggtgctcctggccgtcgggggactgcttttctatagatggcgccggagatcccaccaagaaccccagcgcgcggatagccccctcgagcagcctgagggctccccgctgacccaggacgatcggcaagtggaactgcccgtctga

SEQ ID NO: 4712 - RNA, 1665 nt, synthetic construct
  misc_feature 1..1665: note = derived and/or modified sequence opt6 fromM-CSF__Homo_sapiens__CCDS816.1
  source 1..1665: mol_type = other RNA
atgacggcaccaggagcagccggcagatgccctccaactacatggctaggatcattattattactcgtatgcttgctagcttcaagatcaatcactgaagaagtatccgaatattgttcacatatgattggatccggccatctacaaagcttacaaagacttatagattcacaaatggaaacaagttgccaaataacatttgaatttgtagaccaagaacaattaaaagatccagtttgttatctcaaaaaggcatttttattagtacaagacataatggaagacacaatgagattcagagataacacaccaaacgctatagctatagtacaactacaagaactatctcttcgccttaaatcatgttttacaaaagattacgaagaacatgataaagcatgtgtaagaaccttttacgaaacaccactacaactattagaaaaagttaaaaacgtattcaacgaaacaaaaaatcttttagataaagactggaacattttttcaaaaaactgcaataattcattcgcagaatgttcatcacaagacgtagtaaccaaaccagactgtaactgcctataccccaaagctataccaagttctgatccagccagcgtttcacctcaccaaccactagcaccttcaatggcacctgtcgcaggcctaacatgggaagactcagagggaaccgaaggaagttctctactaccaggagaacaacctttacataccgtagaccctggctcagcaaaacaaagacctccacgatctacatgccaatcatttgagccaccagaaacacctgtagtaaaagattctacaataggcggaagcccacaaccacgtccatctgtcggtgccttcaatcccggaatggaagacattttagattcagcaatgggtacaaattgggtaccagaagaagcatccggagaagcatccgaaataccagttccacaaggaacagaacttagtccatctagaccaggaggaggatccatgcaaactgaacccgcaagaccatcaaactttttatcagcatcatccccattaccagcatccgcaaaaggccaacaaccagcagacgtcacaggaactgctttaccacgagtaggaccagtaagacctacaggtcaagattggaatcataccccacaaaaaacagatcatccctcagccctactaagagacccaccagaaccaggttcaccaagaatttctagtctaagaccacaaggattatcaaatccttcaacattatccgctcaacctcaattatctagatctcatagctcaggaagcgttctcccccttggagaactcgaaggaagaagatctacacgagatcgaagatcaccagcagaacctgaaggcggcccagcatcagaaggtgcagcacgtccactaccaagatttaactctgtaccactaactgatacaggacatgaaagacaatcagaaggaagtttctcaccccaactacaagaatcagtattccatttacttgtaccaagtgtaattctagtccttctagcagttggaggcttactcttctacagatggagacgacgttcccatcaagaaccacaacgagcagattcaccactagaacaacctgaaggatcaccactaacccaagacgacagacaagtagaactgccagtataa

SEQ ID NO: 4713 - protein, 113 aa, synthetic construct [sequence omitted]

SEQ ID NO: 4714 - RNA, 342 nt, synthetic construct
  misc_feature 1..342: note = MIF__Homo_sapiens__ABR12395
  source 1..342: mol_type = other RNA
atgttcatcgtaaacaccaacgtgccccgcgcctccgtgccggacgggttcctctccgagctcacccagcagctggcgcaggccaccggcaagcccccccagtacattgcggtgcaagtggtcccggaccagctcatggcctttggggggtccagcgaaccgtgggcgttttgcagcctgcacagcattggcaaaatcggcggcgcgcagaaccgctcctacagcaagctgctgttcggcctgctggccgagcgcctgcgcatcagcccggacagggtttacatcaactattacgacatgaacgcggccaatgtggggtggaacaactccccctttgcctaa

SEQ ID NO: 4715 - RNA, 342 nt, synthetic construct
  misc_feature 1..342: note = derived and/or modified sequence opt1 fromMIF__Homo_sapiens__ABR12395
  source 1..342: mol_type = other RNA
atgttcatcgtgaacaccaacgtcccccgcgccagcgtgccggacggcttcctgtccgagctcacccagcagctggcccaggcgacggggaagccgccccagtacatcgccgtgcaggtcgtgcccgaccagctgatggccttcggcgggagctccgagccctgggccttctgcagcctccactccatcggcaagatcgggggcgcccagaaccggagctactccaagctgctgttcggcctcctggcggagcgcctgcggatcagccccgaccgcgtgtacatcaactactacgacatgaacgccgccaacgtcgggtggaacaactcccccttcgcctga

SEQ ID NO: 4716 - RNA, 342 nt, synthetic construct
  misc_feature 1..342: note = derived and/or modified sequence opt2 fromMIF__Homo_sapiens__ABR12395
  source 1..342: mol_type = other RNA
atgttcatcgtcaacaccaacgtcccccgcgcctccgtccccgacggcttcctctccgagctcacccagcagctcgcccaggccaccggcaagcccccccagtacatcgccgtccaggtcgtccccgaccagctcatggccttcggcggctcctccgagccctgggccttctgctccctccactccatcggcaagatcggcggcgcccagaaccgctcctactccaagctcctcttcggcctcctcgccgagcgcctccgcatctcccccgaccgcgtctacatcaactactacgacatgaacgccgccaacgtcggctggaacaactcccccttcgcctga

SEQ ID NO: 4717 - RNA, 342 nt, synthetic construct
  misc_feature 1..342: note = derived and/or modified sequence opt3 fromMIF__Homo_sapiens__ABR12395
  source 1..342: mol_type = other RNA
atgttcatcgtgaacaccaatgtccccagagccagcgttcctgacggctttctgtccgagctcacacagcaacttgctcaggcaactgggaagccaccgcagtacattgccgtgcaggtagtgcccgatcaactgatggcgttcggaggttcttcagaaccttgggctttttgcagtttgcacagcataggcaaaatcgggggagcccagaacaggtcctattctaagttactgttcggcctactcgcagagcggctgcgcatttcgccagaccgagtctacatcaattattacgatatgaacgccgctaatgtgggttggaacaattcaccctttgcatga

SEQ ID NO: 4718 - RNA, 342 nt, synthetic construct
  misc_feature 1..342: note = derived and/or modified sequence opt4 fromMIF__Homo_sapiens__ABR12395
  source 1..342: mol_type = other RNA
atgttcatcgtgaacaccaacgtgcccagagccagcgtgcccgacggcttcctgagcgagctgacccagcagctggcccaggccaccggcaagcccccccagtacatcgccgtgcaggtggtgcccgaccagctgatggccttcggcggcagcagcgagccctgggccttctgcagcctgcacagcatcggcaagatcggcggcgcccagaacagaagctacagcaagctgctgttcggcctgctggccgagagactgagaatcagccccgacagagtgtacatcaactactacgacatgaacgccgccaacgtgggctggaacaacagccccttcgcctga

SEQ ID NO: 4719 - RNA, 342 nt, synthetic construct
  misc_feature 1..342: note = derived and/or modified sequence opt5 fromMIF__Homo_sapiens__ABR12395
  source 1..342: mol_type = other RNA
atgttcatcgtgaacaccaatgtccccagagccagcgttcctgacggctttctgtccgagctcacacagcaactggctcaggccacggggaagccgccccagtacattgcggtccaggtggtgcctgatcaacttatggctttcggaggctctagcgaaccctgggccttttgctccctgcactctatcgggaaaattggaggcgcccagaaccggagctattccaagctcctgttcgggcttctggctgagcgcctcagaatctctcctgaccgggtgtacattaattattacgatatgaacgccgctaatgttggatggaacaatagcccctttgcctga

SEQ ID NO: 4720 - RNA, 342 nt, synthetic construct
  misc_feature 1..342: note = derived and/or modified sequence opt6 fromMIF__Homo_sapiens__ABR12395
  source 1..342: mol_type = other RNA
atgttcatagtaaatacaaatgtaccaagagcaagcgtaccagatggatttctatcagaattaacacaacaattagcacaagcaacaggaaaaccaccacaatatatagcagtacaagtagtaccagatcaattaatggcattcggaggatcaagcgaaccatgggcattttgctcactacatagcataggaaaaataggaggagcacaaaatagatcatactcaaaattactatttggattactagcagaaagactaagaatatcaccagatagagtttacataaactattacgatatgaatgcagcaaacgtaggatggaacaatagcccattcgcataa

SEQ ID NO: 4721 - protein, 115 aa, synthetic construct
  REGION 1..115: note = MIF__Homo_sapiens__P14174
MPMFIVNTNVPRASVPDGFLSELTQQLAQATGKPPQYIAVHVVPDQLMAFGGSSEPCALCSLHSIGKIGGAQNRSYSKLLCGLLAERLRISPDRVYINYYDMNAANVGWNNSTFA

SEQ ID NO: 4722 - RNA, 348 nt, synthetic construct
  misc_feature 1..348: note = MIF__Homo_sapiens__AAA21814
  source 1..348: mol_type = other RNA
atgccgatgttcatcgtaaacaccaacgtgccccgcgcctccgtgccggacgggttcctctccgagctcacccagcagctggcgcaggccaccggcaagcccccccagtacatcgcggtgcacgtggtcccggaccagctcatggccttcggcggctccagcgagccgtgcgcgctctgcagcctgcacagcatcggcaagatcggcggcgcgcagaaccgctcctacagcaagctgctgtgcggcctgctggccgagcgcctgcgcatcagcccggacagggtctacatcaactattacgacatgaacgcggccaatgtgggctggaacaactccaccttcgcctaa

SEQ ID NO: 4723 - RNA, 348 nt, synthetic construct
  misc_feature 1..348: note = derived and/or modified sequence opt1 fromMIF__Homo_sapiens__AAA21814
  source 1..348: mol_type = other RNA
atgcccatgttcatcgtgaacaccaacgtcccgcgcgccagcgtgcccgacggcttcctgtccgagctcacccagcagctggcccaggcgacggggaagccgccccagtacatcgccgtgcacgtcgtgcccgaccagctgatggccttcggcgggagctccgagccctgcgccctctgcagcctgcactccatcggcaagatcgggggcgcccagaaccggagctactccaagctgctctgcggcctgctggcggagcgcctccggatcagccccgaccgcgtgtacatcaactactacgacatgaacgccgccaacgtcgggtggaacaactccaccttcgcctga

SEQ ID NO: 4724 - RNA, 348 nt, synthetic construct
  misc_feature 1..348: note = derived and/or modified sequence opt2 fromMIF__Homo_sapiens__AAA21814
  source 1..348: mol_type = other RNA
atgcccatgttcatcgtcaacaccaacgtcccccgcgcctccgtccccgacggcttcctctccgagctcacccagcagctcgcccaggccaccggcaagcccccccagtacatcgccgtccacgtcgtccccgaccagctcatggccttcggcggctcctccgagccctgcgccctctgctccctccactccatcggcaagatcggcggcgcccagaaccgctcctactccaagctcctctgcggcctcctcgccgagcgcctccgcatctcccccgaccgcgtctacatcaactactacgacatgaacgccgccaacgtcggctggaacaactccaccttcgcctga

SEQ ID NO: 4725 - RNA, 348 nt, synthetic construct
  misc_feature 1..348: note = derived and/or modified sequence opt3 fromMIF__Homo_sapiens__AAA21814
  source 1..348: mol_type = other RNA
atgcccatgttcatcgtgaacaccaatgtccctagagccagcgttccagacggctttctgtccgagctcacacagcaacttgctcaggcaactgggaagccgccccagtacattgccgtgcacgtagtgcctgatcagctgatggcgttcggaggttcttcagaaccatgcgctttgtgtagtttacatagcataggcaaaatcgggggagcccaaaacaggtcctattctaagctgctatgcggcctcctggcagagcggcttcgcatttcgcccgaccgagtctacatcaattattacgatatgaacgccgctaatgtgggttggaacaattcaacgtttgcatga

SEQ ID NO: 4726 - RNA, 348 nt, synthetic construct
  misc_feature 1..348: note = derived and/or modified sequence opt4 fromMIF__Homo_sapiens__AAA21814
  source 1..348: mol_type = other RNA
atgcccatgttcatcgtgaacaccaacgtgcccagagccagcgtgcccgacggcttcctgagcgagctgacccagcagctggcccaggccaccggcaagcccccccagtacatcgccgtgcacgtggtgcccgaccagctgatggccttcggcggcagcagcgagccctgcgccctgtgcagcctgcacagcatcggcaagatcggcggcgcccagaacagaagctacagcaagctgctgtgcggcctgctggccgagagactgagaatcagccccgacagagtgtacatcaactactacgacatgaacgccgccaacgtgggctggaacaacagcaccttcgcctga

SEQ ID NO: 4727 - RNA, 348 nt, synthetic construct
  misc_feature 1..348: note = derived and/or modified sequence opt5 fromMIF__Homo_sapiens__AAA21814
  source 1..348: mol_type = other RNA
atgcccatgttcatcgtgaacaccaatgtccctagagccagcgttccggacggctttctgtccgagctcacacagcaactggctcaggccacggggaagccccctcagtacattgcggtgcacgtggtccccgatcagcttatggctttcggaggctctagcgaaccttgcgccctgtgttccctccattctatcgggaaaattggaggcgcccaaaaccggagctattccaagctgctttgcgggctgctcgctgagcgcctgagaatctctcccgaccgggtgtacattaattattacgatatgaacgccgctaatgttggatggaacaatagcacctttgcctga

SEQ ID NO: 4728 - RNA, 348 nt, synthetic construct
  misc_feature 1..348: note = derived and/or modified sequence opt6 fromMIF__Homo_sapiens__AAA21814
  source 1..348: mol_type = other RNA
atgccaatgttcatagtaaacacaaatgtaccaagagcatcagtaccagacggattcctatcagaattaacacaacaactagcacaagcaacaggaaaaccaccacaatacatagcagtacacgtagtaccagaccaactaatggcattcggaggatcatcagaaccatgcgcactatgctcactacactcaataggaaaaataggaggagcacaaaacagatcatactcaaaattactatgcggactactagcagaaagactaagaatatcaccagacagagtatacataaactattacgacatgaacgcagcaaacgtaggatggaacaattcaacattcgcataa

SEQ ID NO: 4729 - protein, 252 aa, synthetic construct
  REGION 1..252: note = OSM__Homo_sapiens__P13725
MGVLLTQRTLLSLVLALLFPSMASMAAIGSCSKEYRVLLGQLQKQTDLMQDTSRLLDPYIRIQGLDVPKLREHCRERPGAFPSEETLRGLGRRGFLQTLNATLGCVLHRLADLEQRLPKAQDLERSGLNIEDLEKLQMARPNILGLRNNIYCMAQLLDNSDTAEPTKAGRGASQPPTPTPASDAFQRKLEGCRFLHGYHRFMHSVGRVFSKWGESPNRSRRHSPHQALRKGVRRTRPSRKGKRLMTRGQLPR

SEQ ID NO: 4730 - RNA, 759 nt, synthetic construct
  misc_feature 1..759: note = OSM__Homo_sapiens__AAA36388
  source 1..759: mol_type = other RNA
atgggggtactgctcacacagaggacgctgctcagtctggtccttgcactcctgtttccaagcatggcgagcatggcggctataggcagctgctcgaaagagtaccgcgtgctccttggccagctccagaagcagacagatctcatgcaggacaccagcagactcctggacccctatatacgtatccaaggcctggatgttcctaaactgagagagcactgcagggagcgccccggggccttccccagtgaggagaccctgagggggctgggcaggcggggcttcctgcagaccctcaatgccacactgggctgcgtcctgcacagactggccgacttagagcagcgcctccccaaggcccaggatttggagaggtctgggctgaacatcgaggacttggagaagctgcagatggcgaggccgaacatcctcgggctcaggaacaacatctactgcatggcccagctgctggacaactcagacacggctgagcccacgaaggctggccggggggcctctcagccgcccacccccacccctgcctcggatgcttttcagcgcaagctggagggctgcaggttcctgcatggctaccatcgcttcatgcactcagtggggcgggtcttcagcaagtggggggagagcccgaaccggagccggagacacagcccccaccaggccctgaggaagggggtgcgcaggaccagaccctccaggaaaggcaagagactcatgaccaggggacagctgccccggtag

SEQ ID NO: 4731 - RNA, 759 nt, synthetic construct
  misc_feature 1..759: note = derived and/or modified sequence opt1 fromOSM__Homo_sapiens__AAA36388
  source 1..759: mol_type = other RNA
atgggcgtgctgctcacccagcgcaccctgctgagcctcgtcctggccctcctgttcccctccatggccagcatggcggccatcgggtcctgcagcaaggagtaccgggtgctgctgggccagctccagaagcagacggacctgatgcaggacacctcccgcctgctcgacccgtacatccggatccaggggctggacgtgcccaagctgcgcgagcactgccgggagcgccccggcgccttccccagcgaggagaccctccgggggctgggccgccggggcttcctgcagaccctcaacgccacgctggggtgcgtcctgcaccgcctcgccgacctggagcagcggctgccgaaggcgcaggacctcgagcgctccggcctgaacatcgaggacctggagaagctccagatggcccggcccaacatcctggggctgcgcaacaacatctactgcatggcccagctcctggacaacagcgacaccgccgagcccaccaaggcgggccgcggggcctcccagcccccgacccccacgcccgccagcgacgccttccagcggaagctggagggctgccggttcctccacggctaccaccgcttcatgcactccgtggggcgggtgttcagcaagtggggcgagtcccccaaccgcagccggcgccactccccgcaccaggccctgcgcaagggggtccggcgcacccggcccagccgcaagggcaagcggctgatgacccgcggccagctcccccggtga

SEQ ID NO: 4732 - RNA, 759 nt, synthetic construct
  misc_feature 1..759: note = derived and/or modified sequence opt2 fromOSM__Homo_sapiens__AAA36388
  source 1..759: mol_type = other RNA
atgggcgtcctcctcacccagcgcaccctcctctccctcgtcctcgccctcctcttcccctccatggcctccatggccgccatcggctcctgctccaaggagtaccgcgtcctcctcggccagctccagaagcagaccgacctcatgcaggacacctcccgcctcctcgacccctacatccgcatccagggcctcgacgtccccaagctccgcgagcactgccgcgagcgccccggcgccttcccctccgaggagaccctccgcggcctcggccgccgcggcttcctccagaccctcaacgccaccctcggctgcgtcctccaccgcctcgccgacctcgagcagcgcctccccaaggcccaggacctcgagcgctccggcctcaacatcgaggacctcgagaagctccagatggcccgccccaacatcctcggcctccgcaacaacatctactgcatggcccagctcctcgacaactccgacaccgccgagcccaccaaggccggccgcggcgcctcccagccccccacccccacccccgcctccgacgccttccagcgcaagctcgagggctgccgcttcctccacggctaccaccgcttcatgcactccgtcggccgcgtcttctccaagtggggcgagtcccccaaccgctcccgccgccactccccccaccaggccctccgcaagggcgtccgccgcacccgcccctcccgcaagggcaagcgcctcatgacccgcggccagctcccccgctga

SEQ ID NO: 4733 - RNA, 759 nt, synthetic construct
  misc_feature 1..759: note = derived and/or modified sequence opt3 fromOSM__Homo_sapiens__AAA36388
  source 1..759: mol_type = other RNA
atgggcgtgctgctcacccagagaacacttctgagcttggtcttagccctgctattcccctccatggcttctatggcagccatcgggtcatgcagtaaggagtacagggttctcctgggacaacttcagaaacagactgacctgatgcaggatacgagccggttgctcgacccttatattcgcatacaaggtctggatgtgccaaagctgcgagaacactgtcgtgagagaccgggcgcgtttccctccgaagagaccctcagggggttaggacggcgcggcttcctgcagacacttaacgctactttgggttgcgtactgcatagactagccgacctcgaacagaggctgcctaaagcacaggatcttgagcggtctgggctgaatatcgaggacttggaaaagctccaaatggcccgcccaaacattctgggattacgaaataacatctactgtatggctcagctgctcgataattcggacaccgcagagcccacaaaagccggcagaggcgcttcacagcctccaacccccactcctgccagcgatgcgtttcagaggaaacttgaagggtgccggttcctgcacggatatcatcgttttatgcacagtgtgggtcgcgtcttctccaagtggggcgagtctccaaacagaagcaggcggcattccccgcaccaagcattgcgaaagggggtgcgcagaacaaggccctcacggaagggaaaacgcctaatgaccagaggccagctgcctaggtga

SEQ ID NO: 4734 - RNA, 759 nt, synthetic construct
  misc_feature 1..759: note = derived and/or modified sequence opt4 fromOSM__Homo_sapiens__AAA36388
  source 1..759: mol_type = other RNA
atgggcgtgctgctgacccagagaaccctgctgagcctggtgctggccctgctgttccccagcatggccagcatggccgccatcggcagctgcagcaaggagtacagagtgctgctgggccagctgcagaagcagaccgacctgatgcaggacaccagcagactgctggacccctacatcagaatccagggcctggacgtgcccaagctgagagagcactgcagagagagacccggcgccttccccagcgaggagaccctgagaggcctgggcagaagaggcttcctgcagaccctgaacgccaccctgggctgcgtgctgcacagactggccgacctggagcagagactgcccaaggcccaggacctggagagaagcggcctgaacatcgaggacctggagaagctgcagatggccagacccaacatcctgggcctgagaaacaacatctactgcatggcccagctgctggacaacagcgacaccgccgagcccaccaaggccggcagaggcgccagccagccccccacccccacccccgccagcgacgccttccagagaaagctggagggctgcagattcctgcacggctaccacagattcatgcacagcgtgggcagagtgttcagcaagtggggcgagagccccaacagaagcagaagacacagcccccaccaggccctgagaaagggcgtgagaagaaccagacccagcagaaagggcaagagactgatgaccagaggccagctgcccagatga

SEQ ID NO: 4735 - RNA, 759 nt, synthetic construct
  misc_feature 1..759: note = derived and/or modified sequence opt5 fromOSM__Homo_sapiens__AAA36388
  source 1..759: mol_type = other RNA
atgggcgtgctgctcacccagagaacactgcttagcctggtcctcgccctgcttttcccctccatggcttctatggccgcgatcgggagctgctccaaggagtaccgggttctgctcggacaactgcagaaacagacggacctgatgcaggatacctctcgcctcctggacccttatattagaatccaaggccttgatgtgccgaagctgcgggaacactgtcgcgagagacccggggcttttcctagcgaagagacactccggggactgggccgcagagggttccttcagaccctgaacgccacactcggatgcgtgctgcatcggctggccgacctcgaacagcgcctgcccaaagctcaggatcttgagagatccggcctgaatattgaggacctcgaaaagctgcaaatggcccggcctaacatccttggcctgcgcaataacatttactgtatggctcagctcctggataattctgacaccgccgagcccacaaaagcggggagaggagccagccagcctccgacccccacgcctgcttccgatgcctttcagcggaagctggaaggctgccgcttcctccacgggtatcatagatttatgcacagcgtcggacgggtgttctctaagtggggcgagtcccccaacagaagccgccggcattctcctcaccaagctctgagaaaaggggttcgccggaccagaccctcccgcaagggaaaacggcttatgacaagaggccagctgccgcgctga

SEQ ID NO: 4736 - RNA, 759 nt, synthetic construct
  misc_feature 1..759: note = derived and/or modified sequence opt6 fromOSM__Homo_sapiens__AAA36388
  source 1..759: mol_type = other RNA
atgggcgtattattaacacaaagaacattactatcactagtactagcattattattcccctcaatggcctcaatggcagcaataggctcatgctcaaaagaatacagagtactattaggacaactacaaaaacaaacagacttaatgcaagacacaagcagacttctagatccatatataagaatacaaggattagacgtcccaaaactaagagaacactgcagagaaagaccaggagcattcccatcagaagaaacactaagaggattaggacgaagaggattcttacaaacactaaacgcaacactaggatgtgtattacatagattagccgacctagaacaaagactaccaaaagcacaagacctagaacgatcaggactaaacatagaagacttagaaaaattacaaatggcaagaccaaacatactcggattacgaaacaatatatattgcatggcacaactattagacaactcagatacagcagaacccacaaaagcaggacgaggagcatcacaaccaccaacaccaacaccagcatcagacgcattccaacgaaaactagaaggatgtagattcctacatggataccacagatttatgcactcagtcggaagagtattctcaaaatggggagaaagtccaaacagatcaagaagacactcaccacaccaagcactcagaaaaggagtaagaagaacaagaccatcaagaaaaggaaaacgactaatgacaaggggccaactaccaagataa

SEQ ID NO: 4737 - protein, 183 aa, synthetic construct
  REGION 1..183: note = OX40L__Homo_sapiens__P23510
MERVQPLEENVGNAARPRFERNKLLLVASVIQGLGLLLCFTYICLHFSALQVSHRYPRIQSIKVQFTEYKKEKGFILTSQKEDEIMKVQNNSVIINCDGFYLISLKGYFSQEVNISLHYQKDEEPLFQLKKVRSVNSLMVASLTYKDKVYLNVTTDNTSLDDFHVNGGELILIHQNPGEFCVL

SEQ ID NO: 4738 - RNA, 552 nt, synthetic construct
  misc_feature 1..552: note = OX40L__Homo_sapiens__BAA14259
  source 1..552: mol_type = other RNA
atggaaagggtccaacccctggaagagaatgtgggaaatgcagccaggccaagattcgagaggaacaagctattgctggtggcctctgtaattcagggactggggctgctcctgtgcttcacctacatctgcctgcacttctctgctcttcaggtatcacatcggtatcctcgaattcaaagtatcaaagtacaatttaccgaatataagaaggagaaaggtttcatcctcacttcccaaaaggaggatgaaatcatgaaggtgcagaacaactcagtcatcatcaactgtgatgggttttatctcatctccctgaagggctacttctcccaggaagtcaacattagccttcattaccagaaggatgaggagcccctcttccaactgaagaaggtcaggtctgtcaactccttgatggtggcctctctgacttacaaagacaaagtctacttgaatgtgaccactgacaatacctccctggatgacttccatgtgaatggcggagaactgattcttatccatcaaaatcctggtgaattctgtgtcctttga

SEQ ID NO: 4739 - RNA, 552 nt, synthetic construct
  misc_feature 1..552: note = derived and/or modified sequence opt1 fromOX40L__Homo_sapiens__BAA14259
  source 1..552: mol_type = other RNA
atggagcgcgtgcagcccctggaggagaacgtcggcaacgccgcccggccgcgcttcgagcggaacaagctcctgctggtggcgagcgtgatccaggggctcggcctgctgctctgcttcacctacatctgcctgcacttctccgccctgcaggtcagccaccgctacccccggatccagtccatcaaggtgcagttcaccgagtacaagaaggagaaggggttcatcctcacgagccagaaggaggacgagatcatgaaggtgcagaacaactccgtcatcatcaactgcgacggcttctacctgatcagcctgaaggggtacttctcccaggaggtgaacatcagcctccactaccagaaggacgaggagcccctgttccagctgaagaaggtgcgctccgtcaacagcctcatggtggcctccctgacctacaaggacaaggtgtacctgaacgtcaccaccgacaacacgagcctcgacgacttccacgtgaacggcggcgagctgatcctgatccaccagaaccccggggagttctgcgtgctctga

SEQ ID NO: 4740 - RNA, 552 nt, synthetic construct
  misc_feature 1..552: note = derived and/or modified sequence opt2 fromOX40L__Homo_sapiens__BAA14259
  source 1..552: mol_type = other RNA
atggagcgcgtccagcccctcgaggagaacgtcggcaacgccgcccgcccccgcttcgagcgcaacaagctcctcctcgtcgcctccgtcatccagggcctcggcctcctcctctgcttcacctacatctgcctccacttctccgccctccaggtctcccaccgctacccccgcatccagtccatcaaggtccagttcaccgagtacaagaaggagaagggcttcatcctcacctcccagaaggaggacgagatcatgaaggtccagaacaactccgtcatcatcaactgcgacggcttctacctcatctccctcaagggctacttctcccaggaggtcaacatctccctccactaccagaaggacgaggagcccctcttccagctcaagaaggtccgctccgtcaactccctcatggtcgcctccctcacctacaaggacaaggtctacctcaacgtcaccaccgacaacacctccctcgacgacttccacgtcaacggcggcgagctcatcctcatccaccagaaccccggcgagttctgcgtcctctga

SEQ ID NO: 4741 - RNA, 552 nt, synthetic construct
  misc_feature 1..552: note = derived and/or modified sequence opt3 fromOX40L__Homo_sapiens__BAA14259
  source 1..552: mol_type = other RNA
atggagagagtgcagcccctggaagagaacgtcggcaatgccgctaggcctcggttcgaacgcaacaagctccttctggttgcaagcgtgatccaagggttgggattactgctatgctttacctacatttgtctccacttctccgccctgcaggtatctcatcgatatccacgtatacagtcaatcaaagtgcagtttacagagtacaagaaagaaaagggtttcattcttacgagtcaaaaagaggacgagatcatgaaggtccagaataacagcgtgattatcaattgcgatggcttttatctgatatccttgaaggggtacttctctcaggaagttaacatctcgctccactatcagaaagacgaggaaccgctgtttcaactgaagaaagtgagatcagtcaatagcctcatggtggcgagtttaacttacaaggataaagtatatctgaacgttaccacagacaatacttcccttgatgacttccatgtgaacggaggcgagttgattctgatccaccagaatcccggtgagttttgtgtcctatga

SEQ ID NO: 4742 - RNA, 552 nt, synthetic construct
  misc_feature 1..552: note = derived and/or modified sequence opt4 fromOX40L__Homo_sapiens__BAA14259
  source 1..552: mol_type = other RNA
atggagagagtgcagcccctggaggagaacgtgggcaacgccgccagacccagattcgagagaaacaagctgctgctggtggccagcgtgatccagggcctgggcctgctgctgtgcttcacctacatctgcctgcacttcagcgccctgcaggtgagccacagataccccagaatccagagcatcaaggtgcagttcaccgagtacaagaaggagaagggcttcatcctgaccagccagaaggaggacgagatcatgaaggtgcagaacaacagcgtgatcatcaactgcgacggcttctacctgatcagcctgaagggctacttcagccaggaggtgaacatcagcctgcactaccagaaggacgaggagcccctgttccagctgaagaaggtgagaagcgtgaacagcctgatggtggccagcctgacctacaaggacaaggtgtacctgaacgtgaccaccgacaacaccagcctggacgacttccacgtgaacggcggcgagctgatcctgatccaccagaaccccggcgagttctgcgtgctgtga

SEQ ID NO: 4743 - RNA, 552 nt, synthetic construct
  misc_feature 1..552: note = derived and/or modified sequence opt5 fromOX40L__Homo_sapiens__BAA14259
  source 1..552: mol_type = other RNA
atggagagagtgcagcccctggaagagaacgtcggcaatgccgctcggcctcgcttcgaaagaaacaagctcctgcttgttgccagcgtgatccaagggctgggactcctgctttgctttacctacatttgtctgcacttctccgcgctccaggtgtctcatcggtatccgcgcatccagagcattaaagtccagtttacagagtacaagaaagaaaagggcttcatcctgacgtcccaaaaagaggacgagattatgaaggtgcagaataactctgttatcatcaattgcgatgggttttatctgattagcctcaagggatacttctcccaggaagtgaacatctctctgcactatcagaaagacgaggaacccctttttcaactgaagaaagtcagaagcgttaattccctcatggtggctagcctgacctacaaggataaagtgtatcttaacgtcacaaccgacaatacatctctggatgacttccatgtgaacggcggggagctcattctgatccaccagaatcctggagagttttgtgtgctgtga

SEQ ID NO: 4744 - RNA, 552 nt, synthetic construct
  misc_feature 1..552: note = derived and/or modified sequence opt6 fromOX40L__Homo_sapiens__BAA14259
  source 1..552: mol_type = other RNA
atggaaagagtacaaccactagaagaaaacgtaggaaacgcagcaagaccaagattcgaaagaaacaaattactactagtagcatcagtaatacaaggactaggactactattatgcttcacatacatatgcctacacttctcagcactacaagtatcccacagatacccaagaatacaatcaataaaagtacaattcaccgaatacaaaaaagaaaaaggcttcatactaacatcccaaaaagaagacgaaataatgaaagtacaaaacaactcagtaataataaactgcgatggattctacctaatatcactaaaaggatacttctcacaagaagtaaacatatccctacactaccaaaaagacgaagaaccactattccaactaaaaaaagtaagatcagtaaactcactaatggtcgcatcactaacatacaaagacaaagtatatctaaacgtcacaaccgacaacacatccctagacgacttccacgtaaacggaggagaactaatactaatacaccaaaacccaggagaattctgcgtactctaa

SEQ ID NO: 4745 - protein, 277 aa, synthetic construct
  REGION 1..277: note = OX40L__Homo_sapiens__P43489
MCVGARRLGRGPCAALLLLGLGLSTVTGLHCVGDTYPSNDRCCHECRPGNGMVSRCSRSQNTVCRPCGPGFYNDVVSSKPCKPCTWCNLRSGSERKQLCTATQDTVCRCRAGTQPLDSYKPGVDCAPCPPGHFSPGDNQACKPWTNCTLAGKHTLQPASNSSDAICEDRDPPATQPQETQGPPARPITVQPTEAWPRTSQGPSTRPVEVPGGRAVAAILGLGLVLGLLGPLAILLALYLLRRDQRLPPDAHKPPGGGSFRTPIQEEQADAHSTLAKI

SEQ ID NO: 4746 - RNA, 834 nt, synthetic construct
  misc_feature 1..834: note = OX40L__Homo_sapiens__AAI05071
  source 1..834: mol_type = other RNA
atgtgcgtgggggctcggcggctgggccgcgggccgtgtgcggctctgctcctcctgggcctggggctgagcaccgtgacggggctccactgtgtcggggacacctaccccagcaacgaccggtgctgccacgagtgcaggccaggcaacgggatggtgagccgctgcagccgctcccagaacacggtgtgccgtccgtgcgggccgggcttctacaacgacgtggtcagctccaagccgtgcaagccctgcacgtggtgtaacctcagaagtgggagtgagcggaagcagctgtgcacggccacacaggacacagtctgccgctgccgggcgggcacccagcccctggacagctacaagcctggagttgactgtgccccctgccctccagggcacttctccccaggcgacaaccaggcctgcaagccctggaccaactgcaccttggctgggaagcacaccctgcagccggccagcaatagctcggacgcaatctgtgaggacagggaccccccagccacgcagccccaggagacccagggccccccggccaggcccatcactgtccagcccactgaagcctggcccagaacctcacagggaccctccacccggcccgtggaggtccccgggggccgtgcggttgccgccatcctgggcctgggcctggtgctggggctgctgggccccctggccatcctgctggccctgtacctgctccggagggaccagaggctgccccccgatgcccacaagccccctgggggaggcagtttccggacccccatccaagaggagcaggccgacgcccactccaccctggccaagatctga

SEQ ID NO: 4747 - RNA, 834 nt, synthetic construct
  misc_feature 1..834: note = derived and/or modified sequence opt1 fromOX40L__Homo_sapiens__AAI05071
  source 1..834: mol_type = other RNA
atgtgcgtgggcgcccgccggctggggcgcggcccctgcgccgcgctcctgctgctcgggctgggcctgagcaccgtcaccgggctccactgcgtgggcgacacgtacccctccaacgaccggtgctgccacgagtgccgccccggcaacgggatggtgagccggtgctcccgcagccagaacaccgtctgccggccctgcggccccgggttctacaacgacgtggtgtccagcaagccgtgcaagccctgcacctggtgcaacctgcgctccggcagcgagcggaagcagctgtgcaccgccacgcaggacaccgtctgccgctgccgggccgggacccagcccctcgactcctacaagcccggcgtggactgcgccccgtgcccgcccggccacttcagccccggggacaaccaggcctgcaagccctggaccaactgcacgctggcgggcaagcacaccctgcagcccgcctccaacagctccgacgccatctgcgaggaccgcgacccgcccgccacccagccccaggagacccaggggccgcccgcgcggcccatcacggtgcagcccaccgaggcctggccccgcaccagccagggcccctccacccggcccgtcgaggtgccgggcgggcgcgccgtggccgccatcctcggcctggggctggtcctcggcctgctggggcccctcgcgatcctgctggccctctacctgctgcggcgcgaccagcggctcccgcccgacgcccacaagccgcccggcggcgggagcttccgcacgcccatccaggaggagcaggccgacgcccactccaccctggcgaagatctga

SEQ ID NO: 4748 - RNA, 834 nt, synthetic construct
  misc_feature 1..834: note = derived and/or modified sequence opt2 fromOX40L__Homo_sapiens__AAI05071
  source 1..834: mol_type = other RNA
atgtgcgtcggcgcccgccgcctcggccgcggcccctgcgccgccctcctcctcctcggcctcggcctctccaccgtcaccggcctccactgcgtcggcgacacctacccctccaacgaccgctgctgccacgagtgccgccccggcaacggcatggtctcccgctgctcccgctcccagaacaccgtctgccgcccctgcggccccggcttctacaacgacgtcgtctcctccaagccctgcaagccctgcacctggtgcaacctccgctccggctccgagcgcaagcagctctgcaccgccacccaggacaccgtctgccgctgccgcgccggcacccagcccctcgactcctacaagcccggcgtcgactgcgccccctgcccccccggccacttctcccccggcgacaaccaggcctgcaagccctggaccaactgcaccctcgccggcaagcacaccctccagcccgcctccaactcctccgacgccatctgcgaggaccgcgacccccccgccacccagccccaggagacccagggcccccccgcccgccccatcaccgtccagcccaccgaggcctggccccgcacctcccagggcccctccacccgccccgtcgaggtccccggcggccgcgccgtcgccgccatcctcggcctcggcctcgtcctcggcctcctcggccccctcgccatcctcctcgccctctacctcctccgccgcgaccagcgcctcccccccgacgcccacaagccccccggcggcggctccttccgcacccccatccaggaggagcaggccgacgcccactccaccctcgccaagatctga

SEQ ID NO: 4749 - RNA, 834 nt, synthetic construct
  misc_feature 1..834: note = derived and/or modified sequence opt3 fromOX40L__Homo_sapiens__AAI05071
  source 1..834: mol_type = other RNA
atgtgcgtgggcgccagaaggctggggcggggaccctgtgctgcactccttctgttgggtttaggcctgagcaccgtcacagggctacactgcgttggagacacttacccttccaacgatcgctgttgccatgagtgtcgaccaggcaatggtatggtgtctcgttgctcaagaagtcagaacacggtatgtaggccgtgcgggcccggattctataatgacgtggtcagctccaagccttgtaaaccatgcacctggtgtaacctccggtctggctcggaacgcaagcaactgtgcacagccactcaggataccgtgtgcagatgtagggcgggcacacagccccttgactcatacaaacctggggttgattgcgctccatgtccccctggacactttagcccaggtgacaatcaggcctgcaagccgtggaccaactgtactctggcaggcaaacatacattgcaacccgccagtaattcctctgatgctatctgcgaggaccgggatcctccagcaacccagccccaggaaacgcaggggcctccagcccgccccattactgtgcaaccgaccgaggcttggcctcgaacaagccagggaccctccactagaccagtcgaagtgcctggcggtagggccgtagcggcaatactcgggctgggactggttctcggcttactgggcccccttgccatcttgctggctctatatctcctgcggcgtgaccagcgccttccacccgatgcccacaagcctccagggggaggttcattcagaaccccgattcaggaggagcaagcagacgctcatagtacactggccaagatctga

SEQ ID NO: 4750 - RNA, 834 nt, synthetic construct
  misc_feature 1..834: note = derived and/or modified sequence opt4 fromOX40L__Homo_sapiens__AAI05071
  source 1..834: mol_type = other RNA
atgtgcgtgggcgccagaagactgggcagaggcccctgcgccgccctgctgctgctgggcctgggcctgagcaccgtgaccggcctgcactgcgtgggcgacacctaccccagcaacgacagatgctgccacgagtgcagacccggcaacggcatggtgagcagatgcagcagaagccagaacaccgtgtgcagaccctgcggccccggcttctacaacgacgtggtgagcagcaagccctgcaagccctgcacctggtgcaacctgagaagcggcagcgagagaaagcagctgtgcaccgccacccaggacaccgtgtgcagatgcagagccggcacccagcccctggacagctacaagcccggcgtggactgcgccccctgcccccccggccacttcagccccggcgacaaccaggcctgcaagccctggaccaactgcaccctggccggcaagcacaccctgcagcccgccagcaacagcagcgacgccatctgcgaggacagagacccccccgccacccagccccaggagacccagggcccccccgccagacccatcaccgtgcagcccaccgaggcctggcccagaaccagccagggccccagcaccagacccgtggaggtgcccggcggcagagccgtggccgccatcctgggcctgggcctggtgctgggcctgctgggccccctggccatcctgctggccctgtacctgctgagaagagaccagagactgccccccgacgcccacaagccccccggcggcggcagcttcagaacccccatccaggaggagcaggccgacgcccacagcaccctggccaagatctga

SEQ ID NO: 4751 - RNA, 834 nt, synthetic construct
  misc_feature 1..834: note = derived and/or modified sequence opt5 fromOX40L__Homo_sapiens__AAI05071
  source 1..834: mol_type = other RNA
atgtgcgtgggcgccagacggctggggcgcggaccctgtgctgccctcctgcttctgggcctcgggctgagcaccgtcacaggacttcactgcgttggcgacacgtacccttccaacgatagatgttgccatgagtgtcggccggggaatggaatggtgtctcgctgcagcagatcccagaacaccgtgtgtcggccctgcggccctggcttctataatgacgtcgtgtctagcaagccctgtaaaccttgcacatggtgtaacctgcgctccgggtctgaaagaaagcaactctgcaccgcgacacaggataccgtttgccggtgtcgcgctggaacacagcccctggacagctacaaacctggcgtggattgcgccccgtgtccccctgggcacttttcccccggagacaatcaggcctgcaagccttggaccaactgtacgctggctggcaaacataccctccaacccgccagcaattcttccgatgctatctgcgaggacagagatccgcctgccacacagccccaggaaacccaggggcctcccgcgcggcccattacagtccaacctaccgaggcctggccgcgcacgagccagggaccctctacaagacctgtggaagttcccggcggccgggctgtggccgctatcctggggcttggactggtcctcggcctgcttgggcctctggccattctcctggcgctgtatctcctgcgcagagaccagcggcttcccccggatgcccacaagcctcccggaggcgggtccttcagaacccctatccaggaggagcaagctgacgcccatagcacactggctaagatttga

SEQ ID NO: 4752 - RNA, 834 nt, synthetic construct
  misc_feature 1..834: note = derived and/or modified sequence opt6 fromOX40L__Homo_sapiens__AAI05071
  source 1..834: mol_type = other RNA
atgtgtgttggagcacgtagattaggaagaggaccatgtgcagcattactactactaggattaggattatcaacagtaacaggtctacattgcgttggagatacatacccatcaaacgacagatgttgccatgaatgtagacctggaaatggaatggtatccagatgtagcagaagccaaaacacagtatgcagaccatgcggcccaggattttataacgatgtagtatcctctaaaccatgtaaaccctgtacatggtgtaatttacgatcaggaagcgaaagaaaacaattatgtacagcaacacaagatacagtatgcagatgcagagcaggaacacaaccactagattcatacaaaccaggtgtagattgcgctccatgtcctccaggacacttctcacccggagacaatcaagcatgtaaaccatggacaaattgcacattagcaggaaaacatactctacaaccagcatcaaatagttcagatgcaatatgtgaagatagagatccaccagcaacccaaccacaagaaacacaaggaccaccagcacgaccaataacagtacaaccgacagaagcatggccaagaacatcacaaggaccatcaacaagaccagtcgaagtaccaggaggaagagcagtagcagcaatattaggattaggactagtattaggactactaggcccactagcaatattactagcactatatctattaagaagagaccaaagattaccaccagacgcacacaaaccaccaggcggaggctcattcaggactccaatacaagaagaacaagcagacgcacactcaacattggcaaaaatataa

SEQ ID NO: 4753 - protein, 317 aa, synthetic construct
  REGION 1..317: note = RANK_ligand__Homo_sapiens__O14788
MRRASRDYTKYLRGSEEMGGGPGAPHEGPLHAPPPPAPHQPPAASRSMFVALLGLGLGQVVCSVALFFYFRAQMDPNRISEDGTHCIYRILRLHENADFQDTTLESQDTKLIPDSCRRIKQAFQGAVQKELQHIVGSQHIRAEKAMVDGSWLDLAKRSKLEAQPFAHLTINATDIPSGSHKVSLSSWYHDRGWAKISNMTFSNGKLIVNQDGFYYLYANICFRHHETSGDLATEYLQLMVYVTKTSIKIPSSHTLMKGGSTKYWSGNSEFHFYSINVGGFFKLRSGEEISIEVSNPSLLDPDQDATYFGAFKVRDID

SEQ ID NO: 4754 - RNA, 954 nt, synthetic construct
  misc_feature 1..954: note = RANK_ligand__Homo_sapiens__CCDS9384.1
  source 1..954: mol_type = other RNA
atgcgccgcgccagcagagactacaccaagtacctgcgtggctcggaggagatgggcggcggccccggagccccgcacgagggccccctgcacgccccgccgccgcctgcgccgcaccagccccctgccgcctcccgctccatgttcgtggccctcctggggctggggctgggccaggttgtctgcagcgtcgccctgttcttctatttcagagcgcagatggatcctaatagaatatcagaagatggcactcactgcatttatagaattttgagactccatgaaaatgcagattttcaagacacaactctggagagtcaagatacaaaattaatacctgattcatgtaggagaattaaacaggcctttcaaggagctgtgcaaaaggaattacaacatatcgttggatcacagcacatcagagcagagaaagcgatggtggatggctcatggttagatctggccaagaggagcaagcttgaagctcagccttttgctcatctcactattaatgccaccgacatcccatctggttcccataaagtgagtctgtcctcttggtaccatgatcggggttgggccaagatctccaacatgacttttagcaatggaaaactaatagttaatcaggatggcttttattacctgtatgccaacatttgctttcgacatcatgaaacttcaggagacctagctacagagtatcttcaactaatggtgtacgtcactaaaaccagcatcaaaatcccaagttctcataccctgatgaaaggaggaagcaccaagtattggtcagggaattctgaattccatttttattccataaacgttggtggattttttaagttacggtctggagaggaaatcagcatcgaggtctccaacccctccttactggatccggatcaggatgcaacatactttggggcttttaaagttcgagatatagattga

SEQ ID NO: 4755 - RNA, 954 nt, synthetic construct
  misc_feature 1..954: note = derived and/or modified sequence opt1 fromRANK_ligand__Homo_sapiens__CCDS9384.1
  source 1..954: mol_type = other RNA
atgcgccgggccagccgcgactacaccaagtacctgcggggctccgaggagatgggcggcgggcccggcgccccgcacgaggggcccctccacgcgcccccgccgcccgcgccccaccagcccccggccgccagccgctccatgttcgtggccctgctgggcctcggcctggggcaggtcgtgtgcagcgtggccctgttcttctacttccgggcccagatggaccccaaccgcatctccgaggacggcacccactgcatctaccggatcctccgcctgcacgagaacgccgacttccaggacacgaccctggagagccaggacaccaagctcatccccgactcctgccggcgcatcaagcaggccttccagggggcggtccagaaggagctgcagcacatcgtggggagccagcacatccgggccgagaaggccatggtggacgggtcctggctggacctcgccaagcgcagcaagctggaggcccagcccttcgcgcacctgaccatcaacgccacggacatcccctccggcagccacaaggtctccctcagctcctggtaccacgaccggggctgggccaagatcagcaacatgaccttctccaacgggaagctgatcgtgaaccaggacggcttctactacctgtacgccaacatctgcttccgccaccacgagaccagcggggacctcgccaccgagtacctgcagctgatggtgtacgtcacgaagacctccatcaagatccccagcagccacaccctcatgaagggcggctccaccaagtactggagcgggaactccgagttccacttctacagcatcaacgtgggcgggttcttcaagctgcggtccggcgaggagatcagcatcgaggtgtccaaccccagcctgctcgaccccgaccaggacgcgacgtacttcggggccttcaaggtccgcgacatcgactga

SEQ ID NO: 4756 - RNA, 954 nt, synthetic construct
  misc_feature 1..954: note = derived and/or modified sequence opt2 fromRANK_ligand__Homo_sapiens__CCDS9384.1
  source 1..954: mol_type = other RNA
atgcgccgcgcctcccgcgactacaccaagtacctccgcggctccgaggagatgggcggcggccccggcgccccccacgagggccccctccacgccccccccccccccgccccccaccagccccccgccgcctcccgctccatgttcgtcgccctcctcggcctcggcctcggccaggtcgtctgctccgtcgccctcttcttctacttccgcgcccagatggaccccaaccgcatctccgaggacggcacccactgcatctaccgcatcctccgcctccacgagaacgccgacttccaggacaccaccctcgagtcccaggacaccaagctcatccccgactcctgccgccgcatcaagcaggccttccagggcgccgtccagaaggagctccagcacatcgtcggctcccagcacatccgcgccgagaaggccatggtcgacggctcctggctcgacctcgccaagcgctccaagctcgaggcccagcccttcgcccacctcaccatcaacgccaccgacatcccctccggctcccacaaggtctccctctcctcctggtaccacgaccgcggctgggccaagatctccaacatgaccttctccaacggcaagctcatcgtcaaccaggacggcttctactacctctacgccaacatctgcttccgccaccacgagacctccggcgacctcgccaccgagtacctccagctcatggtctacgtcaccaagacctccatcaagatcccctcctcccacaccctcatgaagggcggctccaccaagtactggtccggcaactccgagttccacttctactccatcaacgtcggcggcttcttcaagctccgctccggcgaggagatctccatcgaggtctccaacccctccctcctcgaccccgaccaggacgccacctacttcggcgccttcaaggtccgcgacatcgactga

SEQ ID NO: 4757 - RNA, 954 nt, synthetic construct
  misc_feature 1..954: note = derived and/or modified sequence opt3 fromRANK_ligand__Homo_sapiens__CCDS9384.1
  source 1..954: mol_type = other RNA
atgagaagggccagccgggactacaccaagtatctgcgcggctccgaggaaatgggagggggtcccggcgctcctcacgaggggccactccatgcaccgccccctccagcgccccaccagcctccagccgcttctcgatcaatgttcgtggcccttctgggattgggcttaggtcaagtcgtttgcagtgtggcactgtttttctactttcgtgcccagatggatcccaacagaatcagcgaagacgggacacattgtatttataggatactacggctccacgagaatgctgatttccaggacactacgctggaatcccaggataccaaacttatccctgactcttgccgcagaattaagcaagcatttcagggagccgtacagaaagagctgcagcatatcgtgggctcgcaacacattagggctgagaaggccatggtcgatggctcatggttggacctcgcgaaacggagcaagctggaagcacagccattcgcccacctgacaatcaacgctactgatataccgagtgggtcccataaggtgtctctcagctcctggtaccacgaccgcggatgggccaaaatctcaaatatgacctttagtaacggtaagttaattgttaatcaggatggcttctattacctgtatgcaaacatctgttttcgacatcacgagacaagcggggaccttgctaccgaatacttgcagctgatggtgtacgtcactaaaacatctattaagatcccctcctcacacaccctaatgaaaggaggcagcacgaagtattggagtggtaattctgagttccatttttactccataaacgtagggggattctttaagctcagaagcggcgaggaaatttcgatcgaggtgtctaatccttccctgcttgatccagaccaagacgccacttatttcggcgcgttcaaagttagggatattgactga

SEQ ID NO: 4758 - RNA, 954 nt, synthetic construct
  misc_feature 1..954: note = derived and/or modified sequence opt4 fromRANK_ligand__Homo_sapiens__CCDS9384.1
  source 1..954: mol_type = other RNA
atgagaagagccagcagagactacaccaagtacctgagaggcagcgaggagatgggcggcggccccggcgccccccacgagggccccctgcacgccccccccccccccgccccccaccagccccccgccgccagcagaagcatgttcgtggccctgctgggcctgggcctgggccaggtggtgtgcagcgtggccctgttcttctacttcagagcccagatggaccccaacagaatcagcgaggacggcacccactgcatctacagaatcctgagactgcacgagaacgccgacttccaggacaccaccctggagagccaggacaccaagctgatccccgacagctgcagaagaatcaagcaggccttccagggcgccgtgcagaaggagctgcagcacatcgtgggcagccagcacatcagagccgagaaggccatggtggacggcagctggctggacctggccaagagaagcaagctggaggcccagcccttcgcccacctgaccatcaacgccaccgacatccccagcggcagccacaaggtgagcctgagcagctggtaccacgacagaggctgggccaagatcagcaacatgaccttcagcaacggcaagctgatcgtgaaccaggacggcttctactacctgtacgccaacatctgcttcagacaccacgagaccagcggcgacctggccaccgagtacctgcagctgatggtgtacgtgaccaagaccagcatcaagatccccagcagccacaccctgatgaagggcggcagcaccaagtactggagcggcaacagcgagttccacttctacagcatcaacgtgggcggcttcttcaagctgagaagcggcgaggagatcagcatcgaggtgagcaaccccagcctgctggaccccgaccaggacgccacctacttcggcgccttcaaggtgagagacatcgactga

SEQ ID NO: 4759 - RNA, 954 nt, synthetic construct
  misc_feature 1..954: note = derived and/or modified sequence opt5 fromRANK_ligand__Homo_sapiens__CCDS9384.1
  source 1..954: mol_type = other RNA
atgagacgggccagccgcgactacaccaagtatctgagaggctccgaggaaatgggagggggccccggggctcctcacgagggaccgctccatgcgccccctccccctgctccccaccagcctccggccgcctctcggagcatgttcgtggccctgcttggcctggggctcggacaagtcgtttgctccgtggctctgtttttctactttcgcgcccagatggatcccaacagaatctctgaagacggcacacattgtatttatcggatccttcgcctgcacgagaatgctgatttccaggacacgaccctcgaaagccaggatacaaaactgattcctgactcctgcagacggatcaagcaagcctttcagggcgcggtgcagaaagagctgcagcatattgtcgggtctcaacacatccgcgccgagaaggctatggtggatggaagctggctcgacctggccaaaagatccaaacttgaagctcagcccttcgcccacctgaccatcaacgcgacagatattcctagcggctctcataaggtttccctcagctcttggtaccacgaccgggggtgggccaagatctccaatatgacctttagcaacggaaagctgattgtgaatcaggatggcttctattacctttatgctaacatctgttttcgccatcacgagacatctggggacctggccaccgaatacctccagctgatggtctacgtgacgaaaacctccattaagatccccagctcccacacactgatgaaaggaggctctaccaagtattggagcggcaattccgagttccatttttacagcattaacgttgggggattctttaagctcagatctggcgaggaaatctccatcgaggtgagcaatccgtctctgcttgatcctgaccaagacgctacatatttcggggccttcaaagtccgggatattgactga

SEQ ID NO: 4760 - RNA, 954 nt, synthetic construct
  misc_feature 1..954: note = derived and/or modified sequence opt6 fromRANK_ligand__Homo_sapiens__CCDS9384.1
  source 1..954: mol_type = other RNA
atgagaagagcaagcagagactacacaaaatacttaagaggaagcgaagaaatgggaggaggtccaggagcaccacatgaaggaccattacatgcgcctccaccaccagcaccacaccaaccaccagcagcatcaagatcaatgtttgtagcactattaggactaggacttggacaagtagtctgttcagtagcactatttttctacttcagagcacaaatggacccaaacagaatatcagaagacggaacacactgcatataccgaatattaagactacacgaaaacgcagactttcaagatacaacattagaatcacaagacacaaaactaatacctgacagttgcagaagaataaaacaagcattccaaggagcagtacaaaaagaattacaacatatagtaggatcacaacacataagagcagaaaaagcaatggtagacggatcatggttagacctagccaaaagatcaaaactagaagcacaaccattcgcccacttaacaataaacgcaacagacatcccaagtggaagtcacaaagtatcactatcatcatggtaccacgacagaggttgggcaaaaataagtaatatgacattctcaaacggaaaattaatagtaaaccaagacggattttactacttatatgcaaacatatgcttcagacatcacgaaacctcaggcgacctagcaacagaatacctacaattaatggtatacgtaacaaaaacatcaataaaaataccaagttcacatacactaatgaaaggcggatcaaccaaatactggtctggtaattcagaattccacttttactctatcaacgtaggaggatttttcaaactacgatcaggggaagaaataagcatagaagtatcaaatccttcactattagaccccgaccaagatgctacatacttcggcgcattcaaagtaagagacatagactaa

SEQ ID NO: 4761 - protein, 245 aa, synthetic construct
  REGION 1..245: note = Stem_Cell_Factor__Homo_sapiens__P21583-2
MKKTQTWILTCIYLQLLLFNPLVKTEGICRNRVTNNVKDVTKLVANLPKDYMITLKYVPGMDVLPSHCWISEMVVQLSDSLTDLLDKFSNISEGLSNYSIIDKLVNIVDDLVECVKENSSKDLKKSFKSPEPRLFTPEEFFRIFNRSIDAFKDFVVASETSDCVVSSTLSPEKGKAKNPPGDSSLHWAAMALPALFSLIIGFAFGALYWKKRQPSLTRAVENIQINEEDNEISMLQEKEREFQEV

SEQ ID NO: 4762 - RNA, 738 nt, synthetic construct
  misc_feature 1..738: note = Stem_Cell_Factor__Homo_sapiens__CCDS31867.1
  source 1..738: mol_type = other RNA
atgaagaagacacaaacttggattctcacttgcatttatcttcagctgctcctatttaatcctctcgtcaaaactgaagggatctgcaggaatcgtgtgactaataatgtaaaagacgtcactaaattggtggcaaatcttccaaaagactacatgataaccctcaaatatgtccccgggatggatgttttgccaagtcattgttggataagcgagatggtagtacaattgtcagacagcttgactgatcttctggacaagttttcaaatatttctgaaggcttgagtaattattccatcatagacaaacttgtgaatatagtggatgaccttgtggagtgcgtgaaagaaaactcatctaaggatctaaaaaaatcattcaagagcccagaacccaggctctttactcctgaagaattctttagaatttttaatagatccattgatgccttcaaggactttgtagtggcatctgaaactagtgattgtgtggtttcttcaacattaagtcctgagaaagggaaggccaaaaatccccctggagactccagcctacactgggcagccatggcattgccagcattgttttctcttataattggctttgcttttggagccttatactggaagaagagacagccaagtcttacaagggcagttgaaaatatacaaattaatgaagaggataatgagataagtatgttgcaagagaaagagagagagtttcaagaagtgtaa

SEQ ID NO: 4763 - RNA, 738 nt, synthetic construct
  misc_feature 1..738: note = derived and/or modified sequence opt1 fromStem_Cell_Factor__Homo_sapiens__CCDS31867.1
  source 1..738: mol_type = other RNA
atgaagaagacccagacctggatcctgacgtgcatctacctccagctgctcctcttcaaccccctggtgaagaccgagggcatctgccgcaaccgggtcaccaacaacgtgaaggacgtgaccaagctggtcgccaacctcccgaaggactacatgatcacgctgaagtacgtgcccgggatggacgtgctgcccagccactgctggatctccgagatggtcgtgcagctcagcgactccctgaccgacctgctcgacaagttcagcaacatctccgagggcctgagcaactactccatcatcgacaagctggtgaacatcgtcgacgacctcgtggagtgcgtgaaggagaacagctccaaggacctgaagaagtccttcaagagccccgagccgcgcctgttcacccccgaggagttcttccggatcttcaaccgcagcatcgacgccttcaaggacttcgtcgtggcgtccgagaccagcgactgcgtggtctccagcacgctctcccccgagaaggggaaggccaagaacccgcccggcgacagctccctgcactgggccgccatggccctgcccgcgctgttcagcctgatcatcgggttcgccttcggcgccctgtactggaagaagcggcagcccagcctcacccgcgccgtggagaacatccagatcaacgaggaggacaacgagatctccatgctgcaggagaaggagcgggagttccaggaggtgtga

SEQ ID NO: 4764 - RNA, 738 nt, synthetic construct
  misc_feature 1..738: note = derived and/or modified sequence opt2 fromStem_Cell_Factor__Homo_sapiens__CCDS31867.1
  source 1..738: mol_type = other RNA
atgaagaagacccagacctggatcctcacctgcatctacctccagctcctcctcttcaaccccctcgtcaagaccgagggcatctgccgcaaccgcgtcaccaacaacgtcaaggacgtcaccaagctcgtcgccaacctccccaaggactacatgatcaccctcaagtacgtccccggcatggacgtcctcccctcccactgctggatctccgagatggtcgtccagctctccgactccctcaccgacctcctcgacaagttctccaacatctccgagggcctctccaactactccatcatcgacaagctcgtcaacatcgtcgacgacctcgtcgagtgcgtcaaggagaactcctccaaggacctcaagaagtccttcaagtcccccgagccccgcctcttcacccccgaggagttcttccgcatcttcaaccgctccatcgacgccttcaaggacttcgtcgtcgcctccgagacctccgactgcgtcgtctcctccaccctctcccccgagaagggcaaggccaagaacccccccggcgactcctccctccactgggccgccatggccctccccgccctcttctccctcatcatcggcttcgccttcggcgccctctactggaagaagcgccagccctccctcacccgcgccgtcgagaacatccagatcaacgaggaggacaacgagatctccatgctccaggagaaggagcgcgagttccaggaggtctga

SEQ ID NO: 4765 - RNA, 738 nt, synthetic construct
  misc_feature 1..738: note = derived and/or modified sequence opt3 fromStem_Cell_Factor__Homo_sapiens__CCDS31867.1
  source 1..738: mol_type = other RNA
atgaagaaaacccagacatggatcctgacttgcatttacctccaacttctgttgttcaaccccttagtgaagacggagggcatatgtagaaatagggtcaccaacaatgttaaagacgtgacaaagctggtagccaacctacctaaagattatatgatcactctcaagtacgtgccagggatggacgtcctgccgagccactgctggatttccgaaatggtggttcagctttctgattcactgaccgacttgctcgataagtttagtaatatcagcgagggactgtccaactattctattatcgacaaactggtgaatatagtcgatgacctcgtggaatgtgtaaaggagaactcgtcaaaagatttaaagaaaagtttcaagagccccgaacctcggctgtttacaccagaggagttctttcgcatcttcaatcgatccattgacgcttttaaggatttcgttgtggcatctgaaaccagcgactgcgtcgtgtcctcaactcttagtcccgagaaaggtaaggccaaaaaccctccaggcgatagctctttgcattgggcggctatggccctgcccgcactattttccctcatcattgggttcgcctttggagctctgtactggaagaaacgtcagccttcacttacaagagcagtggaaaatatccagataaacgaggaggacaatgaaattagcatgctgcaagagaaggaaagggagttccaggaagtctga

SEQ ID NO: 4766 - RNA, 738 nt, synthetic construct
  misc_feature 1..738: note = derived and/or modified sequence opt4 fromStem_Cell_Factor__Homo_sapiens__CCDS31867.1
  source 1..738: mol_type = other RNA
atgaagaagacccagacctggatcctgacctgcatctacctgcagctgctgctgttcaaccccctggtgaagaccgagggcatctgcagaaacagagtgaccaacaacgtgaaggacgtgaccaagctggtggccaacctgcccaaggactacatgatcaccctgaagtacgtgcccggcatggacgtgctgcccagccactgctggatcagcgagatggtggtgcagctgagcgacagcctgaccgacctgctggacaagttcagcaacatcagcgagggcctgagcaactacagcatcatcgacaagctggtgaacatcgtggacgacctggtggagtgcgtgaaggagaacagcagcaaggacctgaagaagagcttcaagagccccgagcccagactgttcacccccgaggagttcttcagaatcttcaacagaagcatcgacgccttcaaggacttcgtggtggccagcgagaccagcgactgcgtggtgagcagcaccctgagccccgagaagggcaaggccaagaacccccccggcgacagcagcctgcactgggccgccatggccctgcccgccctgttcagcctgatcatcggcttcgccttcggcgccctgtactggaagaagagacagcccagcctgaccagagccgtggagaacatccagatcaacgaggaggacaacgagatcagcatgctgcaggagaaggagagagagttccaggaggtgtga

SEQ ID NO: 4767 - RNA, 738 nt, synthetic construct
  misc_feature 1..738: note = derived and/or modified sequence opt5 fromStem_Cell_Factor__Homo_sapiens__CCDS31867.1
  source 1..738: mol_type = other RNA
atgaagaaaacccagacatggatcctgacgtgcatttacctccaactgcttctgttcaaccccctcgtgaagaccgagggcatctgtagaaatcgggtcacaaacaatgttaaagacgtgaccaagctggtggccaaccttcctaaagattatatgattacactgaagtacgtcccggggatggacgtgctccccagccactgctggatctccgaaatggttgtgcagctgtctgatagcctgaccgacctcctggataagttttccaatatttctgagggacttagcaactattccatcatcgacaaactggtcaatattgtggatgacctcgttgaatgtgtgaaggagaactctagcaaagatctgaagaaatccttcaagagccctgaaccccgcctttttacacctgaggagttctttagaatcttcaatcggtctattgacgcttttaaggatttcgtcgtggcctccgaaaccagcgactgcgtggtctcttccacgctgagccccgagaaaggcaaggcgaaaaaccctccgggggattcttccctccattgggctgccatggccctgcccgctctgtttagcctcatcattggattcgcctttggcgctctgtactggaagaaacgccagccttcccttaccagagccgttgaaaatatccagattaacgaggaggacaatgaaatctctatgctgcaagagaaggaacgggagttccaggaagtgtga

SEQ ID NO: 4768 - RNA, 738 nt, synthetic construct
  misc_feature 1..738: note = derived and/or modified sequence opt6 fromStem_Cell_Factor__Homo_sapiens__CCDS31867.1
  source 1..738: mol_type = other RNA
atgaaaaaaacacaaacctggatactaacatgcatatatctacaattattattattcaacccactagtaaaaacagaaggaatatgccgaaacagagtcacaaacaacgtaaaagacgtaacaaaactagtagcaaacttaccaaaagactacatgataacactaaaatacgtaccaggaatggacgtactaccatcacactgctggatatcagaaatggtagtacaactatcagattccttaacagacctattagacaaattctcaaacatatcagaaggattatcaaactattcaataatagacaaactagtaaacatagtagacgacctagtagaatgcgtaaaagaaaactcatcaaaagacttaaaaaaatcattcaaatcaccagaaccaagactatttacaccagaagaattcttcagaatattcaacagatcaatagacgcatttaaagacttcgtagtagcttcagaaacatcagactgcgtagtatcatcaacactatcaccagaaaaaggcaaagcaaaaaacccaccaggagactcatcattacactgggcagcaatggcactacccgcactattctcactaataataggattcgcctttggtgcattatactggaaaaaaagacaaccatcactcacaagagcagtagaaaacatacaaatcaacgaagaagacaacgaaatatcaatgctacaagaaaaagaacgagaattccaagaagtataa

SEQ ID NO: 4769 - protein, 273 aa, synthetic construct
  REGION 1..273: note = Stem_Cell_Factor__Homo_sapiens__P21583
MKKTQTWILTCIYLQLLLFNPLVKTEGICRNRVTNNVKDVTKLVANLPKDYMITLKYVPGMDVLPSHCWISEMVVQLSDSLTDLLDKFSNISEGLSNYSIIDKLVNIVDDLVECVKENSSKDLKKSFKSPEPRLFTPEEFFRIFNRSIDAFKDFVVASETSDCVVSSTLSPEKDSRVSVTKPFMLPPVAASSLRNDSSSSNRKAKNPPGDSSLHWAAMALPALFSLIIGFAFGALYWKKRQPSLTRAVENIQINEEDNEISMLQEKEREFQEV

SEQ ID NO: 4770 - RNA, 822 nt, synthetic construct
  misc_feature 1..822: note = Stem_Cell_Factor__Homo_sapiens__CCDS31868.1
  source 1..822: mol_type = other RNA
atgaagaagacacaaacttggattctcacttgcatttatcttcagctgctcctatttaatcctctcgtcaaaactgaagggatctgcaggaatcgtgtgactaataatgtaaaagacgtcactaaattggtggcaaatcttccaaaagactacatgataaccctcaaatatgtccccgggatggatgttttgccaagtcattgttggataagcgagatggtagtacaattgtcagacagcttgactgatcttctggacaagttttcaaatatttctgaaggcttgagtaattattccatcatagacaaacttgtgaatatagtggatgaccttgtggagtgcgtgaaagaaaactcatctaaggatctaaaaaaatcattcaagagcccagaacccaggctctttactcctgaagaattctttagaatttttaatagatccattgatgccttcaaggactttgtagtggcatctgaaactagtgattgtgtggtttcttcaacattaagtcctgagaaagattccagagtcagtgtcacaaaaccatttatgttaccccctgttgcagccagctcccttaggaatgacagcagtagcagtaataggaaggccaaaaatccccctggagactccagcctacactgggcagccatggcattgccagcattgttttctcttataattggctttgcttttggagccttatactggaagaagagacagccaagtcttacaagggcagttgaaaatatacaaattaatgaagaggataatgagataagtatgttgcaagagaaagagagagagtttcaagaagtgtaa

SEQ ID NO: 4771 - RNA, 822 nt, synthetic construct
  misc_feature 1..822: note = derived and/or modified sequence opt1 fromStem_Cell_Factor__Homo_sapiens__CCDS31868.1
  source 1..822: mol_type = other RNA
atgaagaagacccagacctggatcctgacgtgcatctacctccagctgctcctgttcaaccccctggtgaagaccgagggcatctgccgcaaccgggtcaccaacaacgtgaaggacgtgaccaagctggtcgccaacctcccgaaggactacatgatcacgctgaagtacgtgcccgggatggacgtgctgcccagccactgctggatctccgagatggtcgtgcagctcagcgactccctgaccgacctgctcgacaagttcagcaacatctccgagggcctgagcaactactccatcatcgacaagctggtgaacatcgtcgacgacctcgtggagtgcgtgaaggagaacagctccaaggacctgaagaagtccttcaagagccccgagccgcgcctgttcacccccgaggagttcttccggatcttcaaccgcagcatcgacgccttcaaggacttcgtcgtggcgtccgagaccagcgactgcgtggtctccagcacgctctcccccgagaaggacagccgggtgtccgtgaccaagcccttcatgctgccgcccgtcgccgccagcagcctgcgcaacgactccagctccagcaaccggaaggccaagaacccgcccggggactccagcctccactgggccgcgatggccctgcccgccctgttctccctcatcatcggcttcgccttcggggcgctgtactggaagaagcgccagcccagcctgacccgggccgtggagaacatccagatcaacgaggaggacaacgagatctccatgctccaggagaaggagcgcgagttccaggaggtgtga

SEQ ID NO: 4772 - RNA, 822 nt, synthetic construct
  misc_feature 1..822: note = derived and/or modified sequence opt2 fromStem_Cell_Factor__Homo_sapiens__CCDS31868.1
  source 1..822: mol_type = other RNA
atgaagaagacccagacctggatcctcacctgcatctacctccagctcctcctcttcaaccccctcgtcaagaccgagggcatctgccgcaaccgcgtcaccaacaacgtcaaggacgtcaccaagctcgtcgccaacctccccaaggactacatgatcaccctcaagtacgtccccggcatggacgtcctcccctcccactgctggatctccgagatggtcgtccagctctccgactccctcaccgacctcctcgacaagttctccaacatctccgagggcctctccaactactccatcatcgacaagctcgtcaacatcgtcgacgacctcgtcgagtgcgtcaaggagaactcctccaaggacctcaagaagtccttcaagtcccccgagccccgcctcttcacccccgaggagttcttccgcatcttcaaccgctccatcgacgccttcaaggacttcgtcgtcgcctccgagacctccgactgcgtcgtctcctccaccctctcccccgagaaggactcccgcgtctccgtcaccaagcccttcatgctcccccccgtcgccgcctcctccctccgcaacgactcctcctcctccaaccgcaaggccaagaacccccccggcgactcctccctccactgggccgccatggccctccccgccctcttctccctcatcatcggcttcgccttcggcgccctctactggaagaagcgccagccctccctcacccgcgccgtcgagaacatccagatcaacgaggaggacaacgagatctccatgctccaggagaaggagcgcgagttccaggaggtctga

SEQ ID NO: 4773 - RNA, 822 nt, synthetic construct
  misc_feature 1..822: note = derived and/or modified sequence opt3 fromStem_Cell_Factor__Homo_sapiens__CCDS31868.1
  source 1..822: mol_type = other RNA
atgaagaaaacccagacatggatcctgacttgcatttacctccaacttctgttgttcaaccccttagtgaagacggagggcatatgtagaaatagggtcaccaacaatgttaaagacgtgacaaagctggtagccaacctacctaaagattatatgatcactctcaagtacgtgccagggatggacgtcctgccgagccactgctggatttccgaaatggtggttcagctttctgattcactgaccgacttgctcgataagtttagtaatatcagcgagggactgtccaactattctattatcgacaaactggtgaatatagtcgatgacctcgtggaatgtgtaaaggagaactcgtcaaaagatttaaagaaaagtttcaagagccccgaacctcggctgtttacaccagaggagttctttcgcatcttcaatcgatccattgacgcttttaaggatttcgttgtggcatctgaaaccagcgactgcgtcgtgtcctcaactcttagtcccgagaaagatagccgtgtgtctgtcacaaagccttttatgttgccacccgttgccgcgtcctcactgagaaacgacagcagttcttccaataggaaagctaagaaccctccaggtgacagctcgctacattgggccgcaatggccctcccggctctgttctctcttatcattggctttgcattcggggccctgtactggaaaaagcggcagccctccttgacccgcgctgtggaaaatatccagataaacgaggaggataatgaaatttcaatgctccaagagaaagaaagagagtttcaggaagtatga

SEQ ID NO: 4774 - RNA, 822 nt, synthetic construct
  misc_feature 1..822: note = derived and/or modified sequence opt4 fromStem_Cell_Factor__Homo_sapiens__CCDS31868.1
  source 1..822: mol_type = other RNA
atgaagaagacccagacctggatcctgacctgcatctacctgcagctgctgctgttcaaccccctggtgaagaccgagggcatctgcagaaacagagtgaccaacaacgtgaaggacgtgaccaagctggtggccaacctgcccaaggactacatgatcaccctgaagtacgtgcccggcatggacgtgctgcccagccactgctggatcagcgagatggtggtgcagctgagcgacagcctgaccgacctgctggacaagttcagcaacatcagcgagggcctgagcaactacagcatcatcgacaagctggtgaacatcgtggacgacctggtggagtgcgtgaaggagaacagcagcaaggacctgaagaagagcttcaagagccccgagcccagactgttcacccccgaggagttcttcagaatcttcaacagaagcatcgacgccttcaaggacttcgtggtggccagcgagaccagcgactgcgtggtgagcagcaccctgagccccgagaaggacagcagagtgagcgtgaccaagcccttcatgctgccccccgtggccgccagcagcctgagaaacgacagcagcagcagcaacagaaaggccaagaacccccccggcgacagcagcctgcactgggccgccatggccctgcccgccctgttcagcctgatcatcggcttcgccttcggcgccctgtactggaagaagagacagcccagcctgaccagagccgtggagaacatccagatcaacgaggaggacaacgagatcagcatgctgcaggagaaggagagagagttccaggaggtgtga

SEQ ID NO: 4775 - RNA, 822 nt, synthetic construct
  misc_feature 1..822: note = derived and/or modified sequence opt5 fromStem_Cell_Factor__Homo_sapiens__CCDS31868.1
  source 1..822: mol_type = other RNA
atgaagaaaacccagacatggatcctgacgtgcatttacctccaactgcttctgttcaaccccctcgtgaagaccgagggcatctgtagaaatcgggtcacaaacaatgttaaagacgtgaccaagctggtggccaaccttcctaaagattatatgattacactgaagtacgtcccggggatggacgtgctccccagccactgctggatctccgaaatggttgtgcagctgtctgatagcctgaccgacctcctggataagttttccaatatttctgagggacttagcaactattccatcatcgacaaactggtcaatattgtggatgacctcgttgaatgtgtgaaggagaactctagcaaagatctgaagaaatccttcaagagccctgaaccccgcctttttacacctgaggagttctttagaatcttcaatcggtctattgacgcttttaaggatttcgtcgtggcctccgaaaccagcgactgcgtggtctcttccacgctgagccccgagaaagattctcgcgtttccgtgaccaagccttttatgctcccgcccgtggcggctagctccctgagaaacgactctagctccagcaatcggaaagccaagaaccctcccggcgactcttccctgcattgggccgctatggccctccctgctctgttcagccttatcattgggtttgccttcggagcgctgtactggaaaaagcgccagccctctctcacaagagccgtcgaaaatatccagattaacgaggaggataatgaaatcagcatgctgcaagagaaagaacgggagtttcaggaagtgtga

SEQ ID NO: 4776 - RNA, 822 nt, synthetic construct
  misc_feature 1..822: note = derived and/or modified sequence opt6 fromStem_Cell_Factor__Homo_sapiens__CCDS31868.1
  source 1..822: mol_type = other RNA
atgaaaaaaacacaaacatggatcctcacatgcatatacctacaactactactattcaacccattagtaaaaacagaaggaatctgcagaaacagagtaacaaacaacgtcaaagacgtaacaaaactagtagcaaatctacccaaagactacatgataacactaaaatacgtaccaggaatggacgtactcccatcccactgctggatatccgaaatggtagtacaactatcagattcactaacagacctattagacaaattctcaaacatatcagaaggattatcaaactactctataatagacaaattagtaaacatagtagacgacctagtcgaatgtgttaaagaaaactcctcaaaagacctaaaaaaaagcttcaaatcaccagaacctcgactattcacacccgaagaattcttcagaatattcaacagatcaatagacgcattcaaagacttcgttgtagcatcagaaacatctgactgtgtagtaagctcaacactatcaccagaaaaagactcacgagtatccgtcacaaaaccatttatgctaccaccagtagctgcatcatcattaagaaacgactcatcatcatccaacagaaaagcaaaaaacccaccaggagactcatcactacactgggcagcaatggcactaccagcattattttcattaataataggattcgcattcggagcactatactggaaaaaacgtcaaccatcattaacacgagcagtagaaaacatacaaataaacgaagaagataacgaaatatcaatgctacaagaaaaagaaagagaatttcaagaagtttaa

SEQ ID NO: 4777 - protein, 390 aa, synthetic construct
  REGION 1..390: note = TGFbeta1__Homo_sapiens__A0A024R0P8
MPPSGLRLLLLLLPLLWLLVLTPGRPAAGLSTCKTIDMELVKRKRIEAIRGQILSKLRLASPPSQGEVPPGPLPEAVLALYNSTRDRVAGESAEPEPEPEADYYAKEVTRVLMVETHNEIYDKFKQSTHSIYMFFNTSELREAVPEPVLLSRAELRLLRLKLKVEQHVELYQKYSNNSWRYLSNRLLAPSDSPEWLSFDVTGVVRQWLSRGGEIEGFRLSAHCSCDSRDNTLQVDINGFTTGRRGDLATIHGMNRPFLLLMATPLERAQHLQSSRHRRALDTNYCFSSTEKNCCVRQLYIDFRKDLGWKWIHEPKGYHANFCLGPCPYIWSLDTQYSKVLALYNQHNPGASAAPCCVPQALEPLPIVYYVGRKPKVEQLSNMIVRSCKCS

SEQ ID NO: 4778 - RNA, 1173 nt, synthetic construct
  misc_feature 1..1173: note = TGFbeta1__Homo_sapiens__EAW57033
  source 1..1173: mol_type = other RNA
atgccgccctccgggctgcggctgctgctgctgctgctaccgctgctgtggctactggtgctgacgcctggccggccggccgcgggactatccacctgcaagactatcgacatggagctggtgaagcggaagcgcatcgaggccatccgcggccagatcctgtccaagctgcggctcgccagccccccgagccagggggaggtgccgcccggcccgctgcccgaggccgtgctcgccctgtacaacagcacccgcgaccgggtggccggggagagtgcagaaccggagcccgagcctgaggccgactactacgccaaggaggtcacccgcgtgctaatggtggaaacccacaacgaaatctatgacaagttcaagcagagtacacacagcatatatatgttcttcaacacatcagagctccgagaagcggtacctgaacccgtgttgctctcccgggcagagctgcgtctgctgaggctcaagttaaaagtggagcagcacgtggagctgtaccagaaatacagcaacaattcctggcgatacctcagcaaccggctgctggcacccagcgactcgccagagtggttatcttttgatgtcaccggagttgtgcggcagtggttgagccgtggaggggaaattgagggctttcgccttagcgcccactgctcctgtgacagcagggataacacactgcaagtggacatcaacgggttcactaccggccgccgaggtgacctggccaccattcatggcatgaaccggcctttcctgcttctcatggccaccccgctggagagggcccagcatctgcaaagctcccggcaccgccgagccctggacaccaactattgcttcagctccacggagaagaactgctgcgtgcggcagctgtacattgacttccgcaaggacctcggctggaagtggatccacgagcccaagggctaccatgccaacttctgcctcgggccctgcccctacatttggagcctggacacgcagtacagcaaggtcctggccctgtacaaccagcataacccgggcgcctcggcggcgccgtgctgcgtgccgcaggcgctggagccgctgcccatcgtgtactacgtgggccgcaagcccaaggtggagcagctgtccaacatgatcgtgcgctcctgcaagtgcagctga

SEQ ID NO: 4779 - RNA, 1173 nt, synthetic construct
  misc_feature 1..1173: note = derived and/or modified sequence opt1 fromTGFbeta1__Homo_sapiens__EAW57033
  source 1..1173: mol_type = other RNA
atgcccccgagcggcctgcgcctcctgctgctcctgctgcccctcctgtggctgctcgtgctgacccccgggcggcccgccgccggcctgtccacgtgcaagaccatcgacatggagctcgtcaagcgcaagcggatcgaggcgatccgcgggcagatcctgagcaagctgcggctcgcctccccgcccagccagggcgaggtgccgcccgggcccctgcccgaggccgtgctggccctctacaactccacccgcgaccgggtcgccggcgagagcgcggagcccgagcccgagccggaggccgactactacgccaaggaggtgacccgcgtgctgatggtcgagacccacaacgagatctacgacaagttcaagcagtccacgcacagcatctacatgttcttcaacacctccgagctgcgggaggccgtgcccgagcccgtgctcctgagccgcgcggagctgcggctcctgcgcctgaagctcaaggtcgagcagcacgtggagctgtaccagaagtactccaacaacagctggcggtacctgtccaaccgcctcctggcccccagcgactccccggagtggctgagcttcgacgtgaccggcgtcgtgcggcagtggctctcccgcgggggcgagatcgaggggttccggctgagcgcccactgctcctgcgacagccgcgacaacaccctccaggtggacatcaacggcttcacgaccgggcggcgcggcgacctggccaccatccacggcatgaaccggcccttcctgctgctcatggccacgcccctggagcgcgcgcagcacctccagagctcccgccaccggcgcgccctggacaccaactactgcttcagctccaccgagaagaactgctgcgtccggcagctgtacatcgacttccgcaaggacctggggtggaagtggatccacgagcccaagggctaccacgccaacttctgcctcgggccgtgcccctacatctggagcctggacacccagtactccaaggtgctggccctctacaaccagcacaaccccggcgccagcgcggccccctgctgcgtgccgcaggccctggagcccctgcccatcgtctactacgtgggccggaagcccaaggtggagcagctgtccaacatgatcgtccgcagctgcaagtgctcctga

SEQ ID NO: 4780 - RNA, 1173 nt, synthetic construct
  misc_feature 1..1173: note = derived and/or modified sequence opt2 fromTGFbeta1__Homo_sapiens__EAW57033
  source 1..1173: mol_type = other RNA
atgcccccctccggcctccgcctcctcctcctcctcctccccctcctctggctcctcgtcctcacccccggccgccccgccgccggcctctccacctgcaagaccatcgacatggagctcgtcaagcgcaagcgcatcgaggccatccgcggccagatcctctccaagctccgcctcgcctcccccccctcccagggcgaggtcccccccggccccctccccgaggccgtcctcgccctctacaactccacccgcgaccgcgtcgccggcgagtccgccgagcccgagcccgagcccgaggccgactactacgccaaggaggtcacccgcgtcctcatggtcgagacccacaacgagatctacgacaagttcaagcagtccacccactccatctacatgttcttcaacacctccgagctccgcgaggccgtccccgagcccgtcctcctctcccgcgccgagctccgcctcctccgcctcaagctcaaggtcgagcagcacgtcgagctctaccagaagtactccaacaactcctggcgctacctctccaaccgcctcctcgccccctccgactcccccgagtggctctccttcgacgtcaccggcgtcgtccgccagtggctctcccgcggcggcgagatcgagggcttccgcctctccgcccactgctcctgcgactcccgcgacaacaccctccaggtcgacatcaacggcttcaccaccggccgccgcggcgacctcgccaccatccacggcatgaaccgccccttcctcctcctcatggccacccccctcgagcgcgcccagcacctccagtcctcccgccaccgccgcgccctcgacaccaactactgcttctcctccaccgagaagaactgctgcgtccgccagctctacatcgacttccgcaaggacctcggctggaagtggatccacgagcccaagggctaccacgccaacttctgcctcggcccctgcccctacatctggtccctcgacacccagtactccaaggtcctcgccctctacaaccagcacaaccccggcgcctccgccgccccctgctgcgtcccccaggccctcgagcccctccccatcgtctactacgtcggccgcaagcccaaggtcgagcagctctccaacatgatcgtccgctcctgcaagtgctcctga

SEQ ID NO: 4781 - RNA, 1173 nt, synthetic construct
  misc_feature 1..1173: note = derived and/or modified sequence opt3 fromTGFbeta1__Homo_sapiens__EAW57033
  source 1..1173: mol_type = other RNA
atgccccctagcggcctgagactccttctgttgttactgccactactctggctgcttgtgctgaccccggggaggcccgccgctggattgtccacatgcaagactatcgacatggagctcgtcaaacggaagcgcattgaagcaatacgaggtcagatcctgtctaaactgcgtctcgcctcacctccaagtcaaggcgaggttccccctgggccattacccgaagcggtgctggctctttacaacagcacgagagatagggtagccggagagtccgcagaacctgagccagagccggaagccgactattacgctaaggaggtgacccgggtcttgatggtggaaacacacaatgagatttatgataaattcaagcagtctactcattcgatctacatgtttttcaacacctcagagctgcgcgaagcagttcccgagcctgtgctactcagcagagccgaactgaggcttctgcggttgaagctcaaagtcgagcagcacgtggaactgtatcagaagtacagtaataactcctggcgctatttatctaatcgactgctcgctccaagcgactcccccgagtggctttcatttgatgtaacaggcgttgtgagacaatggctgagtaggggtggggagattgaaggattccggttgagcgcccattgttcttgcgactcccgtgataacaccctacaggtcgacatcaatggctttactacaggccgcagaggggatctggcgaccatacacggaatgaacaggcctttcctcctgcttatggcaacgccactggagcgggcccagcatttgcagtcaagccgacaccgcagagctctcgacactaattactgttttagttctaccgagaaaaactgctgtgtgaggcaactgtacatcgatttccggaaggacttaggttggaaatggattcacgaacccaagggctatcatgccaatttttgcctggggccgtgtccttacatctggtccctagatacacagtatagcaaggtgctcgcactgtacaaccagcacaatcccggagcttcggccgcgccatgctgtgtccctcaggcccttgaacccttgccaattgtttattacgtgggccgcaaacccaaggtagagcaactgtctaacatgatcgtgagatcctgcaaatgttcatga

SEQ ID NO: 4782 - RNA, 1173 nt, synthetic construct
  misc_feature 1..1173: note = derived and/or modified sequence opt4 fromTGFbeta1__Homo_sapiens__EAW57033
  source 1..1173: mol_type = other RNA
atgccccccagcggcctgagactgctgctgctgctgctgcccctgctgtggctgctggtgctgacccccggcagacccgccgccggcctgagcacctgcaagaccatcgacatggagctggtgaagagaaagagaatcgaggccatcagaggccagatcctgagcaagctgagactggccagcccccccagccagggcgaggtgccccccggccccctgcccgaggccgtgctggccctgtacaacagcaccagagacagagtggccggcgagagcgccgagcccgagcccgagcccgaggccgactactacgccaaggaggtgaccagagtgctgatggtggagacccacaacgagatctacgacaagttcaagcagagcacccacagcatctacatgttcttcaacaccagcgagctgagagaggccgtgcccgagcccgtgctgctgagcagagccgagctgagactgctgagactgaagctgaaggtggagcagcacgtggagctgtaccagaagtacagcaacaacagctggagatacctgagcaacagactgctggcccccagcgacagccccgagtggctgagcttcgacgtgaccggcgtggtgagacagtggctgagcagaggcggcgagatcgagggcttcagactgagcgcccactgcagctgcgacagcagagacaacaccctgcaggtggacatcaacggcttcaccaccggcagaagaggcgacctggccaccatccacggcatgaacagacccttcctgctgctgatggccacccccctggagagagcccagcacctgcagagcagcagacacagaagagccctggacaccaactactgcttcagcagcaccgagaagaactgctgcgtgagacagctgtacatcgacttcagaaaggacctgggctggaagtggatccacgagcccaagggctaccacgccaacttctgcctgggcccctgcccctacatctggagcctggacacccagtacagcaaggtgctggccctgtacaaccagcacaaccccggcgccagcgccgccccctgctgcgtgccccaggccctggagcccctgcccatcgtgtactacgtgggcagaaagcccaaggtggagcagctgagcaacatgatcgtgagaagctgcaagtgcagctga

SEQ ID NO: 4783 - RNA, 1173 nt, synthetic construct
  misc_feature 1..1173: note = derived and/or modified sequence opt5 fromTGFbeta1__Homo_sapiens__EAW57033
  source 1..1173: mol_type = other RNA
atgccccctagcggcctgagactcctgcttctgctcctgccgcttctgtggctcctggtgctgacccccgggcggcctgccgctggactctccacatgcaagacgatcgacatggagctggtcaaacgcaagagaattgaagccatccggggccagattctttctaaactgcgcctcgcgagccctccctcccaaggggaggttccccctggaccgctgcccgaagctgtgcttgccctgtacaactctaccagagatcgggtggccggcgagagcgctgaacctgagcccgagcctgaagccgactattacgctaaggaggtcacacgcgtgctcatggttgaaacccacaatgagatctatgataaattcaagcagtccacacattctatttacatgtttttcaacaccagcgagctgagagaagccgtgcccgagccggtcctgctctcccgggcggaactgcgccttctgagactcaagctgaaagtggagcagcacgttgaactttatcagaagtacagcaataactcttggcggtatctgtccaatcgcctcctggcccctagcgactctcccgagtggctgtcctttgatgtgacaggggtcgtgagacaatggctcagccggggaggcgagatcgaaggcttccgcctgtctgctcattgttcctgcgacagcagagataacacccttcaggtggacatcaatgggtttacgaccggacggagaggcgatctggccacaattcacgggatgaaccgccctttcctcctgcttatggctacacccctggagcgggcccagcatctccagtcctctagacaccgccgggcgctggacaccaattactgttttagctccaccgagaaaaactgctgtgtcagacaactgtacatcgatttccgcaaggacctcggatggaaatggattcacgaacccaagggctatcatgccaatttttgcctggggccttgtccgtacatctggagccttgatacgcagtattctaaggttctggctctctacaaccagcacaatcccggagcctccgctgccccttgctgtgtgccccaggccctggaacctctgcccattgtgtattacgtcggccggaaaccgaaggtggagcaacttagcaacatgatcgttagatcttgcaaatgtagctga

SEQ ID NO: 4784 - RNA, 1173 nt, synthetic construct
  misc_feature 1..1173: note = derived and/or modified sequence opt6 fromTGFbeta1__Homo_sapiens__EAW57033
  source 1..1173: mol_type = other RNA
atgccaccatctggactaagacttttattactactactaccactattatggcttttagttctaacaccaggaaggccagcagcaggactatcaacatgcaaaaccattgatatggaattagtaaaacgaaaaagaatcgaagccatacgaggacaaatactatcaaaacttagacttgcaagcccaccttcccaaggcgaagtacctcccggaccattacctgaagcagtattagctctatacaactccactcgagaccgagtagccggagaatccgccgaaccagaaccagaaccagaagcagattactacgcaaaagaagtaacaagagttttgatggtagaaacgcacaacgaaatatatgacaaattcaaacaatccacacattctatatacatgttcttcaatacatctgaactaagagaagcagtacccgaaccagtactattatcacgagccgaactaagacttctccgactaaaactaaaagtagaacaacacgttgaactttatcaaaaatactcaaataattcatggagatatttatcaaatagattattagcaccatcagactctccagaatggctatcatttgacgtaaccggagtagtaagacaatggttatctagaggaggagaaatagaaggtttccgattatcagcacactgctcatgcgattcccgagacaatacattacaagtcgacataaatggattcacaacaggcagaagaggagacctagcaacaatacacggaatgaatagaccattcctattattaatggcaacaccattagaaagagcacaacacctacaatcttcaagacacagaagagcactagacacaaactactgtttctcatctacagaaaaaaactgctgcgtcagacaattatatatagatttcagaaaagaccttggatggaaatggattcatgaaccaaaaggataccacgcaaacttctgtttaggaccatgtccatacatatggtcactagatacacaatactcaaaagttctagcactctacaatcaacacaacccaggagcttcagccgcaccatgctgtgtaccacaagctctagaaccacttccaatagtttactatgtaggaagaaaaccaaaagtagaacaattatcaaacatgatcgtacgatcatgtaaatgctcataa

SEQ ID NO: 4785 - protein, 390 aa, synthetic construct; identical to SEQ ID NO: 4777
  REGION 1..390: note = TGFbeta1__Homo_sapiens__P01137

SEQ ID NO: 4786 - RNA, 1173 nt, synthetic construct; identical to SEQ ID NO: 4778
  misc_feature 1..1173: note = TGFbeta1__Homo_sapiens__AAH00125
  source 1..1173: mol_type = other RNA

SEQ ID NO: 4787 - RNA, 1173 nt, synthetic construct; identical to SEQ ID NO: 4779
  misc_feature 1..1173: note = derived and/or modified sequence opt1 fromTGFbeta1__Homo_sapiens__AAH00125
  source 1..1173: mol_type = other RNA

SEQ ID NO: 4788 - RNA, 1173 nt, synthetic construct; identical to SEQ ID NO: 4780
  misc_feature 1..1173: note = derived and/or modified sequence opt2 fromTGFbeta1__Homo_sapiens__AAH00125
  source 1..1173: mol_type = other RNA

SEQ ID NO: 4789 - RNA, 1173 nt, synthetic construct; identical to SEQ ID NO: 4781
  misc_feature 1..1173: note = derived and/or modified sequence opt3 fromTGFbeta1__Homo_sapiens__AAH00125
  source 1..1173: mol_type = other RNA

SEQ ID NO: 4790 - RNA, 1173 nt, synthetic construct; identical to SEQ ID NO: 4782
  misc_feature 1..1173: note = derived and/or modified sequence opt4 fromTGFbeta1__Homo_sapiens__AAH00125
  source 1..1173: mol_type = other RNA

SEQ ID NO: 4791 - RNA, 1173 nt, synthetic construct; identical to SEQ ID NO: 4783
  misc_feature 1..1173: note = derived and/or modified sequence opt5 fromTGFbeta1__Homo_sapiens__AAH00125
  source 1..1173: mol_type = other RNA

SEQ ID NO: 4792 - RNA, 1173 nt, synthetic construct
  misc_feature 1..1173: note = derived and/or modified sequence opt6 fromTGFbeta1__Homo_sapiens__AAH00125
  source 1..1173: mol_type = other RNA
atgccaccatcaggattaagattactactattactactaccacttctatggttattagtactaacaccaggaagacccgccgcaggactatcaacatgcaaaacaatagacatggaattagtaaaaagaaaacgcatagaagcaataagaggacaaatattatcaaaattaagactagcatccccaccctcacaaggagaagtcccaccaggcccactaccagaagcagtactagcactatacaactcaacaagagacagagtagcaggagaatcagcagaacctgaaccggaaccagaagcagactactacgcaaaagaagtaacaagagtactaatggttgaaactcataacgaaatatatgacaaattcaaacaatcaacacattcaatttatatgttctttaacacatcagaactaagagaagcagttcctgaaccagtcctattatccagagcagaattaagactattaagattaaaattaaaagtagaacaacatgtagaactatatcaaaaatactcaaacaattcttggagatacctatccaatcgtctcctagccccatcagattccccagaatggctatcattcgatgtcacaggagtagtaaggcaatggttatccagaggaggagaaatagaaggatttagactatcagcacactgcagttgcgactctagagacaatactctacaagtagatataaatggctttacaacaggacgtaggggagatttagcaactatacacggtatgaatcgaccatttctattactaatggcaacaccacttgaacgtgctcaacacttacaatcttcacgccacagaagagcactcgacacaaattactgcttctcaagcacagaaaaaaactgctgcgttagacaattatacatagacttcagaaaagatttaggatggaaatggatccacgaaccaaaaggataccatgccaacttctgtttaggaccatgcccatacatatggtcactagacacacaatactcaaaagtcctagctctatataatcaacataacccaggtgcctccgcagccccttgttgtgtaccccaagcactagaaccattaccaatagtatattacgtaggaagaaaaccaaaagtagaacaactatcaaatatgatagtaagaagctgcaaatgttcataa

SEQ ID NO: 4793 - protein, 414 aa, synthetic construct
  REGION 1..414: note = TGFbeta2__Homo_sapiens__P61812
MHYCVLSAFLILHLVTVALSLSTCSTLDMDQFMRKRIEAIRGQILSKLKLTSPPEDYPEPEEVPPEVISIYNSTRDLLQEKASRRAAACERERSDEEYYAKEVYKIDMPPFFPSENAIPPTFYRPYFRIVRFDVSAMEKNASNLVKAEFRVFRLQNPKARVPEQRIELYQILKSKDLTSPTQRYIDSKVVKTRAEGEWLSFDVTDAVHEWLHHKDRNLGFKISLHCPCCTFVPSNNYIIPNKSEELEARFAGIDGTSTYTSGDQKTIKSTRKKNSGKTPHLLLMLLPSYRLESQQTNRRKKRALDAAYCFRNVQDNCCLRPLYIDFKRDLGWKWIHEPKGYNANFCAGACPYLWSSDTQHSRVLSLYNTINPEASASPCCVSQDLEPLTILYYIGKTPKIEQLSNMIVKSCKCS

SEQ ID NO: 4794 - RNA, 1245 nt, synthetic construct
  misc_feature 1..1245: note = TGFbeta2__Homo_sapiens__AAH96235
  source 1..1245: mol_type = other RNA
atgcactactgtgtgctgagcgcttttctgatcctgcatctggtcacggtcgcgctcagcctgtctacctgcagcacactcgatatggaccagttcatgcgcaagaggatcgaggcgatccgcgggcagatcctgagcaagctgaagctcaccagtcccccagaagactatcctgagcccgaggaagtccccccggaggtgatttccatctacaacagcaccagggacttgctccaggagaaggcgagccggagggcggccgcctgcgagcgcgagaggagcgacgaagagtactacgccaaggaggtttacaaaatagacatgccgcccttcttcccctccgaaaatgccatcccgcccactttctacagaccctacttcagaattgttcgatttgacgtctcagcaatggagaagaatgcttccaatttggtgaaagcagagttcagagtctttcgtttgcagaacccaaaagccagagtgcctgaacaacggattgagctatatcagattctcaagtccaaagatttaacatctccaacccagcgctacatcgacagcaaagttgtgaaaacaagagcagaaggcgaatggctctccttcgatgtaactgatgctgttcatgaatggcttcaccataaagacaggaacctgggatttaaaataagcttacactgtccctgctgcacttttgtaccatctaataattacatcatcccaaataaaagtgaagaactagaagcaagatttgcaggtattgatggcacctccacatataccagtggtgatcagaaaactataaagtccactaggaaaaaaaacagtgggaagaccccacatctcctgctaatgttattgccctcctacagacttgagtcacaacagaccaaccggcggaagaagcgtgctttggatgcggcctattgctttagaaatgtgcaggataattgctgcctacgtccactttacattgatttcaagagggatctagggtggaaatggatacacgaacccaaagggtacaatgccaacttctgtgctggagcatgcccgtatttatggagttcagacactcagcacagcagggtcctgagcttatataataccataaatccagaagcatctgcttctccttgctgcgtgtcccaagatttagaacctctaaccattctctactacattggcaaaacacccaagattgaacagctttctaatatgattgtaaagtcttgcaaatgcagctaa

SEQ ID NO: 4795 - RNA, 1245 nt, synthetic construct
  misc_feature 1..1245: note = derived and/or modified sequence opt1 fromTGFbeta2__Homo_sapiens__AAH96235
  source 1..1245: mol_type = other RNA
atgcactactgcgtgctgagcgccttcctcatcctgcacctggtcaccgtggccctctccctgagcacgtgctccaccctggacatggaccagttcatgcgcaagcggatcgaggcgatccgcggccagatcctcagcaagctgaagctgaccagcccgcccgaggactaccccgagcccgaggaggtgcccccggaggtcatctccatctacaactccacccgggacctcctgcaggagaaggccagccgccgggccgccgcctgcgagcgcgagcggtccgacgaggagtactacgcgaaggaggtgtacaagatcgacatgccgcccttcttccccagcgagaacgccatcccgcccaccttctaccgcccctacttccggatcgtgcgcttcgacgtctccgccatggagaagaacgccagcaacctggtgaaggcggagttccgggtgttccgcctccagaaccccaaggcccgggtccccgagcagcgcatcgagctgtaccagatcctgaagtccaaggacctcacgagccccacccagcggtacatcgactccaaggtggtgaagacccgcgccgagggggagtggctgagcttcgacgtcaccgacgccgtgcacgagtggctgcaccacaaggaccggaacctcggcttcaagatctccctgcactgcccctgctgcacgttcgtgcccagcaacaactacatcatcccgaacaagtccgaggagctggaggcccgcttcgcggggatcgacggcaccagcacctacaccagcggggaccagaagacgatcaagtccacccggaagaagaacagcggcaagacgccccacctcctgctgatgctcctgccctcctaccgcctggagagccagcagaccaaccggcgcaagaagcgcgccctcgacgccgcctactgcttccggaacgtccaggacaactgctgcctgcgccccctgtacatcgacttcaagcgggacctcggctggaagtggatccacgagccgaaggggtacaacgccaacttctgcgcgggcgcctgcccctacctgtggtccagcgacacccagcactcccgcgtgctgagcctctacaacaccatcaaccccgaggcctccgccagcccctgctgcgtgtcccaggacctggagccgctgaccatcctctactacatcgggaagacccccaagatcgagcagctgagcaacatgatcgtcaagtcctgcaagtgcagctga

SEQ ID NO: 4796 - RNA, 1245 nt, synthetic construct
  misc_feature 1..1245: note = derived and/or modified sequence opt2 fromTGFbeta2__Homo_sapiens__AAH96235
  source 1..1245: mol_type = other RNA
atgcactactgcgtcctctccgccttcctcatcctccacctcgtcaccgtcgccctctccctctccacctgctccaccctcgacatggaccagttcatgcgcaagcgcatcgaggccatccgcggccagatcctctccaagctcaagctcacctccccccccgaggactaccccgagcccgaggaggtcccccccgaggtcatctccatctacaactccacccgcgacctcctccaggagaaggcctcccgccgcgccgccgcctgcgagcgcgagcgctccgacgaggagtactacgccaaggaggtctacaagatcgacatgccccccttcttcccctccgagaacgccatcccccccaccttctaccgcccctacttccgcatcgtccgcttcgacgtctccgccatggagaagaacgcctccaacctcgtcaaggccgagttccgcgtcttccgcctccagaaccccaaggcccgcgtccccgagcagcgcatcgagctctaccagatcctcaagtccaaggacctcacctcccccacccagcgctacatcgactccaaggtcgtcaagacccgcgccgagggcgagtggctctccttcgacgtcaccgacgccgtccacgagtggctccaccacaaggaccgcaacctcggcttcaagatctccctccactgcccctgctgcaccttcgtcccctccaacaactacatcatccccaacaagtccgaggagctcgaggcccgcttcgccggcatcgacggcacctccacctacacctccggcgaccagaagaccatcaagtccacccgcaagaagaactccggcaagaccccccacctcctcctcatgctcctcccctcctaccgcctcgagtcccagcagaccaaccgccgcaagaagcgcgccctcgacgccgcctactgcttccgcaacgtccaggacaactgctgcctccgccccctctacatcgacttcaagcgcgacctcggctggaagtggatccacgagcccaagggctacaacgccaacttctgcgccggcgcctgcccctacctctggtcctccgacacccagcactcccgcgtcctctccctctacaacaccatcaaccccgaggcctccgcctccccctgctgcgtctcccaggacctcgagcccctcaccatcctctactacatcggcaagacccccaagatcgagcagctctccaacatgatcgtcaagtcctgcaagtgctcctga

SEQ ID NO: 4797 - RNA, 1245 nt, synthetic construct
  misc_feature 1..1245: note = derived and/or modified sequence opt3 fromTGFbeta2__Homo_sapiens__AAH96235
  source 1..1245: mol_type = other RNA
atgcactactgcgtgctgagcgccttcctcatccttcatctggtcaccgttgctttgtccttatctacatgttcaactctggacatggatcagtttatgagaaagaggattgaggcaatacggggccaaatcctaagtaaactcaagctgacgagccctcccgaagactatccagagccggaagaggtgccccctgaagtaatttccatctacaactctacccgcgatcttctgcaggagaaagcctcgcgacgtgcggctgcctgcgagagagaaaggtcagacgaggaatattacgcaaaggaggtgtataaaattgatatgccacccttctttcctagcgagaatgccatcccacccacattctaccggccttattttcgcatagtcagattcgacgtgagtgctatggaaaagaacgcatccaatttggttaaggccgagtttagggtgttccggctccagaacccaaaagctcgcgtcccggaacagcgaatcgagctgtaccaaattctgaagtctaaagatctcactagccccacccagagatacatcgactccaaggtggtaaaaacaagggccgaaggggagtggttatcatttgatgttaccgacgcggtgcacgagtggctgcatcacaaggatcggaatcttggattcaagattagtttgcattgtccttgctgtacttttgtcccaagcaacaattatatcatacccaacaaatctgaggaactggaagcacgtttcgccggtattgacggcacatccacctacacgtcaggggatcagaagactatcaaaagcacccgcaagaaaaatagtggaaagacacctcacctactcctgatgcttctgccatcttatagattggagtcccagcaaactaacaggcggaaaaagcgagctctcgacgccgcatactgctttcgcaatgtgcaggacaactgttgcctgagacccttatatattgatttcaagagggacctgggctggaaatggatccacgaaccgaagggttacaatgctaacttctgtgccggggcgtgcccttatctctggagctcggatacccagcattctcgggtgctttccctgtacaatacaatcaaccccgaggcctcagcaagtccatgttgcgtcagccaggacttggagcctctaaccattctgtactatataggaaaaacgcccaagatcgaacaactctccaacatgattgttaaatcttgcaagtgtagctga

SEQ ID NO: 4798 - RNA, 1245 nt, synthetic construct
  misc_feature 1..1245: note = derived and/or modified sequence opt4 fromTGFbeta2__Homo_sapiens__AAH96235
  source 1..1245: mol_type = other RNA
atgcactactgcgtgctgagcgccttcctgatcctgcacctggtgaccgtggccctgagcctgagcacctgcagcaccctggacatggaccagttcatgagaaagagaatcgaggccatcagaggccagatcctgagcaagctgaagctgaccagcccccccgaggactaccccgagcccgaggaggtgccccccgaggtgatcagcatctacaacagcaccagagacctgctgcaggagaaggccagcagaagagccgccgcctgcgagagagagagaagcgacgaggagtactacgccaaggaggtgtacaagatcgacatgccccccttcttccccagcgagaacgccatcccccccaccttctacagaccctacttcagaatcgtgagattcgacgtgagcgccatggagaagaacgccagcaacctggtgaaggccgagttcagagtgttcagactgcagaaccccaaggccagagtgcccgagcagagaatcgagctgtaccagatcctgaagagcaaggacctgaccagccccacccagagatacatcgacagcaaggtggtgaagaccagagccgagggcgagtggctgagcttcgacgtgaccgacgccgtgcacgagtggctgcaccacaaggacagaaacctgggcttcaagatcagcctgcactgcccctgctgcaccttcgtgcccagcaacaactacatcatccccaacaagagcgaggagctggaggccagattcgccggcatcgacggcaccagcacctacaccagcggcgaccagaagaccatcaagagcaccagaaagaagaacagcggcaagaccccccacctgctgctgatgctgctgcccagctacagactggagagccagcagaccaacagaagaaagaagagagccctggacgccgcctactgcttcagaaacgtgcaggacaactgctgcctgagacccctgtacatcgacttcaagagagacctgggctggaagtggatccacgagcccaagggctacaacgccaacttctgcgccggcgcctgcccctacctgtggagcagcgacacccagcacagcagagtgctgagcctgtacaacaccatcaaccccgaggccagcgccagcccctgctgcgtgagccaggacctggagcccctgaccatcctgtactacatcggcaagacccccaagatcgagcagctgagcaacatgatcgtgaagagctgcaagtgcagctga

SEQ ID NO: 4799 - RNA, 1245 nt, synthetic construct
  misc_feature 1..1245: note = derived and/or modified sequence opt5 fromTGFbeta2__Homo_sapiens__AAH96235
  source 1..1245: mol_type = other RNA
atgcactactgcgtgctgagcgccttcctcatcctgcatcttgtcaccgttgctctgtccctctctacatgtagcacgctggacatggatcagtttatgagaaagcggattgaggccatccgcggccaaattctttccaaactgaagctcacctctccccctgaagactatccggagcccgaagaggtgcctcccgaagtgatcagcatttacaactccacaagagatctgctgcaggagaaagcgtctcggcgcgctgccgcctgcgagagagaacggagcgacgaggaatattacgctaaggaggtctataaaatcgatatgcctcccttctttccttccgagaatgccatcccgcccaccttctaccgcccttattttagaattgtgcggttcgacgttagcgctatggaaaagaacgcctctaatctcgtgaaggcggagtttcgcgtcttcagactgcagaaccccaaagcccgggtgcctgaacagcgcatcgagctttaccaaattctgaagtccaaagatctcacaagccccacccagagatacatcgactctaaggttgtgaaaacacgggctgaaggggagtggctgtcctttgatgtcaccgacgccgtgcacgagtggcttcatcacaaggatcgcaatctgggattcaagattagcctccattgtccgtgctgtacgtttgtgccttctaacaattatatcattcccaacaaatccgaggaactggaagctagattcgccggcatcgacgggaccagcacatacacctccggagatcagaagacaatcaaatctacccggaagaaaaatagcggcaagacgcctcatctgctcctgatgcttctgccctcctatagactcgagagccagcaaacaaaccgccggaaaaagagagcgctggacgccgcttactgctttcgcaatgtccaggacaactgttgccttcggcccctgtatattgatttcaagagagacctcgggtggaaatggatccacgaacctaagggatacaatgccaacttctgtgctggcgcctgcccgtatctgtggtcttccgatacccagcacagccgcgttctgtctctctacaatacaattaaccccgaggccagcgcttccccttgttgcgtgtctcaggacctggagccccttaccatcctgtactatattggcaaaacccctaagatcgaacaactcagcaacatgatcgtgaaatcctgcaagtgtagctga

SEQ ID NO: 4800 - RNA, 1245 nt, synthetic construct
  misc_feature 1..1245: note = derived and/or modified sequence opt6 fromTGFbeta2__Homo_sapiens__AAH96235
  source 1..1245: mol_type = other RNA
atgcactactgcgtactatcagccttcttaatactacacctagtaacagtagcattatccttatcaacatgctcaacattagacatggatcaattcatgcgtaaaagaatcgaagctattagaggacaaatactttcaaaactcaaactcacctctccaccagaagattacccagaaccagaagaagtacccccagaagtaatttcaatatacaattcaacaagagatctactccaagaaaaagcatcacgaagagcagcagcctgcgaaagagaacgttcagatgaagaatactatgcaaaagaagtatacaaaatagacatgccaccattctttccatctgaaaacgcaataccaccaaccttctacagaccatatttccgcatagtcagattcgacgtctcagcaatggaaaaaaatgcatccaacctagtaaaagcagaattccgagtattcagactccaaaaccccaaagcccgagtcccagaacaacgcatagaactctatcaaatactaaaatccaaagacttaacatccccaacccaaagatatattgactcaaaagtagtaaaaacaagagccgaaggagaatggttatcatttgacgtaaccgacgccgtacatgaatggctacaccacaaagacagaaacttaggattcaaaatatccctacactgcccatgttgcacattcgtacctagcaacaattacataatcccaaacaaatcagaagaactagaagcaagattcgccggtatagacggaacatctacttacacatccggagaccaaaaaacaataaaatcaacaagaaaaaaaaactcaggcaaaacaccacacttactcctcatgctattaccatcatatagattagaatcccaacaaacaaatagaagaaaaaaacgcgccctagatgcagcatattgttttcgaaacgtacaagataattgctgtctaagaccactctacattgactttaaacgagacctaggatggaaatggatccacgaaccaaaaggatataacgcaaacttctgcgcaggtgcatgtccctacctatggtcctcagacacacaacactcaagagtactctcactatataacacaataaatcccgaagcatcggcaagcccatgctgcgtatcacaagatctagaaccactcacaatactgtattacataggaaaaacacccaaaatagaacaactctcaaacatgatagtaaaatcctgtaaatgctcataa

SEQ ID NO: 4801 - protein, 412 aa, synthetic construct
  REGION 1..412: note = TGFbeta3__Homo_sapiens__A5YM40
MKMHLQRALVVLALLNFATVSLSLSTCTTLDFGHIKKKRVEAIRGQILSKLRLTSPPEPTVMTHVPYQVLALYNSTRELLEEMHGEREEGCTQENTESEYYAKEIHKFDMIQGLAEHNELAVCPKGITSKVFRFNVSSVEKNRTNLFRAEFRVLRVPNPSSKRNEQRIELFQILRPDEHIAKQRYIGGKNLPTRGTAEWLSFDVTDTVREWLLRRESNLGLEISIHCPCHTFQPNGDILENIHEVMEIKFKGVDNEDDHGRGDLGRLKKQKDHHNPHLILMMIPPHRLDNPGQGGQRKKRALDTNYCFRNLEENCCVRPLYIDFRQDLGWKWVHEPKGYYANFCSGPCPYLRSADTTHSTVLGLYNTLNPEASASPCCVPQDLEPLTILYYVGRTPKVEQLSNMVVKSCKCS

SEQ ID NO: 4802 - RNA, 1239 nt, synthetic construct
  misc_feature 1..1239: note = TGFbeta3__Homo_sapiens__ABQ59024
  source 1..1239: mol_type = other RNA
atgaagatgcacttgcaaagggctctggtggtcctggccctgctgaactttgccacggtcagcctctctctgtccacttgcaccaccttggacttcggccacatcaagaagaagagggtggaagccattaggggacagatcttgagcaagctcaggctcaccagcccccctgagccaacggtgatgacccacgtcccctatcaggtcctggccctttacaacagcacccgggagctgctggaggagatgcatggggagagggaggaaggctgcacccaggaaaacaccgagtcggaatactatgccaaagaaatccataaattcgacatgatccaggggctggcggagcacaacgaactggctgtctgccctaaaggaattacctccaaggttttccgcttcaatgtgtcctcagtggagaaaaatagaaccaacctattccgagcagaattccgggtcttgcgggtgcccaaccccagctctaagcggaatgagcagaggatcgagctcttccagatccttcggccagatgagcacattgccaaacagcgctatatcggtggcaagaatctgcccacacggggcactgccgagtggctgtcctttgatgtcactgacactgtgcgtgagtggctgttgagaagagagtccaacttaggtctagaaatcagcattcactgtccatgtcacacctttcagcccaatggagatatcctggaaaacattcacgaggtgatggaaatcaaattcaaaggcgtggacaatgaggatgaccatggccgtggagatctggggcgcctcaagaagcagaaggatcaccacaaccctcatctaatcctcatgatgattcccccacaccggctcgacaacccgggccaggggggtcagaggaagaagcgggctttggacaccaattactgcttccgcaacttggaggagaactgctgtgtgcgccccctctacattgacttccgacaggatctgggctggaagtgggtccatgaacctaagggctactatgccaacttctgctcaggcccttgcccatacctccgcagtgcagacacaacccacagcacggtgctgggactgtacaacactctgaaccctgaagcatctgcctcgccttgctgcgtgccccaggacctggagcccctgaccatcctgtactatgttgggaggacccccaaagtggagcagctctccaacatggtggtgaagtcttgtaaatgtagctga

SEQ ID NO: 4803 - RNA, 1239 nt, synthetic construct
  misc_feature 1..1239: note = derived and/or modified sequence opt1 fromTGFbeta3__Homo_sapiens__ABQ59024
  source 1..1239: mol_type = other RNA
atgaagatgcacctccagcgcgccctcgtggtgctggccctgctcaacttcgcgaccgtgagcctgtccctgagcacgtgcaccaccctcgacttcggccacatcaagaagaagcgggtggaggccatccgcgggcagatcctgtccaagctgcggctcaccagcccgcccgagcccaccgtcatgacgcacgtgccctaccaggtgctggccctgtacaactccacccgcgagctcctggaggagatgcacggcgagcgggaggaggggtgcacccaggagaacaccgagagcgagtactacgccaaggagatccacaagttcgacatgatccagggcctggccgagcacaacgagctcgcggtctgccccaaggggatcacgtccaaggtgttccgcttcaacgtgagctccgtcgagaagaaccggaccaacctgttccgcgccgagttccgggtgctgcgcgtgccgaaccccagctccaagcggaacgagcagcgcatcgagctgttccagatcctgcggcccgacgagcacatcgccaagcagcgctacatcggcggcaagaacctgcccacccgggggaccgccgagtggctcagcttcgacgtcacggacaccgtgcgcgagtggctgctgcggcgcgagtccaacctcggcctggagatcagcatccactgcccgtgccacaccttccagcccaacggggacatcctggagaacatccacgaggtgatggagatcaagttcaagggcgtcgacaacgaggacgaccacgggcggggcgacctcggccgcctgaagaagcagaaggaccaccacaacccccacctgatcctcatgatgatcccgccccaccggctggacaaccccgggcagggcgggcagcgcaagaagcgcgcgctggacaccaactactgcttccggaacctcgaggagaactgctgcgtgcgccccctgtacatcgacttccggcaggacctgggctggaagtgggtgcacgagcccaagggctactacgccaacttctgctccgggccgtgcccctacctccgcagcgccgacacgacccactccaccgtcctgggcctgtacaacaccctcaaccccgaggccagcgcctccccctgctgcgtgccgcaggacctggagcccctgacgatcctctactacgtggggcggacccccaaggtcgagcagctgagcaacatggtggtcaagagctgcaagtgctcctga

SEQ ID NO: 4804 - RNA, 1239 nt, synthetic construct
  misc_feature 1..1239: note = derived and/or modified sequence opt2 fromTGFbeta3__Homo_sapiens__ABQ59024
  source 1..1239: mol_type = other RNA
atgaagatgcacctccagcgcgccctcgtcgtcctcgccctcctcaacttcgccaccgtctccctctccctctccacctgcaccaccctcgacttcggccacatcaagaagaagcgcgtcgaggccatccgcggccagatcctctccaagctccgcctcacctccccccccgagcccaccgtcatgacccacgtcccctaccaggtcctcgccctctacaactccacccgcgagctcctcgaggagatgcacggcgagcgcgaggagggctgcacccaggagaacaccgagtccgagtactacgccaaggagatccacaagttcgacatgatccagggcctcgccgagcacaacgagctcgccgtctgccccaagggcatcacctccaaggtcttccgcttcaacgtctcctccgtcgagaagaaccgcaccaacctcttccgcgccgagttccgcgtcctccgcgtccccaacccctcctccaagcgcaacgagcagcgcatcgagctcttccagatcctccgccccgacgagcacatcgccaagcagcgctacatcggcggcaagaacctccccacccgcggcaccgccgagtggctctccttcgacgtcaccgacaccgtccgcgagtggctcctccgccgcgagtccaacctcggcctcgagatctccatccactgcccctgccacaccttccagcccaacggcgacatcctcgagaacatccacgaggtcatggagatcaagttcaagggcgtcgacaacgaggacgaccacggccgcggcgacctcggccgcctcaagaagcagaaggaccaccacaacccccacctcatcctcatgatgatccccccccaccgcctcgacaaccccggccagggcggccagcgcaagaagcgcgccctcgacaccaactactgcttccgcaacctcgaggagaactgctgcgtccgccccctctacatcgacttccgccaggacctcggctggaagtgggtccacgagcccaagggctactacgccaacttctgctccggcccctgcccctacctccgctccgccgacaccacccactccaccgtcctcggcctctacaacaccctcaaccccgaggcctccgcctccccctgctgcgtcccccaggacctcgagcccctcaccatcctctactacgtcggccgcacccccaaggtcgagcagctctccaacatggtcgtcaagtcctgcaagtgctcctga

SEQ ID NO: 4805 - RNA, 1239 nt, synthetic construct
  misc_feature 1..1239: note = derived and/or modified sequence opt3 fromTGFbeta3__Homo_sapiens__ABQ59024
  source 1..1239: mol_type = other RNA
atgaagatgcatctgcagagagccctcgtggtccttgctctgttgaacttcgcaaccgttagcttatccctgtctacatgcactacgctagactttggccacatcaaaaagaaaagggtggaggccattcgggggcaaatactctcaaagctgcgccttaccagtccccctgaaccaacagtaatgactcacgtgccgtaccaggtcctggcgttgtataatagcacccgagagctcctggaagagatgcatggagaacgtgaggagggttgtacacaggaaaacaccgagtccgaatactatgctaaagagatccacaagttcgatatgattcagggcctggccgagcataatgaactcgcagtgtgccccaaggggatcacttctaaagtttttagattcaacgtgtcgtcagtcgagaagaataggacaaacttatttcgggccgagttccgcgtgctgagagtacctaatccaagcagtaaaaggaacgaacaacggattgaactttttcagatcttgcgccccgacgagcacatagctaagcagcgatacatcggaggcaaaaatctgcctaccagaggtacggcagagtggctatccttcgatgttactgacaccgtgagggaatggctcctgcggcgtgagtctaaccttgggctggaaattagcatccactgtccatgccatacatttcagcccaatggagatattttggagaacatccacgaagtcatggagataaagttcaagggcgtggacaatgaggatgaccatggccgcggggatctcggaagactgaaaaagcaaaaagaccaccacaaccctcatttaattctgatgatgatcccaccgcacaggctcgataatcccggtcagggcgggcagcggaagaaacgagcccttgacactaactattgttttcgcaacctggaagagaattgctgtgtgagacctttgtacattgatttcaggcaggacctaggatggaagtgggtccatgaaccaaaaggctattacgctaacttttgctccggtccctgtccttacctgcggtcagccgacaccacacacagtaccgttctcgggctgtataatacgcttaacccagaggcgagcgcatctccctgctgtgtgccgcaagatctggaacctttgactatcctctactatgtaggacgcacacccaaggtggagcagctgtccaatatggtcgtgaagtcatgcaaatgcagctga

SEQ ID NO: 4806 - RNA, 1239 nt, synthetic construct
  misc_feature 1..1239: note = derived and/or modified sequence opt4 fromTGFbeta3__Homo_sapiens__ABQ59024
  source 1..1239: mol_type = other RNA
atgaagatgcacctgcagagagccctggtggtgctggccctgctgaacttcgccaccgtgagcctgagcctgagcacctgcaccaccctggacttcggccacatcaagaagaagagagtggaggccatcagaggccagatcctgagcaagctgagactgaccagcccccccgagcccaccgtgatgacccacgtgccctaccaggtgctggccctgtacaacagcaccagagagctgctggaggagatgcacggcgagagagaggagggctgcacccaggagaacaccgagagcgagtactacgccaaggagatccacaagttcgacatgatccagggcctggccgagcacaacgagctggccgtgtgccccaagggcatcaccagcaaggtgttcagattcaacgtgagcagcgtggagaagaacagaaccaacctgttcagagccgagttcagagtgctgagagtgcccaaccccagcagcaagagaaacgagcagagaatcgagctgttccagatcctgagacccgacgagcacatcgccaagcagagatacatcggcggcaagaacctgcccaccagaggcaccgccgagtggctgagcttcgacgtgaccgacaccgtgagagagtggctgctgagaagagagagcaacctgggcctggagatcagcatccactgcccctgccacaccttccagcccaacggcgacatcctggagaacatccacgaggtgatggagatcaagttcaagggcgtggacaacgaggacgaccacggcagaggcgacctgggcagactgaagaagcagaaggaccaccacaacccccacctgatcctgatgatgatccccccccacagactggacaaccccggccagggcggccagagaaagaagagagccctggacaccaactactgcttcagaaacctggaggagaactgctgcgtgagacccctgtacatcgacttcagacaggacctgggctggaagtgggtgcacgagcccaagggctactacgccaacttctgcagcggcccctgcccctacctgagaagcgccgacaccacccacagcaccgtgctgggcctgtacaacaccctgaaccccgaggccagcgccagcccctgctgcgtgccccaggacctggagcccctgaccatcctgtactacgtgggcagaacccccaaggtggagcagctgagcaacatggtggtgaagagctgcaagtgcagctga

SEQ ID NO: 4807 - RNA, 1239 nt, synthetic construct
  misc_feature 1..1239: note = derived and/or modified sequence opt5 fromTGFbeta3__Homo_sapiens__ABQ59024
  source 1..1239: mol_type = other RNA
atgaagatgcaccttcagagagccctcgtggtcctggctctgctgaacttcgccaccgttagcctctccctgtctacatgcacgacccttgactttggccatatcaaaaagaaacgggtggaggcgattcgcgggcaaatcctgagcaagctcagactgacatctccccctgaaccgaccgtgatgacacacgtcccctaccaggtgctggctctctataattccacccgggagctgcttgaagagatgcatggagaacgcgaggagggctgtacacaggaaaacaccgagagcgaatactatgccaaagagattcacaagttcgatatgatccaggggctggccgagcataatgaactcgctgtttgccctaagggaattacgtccaaagtgtttagattcaacgtctctagcgtggagaagaatcggaccaacctgtttcgcgccgagttcagagttcttcgggtgcccaatccttccagcaaacgcaacgaacaaagaatcgaactgtttcagatcctccggcccgacgagcacattgctaagcagcgctacatcggcgggaaaaatctgcctacaagaggaaccgccgagtggctgtctttcgatgtcacagacaccgtgcgggaatggctcctgcgcagagagtccaaccttggcctggaaattagcatccactgtccgtgccatacgtttcagcccaatggcgatattctcgagaacatccacgaagtgatggagattaagttcaagggggtcgacaatgaggatgaccatggacggggcgatctggggagacttaaaaagcaaaaagaccaccacaaccctcatctgatcctcatgatgattccccctcaccgcctggataatcccggacagggcgggcagcggaagaaaagagcgctggacacaaactattgttttcgcaacctcgaagagaattgctgtgttcggccgctgtacatcgatttcagacaggaccttggatggaagtgggtgcatgaacctaaaggctattacgccaacttttgctctggcccctgtccttacctgcgctccgctgacaccacacacagcaccgtgctcgggctgtataatacccttaaccccgaggcctctgcttccccctgctgtgtccctcaagatctggaaccgctcacaatcctgtactatgtgggacggacgcccaaggttgagcagctgagcaatatggtggtcaagtcctgcaaatgctcttga

SEQ ID NO: 4808 - RNA, 1239 nt, synthetic construct
  misc_feature 1..1239: note = derived and/or modified sequence opt6 fromTGFbeta3__Homo_sapiens__ABQ59024
  source 1..1239: mol_type = other RNA
atgaaaatgcacctacaacgagcactagtagtactagcactactcaatttcgccacagtatcactatcactatcaacatgcacaaccctagactttggacacataaaaaaaaaaagggtagaagcaatcagaggacaaattttatcaaaactcagattaacatcaccaccagaaccaacagttatgacacacgtaccataccaagtcctcgcattatataacagcacacgagaactattagaagaaatgcacggtgaaagagaagaaggatgcacacaagaaaacactgaatcagaatactacgcaaaagaaatccataaattcgacatgatccaaggactagcagaacataacgaattagccgtatgcccaaaaggcataacctcaaaagtattcagattcaacgtctcaagcgtagaaaaaaaccgtacaaacttattccgagcggaattcagagttctaagagtaccaaatccttcatcaaaaagaaacgaacagagaatagaattatttcaaatactccgaccagacgaacacatagcaaaacaaagatacataggaggaaaaaacctaccaacaagaggaaccgcagaatggctaagctttgacgtaacagacacagtaagagaatggctattaaggagagaatcaaacctaggactcgaaataagtatacactgcccatgccacacattccaaccaaacggagacatactagaaaacatacacgaagttatggaaataaaattcaaaggagtcgacaatgaagatgatcacggaaggggagacctaggaagattaaaaaaacaaaaagaccaccataaccctcatctaatattaatgatgataccacctcacagattagataacccaggacaaggaggccaacgcaaaaaaagagcactcgatacaaactattgcttcagaaacctagaagaaaactgctgcgtacgaccattatatatagactttagacaagacctaggatggaaatgggtacacgaaccaaaaggatactatgcaaacttctgttctggaccctgcccctacctcagatcagcagacacaacacattcaacagtactaggcttatacaacacattaaatcccgaagcatctgcatcaccatgctgcgtcccacaagacttagaaccattaaccatactatactacgtaggacgaacaccaaaagtagaacaattatcaaacatggtcgtaaaatcatgcaagtgctcctaa

SEQ ID NO: 4809 - protein, 412 aa, synthetic construct; identical to SEQ ID NO: 4801
  REGION 1..412: note = TGFbeta3__Homo_sapiens__P10600

SEQ ID NO: 4810 - RNA, 1239 nt, synthetic construct; identical to SEQ ID NO: 4802
  misc_feature 1..1239: note = TGFbeta3__Homo_sapiens__AAC79727
  source 1..1239: mol_type = other RNA

SEQ ID NO: 4811 - RNA, 1239 nt, synthetic construct; identical to SEQ ID NO: 4803
  misc_feature 1..1239: note = derived and/or modified sequence opt1 fromTGFbeta3__Homo_sapiens__AAC79727
  source 1..1239: mol_type = other RNA

SEQ ID NO: 4812 - RNA, 1239 nt, synthetic construct; identical to SEQ ID NO: 4804
  misc_feature 1..1239: note = derived and/or modified sequence opt2 fromTGFbeta3__Homo_sapiens__AAC79727
  source 1..1239: mol_type = other RNA

SEQ ID NO: 4813 - RNA, 1239 nt, synthetic construct; identical to SEQ ID NO: 4805
  misc_feature 1..1239: note = derived and/or modified sequence opt3 fromTGFbeta3__Homo_sapiens__AAC79727
  source 1..1239: mol_type = other RNA

SEQ ID NO: 4814 - RNA, 1239 nt, synthetic construct; identical to SEQ ID NO: 4806
  misc_feature 1..1239: note = derived and/or modified sequence opt4 fromTGFbeta3__Homo_sapiens__AAC79727
  source 1..1239: mol_type = other RNA

SEQ ID NO: 4815 - RNA, 1239 nt, synthetic construct; identical to SEQ ID NO: 4807
  misc_feature 1..1239: note = derived and/or modified sequence opt5 fromTGFbeta3__Homo_sapiens__AAC79727
  source 1..1239: mol_type = other RNA

SEQ ID NO: 4816 - RNA, 1239 nt, synthetic construct
  misc_feature 1..1239: note = derived and/or modified sequence opt6 fromTGFbeta3__Homo_sapiens__AAC79727
  source 1..1239: mol_type = other RNA
atgaaaatgcacctacaacgagcactagtagtattagcattactaaatttcgcaaccgtaagcctatcattatcaacttgcacaacactagatttcggacatatcaaaaaaaaacgtgtagaagcgattcgaggacaaatactatccaaactacgactaacaagtccaccagaaccaacagtaatgacacacgtaccataccaagtactagcattatacaactcaaccagggaactactagaagaaatgcacggagaaagagaagaaggatgcacacaagaaaacacagaatcagaatactacgccaaagaaatacacaaatttgacatgatccaaggattagcagaacacaacgaattagctgtctgccccaaaggaataacatcaaaagtctttagatttaatgtaagcagcgttgaaaaaaacagaacaaacctattccgagcagaatttagagtactaagggtaccaaaccccagttcaaaaagaaatgaacaaagaatagaactatttcaaatattacgaccagatgaacacatagcaaaacaaagatacataggcggaaaaaacctaccaacaagaggaacagcagaatggctatcatttgacgtaacagacactgtacgagaatggttactaagaagagaatcaaacttaggactagaaataagcatacactgcccatgtcacaccttccaaccgaacggagacatattagaaaacatacacgaagtaatggaaataaaattcaaaggagtagacaatgaagatgaccatggaagaggagacttagggagattaaaaaaacaaaaagaccatcacaacccacatttaatactaatgatgatcccaccacacagactagacaaccccggacaaggaggacaaagaaaaaaaagagccctagatacaaattactgctttagaaacctagaagaaaactgttgcgtacgaccattatacatagacttcagacaagacttaggatggaaatgggtacacgaacctaaaggatactacgcaaacttttgcagcggaccatgcccataccttagatcagctgacacaacccactccacagtcttaggactatataacacattaaatccagaagcatcagcatcaccatgttgtgtaccacaagacctagaaccgctaacaatactctattacgtaggaagaacaccaaaagtagaacaactaagtaacatggtggtaaaatcatgcaaatgttcataa

SEQ ID NO: 4817 - protein, 251 aa, synthetic construct
  REGION 1..251: note = TL1A__Homo_sapiens__O95150
MAEDLGLSFGETASVEMLPEHGSCRPKARSSSARWALTCCLVLLPFLAGLTTYLLVSQLRAQGEACVQFQALKGQEFAPSHQQVYAPLRADGDKPRAHLTVVRQTPTQHFKNQFPALHWEHELGLAFTKNRMNYTNKFLLIPESGDYFIYSQVTFRGMTSECSEIRQAGRPNKPDSITVVITKVTDSYPEPTQLLMGTKSVCEVGSNWFQPIYLGAMFSLQEGDKLMVNVSDISLVDYTKEDKTFFGAFLL

SEQ ID NO: 4818 - RNA, 756 nt, synthetic construct
  misc_feature 1..756: note = TL1A__Homo_sapiens__AAH69435
  source 1..756: mol_type = other RNA
atggccgaggatctgggactgagctttggggaaacagccagtgtggaaatgctgccagagcacggcagctgcaggcccaaggccaggagcagcagcgcacgctgggctctcacctgctgcctggtgttgctccccttccttgcaggactcaccacatacctgcttgtcagccagctccgggcccagggagaggcctgtgtgcagttccaggctctaaaaggacaggagtttgcaccttcacatcagcaagtttatgcacctcttagagcagacggagataagccaagggcacacctgacagttgtgagacaaactcccacacagcactttaaaaatcagttcccagctctgcactgggaacatgaactaggcctggccttcaccaagaaccgaatgaactataccaacaaattcctgctgatcccagagtcgggagactacttcatttactcccaggtcacattccgtgggatgacctctgagtgcagtgaaatcagacaagcaggccgaccaaacaagccagactccatcactgtggtcatcaccaaggtaacagacagctaccctgagccaacccagctcctcatggggaccaagtctgtgtgcgaagtaggtagcaactggttccagcccatctacctcggagccatgttctccttgcaagaaggggacaagctaatggtgaacgtcagtgacatctctttggtggattacacaaaagaagataaaaccttctttggagccttcttactatag

SEQ ID NO: 4819 - RNA, 756 nt, synthetic construct
  misc_feature 1..756: note = derived and/or modified sequence opt1 fromTL1A__Homo_sapiens__AAH69435
  source 1..756: mol_type = other RNA
atggccgaggacctgggcctcagcttcggggagaccgcctccgtggagatgctgcccgagcacggcagctgccgcccgaaggcgcggtccagctccgcccgctgggccctgacctgctgcctcgtcctgctgcccttcctcgccgggctgacgacctacctgctcgtgagccagctgcgggcccagggcgaggcgtgcgtgcagttccaggccctgaaggggcaggagttcgccccctcccaccagcaggtctacgcgcccctccgcgccgacggcgacaagccgcgggcccacctgaccgtggtgcgccagacccccacgcagcacttcaagaaccagttccccgccctgcactgggagcacgagctcggcctggccttcaccaagaaccggatgaactacaccaacaagttcctgctcatccccgagagcggggactacttcatctactcccaggtcaccttccgcggcatgacgagcgagtgctccgagatccggcaggccgggcgcccgaacaagcccgacagcatcaccgtggtgatcaccaaggtcaccgactcctaccccgagcccacgcagctgctgatgggcaccaagagcgtgtgcgaggtggggtccaactggttccagccgatctacctcggcgcgatgttcagcctgcaggagggcgacaagctgatggtcaacgtgtccgacatcagcctcgtggactacaccaaggaggacaagaccttcttcggggccttcctgctgtga

SEQ ID NO: 4820 - RNA, 756 nt, synthetic construct
  misc_feature 1..756: note = derived and/or modified sequence opt2 fromTL1A__Homo_sapiens__AAH69435
  source 1..756: mol_type = other RNA
atggccgaggacctcggcctctccttcggcgagaccgcctccgtcgagatgctccccgagcacggctcctgccgccccaaggcccgctcctcctccgcccgctgggccctcacctgctgcctcgtcctcctccccttcctcgccggcctcaccacctacctcctcgtctcccagctccgcgcccagggcgaggcctgcgtccagttccaggccctcaagggccaggagttcgccccctcccaccagcaggtctacgcccccctccgcgccgacggcgacaagccccgcgcccacctcaccgtcgtccgccagacccccacccagcacttcaagaaccagttccccgccctccactgggagcacgagctcggcctcgccttcaccaagaaccgcatgaactacaccaacaagttcctcctcatccccgagtccggcgactacttcatctactcccaggtcaccttccgcggcatgacctccgagtgctccgagatccgccaggccggccgccccaacaagcccgactccatcaccgtcgtcatcaccaaggtcaccgactcctaccccgagcccacccagctcctcatgggcaccaagtccgtctgcgaggtcggctccaactggttccagcccatctacctcggcgccatgttctccctccaggagggcgacaagctcatggtcaacgtctccgacatctccctcgtcgactacaccaaggaggacaagaccttcttcggcgccttcctcctctga

SEQ ID NO: 4821 - RNA, 756 nt, synthetic construct
  misc_feature 1..756: note = derived and/or modified sequence opt3 fromTL1A__Homo_sapiens__AAH69435
  source 1..756: mol_type = other RNA
atggccgaggacctgggcctcagcttcggggaaaccgcttccgtggagatgcttcccgaacacggatcttgcagacctaaggcaaggtcaagtagcgcccggtgggcgctgacatgttgcttggtcttactgccatttctagctggtctcactacgtacctgcttgtttcccagctgcgcgcccaaggcgaggcatgtgtgcagttccaggccttgaaagggcaggaatttgctccgtctcatcaacaggtatatgcacccctccgagccgatggagacaagcctcgtgctcacctgaccgtggtcagacagacaccaactcagcatttcaaaaaccaatttcccgccctgcactgggagcatgagctcggcttagcgttcaccaagaataggatgaactacacaaataaatttctgcttatccctgaatcgggtgattatttcatttactcacaggtgacctttcgggggatgactagcgagtgcagtgaaatacgccaggcaggaagaccaaacaagcccgactccatcacagttgtgattaccaaggtcacggattcttatcctgagccaactcagttgctgatgggcaccaaaagcgtgtgtgaggtaggctccaattggttccaaccgatctacctaggggccatgttttcactccaggaaggagacaagctgatggttaacgtgagtgatattagccttgtcgactatacaaaagaggataagactttctttggtgctttcctgttgtga

SEQ ID NO: 4822 - RNA, 756 nt, synthetic construct
  misc_feature 1..756: note = derived and/or modified sequence opt4 fromTL1A__Homo_sapiens__AAH69435
  source 1..756: mol_type = other RNA
atggccgaggacctgggcctgagcttcggcgagaccgccagcgtggagatgctgcccgagcacggcagctgcagacccaaggccagaagcagcagcgccagatgggccctgacctgctgcctggtgctgctgcccttcctggccggcctgaccacctacctgctggtgagccagctgagagcccagggcgaggcctgcgtgcagttccaggccctgaagggccaggagttcgcccccagccaccagcaggtgtacgcccccctgagagccgacggcgacaagcccagagcccacctgaccgtggtgagacagacccccacccagcacttcaagaaccagttccccgccctgcactgggagcacgagctgggcctggccttcaccaagaacagaatgaactacaccaacaagttcctgctgatccccgagagcggcgactacttcatctacagccaggtgaccttcagaggcatgaccagcgagtgcagcgagatcagacaggccggcagacccaacaagcccgacagcatcaccgtggtgatcaccaaggtgaccgacagctaccccgagcccacccagctgctgatgggcaccaagagcgtgtgcgaggtgggcagcaactggttccagcccatctacctgggcgccatgttcagcctgcaggagggcgacaagctgatggtgaacgtgagcgacatcagcctggtggactacaccaaggaggacaagaccttcttcggcgccttcctgctgtga

SEQ ID NO: 4823 - RNA, 756 nt, synthetic construct
  misc_feature 1..756: note = derived and/or modified sequence opt5 fromTL1A__Homo_sapiens__AAH69435
  source 1..756: mol_type = other RNA
atggccgaggacctgggcctcagcttcggggaaaccgcttccgtggagatgctgcccgaacacggatcttgcagacctaaggcccggagctcctctgcgcgctgggctcttacatgttgcctggtcctcctgccgtttcttgccggcctgacgacctacctcctggttagccagctgagagcccaaggggaggcttgtgtgcagttccaggccctcaaaggacaggaatttgctccctcccatcaacaggtgtatgcccctctgcgggcggatggcgacaagccccgcgcccaccttacagtcgtgagacagacccctacacagcatttcaaaaaccaatttcccgctctgcactgggagcatgagctcgggctggccttcaccaagaatcggatgaactacacaaataaatttcttctgatccctgaatctggagattatttcatttacagccaggttacctttcgcggcatgacgtccgagtgcagcgaaatcagacaggctggccggccgaacaagcccgactctattaccgtggtcatcacaaaggtgaccgattcctatcctgagcccacacagctcctgatggggaccaaaagcgtttgtgaggtgggatctaattggttccaacctatttacctgggcgccatgttttccctccaggaaggggacaagctgatggtcaacgtgagcgatatctctcttgtggactatacgaaagaggataagacattctttggagcgttcctgctctga

SEQ ID NO: 4824 - RNA, 756 nt, synthetic construct
  misc_feature 1..756: note = derived and/or modified sequence opt6 fromTL1A__Homo_sapiens__AAH69435
  source 1..756: mol_type = other RNA
atggcagaagacctaggactatcattcggagaaacagcatcagtagaaatgctacccgaacacggttcatgcagaccaaaagcaagatcatcatccgcaagatgggcactaacatgctgcctagtactacttccattcctagcaggattaacaacatacctattagtcagccaactacgagcacaaggagaagcatgcgtacaattccaagcactaaaaggacaagaattcgctccctcacaccaacaagtatacgcaccactaagagcagacggagacaaaccaagagcacatctaacagtagtcagacaaacacctacacaacacttcaaaaatcaattccccgctctacactgggaacacgaactaggattagcattcacaaaaaatagaatgaactacacaaacaaattcctattaataccagaatcaggcgactactttatatactcacaagtaactttcagaggaatgacatcagaatgctcagaaataagacaagcaggaagaccaaacaaaccagactccataacagtagtaataacaaaagtaacagactcataccccgaacctactcaattactaatgggaacaaaatcagtatgcgaagtaggctcaaactggttccaaccaatatacttaggagctatgttcagtttacaagaaggagataaattaatggtaaacgtttccgacatatcactagtagactacacaaaagaagataaaacattcttcggagcattcttactataa

SEQ ID NO: 4825 - protein, 249 aa, synthetic construct
  REGION 1..249: note = TWEAK__Homo_sapiens__Q4ACW9
MAARRSQRRRGRRGEPGTALLVPLALGLGLALACLGLLLAVVSLGSRASLSAQEPAQEELVAEEDQDPSELNPQTEESQDPAPFLNRLVRPRRSAPKGRKTRARRAIAAHYEVHPRPGQDGAQAGVDGTVSGWEEARINSSSPLRYNRQIGEFIVTRAGLYYLYCQVHFDEGKAVYLKLDLLVDGVLALRCLEEFSATAASSLGPQLRLCQVSGLLALRPGSSLRIRTLPWAHLKAAPFLTYFGLFQVH

SEQ ID NO: 4826 - RNA, 750 nt, synthetic construct
  misc_feature 1..750: note = TWEAK__Homo_sapiens__AAI04421
  source 1..750: mol_type = other RNA
atggccgcccgtcggagccagaggcggagggggcgccggggggagccgggcaccgccctgctggtcccgctcgcgctgggcctgggcctggcgctggcctgcctcggcctcctgctggccgtggtcagtttggggagccgggcatcgctgtccgcccaggagcctgcccaggaggagctggtggcagaggaggaccaggacccgtcggaactgaatccccagacagaagaaagccaggatcctgcgcctttcctgaaccgactagttcggcctcgcagaagtgcacctaaaggccggaaaacacgggctcgaagagcgatcgcagcccattatgaagttcatccacgacctggacaggacggagcgcaggcaggtgtggacgggacagtgagtggctgggaggaagccagaatcaacagctccagccctctgcgctacaaccgccagatcggggagtttatagtcacccgggctgggctctactacctgtactgtcaggtgcactttgatgaggggaaggctgtctacctgaagctggacttgctggtggatggtgtgctggccctgcgctgcctggaggaattctcagccactgcggcgagttccctcgggccccagctccgcctctgccaggtgtctgggctgttggccctgcggccagggtcctccctgcggatccgcaccctcccctgggcccatctcaaggctgcccccttcctcacctacttcggactcttccaggttcactga

SEQ ID NO: 4827 - RNA, 750 nt, synthetic construct
  misc_feature 1..750: note = derived and/or modified sequence opt1 fromTWEAK__Homo_sapiens__AAI04421
  source 1..750: mol_type = other RNA
atggccgcccgccggagccagcgccggcgcgggcggcgcggggagcccggcaccgcgctgctcgtgccgctggccctggggctcggcctggccctggcctgcctcgggctgctgctcgccgtcgtgtccctgggcagccgggcgtccctgagcgcccaggagcccgcccaggaggagctcgtggccgaggaggaccaggacccctccgagctgaacccccagaccgaggagagccaggacccggcgcccttcctgaaccgcctcgtccggccccgccggtccgcccccaagggccgcaagacgcgggcccgccgggccatcgccgcgcactacgaggtgcacccgcgccccgggcaggacggcgcccaggccggggtggacggcaccgtcagcgggtgggaggaggcccggatcaactccagcagccccctgcgctacaaccggcagatcggcgagttcatcgtgacccgcgccggcctgtactacctctactgccaggtgcacttcgacgaggggaaggcggtctacctgaagctggacctcctggtggacggcgtgctggccctccggtgcctggaggagttctccgccaccgccgcctccagcctggggccccagctccgcctgtgccaggtctccggcctgctcgcgctgcgcccgggcagctccctgcggatccgcacgctcccctgggcccacctgaaggccgcccccttcctgacctacttcggcctcttccaggtgcactga

SEQ ID NO: 4828 - RNA, 750 nt, synthetic construct
  misc_feature 1..750: note = derived and/or modified sequence opt2 fromTWEAK__Homo_sapiens__AAI04421
  source 1..750: mol_type = other RNA
atggccgcccgccgctcccagcgccgccgcggccgccgcggcgagcccggcaccgccctcctcgtccccctcgccctcggcctcggcctcgccctcgcctgcctcggcctcctcctcgccgtcgtctccctcggctcccgcgcctccctctccgcccaggagcccgcccaggaggagctcgtcgccgaggaggaccaggacccctccgagctcaacccccagaccgaggagtcccaggaccccgcccccttcctcaaccgcctcgtccgcccccgccgctccgcccccaagggccgcaagacccgcgcccgccgcgccatcgccgcccactacgaggtccacccccgccccggccaggacggcgcccaggccggcgtcgacggcaccgtctccggctgggaggaggcccgcatcaactcctcctcccccctccgctacaaccgccagatcggcgagttcatcgtcacccgcgccggcctctactacctctactgccaggtccacttcgacgagggcaaggccgtctacctcaagctcgacctcctcgtcgacggcgtcctcgccctccgctgcctcgaggagttctccgccaccgccgcctcctccctcggcccccagctccgcctctgccaggtctccggcctcctcgccctccgccccggctcctccctccgcatccgcaccctcccctgggcccacctcaaggccgcccccttcctcacctacttcggcctcttccaggtccactga

SEQ ID NO: 4829 - RNA, 750 nt, synthetic construct
  misc_feature 1..750: note = derived and/or modified sequence opt3 fromTWEAK__Homo_sapiens__AAI04421
  source 1..750: mol_type = other RNA
atggccgctagaaggagccagcggcgccgaggccgtagaggggagcccggaaccgcactgctcgtgcctcttgccctgggtttgggcttagcgctggcttgcctagggctcctgcttgccgtcgtttccctgggatctagggcatcattgagtgcccaagaaccagctcaggaggaactcgtggcagaggaagaccaggatccgagcgagctgaacccccagacagaggaatcccaagaccctgccccattcctgaatcggctcgtacgccccagaaggtctgctcctaagggccggaaaactcgcgccagacgagcgatcgcagcccactacgaggtgcatccaaggcccggtcaggatggggctcaggccggagtcgacggcacggtgtcgggctgggaagaggcacggattaactcaagcagtcctttacgttataatcgccagataggggagtttatcgttaccagagctggactgtactatctttactgtcaagtgcacttcgatgaaggtaaggccgtctatttgaaactggacctactcgtggatggcgtactggcgcttaggtgcctggaggaattttccgccacagcagcttctagcttggggccacagctccggctgtgtcaggtttccggattactggccctccgaccgggctcaagtcttcgcattagaactctgccctgggctcatttgaaggccgcacctttcctaacctactttggtctgttccaggtgcactga

SEQ ID NO: 4830 - RNA, 750 nt, synthetic construct
  misc_feature 1..750: note = derived and/or modified sequence opt4 fromTWEAK__Homo_sapiens__AAI04421
  source 1..750: mol_type = other RNA
atggccgccagaagaagccagagaagaagaggcagaagaggcgagcccggcaccgccctgctggtgcccctggccctgggcctgggcctggccctggcctgcctgggcctgctgctggccgtggtgagcctgggcagcagagccagcctgagcgcccaggagcccgcccaggaggagctggtggccgaggaggaccaggaccccagcgagctgaacccccagaccgaggagagccaggaccccgcccccttcctgaacagactggtgagacccagaagaagcgcccccaagggcagaaagaccagagccagaagagccatcgccgcccactacgaggtgcaccccagacccggccaggacggcgcccaggccggcgtggacggcaccgtgagcggctgggaggaggccagaatcaacagcagcagccccctgagatacaacagacagatcggcgagttcatcgtgaccagagccggcctgtactacctgtactgccaggtgcacttcgacgagggcaaggccgtgtacctgaagctggacctgctggtggacggcgtgctggccctgagatgcctggaggagttcagcgccaccgccgccagcagcctgggcccccagctgagactgtgccaggtgagcggcctgctggccctgagacccggcagcagcctgagaatcagaaccctgccctgggcccacctgaaggccgcccccttcctgacctacttcggcctgttccaggtgcactga

SEQ ID NO: 4831 - RNA, 750 nt, synthetic construct
  misc_feature 1..750: note = derived and/or modified sequence opt5 fromTWEAK__Homo_sapiens__AAI04421
  source 1..750: mol_type = other RNA
atggccgctagacggagccagcgcagacggggccgcagaggggagcccggaaccgccctgctcgtgcctctggcgcttggcctggggctcgctctggcctgccttggactgctcctggccgtcgtttccctgggctctcgggctagcctctccgcccaagaaccggctcaggaggaactggtggccgaggaagaccaggatccctctgagcttaaccctcagacagaggaaagccaagaccccgcgcctttcctgaatcgcctcgtgagaccccggcgctccgcccctaaggggagaaaaacgcgggctcgcagagccatcgctgcccactacgaggtccatccgcggcccggacaggatggcgcgcaggccggcgtggacgggaccgtttctggatgggaagaggctcgcattaacagctccagccctctgagatataatcggcagatcggcgagtttattgtgacaagagccgggctttactatctgtactgtcaagtccacttcgatgaaggaaaggctgtgtatctcaaactggacctgctcgttgatggcgtgctggcccttcgctgcctggaggaattttctgccaccgctgcgtccagcctcgggccccagctgcggctttgtcaggtctctggactgctcgccctgagacctggctccagcctgcgcatccggacactcccctgggctcatctgaaggccgccccgttccttacctactttggcctgttccaggtgcactga

SEQ ID NO: 4832 - RNA, 750 nt, synthetic construct
  misc_feature 1..750: note = derived and/or modified sequence opt6 fromTWEAK__Homo_sapiens__AAI04421
  source 1..750: mol_type = other RNA
atggcagccagaagatcacaaagaagaagaggaagaagaggagaaccaggtacagcacttttagtaccattagcattaggattaggattagcattggcttgcctaggactattactagcagtcgtaagtttaggatcaagagcaagcttaagtgcacaagaaccagctcaagaagaattagtagcagaagaagaccaagacccaagcgaactaaatccacaaacagaagaatcgcaagatccagcgccatttttaaatagactagtcaggccacgaagatctgcacctaaaggaagaaaaacaagagcaagaagagcaatagcagcacattatgaagtacacccaagaccaggacaagatggcgctcaagcaggtgtagatggaacagtaagtggatgggaagaagcaagaataaactcaagttcaccattgagatataacagacaaattggagaattcatagtaacaagagctggattatattatctatattgccaagtacatttcgatgaaggaaaagctgtctatctaaaactagatctattagttgatggcgtattagctttaaggtgcttagaagaattctcagcaactgcagcatcatcattaggaccacaattaagattatgtcaagtaagcggactattagcattaagaccaggctcaagtctaagaataagaacactaccatgggcacatttaaaagcagcaccattcttaacatattttggtttatttcaagtacactaa

SEQ ID NO: 4833 - protein, 97 aa, synthetic construct
  REGION 1..97: note = CCL11__Homo_sapiens__P51671
MKVSAALLWLLLIAAAFSPQGLAGPASVPTTCCFNLANRKIPLQRLESYRRITSGKCPQKAVIFKTKLAKDICADPKKKWVQDSMKYLDQKSPTPKP

SEQ ID NO: 4834 - RNA, 294 nt, synthetic construct
  misc_feature 1..294: note = CCL11__Homo_sapiens__AAA98957
  source 1..294: mol_type = other RNA
atgaaggtctccgcagcacttctgtggctgctgctcatagcagctgccttcagcccccaggggctcgctgggccagcttctgtcccaaccacctgctgctttaacctggccaataggaagataccccttcagcgactagagagctacaggagaatcaccagtggcaaatgtccccagaaagctgtgatcttcaagaccaaactggccaaggatatctgtgccgaccccaagaagaagtgggtgcaggattccatgaagtatctggaccaaaaatctccaactccaaagccataa

SEQ ID NO: 4835 - RNA, 294 nt, synthetic construct
  misc_feature 1..294: note = derived and/or modified sequence opt1 fromCCL11__Homo_sapiens__AAA98957
  source 1..294: mol_type = other RNA
atgaaggtgagcgccgccctgctctggctgctgctcatcgcggccgccttcagcccccagggcctggccgggccggccagcgtccccacgacctgctgcttcaacctggcgaaccgcaagatccccctccagcggctggagtcctaccgccggatcaccagcggcaagtgcccccagaaggccgtgatcttcaagaccaagctggccaaggacatctgcgccgacccgaagaagaagtgggtgcaggactccatgaagtacctcgaccagaagtcccccacccccaagccctga

SEQ ID NO: 4836 - RNA, 294 nt, synthetic construct
  misc_feature 1..294: note = derived and/or modified sequence opt2 fromCCL11__Homo_sapiens__AAA98957
  source 1..294: mol_type = other RNA
atgaaggtctccgccgccctcctctggctcctcctcatcgccgccgccttctccccccagggcctcgccggccccgcctccgtccccaccacctgctgcttcaacctcgccaaccgcaagatccccctccagcgcctcgagtcctaccgccgcatcacctccggcaagtgcccccagaaggccgtcatcttcaagaccaagctcgccaaggacatctgcgccgaccccaagaagaagtgggtccaggactccatgaagtacctcgaccagaagtcccccacccccaagccctga

SEQ ID NO: 4837 - RNA, 294 nt, synthetic construct
  misc_feature 1..294: note = derived and/or modified sequence opt3 fromCCL11__Homo_sapiens__AAA98957
  source 1..294: mol_type = other RNA
atgaaggtgagcgccgctctgctctggcttctgttgatcgcagccgcgttcagtccccagggcttagctgggcctgcctctgtcccaaccacatgctgttttaacctggcaaatagaaaaattccgctacaaaggctcgagtcataccggcgcataacttccggaaagtgcccccagaaagccgttatcttcaagacgaaactggctaaggacatttgtgcagatcctaagaaaaagtgggtgcaggacagcatgaaatatcttgatcagaagtccccaacccccaaaccttga

SEQ ID NO: 4838 - RNA, 294 nt, synthetic construct
  misc_feature 1..294: note = derived and/or modified sequence opt4 fromCCL11__Homo_sapiens__AAA98957
  source 1..294: mol_type = other RNA
atgaaggtgagcgccgccctgctgtggctgctgctgatcgccgccgccttcagcccccagggcctggccggccccgccagcgtgcccaccacctgctgcttcaacctggccaacagaaagatccccctgcagagactggagagctacagaagaatcaccagcggcaagtgcccccagaaggccgtgatcttcaagaccaagctggccaaggacatctgcgccgaccccaagaagaagtgggtgcaggacagcatgaagtacctggaccagaagagccccacccccaagccctga

SEQ ID NO: 4839 - RNA, 294 nt, synthetic construct
  misc_feature 1..294: note = derived and/or modified sequence opt5 fromCCL11__Homo_sapiens__AAA98957
  source 1..294: mol_type = other RNA
atgaaggtgagcgccgctctgctctggctgcttctgatcgccgcggctttcagcccccagggcctcgccgggcctgcctctgtcccgaccacatgctgttttaacctggctaatagaaaaattccccttcaacggctggagagctaccgcagaatcacgtccggaaagtgccctcagaaagccgttattttcaagaccaaactcgctaaggacatctgtgccgatcccaagaaaaagtgggtgcaggactctatgaaatatctggatcagaagtcccctacacccaaaccttga

SEQ ID NO: 4840 - RNA, 294 nt, synthetic construct
  misc_feature 1..294: note = derived and/or modified sequence opt6 fromCCL11__Homo_sapiens__AAA98957
  source 1..294: mol_type = other RNA
atgaaagtatcagcagcactactatggctactactaatagcagcagcattctcaccacaaggactagcaggaccagcatcagtaccaacaacatgctgcttcaacctagcaaacagaaaaataccactacaaagactagaatcatacagaagaataacatcaggaaaatgcccacaaaaagcagtaatattcaaaacaaaactagcaaaagacatatgcgcagacccaaaaaaaaaatgggtacaagactcaatgaaatacctagaccaaaaatcaccaacaccaaaaccataa

SEQ ID NO: 4841 - protein, 97 aa, synthetic construct; identical to SEQ ID NO: 4833
  REGION 1..97: note = CCL11__Homo_sapiens__Q6I9T4

SEQ ID NO: 4842 - RNA, 294 nt, synthetic construct; identical to SEQ ID NO: 4834
  misc_feature 1..294: note = CCL11__Homo_sapiens__ABK41951
  source 1..294: mol_type = other RNA

SEQ ID NO: 4843 - RNA, 294 nt, synthetic construct; identical to SEQ ID NO: 4835
  misc_feature 1..294: note = derived and/or modified sequence opt1 fromCCL11__Homo_sapiens__ABK41951
  source 1..294: mol_type = other RNA

SEQ ID NO: 4844 - RNA, 294 nt, synthetic construct; identical to SEQ ID NO: 4836
  misc_feature 1..294: note = derived and/or modified sequence opt2 fromCCL11__Homo_sapiens__ABK41951
  source 1..294: mol_type = other RNA

SEQ ID NO: 4845 - RNA, 294 nt, synthetic construct; identical to SEQ ID NO: 4837
  misc_feature 1..294: note = derived and/or modified sequence opt3 fromCCL11__Homo_sapiens__ABK41951
  source 1..294: mol_type = other RNA

SEQ ID NO: 4846 - RNA, 294 nt, synthetic construct; identical to SEQ ID NO: 4838
  misc_feature 1..294: note = derived and/or modified sequence opt4 fromCCL11__Homo_sapiens__ABK41951
  source 1..294: mol_type = other RNA

SEQ ID NO: 4847 - RNA, 294 nt, synthetic construct; identical to SEQ ID NO: 4839
  misc_feature 1..294: note = derived and/or modified sequence opt5 fromCCL11__Homo_sapiens__ABK41951
  source 1..294: mol_type = other RNA

SEQ ID NO: 4848 - RNA, 294 nt, synthetic construct
  misc_feature 1..294: note = derived and/or modified sequence opt6 fromCCL11__Homo_sapiens__ABK41951
  source 1..294: mol_type = other RNA
atgaaagtatcagccgcactactatggctactactaatagcagcagcattctcaccacaaggactagcaggaccagcatcagtaccaacaacatgctgcttcaacctagcaaacagaaaaataccattacaaagactagaatcatacagaagaataacatcaggaaaatgcccacaaaaagcagtaatattcaaaacaaaactcgcaaaagacatatgcgcagacccaaaaaaaaaatgggtacaagactcaatgaaatacctagaccaaaaatcaccaacaccaaaaccataa

SEQ ID NO: 4849 - protein, 104 aa, synthetic construct
  REGION 1..104: note = CCL12__Mus_musculus__Q62401
MKISTLLCLLLIATTISPQVLAGPDAVSTPVTCCYNVVKQKIHVRKLKSYRRITSSQCPREAVIFRTILDKEICADPKEKWVKNSINHLDKTSQTFILEPSCLG

SEQ ID NO: 4850 - RNA, 315 nt, synthetic construct
  misc_feature 1..315: note = CCL12__Mus_musculus__AAB49424
  source 1..315: mol_type = other RNA
atgaagatttccacacttctatgcctcctgctcatagctaccaccatcagtcctcaggtattggctggaccagatgcggtgagcaccccagtcacgtgctgttataatgttgttaagcagaagattcacgtccggaagctgaagagctacaggagaatcacaagcagccagtgtccccgggaagctgtgatcttcaggaccatactggataaggagatctgtgctgaccccaaggagaagtgggttaagaattccataaaccacttggataagacgtctcaaaccttcatccttgaaccttcatgtctaggctga

SEQ ID NO: 4851 - RNA, 315 nt, synthetic construct
  misc_feature 1..315: note = derived and/or modified sequence opt1 fromCCL12__Mus_musculus__AAB49424
  source 1..315: mol_type = other RNA
atgaagatcagcaccctgctctgcctgctgctcatcgccaccacgatcagcccccaggtgctggccggcccggacgcggtctccacccccgtgacctgctgctacaacgtggtcaagcagaagatccacgtgcgcaagctgaagtcctaccggcgcatcaccagctcccagtgcccccgggaggccgtgatcttccgcacgatcctcgacaaggagatctgcgccgaccccaaggagaagtgggtcaagaacagcatcaaccacctggacaagacctcccagaccttcatcctggagccgagctgcctcgggtga

SEQ ID NO: 4852 - RNA, 315 nt, synthetic construct
  misc_feature 1..315: note = derived and/or modified sequence opt2 fromCCL12__Mus_musculus__AAB49424
  source 1..315: mol_type = other RNA
atgaagatctccaccctcctctgcctcctcctcatcgccaccaccatctccccccaggtcctcgccggccccgacgccgtctccacccccgtcacctgctgctacaacgtcgtcaagcagaagatccacgtccgcaagctcaagtcctaccgccgcatcacctcctcccagtgcccccgcgaggccgtcatcttccgcaccatcctcgacaaggagatctgcgccgaccccaaggagaagtgggtcaagaactccatcaaccacctcgacaagacctcccagaccttcatcctcgagccctcctgcctcggctga

SEQ ID NO: 4853 - RNA, 315 nt, synthetic construct
  misc_feature 1..315: note = derived and/or modified sequence opt3 fromCCL12__Mus_musculus__AAB49424
  source 1..315: mol_type = other RNA
atgaagatcagcaccctgctctgccttctgttgattgccacaactatatctccccaggtgttagctggccctgacgcagtctccacgccagttacctgttgctacaacgtggtaaaacaaaagatccacgtgagaaaactgaagtcatataggcggattacaagtagccagtgtccgcgcgaggccgtcatcttccgaactattctagataaagaaatctgcgcggaccccaaggagaagtgggtgaaaaattccataaaccatctcgataagacctctcagacatttatcctggaaccttcgtgtcttgggtga

SEQ ID NO: 4854 - RNA, 315 nt, synthetic construct
  misc_feature 1..315: note = derived and/or modified sequence opt4 fromCCL12__Mus_musculus__AAB49424
  source 1..315: mol_type = other RNA
atgaagatcagcaccctgctgtgcctgctgctgatcgccaccaccatcagcccccaggtgctggccggccccgacgccgtgagcacccccgtgacctgctgctacaacgtggtgaagcagaagatccacgtgagaaagctgaagagctacagaagaatcaccagcagccagtgccccagagaggccgtgatcttcagaaccatcctggacaaggagatctgcgccgaccccaaggagaagtgggtgaagaacagcatcaaccacctggacaagaccagccagaccttcatcctggagcccagctgcctgggctga

SEQ ID NO: 4855 - RNA, 315 nt, synthetic construct
  misc_feature 1..315: note = derived and/or modified sequence opt5 fromCCL12__Mus_musculus__AAB49424
  source 1..315: mol_type = other RNA
atgaagatcagcaccctgctctgcctgcttctgattgccacaacgatcagcccccaggtgctcgctggccctgacgccgtctctaccccggttacatgttgctacaacgtggtgaaacaaaagattcacgtcagaaaactgaagtcctatcggcgcatcacctcctctcagtgtcccagagaggcggtgattttccggacaatccttgataaagaaatctgcgctgaccctaaggagaagtgggttaaaaatagcattaaccatctggataagacctcccagacatttatcctcgaaccctcttgtctggggtga

SEQ ID NO: 4856 - RNA, 315 nt, synthetic construct
  misc_feature 1..315: note = derived and/or modified sequence opt6 fromCCL12__Mus_musculus__AAB49424
  source 1..315: mol_type = other RNA
atgaaaataagcacactactatgcctactactaatagcaacaacaatatcaccacaagtactagcaggaccagacgcagtatcaacaccagtaacatgctgctacaacgtagtaaaacaaaaaatacacgtaagaaaactaaaatcatacagaagaataacatcatcacaatgcccaagagaagcagtaatattcagaacaatactagacaaagaaatatgcgcagacccaaaagaaaaatgggtaaaaaactcaataaaccacctagacaaaacatcacaaacattcatactagaaccatcatgcctaggataa

SEQ ID NO: 4857 - protein, 98 aa, synthetic construct
  REGION 1..98: note = CCL13__Homo_sapiens__Q99616
MKVSAVLLCLLLMTAAFNPQGLAQPDALNVPSTCCFTFSSKKISLQRLKSYVITTSRCPQKAVIFRTKLGKEICADPKEKWVQNYMKHLGRKAHTLKT

SEQ ID NO: 4858 - RNA, 297 nt, synthetic construct
  misc_feature 1..297: note = CCL13__Homo_sapiens__AAB38703
  source 1..297: mol_type = other RNA
atgaaagtctctgcagtgcttctgtgcctgctgctcatgacagcagctttcaacccccagggacttgctcagccagatgcactcaacgtcccatctacttgctgcttcacatttagcagtaagaagatctccttgcagaggctgaagagctatgtgatcaccaccagcaggtgtccccagaaggctgtcatcttcagaaccaaactgggcaaggagatctgtgctgacccaaaggagaagtgggtccagaattatatgaaacacctgggccggaaagctcacaccctgaagacttga

SEQ ID NO: 4859 - RNA, 297 nt, synthetic construct
  misc_feature 1..297: note = derived and/or modified sequence opt1 fromCCL13__Homo_sapiens__AAB38703
  source 1..297: mol_type = other RNA
atgaaggtgagcgccgtcctgctctgcctgctgctcatgaccgccgcgttcaacccccagggcctggcccagccggacgccctgaacgtgccctccacgtgctgcttcaccttcagctccaagaagatcagcctccagcgcctgaagtcctacgtgatcaccaccagccggtgcccccagaaggccgtcatcttccgcaccaagctggggaaggagatctgcgccgaccccaaggagaagtgggtgcagaactacatgaagcacctcggccggaaggcgcacacgctgaagacctga

SEQ ID NO: 4860 - RNA, 297 nt, synthetic construct
  misc_feature 1..297: note = derived and/or modified sequence opt2 fromCCL13__Homo_sapiens__AAB38703
  source 1..297: mol_type = other RNA
atgaaggtctccgccgtcctcctctgcctcctcctcatgaccgccgccttcaacccccagggcctcgcccagcccgacgccctcaacgtcccctccacctgctgcttcaccttctcctccaagaagatctccctccagcgcctcaagtcctacgtcatcaccacctcccgctgcccccagaaggccgtcatcttccgcaccaagctcggcaaggagatctgcgccgaccccaaggagaagtgggtccagaactacatgaagcacctcggccgcaaggcccacaccctcaagacctga

SEQ ID NO: 4861 - RNA, 297 nt, synthetic construct
  misc_feature 1..297: note = derived and/or modified sequence opt3 fromCCL13__Homo_sapiens__AAB38703
  source 1..297: mol_type = other RNA
atgaaggtgagcgccgtcctgctctgccttctgttgatgaccgctgcattcaacccccagggcttagcccaacctgacgcgctgaatgttccatccacatgttgctttactttctctagtaaaaagatctcactacagagactcaaaagctacgtgattacgacctccaggtgtccgcagaaggctgtaatatttcggacaaaactggggaaggagatctgcgccgatcccaaggaaaaatgggtgcagaactatatgaagcaccttggacgcaaagcacatactctgaagacctga

SEQ ID NO: 4862 - RNA, 297 nt, synthetic construct
  misc_feature 1..297: note = derived and/or modified sequence opt4 fromCCL13__Homo_sapiens__AAB38703
  source 1..297: mol_type = other RNA
atgaaggtgagcgccgtgctgctgtgcctgctgctgatgaccgccgccttcaacccccagggcctggcccagcccgacgccctgaacgtgcccagcacctgctgcttcaccttcagcagcaagaagatcagcctgcagagactgaagagctacgtgatcaccaccagcagatgcccccagaaggccgtgatcttcagaaccaagctgggcaaggagatctgcgccgaccccaaggagaagtgggtgcagaactacatgaagcacctgggcagaaaggcccacaccctgaagacctga

SEQ ID NO: 4863 - RNA, 297 nt, synthetic construct
  misc_feature 1..297: note = derived and/or modified sequence opt5 fromCCL13__Homo_sapiens__AAB38703
  source 1..297: mol_type = other RNA
atgaaggtgagcgccgtcctgctctgcctgcttctgatgaccgctgccttcaacccccagggcctcgcgcaacctgacgctctgaatgttccgtccacatgttgctttacgttctctagcaaaaagatctcccttcagagactgaaatcttacgtgattaccacaagccggtgtccccagaaggccgtgatctttcgcaccaaactcgggaaggagatttgcgccgatcctaaggaaaaatgggtccagaactatatgaagcacctgggaagaaaagctcatacactgaagacctga

SEQ ID NO: 4864 - RNA, 297 nt, synthetic construct
  misc_feature 1..297: note = derived and/or modified sequence opt6 fromCCL13__Homo_sapiens__AAB38703
  source 1..297: mol_type = other RNA
atgaaagtatcagcagtactactatgcctactactaatgacagcagcattcaacccacaaggactagcacaaccagacgcactaaacgtaccatcaacatgctgcttcacattctcatcaaaaaaaatatcactacaaagactaaaatcatacgtaataacaacatcaagatgcccacaaaaagcagtaatattcagaacaaaactaggaaaagaaatatgcgcagacccaaaagaaaaatgggtacaaaactacatgaaacacctaggaagaaaagcacacacactaaaaacataa

SEQ ID NO: 4865 - protein, 93 aa, synthetic construct
  REGION 1..93: note = CCL14__Homo_sapiens__Q16627
MKISVAAIPFFLLITIALGTKTESSSRGPYHPSECCFTYTTYKIPRQRIMDYYETNSQCSKPGIVFITKRGHSVCTNPSDKWVQDYIKDMKEN

SEQ ID NO: 4866 - RNA, 282 nt, synthetic construct
  misc_feature 1..282: note = CCL14__Homo_sapiens__AAC63329
  source 1..282: mol_type = other RNA
atgaagatctccgtggctgccattcccttcttcctcctcatcaccatcgccctagggaccaagactgaatcctcctcacggggaccttaccacccctcagagtgctgcttcacctacactacctacaagatcccgcgtcagcggattatggattactatgagaccaacagccagtgctccaagcccggaattgtcttcatcaccaaaaggggccattccgtctgtaccaaccccagtgacaagtgggtccaggactatatcaaggacatgaaggagaactga

SEQ ID NO: 4867 - RNA, 282 nt, synthetic construct
  misc_feature 1..282: note = derived and/or modified sequence opt1 fromCCL14__Homo_sapiens__AAC63329
  source 1..282: mol_type = other RNA
atgaagatcagcgtggccgccatccccttcttcctgctcatcaccatcgcgctgggcaccaagacggagtccagctcccgcgggccgtaccaccccagcgagtgctgcttcacctacaccacctacaagatcccccggcagcgcatcatggactactacgagacgaactcccagtgcagcaagcccggcatcgtcttcatcaccaagcgggggcactccgtgtgcaccaacccgagcgacaagtgggtgcaggactacatcaaggacatgaaggagaactga

SEQ ID NO: 4868 - RNA, 282 nt, synthetic construct
  misc_feature 1..282: note = derived and/or modified sequence opt2 fromCCL14__Homo_sapiens__AAC63329
  source 1..282: mol_type = other RNA
atgaagatctccgtcgccgccatccccttcttcctcctcatcaccatcgccctcggcaccaagaccgagtcctcctcccgcggcccctaccacccctccgagtgctgcttcacctacaccacctacaagatcccccgccagcgcatcatggactactacgagaccaactcccagtgctccaagcccggcatcgtcttcatcaccaagcgcggccactccgtctgcaccaacccctccgacaagtgggtccaggactacatcaaggacatgaaggagaactga

SEQ ID NO: 4869 - RNA, 282 nt, synthetic construct
  misc_feature 1..282: note = derived and/or modified sequence opt3 fromCCL14__Homo_sapiens__AAC63329
  source 1..282: mol_type = other RNA
atgaagatcagcgtggccgctattcccttctttctgctcataaccatcgcacttggcacaaaaactgagtcctcttcaagagggccttaccacccaagtgaatgctgtttcacgtataccacatacaagattccgaggcagcggatcatggactattacgagactaacagccaatgctccaaacccggaattgtctttatcaccaagcgcggtcattctgtttgtacaaatccttcggataaatgggtgcaggactatataaaggatatgaaggaaaactga

SEQ ID NO: 4870 - RNA, 282 nt, synthetic construct
  misc_feature 1..282: note = derived and/or modified sequence opt4 fromCCL14__Homo_sapiens__AAC63329
  source 1..282: mol_type = other RNA
atgaagatcagcgtggccgccatccccttcttcctgctgatcaccatcgccctgggcaccaagaccgagagcagcagcagaggcccctaccaccccagcgagtgctgcttcacctacaccacctacaagatccccagacagagaatcatggactactacgagaccaacagccagtgcagcaagcccggcatcgtgttcatcaccaagagaggccacagcgtgtgcaccaaccccagcgacaagtgggtgcaggactacatcaaggacatgaaggagaactga

SEQ ID NO: 4871 - RNA, 282 nt, synthetic construct
  misc_feature 1..282: note = derived and/or modified sequence opt5 fromCCL14__Homo_sapiens__AAC63329
  source 1..282: mol_type = other RNA
atgaagatcagcgtggccgctattcccttctttctgctcatcaccattgccctgggcacaaaaacggagtcctctagcagagggccttaccacccgtccgaatgctgtttcacctatacaacctacaagatcccccggcagcgcattatggactattacgagacaaactctcaatgcagcaaacctggaatcgtctttatcaccaagagaggccattccgtttgtacaaatccctctgataaatgggtgcaggactatattaaggatatgaaggaaaactga

SEQ ID NO: 4872 - RNA, 282 nt, synthetic construct
  misc_feature 1..282: note = derived and/or modified sequence opt6 fromCCL14__Homo_sapiens__AAC63329
  source 1..282: mol_type = other RNA
atgaaaatatcagtagcagcaataccattcttcctactaataacaatagcactaggaacaaaaacagaatcatcatcaagaggaccataccacccatcagaatgctgcttcacatacacaacatacaaaataccaagacaaagaataatggactactacgaaacaaactcacaatgctcaaaaccaggaatagtattcataacaaaaagaggacactcagtatgcacaaacccatcagacaaatgggtacaagactacataaaagacatgaaagaaaactaa

SEQ ID NO: 4873 - protein, 113 aa, synthetic construct
  REGION 1..113: note = CCL15__Homo_sapiens__Q16663
MKVSVAALSCLMLVAVLGSQAQFINDAETELMMSKLPLENPVVLNSFHFAADCCTSYISQSIPCSLMKSYFETSSECSKPGVIFLTKKGRQVCAKPSGPGVQDCMKKLKPYSI

SEQ ID NO: 4874 - RNA, 342 nt, synthetic construct
  misc_feature 1..342: note = CCL15__Homo_sapiens__AAB94617
  source 1..342: mol_type = other RNA
atgaaggtctccgtggctgccctctcctgcctcatgcttgttgctgtccttggatcccaggcccagttcataaatgatgcagagacagagttaatgatgtcaaagcttccactggaaaatccagtagttctgaacagctttcactttgctgctgactgctgcacctcctacatctcacaaagcatcccgtgttcactcatgaaaagttattttgaaacgagcagcgagtgctccaagccaggtgtcatattcctcaccaagaaggggaggcaagtctgtgccaaacccagtggtccgggagttcaggattgcatgaaaaagctgaagccctactcaatataa

SEQ ID NO: 4875 - RNA, 342 nt, synthetic construct
  misc_feature 1..342: note = derived and/or modified sequence opt1 fromCCL15__Homo_sapiens__AAB94617
  source 1..342: mol_type = other RNA
atgaaggtgagcgtcgccgccctgtcctgcctcatgctggtggcggtgctgggcagccaggcccagttcatcaacgacgccgagaccgagctcatgatgtccaagctgcccctggagaacccggtcgtgctcaacagcttccacttcgccgccgactgctgcacctcctacatcagccagtccatcccctgcagcctgatgaagtcctacttcgagacgagctccgagtgcagcaagcccggggtgatcttcctgaccaagaagggccgccaggtctgcgcgaagccctccgggccgggcgtgcaggactgcatgaagaagctcaagccctacagcatctga

SEQ ID NO: 4876 - RNA, 342 nt, synthetic construct
  misc_feature 1..342: note = derived and/or modified sequence opt2 fromCCL15__Homo_sapiens__AAB94617
  source 1..342: mol_type = other RNA
atgaaggtctccgtcgccgccctctcctgcctcatgctcgtcgccgtcctcggctcccaggcccagttcatcaacgacgccgagaccgagctcatgatgtccaagctccccctcgagaaccccgtcgtcctcaactccttccacttcgccgccgactgctgcacctcctacatctcccagtccatcccctgctccctcatgaagtcctacttcgagacctcctccgagtgctccaagcccggcgtcatcttcctcaccaagaagggccgccaggtctgcgccaagccctccggccccggcgtccaggactgcatgaagaagctcaagccctactccatctga

SEQ ID NO: 4877 - RNA, 342 nt, synthetic construct
  misc_feature 1..342: note = derived and/or modified sequence opt3 fromCCL15__Homo_sapiens__AAB94617
  source 1..342: mol_type = other RNA
atgaaggtgagcgtcgccgctctgtcctgcctcatgcttgttgcagtgctgggctctcaggcccaattcatcaacgacgcggagaccgaattgatgatgtcaaaattacccctggagaatcctgtagtgctaaacagttttcacttcgctgccgattgttgcacaagctacatttcccagtctataccatgttcgctcatgaagtcatattttgaaactagcagtgagtgctccaaaccgggggtcatcttcctgacgaagaaaggaagacaggtgtgtgcaaagccctctggtcctggcgttcaggactgcatgaagaaacttaagccatacagcatttga

SEQ ID NO: 4878 - RNA, 342 nt, synthetic construct
  misc_feature 1..342: note = derived and/or modified sequence opt4 fromCCL15__Homo_sapiens__AAB94617
  source 1..342: mol_type = other RNA
atgaaggtgagcgtggccgccctgagctgcctgatgctggtggccgtgctgggcagccaggcccagttcatcaacgacgccgagaccgagctgatgatgagcaagctgcccctggagaaccccgtggtgctgaacagcttccacttcgccgccgactgctgcaccagctacatcagccagagcatcccctgcagcctgatgaagagctacttcgagaccagcagcgagtgcagcaagcccggcgtgatcttcctgaccaagaagggcagacaggtgtgcgccaagcccagcggccccggcgtgcaggactgcatgaagaagctgaagccctacagcatctga

SEQ ID NO: 4879 - RNA, 342 nt, synthetic construct
  misc_feature 1..342: note = derived and/or modified sequence opt5 fromCCL15__Homo_sapiens__AAB94617
  source 1..342: mol_type = other RNA
atgaaggtgagcgtcgccgctctgtcctgcctcatgctggttgccgtgcttggctctcaggcgcaattcatcaacgacgctgagaccgaactgatgatgagcaaactccccctggagaatcctgtggtccttaactcctttcacttcgccgccgattgttgcacatcttacattagccagtccatcccgtgttctctgatgaaaagctattttgaaacgtccagcgagtgctctaagcccggggtgattttcctcaccaagaaaggaagacaggtttgtgctaagccttccggccccggggtgcaggactgcatgaagaaactgaagccttacagcatctga

SEQ ID NO: 4880 - RNA, 342 nt, synthetic construct
  misc_feature 1..342: note = derived and/or modified sequence opt6 fromCCL15__Homo_sapiens__AAB94617
  source 1..342: mol_type = other RNA
atgaaagtatcagtagcagcactatcatgcctaatgttagtagcagtactaggatcacaagcacaattcataaacgacgcagaaacagaactaatgatgagcaaactaccactagaaaacccagtagtactaaactcattccacttcgcagcagactgctgcacatcatacatatcacaatcaataccatgctcactaatgaaatcatacttcgaaacatcatcagaatgctcaaaaccaggagtaatattcctaacaaaaaaaggaagacaagtatgcgcaaaaccatcaggaccaggagtacaagactgcatgaaaaaactaaaaccatactcaatataa

SEQ ID NO: 4881 - protein, 120 aa, synthetic construct
  REGION 1..120: note = CCL16__Homo_sapiens__O15467
MKVSEAALSLLVLILIITSASRSQPKVPEWVNTPSTCCLKYYEKVLPRRLVVGYRKALNCHLPAIIFVTKRNREVCTNPNDDWVQEYIKDPNLPLLPTRNLSTVKIITAKNGQPQLLNSQ

SEQ ID NO: 4882 - RNA, 363 nt, synthetic construct
  misc_feature 1..363: note = CCL16__Homo_sapiens__AAC05587
  source 1..363: mol_type = other RNA
atgaaggtctccgaggctgccctgtctctccttgtcctcatccttatcattacttcggcttctcgcagccagccaaaagttcctgagtgggtgaacaccccatccacctgctgcctgaagtattatgagaaagtgttgccaaggagactagtggtgggatacagaaaggccctcaactgtcacctgccagcaatcatcttcgtcaccaagaggaaccgagaagtctgcaccaaccccaatgacgactgggtccaagagtacatcaaggatcccaacctacctttgctgcctaccaggaacttgtccacggttaaaattattacagcaaagaatggtcaaccccagctcctcaactcccagtga

SEQ ID NO: 4883 - RNA, 363 nt, synthetic construct
  misc_feature 1..363: note = derived and/or modified sequence opt1 fromCCL16__Homo_sapiens__AAC05587
  source 1..363: mol_type = other RNA
atgaaggtgagcgaggccgccctgtccctcctggtcctgatcctcatcatcaccagcgcgtcccgcagccagcccaaggtgccggagtgggtgaacaccccctccacgtgctgcctgaagtactacgagaaggtcctgccccggcgcctcgtggtgggctaccggaaggccctgaactgccacctccccgccatcatcttcgtcaccaagcgcaaccgggaggtgtgcaccaacccgaacgacgactgggtgcaggagtacatcaaggaccccaacctgcccctgctgcccacccgcaacctcagcacggtcaagatcatcaccgccaagaacgggcagccgcagctgctgaactcccagtga

SEQ ID NO: 4884 - RNA, 363 nt, synthetic construct
  misc_feature 1..363: note = derived and/or modified sequence opt2 fromCCL16__Homo_sapiens__AAC05587
  source 1..363: mol_type = other RNA
atgaaggtctccgaggccgccctctccctcctcgtcctcatcctcatcatcacctccgcctcccgctcccagcccaaggtccccgagtgggtcaacaccccctccacctgctgcctcaagtactacgagaaggtcctcccccgccgcctcgtcgtcggctaccgcaaggccctcaactgccacctccccgccatcatcttcgtcaccaagcgcaaccgcgaggtctgcaccaaccccaacgacgactgggtccaggagtacatcaaggaccccaacctccccctcctccccacccgcaacctctccaccgtcaagatcatcaccgccaagaacggccagccccagctcctcaactcccagtga

SEQ ID NO: 4885 - RNA, 363 nt, synthetic construct
  misc_feature 1..363: note = derived and/or modified sequence opt3 fromCCL16__Homo_sapiens__AAC05587
  source 1..363: mol_type = other RNA
atgaaggtgagcgaggccgctctgtccctccttgtcctgatcttgattataacctctgcatcaagaagtcagcccaaagttcctgaatgggtgaacacaccaagcacttgctgtttaaagtactatgagaaagtactgccgaggcggctagtggtcggctaccgcaaggccctcaattgccaccttcccgcgatcattttcgtgacgaaacgaaaccgtgaagtttgtaccaatcctaacgacgattgggtgcaagagtatatcaaggacccaaatctgcccctgttgcctacaagaaacctctccactgtcaagattatcaccgctaaaaatgggcagccacagctgctgaactctcagtga

SEQ ID NO: 4886 - RNA, 363 nt, synthetic construct
  misc_feature 1..363: note = derived and/or modified sequence opt4 fromCCL16__Homo_sapiens__AAC05587
  source 1..363: mol_type = other RNA
atgaaggtgagcgaggccgccctgagcctgctggtgctgatcctgatcatcaccagcgccagcagaagccagcccaaggtgcccgagtgggtgaacacccccagcacctgctgcctgaagtactacgagaaggtgctgcccagaagactggtggtgggctacagaaaggccctgaactgccacctgcccgccatcatcttcgtgaccaagagaaacagagaggtgtgcaccaaccccaacgacgactgggtgcaggagtacatcaaggaccccaacctgcccctgctgcccaccagaaacctgagcaccgtgaagatcatcaccgccaagaacggccagccccagctgctgaacagccagtga

SEQ ID NO: 4887 - RNA, 363 nt, synthetic construct
  misc_feature 1..363: note = derived and/or modified sequence opt5 fromCCL16__Homo_sapiens__AAC05587
  source 1..363: mol_type = other RNA
atgaaggtgagcgaggccgctctgtccctcctggtccttatcctgattatcacctctgccagcagatcccagcccaaagttcctgaatgggtgaacacaccgtctacgtgctgtctcaagtactatgagaaagtgctgccccggcgccttgtcgtgggctacagaaaggcgctgaattgccacctccctgctattatcttcgttaccaaacggaaccgcgaagtgtgtacaaatcccaacgacgattgggtccaagagtatattaaggaccctaatctgcccctgctccctaccagaaacctgagcacagtgaagatcatcaccgccaaaaatgggcagccgcagcttctgaactcccagtga

SEQ ID NO: 4888 - RNA, 363 nt, synthetic construct
  misc_feature 1..363: note = derived and/or modified sequence opt6 fromCCL16__Homo_sapiens__AAC05587
  source 1..363: mol_type = other RNA
atgaaagtatcagaagcagcactatcactactagtactaatactaataataacatcagcatcaagatcacaaccaaaagtcccagaatgggtaaacacaccatcaacatgctgcctaaaatactacgaaaaagtactaccaagaagactagtagtaggatacagaaaagcactaaactgccacctaccagcaataatattcgtaacaaaaagaaacagagaagtatgcacaaacccaaacgacgactgggtacaagaatacataaaagacccaaacctaccactactaccaacaagaaacctatcaacagtcaaaataataacagcaaaaaacggacaaccacaactactaaactcacaataa

SEQ ID NO: 4889 - protein, 94 aa, synthetic construct
  REGION 1..94: note = CCL17__Homo_sapiens__Q92583
MAPLKMLALVTLLLGASLQHIHAARGTNVGRECCLEYFKGAIPLRKLKTWYQTSEDCSRDAIVFVTVQGRAICSDPNNKRVKNAVKYLQSLERS

SEQ ID NO: 4890 - RNA, 285 nt, synthetic construct
  misc_feature 1..285: note = CCL17__Homo_sapiens__AAH69107
  source 1..285: mol_type = other RNA
atggccccactgaagatgctggccctggtcaccctcctcctgggggcttctctgcagcacatccacgcagctcgagggaccaatgtgggccgggagtgctgcctggagtacttcaagggagccattccccttagaaagctgaagacgtggtaccagacatctgaggactgctccagggatgccatcgtttttgtaactgtgcagggcagggccatctgttcggaccccaacaacaagagagtgaagaatgcagttaaatacctgcaaagccttgagaggtcttga

SEQ ID NO: 4891 - RNA, 285 nt, synthetic construct
  misc_feature 1..285: note = derived and/or modified sequence opt1 fromCCL17__Homo_sapiens__AAH69107
  source 1..285: mol_type = other RNA
atggcgcccctgaagatgctcgccctggtgaccctgctcctgggcgccagcctgcagcacatccacgccgcccgcgggaccaacgtcggccgggagtgctgcctcgagtacttcaagggggccatcccgctgcgcaagctgaagacgtggtaccagacctccgaggactgcagccgggacgccatcgtgttcgtgaccgtccagggccgcgcgatctgctccgaccccaacaacaagcgggtgaagaacgccgtgaagtacctccagagcctggagcgctcctga

SEQ ID NO: 4892 - RNA, 285 nt, synthetic construct
  misc_feature 1..285: note = derived and/or modified sequence opt2 fromCCL17__Homo_sapiens__AAH69107
  source 1..285: mol_type = other RNA
atggcccccctcaagatgctcgccctcgtcaccctcctcctcggcgcctccctccagcacatccacgccgcccgcggcaccaacgtcggccgcgagtgctgcctcgagtacttcaagggcgccatccccctccgcaagctcaagacctggtaccagacctccgaggactgctcccgcgacgccatcgtcttcgtcaccgtccagggccgcgccatctgctccgaccccaacaacaagcgcgtcaagaacgccgtcaagtacctccagtccctcgagcgctcctga

SEQ ID NO: 4893 - RNA, 285 nt, synthetic construct
  misc_feature 1..285: note = derived and/or modified sequence opt3 fromCCL17__Homo_sapiens__AAH69107
  source 1..285: mol_type = other RNA
atggctcccctgaagatgctcgcccttgtgaccctgttgttaggcgcaagcctgcagcacatccatgccgcgagagggacaaacgtcggaagggagtgctgtctagaatacttcaaaggtgctattcctctccggaagctgaaaacttggtatcaaacgtccgaggactgctctcgcgatgccatagtttttgtgaccgtacagggccgagcaatctgttcagacccaaataacaagcgtgtgaaaaatgccgtcaagtaccttcagagtctggaaagaagctga

SEQ ID NO: 4894 - RNA, 285 nt, synthetic construct
  misc_feature 1..285: note = derived and/or modified sequence opt4 fromCCL17__Homo_sapiens__AAH69107
  source 1..285: mol_type = other RNA
atggcccccctgaagatgctggccctggtgaccctgctgctgggcgccagcctgcagcacatccacgccgccagaggcaccaacgtgggcagagagtgctgcctggagtacttcaagggcgccatccccctgagaaagctgaagacctggtaccagaccagcgaggactgcagcagagacgccatcgtgttcgtgaccgtgcagggcagagccatctgcagcgaccccaacaacaagagagtgaagaacgccgtgaagtacctgcagagcctggagagaagctga

SEQ ID NO: 4895 - RNA, 285 nt, synthetic construct
  misc_feature 1..285: note = derived and/or modified sequence opt5 fromCCL17__Homo_sapiens__AAH69107
  source 1..285: mol_type = other RNA
atggctcccctgaagatgctcgccctggtgacccttctgctcggcgccagcctgcagcacatccatgcggctagagggacaaacgtcggacgggagtgctgtcttgaatacttcaaaggcgccattcctctgcgcaagctcaaaacgtggtatcaaacctccgaggactgctctagagatgccatcgtttttgtgacagtgcaggggcgggctatttgtagcgacccgaataacaagcgcgtcaaaaatgccgtgaagtacctgcagtccctggaaagatcttga

SEQ ID NO: 4896 - RNA, 285 nt, synthetic construct
  misc_feature 1..285: note = derived and/or modified sequence opt6 fromCCL17__Homo_sapiens__AAH69107
  source 1..285: mol_type = other RNA
atggcaccactaaaaatgctagcactagtaacactattattaggagcatcactacaacacatacacgcagcaagaggaacaaacgtaggaagagaatgctgcctagaatacttcaaaggagcaataccactaagaaaactaaaaacatggtaccaaacatcagaagactgctcaagagacgcaatagtattcgtaacagtacaaggaagagcaatatgctcagacccaaacaacaaaagagtaaaaaacgcagtaaaatacctacaatcactagaaagatcataa

SEQ ID NO: 4897 - protein, 89 aa, synthetic construct
  REGION 1..89: note = CCL18__Homo_sapiens__P55774
MKGLAAALLVLVCTMALCSCAQVGTNKELCCLVYTSWQIPQKFIVDYSETSPQCPKPGVILLTKRGRQICADPNKKWVQKYISDLKLNA

SEQ ID NO: 4898 - RNA, 270 nt, synthetic construct
  misc_feature 1..270: note = CCL18__Homo_sapiens__AAC32287
  source 1..270: mol_type = other RNA
atgaagggccttgcagctgccctccttgtcctcgtctgcaccatggccctctgctcctgtgcacaagttggtaccaacaaagagctctgctgcctcgtctatacctcctggcagattccacaaaagttcatagttgactattctgaaaccagcccccagtgccccaagccaggtgtcatcctcctaaccaagagaggccggcagatctgtgctgaccccaataagaagtgggtccagaaatacatcagcgacctgaagctgaatgcctga

SEQ ID NO: 4899 - RNA, 270 nt, synthetic construct
  misc_feature 1..270: note = derived and/or modified sequence opt1 fromCCL18__Homo_sapiens__AAC32287
  source 1..270: mol_type = other RNA
atgaagggcctggccgccgcgctcctggtgctggtctgcaccatggccctctgcagctgcgcccaggtggggaccaacaaggagctgtgctgcctggtgtacacgtcctggcagatcccccagaagttcatcgtcgactacagcgagacctccccgcagtgccccaagcccggcgtgatcctcctgaccaagcgcgggcggcagatctgcgccgaccccaacaagaagtgggtgcagaagtacatcagcgacctgaagctcaacgcctga

SEQ ID NO: 4900 - RNA, 270 nt, synthetic construct
  misc_feature 1..270: note = derived and/or modified sequence opt2 fromCCL18__Homo_sapiens__AAC32287
  source 1..270: mol_type = other RNA
atgaagggcctcgccgccgccctcctcgtcctcgtctgcaccatggccctctgctcctgcgcccaggtcggcaccaacaaggagctctgctgcctcgtctacacctcctggcagatcccccagaagttcatcgtcgactactccgagacctccccccagtgccccaagcccggcgtcatcctcctcaccaagcgcggccgccagatctgcgccgaccccaacaagaagtgggtccagaagtacatctccgacctcaagctcaacgcctga

SEQ ID NO: 4901 - RNA, 270 nt, synthetic construct
  misc_feature 1..270: note = derived and/or modified sequence opt3 fromCCL18__Homo_sapiens__AAC32287
  source 1..270: mol_type = other RNA
atgaagggcctggccgctgcactccttgtgctggtctgcaccatggccttgtgtagctgcgcgcaggttgggacaaacaaagagttatgttgcctggtgtacacttcctggcaaatcccccagaagttcattgtagactattctgaaacgtcacctcagtgtccaaaaccgggagtgatactactcaccaagagaggtaggcagatctgcgctgatcccaataaaaagtgggtccaaaagtacattagtgacctgaaacttaacgcctga

SEQ ID NO: 4902 - RNA, 270 nt, synthetic construct
  misc_feature 1..270: note = derived and/or modified sequence opt4 fromCCL18__Homo_sapiens__AAC32287
  source 1..270: mol_type = other RNA
atgaagggcctggccgccgccctgctggtgctggtgtgcaccatggccctgtgcagctgcgcccaggtgggcaccaacaaggagctgtgctgcctggtgtacaccagctggcagatcccccagaagttcatcgtggactacagcgagaccagcccccagtgccccaagcccggcgtgatcctgctgaccaagagaggcagacagatctgcgccgaccccaacaagaagtgggtgcagaagtacatcagcgacctgaagctgaacgcctga

SEQ ID NO: 4903 - RNA, 270 nt, synthetic construct
  misc_feature 1..270: note = derived and/or modified sequence opt5 fromCCL18__Homo_sapiens__AAC32287
  source 1..270: mol_type = other RNA
atgaagggcctggccgctgccctcctggtgcttgtctgcaccatggcgctgtgtagctgcgctcaggttgggacaaacaaagagctctgttgcctggtgtacacgtcctggcaaatcccccagaagttcattgtggactattctgaaaccagccctcagtgtccgaaacccggagtcatccttctgacaaagagaggccggcagatttgcgccgatcctaataaaaagtgggtgcaaaagtacatctccgacctcaaactgaacgcctga

SEQ ID NO: 4904 - RNA, 270 nt, synthetic construct
  misc_feature 1..270: note = derived and/or modified sequence opt6 fromCCL18__Homo_sapiens__AAC32287
  source 1..270: mol_type = other RNA
atgaaaggactagcagcagcactactagtactagtatgcacaatggcactatgctcatgcgcacaagtaggaacaaacaaagaactatgctgcctagtatacacatcatggcaaataccacaaaaattcatagtagactactcagaaacatcaccacaatgcccaaaaccaggagtaatactactaacaaaaagaggaagacaaatatgcgcagacccaaacaaaaaatgggtacaaaaatacatatcagacctaaaactaaacgcataa

SEQ ID NO: 4905 - protein, 98 aa, synthetic construct
  REGION 1..98: note = CCL19__Homo_sapiens__Q6IBD6
MALLLALSLLVLWTSPAPTLSGTNDAEDCCLSVTQKPIPGYIVRNFHYLLIKDGCRVPAVVFTTLRGRQLCAPPDQPWVERIIQRLQRTSAKMKRRSS

SEQ ID NO: 4906 - RNA, 297 nt, synthetic construct
  misc_feature 1..297: note = CCL19__Homo_sapiens__ABK41949
  source 1..297: mol_type = other RNA
atggccctgctactggccctcagcctgctggttctctggacttccccagccccaactctgagtggcaccaatgatgctgaagactgctgcctgtctgtgacccagaaacccatccctgggtacatcgtgaggaacttccactaccttctcatcaaggatggctgcagggtgcctgctgtagtgttcaccacactgaggggccgccagctctgtgcacccccagaccagccctgggtagaacgcatcatccagagactgcagaggacctcagccaagatgaagcgccgcagcagttaa

SEQ ID NO: 4907 - RNA, 297 nt, synthetic construct
  misc_feature 1..297: note = derived and/or modified sequence opt1 fromCCL19__Homo_sapiens__ABK41949
  source 1..297: mol_type = other RNA
atggccctgctcctggccctgagcctcctggtgctgtggacctcccccgcgccgaccctcagcggcacgaacgacgccgaggactgctgcctgtccgtcacccagaagcccatccccgggtacatcgtgcgcaacttccactacctgctcatcaaggacggctgccgggtgcccgccgtcgtgttcaccaccctgcgcgggcggcagctgtgcgccccgcccgaccagccctgggtggagcgcatcatccagcggctccagcgcacgagcgccaagatgaagcggcgctccagctga

SEQ ID NO: 4908 - RNA, 297 nt, synthetic construct
  misc_feature 1..297: note = derived and/or modified sequence opt2 fromCCL19__Homo_sapiens__ABK41949
  source 1..297: mol_type = other RNA
atggccctcctcctcgccctctccctcctcgtcctctggacctcccccgcccccaccctctccggcaccaacgacgccgaggactgctgcctctccgtcacccagaagcccatccccggctacatcgtccgcaacttccactacctcctcatcaaggacggctgccgcgtccccgccgtcgtcttcaccaccctccgcggccgccagctctgcgccccccccgaccagccctgggtcgagcgcatcatccagcgcctccagcgcacctccgccaagatgaagcgccgctcctcctga

SEQ ID NO: 4909 - RNA, 297 nt, synthetic construct
  misc_feature 1..297: note = derived and/or modified sequence opt3 fromCCL19__Homo_sapiens__ABK41949
  source 1..297: mol_type = other RNA
atggccctgctccttgctctgagcttgttagtgctgtggacttcccccgcacctacactatctggcactaacgacgccgaggattgctgtctctcagtcacgcagaagccaatcccggggtacattgttagaaatttccactatctgcttataaaagacggatgcagggtgcccgcggtagtgtttaccacactgcggggtcgccaattgtgtgctcctccagatcagccctgggtcgaacgaatcattcagcgtctccagagaaccagtgccaagatgaaaaggcggagctcctga

SEQ ID NO: 4910 - RNA, 297 nt, synthetic construct
  misc_feature 1..297: note = derived and/or modified sequence opt4 fromCCL19__Homo_sapiens__ABK41949
  source 1..297: mol_type = other RNA
atggccctgctgctggccctgagcctgctggtgctgtggaccagccccgcccccaccctgagcggcaccaacgacgccgaggactgctgcctgagcgtgacccagaagcccatccccggctacatcgtgagaaacttccactacctgctgatcaaggacggctgcagagtgcccgccgtggtgttcaccaccctgagaggcagacagctgtgcgccccccccgaccagccctgggtggagagaatcatccagagactgcagagaaccagcgccaagatgaagagaagaagcagctga

SEQ ID NO: 4911 - RNA, 297 nt, synthetic construct
  misc_feature 1..297: note = derived and/or modified sequence opt5 fromCCL19__Homo_sapiens__ABK41949
  source 1..297: mol_type = other RNA
atggccctgctcctggcccttagcctgctcgtgctgtggacctcccccgcccctacactttctggcacgaacgacgcggaggattgctgtctgagcgtcacccagaagccgatccccgggtacattgttagaaatttccactatctcctgatcaaagacggatgccgggtgcctgctgtggtctttacaaccctgcgcggcagacaactctgtgctccccctgatcagccctgggtggaacggattatccagcgcctgcagagaacatccgccaagatgaaacggcgctctagctga

SEQ ID NO: 4912 - RNA, 297 nt, synthetic construct
  misc_feature 1..297: note = derived and/or modified sequence opt6 fromCCL19__Homo_sapiens__ABK41949
  source 1..297: mol_type = other RNA
atggcattactattagcattaagcttactagtactatggacatcaccagcaccaacactatcaggaacaaacgatgcagaagactgttgcttaagcgtaacacaaaaaccaataccaggatatatagtaagaaatttccattacttactaataaaagatggatgtagagtaccagcagtagtattcacaacattaagaggaagacaactatgtgcaccaccagatcaaccatgggtagaaagaataatacaaagattacaaagaacaagcgcaaaaatgaaaagaagatcaagctaa

SEQ ID NO: 4913 - protein, 98 aa, synthetic construct; identical to SEQ ID NO: 4905
  REGION 1..98: note = CCL19__Homo_sapiens__Q99731

SEQ ID NO: 4914 - RNA, 297 nt, synthetic construct; identical to SEQ ID NO: 4906
  misc_feature 1..297: note = CCL19__Homo_sapiens__AAC50944
  source 1..297: mol_type = other RNA

SEQ ID NO: 4915 - RNA, 297 nt, synthetic construct; identical to SEQ ID NO: 4907
  misc_feature 1..297: note = derived and/or modified sequence opt1 fromCCL19__Homo_sapiens__AAC50944
  source 1..297: mol_type = other RNA

SEQ ID NO: 4916 - RNA, 297 nt, synthetic construct; identical to SEQ ID NO: 4908
  misc_feature 1..297: note = derived and/or modified sequence opt2 fromCCL19__Homo_sapiens__AAC50944
  source 1..297: mol_type = other RNA

SEQ ID NO: 4917 - RNA, 297 nt, synthetic construct; identical to SEQ ID NO: 4909
  misc_feature 1..297: note = derived and/or modified sequence opt3 fromCCL19__Homo_sapiens__AAC50944
  source 1..297: mol_type = other RNA

SEQ ID NO: 4918 - RNA, 297 nt, synthetic construct; identical to SEQ ID NO: 4910
  misc_feature 1..297: note = derived and/or modified sequence opt4 fromCCL19__Homo_sapiens__AAC50944
  source 1..297: mol_type = other RNA

SEQ ID NO: 4919 - RNA, 297 nt, synthetic construct; identical to SEQ ID NO: 4911
  misc_feature 1..297: note = derived and/or modified sequence opt5 fromCCL19__Homo_sapiens__AAC50944
  source 1..297: mol_type = other RNA

SEQ ID NO: 4920 - RNA, 297 nt, synthetic construct
  misc_feature 1..297: note = derived and/or modified sequence opt6 fromCCL19__Homo_sapiens__AAC50944
  source 1..297: mol_type = other RNA
atggcattactattagcattatcattactagtactatggacatcaccagcaccaacactatcaggaacaaacgatgcagaagactgttgcttaagcgtaacacaaaaaccaataccaggatatatagtaagaaatttccattacttactaataaaagatggatgtagagtaccagcagtagtattcacaacattaagaggaagacaactatgtgcaccaccagatcaaccatgggtagaaagaataatacaaagactacaaagaacaagcgcaaaaatgaaaagaagatcaagctaa

SEQ ID NO: 4921 - protein, 96 aa, synthetic construct
  REGION 1..96: note = CCL1__Homo_sapiens__P22362
MQIITTALVCLLLAGMWPEDVDSKSMQVPFSRCCFSFAEQEIPLRAILCYRNTSSICSNEGLIFKLKRGKEACALDTVGWVQRHRKMLRHCPSKRK

SEQ ID NO: 4922 - RNA, 291 nt, synthetic construct
  misc_feature 1..291: note = CCL1__Homo_sapiens__AAA52705
  source 1..291: mol_type = other RNA
atgcagatcatcaccacagccctggtgtgcttgctgctagctgggatgtggccggaagatgtggacagcaagagcatgcaggtacccttctccagatgttgcttctcatttgcggagcaagagattcccctgagggcaatcctgtgttacagaaataccagctccatctgctccaatgagggcttaatattcaagctgaagagaggcaaagaggcctgcgccttggacacagttggatgggttcagaggcacagaaaaatgctgaggcactgcccgtcaaaaagaaaatga

SEQ ID NO: 4923 - RNA, 291 nt, synthetic construct
  misc_feature 1..291: note = derived and/or modified sequence opt1 fromCCL1__Homo_sapiens__AAA52705
  source 1..291: mol_type = other RNA
atgcagatcatcaccaccgccctggtgtgcctcctgctggccggcatgtggcccgaggacgtcgacagcaagtccatgcaggtcccgttcagccgctgctgcttctccttcgcggagcaggagatccccctccgggccatcctgtgctaccgcaacacgagctccatctgcagcaacgaggggctgatcttcaagctcaagcggggcaaggaggcctgcgccctggacaccgtggggtgggtgcagcgccaccggaagatgctgcgccactgcccctccaagcggaagtga

SEQ ID NO: 4924 - RNA, 291 nt, synthetic construct
  misc_feature 1..291: note = derived and/or modified sequence opt2 fromCCL1__Homo_sapiens__AAA52705
  source 1..291: mol_type = other RNA
atgcagatcatcaccaccgccctcgtctgcctcctcctcgccggcatgtggcccgaggacgtcgactccaagtccatgcaggtccccttctcccgctgctgcttctccttcgccgagcaggagatccccctccgcgccatcctctgctaccgcaacacctcctccatctgctccaacgagggcctcatcttcaagctcaagcgcggcaaggaggcctgcgccctcgacaccgtcggctgggtccagcgccaccgcaagatgctccgccactgcccctccaagcgcaagtga

SEQ ID NO: 4925 - RNA, 291 nt, synthetic construct
  misc_feature 1..291: note = derived and/or modified sequence opt3 fromCCL1__Homo_sapiens__AAA52705
  source 1..291: mol_type = other RNA
atgcagatcattaccacagccctggtgtgcctccttctggctggcatgtggcccgaggacgtcgatagcaagtccatgcaagttcctttctctagatgttgcttttcattcgcagaacaggagataccattgagggccatcttatgttaccggaacacgagtagcatttgctccaatgaagggctgatctttaaactaaagcgcggaaaagaggcgtgtgctctcgacactgtgggttgggtacagcgacaccgtaagatgctgagacattgcccgtctaaaaggaagtga

SEQ ID NO: 4926 - RNA, 291 nt, synthetic construct
  misc_feature 1..291: note = derived and/or modified sequence opt4 fromCCL1__Homo_sapiens__AAA52705
  source 1..291: mol_type = other RNA
atgcagatcatcaccaccgccctggtgtgcctgctgctggccggcatgtggcccgaggacgtggacagcaagagcatgcaggtgcccttcagcagatgctgcttcagcttcgccgagcaggagatccccctgagagccatcctgtgctacagaaacaccagcagcatctgcagcaacgagggcctgatcttcaagctgaagagaggcaaggaggcctgcgccctggacaccgtgggctgggtgcagagacacagaaagatgctgagacactgccccagcaagagaaagtga

SEQ ID NO: 4927 - RNA, 291 nt, synthetic construct
  misc_feature 1..291: note = derived and/or modified sequence opt5 fromCCL1__Homo_sapiens__AAA52705
  source 1..291: mol_type = other RNA
atgcagatcattaccacagccctggtgtgcctcctgcttgctggcatgtggcccgaggacgtcgatagcaagtccatgcaagttcctttctctagatgttgctttagcttcgccgaacaggagatcccgctgcgggcgattctctgttaccgcaacacgtcctctatctgcagcaatgaagggctgatttttaaacttaagagaggaaaagaggcttgtgccctggacaccgtgggctgggtgcagcggcaccgcaagatgctcagacattgcccctccaaacggaagtga

SEQ ID NO: 4928 - RNA, 291 nt, synthetic construct
  misc_feature 1..291: note = derived and/or modified sequence opt6 fromCCL1__Homo_sapiens__AAA52705
  source 1..291: mol_type = other RNA
atgcaaataataacaacagcattagtatgtctattactagcaggaatgtggccagaagatgtagatagcaaaagcatgcaagtaccatttagcagatgctgtttctcattcgcagaacaagaaataccattaagagcaatattatgctatagaaatacatcaagcatatgctcaaacgaaggattaatatttaaattaaaaagaggaaaagaagcatgcgcactagatacagtaggatgggtacaaagacatagaaaaatgttaagacattgcccaagcaaaagaaaataa

SEQ ID NO: 4929 - protein, 96 aa, synthetic construct
  REGION 1..96: note = CCL20__Homo_sapiens__P78556
MCCTKSLLLAALMSVLLLHLCGESEAASNFDCCLGYTDRILHPKFIVGFTRQLANEGCDINAIIFHTKKKLSVCANPKQTWVKYIVRLLSKKVKNM

SEQ ID NO: 4930 - RNA, 291 nt, synthetic construct
  misc_feature 1..291: note = CCL20__Homo_sapiens__AAC50943
  source 1..291: mol_type = other RNA
atgtgctgtaccaagagtttgctcctggctgctttgatgtcagtgctgctactccacctctgcggcgaatcagaagcagcaagcaactttgactgctgtcttggatacacagaccgtattcttcatcctaaatttattgtgggcttcacacggcagctggccaatgaaggctgtgacatcaatgctatcatctttcacacaaagaaaaagttgtctgtgtgcgcaaatccaaaacagacttgggtgaaatatattgtgcgtctcctcagtaaaaaagtcaagaacatgtaa

SEQ ID NO: 4931 - RNA, 291 nt, synthetic construct
  misc_feature 1..291: note = derived and/or modified sequence opt1 fromCCL20__Homo_sapiens__AAC50943
  source 1..291: mol_type = other RNA
atgtgctgcaccaagagcctgctcctggccgccctgatgtccgtgctcctgctgcacctctgcggcgagagcgaggcggcctccaacttcgactgctgcctggggtacaccgaccgcatcctgcaccccaagttcatcgtcggcttcacgcggcagctcgccaacgaggggtgcgacatcaacgccatcatcttccacaccaagaagaagctgagcgtgtgcgccaacccgaagcagacctgggtgaagtacatcgtccgcctgctctccaagaaggtgaagaacatgtga

SEQ ID NO: 4932 - RNA, 291 nt, synthetic construct
  misc_feature 1..291: note = derived and/or modified sequence opt2 fromCCL20__Homo_sapiens__AAC50943
  source 1..291: mol_type = other RNA
atgtgctgcaccaagtccctcctcctcgccgccctcatgtccgtcctcctcctccacctctgcggcgagtccgaggccgcctccaacttcgactgctgcctcggctacaccgaccgcatcctccaccccaagttcatcgtcggcttcacccgccagctcgccaacgagggctgcgacatcaacgccatcatcttccacaccaagaagaagctctccgtctgcgccaaccccaagcagacctgggtcaagtacatcgtccgcctcctctccaagaaggtcaagaacatgtga

SEQ ID NO: 4933 - RNA, 291 nt, synthetic construct
  misc_feature 1..291: note = derived and/or modified sequence opt3 fromCCL20__Homo_sapiens__AAC50943
  source 1..291: mol_type = other RNA
atgtgctgtaccaagagcctgctccttgccgctctgatgtccgtgttgttactgcacctatgcggcgagtctgaagcagcctcaaacttcgactgttgcctcgggtacacagatagaatcctgcatcccaaatttattgtcggattcactaggcagcttgcgaatgagggttgtgacataaacgctatcatttttcacacgaagaaaaagctgagtgtttgcgccaatcctaaacaaacctgggtgaagtatatcgtacggttgctcagcaagaaagtgaagaacatgtga

SEQ ID NO: 4934 - RNA, 291 nt, synthetic construct
  misc_feature 1..291: note = derived and/or modified sequence opt4 fromCCL20__Homo_sapiens__AAC50943
  source 1..291: mol_type = other RNA
atgtgctgcaccaagagcctgctgctggccgccctgatgagcgtgctgctgctgcacctgtgcggcgagagcgaggccgccagcaacttcgactgctgcctgggctacaccgacagaatcctgcaccccaagttcatcgtgggcttcaccagacagctggccaacgagggctgcgacatcaacgccatcatcttccacaccaagaagaagctgagcgtgtgcgccaaccccaagcagacctgggtgaagtacatcgtgagactgctgagcaagaaggtgaagaacatgtga

SEQ ID NO: 4935 - RNA, 291 nt, synthetic construct
  misc_feature 1..291: note = derived and/or modified sequence opt5 fromCCL20__Homo_sapiens__AAC50943
  source 1..291: mol_type = other RNA
atgtgctgtaccaagagcctgctcctggccgctcttatgtccgtgctgctcctgcacctttgcggcgagtctgaagccgcgagcaacttcgactgttgcctggggtacacagatagaatcctccatcccaaatttattgtcggattcacgcggcagctggctaatgagggctgtgacatcaacgccattatctttcacaccaagaaaaagctgtccgtttgcgccaatcctaaacaaacatgggtgaagtatattgtgcgcctcctgtctaagaaagtcaagaacatgtga

SEQ ID NO: 4936 - RNA, 291 nt, synthetic construct
  misc_feature 1..291: note = derived and/or modified sequence opt6 fromCCL20__Homo_sapiens__AAC50943
  source 1..291: mol_type = other RNA
atgtgctgcacaaaatcactactactagcagcactaatgtcagtactattactacacctatgcggagaatcagaagcagcatcaaacttcgactgctgcctaggatacacagacagaatactacacccaaaattcatagtaggattcacaagacaactagcaaacgaaggatgcgacataaacgcaataatattccacacaaaaaaaaaactatcagtatgcgcaaacccaaaacaaacatgggtaaaatacatagtaagactactatcaaaaaaagtaaaaaacatgtaa

SEQ ID NO: 4937 - protein, 134 aa, synthetic construct
  REGION 1..134: note = CCL21__Homo_sapiens__O00585
MAQSLALSLLILVLAFGIPRTQGSDGGAQDCCLKYSQRKIPAKVVRSYRKQEPSLGCSIPAILFLPRKRSQAELCADPKELWVQQLMQHLDKTPSPQKPAQGCRKDRGASKTGKKGKGSKGCKRTERSQTPKGP

SEQ ID NO: 4938 - RNA, 405 nt, synthetic construct
  misc_feature 1..405: note = CCL21__Homo_sapiens__AAB86594
  source 1..405: mol_type = other RNA
atggctcagtcactggctctgagcctccttatcctggttctggcctttggaatccccaggacccaaggcagtgatggaggggctcaggactgttgcctcaagtacagccaaaggaagattcccgccaaggttgtccgcagctaccggaagcaggaaccaagcttaggctgctccatcccagctatcctgttcttgccccgcaagcgctctcaggcagagctatgtgcagacccaaaggagctctgggtgcagcagctgatgcagcatctggacaagacaccatccccacagaaaccagcccagggctgcaggaaggacaggggggcctccaagactggcaagaaaggaaagggctccaaaggctgcaagaggactgagcggtcacagacccctaaagggccatag

SEQ ID NO: 4939 - RNA, 405 nt, synthetic construct
  misc_feature 1..405: note = derived and/or modified sequence opt1 fromCCL21__Homo_sapiens__AAB86594
  source 1..405: mol_type = other RNA
atggcccagagcctggccctctccctgctgatcctcgtgctggcgttcggcatcccccgcacccaggggagcgacggcggggcccaggactgctgcctgaagtactcccagcggaagatcccggccaaggtcgtgcgcagctaccggaagcaggagccctccctcggctgcagcatccccgccatcctgttcctgccccgcaagcggtcccaggccgagctctgcgcggacccgaaggagctgtgggtgcagcagctgatgcagcacctcgacaagacccccagcccccagaagcccgcccaggggtgccgcaaggaccggggcgcctccaagacgggcaagaaggggaagggcagcaaggggtgcaagcgcaccgagcggtcccagaccccgaagggcccctga

SEQ ID NO: 4940 - RNA, 405 nt, synthetic construct
  misc_feature 1..405: note = derived and/or modified sequence opt2 fromCCL21__Homo_sapiens__AAB86594
  source 1..405: mol_type = other RNA
atggcccagtccctcgccctctccctcctcatcctcgtcctcgccttcggcatcccccgcacccagggctccgacggcggcgcccaggactgctgcctcaagtactcccagcgcaagatccccgccaaggtcgtccgctcctaccgcaagcaggagccctccctcggctgctccatccccgccatcctcttcctcccccgcaagcgctcccaggccgagctctgcgccgaccccaaggagctctgggtccagcagctcatgcagcacctcgacaagaccccctccccccagaagcccgcccagggctgccgcaaggaccgcggcgcctccaagaccggcaagaagggcaagggctccaagggctgcaagcgcaccgagcgctcccagacccccaagggcccctga

SEQ ID NO: 4941 - RNA, 405 nt, synthetic construct
  misc_feature 1..405: note = derived and/or modified sequence opt3 fromCCL21__Homo_sapiens__AAB86594
  source 1..405: mol_type = other RNA
atggcccagagcctggctctctcccttctgatcttggtgttagcattcggcattcccagaacccaagggtctgacggaggtgcccaggattgctgtctgaagtactcacagaggaaaatacctgcgaaggtcgttcggagttatcgcaaacaggagccaagcctaggctgctccatcccggctattctctttctgccccgaaagcgttctcaagccgaactttgtgcagaccctaaagagctgtgggtgcagcagttgatgcagcacctcgataagacaccatcgccccaaaagcctgcccaggggtgcagaaaagacaggggagcttcaaagactggcaaaaagggtaaagggagcaagggatgtaagcggacggaacgcagtcagaccccaaaaggcccctga

SEQ ID NO: 4942 - RNA, 405 nt, synthetic construct
  misc_feature 1..405: note = derived and/or modified sequence opt4 fromCCL21__Homo_sapiens__AAB86594
  source 1..405: mol_type = other RNA
atggcccagagcctggccctgagcctgctgatcctggtgctggccttcggcatccccagaacccagggcagcgacggcggcgcccaggactgctgcctgaagtacagccagagaaagatccccgccaaggtggtgagaagctacagaaagcaggagcccagcctgggctgcagcatccccgccatcctgttcctgcccagaaagagaagccaggccgagctgtgcgccgaccccaaggagctgtgggtgcagcagctgatgcagcacctggacaagacccccagcccccagaagcccgcccagggctgcagaaaggacagaggcgccagcaagaccggcaagaagggcaagggcagcaagggctgcaagagaaccgagagaagccagacccccaagggcccctga

SEQ ID NO: 4943 - RNA, 405 nt, synthetic construct
  misc_feature 1..405: note = derived and/or modified sequence opt5 fromCCL21__Homo_sapiens__AAB86594
  source 1..405: mol_type = other RNA
atggcccagagcctggctctctccctgcttatcctggtgctcgccttcggcattcccagaacccaagggtctgacggaggcgcgcaggattgctgtctgaagtacagccagcggaaaatccctgctaaggtcgttcgctcctatagaaaacaggagccgtctcttgggtgcagcattcccgccatcctgtttctccctcggaagcgctcccaagccgaactgtgtgctgaccccaaagagctgtgggtgcagcagctcatgcagcacctggataagacaccttctccccaaaagcctgcccagggatgcagaaaagaccggggcgctagcaagacggggaaaaagggaaaaggctccaagggctgtaagcgcaccgaaagaagccagacaccgaaagggccctga

SEQ ID NO: 4944 - RNA, 405 nt, synthetic construct
  misc_feature 1..405: note = derived and/or modified sequence opt6 fromCCL21__Homo_sapiens__AAB86594
  source 1..405: mol_type = other RNA
atggcacaatcattagcactatcactactaatactagtattagcattcggaataccaagaacacaaggatcagacggaggagcacaagactgctgcctaaaatactcacaaagaaaaataccagcaaaagtagtaagatcatacagaaaacaagaaccatcactaggatgctcaataccagcaatactattcctaccaagaaaaagatcacaagcagaactatgcgcagacccaaaagaactatgggtacaacaactcatgcaacacttagacaaaacaccaagcccacaaaaaccagcacaaggatgcagaaaagacagaggagcatcaaaaacaggaaaaaaaggaaaaggatcaaaaggatgcaaaagaacagaacgatcacaaacaccaaaaggaccataa

SEQ ID NO: 4945 - protein, 93 aa, synthetic construct
  REGION 1..93: note = CCL22__Homo_sapiens__O00626
MDRLQTALLVVLVLLAVALQATEAGPYGANMEDSVCCRDYVRYRLPLRVVKHFYWTSDSCPRPGVVLLTFRDKEICADPRVPWVKMILNKLSQ

SEQ ID NO: 4946 - RNA, 282 nt, synthetic construct
  misc_feature 1..282: note = CCL22__Homo_sapiens__BAG34909
  source 1..282: mol_type = other RNA
atggatcgcctacagactgcactcctggttgtcctcgtcctccttgctgtggcgcttcaagcaactgaggcaggcccctacggcgccaacatggaagacagcgtctgctgccgtgattacgtccgttaccgtctgcccctgcgcgtggtgaaacacttctactggacctcagactcctgcccgaggcctggcgtggtgttgctaaccttcagggataaggagatctgtgccgatcccagagtgccctgggtgaagatgattctcaataagctgagccaatga

SEQ ID NO: 4947 - RNA, 282 nt, synthetic construct
  misc_feature 1..282: note = derived and/or modified sequence opt1 fromCCL22__Homo_sapiens__BAG34909
  source 1..282: mol_type = other RNA
atggaccgcctgcagaccgccctcctggtggtcctggtgctcctggccgtggcgctgcaggccaccgaggccggcccctacggggccaacatggaggacagcgtctgctgccgggactacgtgcgctaccggctcccgctgcgcgtggtcaagcacttctactggacgtccgacagctgcccccggcccggcgtggtgctgctcaccttccgcgacaaggagatctgcgccgacccccgggtcccgtgggtgaagatgatcctgaacaagctgtcccagtga

SEQ ID NO: 4948 - RNA, 282 nt, synthetic construct
  misc_feature 1..282: note = derived and/or modified sequence opt2 fromCCL22__Homo_sapiens__BAG34909
  source 1..282: mol_type = other RNA
atggaccgcctccagaccgccctcctcgtcgtcctcgtcctcctcgccgtcgccctccaggccaccgaggccggcccctacggcgccaacatggaggactccgtctgctgccgcgactacgtccgctaccgcctccccctccgcgtcgtcaagcacttctactggacctccgactcctgcccccgccccggcgtcgtcctcctcaccttccgcgacaaggagatctgcgccgacccccgcgtcccctgggtcaagatgatcctcaacaagctctcccagtga

SEQ ID NO: 4949 - RNA, 282 nt, synthetic construct
  misc_feature 1..282: note = derived and/or modified sequence opt3 fromCCL22__Homo_sapiens__BAG34909
  source 1..282: mol_type = other RNA
atggacagactgcagaccgccctccttgtggtcctggttttgttagctgtggcactgcaagccacagaggcgggcccctacggggctaacatggaagatagcgtatgctgtagggactatgtgcggtaccgcctacctctccgagtcgtgaagcacttctattggacttccgattcttgcccacgtccgggagttgtgctgcttacgtttagagacaaagagatctgtgccgatcccagggtcccttgggtgaagatgattctgaataaattgtcacagtga

SEQ ID NO: 4950 - RNA, 282 nt, synthetic construct
  misc_feature 1..282: note = derived and/or modified sequence opt4 fromCCL22__Homo_sapiens__BAG34909
  source 1..282: mol_type = other RNA
atggacagactgcagaccgccctgctggtggtgctggtgctgctggccgtggccctgcaggccaccgaggccggcccctacggcgccaacatggaggacagcgtgtgctgcagagactacgtgagatacagactgcccctgagagtggtgaagcacttctactggaccagcgacagctgccccagacccggcgtggtgctgctgaccttcagagacaaggagatctgcgccgaccccagagtgccctgggtgaagatgatcctgaacaagctgagccagtga

SEQ ID NO: 4951 - RNA, 282 nt, synthetic construct
  misc_feature 1..282: note = derived and/or modified sequence opt5 fromCCL22__Homo_sapiens__BAG34909
  source 1..282: mol_type = other RNA
atggacagactgcagaccgccctcctggtggtccttgttctgctcgctgtggccctgcaagcgacagaggctggcccctacggggccaacatggaagatagcgtgtgctgtcgggactatgtccgctacagacttcctctgcgggtggttaagcacttctattggacgtccgattcttgcccgcgccccggagtggtcctcctgacctttagagacaaagagatctgtgccgatcctcgggtgccctgggttaagatgattctgaataaactcagccagtga

SEQ ID NO: 4952 - RNA, 282 nt, synthetic construct
  misc_feature 1..282: note = derived and/or modified sequence opt6 fromCCL22__Homo_sapiens__BAG34909
  source 1..282: mol_type = other RNA
atggacagactacaaacagcactattagtagtactagtactattagcagtagcattacaagcaacagaagcaggaccatatggagcaaacatggaagatagcgtatgctgtagagattacgtaagatatagattaccattaagagtagtaaaacacttttactggacatcagactcatgcccaagaccaggagtagtattactaacattcagagacaaagaaatatgcgcagacccaagagtaccatgggtaaaaatgatactaaataaattaagccaataa

SEQ ID NO: 4953 - protein, 119 aa, synthetic construct
  REGION 1..119: note = CCL24__Homo_sapiens__O00175
MAGLMTIVTSLLFLGVCAHHIIPTGSVVIPSPCCMFFVSKRIPENRVVSYQLSSRSTCLKAGVIFTTKKGQQFCGDPKQEWVQRYMKNLDAKQKKASPRARAVAVKGPVQRYPGNQTTC

SEQ ID NO: 4954 - RNA, 360 nt, synthetic construct
  misc_feature 1..360: note = CCL24__Homo_sapiens__AAD15410
  source 1..360: mol_type = other RNA
atggcaggcctgatgaccatagtaaccagccttctgttccttggtgtctgtgcccaccacatcatccctacgggctctgtggtcatcccctctccctgctgcatgttctttgtttccaagagaattcctgagaaccgagtggtcagctaccagctgtccagcaggagcacatgcctcaaggcaggagtgatcttcaccaccaagaagggccagcagttctgtggcgaccccaagcaggagtgggtccagaggtacatgaagaacctggacgccaagcagaagaaggcttcccctagggccagggcagtggctgtcaagggccctgtccagagatatcctggcaaccaaaccacctgctaa

SEQ ID NO: 4955 - RNA, 360 nt, synthetic construct
  misc_feature 1..360: note = derived and/or modified sequence opt1 fromCCL24__Homo_sapiens__AAD15410
  source 1..360: mol_type = other RNA
atggccggcctgatgaccatcgtgaccagcctcctgttcctgggggtctgcgcccaccacatcatccccacgggctccgtggtgatcccgagcccctgctgcatgttcttcgtctccaagcgcatccccgagaaccgggtggtgagctaccagctctccagccgctccacctgcctgaaggcgggggtcatcttcaccaccaagaagggccagcagttctgcggggaccccaagcaggagtgggtgcagcggtacatgaagaacctggacgccaagcagaagaaggccagcccgcgcgcccgggccgtggcggtcaagggccccgtgcagcgctaccccggcaaccagacgacctgctga

SEQ ID NO: 4956 - RNA, 360 nt, synthetic construct
  misc_feature 1..360: note = derived and/or modified sequence opt2 fromCCL24__Homo_sapiens__AAD15410
  source 1..360: mol_type = other RNA
atggccggcctcatgaccatcgtcacctccctcctcttcctcggcgtctgcgcccaccacatcatccccaccggctccgtcgtcatcccctccccctgctgcatgttcttcgtctccaagcgcatccccgagaaccgcgtcgtctcctaccagctctcctcccgctccacctgcctcaaggccggcgtcatcttcaccaccaagaagggccagcagttctgcggcgaccccaagcaggagtgggtccagcgctacatgaagaacctcgacgccaagcagaagaaggcctccccccgcgcccgcgccgtcgccgtcaagggccccgtccagcgctaccccggcaaccagaccacctgctga

SEQ ID NO: 4957 - RNA, 360 nt, synthetic construct
  misc_feature 1..360: note = derived and/or modified sequence opt3 fromCCL24__Homo_sapiens__AAD15410
  source 1..360: mol_type = other RNA
atggccggcctgatgaccatcgtgacaagcctccttttcctgggggtctgcgctcaccatattatacccactggatccgttgtgatcccttctccatgttgcatgtttttcgtatcaaagaggattccggagaacagagtggtcagttaccagttgagctcccggtctacgtgtttaaaagccggtgtgatctttaccacaaagaaaggccaacagttctgcggggaccccaagcaggaatgggttcagcgctatatgaaaaatctggatgcaaagcaaaagaaagcgtcgcctcgagctcgtgccgtggcagtcaagggaccagtgcagagataccccggcaaccagactacctgttga

SEQ ID NO: 4958 - RNA, 360 nt, synthetic construct
  misc_feature 1..360: note = derived and/or modified sequence opt4 fromCCL24__Homo_sapiens__AAD15410
  source 1..360: mol_type = other RNA
atggccggcctgatgaccatcgtgaccagcctgctgttcctgggcgtgtgcgcccaccacatcatccccaccggcagcgtggtgatccccagcccctgctgcatgttcttcgtgagcaagagaatccccgagaacagagtggtgagctaccagctgagcagcagaagcacctgcctgaaggccggcgtgatcttcaccaccaagaagggccagcagttctgcggcgaccccaagcaggagtgggtgcagagatacatgaagaacctggacgccaagcagaagaaggccagccccagagccagagccgtggccgtgaagggccccgtgcagagataccccggcaaccagaccacctgctga

SEQ ID NO: 4959 - RNA, 360 nt, synthetic construct
  misc_feature 1..360: note = derived and/or modified sequence opt5 fromCCL24__Homo_sapiens__AAD15410
  source 1..360: mol_type = other RNA
atggccggcctgatgaccatcgtgacaagcctcctgttccttggggtctgcgctcaccatattatccccacgggatccgttgtgattccttctccgtgttgcatgtttttcgtgagcaagagaatccccgagaaccgggtcgtgtcctaccagctgtctagccgctccacctgtctcaaagccggcgttatttttacaaccaagaaagggcaacagttctgcggagaccctaagcaggaatgggtgcagagatatatgaaaaatctggatgcgaagcaaaagaaggcttctccccgggcccgcgccgtcgctgtgaaaggccctgttcagagataccccgggaaccagacaacctgttga

SEQ ID NO: 4960 - RNA, 360 nt, synthetic construct
  misc_feature 1..360: note = derived and/or modified sequence opt6 fromCCL24__Homo_sapiens__AAD15410
  source 1..360: mol_type = other RNA
atggcaggattaatgacaatagtaacatcactattattcttaggagtatgcgcacaccatataataccaacaggatcagtagtaataccaagcccatgctgtatgtttttcgtaagcaaaagaataccagaaaacagagtagtaagctatcaattaagctcaagatcaacatgtctaaaagcaggagtaatattcacaacaaaaaaaggacaacaattctgtggagacccaaaacaagaatgggtacaaagatacatgaaaaatctagacgcaaaacaaaaaaaagcaagcccaagagcaagagcagtagcagtaaaaggaccagtacaaagatatccaggaaaccaaacaacatgctaa

SEQ ID NO: 4961 - protein, 150 aa, synthetic construct
  REGION 1..150: note = CCL25__Homo_sapiens__O15444
MNLWLLACLVAGFLGAWAPAVHTQGVFEDCCLAYHYPIGWAVLRRAWTYRIQEVSGSCNLPAAIFYLPKRHRKVCGNPKSREVQRAMKLLDARNKVFAKLHHNTQTFQAGPHAVKKLSSGNSKLSSSKFSNPISSSKRNVSLLISANSGL

SEQ ID NO: 4962 - RNA, 453 nt, synthetic construct
  misc_feature 1..453: note = CCL25__Homo_sapiens__AAI30562
  source 1..453: mol_type = other RNA
atgaacctgtggctcctggcctgcctggtggccggcttcctgggagcctgggcccccgctgtccacacccaaggtgtctttgaggactgctgcctggcctaccactaccccattgggtgggctgtgctccggcgcgcctggacttaccggatccaggaggtgagcgggagctgcaatctgcctgctgcgatattctacctccccaagagacacaggaaggtgtgtgggaaccccaaaagcagggaggtgcagagagccatgaagctcctggatgctcgaaataaggtttttgcaaagctccaccacaacacgcagaccttccaagcaggccctcatgctgtaaagaagttgagttctggaaactccaagttatcatcatccaagtttagcaatcccatcagcagcagcaagaggaatgtctccctcctgatatcagctaattcaggactgtga

SEQ ID NO: 4963 - RNA, 453 nt, synthetic construct
  misc_feature 1..453: note = derived and/or modified sequence opt1 fromCCL25__Homo_sapiens__AAI30562
  source 1..453: mol_type = other RNA
atgaacctgtggctcctggcctgcctggtggccggcttcctcggggcgtgggcccccgccgtccacacccagggcgtgttcgaggactgctgcctggcctaccactacccgatcgggtgggccgtgctgcgccgggcgtggacctaccgcatccaggaggtcagcggctcctgcaacctccccgccgccatcttctacctgcccaagcggcaccgcaaggtgtgcgggaaccccaagagccgggaggtgcagcgcgccatgaagctgctcgacgcgcggaacaaggtcttcgccaagctgcaccacaacacgcagaccttccaggccggcccgcacgccgtgaagaagctgtccagcggcaactccaagctcagctccagcaagttctccaaccccatcagctccagcaagcgcaacgtgtccctgctgatcagcgccaactccgggctctga

SEQ ID NO: 4964 - RNA, 453 nt, synthetic construct
  misc_feature 1..453: note = derived and/or modified sequence opt2 fromCCL25__Homo_sapiens__AAI30562
  source 1..453: mol_type = other RNA
atgaacctctggctcctcgcctgcctcgtcgccggcttcctcggcgcctgggcccccgccgtccacacccagggcgtcttcgaggactgctgcctcgcctaccactaccccatcggctgggccgtcctccgccgcgcctggacctaccgcatccaggaggtctccggctcctgcaacctccccgccgccatcttctacctccccaagcgccaccgcaaggtctgcggcaaccccaagtcccgcgaggtccagcgcgccatgaagctcctcgacgcccgcaacaaggtcttcgccaagctccaccacaacacccagaccttccaggccggcccccacgccgtcaagaagctctcctccggcaactccaagctctcctcctccaagttctccaaccccatctcctcctccaagcgcaacgtctccctcctcatctccgccaactccggcctctga

SEQ ID NO: 4965 - RNA, 453 nt, synthetic construct
  misc_feature 1..453: note = derived and/or modified sequence opt3 fromCCL25__Homo_sapiens__AAI30562
  source 1..453: mol_type = other RNA
atgaacctgtggctccttgcctgcctggtggctggcttcttgggggcatgggcccccgcggtccacacccagggagtttttgaggactgttgcttagcttaccattatcctatcggttgggccgtgctgagaagggcatggacataccggattcaagaagtaagcggctcctgtaatctaccagccgctatattctatctcccgaagcgccaccgaaaagtgtgcgggaaccccaagtctcgtgaggtccagagagcaatgaaactgcttgatgccaggaataaggtgtttgctaaactgcatcacaacactcagacgttccaggccggacctcatgcggttaagaagttgtcaagtggcaatagcaaactctcctcttcgaagttttcaaacccaatcagcagttccaaacggaatgtgtctctgctgattagcgcaaactccggtctctga

SEQ ID NO: 4966 - RNA, 453 nt, synthetic construct
  misc_feature 1..453: note = derived and/or modified sequence opt4 fromCCL25__Homo_sapiens__AAI30562
  source 1..453: mol_type = other RNA
atgaacctgtggctgctggcctgcctggtggccggcttcctgggcgcctgggcccccgccgtgcacacccagggcgtgttcgaggactgctgcctggcctaccactaccccatcggctgggccgtgctgagaagagcctggacctacagaatccaggaggtgagcggcagctgcaacctgcccgccgccatcttctacctgcccaagagacacagaaaggtgtgcggcaaccccaagagcagagaggtgcagagagccatgaagctgctggacgccagaaacaaggtgttcgccaagctgcaccacaacacccagaccttccaggccggcccccacgccgtgaagaagctgagcagcggcaacagcaagctgagcagcagcaagttcagcaaccccatcagcagcagcaagagaaacgtgagcctgctgatcagcgccaacagcggcctgtga

SEQ ID NO: 4967 - RNA, 453 nt, synthetic construct
  misc_feature 1..453: note = derived and/or modified sequence opt5 fromCCL25__Homo_sapiens__AAI30562
  source 1..453: mol_type = other RNA
atgaacctgtggctcctggcctgccttgtggctggcttcctgggggcctgggcgcccgctgtccacacccagggagtttttgaggactgttgcctcgcctaccattatcctatcggctgggccgtgctgagacgggcttggacataccgcattcaagaagtgagcgggtcctgtaatcttccggccgctatcttctatctgcccaagagacaccggaaagtctgcggaaaccctaagtctcgcgaggtgcagagagccatgaaactcctggatgcgcggaataaggtttttgccaaactgcatcacaacacgcagaccttccaggctggcccccatgccgtgaagaagctcagctccggaaattctaaactgagctcctctaagtttagcaaccctatttccagctctaaacgcaatgtctcccttctgatcagcgctaactctgggctctga

SEQ ID NO: 4968 - RNA, 453 nt, synthetic construct
  misc_feature 1..453: note = derived and/or modified sequence opt6 fromCCL25__Homo_sapiens__AAI30562
  source 1..453: mol_type = other RNA
atgaatctatggctactagcctgcctagtagcaggattcctaggagcatgggcaccagcagtacacacacaaggagtattcgaagactgctgcctagcataccactacccaataggatgggcagtactaagaagagcatggacatacagaatacaagaagtatcaggatcatgcaacttaccagcagcaatattctacctaccaaaaagacacagaaaagtatgcggaaacccaaaatcaagagaagtacaaagagcaatgaaactactagacgcaagaaacaaagtattcgcaaaactacaccacaacacacaaacattccaagcaggaccacacgcagtaaaaaaattatcatcaggcaactccaaactatcatcatcaaaattctcaaacccaatatcatcatcaaaaagaaacgtatcactactaatatcagcaaactcaggactataa

SEQ ID NO: 4969 - protein, 94 aa, synthetic construct
  REGION 1..94: note = CCL26__Homo_sapiens__Q9Y258
MMGLSLASAVLLASLLSLHLGTATRGSDISKTCCFQYSHKPLPWTWVRSYEFTSNSCSQRAVIFTTKRGKKVCTHPRKKWVQKYISLLKTPKQL

SEQ ID NO: 4970 - RNA, 285 nt, synthetic construct
  misc_feature 1..285: note = CCL26__Homo_sapiens__AAD15411
  source 1..285: mol_type = other RNA
atgatgggcctctccttggcctctgctgtgctcctggcctccctcctgagtctccaccttggaactgccacacgtgggagtgacatatccaagacctgctgcttccaatacagccacaagccccttccctggacctgggtgcgaagctatgaattcaccagtaacagctgctcccagcgggctgtgatattcactaccaaaagaggcaagaaagtctgtacccatccaaggaaaaaatgggtgcaaaaatacatttctttactgaaaactccgaaacaattgtga

SEQ ID NO: 4971 - RNA, 285 nt, synthetic construct
  misc_feature 1..285: note = derived and/or modified sequence opt1 fromCCL26__Homo_sapiens__AAD15411
  source 1..285: mol_type = other RNA
atgatgggcctgagcctcgcctccgccgtgctgctggcgagcctcctgtccctgcacctcgggaccgccacccgcggcagcgacatctccaagacgtgctgcttccagtacagccacaagcccctgccgtggacctgggtccggtcctacgagttcaccagcaactcctgcagccagcgcgccgtgatcttcaccacgaagcgggggaagaaggtgtgcacccacccccgcaagaagtgggtccagaagtacatctccctgctcaagacccccaagcagctgtga

SEQ ID NO: 4972 - RNA, 285 nt, synthetic construct
  misc_feature 1..285: note = derived and/or modified sequence opt2 fromCCL26__Homo_sapiens__AAD15411
  source 1..285: mol_type = other RNA
atgatgggcctctccctcgcctccgccgtcctcctcgcctccctcctctccctccacctcggcaccgccacccgcggctccgacatctccaagacctgctgcttccagtactcccacaagcccctcccctggacctgggtccgctcctacgagttcacctccaactcctgctcccagcgcgccgtcatcttcaccaccaagcgcggcaagaaggtctgcacccacccccgcaagaagtgggtccagaagtacatctccctcctcaagacccccaagcagctctga

SEQ ID NO: 4973 - RNA, 285 nt, synthetic construct
  misc_feature 1..285: note = derived and/or modified sequence opt3 fromCCL26__Homo_sapiens__AAD15411
  source 1..285: mol_type = other RNA
atgatgggcctgagcctcgcctccgctgtgcttctggcatctttgttatcactgcacctagggaccgccacaagaggaagtgacatcagcaagacttgctgtttccagtactcccataaacccctcccttggacgtgggtcaggtcttatgagtttacctcgaactcatgcagccaacgggcggttattttcacaactaagcgcggtaaaaaggtgtgtacccacccacgaaagaaatgggtacagaagtacataagtctgcttaaaacaccgaagcagctgtga

SEQ ID NO: 4974 - RNA, 285 nt, synthetic construct
  misc_feature 1..285: note = derived and/or modified sequence opt4 fromCCL26__Homo_sapiens__AAD15411
  source 1..285: mol_type = other RNA
atgatgggcctgagcctggccagcgccgtgctgctggccagcctgctgagcctgcacctgggcaccgccaccagaggcagcgacatcagcaagacctgctgcttccagtacagccacaagcccctgccctggacctgggtgagaagctacgagttcaccagcaacagctgcagccagagagccgtgatcttcaccaccaagagaggcaagaaggtgtgcacccaccccagaaagaagtgggtgcagaagtacatcagcctgctgaagacccccaagcagctgtga

SEQ ID NO: 4975 - RNA, 285 nt, synthetic construct
  misc_feature 1..285: note = derived and/or modified sequence opt5 fromCCL26__Homo_sapiens__AAD15411
  source 1..285: mol_type = other RNA
atgatgggcctgagcctcgcctccgctgtgctgcttgcctctctgctcagcctgcaccttgggaccgcgacaagaggatccgacatctctaagacgtgctgtttccagtacagccataaacccctgccttggacctgggtccggtcctatgagtttacatctaacagctgctcccaacgcgctgttattttcaccacaaagagaggcaaaaaggtgtgtacccacccgcggaaaaagtgggtgcagaagtacatcagcctcctgaaaacacccaagcagctgtga

SEQ ID NO: 4976 - RNA, 285 nt, synthetic construct
  misc_feature 1..285: note = derived and/or modified sequence opt6 fromCCL26__Homo_sapiens__AAD15411
  source 1..285: mol_type = other RNA
atgatgggactatcactagcatcagcagtactactagcatcactactatcactacacctaggaacagcaacaagaggatcagacatatcaaaaacatgctgcttccaatactcacacaaaccactaccatggacatgggtaagatcatacgaattcacatcaaactcatgctcacaaagagcagtaatattcacaacaaaaagaggaaaaaaagtatgcacacacccaagaaaaaaatgggtacaaaaatacatatcactactaaaaacaccaaaacaactataa

SEQ ID NO: 4977 - protein, 112 aa, synthetic construct
  REGION 1..112: note = CCL27__Homo_sapiens__Q5VZ77
MKGPPTFCSLLLLSLLLSPDPTAAFLLPPSTACCTQLYRKPLSDKLLRKVIQVELQEADGDCHLQAFVLHLAQRSICIHPQNPSLSQWFEHQERKLHGTLPKLNFGMLRKMG

SEQ ID NO: 4978 - RNA, 339 nt, synthetic construct
  misc_feature 1..339: note = CCL27__Homo_sapiens__AAI48264
  source 1..339: mol_type = other RNA
atgaaggggcccccaaccttctgcagcctcctgctgctgtcattgctcctgagcccagaccctacagcagcattcctactgccacccagcactgcctgctgtactcagctctaccgaaagccactctcagacaagctactgaggaaggtcatccaggtggaactgcaggaggctgacggggactgtcacctccaggctttcgtgcttcacctggctcaacgcagcatctgcatccacccccagaaccccagcctgtcacagtggtttgagcaccaagagagaaagctccatgggactctgcccaagctgaattttgggatgctaaggaaaatgggctag

SEQ ID NO: 4979 - RNA, 339 nt, synthetic construct
  misc_feature 1..339: note = derived and/or modified sequence opt1 fromCCL27__Homo_sapiens__AAI48264
  source 1..339: mol_type = other RNA
atgaaggggcccccgaccttctgcagcctgctcctgctgtccctcctgctgagccccgaccccaccgccgccttcctcctgcccccgtccacggcgtgctgcacccagctgtaccgcaagcccctcagcgacaagctgctgcggaaggtgatccaggtcgagctccaggaggccgacggcgactgccacctccaggccttcgtgctgcacctggcccagcgctccatctgcatccacccccagaaccccagcctgtcccagtggttcgagcaccaggagcggaagctgcacggcaccctcccgaagctgaacttcgggatgctgcgcaagatgggctga

SEQ ID NO: 4980 - RNA, 339 nt, synthetic construct
  misc_feature 1..339: note = derived and/or modified sequence opt2 fromCCL27__Homo_sapiens__AAI48264
  source 1..339: mol_type = other RNA
atgaagggcccccccaccttctgctccctcctcctcctctccctcctcctctcccccgaccccaccgccgccttcctcctccccccctccaccgcctgctgcacccagctctaccgcaagcccctctccgacaagctcctccgcaaggtcatccaggtcgagctccaggaggccgacggcgactgccacctccaggccttcgtcctccacctcgcccagcgctccatctgcatccacccccagaacccctccctctcccagtggttcgagcaccaggagcgcaagctccacggcaccctccccaagctcaacttcggcatgctccgcaagatgggctga

SEQ ID NO: 4981 - RNA, 339 nt, synthetic construct
  misc_feature 1..339: note = derived and/or modified sequence opt3 fromCCL27__Homo_sapiens__AAI48264
  source 1..339: mol_type = other RNA
atgaaggggccccctaccttctgcagcctgctccttctgtccttgttactgtctccagacccgacagccgcttttctactgcccccttcaactgcatgttgcacgcagctgtacagaaaaccacttagtgataagctgttgaggaaagtgatccaagtcgagctccaggaagccgacggcgattgtcacctccaggcgttcgttctgcatctcgctcagcggagcatttgcatacacccccaaaacccttccttatctcagtggtttgagcatcaggaacgcaagctgcacggaacccttccaaaattgaatttcggtatgctgcgaaagatgggctga

SEQ ID NO: 4982 - RNA, 339 nt, synthetic construct
  misc_feature 1..339: note = derived and/or modified sequence opt4 fromCCL27__Homo_sapiens__AAI48264
  source 1..339: mol_type = other RNA
atgaagggcccccccaccttctgcagcctgctgctgctgagcctgctgctgagccccgaccccaccgccgccttcctgctgccccccagcaccgcctgctgcacccagctgtacagaaagcccctgagcgacaagctgctgagaaaggtgatccaggtggagctgcaggaggccgacggcgactgccacctgcaggccttcgtgctgcacctggcccagagaagcatctgcatccacccccagaaccccagcctgagccagtggttcgagcaccaggagagaaagctgcacggcaccctgcccaagctgaacttcggcatgctgagaaagatgggctga

SEQ ID NO: 4983 - RNA, 339 nt, synthetic construct
  misc_feature 1..339: note = derived and/or modified sequence opt5 fromCCL27__Homo_sapiens__AAI48264
  source 1..339: mol_type = other RNA
atgaaggggccccctaccttctgcagcctgctcctgctttccctgctcctgtctccggaccccacagccgcttttcttctgcctcccagcacggcctgttgcacccagctctacagaaaacctctgtccgataagctgctccggaaagtgatccaagtcgagctgcaggaagcggacggcgattgtcaccttcaggctttcgttctgcatctcgcccagcgctctatttgcatccacccccaaaaccctagcctgtcccagtggtttgagcatcaggaaagaaaacttcacggaacactgccgaagctcaatttcggcatgctgcggaagatggggtga

SEQ ID NO: 4984 - RNA, 339 nt, synthetic construct
  misc_feature 1..339: note = derived and/or modified sequence opt6 fromCCL27__Homo_sapiens__AAI48264
  source 1..339: mol_type = other RNA
atgaaaggaccaccaacattctgctcactactactactatcactactactatcacccgacccaacagcagcattcctattaccaccatcaacagcatgctgcacacaactatacagaaaaccactatcagacaaactactaagaaaagtaatacaagtagaactacaagaagcagacggagactgccacctacaagcattcgtactacacctagcacaaagatcaatatgcatacacccacaaaacccatcactatcacaatggttcgaacaccaagaaagaaaactacacggaacactaccaaaactaaacttcggaatgctaagaaaaatgggataa

SEQ ID NO: 4985 - protein, 127 aa, synthetic construct
  REGION 1..127: note = CCL28__Homo_sapiens__A0N0Q3
MQQRGLAIVALAVCAALHASEAILPIASSCCTEVSHHISRRLLERVNMCRIQRADGDCDLAAVILHVKRRRICVSPHNHTVKQWMKVQAAKKNGKGNVCHRKKHHGKRNSNRAHQGKHETYGHKTPY

SEQ ID NO: 4986 - RNA, 384 nt, synthetic construct
  misc_feature 1..384: note = CCL28__Homo_sapiens__ABK41944
  source 1..384: mol_type = other RNA
atgcagcagagaggactcgccatcgtggccttggctgtctgtgcggccctacatgcctcagaagccatacttcccattgcctccagctgttgcacggaggtttcacatcatatttccagaaggctcctggaaagagtgaatatgtgtcgcatccagagagctgatggggattgtgacttggctgctgtcatccttcatgtcaagcgcagaagaatctgtgtcagcccgcacaaccatactgttaagcagtggatgaaagtgcaagctgccaagaaaaatggtaaaggaaatgtttgccacaggaagaaacaccatggcaagaggaacagtaacagggcacatcaggggaaacacgaaacatacggccataaaactccttattag

SEQ ID NO: 4987 - RNA, 384 nt, synthetic construct
  misc_feature 1..384: note = derived and/or modified sequence opt1 fromCCL28__Homo_sapiens__ABK41944
  source 1..384: mol_type = other RNA
atgcagcagcgcggcctggccatcgtggccctcgcggtctgcgccgccctgcacgccagcgaggccatcctgcccatcgcgtccagctgctgcaccgaggtgtcccaccacatcagccggcgcctcctggagcgggtgaacatgtgccgcatccagcgggccgacggggactgcgacctggccgccgtcatcctccacgtgaagcgccggcgcatctgcgtgtccccgcacaaccacaccgtcaagcagtggatgaaggtgcaggcggccaagaagaacggcaaggggaacgtgtgccaccggaagaagcaccacggcaagcgcaacagcaaccgggcccaccaggggaagcacgagacgtacggccacaagaccccctactga

SEQ ID NO: 4988 - RNA, 384 nt, synthetic construct
  misc_feature 1..384: note = derived and/or modified sequence opt2 fromCCL28__Homo_sapiens__ABK41944
  source 1..384: mol_type = other RNA
atgcagcagcgcggcctcgccatcgtcgccctcgccgtctgcgccgccctccacgcctccgaggccatcctccccatcgcctcctcctgctgcaccgaggtctcccaccacatctcccgccgcctcctcgagcgcgtcaacatgtgccgcatccagcgcgccgacggcgactgcgacctcgccgccgtcatcctccacgtcaagcgccgccgcatctgcgtctccccccacaaccacaccgtcaagcagtggatgaaggtccaggccgccaagaagaacggcaagggcaacgtctgccaccgcaagaagcaccacggcaagcgcaactccaaccgcgcccaccagggcaagcacgagacctacggccacaagaccccctactga

SEQ ID NO: 4989 - RNA, 384 nt, synthetic construct
  misc_feature 1..384: note = derived and/or modified sequence opt3 fromCCL28__Homo_sapiens__ABK41944
  source 1..384: mol_type = other RNA
atgcagcaaagaggcctggccatcgtggctctcgcagtctgcgccgcgcttcacgctagcgaggccattctgcccatagcatcctcttgttgcaccgaagtttcacatcacatcagtaggcggttgttagagcgcgtgaacatgtgtcgtattcagcgagccgacggggattgcgacctggctgcagtaatcctacatgtgaagagaaggcggatttgtgtcagccctcacaatcatacagtgaaacagtggatgaaggttcaggccgctaaaaagaacggaaaaggtaatgtgtgccaccgcaagaagcaccatggcaaaagaaactccaatagggcccaccaagggaagcatgaaacttacggacacaaaacgccatattga

SEQ ID NO: 4990 - RNA, 384 nt, synthetic construct
  misc_feature 1..384: note = derived and/or modified sequence opt4 fromCCL28__Homo_sapiens__ABK41944
  source 1..384: mol_type = other RNA
atgcagcagagaggcctggccatcgtggccctggccgtgtgcgccgccctgcacgccagcgaggccatcctgcccatcgccagcagctgctgcaccgaggtgagccaccacatcagcagaagactgctggagagagtgaacatgtgcagaatccagagagccgacggcgactgcgacctggccgccgtgatcctgcacgtgaagagaagaagaatctgcgtgagcccccacaaccacaccgtgaagcagtggatgaaggtgcaggccgccaagaagaacggcaagggcaacgtgtgccacagaaagaagcaccacggcaagagaaacagcaacagagcccaccagggcaagcacgagacctacggccacaagaccccctactga

SEQ ID NO: 4991 - RNA, 384 nt, synthetic construct
  misc_feature 1..384: note = derived and/or modified sequence opt5 fromCCL28__Homo_sapiens__ABK41944
  source 1..384: mol_type = other RNA
atgcagcaaagaggcctggccatcgtggctctcgccgtctgcgcggctctgcacgccagcgaggccattcttcccatcgcttcctcttgttgcaccgaagttagccatcacatttcccggcgcctgctcgagagagtgaacatgtgtcggatccagcgcgccgacggggattgcgacctggctgccgtgattcttcatgtcaagagacggcgcatctgtgtgtctcctcacaatcatacagttaaacagtggatgaaggtgcaggcggccaaaaagaacggaaaaggcaatgtctgccacagaaagaagcaccatgggaaacggaacagcaatcgcgctcaccaaggaaagcatgaaacgtacggccacaaaaccccgtattga

SEQ ID NO: 4992 - RNA, 384 nt, synthetic construct
  misc_feature 1..384: note = derived and/or modified sequence opt6 fromCCL28__Homo_sapiens__ABK41944
  source 1..384: mol_type = other RNA
atgcaacaaagaggactagcaatagtagcattagcagtatgcgcagcattacacgcgagcgaagcaatactaccaatagcaagcagttgctgtacagaagtatcacaccatatatcaagaagactattagaaagagtaaatatgtgtagaatacaaagagcagatggagattgcgatctagcagcagtaatattacacgtaaaaagaagaagaatatgtgtatcaccacataaccatacagtaaaacaatggatgaaagtacaagcagcaaaaaaaaatggaaaaggaaatgtatgtcacagaaaaaaacaccatggaaaaagaaatagcaatagagcacaccaaggaaaacacgaaacatacggacataaaacaccatattaa

SEQ ID NO: 4993 - protein, 127 aa, synthetic construct; identical to SEQ ID NO: 4985
  REGION 1..127: note = CCL28__Homo_sapiens__Q9NRJ3

SEQ ID NO: 4994 - RNA, 384 nt, synthetic construct; identical to SEQ ID NO: 4986
  misc_feature 1..384: note = CCL28__Homo_sapiens__AAF87205
  source 1..384: mol_type = other RNA

SEQ ID NO: 4995 - RNA, 384 nt, synthetic construct; identical to SEQ ID NO: 4987
  misc_feature 1..384: note = derived and/or modified sequence opt1 fromCCL28__Homo_sapiens__AAF87205
  source 1..384: mol_type = other RNA

SEQ ID NO: 4996 - RNA, 384 nt, synthetic construct; identical to SEQ ID NO: 4988
  misc_feature 1..384: note = derived and/or modified sequence opt2 fromCCL28__Homo_sapiens__AAF87205
  source 1..384: mol_type = other RNA

SEQ ID NO: 4997 - RNA, 384 nt, synthetic construct; identical to SEQ ID NO: 4989
  misc_feature 1..384: note = derived and/or modified sequence opt3 fromCCL28__Homo_sapiens__AAF87205
  source 1..384: mol_type = other RNA

SEQ ID NO: 4998 - RNA, 384 nt, synthetic construct; identical to SEQ ID NO: 4990
  misc_feature 1..384: note = derived and/or modified sequence opt4 fromCCL28__Homo_sapiens__AAF87205
  source 1..384: mol_type = other RNA

SEQ ID NO: 4999 - RNA, 384 nt, synthetic construct; identical to SEQ ID NO: 4991
  misc_feature 1..384: note = derived and/or modified sequence opt5 fromCCL28__Homo_sapiens__AAF87205
  source 1..384: mol_type = other RNA

SEQ ID NO: 5000 - RNA, 384 nt, synthetic construct
  misc_feature 1..384: note = derived and/or modified sequence opt6 fromCCL28__Homo_sapiens__AAF87205
  source 1..384: mol_type = other RNA
atgcaacaaagaggactagcaatagtagcattagcagtatgcgcagcattacacgcaagcgaagcaatactaccaatagcaagctcatgctgtacagaagtatcacaccatatatcaagaagactattagaaagagtaaatatgtgcagaatacaaagagcagatggagactgcgacctcgcagcagtaatattacacgtaaaaagaagaagaatatgtgtatcaccacataaccatacagtaaaacaatggatgaaagtacaagcagcaaaaaaaaatggaaaaggaaatgtatgtcacagaaaaaaacaccatggaaaaagaaatagcaatagagcacaccaaggaaaacacgaaacatacggacataaaacaccatattaa

SEQ ID NO: 5001 - protein, 99 aa, synthetic construct
  REGION 1..99: note = CCL2__Homo_sapiens__P13500
MKVSAALLCLLLIAATFIPQGLAQPDAINAPVTCCYNFTNRKISVQRLASYRRITSSKCPKEAVIFKTIVAKEICADPKQKWVQDSMDHLDKQTQTPKT

SEQ ID NO: 5002 - RNA, 300 nt, synthetic construct
  misc_feature 1..300: note = CCL2__Homo_sapiens__AAA18102
  source 1..300: mol_type = other RNA
atgaaagtctctgccgcccttctgtgcctgctgctcatagcagccaccttcattccccaagggctcgctcagccagatgcaatcaatgccccagtcacctgctgctataacttcaccaataggaagatctcagtgcagaggctcgcgagctatagaagaatcaccagcagcaagtgtcccaaagaagctgtgatcttcaagaccattgtggccaaggagatctgtgctgaccccaagcagaagtgggttcaggattccatggaccacctggacaagcaaacccaaactccgaagacttga

SEQ ID NO: 5003 - RNA, 300 nt, synthetic construct
  misc_feature 1..300: note = derived and/or modified sequence opt1 fromCCL2__Homo_sapiens__AAA18102
  source 1..300: mol_type = other RNA
atgaaggtgagcgccgccctgctctgcctgctgctcatcgcggccaccttcatcccccagggcctggcccagccggacgccatcaacgcccccgtgacctgctgctacaacttcacgaaccgcaagatctccgtccagcggctggcgagctaccgccggatcacctccagcaagtgccccaaggaggccgtgatcttcaagaccatcgtcgccaaggagatctgcgccgaccccaagcagaagtgggtgcaggactccatggaccacctcgacaagcagacccagacgccgaagacctga

SEQ ID NO: 5004 - RNA, 300 nt, synthetic construct
  misc_feature 1..300: note = derived and/or modified sequence opt2 fromCCL2__Homo_sapiens__AAA18102
  source 1..300: mol_type = other RNA
atgaaggtctccgccgccctcctctgcctcctcctcatcgccgccaccttcatcccccagggcctcgcccagcccgacgccatcaacgcccccgtcacctgctgctacaacttcaccaaccgcaagatctccgtccagcgcctcgcctcctaccgccgcatcacctcctccaagtgccccaaggaggccgtcatcttcaagaccatcgtcgccaaggagatctgcgccgaccccaagcagaagtgggtccaggactccatggaccacctcgacaagcagacccagacccccaagacctga

SEQ ID NO: 5005 - RNA, 300 nt, synthetic construct
  misc_feature 1..300: note = derived and/or modified sequence opt3 fromCCL2__Homo_sapiens__AAA18102
  source 1..300: mol_type = other RNA
atgaaggtgagcgccgctctgctctgccttctgttgatcgcagccaccttcattccccagggcttagcgcaacctgacgctataaacgccccagtcacatgttgctacaattttactaacagaaaaatctccgttcagaggctggcatcttatcggcgcattacgtcaagtaagtgtccgaaagaggccgtgatcttcaagaccattgtagctaaagaaatctgcgcagatcccaagcagaagtgggtgcaggacagcatggatcacctagacaaacaaacacagactcctaagacctga

SEQ ID NO: 5006 - RNA, 300 nt, synthetic construct
  misc_feature 1..300: note = derived and/or modified sequence opt4 fromCCL2__Homo_sapiens__AAA18102
  source 1..300: mol_type = other RNA
atgaaggtgagcgccgccctgctgtgcctgctgctgatcgccgccaccttcatcccccagggcctggcccagcccgacgccatcaacgcccccgtgacctgctgctacaacttcaccaacagaaagatcagcgtgcagagactggccagctacagaagaatcaccagcagcaagtgccccaaggaggccgtgatcttcaagaccatcgtggccaaggagatctgcgccgaccccaagcagaagtgggtgcaggacagcatggaccacctggacaagcagacccagacccccaagacctga

SEQ ID NO: 5007 - RNA, 300 nt, synthetic construct
  misc_feature 1..300: note = derived and/or modified sequence opt5 fromCCL2__Homo_sapiens__AAA18102
  source 1..300: mol_type = other RNA
atgaaggtgagcgccgctctgctctgcctgcttctgatcgccgcgaccttcattccccagggcctcgctcaacctgacgccatcaacgccccggtcacatgttgctacaattttacgaacagaaaaatttccgttcagcggctggcttcttatcgcagaatcaccagctccaagtgtcccaaagaggccgtgattttcaagacaatcgtggctaaagaaatctgcgccgatcctaagcagaagtgggtccaggactctatggatcaccttgacaaacaaacccagacacccaagacctga

SEQ ID NO: 5008 - RNA, 300 nt, synthetic construct
  misc_feature 1..300: note = derived and/or modified sequence opt6 fromCCL2__Homo_sapiens__AAA18102
  source 1..300: mol_type = other RNA
atgaaagtatcagcagcactactatgcctactactaatagcagcaacattcataccacaaggattagcacaaccagacgcaataaacgcaccagtaacatgctgctacaacttcacaaacagaaaaatatcagtacaaagactagcatcatacagaagaataacatcatcaaaatgcccaaaagaagcagtaatattcaaaacaatagtagcaaaagaaatatgcgcagacccaaaacaaaaatgggtacaagactcaatggaccacctagacaaacaaacacaaacaccaaaaacataa

SEQ ID NO: 5009 - protein, 92 aa, synthetic construct
  REGION 1..92: note = CCL3__Homo_sapiens__A0N0R1
MQVSTAALAVLLCTMALCNQFSASLAADTPTACCFSYTSRQIPQNFIADYFETSSQCSKPGVIFLTKRSRQVCADPSEEWVQKYVSDLELSA

SEQ ID NO: 5010 - RNA, 279 nt, synthetic construct
  misc_feature 1..279: note = CCL3__Homo_sapiens__AAI71831
  source 1..279: mol_type = other RNA
atgcaggtctccactgctgcccttgctgtcctcctctgcaccatggctctctgcaaccagttctctgcatcacttgctgctgacacgccgaccgcctgctgcttcagctacacctcccggcagattccacagaatttcatagctgactactttgagacgagcagccagtgctccaagcctggtgtcatcttcctaaccaagcgaagccggcaggtctgtgctgaccccagtgaggagtgggtccagaaatatgtcagcgacctggagctgagtgcctga

SEQ ID NO: 5011 - RNA, 279 nt, synthetic construct
  misc_feature 1..279: note = derived and/or modified sequence opt1 fromCCL3__Homo_sapiens__AAI71831
  source 1..279: mol_type = other RNA
atgcaggtcagcaccgccgccctggcggtgctcctgtgcaccatggccctgtgcaaccagttctccgccagcctcgccgccgacacgcccaccgcgtgctgcttctcctacaccagccgccagatcccgcagaacttcatcgccgactacttcgagacctccagccagtgctccaagcccggcgtgatcttcctgacgaagcggagccgccaggtgtgcgccgacccctccgaggagtgggtccagaagtacgtgagcgacctggagctctccgcctga

SEQ ID NO: 5012 - RNA, 279 nt, synthetic construct
  misc_feature 1..279: note = derived and/or modified sequence opt2 fromCCL3__Homo_sapiens__AAI71831
  source 1..279: mol_type = other RNA
atgcaggtctccaccgccgccctcgccgtcctcctctgcaccatggccctctgcaaccagttctccgcctccctcgccgccgacacccccaccgcctgctgcttctcctacacctcccgccagatcccccagaacttcatcgccgactacttcgagacctcctcccagtgctccaagcccggcgtcatcttcctcaccaagcgctcccgccaggtctgcgccgacccctccgaggagtgggtccagaagtacgtctccgacctcgagctctccgcctga

SEQ ID NO: 5013 - RNA, 279 nt, synthetic construct
  misc_feature 1..279: note = derived and/or modified sequence opt3 fromCCL3__Homo_sapiens__AAI71831
  source 1..279: mol_type = other RNA
atgcaagtgagcaccgccgctctggcagtcctcctttgcacaatggccctgtgtaaccagttctccgcgtctttggctgccgacactcccacggcatgctgtttttcatacaccagtagacagatccctcagaatttcattgccgattattttgagacaagctcccagtgctctaagccaggcgttatattcttaactaaaaggtcgcggcaagtgtgtgctgacccgtcagaagagtgggtacagaagtacgtgagcgatctggaactaagtgcatga

SEQ ID NO: 5014 - RNA, 279 nt, synthetic construct
  misc_feature 1..279: note = derived and/or modified sequence opt4 fromCCL3__Homo_sapiens__AAI71831
  source 1..279: mol_type = other RNA
atgcaggtgagcaccgccgccctggccgtgctgctgtgcaccatggccctgtgcaaccagttcagcgccagcctggccgccgacacccccaccgcctgctgcttcagctacaccagcagacagatcccccagaacttcatcgccgactacttcgagaccagcagccagtgcagcaagcccggcgtgatcttcctgaccaagagaagcagacaggtgtgcgccgaccccagcgaggagtgggtgcagaagtacgtgagcgacctggagctgagcgcctga

SEQ ID NO: 5015 - RNA, 279 nt, synthetic construct
  misc_feature 1..279: note = derived and/or modified sequence opt5 fromCCL3__Homo_sapiens__AAI71831
  source 1..279: mol_type = other RNA
atgcaagtgagcaccgccgctctggccgtcctcctgtgcacaatggcgctttgtaaccagttctccgcttctctggccgccgacacgcccaccgcttgctgttttagctacacatccagacagatccctcagaatttcattgccgattattttgagacctctagccagtgctccaagccgggcgttatcttcctcacaaaacggtctcgccaagtgtgtgctgaccccagcgaagagtgggtgcagaagtacgtctccgatctggaacttagcgcctga

SEQ ID NO: 5016 - RNA, 279 nt, synthetic construct
  misc_feature 1..279: note = derived and/or modified sequence opt6 fromCCL3__Homo_sapiens__AAI71831
  source 1..279: mol_type = other RNA
atgcaagtatcaacagcagcactagcagtactactatgcacaatggcactatgcaaccaattctcagcatcactagcagcagacacaccaacagcatgctgcttctcatacacatcaagacaaataccacaaaacttcatagcagactacttcgaaacatcatcacaatgctcaaaaccaggagtaatattcctaacaaaaagatcaagacaagtatgcgcagacccatcagaagaatgggtacaaaaatacgtatcagacctagaactatcagcataa

SEQ ID NO: 5017 - protein, 92 aa, synthetic construct; identical to SEQ ID NO: 5009
  REGION 1..92: note = CCL3__Homo_sapiens__P10147

SEQ ID NO: 5018 - RNA, 279 nt, synthetic construct
  misc_feature 1..279: note = CCL3__Homo_sapiens__AAA35858
  source 1..279: mol_type = other RNA
atgcaggtctccactgctgcccttgctgtcctcctctgcaccatggctctctgcaaccagttctctgcatcacttgctgctgacacgccgaccgcctgctgcttcagctacacctcccggcagattccacagaatttcatagctgactactttgagacgagcagccagtgctccaagcccggtgtcatcttcctaaccaagcgaagccggcaggtctgtgctgaccccagtgaggagtgggtccagaaatatgtcagcgacctggagctgagtgcctga

SEQ ID NO: 5019 - RNA, 279 nt, synthetic construct; identical to SEQ ID NO: 5011
  misc_feature 1..279: note = derived and/or modified sequence opt1 fromCCL3__Homo_sapiens__AAA35858
  source 1..279: mol_type = other RNA

SEQ ID NO: 5020 - RNA, 279 nt, synthetic construct; identical to SEQ ID NO: 5012
  misc_feature 1..279: note = derived and/or modified sequence opt2 fromCCL3__Homo_sapiens__AAA35858
  source 1..279: mol_type = other RNA

SEQ ID NO: 5021 - RNA, 279 nt, synthetic construct; identical to SEQ ID NO: 5013
  misc_feature 1..279: note = derived and/or modified sequence opt3 fromCCL3__Homo_sapiens__AAA35858
  source 1..279: mol_type = other RNA

SEQ ID NO: 5022 - RNA, 279 nt, synthetic construct; identical to SEQ ID NO: 5014
  misc_feature 1..279: note = derived and/or modified sequence opt4 fromCCL3__Homo_sapiens__AAA35858
  source 1..279: mol_type = other RNA

SEQ ID NO: 5023 - RNA, 279 nt, synthetic construct; identical to SEQ ID NO: 5015
  misc_feature 1..279: note = derived and/or modified sequence opt5 fromCCL3__Homo_sapiens__AAA35858
  source 1..279: mol_type = other RNA

SEQ ID NO: 5024 - RNA, 279 nt, synthetic construct
  misc_feature 1..279: note = derived and/or modified sequence opt6 fromCCL3__Homo_sapiens__AAA35858
  source 1..279: mol_type = other RNA
atgcaagtatcaacagcagcactagcagtactactatgcacaatggcactatgcaaccaattctcagcatcactagcagcagacacaccaacagcatgctgcttctcatacacatcaagacaaataccacaaaacttcatagcagactacttcgaaacatcatcacaatgctcaaaaccaggagtaatattcttaacaaaaagatcaagacaagtatgcgcagacccatcagaagaatgggtacaaaaatacgtatcagacctagaactatcagcataa

SEQ ID NO: 5025 - protein, 92 aa, synthetic construct
  REGION 1..92: note = CCL4__Homo_sapiens__P13236
MKLCVTVLSLLMLVAAFCSPALSAPMGSDPPTACCFSYTARKLPRNFVVDYYETSSLCSQPAVVFQTKRSKQVCADPSESWVQEYVYDLELN

SEQ ID NO: 5026 - RNA, 279 nt, synthetic construct
  misc_feature 1..279: note = CCL4__Homo_sapiens__AAA51576
  source 1..279: mol_type = other RNA
atgaagctctgcgtgactgtcctgtctctcctcatgctagtagctgccttctgctctccagcgctctcagcaccaatgggctcagaccctcccaccgcctgctgcttttcttacaccgcgaggaagcttcctcgcaactttgtggtagattactatgagaccagcagcctctgctcccagccagctgtggtattccaaaccaaaagaagcaagcaagtctgtgctgatcccagtgaatcctgggtccaggagtacgtgtatgacctggaactgaactga

SEQ ID NO: 5027 - RNA, 279 nt, synthetic construct
  misc_feature 1..279: note = derived and/or modified sequence opt1 fromCCL4__Homo_sapiens__AAA51576
  source 1..279: mol_type = other RNA
atgaagctgtgcgtgaccgtcctcagcctgctgatgctcgtggccgccttctgctcccccgcgctgagcgccccgatgggctccgacccgcccaccgcctgctgcttcagctacacggcccgcaagctgccccggaacttcgtggtcgactactacgagacctccagcctctgctcccagcccgccgtggtgttccagaccaagcgcagcaagcaggtctgcgcggacccctccgagagctgggtgcaggagtacgtgtacgacctggagctgaactga

SEQ ID NO: 5028 - RNA, 279 nt, synthetic construct
  misc_feature 1..279: note = derived and/or modified sequence opt2 fromCCL4__Homo_sapiens__AAA51576
  source 1..279: mol_type = other RNA
atgaagctctgcgtcaccgtcctctccctcctcatgctcgtcgccgccttctgctcccccgccctctccgcccccatgggctccgacccccccaccgcctgctgcttctcctacaccgcccgcaagctcccccgcaacttcgtcgtcgactactacgagacctcctccctctgctcccagcccgccgtcgtcttccagaccaagcgctccaagcaggtctgcgccgacccctccgagtcctgggtccaggagtacgtctacgacctcgagctcaactga

SEQ ID NO: 5029 - RNA, 279 nt, synthetic construct
  misc_feature 1..279: note = derived and/or modified sequence opt3 fromCCL4__Homo_sapiens__AAA51576
  source 1..279: mol_type = other RNA
atgaagctgtgcgtgaccgtcctcagccttctgatgttggttgccgctttctgttcccccgcattatctgcccctatgggctcagacccaccgacagcgtgctgttttagttacactgctagaaaactgcccaggaacttcgtggtagattattacgagacgagctccctatgctctcagcctgccgtggtctttcaaaccaagcggtcgaaacaggtgtgtgcagacccatcagaaagctgggttcaggagtatgtgtacgatctcgaactgaattga

SEQ ID NO: 5030 - RNA, 279 nt, synthetic construct
  misc_feature 1..279: note = derived and/or modified sequence opt4 fromCCL4__Homo_sapiens__AAA51576
  source 1..279: mol_type = other RNA
atgaagctgtgcgtgaccgtgctgagcctgctgatgctggtggccgccttctgcagccccgccctgagcgcccccatgggcagcgacccccccaccgcctgctgcttcagctacaccgccagaaagctgcccagaaacttcgtggtggactactacgagaccagcagcctgtgcagccagcccgccgtggtgttccagaccaagagaagcaagcaggtgtgcgccgaccccagcgagagctgggtgcaggagtacgtgtacgacctggagctgaactga

SEQ ID NO: 5031 - RNA, 279 nt, synthetic construct
  misc_feature 1..279: note = derived and/or modified sequence opt5 fromCCL4__Homo_sapiens__AAA51576
  source 1..279: mol_type = other RNA
atgaagctgtgcgtgaccgtcctcagcctgcttatgctggttgccgctttctgttcccccgccctctctgcgcctatgggcagcgacccgcccacagcttgctgtttttcctacacggccagaaaactgcctcggaacttcgtggtggattattacgagacctctagcctttgctcccagcccgccgtcgtgtttcaaacaaagcgctctaaacaggtttgtgctgaccctagcgaatcctgggtgcaggagtatgtctacgatctggaactcaattga

SEQ ID NO: 5032 - RNA, 279 nt, synthetic construct
  misc_feature 1..279: note = derived and/or modified sequence opt6 fromCCL4__Homo_sapiens__AAA51576
  source 1..279: mol_type = other RNA
atgaaactatgcgtaacagtactatcactactaatgctagtagcagcattctgctcaccagcactatcagcaccaatgggatcagacccaccaacagcatgctgcttctcatacacagcaagaaaactaccaagaaacttcgtagtagactactacgaaacatcatcactatgctcacaaccagcagtagtattccaaacaaaaagatcaaaacaagtatgcgcagacccatcagaatcatgggtacaagaatacgtatacgacctagaactaaactaa

SEQ ID NO: 5033 - protein, 52 aa, synthetic construct
  REGION 1..52: note = CCL4__Homo_sapiens__Q7M4M2
MKLCVTVLSLLMLVAAFCSPALSAPNSKPKEASKSVLIPVNPGSRSTCMTWN

SEQ ID NO: 5034 - RNA, 159 nt, synthetic construct
  misc_feature 1..159: note = CCL4__Homo_sapiens__AAX07293
  source 1..159: mol_type = other RNA
atgaagctctgcgtgactgtcctgtctctcctcatgctagtagctgccttctgctctccagcgctctcagcaccaaattccaaaccaaaagaagcaagcaagtctgtgctgatcccagtgaatcctgggtccaggagtacgtgtatgacctggaactga

SEQ ID NO: 5035 - RNA, 159 nt, synthetic construct
  misc_feature 1..159: note = derived and/or modified sequence opt1 fromCCL4__Homo_sapiens__AAX07293
  source 1..159: mol_type = other RNA
atgaagctgtgcgtgaccgtcctcagcctgctgatgctcgtggccgccttctgctcccccgcgctgagcgccccgaactccaagcccaaggaggccagcaagtccgtgctgatccccgtcaaccccggcagccgctccacgtgcatgacctggaactga

SEQ ID NO: 5036 - RNA, 159 nt, synthetic construct
  misc_feature 1..159: note = derived and/or modified sequence opt2 fromCCL4__Homo_sapiens__AAX07293
  source 1..159: mol_type = other RNA
atgaagctctgcgtcaccgtcctctccctcctcatgctcgtcgccgccttctgctcccccgccctctccgcccccaactccaagcccaaggaggcctccaagtccgtcctcatccccgtcaaccccggctcccgctccacctgcatgacctggaactga

SEQ ID NO: 5037 - RNA, 159 nt, synthetic construct
  misc_feature 1..159: note = derived and/or modified sequence opt3 fromCCL4__Homo_sapiens__AAX07293
  source 1..159: mol_type = other RNA
atgaagctgtgcgtgaccgtcctcagccttctgatgttggttgccgctttctgttcccccgcattatctgcccctaactcaaaaccaaaggaggcgagtaaaagcgtgctgatcccggtaaatcccggctccagatctacatgcatgacttggaactga

SEQ ID NO: 5038 - RNA, 159 nt, synthetic construct
  misc_feature 1..159: note = derived and/or modified sequence opt4 fromCCL4__Homo_sapiens__AAX07293
  source 1..159: mol_type = other RNA
atgaagctgtgcgtgaccgtgctgagcctgctgatgctggtggccgccttctgcagccccgccctgagcgcccccaacagcaagcccaaggaggccagcaagagcgtgctgatccccgtgaaccccggcagcagaagcacctgcatgacctggaactga

SEQ ID NO: 5039 - RNA, 159 nt, synthetic construct
  misc_feature 1..159: note = derived and/or modified sequence opt5 fromCCL4__Homo_sapiens__AAX07293
  source 1..159: mol_type = other RNA
atgaagctgtgcgtgaccgtcctcagcctgcttatgctggttgccgctttctgttcccccgccctctctgcgcctaacagcaaaccgaaggaggcttccaaatctgtgctgatccccgtgaatcctggcagcagatccacatgcatgacgtggaactga

SEQ ID NO: 5040 - RNA, 159 nt, synthetic construct
  misc_feature 1..159: note = derived and/or modified sequence opt6 fromCCL4__Homo_sapiens__AAX07293
  source 1..159: mol_type = other RNA
atgaaactatgcgtaacagtactatcactactaatgctagtagcagcattctgctcaccagcactatcagcaccaaactcaaaaccaaaagaagcatcaaaatcagtactaataccagtaaacccaggatcaagatcaacatgcatgacatggaactaa

SEQ ID NO: 5041 - protein, 91 aa, synthetic construct
  REGION 1..91: note = CCL5__Homo_sapiens__D0EI67
MKVSAAALAVILIATALCAPASASPYSSDTTPCCFAYIARPLPRAHIKEYFYTSGKCSNPAVVFVTRKNRQVCANPEKKWVREYINSLEMS

SEQ ID NO: 5042 - RNA, 276 nt, synthetic construct
  misc_feature 1..276: note = CCL5__Homo_sapiens__ACW84342
  source 1..276: mol_type = other RNA
atgaaggtctccgcggcagccctcgctgtcatcctcattgctactgccctctgcgctcctgcatctgcctccccatattcctcggacaccacaccctgctgctttgcctacattgcccgcccactgccccgtgcccacatcaaggagtatttctacaccagtggcaagtgctccaacccagcagtcgtctttgtcacccgaaagaaccgccaagtgtgtgccaacccagagaagaaatgggttcgggagtacatcaactctttggagatgagctag

SEQ ID NO: 5043 - RNA, 276 nt, synthetic construct
  misc_feature 1..276: note = derived and/or modified sequence opt1 fromCCL5__Homo_sapiens__ACW84342
  source 1..276: mol_type = other RNA
atgaaggtgagcgccgccgcgctggccgtcatcctcatcgccaccgccctgtgcgcccccgcgtccgccagcccgtactccagcgacaccacgccctgctgcttcgcctacatcgcccgccccctgccccgggcgcacatcaaggagtacttctacacctccggcaagtgcagcaacccggccgtggtgttcgtcacccgcaagaaccgccaggtgtgcgccaaccccgagaagaagtgggtgcgggagtacatcaactccctcgagatgagctga

SEQ ID NO: 5044 - RNA, 276 nt, synthetic construct
  misc_feature 1..276: note = derived and/or modified sequence opt2 fromCCL5__Homo_sapiens__ACW84342
  source 1..276: mol_type = other RNA
atgaaggtctccgccgccgccctcgccgtcatcctcatcgccaccgccctctgcgcccccgcctccgcctccccctactcctccgacaccaccccctgctgcttcgcctacatcgcccgccccctcccccgcgcccacatcaaggagtacttctacacctccggcaagtgctccaaccccgccgtcgtcttcgtcacccgcaagaaccgccaggtctgcgccaaccccgagaagaagtgggtccgcgagtacatcaactccctcgagatgtcctga

SEQ ID NO: 5045 - RNA, 276 nt, synthetic construct
  misc_feature 1..276: note = derived and/or modified sequence opt3 fromCCL5__Homo_sapiens__ACW84342
  source 1..276: mol_type = other RNA
atgaaggtgagcgccgctgcactggccgtcatcctcattgcgaccgctctttgcgcccccgcatccgcctctccttactcaagtgacacaactccatgttgcttcgcttatatagcaagaccgctgcccagggcccacatcaaagagtacttttatacgagcggcaagtgttccaaccctgctgttgtgttcgtaacccggaaaaatcgccaggtgtgcgccaacccagaaaagaaatgggtccgagagtacattaattctttggaaatgtcgtga

SEQ ID NO: 5046 - RNA, 276 nt, synthetic construct
  misc_feature 1..276: note = derived and/or modified sequence opt4 fromCCL5__Homo_sapiens__ACW84342
  source 1..276: mol_type = other RNA
atgaaggtgagcgccgccgccctggccgtgatcctgatcgccaccgccctgtgcgcccccgccagcgccagcccctacagcagcgacaccaccccctgctgcttcgcctacatcgccagacccctgcccagagcccacatcaaggagtacttctacaccagcggcaagtgcagcaaccccgccgtggtgttcgtgaccagaaagaacagacaggtgtgcgccaaccccgagaagaagtgggtgagagagtacatcaacagcctggagatgagctga

SEQ ID NO: 5047 - RNA, 276 nt, synthetic construct
  misc_feature 1..276: note = derived and/or modified sequence opt5 fromCCL5__Homo_sapiens__ACW84342
  source 1..276: mol_type = other RNA
atgaaggtgagcgccgctgccctggcggtcatcctcattgctaccgccctgtgcgcccccgcttccgcctctccttacagctccgacacaacgccgtgttgcttcgcttatatcgccagaccccttcctcgggcgcacattaaagagtacttttatacctctggcaagtgtagcaaccccgccgttgtgttcgtgacacgcaaaaatagacaggtctgcgctaaccctgaaaagaaatgggtgcgggagtacatcaattccctggaaatgtcttga

SEQ ID NO: 5048 - RNA, 276 nt, synthetic construct
  misc_feature 1..276: note = derived and/or modified sequence opt6 fromCCL5__Homo_sapiens__ACW84342
  source 1..276: mol_type = other RNA
atgaaagtaagcgcagcagcactagcagtaatactaatagcaacagcattatgcgcaccagcaagcgcaagcccatactcaagcgatacaacaccatgttgctttgcatatatagcaagaccactaccaagagcacacataaaagaatacttttacacaagcggaaaatgtagcaatccagcagtagtattcgtaacaagaaaaaatagacaagtatgtgcaaatccagaaaaaaaatgggtaagagaatacataaactcactagaaatgtcataa

SEQ ID NO: 5049 - protein, 91 aa, synthetic construct; identical to SEQ ID NO: 5041
  REGION 1..91: note = CCL5__Homo_sapiens__P13501

SEQ ID NO: 5050 - RNA, 276 nt, synthetic construct; identical to SEQ ID NO: 5042
  misc_feature 1..276: note = CCL5__Homo_sapiens__AAC03541
  source 1..276: mol_type = other RNA

SEQ ID NO: 5051 - RNA, 276 nt, synthetic construct; identical to SEQ ID NO: 5043
  misc_feature 1..276: note = derived and/or modified sequence opt1 fromCCL5__Homo_sapiens__AAC03541
  source 1..276: mol_type = other RNA

SEQ ID NO: 5052 - RNA, 276 nt, synthetic construct; identical to SEQ ID NO: 5044
  misc_feature 1..276: note = derived and/or modified sequence opt2 fromCCL5__Homo_sapiens__AAC03541
  source 1..276: mol_type = other RNA

SEQ ID NO: 5053 - RNA, 276 nt, synthetic construct; identical to SEQ ID NO: 5045
  misc_feature 1..276: note = derived and/or modified sequence opt3 fromCCL5__Homo_sapiens__AAC03541
  source 1..276: mol_type = other RNA

SEQ ID NO: 5054 - RNA, 276 nt, synthetic construct; identical to SEQ ID NO: 5046
  misc_feature 1..276: note = derived and/or modified sequence opt4 fromCCL5__Homo_sapiens__AAC03541
  source 1..276: mol_type = other RNA

SEQ ID NO: 5055 - RNA, 276 nt, synthetic construct; identical to SEQ ID NO: 5047
  misc_feature 1..276: note = derived and/or modified sequence opt5 fromCCL5__Homo_sapiens__AAC03541
  source 1..276: mol_type = other RNA

SEQ ID NO: 5056 - RNA, 276 nt, synthetic construct
  misc_feature 1..276: note = derived and/or modified sequence opt6 fromCCL5__Homo_sapiens__AAC03541
  source 1..276: mol_type = other RNA
atgaaagtaagcgcagcagcactcgcagtaatactaatagcaacagcattatgcgcaccagcaagcgcaagcccatactcaagcgatacaacaccatgttgctttgcatatatagcaagaccactaccaagagcacacataaaagaatacttttacacaagcggaaaatgtagcaatccagcagtagtattcgtaacaagaaaaaatagacaagtatgtgcaaatccagaaaaaaaatgggtaagagaatacataaactcactagaaatgtcataa

SEQ ID NO: 5057 - protein, 116 aa, synthetic construct
  REGION 1..116: note = CCL6__Mus_musculus__P27784
MRNSKTAISFFILVAVLGSQAGLIQEMEKEDRRYNPPIIHQGFQDTSSDCCFSYATQIPCKRFIYYFPTSGGCIKPGIIFISRRGTQVCADPSDRRVQRCLSTLKQGPRSGNKVIA

SEQ ID NO: 5058 - RNA, 351 nt, synthetic construct
  misc_feature 1..351: note = CCL6__Mus_musculus__AAA37329
  source 1..351: mol_type = other RNA
atgagaaactccaagactgccatttcattctttatccttgtggctgtccttgggtcccaggctggcctcatacaagaaatggaaaaagaagatcgtcgctataaccctccaataattcatcaaggctttcaagacacttcttcagactgctgcttctcttatgccacacagatcccatgtaaaagatttatatattatttccccaccagtggtgggtgcatcaagccgggcatcatctttatcagcaggaggggaacccaggtctgtgccgaccccagcgatcggagagttcagaggtgcctaagcaccctgaagcaaggcccaagatctgggaacaaggtcattgcttga

SEQ ID NO: 5059 - RNA, 351 nt, synthetic construct
  misc_feature 1..351: note = derived and/or modified sequence opt1 fromCCL6__Mus_musculus__AAA37329
  source 1..351: mol_type = other RNA
atgcgcaacagcaagaccgccatctccttcttcatcctggtggccgtcctcggcagccaggcggggctgatccaggagatggagaaggaggaccggcgctacaacccgcccatcatccaccagggcttccaggacacctccagcgactgctgcttctcctacgccacgcagatcccctgcaagcggttcatctactacttccccaccagcgggggctgcatcaagcccgggatcatcttcatctcccgccggggcacccaggtgtgcgccgacccgagcgaccgccgggtgcagcgctgcctgtccaccctcaagcagggcccccggagcgggaacaaggtcatcgcctga

SEQ ID NO: 5060 - RNA, 351 nt, synthetic construct
  misc_feature 1..351: note = derived and/or modified sequence opt2 fromCCL6__Mus_musculus__AAA37329
  source 1..351: mol_type = other RNA
atgcgcaactccaagaccgccatctccttcttcatcctcgtcgccgtcctcggctcccaggccggcctcatccaggagatggagaaggaggaccgccgctacaacccccccatcatccaccagggcttccaggacacctcctccgactgctgcttctcctacgccacccagatcccctgcaagcgcttcatctactacttccccacctccggcggctgcatcaagcccggcatcatcttcatctcccgccgcggcacccaggtctgcgccgacccctccgaccgccgcgtccagcgctgcctctccaccctcaagcagggcccccgctccggcaacaaggtcatcgcctga

SEQ ID NO: 5061 - RNA, 351 nt, synthetic construct
  misc_feature 1..351: note = derived and/or modified sequence opt3 fromCCL6__Mus_musculus__AAA37329
  source 1..351: mol_type = other RNA
atgagaaacagcaagaccgccatctccttctttattctggtggctgtcctcggctctcaggcagggcttatacaagagatggaaaaagaggacaggcggtacaatccccctatcattcaccagggattccaggatacatcaagtgactgctgttttagctatgccactcagatcccatgcaagcgcttcatttactattttccgacgtccggtggctgtatcaaacccgggataatcttcatttctcgacgtggaacccaagtttgcgcggatccttcggacagaagggtgcagcggtgtctgtcaacattgaagcagggcccacgcagcggtaacaaagtaatcgcttga

SEQ ID NO: 5062 - RNA, 351 nt, synthetic construct
  misc_feature 1..351: note = derived and/or modified sequence opt4 fromCCL6__Mus_musculus__AAA37329
  source 1..351: mol_type = other RNA
atgagaaacagcaagaccgccatcagcttcttcatcctggtggccgtgctgggcagccaggccggcctgatccaggagatggagaaggaggacagaagatacaacccccccatcatccaccagggcttccaggacaccagcagcgactgctgcttcagctacgccacccagatcccctgcaagagattcatctactacttccccaccagcggcggctgcatcaagcccggcatcatcttcatcagcagaagaggcacccaggtgtgcgccgaccccagcgacagaagagtgcagagatgcctgagcaccctgaagcagggccccagaagcggcaacaaggtgatcgcctga

SEQ ID NO: 5063 - RNA, 351 nt, synthetic construct
  misc_feature 1..351: note = derived and/or modified sequence opt5 fromCCL6__Mus_musculus__AAA37329
  source 1..351: mol_type = other RNA
atgagaaacagcaagaccgccatctccttctttattctggtggctgtcctcggctctcaggccgggctgatccaagagatggaaaaagaggaccggcgctacaatccccctattatccaccagggattccaggatacaagctccgactgctgtttttcttatgcgacgcagattccgtgcaagagattcatctactattttcccaccagcggcgggtgtatcaaacctggaattatcttcatttcccggcgcggcacacaagtttgcgctgatccctctgacagacgggtgcagcgctgtcttagcaccctgaagcaggggcctagatccggaaacaaagtgatcgcctga

SEQ ID NO: 5064 - RNA, 351 nt, synthetic construct
  misc_feature 1..351: note = derived and/or modified sequence opt6 fromCCL6__Mus_musculus__AAA37329
  source 1..351: mol_type = other RNA
atgagaaactcaaaaacagcaatatcattcttcatactagtagcagtactaggatcacaagcaggactaatacaagaaatggaaaaagaagacagaagatacaacccaccaataatacaccaaggattccaagacacatcatcagactgctgcttctcatacgcaacacaaataccatgcaaaagattcatatactacttcccaacatcaggaggatgcataaaaccaggaataatattcatatcaagaagaggaacacaagtatgcgcagacccatcagacagaagagtacaaagatgcctatcaacactaaaacaaggaccaagatcaggaaacaaagtaatagcataa

SEQ ID NO: 5065 - protein, 99 aa, synthetic construct
  REGION 1..99: note = CCL7__Homo_sapiens__P80098
MKASAALLCLLLTAAAFSPQGLAQPVGINTSTTCCYRFINKKIPKQRLESYRRTTSSHCPREAVIFKTKLDKEICADPTQKWVQDFMKHLDKKTQTPKL

SEQ ID NO: 5066 - RNA, 300 nt, synthetic construct
  misc_feature 1..300: note = CCL7__Homo_sapiens__AAH92436
  source 1..300: mol_type = other RNA
atgaaagcctctgcagcacttctgtgtctgctgctcacagcagctgctttcagcccccaggggcttgctcagccagttgggattaatacttcaactacctgctgctacagatttatcaataagaaaatccctaagcagaggctggagagctacagaaggaccaccagtagccactgtccccgggaagctgtaatcttcaagaccaaactggacaaggagatctgtgctgaccccacacagaagtgggtccaggactttatgaagcacctggacaagaaaacccaaactccaaagctttga

SEQ ID NO: 5067 - RNA, 300 nt, synthetic construct
  misc_feature 1..300: note = derived and/or modified sequence opt1 fromCCL7__Homo_sapiens__AAH92436
  source 1..300: mol_type = other RNA
atgaaggccagcgccgcgctgctctgcctgctgctcaccgccgccgccttcagcccccagggcctggcccagccggtggggatcaacacctccacgacctgctgctaccgcttcatcaacaagaagatccccaagcagcggctggagtcctaccgccggaccaccagctcccactgcccccgcgaggcggtcatcttcaagacgaagctcgacaaggagatctgcgccgaccccacccagaagtgggtgcaggacttcatgaagcacctggacaagaagacccagaccccgaagctgtga

SEQ ID NO: 5068 - RNA, 300 nt, synthetic construct
  misc_feature 1..300: note = derived and/or modified sequence opt2 fromCCL7__Homo_sapiens__AAH92436
  source 1..300: mol_type = other RNA
atgaaggcctccgccgccctcctctgcctcctcctcaccgccgccgccttctccccccagggcctcgcccagcccgtcggcatcaacacctccaccacctgctgctaccgcttcatcaacaagaagatccccaagcagcgcctcgagtcctaccgccgcaccacctcctcccactgcccccgcgaggccgtcatcttcaagaccaagctcgacaaggagatctgcgccgaccccacccagaagtgggtccaggacttcatgaagcacctcgacaagaagacccagacccccaagctctga

SEQ ID NO: 5069 - RNA, 300 nt, synthetic construct
  misc_feature 1..300: note = derived and/or modified sequence opt3 fromCCL7__Homo_sapiens__AAH92436
  source 1..300: mol_type = other RNA
atgaaggccagcgctgcactgctctgccttctgttgaccgccgcggctttctctccccagggcttagcccaacctgtggggatcaacacatccactacgtgttgctacagatttattaataaaaagataccaaaacagaggctggagtcatatcggcgcaccacaagtagccactgtccgcgagaagcagtcatcttcaagactaaactagacaaggagatttgcgccgatcccacccagaagtgggttcaggactttatgaaacatctcgataagaaaacacaaacccctaagctgtga

SEQ ID NO: 5070 - RNA, 300 nt, synthetic construct
  misc_feature 1..300: note = derived and/or modified sequence opt4 fromCCL7__Homo_sapiens__AAH92436
  source 1..300: mol_type = other RNA
atgaaggccagcgccgccctgctgtgcctgctgctgaccgccgccgccttcagcccccagggcctggcccagcccgtgggcatcaacaccagcaccacctgctgctacagattcatcaacaagaagatccccaagcagagactggagagctacagaagaaccaccagcagccactgccccagagaggccgtgatcttcaagaccaagctggacaaggagatctgcgccgaccccacccagaagtgggtgcaggacttcatgaagcacctggacaagaagacccagacccccaagctgtga

SEQ ID NO: 5071 - RNA, 300 nt, synthetic construct
  misc_feature 1..300: note = derived and/or modified sequence opt5 fromCCL7__Homo_sapiens__AAH92436
  source 1..300: mol_type = other RNA
atgaaggccagcgctgccctgctctgcctgcttctgaccgcggctgccttctctccccagggcctcgcccaacctgtggggatcaacacatccacgacctgttgctacagatttattaataaaaagatcccgaaacagcggctggagagctatcgcagaacaacctcctctcactgtccccgggaagctgtcattttcaagacaaaacttgacaaggagatctgcgccgatcctacccagaagtgggttcaggactttatgaaacatctggataagaaaacacaaacccccaagctctga

SEQ ID NO: 5072 - RNA, 300 nt, synthetic construct
  misc_feature 1..300: note = derived and/or modified sequence opt6 fromCCL7__Homo_sapiens__AAH92436
  source 1..300: mol_type = other RNA
atgaaagcatcagcagcactactatgcctattactaacagcagcagcattctcaccacaaggactagcacaaccagtaggaataaacacatcaacaacatgctgctacagattcataaacaaaaaaataccaaaacaaagactagaatcatacagaagaacaacatcatcacactgcccaagagaagcagtaatattcaaaacaaaactagacaaagaaatatgcgcagacccaacacaaaaatgggtacaagacttcatgaaacacctagacaaaaaaacacaaacaccaaaactataa

SEQ ID NO: 5073 - protein, 109 aa, synthetic construct
  REGION 1..109: note = CCL7__Homo_sapiens__Q7Z7Q8
MWKPMPSPSNMKASAALLCLLLTAAAFSPQGLAQPVGINTSTTCCYRFINKKIPKQRLESYRRTTSSHCPREAVIFKTKLDKEICADPTQKWVQDFMKHLDKKTQTPKL

SEQ ID NO: 5074 - RNA, 330 nt, synthetic construct
  misc_feature 1..330: note = CCL7__Homo_sapiens__EAW80210
  source 1..330: mol_type = other RNA
atgtggaagcccatgccctcaccctccaacatgaaagcctctgcagcacttctgtgtctgctgctcacagcagctgctttcagcccccaggggcttgctcagccagttgggattaatacttcaactacctgctgctacagatttatcaataagaaaatccctaagcagaggctggagagctacagaaggaccaccagtagccactgtccccgggaagctgtaatcttcaagaccaaactggacaaggagatctgtgctgaccccacacagaagtgggtccaggactttatgaagcacctggacaagaaaacccaaactccaaagctttga

SEQ ID NO: 5075 - RNA, 330 nt, synthetic construct
  misc_feature 1..330: note = derived and/or modified sequence opt1 fromCCL7__Homo_sapiens__EAW80210
  source 1..330: mol_type = other RNA
atgtggaagcccatgccgagcccctccaacatgaaggccagcgccgcgctgctctgcctgctgctcaccgccgccgccttcagcccccagggcctggcccagcccgtggggatcaacacctccacgacctgctgctaccgcttcatcaacaagaagatcccgaagcagcggctggagtcctaccgccggaccaccagctcccactgcccccgcgaggcggtcatcttcaagacgaagctcgacaaggagatctgcgccgaccccacccagaagtgggtgcaggacttcatgaagcacctggacaagaagacccagacccccaagctgtga

SEQ ID NO: 5076 - RNA, 330 nt, synthetic construct
  misc_feature 1..330: note = derived and/or modified sequence opt2 fromCCL7__Homo_sapiens__EAW80210
  source 1..330: mol_type = other RNA
atgtggaagcccatgccctccccctccaacatgaaggcctccgccgccctcctctgcctcctcctcaccgccgccgccttctccccccagggcctcgcccagcccgtcggcatcaacacctccaccacctgctgctaccgcttcatcaacaagaagatccccaagcagcgcctcgagtcctaccgccgcaccacctcctcccactgcccccgcgaggccgtcatcttcaagaccaagctcgacaaggagatctgcgccgaccccacccagaagtgggtccaggacttcatgaagcacctcgacaagaagacccagacccccaagctctga

SEQ ID NO: 5077 - RNA, 330 nt, synthetic construct
  misc_feature 1..330: note = derived and/or modified sequence opt3 fromCCL7__Homo_sapiens__EAW80210
  source 1..330: mol_type = other RNA
atgtggaagcccatgcctagcccatccaacatgaaagcctctgctgcactgctctgccttctgttgaccgccgcggctttctcaccgcagggcttagcccaacccgtggggatcaatacaagtactacgtgttgctacagatttattaacaagaaaatacctaagcagaggctggagagctatcggcgcaccacatcctctcactgtccacgagaagcagtcatcttcaaaactaagctagacaaggagatttgcgccgatcccacccagaaatgggttcaggactttatgaagcatctcgataaaaagacacaaacccctaaactgtga

SEQ ID NO: 5078 - RNA, 330 nt, synthetic construct
  misc_feature 1..330: note = derived and/or modified sequence opt4 fromCCL7__Homo_sapiens__EAW80210
  source 1..330: mol_type = other RNA
atgtggaagcccatgcccagccccagcaacatgaaggccagcgccgccctgctgtgcctgctgctgaccgccgccgccttcagcccccagggcctggcccagcccgtgggcatcaacaccagcaccacctgctgctacagattcatcaacaagaagatccccaagcagagactggagagctacagaagaaccaccagcagccactgccccagagaggccgtgatcttcaagaccaagctggacaaggagatctgcgccgaccccacccagaagtgggtgcaggacttcatgaagcacctggacaagaagacccagacccccaagctgtga

SEQ ID NO: 5079 - RNA, 330 nt, synthetic construct
  misc_feature 1..330: note = derived and/or modified sequence opt5 fromCCL7__Homo_sapiens__EAW80210
  source 1..330: mol_type = other RNA
atgtggaagcccatgcctagcccgtccaacatgaaagcctctgctgccctgctctgcctgcttctgaccgcggctgccttcagcccccagggcctcgcccaacctgtggggatcaatacatccacgacctgttgctacagatttattaacaagaaaatccccaagcagcggctggagtcttatcgcagaacaaccagctcccactgtcctcgggaagctgtcattttcaaaacaaaacttgacaaggagatctgcgccgatcccacccagaagtgggttcaggactttatgaagcatctggataaaaagacacaaacccctaaactctga

SEQ ID NO: 5080 - RNA, 330 nt, synthetic construct
  misc_feature 1..330: note = derived and/or modified sequence opt6 fromCCL7__Homo_sapiens__EAW80210
  source 1..330: mol_type = other RNA
atgtggaaaccaatgccatcaccatcaaacatgaaagcatcagcagcactactatgcctactactaacagcagcagcattctcaccacaaggactagcacaaccagtaggaataaacacatcaacaacatgctgctacagattcataaacaaaaaaataccaaaacaaagactagaatcatacagaagaacaacatcatcacactgccccagagaagcagtaatattcaaaacaaaactagacaaagaaatatgcgcagacccaacacaaaaatgggtacaagacttcatgaaacacctagacaaaaaaacacaaacaccaaaactataa

SEQ ID NO: 5081 - protein, 109 aa, synthetic construct
  REGION 1..109: note = CCL8__Homo_sapiens__H0UIC7
MLKLTPLPSKMKVSAALLCLLLMAATFSPQGLAQPDSVSIPITCCFNVINRKIPIQRLESYTRITNIQCPKEAVIFKTKRGKEVCADPKERWVRDSMKHLDQIFQNLKP

SEQ ID NO: 5082 - RNA, 330 nt, synthetic construct
  misc_feature 1..330: note = CCL8__Homo_sapiens__EAW80207
  source 1..330: mol_type = other RNA
atgctgaagctcacacccttgccctccaagatgaaggtttctgcagcgcttctgtgcctgctgctcatggcagccactttcagccctcagggacttgctcagccagattcagtttccattccaatcacctgctgctttaacgtgatcaataggaaaattcctatccagaggctggagagctacacaagaatcaccaacatccaatgtcccaaggaagctgtgatcttcaagaccaaacggggcaaggaggtctgtgctgaccccaaggagagatgggtcagggattccatgaagcatctggaccaaatatttcaaaatctgaagccatga

SEQ ID NO: 5083 - RNA, 330 nt, synthetic construct
  misc_feature 1..330: note = derived and/or modified sequence opt1 fromCCL8__Homo_sapiens__EAW80207
  source 1..330: mol_type = other RNA
atgctgaagctcaccccgctgcccagcaagatgaaggtgtccgccgccctgctctgcctgctgctcatggcggccaccttcagcccccagggcctggcccagcccgactccgtcagcatccccatcacgtgctgcttcaacgtgatcaaccgcaagatcccgatccagcggctggagtcctacacccgcatcaccaacatccagtgccccaaggaggccgtgatcttcaagaccaagcgggggaaggaggtctgcgccgaccccaaggagcgctgggtgcgggacagcatgaagcacctcgaccagatcttccagaacctgaagccctga

SEQ ID NO: 5084 - RNA, 330 nt, synthetic construct
  misc_feature 1..330: note = derived and/or modified sequence opt2 fromCCL8__Homo_sapiens__EAW80207
  source 1..330: mol_type = other RNA
atgctcaagctcacccccctcccctccaagatgaaggtctccgccgccctcctctgcctcctcctcatggccgccaccttctccccccagggcctcgcccagcccgactccgtctccatccccatcacctgctgcttcaacgtcatcaaccgcaagatccccatccagcgcctcgagtcctacacccgcatcaccaacatccagtgccccaaggaggccgtcatcttcaagaccaagcgcggcaaggaggtctgcgccgaccccaaggagcgctgggtccgcgactccatgaagcacctcgaccagatcttccagaacctcaagccctga

SEQ ID NO: 5085 - RNA, 330 nt, synthetic construct
  misc_feature 1..330: note = derived and/or modified sequence opt3 fromCCL8__Homo_sapiens__EAW80207
  source 1..330: mol_type = other RNA
atgctgaagctcacaccccttcctagcaaaatgaaggtgtccgccgctctgttgtgcttactgctaatggcagccaccttctctccacagggcctcgcgcaaccggactcagtcagtatccccattacttgttgctttaacgttataaatagaaaaatccctattcagaggctggagagctacacgcggatcaccaacattcagtgtccaaaggaagctgtgatcttcaaaacaaagcgcgggaaggaggtatgcgccgatcccaaagaacgatgggtgcgtgactccatgaagcaccttgatcagatatttcaaaatctgaaaccttga

SEQ ID NO: 5086 - RNA, 330 nt, synthetic construct
  misc_feature 1..330: note = derived and/or modified sequence opt4 fromCCL8__Homo_sapiens__EAW80207
  source 1..330: mol_type = other RNA
atgctgaagctgacccccctgcccagcaagatgaaggtgagcgccgccctgctgtgcctgctgctgatggccgccaccttcagcccccagggcctggcccagcccgacagcgtgagcatccccatcacctgctgcttcaacgtgatcaacagaaagatccccatccagagactggagagctacaccagaatcaccaacatccagtgccccaaggaggccgtgatcttcaagaccaagagaggcaaggaggtgtgcgccgaccccaaggagagatgggtgagagacagcatgaagcacctggaccagatcttccagaacctgaagccctga

SEQ ID NO: 5087 - RNA, 330 nt, synthetic construct
  misc_feature 1..330: note = derived and/or modified sequence opt5 fromCCL8__Homo_sapiens__EAW80207
  source 1..330: mol_type = other RNA
atgctgaagctcacacccctgcctagcaaaatgaaggtgtccgccgcccttctgtgcctcctgcttatggctgcgaccttctctccgcagggcctggctcaacccgacagcgtctccatccctattacgtgttgctttaacgttatcaatagaaaaattcccatccagcggctcgagtcttacacccgcattacaaacatccagtgtcctaaggaagccgtgatcttcaaaaccaagagagggaaggaggtgtgcgccgatcccaaagaacggtgggtccgcgacagcatgaagcacctggatcagatttttcaaaatctgaaaccttga

SEQ ID NO: 5088 - RNA, 330 nt, synthetic construct
  misc_feature 1..330: note = derived and/or modified sequence opt6 fromCCL8__Homo_sapiens__EAW80207
  source 1..330: mol_type = other RNA
atgctaaaactaacaccactaccatcaaaaatgaaagtatcagcagcactactatgcctactactaatggcagcaacattctcaccacaaggactagcacaaccagactcagtatcaataccaataacatgctgcttcaacgtaataaacagaaaaataccaatacaaagactagaatcatacacaagaataacaaacatacaatgcccaaaagaagcagtaatattcaaaacaaaaagaggaaaagaagtatgcgcagacccaaaagaaagatgggtaagagactcaatgaaacacctagaccaaatattccaaaacctaaaaccataa

SEQ ID NO: 5089 - protein, 99 aa, synthetic construct
  REGION 1..99: note = CCL8__Homo_sapiens__P80075
MKVSAALLCLLLMAATFSPQGLAQPDSVSIPITCCFNVINRKIPIQRLESYTRITNIQCPKEAVIFKTKRGKEVCADPKERWVRDSMKHLDQIFQNLKP

SEQ ID NO: 5090 - RNA, 300 nt, synthetic construct
  misc_feature 1..300: note = CCL8__Homo_sapiens__CAA76341
  source 1..300: mol_type = other RNA
atgaaggtttctgcagcgcttctgtgcctgctgctcatggcagccactttcagccctcagggacttgctcagccagattcagtttccattccaatcacctgctgctttaacgtgatcaataggaaaattcctatccagaggctggagagctacacaagaatcaccaacatccaatgtcccaaggaagctgtgatcttcaagaccaaacggggcaaggaggtctgtgctgaccccaaggagagatgggtcagggattccatgaagcatctggaccaaatatttcaaaatctgaagccatga

SEQ ID NO: 5091 - RNA, 300 nt, synthetic construct
  misc_feature 1..300: note = derived and/or modified sequence opt1 fromCCL8__Homo_sapiens__CAA76341
  source 1..300: mol_type = other RNA
atgaaggtgagcgccgccctgctctgcctgctgctcatggcggccaccttcagcccccagggcctggcccagccggactccgtctccatccccatcacgtgctgcttcaacgtgatcaaccgcaagatccccatccagcggctggagagctacacccgcatcaccaacatccagtgccccaaggaggccgtgatcttcaagaccaagcgggggaaggaggtctgcgccgacccgaaggagcgctgggtgcgggactccatgaagcacctcgaccagatcttccagaacctgaagccctga

SEQ ID NO: 5092 - RNA, 300 nt, synthetic construct
  misc_feature 1..300: note = derived and/or modified sequence opt2 fromCCL8__Homo_sapiens__CAA76341
  source 1..300: mol_type = other RNA
atgaaggtctccgccgccctcctctgcctcctcctcatggccgccaccttctccccccagggcctcgcccagcccgactccgtctccatccccatcacctgctgcttcaacgtcatcaaccgcaagatccccatccagcgcctcgagtcctacacccgcatcaccaacatccagtgccccaaggaggccgtcatcttcaagaccaagcgcggcaaggaggtctgcgccgaccccaaggagcgctgggtccgcgactccatgaagcacctcgaccagatcttccagaacctcaagccctga

SEQ ID NO: 5093 - RNA, 300 nt, synthetic construct
  misc_feature 1..300: note = derived and/or modified sequence opt3 fromCCL8__Homo_sapiens__CAA76341
  source 1..300: mol_type = other RNA
atgaaggtgagcgccgctctgctctgccttctgttgatggcagccaccttctctccccagggcttagcgcaacctgactccgtctcaatcccaattacatgttgctttaacgttataaatagaaaaatcccgattcagaggctggagagttacactcggatcacgaacattcagtgtcccaaggaagctgtgatcttcaaaaccaagcgcgggaaagaggtatgcgccgatcctaaggaacgatgggtgcgtgacagcatgaagcacctagatcagatatttcaaaatctcaaaccatga

SEQ ID NO: 5094 - RNA, 300 nt, synthetic construct
  misc_feature 1..300: note = derived and/or modified sequence opt4 fromCCL8__Homo_sapiens__CAA76341
  source 1..300: mol_type = other RNA
atgaaggtgagcgccgccctgctgtgcctgctgctgatggccgccaccttcagcccccagggcctggcccagcccgacagcgtgagcatccccatcacctgctgcttcaacgtgatcaacagaaagatccccatccagagactggagagctacaccagaatcaccaacatccagtgccccaaggaggccgtgatcttcaagaccaagagaggcaaggaggtgtgcgccgaccccaaggagagatgggtgagagacagcatgaagcacctggaccagatcttccagaacctgaagccctga

SEQ ID NO: 5095 - RNA, 300 nt, synthetic construct
  misc_feature 1..300: note = derived and/or modified sequence opt5 fromCCL8__Homo_sapiens__CAA76341
  source 1..300: mol_type = other RNA
atgaaggtgagcgccgctctgctctgcctgcttctgatggccgcgaccttctctccccagggcctcgctcaacctgactccgtcagcatcccgattacatgttgctttaacgttatcaatagaaaaattcccatccagcggctggagtcctacacgcgcattaccaacatccagtgtcctaaggaagccgtgatcttcaaaacaaagagagggaaagaggtgtgcgccgatcccaaggaacggtgggtccgcgactctatgaagcaccttgatcagatttttcaaaatctgaaaccttga

SEQ ID NO: 5096 - RNA, 300 nt, synthetic construct
  misc_feature 1..300: note = derived and/or modified sequence opt6 fromCCL8__Homo_sapiens__CAA76341
  source 1..300: mol_type = other RNA
atgaaagtatcagcagcactactatgcctactactaatggcagcaacattctcaccacaaggactagcacaaccagactcagtatcaataccaataacatgctgcttcaacgtaataaacagaaaaataccaatacaaagattagaatcatacacaagaataacaaacatacaatgcccaaaagaagcagtaatattcaaaacaaaaagaggaaaagaagtatgcgcagacccaaaagaaagatgggtaagagactcaatgaaacacctagaccaaatattccaaaacttaaaaccataa

SEQ ID NO: 5097 - protein, 122 aa, synthetic construct
  REGION 1..122: note = CCL9__Mus_musculus__P51670
MKPFHTALSFLILTTALGIWAQITHATETKEVQSSLKAQQGLEIEMFHMGFQDSSDCCLSYNSRIQCSRFIGYFPTSGGCTRPGIIFISKRGFQVCANPSDRRVQRCIERLEQNSQPRTYKQ

SEQ ID NO: 5098 - RNA, 369 nt, synthetic construct
  misc_feature 1..369: note = CCL9__Mus_musculus__AAA92583
  source 1..369: mol_type = other RNA
atgaagccttttcatactgccctctccttcctcattcttacaactgctcttggaatctgggcccagatcacacatgcaacagagacaaaagaagtccagagcagtctgaaggcacagcaagggcttgaaattgaaatgtttcacatgggctttcaagactcttcagattgctgcctgtcctataactcacggattcagtgttcaagatttataggttattttcccaccagtggtgggtgtaccaggccgggcatcatctttatcagcaagagggggttccaggtctgtgccaaccccagtgatcggagagttcagagatgcattgaaagattggagcaaaactcacaaccacggacctacaaacaataa

SEQ ID NO: 5099 - RNA, 369 nt, synthetic construct
  misc_feature 1..369: note = derived and/or modified sequence opt1 fromCCL9__Mus_musculus__AAA92583
  source 1..369: mol_type = other RNA
atgaagcccttccacaccgccctgagcttcctcatcctgaccacggccctgggcatctgggcgcagatcacccacgccaccgagaccaaggaggtgcagtccagcctcaaggcccagcaggggctggagatcgagatgttccacatgggcttccaggactccagcgactgctgcctgtcctacaacagccgcatccagtgctcccggttcatcgggtacttcccgacgagcggcgggtgcacccgccccggcatcatcttcatctccaagcggggcttccaggtctgcgccaaccccagcgaccgccgggtgcagcgctgcatcgagcggctcgagcagaactcccagccccgcacctacaagcagtga

SEQ ID NO: 5100 - RNA, 369 nt, synthetic construct
  misc_feature 1..369: note = derived and/or modified sequence opt2 fromCCL9__Mus_musculus__AAA92583
  source 1..369: mol_type = other RNA
atgaagcccttccacaccgccctctccttcctcatcctcaccaccgccctcggcatctgggcccagatcacccacgccaccgagaccaaggaggtccagtcctccctcaaggcccagcagggcctcgagatcgagatgttccacatgggcttccaggactcctccgactgctgcctctcctacaactcccgcatccagtgctcccgcttcatcggctacttccccacctccggcggctgcacccgccccggcatcatcttcatctccaagcgcggcttccaggtctgcgccaacccctccgaccgccgcgtccagcgctgcatcgagcgcctcgagcagaactcccagccccgcacctacaagcagtga

SEQ ID NO: 5101 - RNA, 369 nt, synthetic construct
  misc_feature 1..369: note = derived and/or modified sequence opt3 fromCCL9__Mus_musculus__AAA92583
  source 1..369: mol_type = other RNA
atgaagcccttccacaccgccctgagctttctcatccttacaactgctctgggcatttgggcacagataacgcatgccaccgagacaaaagaagtgcaatcctctttgaaggcgcagcaggggttagagatcgaaatgttccacatgggatttcaggactcaagtgattgctgtctgagctacaactccaggattcaatgctctagattcatcggttattttcctacttcgggcgggtgtacccggccaggaattatcttcatatcaaaacgcggctttcaggtctgcgctaatccgagcgaccgacgtgttcagagatgtatcgagaggctagaacagaacagtcaaccccggacatacaagcagtga

SEQ ID NO: 5102 - RNA, 369 nt, synthetic construct
  misc_feature 1..369: note = derived and/or modified sequence opt4 fromCCL9__Mus_musculus__AAA92583
  source 1..369: mol_type = other RNA
atgaagcccttccacaccgccctgagcttcctgatcctgaccaccgccctgggcatctgggcccagatcacccacgccaccgagaccaaggaggtgcagagcagcctgaaggcccagcagggcctggagatcgagatgttccacatgggcttccaggacagcagcgactgctgcctgagctacaacagcagaatccagtgcagcagattcatcggctacttccccaccagcggcggctgcaccagacccggcatcatcttcatcagcaagagaggcttccaggtgtgcgccaaccccagcgacagaagagtgcagagatgcatcgagagactggagcagaacagccagcccagaacctacaagcagtga

SEQ ID NO: 5103 - RNA, 369 nt, synthetic construct
  misc_feature 1..369: note = derived and/or modified sequence opt5 fromCCL9__Mus_musculus__AAA92583
  source 1..369: mol_type = other RNA
atgaagcccttccacaccgccctgagctttctcatcctgacaacggctcttggcatttgggcccagatcacccatgcgacagagaccaaagaagtgcaatcctctctgaaggctcagcaggggctcgagattgaaatgttccacatgggatttcaggacagctccgattgctgtctgtcttacaacagcagaatccaatgctcccggttcattggctattttcctacatctgggggatgtacccgcccgggcatcatcttcattagcaaaagagggtttcaggtctgcgccaatccctccgaccggcgcgttcagagatgtatcgagcggcttgaacagaacagccaacctcgcacatacaagcagtga

SEQ ID NO: 5104 - RNA, 369 nt, synthetic construct
  misc_feature 1..369: note = derived and/or modified sequence opt6 fromCCL9__Mus_musculus__AAA92583
  source 1..369: mol_type = other RNA
atgaaaccattccacacagcactatcattcctaatactaacaacagcactaggaatatgggcacaaataacacacgcaacagaaacaaaagaagtacaatcatcactaaaagcacaacaaggactagaaatagaaatgttccacatgggattccaagactcatcagactgctgcttatcatacaactcaagaatacaatgctcaagattcataggatacttcccaacatcaggaggatgcacaagaccaggaataatattcatatcaaaaagaggattccaagtatgcgcaaacccctcagacagaagagtacaaagatgcatagaaagactagaacaaaactcacaaccaagaacatacaaacaataa

SEQ ID NO: 5105 - protein, 397 aa, synthetic construct
  REGION 1..397: note = CX3CL1__Homo_sapiens__A0N0N7
MAPISLSWLLRLATFCHLTVLLAGQHHGVTKCNITCSKMTSKIPVALLIHYQQNQASCGKRAIILETRQHRLFCADPKEQWVKDAMQHLDRQAAALTRNGGTFEKQIGEVKPRTTPAAGGMDESVVLEPEATGESSSLEPTPSSQEAQRALGTSPELPTGVTGSSGTRLPPTPKAQDGGPVGTELFRVPPVSTAATWQSSAPHQPGPSLWAEAKTSEAPSTQDPSTQASTASSPAPEENAPSEGQRVWGQGQSPRPENSLEREEMGPVPAHTDAFQDWGPGSMAHVSVVPVSSEGTPSREPVASGSWTPKAEEPIHATMDPQRLGVLITPVPDAQAATRRQAVGLLAFLGLLFCLGVAMFTYQSLQGCPRKMAGEMAEGLRYIPRSCGSNSYVLVPV

SEQ ID NO: 5106 - RNA, 1194 nt, synthetic construct
  misc_feature 1..1194: note = CX3CL1__Homo_sapiens__ABK41928
  source 1..1194: mol_type = other RNA
atggctccgatatctctgtcgtggctgctccgcttggccaccttctgccatctgactgtcctgctggctggacagcaccacggtgtgacgaaatgcaacatcacgtgcagcaagatgacatcaaagatacctgtagctttgctcatccactatcaacagaaccaggcatcatgcggcaaacgcgcaatcatcttggagacgagacagcacaggctgttctgtgccgacccgaaggagcaatgggtcaaggacgcgatgcagcatctggaccgccaggctgctgccctaactcgaaatggcggcaccttcgagaagcagatcggcgaggtgaagcccaggaccacccctgccgccgggggaatggacgagtctgtggtcctggagcccgaagccacaggcgaaagcagtagcctggagccgactccttcttcccaggaagcacagagggccctggggacctccccagagctgccgacgggcgtgactggttcctcagggaccaggctccccccgacgccaaaggctcaggatggagggcctgtgggcacggagcttttccgagtgcctcccgtctccactgccgccacgtggcagagttctgctccccaccaacctgggcccagcctctgggctgaggcaaagacctctgaggccccgtccacccaggacccctccacccaggcctccactgcgtcctccccagccccagaggagaatgctccgtctgaaggccagcgtgtgtggggtcagggacagagccccaggccagagaactctctggagcgggaggagatgggtcccgtgccagcgcacacggatgccttccaggactgggggcctggcagcatggcccacgtctctgtggtccctgtctcctcagaagggacccccagcagggagccagtggcttcaggcagctggacccctaaggctgaggaacccatccatgccaccatggacccccagaggctgggcgtccttatcactcctgtccctgacgcccaggctgccacccggaggcaggcggtggggctgctggccttccttggcctcctcttctgcctgggggtggccatgttcacctaccagagcctccagggctgccctcgaaagatggcaggagagatggcggagggccttcgctacatcccccggagctgtggtagtaattcatatgtcctggtgcccgtgtga

SEQ ID NO: 5107 - RNA, 1194 nt, synthetic construct
  misc_feature 1..1194: note = derived and/or modified sequence opt1 fromCX3CL1__Homo_sapiens__ABK41928
  source 1..1194: mol_type = other RNA
atggcccccatcagcctgtcctggctcctgcgcctggccaccttctgccacctcaccgtgctgctggcgggccagcaccacggggtcacgaagtgcaacatcacgtgcagcaagatgacctccaagatcccggtggccctcctgatccactaccagcagaaccaggccagctgcggcaagcgggccatcatcctggagacccgccagcaccgcctcttctgcgccgaccccaaggagcagtgggtgaaggacgcgatgcagcacctggaccggcaggccgccgccctgacccggaacgggggcaccttcgagaagcagatcggggaggtcaagccccgcaccacccccgcggccggcggcatggacgagtccgtggtgctcgagccggaggccacgggggagagctccagcctggagcccaccccctccagccaggaggcccagcgggccctgggcacctcccccgagctcccgaccggggtcacgggcagctccgggacccgcctgccgcccacccccaaggcgcaggacggcggccccgtggggaccgagctgttccgggtgccgcccgtcagcacggccgccacctggcagtccagcgcgccccaccagcccggcccctccctctgggccgaggccaagaccagcgaggccccctccacccaggaccccagcacgcaggccagcaccgcctccagcccggcccccgaggagaacgcgccctccgaggggcagcgcgtgtggggccagggccagagcccccggccggagaactccctggagcgcgaggagatggggcccgtgcccgcccacaccgacgccttccaggactggggccccgggagcatggcccacgtctccgtggtgccggtcagctccgagggcacccccagccgggagcccgtggcctccgggagctggacgccgaaggcggaggagcccatccacgccaccatggacccccagcgcctgggcgtgctcatcacccccgtcccggacgcccaggccgcgacccggcgccaggccgtgggcctgctggccttcctcgggctgctgttctgcctcggcgtggccatgttcacgtaccagtccctgcaggggtgcccccggaagatggccggcgagatggcggaggggctgcgctacatcccccggagctgcggctccaacagctacgtcctcgtgcccgtgtga

SEQ ID NO: 5108 - RNA, 1194 nt, synthetic construct
  misc_feature 1..1194: note = derived and/or modified sequence opt2 fromCX3CL1__Homo_sapiens__ABK41928
  source 1..1194: mol_type = other RNA
atggcccccatctccctctcctggctcctccgcctcgccaccttctgccacctcaccgtcctcctcgccggccagcaccacggcgtcaccaagtgcaacatcacctgctccaagatgacctccaagatccccgtcgccctcctcatccactaccagcagaaccaggcctcctgcggcaagcgcgccatcatcctcgagacccgccagcaccgcctcttctgcgccgaccccaaggagcagtgggtcaaggacgccatgcagcacctcgaccgccaggccgccgccctcacccgcaacggcggcaccttcgagaagcagatcggcgaggtcaagccccgcaccacccccgccgccggcggcatggacgagtccgtcgtcctcgagcccgaggccaccggcgagtcctcctccctcgagcccaccccctcctcccaggaggcccagcgcgccctcggcacctcccccgagctccccaccggcgtcaccggctcctccggcacccgcctcccccccacccccaaggcccaggacggcggccccgtcggcaccgagctcttccgcgtcccccccgtctccaccgccgccacctggcagtcctccgccccccaccagcccggcccctccctctgggccgaggccaagacctccgaggccccctccacccaggacccctccacccaggcctccaccgcctcctcccccgcccccgaggagaacgccccctccgagggccagcgcgtctggggccagggccagtccccccgccccgagaactccctcgagcgcgaggagatgggccccgtccccgcccacaccgacgccttccaggactggggccccggctccatggcccacgtctccgtcgtccccgtctcctccgagggcaccccctcccgcgagcccgtcgcctccggctcctggacccccaaggccgaggagcccatccacgccaccatggacccccagcgcctcggcgtcctcatcacccccgtccccgacgcccaggccgccacccgccgccaggccgtcggcctcctcgccttcctcggcctcctcttctgcctcggcgtcgccatgttcacctaccagtccctccagggctgcccccgcaagatggccggcgagatggccgagggcctccgctacatcccccgctcctgcggctccaactcctacgtcctcgtccccgtctga

SEQ ID NO: 5109 - RNA, 1194 nt, synthetic construct
  misc_feature 1..1194: note = derived and/or modified sequence opt3 fromCX3CL1__Homo_sapiens__ABK41928
  source 1..1194: mol_type = other RNA
atggcccccatcagcctgtcctggctccttagactggctaccttctgccacttgacagtgttactggcaggccagcatcacggggtcactaagtgtaacattacgtgctctaaaatgacctcaaagatacctgttgccctactcatccattaccaacagaatcaggcgagttgtggaaaaagggctattatcctggagacacggcagcaccgcctgttttgcgccgacccaaaggaacaatgggtgaaagatgcaatgcagcatcttgaccgacaggccgctgcattgactcgtaacggtggcaccttcgagaagcagattggggaagtaaagccgagaacaacccccgccgctggaggcatggatgagagcgtggtcctcgaacctgaggccactggtgagtcctcttcgctggaaccaacaccctcaagccaagaggcgcagagggcactggggaccagtcctgaactcccaacgggagtgactggctcctctggcacccggttaccccctacaccaaaagcccaggacgggggaccggttggtactgagctgtttcgcgtgccccctgtcagcaccgctgccacatggcagtcctcagcaccacaccaacccggccctagtctttgggctgaggccaagaccagcgaagcgccatctacgcaggatccctccactcaggcctcaacagcaagcagtccggctcctgaggaaaatgccccctctgaggggcaaagagtgtggggacagggccagtccccaaggcctgaaaacagcttggagcgggaggaaatgggtcccgtaccagctcacaccgacgccttccaggattgggggcccggatcgatggcacatgtttctgtggtccctgtgtcctcagagggcactccaagtcgcgaaccggtggccagcggctcctggacacccaaagctgaggaacctatccacgcgaccatggacccacaacgactgggggtcctaataacgcccgttcctgatgcacaggccgctaccagaaggcaggccgtgggactcctggcatttcttggtctgttgttctgtctcggcgtagccatgtttacatatcagtctctgcaagggtgcccacggaagatggctggagagatggccgagggcttacgttacatcccccgcagctgtggttcaaatagttatgtgctggtcccggtgtga

SEQ ID NO: 5110 - RNA, 1194 nt, synthetic construct
  misc_feature 1..1194: note = derived and/or modified sequence opt4 fromCX3CL1__Homo_sapiens__ABK41928
  source 1..1194: mol_type = other RNA
atggcccccatcagcctgagctggctgctgagactggccaccttctgccacctgaccgtgctgctggccggccagcaccacggcgtgaccaagtgcaacatcacctgcagcaagatgaccagcaagatccccgtggccctgctgatccactaccagcagaaccaggccagctgcggcaagagagccatcatcctggagaccagacagcacagactgttctgcgccgaccccaaggagcagtgggtgaaggacgccatgcagcacctggacagacaggccgccgccctgaccagaaacggcggcaccttcgagaagcagatcggcgaggtgaagcccagaaccacccccgccgccggcggcatggacgagagcgtggtgctggagcccgaggccaccggcgagagcagcagcctggagcccacccccagcagccaggaggcccagagagccctgggcaccagccccgagctgcccaccggcgtgaccggcagcagcggcaccagactgccccccacccccaaggcccaggacggcggccccgtgggcaccgagctgttcagagtgccccccgtgagcaccgccgccacctggcagagcagcgccccccaccagcccggccccagcctgtgggccgaggccaagaccagcgaggcccccagcacccaggaccccagcacccaggccagcaccgccagcagccccgcccccgaggagaacgcccccagcgagggccagagagtgtggggccagggccagagccccagacccgagaacagcctggagagagaggagatgggccccgtgcccgcccacaccgacgccttccaggactggggccccggcagcatggcccacgtgagcgtggtgcccgtgagcagcgagggcacccccagcagagagcccgtggccagcggcagctggacccccaaggccgaggagcccatccacgccaccatggacccccagagactgggcgtgctgatcacccccgtgcccgacgcccaggccgccaccagaagacaggccgtgggcctgctggccttcctgggcctgctgttctgcctgggcgtggccatgttcacctaccagagcctgcagggctgccccagaaagatggccggcgagatggccgagggcctgagatacatccccagaagctgcggcagcaacagctacgtgctggtgcccgtgtga

SEQ ID NO: 5111 - RNA, 1194 nt, synthetic construct
  misc_feature 1..1194: note = derived and/or modified sequence opt5 fromCX3CL1__Homo_sapiens__ABK41928
  source 1..1194: mol_type = other RNA
atggcccccatcagcctgtcctggctcctgagacttgctaccttctgccacctgacagtgctcctggccggccagcatcacggggtcacgaagtgtaacattacctgctctaaaatgacaagcaagatccctgttgcgcttctgattcattaccaacagaatcaggcttcctgtggaaaacgggccatcattctcgagacccgccagcacagactgttttgcgccgacccgaaggaacaatgggtgaaagatgctatgcagcatctggaccggcaggccgctgccctcacacgcaacggcgggaccttcgagaagcagatcggagaagtgaagcccagaacaacccctgcggccggcgggatggatgagtctgtcgtgctggaacccgaggctacgggagagagctcctctcttgaacctacccccagctcccaagaggcccagcgggctctgggcacaagccctgaactcccgaccggcgttacagggtcttccggaacccgcctgccccctacgcccaaagcccaggacggcgggcctgtgggaacagagctttttagagtgcccccggtcagcaccgcggccacatggcagtcttccgctcctcaccaacccggccctagcctgtgggccgaggctaagacctctgaagccccctccacccaggatcccagcacacaggcctccacggcttctagccctgcgccggaggaaaatgccccctccgaggggcaacgggtttggggacagggccagagccctcgccccgaaaactctctcgagagagaggaaatgggccctgtgcccgctcacaccgacgccttccaggattgggggccgggatccatggcccatgtcagcgtggtgcctgtctctagcgagggcacaccctcccgggaacctgttgcttctgggagctggacccccaaagccgaggaacctatccacgcgacaatggacccccaacgcctgggagtgctgattaccccggtgcctgatgctcaggccgccacgagacggcaggctgtcggcctcctggcctttcttgggctcctgttctgtctgggagtggctatgtttacatatcagtcccttcaaggctgcccccgcaagatggccggcgagatggcggaggggctgagatacatcccccggagctgtggatctaattcctatgttctcgtgcctgtctga

SEQ ID NO: 5112 - RNA, 1194 nt, synthetic construct
  misc_feature 1..1194: note = derived and/or modified sequence opt6 fromCX3CL1__Homo_sapiens__ABK41928
  source 1..1194: mol_type = other RNA
atggcacctataagtctcagttggctactacgactcgccacattttgtcatttaacagtactactagcaggacaacatcatggagtaacaaaatgtaacataacatgctcaaaaatgacatcaaaaataccagtagcattattaatacattaccaacaaaatcaggcttcatgtggaaaacgagcaataatactagaaacacgtcaacatagacttttttgtgcagatccaaaagaacaatgggtcaaagacgcaatgcaacatttagatagacaagcagcagcactaacaagaaacggcggaacatttgaaaaacaaataggagaagtaaaacctagaacaacaccagcagcaggtggcatggatgaatctgtagtactagaaccagaagcaacaggagaatcatcaagtttagaaccaacaccaagttctcaagaagcacaaagagccctaggaacaagtccagaactaccaacaggagtaacaggaagttcaggaacaagacttccaccaactcctaaagcacaagatggaggaccagtaggtacagaactattcagagtaccaccagtatcaacagctgcaacatggcaatcaagtgcccctcaccaaccagggccatcactatgggctgaagcgaaaacttcagaagcaccttctacacaagacccttctactcaagcatcaaccgcatccagcccagcaccagaagaaaacgcaccatcggaaggtcaaagagtatggggacaaggacaatcaccaagacccgaaaactcactagaaagagaagaaatgggaccagtcccagcacatactgatgcttttcaagattggggaccaggaagcatggcccatgtatcagtcgtaccagtatcaagtgaaggaacaccaagcagagaaccagtagcaagtggatcatggacccctaaagctgaagaaccaatacatgctacaatggacccacaaagattaggagtattaattacacctgttcccgatgcacaagccgcaactagaagacaagcagttggactcttagcatttttgggattactcttctgtttaggagtagctatgtttacatatcaatcattacaaggatgtccacgaaaaatggcaggcgaaatggcagaaggattaagatatatacccagatcatgtggttcaaattcatacgtattagtaccagtataa

SEQ ID NO: 5113 - protein, 397 aa, synthetic construct; identical to SEQ ID NO: 5105
  REGION 1..397: note = CX3CL1__Homo_sapiens__P78423

SEQ ID NO: 5114 - RNA, 1194 nt, synthetic construct; identical to SEQ ID NO: 5106
  misc_feature 1..1194: note = CX3CL1__Homo_sapiens__AAB49679
  source 1..1194: mol_type = other RNA

SEQ ID NO: 5115 - RNA, 1194 nt, synthetic construct; identical to SEQ ID NO: 5107
  misc_feature 1..1194: note = derived and/or modified sequence opt1 fromCX3CL1__Homo_sapiens__AAB49679
  source 1..1194: mol_type = other RNA

SEQ ID NO: 5116 - RNA, 1194 nt, synthetic construct; identical to SEQ ID NO: 5108
  misc_feature 1..1194: note = derived and/or modified sequence opt2 fromCX3CL1__Homo_sapiens__AAB49679
  source 1..1194: mol_type = other RNA

SEQ ID NO: 5117 - RNA, 1194 nt, synthetic construct; identical to SEQ ID NO: 5109
  misc_feature 1..1194: note = derived and/or modified sequence opt3 fromCX3CL1__Homo_sapiens__AAB49679
  source 1..1194: mol_type = other RNA

SEQ ID NO: 5118 - RNA, 1194 nt, synthetic construct; identical to SEQ ID NO: 5110
  misc_feature 1..1194: note = derived and/or modified sequence opt4 fromCX3CL1__Homo_sapiens__AAB49679
  source 1..1194: mol_type = other RNA

SEQ ID NO: 5119 - RNA, 1194 nt, synthetic construct; identical to SEQ ID NO: 5111
  misc_feature 1..1194: note = derived and/or modified sequence opt5 fromCX3CL1__Homo_sapiens__AAB49679
  source 1..1194: mol_type = other RNA

SEQ ID NO: 5120 - RNA, 1194 nt, synthetic construct
  misc_feature 1..1194: note = derived and/or modified sequence opt6 fromCX3CL1__Homo_sapiens__AAB49679
  source 1..1194: mol_type = other RNA
atggcaccaatttcactaagctggctattaagattagcaacattttgtcatttaaccgtactactcgcaggacaacatcacggagtaacaaaatgcaacataacatgttctaaaatgacatctaaaataccagtagcacttttaatacactatcaacaaaatcaagcatcatgtggaaaacgcgcaataatactagaaaccagacaacatcgtttattttgcgcagacccaaaagaacaatgggtaaaagatgcaatgcaacatttagatagacaagcagcagcattaacaagaaatggaggtacatttgaaaaacaaataggagaagtaaaacctagaacaacacctgcagcaggaggcatggatgaatcagtagtattagaaccagaagcaacaggcgaaagtagttcattagaaccaacaccaagtagtcaagaagcacaaagagcattaggaacatcaccagaattaccaaccggcgtaacgggatcgtcaggaacacgtttaccaccaacaccaaaagcacaagatggcggaccagtaggcacagaattattcagagttccaccagttagtactgcagcaacctggcaatctagcgccccacatcaaccaggtccatccctatgggcagaagccaaaacaagcgaagctccatcaacacaagatccctcaacacaagcatcaacagcaagttctcccgcaccagaagaaaatgctccaagtgaaggacagcgagtatggggacaaggacaatccccaagaccagaaaattctttagaaagagaagaaatgggaccagtaccagctcatacagatgcattccaagactggggaccaggatcaatggctcatgtctctgtagtccctgtaagttcagaaggaacaccatcaagagaaccagtagcatccggaagctggacaccaaaagcagaagagccaatacatgctacaatggatccgcaacgcctaggagttctaattacacctgtaccagatgcacaagcagctacaagacgacaagcagttggattactagcatttttaggactactattttgtctaggagtagcaatgttcacatatcaatctttacaaggatgtccaagaaagatggcaggagaaatggcagaaggattaagatacatacccagatcctgtggaagtaactcatatgtattagtaccagtataa

SEQ ID NO: 5121 - protein, 397 aa, synthetic construct [sequence omitted]

SEQ ID NO: 5122 - RNA, 1194 nt, synthetic construct
  misc_feature 1..1194: note = CX3CL1__Homo_sapiens__CAG33707
  source 1..1194: mol_type = other RNA
atggctccgatatctctgtcgtggctgctccgcttggccaccttctgccatctgactgtcctgctggctggacagcaccacggtgtgacgaaatgcaacatcacgtgcagcaagatgacatcaaagatacctgtagctttgctcatccactatcaacagaaccaggcatcatgcggcaaacgcgcaatcatcttggagacgagacagcacaggctgttctgtgccgacccgaaggagcaatgggtcaaggacgcgatgcagcatctggaccgccaggctgctgccctaactcgaaatggcggcaccttcgagaagcagatcggcgaggtgaagcccaggaccacccctgccgccgggggaatggacgagtctgtggtcctggagcccgaagccacaggcgaaagcagtagcccggagccgactccttcttcccaggaagcacagagggccctggggacctccccagagctgccgacgggcgtgactggttcctcagggaccaggctccccccgacgccaaaggctcaggatggagggcctgtgggcacggagcttttccgagtgcctcccgtctccactgccgccacgtggcagagttctgctccccaccaacctgggcccagcctctgggctgaggcaaagacctctgaggccccgtccacccaggacccctccacccaggcctccactgcgtcctccccagccccagaggagaatgctccgtctgaaggccagcgtgtgtggggtcagggacagagccccaggccagagaactctctggagcgggaggagatgggtcccgtgccagcgcacacggatgccttccaggactgggggcctggcagcatggcccacgtctctgtggtccctgtctcctcagaagggacccccagcagggagccagtggcttcaggcagctggacccctaaggctgaggaacccatccatgccaccatggacccccagaggctgggcgtccttatcactcctgtccctgacgcccaggctgccacccggaggcaggcggtggggctgctggccttccttggcctcctcttctgcctgggggtggccatgttcacctaccagagcctccagggctgccctcgaaagatggcaggagagatggcggagggccttcgctacatcccccggagctgtggtagtaattcatatgtcctggtgcccgtttaa

SEQ ID NO: 5123 - RNA, 1194 nt, synthetic construct
  misc_feature 1..1194: note = derived and/or modified sequence opt1 fromCX3CL1__Homo_sapiens__CAG33707
  source 1..1194: mol_type = other RNA
atggcccccatcagcctgtcctggctcctgcgcctggccaccttctgccacctcaccgtgctgctggcgggccagcaccacggggtcacgaagtgcaacatcacgtgcagcaagatgacctccaagatcccggtggccctcctgatccactaccagcagaaccaggccagctgcggcaagcgggccatcatcctggagacccgccagcaccgcctcttctgcgccgaccccaaggagcagtgggtgaaggacgcgatgcagcacctggaccggcaggccgccgccctgacccggaacgggggcaccttcgagaagcagatcggggaggtcaagccccgcaccacccccgcggccggcggcatggacgagtccgtggtgctcgagccggaggccacgggggagagctccagccccgagcccaccccctccagccaggaggcccagcgggccctgggcacctccccggagctgcccaccggggtcacgggcagctccgggacccgcctcccgcccacccccaaggcgcaggacggcggccccgtggggaccgagctgttccgggtgccgcccgtcagcacggccgccacctggcagtccagcgcgccccaccagcccggcccctccctgtgggccgaggccaagaccagcgaggccccctccacccaggacccgagcacgcaggccagcaccgcctccagccccgcccccgaggagaacgcgccctccgaggggcagcgcgtgtggggccagggccagagcccgcggcccgagaactccctcgagcgcgaggagatggggcccgtgcccgcccacaccgacgccttccaggactggggcccggggagcatggcccacgtctccgtggtgcccgtcagctccgagggcacccccagccgggagccggtggcctccgggagctggacgcccaaggcggaggagcccatccacgccaccatggacccccagcgcctgggcgtgctgatcaccccggtccccgacgcccaggccgcgacccggcgccaggccgtgggcctcctggccttcctggggctcctgttctgcctgggcgtggccatgttcacgtaccagtccctccaggggtgcccccggaagatggccggcgagatggcggaggggctgcgctacatcccccggagctgcggctccaacagctacgtcctggtgccggtgtga

SEQ ID NO: 5124 - RNA, 1194 nt, synthetic construct
  misc_feature 1..1194: note = derived and/or modified sequence opt2 fromCX3CL1__Homo_sapiens__CAG33707
  source 1..1194: mol_type = other RNA
atggcccccatctccctctcctggctcctccgcctcgccaccttctgccacctcaccgtcctcctcgccggccagcaccacggcgtcaccaagtgcaacatcacctgctccaagatgacctccaagatccccgtcgccctcctcatccactaccagcagaaccaggcctcctgcggcaagcgcgccatcatcctcgagacccgccagcaccgcctcttctgcgccgaccccaaggagcagtgggtcaaggacgccatgcagcacctcgaccgccaggccgccgccctcacccgcaacggcggcaccttcgagaagcagatcggcgaggtcaagccccgcaccacccccgccgccggcggcatggacgagtccgtcgtcctcgagcccgaggccaccggcgagtcctcctcccccgagcccaccccctcctcccaggaggcccagcgcgccctcggcacctcccccgagctccccaccggcgtcaccggctcctccggcacccgcctcccccccacccccaaggcccaggacggcggccccgtcggcaccgagctcttccgcgtcccccccgtctccaccgccgccacctggcagtcctccgccccccaccagcccggcccctccctctgggccgaggccaagacctccgaggccccctccacccaggacccctccacccaggcctccaccgcctcctcccccgcccccgaggagaacgccccctccgagggccagcgcgtctggggccagggccagtccccccgccccgagaactccctcgagcgcgaggagatgggccccgtccccgcccacaccgacgccttccaggactggggccccggctccatggcccacgtctccgtcgtccccgtctcctccgagggcaccccctcccgcgagcccgtcgcctccggctcctggacccccaaggccgaggagcccatccacgccaccatggacccccagcgcctcggcgtcctcatcacccccgtccccgacgcccaggccgccacccgccgccaggccgtcggcctcctcgccttcctcggcctcctcttctgcctcggcgtcgccatgttcacctaccagtccctccagggctgcccccgcaagatggccggcgagatggccgagggcctccgctacatcccccgctcctgcggctccaactcctacgtcctcgtccccgtctga

SEQ ID NO: 5125 - RNA, 1194 nt, synthetic construct
  misc_feature 1..1194: note = derived and/or modified sequence opt3 fromCX3CL1__Homo_sapiens__CAG33707
  source 1..1194: mol_type = other RNA
atggcccccatcagcctgtcctggctccttagactggctaccttctgccacttgacagtgttactggcaggccagcatcacggggtcactaagtgtaacattacgtgctctaaaatgacctcaaagatacctgttgccctactcatccattaccaacagaatcaggcgagttgtggaaaaagggctattatcctggagacacggcagcaccgcctgttttgcgccgacccaaaggaacaatgggtgaaagatgcaatgcagcatcttgaccgacaggccgctgcattgactcgtaacggtggcaccttcgagaagcagattggggaagtaaagccgagaacaacccccgccgctggaggcatggatgagagcgtggtcctcgaacctgaggccactggtgagtcctcttcgccagaacccacaccttcaagccaagaggcgcagagggcactggggaccagtccagaactgcccacgggagtgactggctcctctggcacccggctccctccaacaccgaaagcccaggacgggggacccgttggtactgagttatttcgcgtgcctccagtcagcaccgctgccacatggcagtcctcagcaccccaccaacctggcccaagtctgtgggctgaggccaagaccagcgaagcgccctctacgcaggatccgtccactcaggcctcaacagcaagcagtcctgctcccgaggaaaatgccccatctgaggggcaaagagtgtggggacagggccagtcccctaggcccgaaaacagccttgagcgggaggaaatgggtccagtacccgctcacaccgacgccttccaggattgggggcctggatcgatggcacatgtttctgtggtcccagtgtcctcagagggcactccgagtcgcgaacccgtggccagcggctcctggacacctaaagctgaggaaccaatccacgcgaccatggacccccaacgattgggggtcctgataacgcctgttccagatgcacaggccgctaccagaaggcaggccgtgggactactcgcatttctgggtcttctgttctgtttgggcgtagccatgtttacatatcagtctctccaagggtgcccccggaagatggctggagagatggccgagggcctgcgttacatcccgcgcagctgtggttcaaatagttatgtgttagtccctgtgtga

SEQ ID NO: 5126 - RNA, 1194 nt, synthetic construct
  misc_feature 1..1194: note = derived and/or modified sequence opt4 fromCX3CL1__Homo_sapiens__CAG33707
  source 1..1194: mol_type = other RNA
atggcccccatcagcctgagctggctgctgagactggccaccttctgccacctgaccgtgctgctggccggccagcaccacggcgtgaccaagtgcaacatcacctgcagcaagatgaccagcaagatccccgtggccctgctgatccactaccagcagaaccaggccagctgcggcaagagagccatcatcctggagaccagacagcacagactgttctgcgccgaccccaaggagcagtgggtgaaggacgccatgcagcacctggacagacaggccgccgccctgaccagaaacggcggcaccttcgagaagcagatcggcgaggtgaagcccagaaccacccccgccgccggcggcatggacgagagcgtggtgctggagcccgaggccaccggcgagagcagcagccccgagcccacccccagcagccaggaggcccagagagccctgggcaccagccccgagctgcccaccggcgtgaccggcagcagcggcaccagactgccccccacccccaaggcccaggacggcggccccgtgggcaccgagctgttcagagtgccccccgtgagcaccgccgccacctggcagagcagcgccccccaccagcccggccccagcctgtgggccgaggccaagaccagcgaggcccccagcacccaggaccccagcacccaggccagcaccgccagcagccccgcccccgaggagaacgcccccagcgagggccagagagtgtggggccagggccagagccccagacccgagaacagcctggagagagaggagatgggccccgtgcccgcccacaccgacgccttccaggactggggccccggcagcatggcccacgtgagcgtggtgcccgtgagcagcgagggcacccccagcagagagcccgtggccagcggcagctggacccccaaggccgaggagcccatccacgccaccatggacccccagagactgggcgtgctgatcacccccgtgcccgacgcccaggccgccaccagaagacaggccgtgggcctgctggccttcctgggcctgctgttctgcctgggcgtggccatgttcacctaccagagcctgcagggctgccccagaaagatggccggcgagatggccgagggcctgagatacatccccagaagctgcggcagcaacagctacgtgctggtgcccgtgtga

SEQ ID NO: 5127 - RNA, 1194 nt, synthetic construct
  misc_feature 1..1194: note = derived and/or modified sequence opt5 fromCX3CL1__Homo_sapiens__CAG33707
  source 1..1194: mol_type = other RNA
atggcccccatcagcctgtcctggctcctgagacttgctaccttctgccacctgacagtgctcctggccggccagcatcacggggtcacgaagtgtaacattacctgctctaaaatgacaagcaagatccctgttgcgcttctgattcattaccaacagaatcaggcttcctgtggaaaacgggccatcattctcgagacccgccagcacagactgttttgcgccgacccgaaggaacaatgggtgaaagatgctatgcagcatctggaccggcaggccgctgccctcacacgcaacggcgggaccttcgagaagcagatcggagaagtgaagcccagaacaacccctgcggccggcgggatggatgagtctgtcgtgctggaacccgaggctacgggagagagctcctctcctgaacccacccctagctcccaagaggcccagcgggctcttggcacaagcccggaactgcccaccggcgttacagggtcttccggaacccgcctccctcccacgcctaaagcccaggacggcgggcccgtgggaacagagctgtttagagtcccgcctgtgagcaccgcggccacatggcagtcttccgctccccaccaacctggccccagcctttgggccgaggctaagacctctgaagccccctccacccaggatcctagcacacaggcctccacggcttctagcccggcgcccgaggaaaatgccccttccgaggggcaacgggtttggggacagggccagagcccccgccctgaaaactctctggagagagaggaaatgggccccgtgccggctcacaccgacgccttccaggattgggggcctggatccatggcccatgtcagcgtggtgcccgtctctagcgagggcacaccttcccgggaacccgttgcttctgggagctggacccctaaagccgaggaacccatccacgcgacaatggacccgcaacgcctcggagtgctgattacccctgtgcccgatgctcaggccgccacgagacggcaggctgtcggcctgctcgcctttctggggcttctgttctgtctcggagtggctatgtttacatatcagtccctgcaaggctgcccccgcaagatggccggcgagatggcggaggggcttagatacatccctcggagctgtggatctaattcctatgttctggtgccggtctga

SEQ ID NO: 5128 - RNA, 1194 nt, synthetic construct
  misc_feature 1..1194: note = derived and/or modified sequence opt6 fromCX3CL1__Homo_sapiens__CAG33707
  source 1..1194: mol_type = other RNA
atggcacctataagcttaagctggttactaagattagcaaccttctgtcatctaacagttttactagcaggacaacatcatggagtaactaaatgtaacataacatgttcaaaaatgactagtaaaataccagtagctttattaatacactatcaacaaaatcaagcaagttgtggcaaaagagcaataatcctagaaacaagacaacatagattattctgtgcagatccaaaagaacaatgggtaaaagatgcaatgcaacatttagatagacaagcagcagccttaactagaaatggaggtacatttgaaaaacaaataggagaagtaaaaccaaggacaacacctgcagcaggaggaatggatgaatcagtagttttagaaccagaagccacaggtgaatcttcatcaccagaaccaacaccatcctcacaagaagcacaaagagcattaggaacatcaccagaattacccacaggagttacagggagtagtggtacaaggttacctcctacaccaaaagcccaagatggtggacccgttggtacagaactttttagagtaccccctgtatcaacagcagcaacatggcaatcatcagcaccacatcaaccaggaccatcattatgggcagaagcaaaaacatcagaagcaccttctacacaagacccatcaacacaagcttcaacagcatcatctccagctcccgaagaaaacgctccttcagaaggacaaagagtatggggacaaggacaatcaccaagaccagaaaattcacttgaacgagaagaaatgggaccagtaccagcacacaccgatgcatttcaagattggggaccaggaagtatggcacatgtaagtgtagtaccagtaagttcagaaggtacaccatcaagagaaccagtcgcatcaggaagctggacaccaaaagcagaagaaccaatacacgcgacaatggacccccaaagactaggagtattaataacaccagtccccgatgcccaagcagctacaagaagacaagctgtaggccttctagcttttctaggattattattttgtttgggtgttgcaatgtttacatatcaatccttacaaggatgcccacgaaaaatggcaggagaaatggcagaaggactaagatatataccccgatcatgcggatcaaattcatacgtacttgtaccagtataa

SEQ ID NO: 5129 - protein, 98 aa, synthetic construct
  REGION 1..98: note = CXCL10__Homo_sapiens__A0A024RDA4
MNQTAILICCLIFLTLSGIQGVPLSRTVRCTCISISNQPVNPRSLEKLEIIPASQFCPRVEIIATMKKKGEKRCLNPESKAIKNLLKAVSKERSKRSP

SEQ ID NO: 5130 - RNA, 297 nt, synthetic construct
  misc_feature 1..297: note = CXCL10__Homo_sapiens__EAX05772
  source 1..297: mol_type = other RNA
atgaatcaaactgccattctgatttgctgccttatctttctgactctaagtggcattcaaggagtacctctctctagaactgtacgctgtacctgcatcagcattagtaatcaacctgttaatccaaggtctttagaaaaacttgaaattattcctgcaagccaattttgtccacgtgttgagatcattgctacaatgaaaaagaagggtgagaagagatgtctgaatccagaatcgaaggccatcaagaatttactgaaagcagttagcaaggaaaggtctaaaagatctccttaa

SEQ ID NO: 5131 - RNA, 297 nt, synthetic construct
  misc_feature 1..297: note = derived and/or modified sequence opt1 fromCXCL10__Homo_sapiens__EAX05772
  source 1..297: mol_type = other RNA
atgaaccagaccgccatcctgatctgctgcctcatcttcctgaccctgagcggcatccagggggtgcccctctcccgcaccgtccggtgcacgtgcatcagcatctccaaccagccggtgaacccccgcagcctggagaagctggagatcatccccgcctcccagttctgcccccgggtggagatcatcgcgaccatgaagaagaagggcgagaagcgctgcctcaacccggagagcaaggccatcaagaacctgctgaaggccgtctccaaggagcggagcaagcgctccccctga

SEQ ID NO: 5132 - RNA, 297 nt, synthetic construct
  misc_feature 1..297: note = derived and/or modified sequence opt2 fromCXCL10__Homo_sapiens__EAX05772
  source 1..297: mol_type = other RNA
atgaaccagaccgccatcctcatctgctgcctcatcttcctcaccctctccggcatccagggcgtccccctctcccgcaccgtccgctgcacctgcatctccatctccaaccagcccgtcaacccccgctccctcgagaagctcgagatcatccccgcctcccagttctgcccccgcgtcgagatcatcgccaccatgaagaagaagggcgagaagcgctgcctcaaccccgagtccaaggccatcaagaacctcctcaaggccgtctccaaggagcgctccaagcgctccccctga

SEQ ID NO: 5133 - RNA, 297 nt, synthetic construct
  misc_feature 1..297: note = derived and/or modified sequence opt3 fromCXCL10__Homo_sapiens__EAX05772
  source 1..297: mol_type = other RNA
atgaaccagaccgccatcctgatttgctgtctcatattccttacactgagcggcatccaaggggtgcccttgtccagaactgtcaggtgcacgtgtatttctatctcaaatcagcctgttaacccacggagtttagagaagctggaaattatcccggctagccagttttgcccccgcgtggagataatcgcaaccatgaaaaagaaaggagaaaagcgatgtctaaatcctgagtccaaagccattaagaacctcctgaaggcggtatctaaagaacgttcgaagagatcaccatga

SEQ ID NO: 5134 - RNA, 297 nt, synthetic construct
  misc_feature 1..297: note = derived and/or modified sequence opt4 fromCXCL10__Homo_sapiens__EAX05772
  source 1..297: mol_type = other RNA
atgaaccagaccgccatcctgatctgctgcctgatcttcctgaccctgagcggcatccagggcgtgcccctgagcagaaccgtgagatgcacctgcatcagcatcagcaaccagcccgtgaaccccagaagcctggagaagctggagatcatccccgccagccagttctgccccagagtggagatcatcgccaccatgaagaagaagggcgagaagagatgcctgaaccccgagagcaaggccatcaagaacctgctgaaggccgtgagcaaggagagaagcaagagaagcccctga

SEQ ID NO: 5135 - RNA, 297 nt, synthetic construct
  misc_feature 1..297: note = derived and/or modified sequence opt5 fromCXCL10__Homo_sapiens__EAX05772
  source 1..297: mol_type = other RNA
atgaaccagaccgccatcctgatttgctgtctcatcttcctgacacttagcggcattcaaggggtgcccctgtccagaacggtccggtgcacctgtatctctattagcaatcagcctgttaacccgcgctccctcgagaagctggaaatcatccccgcttctcagttttgccctagagtggagattatcgccacaatgaaaaagaaaggagaaaagcggtgtcttaatcccgagagcaaagcgattaagaacctgctcaaggctgtgtccaaagaacgctctaagagaagcccttga

SEQ ID NO: 5136 - RNA, 297 nt, synthetic construct
  misc_feature 1..297: note = derived and/or modified sequence opt6 fromCXCL10__Homo_sapiens__EAX05772
  source 1..297: mol_type = other RNA
atgaaccaaacagcaatactaatatgctgcctaatattcctaacactatcaggaatacaaggagtaccactatcaagaacagtaagatgcacatgcatatcaatatcaaaccaaccagtaaacccaagatcactagaaaaactagaaataataccagcatcacaattctgcccaagagtagaaataatagcaacaatgaaaaaaaaaggagaaaaaagatgcctaaacccagaatcaaaagcaataaaaaacctactaaaagcagtatcaaaagaaagatcaaaaagatcaccataa

SEQ ID NO: 5137 - protein, 98 aa, synthetic construct; identical to SEQ ID NO: 5129
  REGION 1..98: note = CXCL10__Homo_sapiens__P02778

SEQ ID NO: 5138 - RNA, 297 nt, synthetic construct; identical to SEQ ID NO: 5130
  misc_feature 1..297: note = CXCL10__Homo_sapiens__AAH10954
  source 1..297: mol_type = other RNA

SEQ ID NO: 5139 - RNA, 297 nt, synthetic construct; identical to SEQ ID NO: 5131
  misc_feature 1..297: note = derived and/or modified sequence opt1 fromCXCL10__Homo_sapiens__AAH10954
  source 1..297: mol_type = other RNA

SEQ ID NO: 5140 - RNA, 297 nt, synthetic construct; identical to SEQ ID NO: 5132
  misc_feature 1..297: note = derived and/or modified sequence opt2 fromCXCL10__Homo_sapiens__AAH10954
  source 1..297: mol_type = other RNA

SEQ ID NO: 5141 - RNA, 297 nt, synthetic construct; identical to SEQ ID NO: 5133
  misc_feature 1..297: note = derived and/or modified sequence opt3 fromCXCL10__Homo_sapiens__AAH10954
  source 1..297: mol_type = other RNA

SEQ ID NO: 5142 - RNA, 297 nt, synthetic construct; identical to SEQ ID NO: 5134
  misc_feature 1..297: note = derived and/or modified sequence opt4 fromCXCL10__Homo_sapiens__AAH10954
  source 1..297: mol_type = other RNA

SEQ ID NO: 5143 - RNA, 297 nt, synthetic construct; identical to SEQ ID NO: 5135
  misc_feature 1..297: note = derived and/or modified sequence opt5 fromCXCL10__Homo_sapiens__AAH10954
  source 1..297: mol_type = other RNA

SEQ ID NO: 5144 - RNA, 297 nt, synthetic construct
  misc_feature 1..297: note = derived and/or modified sequence opt6 fromCXCL10__Homo_sapiens__AAH10954
  source 1..297: mol_type = other RNA
atgaaccaaacagcaatactcatatgctgcctaatattcctaacactatcaggaatacaaggagtaccactatcaagaacagtaagatgcacatgcatatcaatatcaaaccaaccagtaaacccaagatcactagaaaaactagaaataataccagcatcacaattctgcccacgagtagaaataatagcaacaatgaaaaaaaaaggagaaaaaagatgcctaaacccagaatcaaaagcaataaaaaacctactaaaagcagtatcaaaagaaagatcaaaacgatcaccataa

SEQ ID NO: 5145 - protein, 94 aa, synthetic construct
  REGION 1..94: note = CXCL11__Homo_sapiens__O14625
MSVKGMAIALAVILCATVVQGFPMFKRGRCLCIGPGVKAVKVADIEKASIMYPSNNCDKIEVIITLKENKGQRCLNPKSKQARLIIKKVERKNF

SEQ ID NO: 5146 - RNA, 285 nt, synthetic construct
  misc_feature 1..285: note = CXCL11__Homo_sapiens__AAC39775
  source 1..285: mol_type = other RNA
atgagtgtgaagggcatggctatagccttggctgtgatattgtgtgctacagttgttcaaggcttccccatgttcaaaagaggacgctgtctttgcataggccctggggtaaaagcagtgaaagtggcagatattgagaaagcctccataatgtacccaagtaacaactgtgacaaaatagaagtgattattaccctgaaagaaaataaaggacaacgatgcctaaatcccaaatcgaagcaagcaaggcttataatcaaaaaagttgaaagaaagaatttttaa

SEQ ID NO: 5147 - RNA, 285 nt, synthetic construct
  misc_feature 1..285: note = derived and/or modified sequence opt1 fromCXCL11__Homo_sapiens__AAC39775
  source 1..285: mol_type = other RNA
atgagcgtgaagggcatggccatcgccctggcggtcatcctctgcgccaccgtggtgcaggggttccccatgttcaagcgcggccggtgcctgtgcatcgggccgggcgtcaaggccgtgaaggtggccgacatcgagaaggcctccatcatgtaccccagcaacaactgcgacaagatcgaggtcatcatcaccctgaaggagaacaaggggcagcgctgcctcaaccccaagtccaagcaggcgcggctgatcatcaagaaggtggagcgcaagaacttctga

SEQ ID NO: 5148 - RNA, 285 nt, synthetic construct
  misc_feature 1..285: note = derived and/or modified sequence opt2 fromCXCL11__Homo_sapiens__AAC39775
  source 1..285: mol_type = other RNA
atgtccgtcaagggcatggccatcgccctcgccgtcatcctctgcgccaccgtcgtccagggcttccccatgttcaagcgcggccgctgcctctgcatcggccccggcgtcaaggccgtcaaggtcgccgacatcgagaaggcctccatcatgtacccctccaacaactgcgacaagatcgaggtcatcatcaccctcaaggagaacaagggccagcgctgcctcaaccccaagtccaagcaggcccgcctcatcatcaagaaggtcgagcgcaagaacttctga

SEQ ID NO: 5149 - RNA, 285 nt, synthetic construct
  misc_feature 1..285: note = derived and/or modified sequence opt3 fromCXCL11__Homo_sapiens__AAC39775
  source 1..285: mol_type = other RNA
atgagcgtgaaaggcatggccatcgctctggcagtcattctctgcgccaccgttgtgcaggggttccccatgtttaaaagaggaaggtgtctttgcataggtcctggcgtaaaggcggtgaaagtcgctgacatcgagaaggcctccattatgtacccatctaacaattgtgataaaatcgaagtgattatcacactgaaggagaacaaggggcaacggtgcttgaatccgaaatcaaagcaggcacgcttaataatcaaaaaggttgaacgaaagaacttctga

SEQ ID NO: 5150 - RNA, 285 nt, synthetic construct
  misc_feature 1..285: note = derived and/or modified sequence opt4 fromCXCL11__Homo_sapiens__AAC39775
  source 1..285: mol_type = other RNA
atgagcgtgaagggcatggccatcgccctggccgtgatcctgtgcgccaccgtggtgcagggcttccccatgttcaagagaggcagatgcctgtgcatcggccccggcgtgaaggccgtgaaggtggccgacatcgagaaggccagcatcatgtaccccagcaacaactgcgacaagatcgaggtgatcatcaccctgaaggagaacaagggccagagatgcctgaaccccaagagcaagcaggccagactgatcatcaagaaggtggagagaaagaacttctga

SEQ ID NO: 5151 - RNA, 285 nt, synthetic construct
  misc_feature 1..285: note = derived and/or modified sequence opt5 fromCXCL11__Homo_sapiens__AAC39775
  source 1..285: mol_type = other RNA
atgagcgtgaagggcatggccatcgctctggccgtcattctctgcgcgaccgttgtgcaggggttccccatgtttaaaagaggacggtgtctgtgcatcggccctggggtgaaggctgtcaaagtggccgacattgagaaggcctccatcatgtacccgtctaacaattgtgataaaattgaagttatcatcacacttaaggagaacaagggacaacgctgcctgaatcccaaaagcaagcaggctagactcattatcaaaaaggtggaacggaaaaacttctga

SEQ ID NO: 5152 - RNA, 285 nt, synthetic construct
  misc_feature 1..285: note = derived and/or modified sequence opt6 fromCXCL11__Homo_sapiens__AAC39775
  source 1..285: mol_type = other RNA
atgtcagtaaaaggaatggcaatagcactagcagtaatactatgcgcaacagtagtacaaggattcccaatgttcaaaagaggaagatgcctatgcataggaccaggagtaaaagcagtaaaagtagcagacatagaaaaagcaagcataatgtatccatcaaacaattgcgacaaaatagaagtaataataacattaaaagaaaacaaaggacaaagatgcctaaatccaaaaagcaaacaagcaagactaataataaaaaaagtagaaagaaaaaacttttaa

SEQ ID NO: 5153 - protein, 93 aa, synthetic construct
  REGION 1..93: note = CXCL12__Homo_sapiens__P48061
MNAKVVVVLVLVLTALCLSDGKPVSLSYRCPCRFFESHVARANVKHLKILNTPNCALQIVARLKNNNRQVCIDPKLKWIQEYLEKALNKRFKM

SEQ ID NO: 5154 - RNA, 282 nt, synthetic construct
  misc_feature 1..282: note = CXCL12__Homo_sapiens__AAA97434
  source 1..282: mol_type = other RNA
atgaacgccaaggtcgtggtcgtgctggtcctcgtgctgaccgcgctctgcctcagcgacgggaagcccgtcagcctgagctacagatgcccatgccgattcttcgaaagccatgttgccagagccaacgtcaagcatctcaaaattctcaacactccaaactgtgcccttcagattgtagcccggctgaagaacaacaacagacaagtgtgcattgacccgaagctaaagtggattcaggagtacctggagaaagctttaaacaagaggttcaagatgtga

SEQ ID NO: 5155 - RNA, 282 nt, synthetic construct
  misc_feature 1..282: note = derived and/or modified sequence opt1 fromCXCL12__Homo_sapiens__AAA97434
  source 1..282: mol_type = other RNA
atgaacgccaaggtggtcgtggtgctggtcctcgtgctgaccgccctgtgcctcagcgacggcaagcccgtgtccctgagctaccgctgcccgtgccggttcttcgagtcccacgtcgcgcgcgccaacgtgaagcacctgaagatcctcaacacccccaactgcgccctgcagatcgtggcccggctgaagaacaacaaccgccaggtctgcatcgaccccaagctcaagtggatccaggagtacctggagaaggccctgaacaagcggttcaagatgtga

SEQ ID NO: 5156 - RNA, 282 nt, synthetic construct
  misc_feature 1..282: note = derived and/or modified sequence opt2 fromCXCL12__Homo_sapiens__AAA97434
  source 1..282: mol_type = other RNA
atgaacgccaaggtcgtcgtcgtcctcgtcctcgtcctcaccgccctctgcctctccgacggcaagcccgtctccctctcctaccgctgcccctgccgcttcttcgagtcccacgtcgcccgcgccaacgtcaagcacctcaagatcctcaacacccccaactgcgccctccagatcgtcgcccgcctcaagaacaacaaccgccaggtctgcatcgaccccaagctcaagtggatccaggagtacctcgagaaggccctcaacaagcgcttcaagatgtga

SEQ ID NO: 5157 - RNA, 282 nt, synthetic construct
  misc_feature 1..282: note = derived and/or modified sequence opt3 fromCXCL12__Homo_sapiens__AAA97434
  source 1..282: mol_type = other RNA
atgaacgccaaggtggtcgttgtgctggtactcgtgcttaccgctctgtgcttgagcgacggcaaacccgtctccttatcttacagatgtccttgcaggttctttgagtcacacgtggcacgggccaatgttaagcatctgaaaatcctaaacacaccaaattgtgcgctccagattgtggctcgcctgaagaacaataaccgacaagtctgcatagatccgaaacttaagtggatccaggaatatctggagaaggccttgaataaacgtttcaagatgtga

SEQ ID NO: 5158 - RNA, 282 nt, synthetic construct
  misc_feature 1..282: note = derived and/or modified sequence opt4 fromCXCL12__Homo_sapiens__AAA97434
  source 1..282: mol_type = other RNA
atgaacgccaaggtggtggtggtgctggtgctggtgctgaccgccctgtgcctgagcgacggcaagcccgtgagcctgagctacagatgcccctgcagattcttcgagagccacgtggccagagccaacgtgaagcacctgaagatcctgaacacccccaactgcgccctgcagatcgtggccagactgaagaacaacaacagacaggtgtgcatcgaccccaagctgaagtggatccaggagtacctggagaaggccctgaacaagagattcaagatgtga

SEQ ID NO: 5159 - RNA, 282 nt, synthetic construct
  misc_feature 1..282: note = derived and/or modified sequence opt5 fromCXCL12__Homo_sapiens__AAA97434
  source 1..282: mol_type = other RNA
atgaacgccaaggtggtcgttgtgctggtgctcgtcctgaccgctctttgcctgagcgacggcaaacccgtgtccctctcttacagatgtccttgccggttctttgagagccacgttgcccgcgcgaatgtgaagcatctgaaaatccttaacacaccgaattgtgctctgcagattgtcgccagactcaagaacaataaccggcaagtgtgcatcgatcccaaactgaagtggattcaggaatatctggagaaggccctcaataaacgcttcaagatgtga

SEQ ID NO: 5160 - RNA, 282 nt, synthetic construct
  misc_feature 1..282: note = derived and/or modified sequence opt6 fromCXCL12__Homo_sapiens__AAA97434
  source 1..282: mol_type = other RNA
atgaacgcaaaagtagtagtagtactagtactagtactaacagcactatgcttaagcgacggaaaaccagtaagcctaagctacagatgcccatgcagattcttcgaaagccacgtagcaagagcaaacgtaaaacacctaaaaatactaaacacaccaaactgcgcactacaaatagtagcaagactaaaaaacaacaacagacaagtatgcatagacccaaaactaaaatggatacaagaatacctagaaaaagcactaaacaaaagattcaaaatgtaa

SEQ ID NO: 5161 - protein, 62 aa, synthetic construct [sequence omitted]

SEQ ID NO: 5162 - RNA, 189 nt, synthetic construct
  misc_feature 1..189: note = CXCL13__Homo_sapiens__CCQ42936
  source 1..189: mol_type = other RNA
atgtacacatgtatcctttcacacatttgccttgacaaacttctttcactcacatctttttcactgactttttttgtggggggcggggccggggggactctggtatctaattctttaatgattcctataaatctaatgacattcaataaagttgagcaaacattttacttaaaaaaaaaaaaaaaataa

SEQ ID NO: 5163 - RNA, 189 nt, synthetic construct
  misc_feature 1..189: note = derived and/or modified sequence opt1 fromCXCL13__Homo_sapiens__CCQ42936
  source 1..189: mol_type = other RNA
atgtacacgtgcatcctgagccacatctgcctcgacaagctgctgtccctcaccagcttctccctgaccttcttcgtgggcgggggcgccgggggcaccctggtcagcaactccctcatgatccccatcaacctgatgaccttcaacaaggtggagcagaccttctacctgaagaagaagaagaagtga

SEQ ID NO: 5164 - RNA, 189 nt, synthetic construct
  misc_feature 1..189: note = derived and/or modified sequence opt2 fromCXCL13__Homo_sapiens__CCQ42936
  source 1..189: mol_type = other RNA
atgtacacctgcatcctctcccacatctgcctcgacaagctcctctccctcacctccttctccctcaccttcttcgtcggcggcggcgccggcggcaccctcgtctccaactccctcatgatccccatcaacctcatgaccttcaacaaggtcgagcagaccttctacctcaagaagaagaagaagtga

SEQ ID NO: 5165 - RNA, 189 nt, synthetic construct
  misc_feature 1..189: note = derived and/or modified sequence opt3 fromCXCL13__Homo_sapiens__CCQ42936
  source 1..189: mol_type = other RNA
atgtacacttgcatcctgagccacatttgtctcgacaaacttctgtccttgacatctttctcattaacctttttcgtgggcgggggagccggtggcacgctggtcagtaacagcctaatgatacccatcaatctcatgacctttaacaaggttgagcagacattctatctgaagaaaaagaaaaagtga

SEQ ID NO: 5166 - RNA, 189 nt, synthetic construct
  misc_feature 1..189: note = derived and/or modified sequence opt4 fromCXCL13__Homo_sapiens__CCQ42936
  source 1..189: mol_type = other RNA
atgtacacctgcatcctgagccacatctgcctggacaagctgctgagcctgaccagcttcagcctgaccttcttcgtgggcggcggcgccggcggcaccctggtgagcaacagcctgatgatccccatcaacctgatgaccttcaacaaggtggagcagaccttctacctgaagaagaagaagaagtga

SEQ ID NO: 5167 - RNA, 189 nt, synthetic construct
  misc_feature 1..189: note = derived and/or modified sequence opt5 fromCXCL13__Homo_sapiens__CCQ42936
  source 1..189: mol_type = other RNA
atgtatacctgcatcctgagccacatttgtctcgacaagctgctttccctgacatctttcagcctcacgtttttcgtgggcgggggagccggcgggaccctggtctccaactctcttatgatccccattaatctgatgacatttaacaaagttgagcagaccttctacctcaagaaaaagaaaaagtga

SEQ ID NO: 5168 - RNA, 189 nt, synthetic construct
  misc_feature 1..189: note = derived and/or modified sequence opt6 fromCXCL13__Homo_sapiens__CCQ42936
  source 1..189: mol_type = other RNA
atgtacacatgcatactatcacacatatgcctagacaaactactatcactaacatcattctcactaacattcttcgtaggaggaggagcaggaggaacactagtatcaaactcactaatgataccaataaacctaatgacattcaacaaagtagaacaaacattctacctaaaaaaaaaaaaaaaataa

SEQ ID NO: 5169 - protein, 109 aa, synthetic construct
  REGION 1..109: note = CXCL13__Homo_sapiens__O43927
MKFISTSLLLMLLVSSLSPVQGVLEVYYTSLRCRCVQESSVFIPRRFIDRIQILPRGNGCPRKEIIVWKKNKSIVCVDPQAEWIQRMMEVLRKRSSSTLPVPVFKRKIP

SEQ ID NO: 5170 - RNA, 330 nt, synthetic construct
  misc_feature 1..330: note = CXCL13__Homo_sapiens__AAC14402
  source 1..330: mol_type = other RNA
atgaagttcatctcgacatctctgcttctcatgctgctggtcagcagcctctctccagtccaaggtgttctggaggtctattacacaagcttgaggtgtagatgtgtccaagagagctcagtctttatccctagacgcttcattgatcgaattcaaatcttgccccgtgggaatggttgtccaagaaaagaaatcatagtctggaagaagaacaagtcaattgtgtgtgtggaccctcaagctgaatggatacaaagaatgatggaagtattgagaaaaagaagttcttcaactctaccagttccagtgtttaagagaaagattccctga

SEQ ID NO: 5171 - RNA, 330 nt, synthetic construct
  misc_feature 1..330: note = derived and/or modified sequence opt1 fromCXCL13__Homo_sapiens__AAC14402
  source 1..330: mol_type = other RNA
atgaagttcatcagcacctccctgctcctgatgctgctcgtgagctccctgagccccgtccagggcgtgctggaggtgtactacacctccctccgctgccggtgcgtccaggagagctccgtgttcatcccgcgccggttcatcgaccgcatccagatcctgccccgggggaacggctgcccccgcaaggagatcatcgtgtggaagaagaacaagagcatcgtctgcgtggacccccaggccgagtggatccagcggatgatggaggtgctgcgcaagcggtccagctccacgctcccggtccccgtgttcaagcgcaagatcccctga

SEQ ID NO: 5172 - RNA, 330 nt, synthetic construct
  misc_feature 1..330: note = derived and/or modified sequence opt2 fromCXCL13__Homo_sapiens__AAC14402
  source 1..330: mol_type = other RNA
atgaagttcatctccacctccctcctcctcatgctcctcgtctcctccctctcccccgtccagggcgtcctcgaggtctactacacctccctccgctgccgctgcgtccaggagtcctccgtcttcatcccccgccgcttcatcgaccgcatccagatcctcccccgcggcaacggctgcccccgcaaggagatcatcgtctggaagaagaacaagtccatcgtctgcgtcgacccccaggccgagtggatccagcgcatgatggaggtcctccgcaagcgctcctcctccaccctccccgtccccgtcttcaagcgcaagatcccctga

SEQ ID NO: 5173 - RNA, 330 nt, synthetic construct
  misc_feature 1..330: note = derived and/or modified sequence opt3 fromCXCL13__Homo_sapiens__AAC14402
  source 1..330: mol_type = other RNA
atgaagttcatcagcacctccctgctccttatgctgttggtgtcttcattaagtcccgtccagggcgttctggaggtgtactatacaagcctaagatgtaggtgcgtacaagaatcctctgtgtttattcctcggcgcttcatagaccgaatccagattctcccacgtgggaacggatgcccgagaaaagagatcattgtctggaagaaaaataagtcgatcgtgtgtgttgatccccaggccgaatggatacagaggatgatggaggtgctgcggaaacgctcaagcagtactcttcctgtcccagtgtttaagagaaagatcccctga

SEQ ID NO: 5174 - RNA, 330 nt, synthetic construct
  misc_feature 1..330: note = derived and/or modified sequence opt4 fromCXCL13__Homo_sapiens__AAC14402
  source 1..330: mol_type = other RNA
atgaagttcatcagcaccagcctgctgctgatgctgctggtgagcagcctgagccccgtgcagggcgtgctggaggtgtactacaccagcctgagatgcagatgcgtgcaggagagcagcgtgttcatccccagaagattcatcgacagaatccagatcctgcccagaggcaacggctgccccagaaaggagatcatcgtgtggaagaagaacaagagcatcgtgtgcgtggacccccaggccgagtggatccagagaatgatggaggtgctgagaaagagaagcagcagcaccctgcccgtgcccgtgttcaagagaaagatcccctga

SEQ ID NO: 5175 - RNA, 330 nt, synthetic construct
  misc_feature 1..330: note = derived and/or modified sequence opt5 fromCXCL13__Homo_sapiens__AAC14402
  source 1..330: mol_type = other RNA
atgaagttcatcagcacctccctgctcctgatgcttctggtgtctagcctctcccccgtccagggcgttctggaggtgtactatacatctcttagatgccggtgtgtgcaagaaagctccgtctttattcctcgcagattcatcgaccggattcagatcctgccgcgcgggaacggatgccccagaaaagagattatcgtgtggaagaaaaataagtctatcgtttgtgtggatcctcaggccgaatggattcagcggatgatggaggtcctccgcaaaagaagctccagcacgctgcccgtgcctgtttttaagcggaagatcccctga

SEQ ID NO: 5176 - RNA, 330 nt, synthetic construct
  misc_feature 1..330: note = derived and/or modified sequence opt6 fromCXCL13__Homo_sapiens__AAC14402
  source 1..330: mol_type = other RNA
atgaaatttatatcaacatcactactactaatgctattagtatcaagcctaagcccagtacaaggagtactcgaagtatattacacaagcttaagatgtagatgtgtacaagaatcaagcgtattcataccaagaagatttatagacagaatacaaatactaccaagaggaaacggatgcccaagaaaagaaataatagtatggaaaaaaaataaatcaatagtatgcgtagacccacaagcagaatggatacaaagaatgatggaagtattaagaaaaagatcaagctcaacattaccagtaccagtattcaaaagaaaaataccataa

SEQ ID NO: 5177 - protein, 111 aa, synthetic construct
  REGION 1..111: note = CXCL14__Homo_sapiens__O95715
MSLLPRRAPPVSMRLLAAALLLLLLALYTARVDGSKCKCSRKGPKIRYSDVKKLEMKPKYPHCEEKMVIITTKSVSRYRGQEHCLHPKLQSTKRFIKWYNAWNEKRRVYEE

SEQ ID NO: 5178 - RNA, 336 nt, synthetic construct
  misc_feature 1..336: note = CXCL14__Homo_sapiens__AAP35743
  source 1..336: mol_type = other RNA
atgtccctgctcccacgccgcgcccctccggtcagcatgaggctcctggcggccgcgctgctcctgctgctgctggcgctgtacaccgcgcgtgtggacgggtccaaatgcaagtgctcccggaagggacccaagatccgctacagcgacgtgaagaagctggaaatgaagccaaagtacccgcactgcgaggagaagatggttatcatcaccaccaagagcgtgtccaggtaccgaggtcaggagcactgcctgcaccccaagctgcagagcaccaagcgcttcatcaagtggtacaacgcctggaacgagaagcgcagggtctacgaagaatag

SEQ ID NO: 5179 - RNA, 336 nt, synthetic construct
  misc_feature 1..336: note = derived and/or modified sequence opt1 fromCXCL14__Homo_sapiens__AAP35743
  source 1..336: mol_type = other RNA
atgagcctgctcccccgccgggccccgcccgtgtccatgcgcctgctggccgcggccctcctgctgctcctgctggccctctacaccgcccgggtcgacggcagcaagtgcaagtgctcccgcaaggggcccaagatccggtacagcgacgtgaagaagctggagatgaagcccaagtacccgcactgcgaggagaagatggtgatcatcaccacgaagtccgtcagccgctaccggggccaggagcactgcctgcaccccaagctccagtccaccaagcgcttcatcaagtggtacaacgcctggaacgagaagcggcgcgtgtacgaggagtga

SEQ ID NO: 5180 - RNA, 336 nt, synthetic construct
  misc_feature 1..336: note = derived and/or modified sequence opt2 fromCXCL14__Homo_sapiens__AAP35743
  source 1..336: mol_type = other RNA
atgtccctcctcccccgccgcgccccccccgtctccatgcgcctcctcgccgccgccctcctcctcctcctcctcgccctctacaccgcccgcgtcgacggctccaagtgcaagtgctcccgcaagggccccaagatccgctactccgacgtcaagaagctcgagatgaagcccaagtacccccactgcgaggagaagatggtcatcatcaccaccaagtccgtctcccgctaccgcggccaggagcactgcctccaccccaagctccagtccaccaagcgcttcatcaagtggtacaacgcctggaacgagaagcgccgcgtctacgaggagtga

SEQ ID NO: 5181 - RNA, 336 nt, synthetic construct
  misc_feature 1..336: note = derived and/or modified sequence opt3 fromCXCL14__Homo_sapiens__AAP35743
  source 1..336: mol_type = other RNA
atgagcctgctccccagaagggcccctccagtgtccatgcggcttctggctgcagccttgttactgctactcctggcgctttacaccgctcgcgtcgacggctctaagtgcaaatgttcacgaaaggggccgaaaatccgttatagtgatgttaagaaactggagatgaagcccaagtaccctcactgcgaagagaaaatggtgattataacaactaagagcgtatccagatataggggacaggaacattgtttgcacccaaaactccaatctacgaagcggttcatcaaatggtacaacgcctggaatgagaagcgcagagtgtatgaagagtga

SEQ ID NO: 5182 - RNA, 336 nt, synthetic construct
  misc_feature 1..336: note = derived and/or modified sequence opt4 fromCXCL14__Homo_sapiens__AAP35743
  source 1..336: mol_type = other RNA
atgagcctgctgcccagaagagccccccccgtgagcatgagactgctggccgccgccctgctgctgctgctgctggccctgtacaccgccagagtggacggcagcaagtgcaagtgcagcagaaagggccccaagatcagatacagcgacgtgaagaagctggagatgaagcccaagtacccccactgcgaggagaagatggtgatcatcaccaccaagagcgtgagcagatacagaggccaggagcactgcctgcaccccaagctgcagagcaccaagagattcatcaagtggtacaacgcctggaacgagaagagaagagtgtacgaggagtga

SEQ ID NO: 5183 - RNA, 336 nt, synthetic construct
  misc_feature 1..336: note = derived and/or modified sequence opt5 fromCXCL14__Homo_sapiens__AAP35743
  source 1..336: mol_type = other RNA
atgagcctgctccccagacgggcccctccggtgtccatgcgcctgcttgctgccgcgctgctcctgcttctgctcgctctgtacaccgccagagtcgacggctctaagtgcaaatgtagccggaaggggcccaaaatccgctattccgatgttaagaaactggagatgaagcctaagtacccccactgcgaagagaaaatggtgattatcacaacgaagtctgtgagcagatatcggggacaggaacattgtctccaccctaaactgcaatccaccaagcgcttcattaaatggtacaacgcctggaatgagaagagacgggtctatgaagagtga

SEQ ID NO: 5184 - RNA, 336 nt, synthetic construct
  misc_feature 1..336: note = derived and/or modified sequence opt6 fromCXCL14__Homo_sapiens__AAP35743
  source 1..336: mol_type = other RNA
atgtcactactaccaagaagagcaccaccagtatcaatgagactactagcagcagcactactactactattactagcactatacacagcaagagtagacggaagcaaatgcaaatgctcaagaaaaggaccaaaaataagatactcagacgtaaaaaaattagaaatgaaaccaaaatacccacactgcgaagaaaaaatggtaataataacaacaaaatcagtatcaagatacagaggacaagaacactgcctacacccaaaactacaaagcacaaaaagattcataaaatggtacaacgcatggaacgaaaaaagaagagtatacgaagaataa

SEQ ID NO: 5185 - protein, 167 aa, synthetic construct
  REGION 1..167: note = CXCL15__Mus_musculus__Q9WVL7
MAAQGWSMLLLAVLNLGIFVRPCDTQELRCLCIQEHSEFIPLKLIKNIMVIFETIYCNRKEVIAVPKNGSMICLDPDAPWVKATVGPITNRFLPEDLKQKEFPPAMKLLYSVEHEKPLYLSFGRPENKRIFPFPIRETSRHFADLAHNSDRNFLRDSSEVSLTGSDA

SEQ ID NO: 5186 - RNA, 504 nt, synthetic construct
  misc_feature 1..504: note = CXCL15__Mus_musculus__AAD38079
  source 1..504: mol_type = other RNA
atggctgctcaaggctggtccatgctcctgctggctgtccttaacctaggcatcttcgtccgtccctgtgacactcaagagctacgatgtctgtgtattcaggaacactctgaattcattcctctcaaactcattaaaaatataatggtgatattcgagaccatttactgcaacagaaaggaagtgatagcagtcccaaaaaatgggagtatgatttgtttggatcctgatgctccatgggtgaaggctactgttggcccaattactaacaggttcctacctgaggacctcaaacaaaaggaatttccaccggcaatgaagcttctgtatagtgttgagcatgaaaagcctctatatctttcatttgggagacctgagaacaagagaatatttccctttccaattcgggagacctctagacactttgctgatttagctcacaacagtgataggaattttctacgggactccagtgaagtcagcttgacaggcagtgatgcctaa

SEQ ID NO: 5187 - RNA, 504 nt, synthetic construct
  misc_feature 1..504: note = derived and/or modified sequence opt1 fromCXCL15__Mus_musculus__AAD38079
  source 1..504: mol_type = other RNA
atggccgcccagggctggagcatgctgctcctggcggtgctgaacctcgggatcttcgtccgcccctgcgacacccaggagctgcggtgcctgtgcatccaggagcactccgagttcatcccgctcaagctgatcaagaacatcatggtgatcttcgagaccatctactgcaaccgcaaggaggtgatcgccgtccccaagaacggcagcatgatctgcctggaccccgacgccccctgggtgaaggccacggtggggccgatcaccaaccggttcctccccgaggacctgaagcagaaggagttcccgcccgccatgaagctgctctactccgtcgagcacgagaagcccctgtacctgagcttcggccgccccgagaacaagcggatcttccccttccccatccgcgagacctcccggcacttcgcggacctcgcccacaacagcgaccgcaacttcctgcgggactccagcgaggtgtccctgaccgggagcgacgcctga

SEQ ID NO: 5188 - RNA, 504 nt, synthetic construct
  misc_feature 1..504: note = derived and/or modified sequence opt2 fromCXCL15__Mus_musculus__AAD38079
  source 1..504: mol_type = other RNA
atggccgcccagggctggtccatgctcctcctcgccgtcctcaacctcggcatcttcgtccgcccctgcgacacccaggagctccgctgcctctgcatccaggagcactccgagttcatccccctcaagctcatcaagaacatcatggtcatcttcgagaccatctactgcaaccgcaaggaggtcatcgccgtccccaagaacggctccatgatctgcctcgaccccgacgccccctgggtcaaggccaccgtcggccccatcaccaaccgcttcctccccgaggacctcaagcagaaggagttcccccccgccatgaagctcctctactccgtcgagcacgagaagcccctctacctctccttcggccgccccgagaacaagcgcatcttccccttccccatccgcgagacctcccgccacttcgccgacctcgcccacaactccgaccgcaacttcctccgcgactcctccgaggtctccctcaccggctccgacgcctga

SEQ ID NO: 5189 - RNA, 504 nt, synthetic construct
  misc_feature 1..504: note = derived and/or modified sequence opt3 fromCXCL15__Mus_musculus__AAD38079
  source 1..504: mol_type = other RNA
atggccgctcagggctggagcatgctgctccttgcagtgctgaacttggggatcttcgtcagaccctgcgacacccaagagttaaggtgtctgtgcattcaggaacactccgagtttatacctctaaagctcatcaaaaatattatggttatcttcgaaacaatttactgtaaccggaaggaggtgatcgccgtaccgaaaaatggatctatgatatgcctggatccagacgcgccctgggtgaaggctactgtcggtcctatcacgaaccgctttcttccagaagatctgaaacagaaggagtttccccctgccatgaagttgctctattcagtggagcatgaaaaaccactgtacctgagttttggccgacccgagaataagcgtattttcccttttccaatcagagaaaccagcaggcacttcgcagacctcgcccataactccgatcggaatttcttacgcgactcttcggaggtttcactgacagggagcgatgcttga

SEQ ID NO: 5190 - RNA, 504 nt, synthetic construct
  misc_feature 1..504: note = derived and/or modified sequence opt4 fromCXCL15__Mus_musculus__AAD38079
  source 1..504: mol_type = other RNA
atggccgcccagggctggagcatgctgctgctggccgtgctgaacctgggcatcttcgtgagaccctgcgacacccaggagctgagatgcctgtgcatccaggagcacagcgagttcatccccctgaagctgatcaagaacatcatggtgatcttcgagaccatctactgcaacagaaaggaggtgatcgccgtgcccaagaacggcagcatgatctgcctggaccccgacgccccctgggtgaaggccaccgtgggccccatcaccaacagattcctgcccgaggacctgaagcagaaggagttcccccccgccatgaagctgctgtacagcgtggagcacgagaagcccctgtacctgagcttcggcagacccgagaacaagagaatcttccccttccccatcagagagaccagcagacacttcgccgacctggcccacaacagcgacagaaacttcctgagagacagcagcgaggtgagcctgaccggcagcgacgcctga

SEQ ID NO: 5191 - RNA, 504 nt, synthetic construct
  misc_feature 1..504: note = derived and/or modified sequence opt5 fromCXCL15__Mus_musculus__AAD38079
  source 1..504: mol_type = other RNA
atggccgctcagggctggagcatgctgctcctggccgtgcttaacctggggatcttcgtcagaccctgcgacacccaagagctccggtgtctgtgcattcaggaacactccgagtttatccctcttaagctgattaaaaatatcatggttattttcgaaacaatctactgtaaccgcaaggaggtgatcgcggtgccgaaaaatggatctatgatttgcctcgatcccgacgctccttgggtcaaggccacggtgggccccatcaccaacagatttctgcctgaagatctgaaacagaaggagtttccccctgccatgaagctcctgtatagcgttgagcatgaaaaaccgctttacctgtccttcgggcggcccgagaataagcgcattttcccttttcccatcagagaaacatctcggcacttcgctgacctcgcccataacagcgatcgcaattttctgagagactcctctgaggtgagccttaccggatccgatgcttga

SEQ ID NO: 5192 - RNA, 504 nt, synthetic construct
  misc_feature 1..504: note = derived and/or modified sequence opt6 fromCXCL15__Mus_musculus__AAD38079
  source 1..504: mol_type = other RNA
atggcagcacaaggatggtcaatgctactactagcagtactaaacctaggaatattcgtaagaccctgcgacacacaagaactaagatgcctatgcatacaagaacactcagaattcataccactaaaactaataaaaaacatcatggtaatattcgaaacaatatactgcaacagaaaagaagtaatagcagtaccaaaaaacggctcaatgatatgcctagaccccgacgcaccatgggtaaaagcaacagtcggaccaataacaaacagattcctaccagaagacctaaaacaaaaagaattcccaccagcaatgaaactactatactcagtagaacacgaaaaaccattatatctatcattcggaagaccagaaaacaaaagaatattcccattcccaataagagaaacatccagacacttcgcagacctagcacacaactcagatagaaacttcctaagagactcatcagaagtatcactaacaggatcagacgcataa

SEQ ID NO: 5193 - protein, 107 aa, synthetic construct
  REGION 1..107: note = CXCL1__Homo_sapiens__P09341
MARAALSAAPSNPRLLRVALLLLLLVAAGRRAAGASVATELRCQCLQTLQGIHPKNIQSVNVKSPGPHCAQTEVIATLKNGRKACLNPASPIVKKIIEKMLNSDKSN

SEQ ID NO: 5194 - RNA, 324 nt, synthetic construct
  misc_feature 1..324: note = CXCL1__Homo_sapiens__AAA35933
  source 1..324: mol_type = other RNA
atggcccgcgctgctctctccgccgcccccagcaatccccggctcctgcgagtggcactgctgctcctgctcctggtagccgctggccggcgcgcagcaggagcgtccgtggccactgaactgcgctgccagtgcttgcagaccctgcagggaattcaccccaagaacatccaaagtgtgaacgtgaagtcccccggaccccactgcgcccaaaccgaagtcatagccacactcaagaatgggcggaaagcttgcctcaatcctgcatcccccatagttaagaaaatcatcgaaaagatgctgaacagtgacaaatccaactga

SEQ ID NO: 5195 - RNA, 324 nt, synthetic construct
  misc_feature 1..324: note = derived and/or modified sequence opt1 fromCXCL1__Homo_sapiens__AAA35933
  source 1..324: mol_type = other RNA
atggcccgcgccgcgctgagcgccgccccctccaacccgcggctcctgcgcgtggccctgctcctgctgctcctggtcgccgcgggccggcgcgccgccggggccagcgtggcgaccgagctgcggtgccagtgcctccagaccctgcagggcatccaccccaagaacatccagtccgtgaacgtcaagagccccgggccccactgcgcccagacggaggtgatcgccaccctgaagaacggccgcaaggcctgcctcaacccggcctcccccatcgtgaagaagatcatcgagaagatgctgaacagcgacaagtccaactga

SEQ ID NO: 5196 - RNA, 324 nt, synthetic construct
  misc_feature 1..324: note = derived and/or modified sequence opt2 fromCXCL1__Homo_sapiens__AAA35933
  source 1..324: mol_type = other RNA
atggcccgcgccgccctctccgccgccccctccaacccccgcctcctccgcgtcgccctcctcctcctcctcctcgtcgccgccggccgccgcgccgccggcgcctccgtcgccaccgagctccgctgccagtgcctccagaccctccagggcatccaccccaagaacatccagtccgtcaacgtcaagtcccccggcccccactgcgcccagaccgaggtcatcgccaccctcaagaacggccgcaaggcctgcctcaaccccgcctcccccatcgtcaagaagatcatcgagaagatgctcaactccgacaagtccaactga

SEQ ID NO: 5197 - RNA, 324 nt, synthetic construct
  misc_feature 1..324: note = derived and/or modified sequence opt3 fromCXCL1__Homo_sapiens__AAA35933
  source 1..324: mol_type = other RNA
atggccagagctgcactgagcgccgcgccctccaaccctaggctgcttcgggtggctctgttgttactgctactcgtcgccgcaggccgccgagccgctggggcatctgttgccaccgagctgcgttgccagtgtcttcaaacactgcagggaatccacccaaagaatattcagtcagtgaacgtaaaaagtccgggtccccattgcgctcagactgaagtgatagccacgttgaagaatggcagaaaagcgtgtctcaaccctgcaagcccaatcgtcaagaaaattatcgagaagatgctcaattccgacaagtctaactga

SEQ ID NO: 5198 - RNA, 324 nt, synthetic construct
  misc_feature 1..324: note = derived and/or modified sequence opt4 fromCXCL1__Homo_sapiens__AAA35933
  source 1..324: mol_type = other RNA
atggccagagccgccctgagcgccgcccccagcaaccccagactgctgagagtggccctgctgctgctgctgctggtggccgccggcagaagagccgccggcgccagcgtggccaccgagctgagatgccagtgcctgcagaccctgcagggcatccaccccaagaacatccagagcgtgaacgtgaagagccccggcccccactgcgcccagaccgaggtgatcgccaccctgaagaacggcagaaaggcctgcctgaaccccgccagccccatcgtgaagaagatcatcgagaagatgctgaacagcgacaagagcaactga

SEQ ID NO: 5199 - RNA, 324 nt, synthetic construct
  misc_feature 1..324: note = derived and/or modified sequence opt5 fromCXCL1__Homo_sapiens__AAA35933
  source 1..324: mol_type = other RNA
atggccagagctgccctgagcgcggctccctccaaccctcggctcctgcgcgtggcccttctgctcctgcttctggtcgccgctggcagacgggccgctggggcctctgttgcgaccgagctccgctgccagtgtctgcaaacactgcagggaatccacccgaagaatattcagagcgtgaacgtgaaatcccccggccctcattgcgcccagacggaagtcatcgctaccctcaagaatgggagaaaagcctgtctgaaccccgcttctcctattgtgaagaaaatcattgagaagatgcttaatagcgacaagtccaactga

SEQ ID NO: 5200 - RNA, 324 nt, synthetic construct
  misc_feature 1..324: note = derived and/or modified sequence opt6 fromCXCL1__Homo_sapiens__AAA35933
  source 1..324: mol_type = other RNA
atggcaagagcagcactaagcgcagcaccaagcaacccaagactactaagagtagcactactattactactactagtagcagcaggaagaagagcagcaggagcatcagtagcaacagaactaagatgccaatgcctacaaacactacaaggaatacacccaaaaaacatacaaagcgtaaacgtaaaatcaccaggaccacactgcgcacaaacagaagtaatagcaacactaaaaaacggaagaaaagcatgcctaaacccagcatcaccaatagtaaaaaaaataatagaaaaaatgctaaacagcgacaaatcaaactaa

SEQ ID NO: 5201 - protein, 107 aa, synthetic construct
  REGION 1..107: note = CXCL2__Homo_sapiens__A0A024RDD9
MARATLSAAPSNPRLLRVALLLLLLVAASRRAAGAPLATELRCQCLQTLQGIHLKNIQSVKVKSPGPHCAQTEVIATLKNGQKACLNPASPMVKKIIEKMLKNGKSN

SEQ ID NO: 5202 - RNA, 324 nt, synthetic construct
  misc_feature 1..324: note = CXCL2__Homo_sapiens__EAX05701
  source 1..324: mol_type = other RNA
atggcccgcgccacgctctccgccgcccccagcaatccccggctcctgcgggtggcgctgctgctcctgctcctggtggccgccagccggcgcgcagcaggagcgcccctggccactgaactgcgctgccagtgcttgcagaccctgcagggaattcacctcaagaacatccaaagtgtgaaggtgaagtcccccggaccccactgcgcccaaaccgaagtcatagccacactcaagaatgggcagaaagcttgtctcaaccccgcatcgcccatggttaagaaaatcatcgaaaagatgctgaaaaatggcaaatccaactga

SEQ ID NO: 5203 - RNA, 324 nt, synthetic construct
  misc_feature 1..324: note = derived and/or modified sequence opt1 fromCXCL2__Homo_sapiens__EAX05701
  source 1..324: mol_type = other RNA
atggcccgcgccaccctgagcgcggccccctccaacccgcggctcctgcgcgtggccctgctcctgctgctcctggtcgccgccagccggcgcgcggccggcgcgcccctggccaccgagctccggtgccagtgcctgcagacgctgcaggggatccacctcaagaacatccagtccgtgaaggtcaagagccccggcccccactgcgcccagaccgaggtgatcgccaccctgaagaacgggcagaaggcctgcctgaacccggcctcccccatggtgaagaagatcatcgagaagatgctcaagaacggcaagagcaactga

SEQ ID NO: 5204 - RNA, 324 nt, synthetic construct
  misc_feature 1..324: note = derived and/or modified sequence opt2 fromCXCL2__Homo_sapiens__EAX05701
  source 1..324: mol_type = other RNA
atggcccgcgccaccctctccgccgccccctccaacccccgcctcctccgcgtcgccctcctcctcctcctcctcgtcgccgcctcccgccgcgccgccggcgcccccctcgccaccgagctccgctgccagtgcctccagaccctccagggcatccacctcaagaacatccagtccgtcaaggtcaagtcccccggcccccactgcgcccagaccgaggtcatcgccaccctcaagaacggccagaaggcctgcctcaaccccgcctcccccatggtcaagaagatcatcgagaagatgctcaagaacggcaagtccaactga

SEQ ID NO: 5205 - RNA, 324 nt, synthetic construct
  misc_feature 1..324: note = derived and/or modified sequence opt3 fromCXCL2__Homo_sapiens__EAX05701
  source 1..324: mol_type = other RNA
atggccagagctaccctgagcgcagccccctccaaccctaggctccttcgggtggcgctgttgttactgctactcgtcgctgcctctcgccgagcagccggcgctccactggcaacagagcttcgttgccagtgtctgcaaactttgcaggggatccacctcaagaatattcagtcagttaaagtgaagagtccgggaccccattgcgcccagacggaagtaatagctaccctgaaaaacggtcaaaaggcctgtctgaatcctgcgagcccaatggtgaaaaagatcattgagaagatgctcaaaaacggcaagtccaattga

SEQ ID NO: 5206 - RNA, 324 nt, synthetic construct
  misc_feature 1..324: note = derived and/or modified sequence opt4 fromCXCL2__Homo_sapiens__EAX05701
  source 1..324: mol_type = other RNA
atggccagagccaccctgagcgccgcccccagcaaccccagactgctgagagtggccctgctgctgctgctgctggtggccgccagcagaagagccgccggcgcccccctggccaccgagctgagatgccagtgcctgcagaccctgcagggcatccacctgaagaacatccagagcgtgaaggtgaagagccccggcccccactgcgcccagaccgaggtgatcgccaccctgaagaacggccagaaggcctgcctgaaccccgccagccccatggtgaagaagatcatcgagaagatgctgaagaacggcaagagcaactga

SEQ ID NO: 5207 - RNA, 324 nt, synthetic construct
  misc_feature 1..324: note = derived and/or modified sequence opt5 fromCXCL2__Homo_sapiens__EAX05701
  source 1..324: mol_type = other RNA
atggccagagctaccctgagcgccgcgccctccaaccctcggctcctgcgcgtggcccttctgctcctgcttctggtcgctgcctctagacgggctgccggggctccgctcgccacagagctgcgctgccagtgtctgcaaacgctccaggggatccacctgaagaatattcagagcgttaaagtgaagtcccccggacctcattgcgcgcagaccgaagtgatcgccacacttaaaaacggccaaaaggcttgtctgaatcccgcctctcctatggtcaaaaagattatcgagaagatgctcaaaaacggcaagagcaattga

SEQ ID NO: 5208 - RNA, 324 nt, synthetic construct
  misc_feature 1..324: note = derived and/or modified sequence opt6 fromCXCL2__Homo_sapiens__EAX05701
  source 1..324: mol_type = other RNA
atggcaagagcaacactaagcgcagcaccaagcaacccaagactactaagagtagcactactactactattactagtagcagcaagcagaagagcagcaggagcaccactagcaacagaactcagatgccaatgcctacaaacactacaaggaatacacctaaaaaacatacaaagcgtaaaagtaaaatcaccaggaccacactgcgcacaaacagaagtaatagcaacactaaaaaacggacaaaaagcatgcctaaacccagcatcaccaatggtcaaaaaaataatagaaaaaatgctaaaaaacggaaaatcaaactaa

SEQ ID NO: 5209 - protein, 107 aa, synthetic construct; identical to SEQ ID NO: 5201
  REGION 1..107: note = CXCL2__Homo_sapiens__P19875

SEQ ID NO: 5210 - RNA, 324 nt, synthetic construct
  misc_feature 1..324: note = CXCL2__Homo_sapiens__AAA63182
  source 1..324: mol_type = other RNA
atggcccgcgccacgctctccgccgcccccagcaatccccggctcctgcgagtggcgctgctgctcctgctcctggtggccgccagccggcgcgcagcaggagcgcccctggccactgaactgcgctgccagtgcttgcagaccctgcagggaattcacctcaagaacatccaaagtgtgaaggtgaagtcccccggaccccactgcgcccaaaccgaagtcatagccacactcaagaatgggcagaaagcttgtctcaaccccgcatcgcccatggttaagaaaatcatcgaaaagatgctgaaaaatggcaaatccaactga

SEQ ID NO: 5211 - RNA, 324 nt, synthetic construct; identical to SEQ ID NO: 5203
  misc_feature 1..324: note = derived and/or modified sequence opt1 fromCXCL2__Homo_sapiens__AAA63182
  source 1..324: mol_type = other RNA

SEQ ID NO: 5212 - RNA, 324 nt, synthetic construct; identical to SEQ ID NO: 5204
  misc_feature 1..324: note = derived and/or modified sequence opt2 fromCXCL2__Homo_sapiens__AAA63182
  source 1..324: mol_type = other RNA

SEQ ID NO: 5213 - RNA, 324 nt, synthetic construct; identical to SEQ ID NO: 5205
  misc_feature 1..324: note = derived and/or modified sequence opt3 fromCXCL2__Homo_sapiens__AAA63182
  source 1..324: mol_type = other RNA

SEQ ID NO: 5214 - RNA, 324 nt, synthetic construct; identical to SEQ ID NO: 5206
  misc_feature 1..324: note = derived and/or modified sequence opt4 fromCXCL2__Homo_sapiens__AAA63182
  source 1..324: mol_type = other RNA

SEQ ID NO: 5215 - RNA, 324 nt, synthetic construct; identical to SEQ ID NO: 5207
  misc_feature 1..324: note = derived and/or modified sequence opt5 fromCXCL2__Homo_sapiens__AAA63182
  source 1..324: mol_type = other RNA

SEQ ID NO: 5216 - RNA, 324 nt, synthetic construct
  misc_feature 1..324: note = derived and/or modified sequence opt6 fromCXCL2__Homo_sapiens__AAA63182
  source 1..324: mol_type = other RNA
atggcaagagcaacactaagcgcagcaccaagcaacccaagactactaagagtagcactactactactactactagtagcagcaagcagaagagcagcaggagccccactagcaacagaactaagatgccaatgcctacaaacactacaaggaatacacctaaaaaacatacaaagcgtaaaagtaaaatcaccaggaccacactgcgcacaaacagaagtaatagcaacactaaaaaacggacaaaaagcatgcctaaacccagcatcaccaatggtaaaaaaaataatagaaaaaatgctaaaaaacggaaaatcaaactaa

SEQ ID NO: 5217 - protein, 107 aa, synthetic construct
  REGION 1..107: note = CXCL3__Homo_sapiens__P19876
MAHATLSAAPSNPRLLRVALLLLLLVAASRRAAGASVVTELRCQCLQTLQGIHLKNIQSVNVRSPGPHCAQTEVIATLKNGKKACLNPASPMVQKIIEKILNKGSTN

SEQ ID NO: 5218 - RNA, 324 nt, synthetic construct
  misc_feature 1..324: note = CXCL3__Homo_sapiens__AAH16308
  source 1..324: mol_type = other RNA
atggcccacgccacgctctccgccgcccccagcaatccccggctcctgcgggtggcgctgctgctcctgctcctggtggccgccagccggcgcgcagcaggagcgtccgtggtcactgaactgcgctgccagtgcttgcagacactgcagggaattcacctcaagaacatccaaagtgtgaatgtaaggtcccccggaccccactgcgcccaaaccgaagtcatagccacactcaagaatgggaagaaagcttgtctcaaccccgcatcccccatggttcagaaaatcatcgaaaagatactgaacaaggggagcaccaactga

SEQ ID NO: 5219 - RNA, 324 nt, synthetic construct
  misc_feature 1..324: note = derived and/or modified sequence opt1 fromCXCL3__Homo_sapiens__AAH16308
  source 1..324: mol_type = other RNA
atggcccacgccaccctgagcgcggccccctccaacccgcgcctcctgcgggtggccctgctcctgctgctcctggtcgccgccagccgccgggcggccggcgcctccgtggtgaccgagctgcgctgccagtgcctccagacgctgcaggggatccacctgaagaacatccagagcgtcaacgtgcggtcccccggcccccactgcgcccagaccgaggtgatcgcgaccctcaagaacgggaagaaggcctgcctgaaccccgccagcccgatggtccagaagatcatcgagaagatcctgaacaagggctccaccaactga

SEQ ID NO: 5220 - RNA, 324 nt, synthetic construct
  misc_feature 1..324: note = derived and/or modified sequence opt2 fromCXCL3__Homo_sapiens__AAH16308
  source 1..324: mol_type = other RNA
atggcccacgccaccctctccgccgccccctccaacccccgcctcctccgcgtcgccctcctcctcctcctcctcgtcgccgcctcccgccgcgccgccggcgcctccgtcgtcaccgagctccgctgccagtgcctccagaccctccagggcatccacctcaagaacatccagtccgtcaacgtccgctcccccggcccccactgcgcccagaccgaggtcatcgccaccctcaagaacggcaagaaggcctgcctcaaccccgcctcccccatggtccagaagatcatcgagaagatcctcaacaagggctccaccaactga

SEQ ID NO: 5221 - RNA, 324 nt, synthetic construct
  misc_feature 1..324: note = derived and/or modified sequence opt3 fromCXCL3__Homo_sapiens__AAH16308
  source 1..324: mol_type = other RNA
atggcccacgctaccctgagcgcagccccctccaaccctagactccttagggtggcgctgttgttactgctactcgtcgctgcctctcggcgcgcagccggcgcttcagttgtgacagagctgcgatgccagtgtcttcaaactctgcaggggatccatttgaagaatattcagagtgtaaacgtgcgtagcccaggaccgcactgcgcacagacggaagtcatagccaccctcaaaaatggtaagaaagcctgtctgaaccccgcttcccctatggtgcaaaagatcattgagaaaatcctgaataagggctctacaaactga

SEQ ID NO: 5222 - RNA, 324 nt, synthetic construct
  misc_feature 1..324: note = derived and/or modified sequence opt4 fromCXCL3__Homo_sapiens__AAH16308
  source 1..324: mol_type = other RNA
atggcccacgccaccctgagcgccgcccccagcaaccccagactgctgagagtggccctgctgctgctgctgctggtggccgccagcagaagagccgccggcgccagcgtggtgaccgagctgagatgccagtgcctgcagaccctgcagggcatccacctgaagaacatccagagcgtgaacgtgagaagccccggcccccactgcgcccagaccgaggtgatcgccaccctgaagaacggcaagaaggcctgcctgaaccccgccagccccatggtgcagaagatcatcgagaagatcctgaacaagggcagcaccaactga

SEQ ID NO: 5223 - RNA, 324 nt, synthetic construct
  misc_feature 1..324: note = derived and/or modified sequence opt5 fromCXCL3__Homo_sapiens__AAH16308
  source 1..324: mol_type = other RNA
atggcccacgctaccctgagcgccgcgccctccaaccctagactcctgcgggtggcccttctgctcctgcttctggtcgctgcctctcgcagagctgccggcgctagcgttgtgacagagctccggtgccagtgtctgcaaacgctgcaggggatccatctcaagaatattcagtccgtgaacgtccgctctccgggaccccactgcgcccagaccgaagtgatcgcgacactgaaaaatggcaagaaagcctgtcttaaccctgctagccccatggttcaaaagattatcgagaaaattctgaataaggggtccaccaactga

SEQ ID NO: 5224 - RNA, 324 nt, synthetic construct
  misc_feature 1..324: note = derived and/or modified sequence opt6 fromCXCL3__Homo_sapiens__AAH16308
  source 1..324: mol_type = other RNA
atggcacacgcaacactaagcgcagcaccaagcaacccaagactactaagagtagcactactactactactactagtagcagcaagcagaagagcagcaggagcatcagtagtaacagaactaagatgccaatgcttacaaacactacaaggaatacacctaaaaaacatacaaagcgtaaacgtaagatcaccaggaccacactgcgcacaaacagaagtaatagcaacactaaaaaacggaaaaaaagcatgcctaaacccagcatcaccaatggtacaaaaaataatagaaaaaatactaaacaaaggaagcacaaactaa

SEQ ID NO: 5225 - protein, 101 aa, synthetic construct
  REGION 1..101: note = CXCL4__Homo_sapiens__P02776
MSSAAGFCASRPGLLFLGLLLLPLVVAFASAEAEEDGDLQCLCVKTTSQVRPRHITSLEVIKAGPHCPTAQLIATLKNGRKICLDLQAPLYKKIIKKLLES

SEQ ID NO: 5226 - RNA, 306 nt, synthetic construct
  misc_feature 1..306: note = CXCL4__Homo_sapiens__AAA60066
  source 1..306: mol_type = other RNA
atgagctccgcagccgggttctgcgcctcacgccccgggctgctgttcctggggttgctgctcctgccacttgtggtcgccttcgccagcgctgaagctgaagaagatggggacctgcagtgcctgtgtgtgaagaccacctcccaggtccgtcccaggcacatcaccagcctggaggtgatcaaggccggaccccactgccccactgcccaactgatagccacgctgaagaatggaaggaaaatttgcttggacctgcaagccccgctgtacaagaaaataattaagaaacttttggagagttag

SEQ ID NO: 5227 - RNA, 306 nt, synthetic construct
  misc_feature 1..306: note = derived and/or modified sequence opt1 fromCXCL4__Homo_sapiens__AAA60066
  source 1..306: mol_type = other RNA
atgagctccgccgccggcttctgcgcgagccgccccgggctcctgttcctgggcctgctcctgctgccgctcgtggtcgccttcgcctccgccgaggccgaggaggacggggacctgcagtgcctgtgcgtgaagaccaccagccaggtgcggccccgccacatcacgtccctcgaggtcatcaaggcgggcccccactgccccaccgcccagctgatcgccaccctgaagaacgggcggaagatctgcctcgacctgcaggccccgctgtacaagaagatcatcaagaagctcctggagagctga

SEQ ID NO: 5228 - RNA, 306 nt, synthetic construct
  misc_feature 1..306: note = derived and/or modified sequence opt2 fromCXCL4__Homo_sapiens__AAA60066
  source 1..306: mol_type = other RNA
atgtcctccgccgccggcttctgcgcctcccgccccggcctcctcttcctcggcctcctcctcctccccctcgtcgtcgccttcgcctccgccgaggccgaggaggacggcgacctccagtgcctctgcgtcaagaccacctcccaggtccgcccccgccacatcacctccctcgaggtcatcaaggccggcccccactgccccaccgcccagctcatcgccaccctcaagaacggccgcaagatctgcctcgacctccaggcccccctctacaagaagatcatcaagaagctcctcgagtcctga

SEQ ID NO: 5229 - RNA, 306 nt, synthetic construct
  misc_feature 1..306: note = derived and/or modified sequence opt3 fromCXCL4__Homo_sapiens__AAA60066
  source 1..306: mol_type = other RNA
atgagctccgccgctggcttctgcgcatctagacccgggctgctctttcttggactgttgttactgcctctagtggtcgccttcgcgtcagctgaggccgaagaggacggtgatctccagtgtctgtgcgttaagaccacaagtcaagtgaggccacggcacatcactagccttgaagtaattaaagcaggcccgcattgtcccacggcccagctgatagctaccttgaagaacgggcgcaaaatctgcctcgacctgcaggcacctctgtacaagaaaattatcaagaagctcttagagtcctga

SEQ ID NO: 5230 - RNA, 306 nt, synthetic construct
  misc_feature 1..306: note = derived and/or modified sequence opt4 fromCXCL4__Homo_sapiens__AAA60066
  source 1..306: mol_type = other RNA
atgagcagcgccgccggcttctgcgccagcagacccggcctgctgttcctgggcctgctgctgctgcccctggtggtggccttcgccagcgccgaggccgaggaggacggcgacctgcagtgcctgtgcgtgaagaccaccagccaggtgagacccagacacatcaccagcctggaggtgatcaaggccggcccccactgccccaccgcccagctgatcgccaccctgaagaacggcagaaagatctgcctggacctgcaggcccccctgtacaagaagatcatcaagaagctgctggagagctga

SEQ ID NO: 5231 - RNA, 306 nt, synthetic construct
  misc_feature 1..306: note = derived and/or modified sequence opt5 fromCXCL4__Homo_sapiens__AAA60066
  source 1..306: mol_type = other RNA
atgagctccgccgccggcttctgcgcctctagacccgggctgctctttctgggacttctgctcctgcctcttgtggtcgcgttcgctagcgccgaggccgaagaggacggcgatctgcagtgtctctgcgttaagaccacatcccaagtgcggccgcgccacatcacgtctctggaagtgattaaagctgggccccattgtcctaccgcccagctgatcgctacactcaagaacggaagaaaaatttgcctggaccttcaggctcccctgtacaagaaaatcattaagaagctcctggagagctga

SEQ ID NO: 5232 - RNA, 306 nt, synthetic construct
  misc_feature 1..306: note = derived and/or modified sequence opt6 fromCXCL4__Homo_sapiens__AAA60066
  source 1..306: mol_type = other RNA
atgtcatcagcagcaggattctgcgcatcaagaccaggactactattcctaggactactactactaccattagtagtagcattcgcatcagcagaagcagaagaagacggagacctacaatgcctatgcgtaaaaacaacatcacaagtaagaccaagacacataacatcactagaagtaataaaagcaggaccacactgcccaacagcacaactaatagcaacactaaaaaacggaagaaaaatatgcctagacctacaagcaccactatacaaaaaaataataaaaaaactactagaatcataa

SEQ ID NO: 5233 - protein, 114 aa, synthetic construct
  REGION 1..114: note = CXCL5__Homo_sapiens__P42830
MSLLSSRAARVPGPSSSLCALLVLLLLLTQPGPIASAGPAAAVLRELRCVCLQTTQGVHPKMISNLQVFAIGPQCSKVEVVASLKNGKEICLDPEAPFLKKVIQKILDGGNKEN

SEQ ID NO: 5234 - RNA, 345 nt, synthetic construct
  misc_feature 1..345: note = CXCL5__Homo_sapiens__AAA86426
  source 1..345: mol_type = other RNA
atgagcctcctgtccagccgcgcggcccgtgtccccggtccttcgagctccttgtgcgcgctgttggtgctgctgctgctgctgacgcagccagggcccatcgccagcgctggtcctgccgctgctgtgttgagagagctgcgttgcgtttgtttacagaccacgcaaggagttcatcccaaaatgatcagtaatctgcaagtgttcgccataggcccacagtgctccaaggtggaagtggtagcctccctgaagaacgggaaggaaatttgtcttgatccagaagccccttttctaaagaaagtcatccagaaaattttggacggtggaaacaaggaaaactga

SEQ ID NO: 5235 - RNA, 345 nt, synthetic construct
  misc_feature 1..345: note = derived and/or modified sequence opt1 fromCXCL5__Homo_sapiens__AAA86426
  source 1..345: mol_type = other RNA
atgagcctgctctccagccgcgccgcccgggtgcccggcccgtccagctccctgtgcgcgctgctcgtcctgctgctcctgctgacccagcccgggcccatcgccagcgccggccccgccgccgcggtgctccgcgagctgcggtgcgtgtgcctgcagaccacgcagggggtccacccgaagatgatctccaacctccaggtgttcgccatcggcccccagtgcagcaaggtggaggtcgtggcctccctgaagaacgggaaggagatctgcctggaccccgaggcccccttcctcaagaaggtgatccagaagatcctggacggcggcaacaaggagaactga

SEQ ID NO: 5236 - RNA, 345 nt, synthetic construct
  misc_feature 1..345: note = derived and/or modified sequence opt2 fromCXCL5__Homo_sapiens__AAA86426
  source 1..345: mol_type = other RNA
atgtccctcctctcctcccgcgccgcccgcgtccccggcccctcctcctccctctgcgccctcctcgtcctcctcctcctcctcacccagcccggccccatcgcctccgccggccccgccgccgccgtcctccgcgagctccgctgcgtctgcctccagaccacccagggcgtccaccccaagatgatctccaacctccaggtcttcgccatcggcccccagtgctccaaggtcgaggtcgtcgcctccctcaagaacggcaaggagatctgcctcgaccccgaggcccccttcctcaagaaggtcatccagaagatcctcgacggcggcaacaaggagaactga

SEQ ID NO: 5237 - RNA, 345 nt, synthetic construct
  misc_feature 1..345: note = derived and/or modified sequence opt3 fromCXCL5__Homo_sapiens__AAA86426
  source 1..345: mol_type = other RNA
atgagcctgctctcctctagagccgctagggtgcccggcccttcaagtagcctttgcgcactgttggtcttactgctactcctgacccagccagggccgatcgcctccgcgggacccgctgccgcagttcttcgggagctgcgctgtgtgtgcttgcaaacaactcagggtgtacaccctaagatgatttctaacctccaggtgttcgccataggcccacagtgttcgaaagtcgaagtggttgcttcactgaagaatgggaaagagatctgcctggaccccgaagcaccttttctcaagaaagtgattcaaaagatcttagatggaggcaacaaggagaattga

SEQ ID NO: 5238 - RNA, 345 nt, synthetic construct
  misc_feature 1..345: note = derived and/or modified sequence opt4 fromCXCL5__Homo_sapiens__AAA86426
  source 1..345: mol_type = other RNA
atgagcctgctgagcagcagagccgccagagtgcccggccccagcagcagcctgtgcgccctgctggtgctgctgctgctgctgacccagcccggccccatcgccagcgccggccccgccgccgccgtgctgagagagctgagatgcgtgtgcctgcagaccacccagggcgtgcaccccaagatgatcagcaacctgcaggtgttcgccatcggcccccagtgcagcaaggtggaggtggtggccagcctgaagaacggcaaggagatctgcctggaccccgaggcccccttcctgaagaaggtgatccagaagatcctggacggcggcaacaaggagaactga

SEQ ID NO: 5239 - RNA, 345 nt, synthetic construct
  misc_feature 1..345: note = derived and/or modified sequence opt5 fromCXCL5__Homo_sapiens__AAA86426
  source 1..345: mol_type = other RNA
atgagcctgctctcctctagagccgctcgggtgcccggccctagctcctctctgtgcgcccttctggtcctcctgcttctgctcacccagccggggcccatcgcgagcgctggacctgccgccgctgttctgcgcgagctgagatgtgtgtgcctccaaacaacgcagggcgtgcaccccaagatgatttccaacctgcaggtcttcgccatcgggcctcagtgttctaaagtggaagttgtggctagccttaagaatggaaaagagatttgcctggaccccgaagccccttttctcaagaaagtcatccaaaagattctggatggcgggaacaaggagaattga

SEQ ID NO: 5240 - RNA, 345 nt, synthetic construct
  misc_feature 1..345: note = derived and/or modified sequence opt6 fromCXCL5__Homo_sapiens__AAA86426
  source 1..345: mol_type = other RNA
atgtcactactatcatcaagagcagcaagagtaccaggaccatcatcatcactatgcgcactactagtactactattactactaacacaaccaggaccaatagcatcagcaggaccagcagcagcagtactaagagaactaagatgcgtatgcctacaaacaacacaaggagtacacccaaaaatgatatcaaacctacaagtattcgcaataggaccacaatgctcaaaagtagaagtagtagcatcactaaaaaacggaaaagaaatatgcctagacccagaagcaccattcttaaaaaaagtaatacaaaaaatactagacggaggaaacaaagaaaactaa

SEQ ID NO: 5241 - protein, 114 aa, synthetic construct; identical to SEQ ID NO: 5233
  REGION 1..114: note = CXCL5__Homo_sapiens__Q6I9S7

SEQ ID NO: 5242 - RNA, 345 nt, synthetic construct
  misc_feature 1..345: note = CXCL5__Homo_sapiens__AAP35453
  source 1..345: mol_type = other RNA
atgagcctcctgtccagccgcgcggcccgtgtccccggtccttcgagctccttgtgcgcgctgttggtgctgctgctgctgctgacgcagccagggcccatcgccagcgctggtcctgccgctgctgtgttgagagagctgcgttgcgtttgtttacagaccacgcaaggagttcatcccaaaatgatcagtaatctgcaagtgttcgccataggcccacagtgctccaaggtggaagtggtagcctccctgaagaacgggaaggaaatttgtcttgatccagaagccccttttctaaagaaagtcatccagaaaattttggacggtggaaacaaggaaaactag

SEQ ID NO: 5243 - RNA, 345 nt, synthetic construct; identical to SEQ ID NO: 5235
  misc_feature 1..345: note = derived and/or modified sequence opt1 fromCXCL5__Homo_sapiens__AAP35453
  source 1..345: mol_type = other RNA

SEQ ID NO: 5244 - RNA, 345 nt, synthetic construct; identical to SEQ ID NO: 5236
  misc_feature 1..345: note = derived and/or modified sequence opt2 fromCXCL5__Homo_sapiens__AAP35453
  source 1..345: mol_type = other RNA

SEQ ID NO: 5245 - RNA, 345 nt, synthetic construct; identical to SEQ ID NO: 5237
  misc_feature 1..345: note = derived and/or modified sequence opt3 fromCXCL5__Homo_sapiens__AAP35453
  source 1..345: mol_type = other RNA

SEQ ID NO: 5246 - RNA, 345 nt, synthetic construct; identical to SEQ ID NO: 5238
  misc_feature 1..345: note = derived and/or modified sequence opt4 fromCXCL5__Homo_sapiens__AAP35453
  source 1..345: mol_type = other RNA

SEQ ID NO: 5247 - RNA, 345 nt, synthetic construct; identical to SEQ ID NO: 5239
  misc_feature 1..345: note = derived and/or modified sequence opt5 fromCXCL5__Homo_sapiens__AAP35453
  source 1..345: mol_type = other RNA

SEQ ID NO: 5248 - RNA, 345 nt, synthetic construct
  misc_feature 1..345: note = derived and/or modified sequence opt6 fromCXCL5__Homo_sapiens__AAP35453
  source 1..345: mol_type = other RNA
atgtcactactatcatcaagagcagcaagagtaccaggaccatcatcatcactatgcgcactactagtactactactattattaacacaaccaggaccaatagcatcagcaggaccagcagcagcagtactaagagaactaagatgcgtatgcctacaaacaacacaaggagtacacccaaaaatgatatcaaacctacaagtattcgcaataggaccacaatgctcaaaagtagaagtagtagcatcactaaaaaacggaaaagaaatatgcctagacccagaagcaccattcctaaaaaaagtaatacaaaaaatactagacggaggaaacaaagaaaactaa

SEQ ID NO: 5249 - protein, 114 aa, synthetic construct
  REGION 1..114: note = CXCL6__Homo_sapiens__P80162
MSLPSSRAARVPGPSGSLCALLALLLLLTPPGPLASAGPVSAVLTELRCTCLRVTLRVNPKTIGKLQVFPAGPQCSKVEVVASLKNGKQVCLDPEAPFLKKVIQKILDSGNKKN

SEQ ID NO: 5250 - RNA, 345 nt, synthetic construct
  misc_feature 1..345: note = CXCL6__Homo_sapiens__AAC51338
  source 1..345: mol_type = other RNA
atgagcctcccgtccagccgcgcggcccgtgtcccgggtccttcgggctccttgtgcgcgctgctcgcgctgctgctcctgctgacgccgccggggcccctcgccagcgctggtcctgtctctgctgtgctgacagagctgcgttgcacttgtttacgcgttacgctgagagtaaaccccaaaacgattggtaaactgcaggtgttccccgcaggcccgcagtgctccaaggtggaagtggtagcctccctgaagaacgggaagcaagtttgtctggacccggaagccccttttctaaagaaagtcatccagaaaattttggacagtggaaacaagaaaaactga

SEQ ID NO: 5251 - RNA, 345 nt, synthetic construct
  misc_feature 1..345: note = derived and/or modified sequence opt1 fromCXCL6__Homo_sapiens__AAC51338
  source 1..345: mol_type = other RNA
atgagcctgccctccagccgcgccgcccgggtgccgggcccctccgggagcctctgcgcgctgctggccctcctgctgctcctgaccccgcccggccccctggcctccgccgggcccgtcagcgccgtgctcaccgagctgcgctgcacgtgcctgcgggtgaccctccgcgtcaaccccaagaccatcggcaagctccaggtgttccccgcggggccgcagtgctccaaggtggaggtcgtggccagcctgaagaacggcaagcaggtctgcctggaccccgaggcccccttcctgaagaaggtgatccagaagatcctggactccggcaacaagaagaactga

SEQ ID NO: 5252 - RNA, 345 nt, synthetic construct
  misc_feature 1..345: note = derived and/or modified sequence opt2 fromCXCL6__Homo_sapiens__AAC51338
  source 1..345: mol_type = other RNA
atgtccctcccctcctcccgcgccgcccgcgtccccggcccctccggctccctctgcgccctcctcgccctcctcctcctcctcaccccccccggccccctcgcctccgccggccccgtctccgccgtcctcaccgagctccgctgcacctgcctccgcgtcaccctccgcgtcaaccccaagaccatcggcaagctccaggtcttccccgccggcccccagtgctccaaggtcgaggtcgtcgcctccctcaagaacggcaagcaggtctgcctcgaccccgaggcccccttcctcaagaaggtcatccagaagatcctcgactccggcaacaagaagaactga

SEQ ID NO: 5253 - RNA, 345 nt, synthetic construct
  misc_feature 1..345: note = derived and/or modified sequence opt3 fromCXCL6__Homo_sapiens__AAC51338
  source 1..345: mol_type = other RNA
atgagcctgccctcctctagagccgctagggtgcctggcccatcagggagtctctgcgcacttctggccttgttactgctactcaccccgcccggacctctggcgagcgctggtccagtctccgccgttcttacagagctgcggtgtacttgcttgcgcgtgacgctccgagtaaaccccaagaccatcggcaaattacaggtgttccctgcagggccacaatgttctaaggtcgaagtggttgcctcgctgaaaaatggaaaacaggtgtgcctcgaccccgaggctccttttctgaagaaggtcattcagaagatactggattcaggcaacaaaaagaattga

SEQ ID NO: 5254 - RNA, 345 nt, synthetic construct
  misc_feature 1..345: note = derived and/or modified sequence opt4 fromCXCL6__Homo_sapiens__AAC51338
  source 1..345: mol_type = other RNA
atgagcctgcccagcagcagagccgccagagtgcccggccccagcggcagcctgtgcgccctgctggccctgctgctgctgctgaccccccccggccccctggccagcgccggccccgtgagcgccgtgctgaccgagctgagatgcacctgcctgagagtgaccctgagagtgaaccccaagaccatcggcaagctgcaggtgttccccgccggcccccagtgcagcaaggtggaggtggtggccagcctgaagaacggcaagcaggtgtgcctggaccccgaggcccccttcctgaagaaggtgatccagaagatcctggacagcggcaacaagaagaactga

SEQ ID NO: 5255 - RNA, 345 nt, synthetic construct
  misc_feature 1..345: note = derived and/or modified sequence opt5 fromCXCL6__Homo_sapiens__AAC51338
  source 1..345: mol_type = other RNA
atgagcctgccctcctctagagccgctcgggtgcctggcccgagcgggtccctctgcgccctgcttgcgctgctcctgcttctgacaccccctggacccctcgcttctgccggccctgtcagcgccgttctgaccgagctgcgctgtacgtgcctcagagtgaccctgcgggtgaaccccaagacaatcgggaaacttcaggtcttccctgctggaccgcaatgttccaaggtggaagttgtggcctctctgaaaaatggcaagcaggtctgcctcgaccccgaggctccttttctgaaaaaggtgattcagaagatccttgatagcgggaacaaaaagaattga

SEQ ID NO: 5256 - RNA, 345 nt, synthetic construct
  misc_feature 1..345: note = derived and/or modified sequence opt6 fromCXCL6__Homo_sapiens__AAC51338
  source 1..345: mol_type = other RNA
atgtcactaccatcatcaagagcagcaagagtaccaggaccatcaggaagcctatgcgcattactagcactactactactactaacaccaccaggaccactagcatcagcaggaccagtatcagcagtactaacagaactaagatgcacatgcctaagagtaacactaagagtaaacccaaaaacaataggaaaactacaagtattcccagcaggaccacaatgctcaaaagtagaagtagtagcatcactaaaaaacggaaaacaagtatgcctagacccagaagcaccattcctaaaaaaagtaatacaaaaaatactagactcaggaaacaaaaaaaactaa

SEQ ID NO: 5257 - protein, 128 aa, synthetic construct
  REGION 1..128: note = CXCL7__Homo_sapiens__P02775
MSLRLDTTPSCNSARPLHALQVLLLLSLLLTALASSTKGQTKRNLAKGKEESLDSDLYAELRCMCIKTTSGIHPKNIQSLEVIGKGTHCNQVEVIATLKDGRKICLDPDAPRIKKIVQKKLAGDESAD

SEQ ID NO: 5258 - RNA, 387 nt, synthetic construct
  misc_feature 1..387: note = CXCL7__Homo_sapiens__AAA62836
  source 1..387: mol_type = other RNA
atgagcctcagacttgataccaccccttcctgtaacagtgcgagaccacttcatgccttgcaggtgctgctgcttctgtcattgctgctgactgctctggcttcctccaccaaaggacaaactaagagaaacttggcgaaaggcaaagaggaaagtctagacagtgacttgtatgctgaactccgctgcatgtgtataaagacaacctctggaattcatcccaaaaacatccaaagtttggaagtgatcgggaaaggaacccattgcaaccaagtcgaagtgatagccacactgaaggatgggaggaaaatctgcctggacccagatgctcccagaatcaagaaaattgtacagaaaaaattggcaggtgatgaatctgctgattaa

SEQ ID NO: 5259 - RNA, 387 nt, synthetic construct
  misc_feature 1..387: note = derived and/or modified sequence opt1 fromCXCL7__Homo_sapiens__AAA62836
  source 1..387: mol_type = other RNA
atgagcctgcgcctcgacaccaccccctcctgcaacagcgcccggccgctgcacgccctccaggtgctgctgctgctctccctgctgctcacggcgctggccagctccaccaagggccagaccaagcgcaacctggccaaggggaaggaggagagcctcgactccgacctgtacgccgagctgcggtgcatgtgcatcaagaccacgagcggcatccaccccaagaacatccagtccctcgaggtcatcgggaagggcacccactgcaaccaggtggaggtgatcgccaccctgaaggacgggcgcaagatctgcctggaccccgacgcgccccggatcaagaagatcgtccagaagaagctcgccggcgacgagagcgccgactga

SEQ ID NO: 5260 - RNA, 387 nt, synthetic construct
  misc_feature 1..387: note = derived and/or modified sequence opt2 fromCXCL7__Homo_sapiens__AAA62836
  source 1..387: mol_type = other RNA
atgtccctccgcctcgacaccaccccctcctgcaactccgcccgccccctccacgccctccaggtcctcctcctcctctccctcctcctcaccgccctcgcctcctccaccaagggccagaccaagcgcaacctcgccaagggcaaggaggagtccctcgactccgacctctacgccgagctccgctgcatgtgcatcaagaccacctccggcatccaccccaagaacatccagtccctcgaggtcatcggcaagggcacccactgcaaccaggtcgaggtcatcgccaccctcaaggacggccgcaagatctgcctcgaccccgacgccccccgcatcaagaagatcgtccagaagaagctcgccggcgacgagtccgccgactga

SEQ ID NO: 5261 - RNA, 387 nt, synthetic construct
  misc_feature 1..387: note = derived and/or modified sequence opt3 fromCXCL7__Homo_sapiens__AAA62836
  source 1..387: mol_type = other RNA
atgagcctgagactcgacaccacaccctcctgcaactctgccaggcctcttcacgctctgcaagtgttgttactgctatcactcctgcttactgcactggccagtagcacgaagggccagaccaaacggaatttggcgaaggggaaagaggaatccctcgattctgacctgtacgctgagctgcgctgtatgtgcatcaagacaacttcgggtattcatccgaaaaacatacagtcactcgaagtcatcggaaagggcacccactgtaatcaggttgaggtgattgccacattaaaggatgggcgaaaaatctgcctggacccagatgcaccccgtattaagaaaatcgtacagaagaaacttgccggagacgaaagcgctgattga

SEQ ID NO: 5262 - RNA, 387 nt, synthetic construct
  misc_feature 1..387: note = derived and/or modified sequence opt4 fromCXCL7__Homo_sapiens__AAA62836
  source 1..387: mol_type = other RNA
atgagcctgagactggacaccacccccagctgcaacagcgccagacccctgcacgccctgcaggtgctgctgctgctgagcctgctgctgaccgccctggccagcagcaccaagggccagaccaagagaaacctggccaagggcaaggaggagagcctggacagcgacctgtacgccgagctgagatgcatgtgcatcaagaccaccagcggcatccaccccaagaacatccagagcctggaggtgatcggcaagggcacccactgcaaccaggtggaggtgatcgccaccctgaaggacggcagaaagatctgcctggaccccgacgcccccagaatcaagaagatcgtgcagaagaagctggccggcgacgagagcgccgactga

SEQ ID NO: 5263 - RNA, 387 nt, synthetic construct
  misc_feature 1..387: note = derived and/or modified sequence opt5 fromCXCL7__Homo_sapiens__AAA62836
  source 1..387: mol_type = other RNA
atgagcctgagactcgacaccacaccctcctgcaactctgcccggcctctgcacgcccttcaggtgctgctcctgcttagcctgctcctgacggctctggcgtcctctaccaagggccaaacaaaacgcaatctcgctaaggggaaagaggaaagcctggattccgacctttacgccgagctgagatgtatgtgcatcaagaccacatctggcattcatccgaaaaacatccagagcctcgaagtcattggaaaggggacccactgtaatcaggttgaggtgatcgccacactgaaggatggacggaaaatttgccttgaccccgatgctcctcgcatcaagaaaatcgtgcagaagaaactggccggcgacgaatccgctgattga

SEQ ID NO: 5264 - RNA, 387 nt, synthetic construct
  misc_feature 1..387: note = derived and/or modified sequence opt6 fromCXCL7__Homo_sapiens__AAA62836
  source 1..387: mol_type = other RNA
atgtcactaagactcgacacaacaccatcatgcaactcagcaagaccactacacgcactacaagtactactactactaagcctactactaacagcactagcaagctcaacaaaaggacaaacaaaaagaaacctagcaaaaggaaaagaagaatcactagacagcgacctatacgcagaactaagatgcatgtgcataaaaacaacatcaggaatacacccaaaaaacatacaaagcttagaagtaataggaaaaggaacacactgcaaccaagtagaagtaatagcaacactaaaagacggaagaaaaatatgcctagacccagacgcaccaagaataaaaaaaatagtacaaaaaaaactagcaggagacgaatcagcagactaa

SEQ ID NO: 5265 - protein, 99 aa, synthetic construct
  REGION 1..99: note = CXCL8__Homo_sapiens__P10145
MTSKLAVALLAAFLISAALCEGAVLPRSAKELRCQCIKTYSKPFHPKFIKELRVIESGPHCANTEIIVKLSDGRELCLDPKENWVQRVVEKFLKRAENS

SEQ ID NO: 5266 - RNA, 300 nt, synthetic construct
  misc_feature 1..300: note = CXCL8__Homo_sapiens__AAA35611
  source 1..300: mol_type = other RNA
atgacttccaagctggccgtggctctcttggcagccttcctgatttctgcagctctgtgtgaaggtgcagttttgccaaggagtgctaaagaacttagatgtcagtgcataaagacatactccaaacctttccaccccaaatttatcaaagaactgagagtgattgagagtggaccacactgcgccaacacagaaattattgtaaagctttctgatggaagagagctctgtctggaccccaaggaaaactgggtgcagagggttgtggagaagtttttgaagagggctgagaattcataa

SEQ ID NO: 5267 - RNA, 300 nt, synthetic construct
  misc_feature 1..300: note = derived and/or modified sequence opt1 fromCXCL8__Homo_sapiens__AAA35611
  source 1..300: mol_type = other RNA
atgaccagcaagctggccgtggccctcctggcggccttcctgatctccgccgccctctgcgagggcgccgtcctgccccgcagcgcgaaggagctgcggtgccagtgcatcaagacctactccaagccgttccaccccaagttcatcaaggagctccgcgtgatcgagagcgggccccactgcgccaacacggagatcatcgtgaagctgtccgacggccgggagctgtgcctcgaccccaaggagaactgggtccagcgcgtggtggagaagttcctgaagcgggccgagaacagctga

SEQ ID NO: 5268 - RNA, 300 nt, synthetic construct
  misc_feature 1..300: note = derived and/or modified sequence opt2 fromCXCL8__Homo_sapiens__AAA35611
  source 1..300: mol_type = other RNA
atgacctccaagctcgccgtcgccctcctcgccgccttcctcatctccgccgccctctgcgagggcgccgtcctcccccgctccgccaaggagctccgctgccagtgcatcaagacctactccaagcccttccaccccaagttcatcaaggagctccgcgtcatcgagtccggcccccactgcgccaacaccgagatcatcgtcaagctctccgacggccgcgagctctgcctcgaccccaaggagaactgggtccagcgcgtcgtcgagaagttcctcaagcgcgccgagaactcctga

SEQ ID NO: 5269 - RNA, 300 nt, synthetic construct
  misc_feature 1..300: note = derived and/or modified sequence opt3 fromCXCL8__Homo_sapiens__AAA35611
  source 1..300: mol_type = other RNA
atgaccagcaagctggccgtggctctccttgcagccttcctgatctccgcggctttgtgcgagggcgccgtcttacccagatctgcaaaagaactgaggtgtcagtgcattaagacatactcaaaaccttttcacccaaagttcataaaagagctacgggttatcgaaagtgggccgcattgtgccaacactgagattatcgtgaagctcagcgacggacgcgaactgtgccttgatcccaaggagaattgggtacaacgagtggtcgagaaatttctgaagcgtgctgaaaactcctga

SEQ ID NO: 5270 - RNA, 300 nt, synthetic construct
  misc_feature 1..300: note = derived and/or modified sequence opt4 fromCXCL8__Homo_sapiens__AAA35611
  source 1..300: mol_type = other RNA
atgaccagcaagctggccgtggccctgctggccgccttcctgatcagcgccgccctgtgcgagggcgccgtgctgcccagaagcgccaaggagctgagatgccagtgcatcaagacctacagcaagcccttccaccccaagttcatcaaggagctgagagtgatcgagagcggcccccactgcgccaacaccgagatcatcgtgaagctgagcgacggcagagagctgtgcctggaccccaaggagaactgggtgcagagagtggtggagaagttcctgaagagagccgagaacagctga

SEQ ID NO: 5271 - RNA, 300 nt, synthetic construct
  misc_feature 1..300: note = derived and/or modified sequence opt5 fromCXCL8__Homo_sapiens__AAA35611
  source 1..300: mol_type = other RNA
atgaccagcaagctggccgtggctctcctggccgcgttccttatctccgctgccctgtgcgagggcgccgtcctccccagatctgctaaagaactgcggtgtcagtgcattaagacatacagcaaaccttttcacccgaagttcatcaaagagcttcgcgttattgaatccgggccccattgtgccaacacggagatcattgtgaagctgtctgacggaagagaactctgcctggatcctaaggagaattgggtgcaacgggtcgtggagaaatttctgaagcgcgctgaaaacagctga

SEQ ID NO: 5272 - RNA, 300 nt, synthetic construct
  misc_feature 1..300: note = derived and/or modified sequence opt6 fromCXCL8__Homo_sapiens__AAA35611
  source 1..300: mol_type = other RNA
atgacatcaaaactagcagtagcactactagcagcattcctaatatcagcagcactatgcgaaggagcagtactaccaagatcagcaaaagaattaagatgccaatgcataaaaacatactcaaaaccattccacccaaaattcataaaagaactaagagtaatagaatcaggaccacactgcgcaaacacagaaataatagtaaaactatcagacggaagagaactatgcctagacccaaaagaaaactgggtacaaagagtagtagaaaaattcctaaaaagagcagaaaactcataa

SEQ ID NO: 5273 - protein, 52 aa, synthetic construct
  REGION 1..52: note = CXCL9__Homo_sapiens__L8E8X0
MMQHPCLFMTGCLLSFSNNKKHVVKHLRIFWTVFKKYTVYRKSYNLTMKRTL

SEQ ID NO: 5274 - RNA, 159 nt, synthetic construct
  misc_feature 1..159: note = CXCL9__Homo_sapiens__CCQ43176
  source 1..159: mol_type = other RNA
atgatgcaacatccttgtctttttatgacaggatgtttgctcagcttctccaacaataagaagcacgtggtaaaacacttgcggatattctggactgtttttaaaaaatatacagtttaccgaaaatcatataatcttacaatgaaaaggactttatag

SEQ ID NO: 5275 - RNA, 159 nt, synthetic construct
  misc_feature 1..159: note = derived and/or modified sequence opt1 fromCXCL9__Homo_sapiens__CCQ43176
  source 1..159: mol_type = other RNA
atgatgcagcacccctgcctgttcatgaccggctgcctcctgagcttctccaacaacaagaagcacgtggtcaagcacctccgcatcttctggaccgtgttcaagaagtacacggtgtaccgcaagagctacaacctgaccatgaagcggaccctgtga

SEQ ID NO: 5276 - RNA, 159 nt, synthetic construct
  misc_feature 1..159: note = derived and/or modified sequence opt2 fromCXCL9__Homo_sapiens__CCQ43176
  source 1..159: mol_type = other RNA
atgatgcagcacccctgcctcttcatgaccggctgcctcctctccttctccaacaacaagaagcacgtcgtcaagcacctccgcatcttctggaccgtcttcaagaagtacaccgtctaccgcaagtcctacaacctcaccatgaagcgcaccctctga

SEQ ID NO: 5277 - RNA, 159 nt, synthetic construct
  misc_feature 1..159: note = derived and/or modified sequence opt3 fromCXCL9__Homo_sapiens__CCQ43176
  source 1..159: mol_type = other RNA
atgatgcagcacccctgcctgttcatgaccggctgtctccttagcttttccaacaataagaaacatgtggtcaagcacctgagaatcttctggacagtttttaaaaagtacactgtgtataggaaatcttacaacttgacgatgaagcggaccttatga

SEQ ID NO: 5278 - RNA, 159 nt, synthetic construct
  misc_feature 1..159: note = derived and/or modified sequence opt4 fromCXCL9__Homo_sapiens__CCQ43176
  source 1..159: mol_type = other RNA
atgatgcagcacccctgcctgttcatgaccggctgcctgctgagcttcagcaacaacaagaagcacgtggtgaagcacctgagaatcttctggaccgtgttcaagaagtacaccgtgtacagaaagagctacaacctgaccatgaagagaaccctgtga

SEQ ID NO: 5279 - RNA, 159 nt, synthetic construct
  misc_feature 1..159: note = derived and/or modified sequence opt5 fromCXCL9__Homo_sapiens__CCQ43176
  source 1..159: mol_type = other RNA
atgatgcagcacccctgcctgttcatgaccggctgtctcctgagcttttccaacaataagaaacatgtggtcaagcaccttagaatcttctggacagtttttaaaaagtacacggtgtatcggaaatcttacaacctgaccatgaagcgcacactctga

SEQ ID NO: 5280 - RNA, 159 nt, synthetic construct
  misc_feature 1..159: note = derived and/or modified sequence opt6 fromCXCL9__Homo_sapiens__CCQ43176
  source 1..159: mol_type = other RNA
atgatgcaacacccatgcctattcatgaccggatgcctactatcattctcaaacaacaaaaaacacgtagtcaaacacctaagaatattctggacagtattcaaaaaatacacagtatacagaaaatcatacaacctaacaatgaaaagaacactataa

SEQ ID NO: 5281 - protein, 125 aa, synthetic construct
  REGION 1..125: note = CXCL9__Homo_sapiens__Q07325
MKKSGVLFLLGIILLVLIGVQGTPVVRKGRCSCISTNQGTIHLQSLKDLKQFAPSPSCEKIEIIATLKNGVQTCLNPDSADVKELIKKWEKQVSQKKKQKNGKKHQKKKVLKVRKSQRSRQKKTT

SEQ ID NO: 5282 - RNA, 378 nt, synthetic construct
  misc_feature 1..378: note = CXCL9__Homo_sapiens__AAH63122
  source 1..378: mol_type = other RNA
atgaagaaaagtggtgttcttttcctcttgggcatcatcttgctggttctgattggagtgcaaggaaccccagtagtgagaaagggtcgctgttcctgcatcagcaccaaccaagggactatccacctacaatccttgaaagaccttaaacaatttgccccaagcccttcctgcgagaaaattgaaatcattgctacactgaagaatggagttcaaacatgtctaaacccagattcagcagatgtgaaggaactgattaaaaagtgggagaaacaggtcagccaaaagaaaaagcaaaagaatgggaaaaaacatcaaaaaaagaaagttctgaaagttcgaaaatctcaacgttctcgtcaaaagaagactacataa

SEQ ID NO: 5283 - RNA, 378 nt, synthetic construct
  misc_feature 1..378: note = derived and/or modified sequence opt1 fromCXCL9__Homo_sapiens__AAH63122
  source 1..378: mol_type = other RNA
atgaagaagtccggcgtgctgttcctcctggggatcatcctgctcgtcctgatcggcgtgcaggggacccccgtggtccgcaagggccggtgcagctgcatcagcaccaaccaggggacgatccacctccagtccctgaaggacctgaagcagttcgccccgagcccctcctgcgagaagatcgagatcatcgccaccctgaagaacggcgtgcagacctgcctcaaccccgacagcgcggacgtgaaggagctgatcaagaagtgggagaagcaggtctcccagaagaagaagcagaagaacggcaagaagcaccagaagaagaaggtgctgaaggtgcgcaagagccagcggtcccgccagaagaagaccacgtga

SEQ ID NO: 5284 - RNA, 378 nt, synthetic construct
  misc_feature 1..378: note = derived and/or modified sequence opt2 fromCXCL9__Homo_sapiens__AAH63122
  source 1..378: mol_type = other RNA
atgaagaagtccggcgtcctcttcctcctcggcatcatcctcctcgtcctcatcggcgtccagggcacccccgtcgtccgcaagggccgctgctcctgcatctccaccaaccagggcaccatccacctccagtccctcaaggacctcaagcagttcgccccctccccctcctgcgagaagatcgagatcatcgccaccctcaagaacggcgtccagacctgcctcaaccccgactccgccgacgtcaaggagctcatcaagaagtgggagaagcaggtctcccagaagaagaagcagaagaacggcaagaagcaccagaagaagaaggtcctcaaggtccgcaagtcccagcgctcccgccagaagaagaccacctga

SEQ ID NO: 5285 - RNA, 378 nt, synthetic construct
  misc_feature 1..378: note = derived and/or modified sequence opt3 fromCXCL9__Homo_sapiens__AAH63122
  source 1..378: mol_type = other RNA
atgaagaaaagcggcgtgctgttcctccttgggataattctgttggtcttaataggagttcagggtacccccgtggtaagaaaggggaggtgctcctgtatctctacaaaccaaggcactattcatctgcagtcactaaaagacctcaagcagtttgcccctagtccaagctgcgagaaaatcgaaattatcgctacgctgaagaatggagtgcagacctgtcttaacccggattccgcagacgtcaaggagctgatcaaaaagtgggaaaaacaagtgtctcagaagaaaaagcagaagaatggcaaaaagcaccagaaaaagaaagttttgaaggtgcggaaatcgcaacgctcacgacagaagaagacaacttga

SEQ ID NO: 5286 - RNA, 378 nt, synthetic construct
  misc_feature 1..378: note = derived and/or modified sequence opt4 fromCXCL9__Homo_sapiens__AAH63122
  source 1..378: mol_type = other RNA
atgaagaagagcggcgtgctgttcctgctgggcatcatcctgctggtgctgatcggcgtgcagggcacccccgtggtgagaaagggcagatgcagctgcatcagcaccaaccagggcaccatccacctgcagagcctgaaggacctgaagcagttcgcccccagccccagctgcgagaagatcgagatcatcgccaccctgaagaacggcgtgcagacctgcctgaaccccgacagcgccgacgtgaaggagctgatcaagaagtgggagaagcaggtgagccagaagaagaagcagaagaacggcaagaagcaccagaagaagaaggtgctgaaggtgagaaagagccagagaagcagacagaagaagaccacctga

SEQ ID NO: 5287 - RNA, 378 nt, synthetic construct
  misc_feature 1..378: note = derived and/or modified sequence opt5 fromCXCL9__Homo_sapiens__AAH63122
  source 1..378: mol_type = other RNA
atgaagaaaagcggcgtgctgttcctcctggggatcattcttctggtcctcatcggagttcagggcacccccgtggtgagaaaggggcggtgctcctgtatttctacaaaccaaggaacgatccatctgcagagccttaaagacctgaagcagtttgccccttccccgtcttgcgagaaaattgaaatcatcgctaccctcaagaatggcgtccagacatgtctgaaccccgatagcgccgacgtgaaggagctgattaaaaagtgggaaaaacaagtttcccagaagaaaaagcagaagaatgggaaaaagcaccagaaaaagaaagtgctcaaggtccgcaaatctcaaagaagccggcagaagaagaccacatga

SEQ ID NO: 5288 - RNA, 378 nt, synthetic construct
  misc_feature 1..378: note = derived and/or modified sequence opt6 fromCXCL9__Homo_sapiens__AAH63122
  source 1..378: mol_type = other RNA
atgaaaaaatcaggagtactattcctactaggaataatactactagtactaataggagtacaaggaacaccagtagtaagaaaaggaagatgcagctgcatatcaacaaaccaaggaacaatacacctacaatcactaaaagacctaaaacaattcgcaccatcaccatcatgcgaaaaaatagaaataatagcaacactaaaaaacggagtacaaacatgcctaaacccagactcagcagacgtaaaagaattaataaaaaaatgggaaaaacaagtaagccaaaaaaaaaaacaaaaaaatggaaaaaaacaccaaaaaaaaaaagtactaaaagtaagaaaaagccaaagatcaagacaaaaaaaaaccacataa

SEQ ID NO: 5289 - protein, 114 aa, synthetic construct
  REGION 1..114: note = XCL1__Homo_sapiens__P47992
MRLLILALLGICSLTAYIVEGVGSEVSDKRTCVSLTTQRLPVSRIKTYTITEGSLRAVIFITKRGLKVCADPQATWVRDVVRSMDRKSNTRNNMIQTKPTGTQQSTNTAVTLTG

SEQ ID NO: 5290 - RNA, 345 nt, synthetic construct
  misc_feature 1..345: note = XCL1__Homo_sapiens__AAC50164
  source 1..345: mol_type = other RNA
atgagacttctcatcctggccctccttggcatctgctctctcactgcatacattgtggaaggtgtagggagtgaagtctcagataagaggacctgtgtgagcctcactacccagcgactgccggttagcagaatcaagacctacaccatcacggaaggctccttgagagcagtaatttttattaccaaacgtggcctaaaagtctgtgctgatccacaagccacgtgggtgagagacgtggtcaggagcatggacaggaaatccaacaccagaaataacatgatccagaccaagccaacaggaacccagcaatcgaccaatacagctgtgaccctgactggctag

SEQ ID NO: 5291 - RNA, 345 nt, synthetic construct
  misc_feature 1..345: note = derived and/or modified sequence opt1 fromXCL1__Homo_sapiens__AAC50164
  source 1..345: mol_type = other RNA
atgcgcctgctcatcctggccctgctcggcatctgcagcctgaccgcctacatcgtggagggggtcggctccgaggtgagcgacaagcggacctgcgtgtccctgacgacccagcgcctccccgtcagccggatcaagacctacaccatcacggaggggtccctgcgcgcggtgatcttcatcaccaagcggggcctgaaggtgtgcgccgacccgcaggccacctgggtccgcgacgtggtgcggagcatggaccgcaagtccaacacccggaacaacatgatccagacgaagcccaccgggacccagcagagcaccaacacggccgtcaccctcaccggctga

SEQ ID NO: 5292 - RNA, 345 nt, synthetic construct
  misc_feature 1..345: note = derived and/or modified sequence opt2 fromXCL1__Homo_sapiens__AAC50164
  source 1..345: mol_type = other RNA
atgcgcctcctcatcctcgccctcctcggcatctgctccctcaccgcctacatcgtcgagggcgtcggctccgaggtctccgacaagcgcacctgcgtctccctcaccacccagcgcctccccgtctcccgcatcaagacctacaccatcaccgagggctccctccgcgccgtcatcttcatcaccaagcgcggcctcaaggtctgcgccgacccccaggccacctgggtccgcgacgtcgtccgctccatggaccgcaagtccaacacccgcaacaacatgatccagaccaagcccaccggcacccagcagtccaccaacaccgccgtcaccctcaccggctga

SEQ ID NO: 5293 - RNA, 345 nt, synthetic construct
  misc_feature 1..345: note = derived and/or modified sequence opt3 fromXCL1__Homo_sapiens__AAC50164
  source 1..345: mol_type = other RNA
atgagactgctcatccttgccctgttgggcatttgcagcttaaccgcttacatagtggagggggtcggatccgaagtttctgacaagaggacatgtgtgtcactgactacgcagcggctacccgtaagtcgcatcaaaacctatacaattactgagggtagcctccgagcagtgatcttcattaccaagcgtggcctgaaagtctgcgccgatcctcaagcgacatgggtgagagacgttgtgaggtccatggatcggaagtctaacacccgcaataacatgatccagactaaaccaacagggacccagcagtcgacgaatactgctgtcacccttacaggatga

SEQ ID NO: 5294 - RNA, 345 nt, synthetic construct
  misc_feature 1..345: note = derived and/or modified sequence opt4 fromXCL1__Homo_sapiens__AAC50164
  source 1..345: mol_type = other RNA
atgagactgctgatcctggccctgctgggcatctgcagcctgaccgcctacatcgtggagggcgtgggcagcgaggtgagcgacaagagaacctgcgtgagcctgaccacccagagactgcccgtgagcagaatcaagacctacaccatcaccgagggcagcctgagagccgtgatcttcatcaccaagagaggcctgaaggtgtgcgccgacccccaggccacctgggtgagagacgtggtgagaagcatggacagaaagagcaacaccagaaacaacatgatccagaccaagcccaccggcacccagcagagcaccaacaccgccgtgaccctgaccggctga

SEQ ID NO: 5295 - RNA, 345 nt, synthetic construct
  misc_feature 1..345: note = derived and/or modified sequence opt5 fromXCL1__Homo_sapiens__AAC50164
  source 1..345: mol_type = other RNA
atgagactgctcatcctggcccttctgggcatttgcagcctcaccgcttacatcgtggagggggtcggatccgaagtttctgacaagcggacatgtgtgagcctgacgacccagcgccttcccgtgtccagaattaaaacatataccatcacagagggctctctgcgggccgtcattttcatcaccaagcgcgggctcaaagtgtgcgcggatcctcaagctacatgggttagagacgtggtccggagcatggatcgcaagtccaacaccagaaataacatgatccagacgaaaccgaccggaacacagcagtctaccaatacagccgtgaccctgacgggctga

SEQ ID NO: 5296 - RNA, 345 nt, synthetic construct
  misc_feature 1..345: note = derived and/or modified sequence opt6 fromXCL1__Homo_sapiens__AAC50164
  source 1..345: mol_type = other RNA
atgagactactaatactagcattactaggaatatgctcactaacagcatacatagtagaaggagtaggaagcgaagtatcagacaaaagaacatgcgtaagcctaacaacacaaagactaccagtatcaagaataaaaacatacacaataacagaaggaagcctaagagcagtaatattcataacaaaaagaggactaaaagtatgcgcagacccacaagcaacatgggtaagagacgtagtaagatcaatggacagaaaaagcaacacaagaaacaacatgatacaaacaaaaccaacaggaacacaacaatcaacaaacacagcagtaacactaacaggataa

SEQ ID NO: 5297 - protein, 114 aa, synthetic construct
  REGION 1..114: note = XCL2__Homo_sapiens__Q9UBD3
MRLLILALLGICSLTAYIVEGVGSEVSHRRTCVSLTTQRLPVSRIKTYTITEGSLRAVIFITKRGLKVCADPQATWVRDVVRSMDRKSNTRNNMIQTKPTGTQQSTNTAVTLTG

SEQ ID NO: 5298 - RNA, 345 nt, synthetic construct
  misc_feature 1..345: note = XCL2__Homo_sapiens__AAH69360
  source 1..345: mol_type = other RNA
atgagacttctcatcctggccctccttggcatctgctctctcactgcatacattgtggaaggtgtagggagtgaagtctcacataggaggacctgtgtgagcctcactacccagcgactgccagttagcagaatcaagacctacaccatcacggaaggctccttgagagcagtaatttttattaccaaacgtggcctaaaagtctgtgctgatccacaagccacgtgggtgagagacgtggtcaggagcatggacaggaaatccaacaccagaaataacatgatccagaccaagccaacaggaacccagcaatcgaccaatacagctgtgaccctgactggctag

SEQ ID NO: 5299 - RNA, 345 nt, synthetic construct
  misc_feature 1..345: note = derived and/or modified sequence opt1 fromXCL2__Homo_sapiens__AAH69360
  source 1..345: mol_type = other RNA
atgcgcctgctcatcctggccctgctcggcatctgcagcctgaccgcctacatcgtggagggggtcggctccgaggtgagccaccggcggacctgcgtgtccctgacgacccagcgcctccccgtcagccgcatcaagacctacaccatcacggaggggtccctgcgggcggtgatcttcatcaccaagcgcggcctgaaggtgtgcgccgacccgcaggccacctgggtccgggacgtggtgcgcagcatggaccggaagtccaacacccgcaacaacatgatccagacgaagcccaccgggacccagcagagcaccaacacggccgtcaccctcaccggctga

SEQ ID NO: 5300 - RNA, 345 nt, synthetic construct
  misc_feature 1..345: note = derived and/or modified sequence opt2 fromXCL2__Homo_sapiens__AAH69360
  source 1..345: mol_type = other RNA
atgcgcctcctcatcctcgccctcctcggcatctgctccctcaccgcctacatcgtcgagggcgtcggctccgaggtctcccaccgccgcacctgcgtctccctcaccacccagcgcctccccgtctcccgcatcaagacctacaccatcaccgagggctccctccgcgccgtcatcttcatcaccaagcgcggcctcaaggtctgcgccgacccccaggccacctgggtccgcgacgtcgtccgctccatggaccgcaagtccaacacccgcaacaacatgatccagaccaagcccaccggcacccagcagtccaccaacaccgccgtcaccctcaccggctga

SEQ ID NO: 5301 - RNA, 345 nt, synthetic construct
  misc_feature 1..345: note = derived and/or modified sequence opt3 fromXCL2__Homo_sapiens__AAH69360
  source 1..345: mol_type = other RNA
atgagactgctcatccttgccctgttgggcatttgcagcttaaccgcttacatagtggagggggtcggatccgaagtttctcacaggcggacatgtgtgtcactgactacgcagcgcctacccgtaagtcgaatcaagacctatacaattactgagggtagcctccgtgcagtgatcttcattaccaaaagaggcctgaaggtctgcgccgaccctcaagcgacatgggtgagggatgttgtgcggtccatggaccgcaaatctaacaccagaaataacatgatccagactaagccaacagggacccagcagtcgacgaatactgctgtcacccttacaggatga

SEQ ID NO: 5302 - RNA, 345 nt, synthetic construct
  misc_feature 1..345: note = derived and/or modified sequence opt4 fromXCL2__Homo_sapiens__AAH69360
  source 1..345: mol_type = other RNA
atgagactgctgatcctggccctgctgggcatctgcagcctgaccgcctacatcgtggagggcgtgggcagcgaggtgagccacagaagaacctgcgtgagcctgaccacccagagactgcccgtgagcagaatcaagacctacaccatcaccgagggcagcctgagagccgtgatcttcatcaccaagagaggcctgaaggtgtgcgccgacccccaggccacctgggtgagagacgtggtgagaagcatggacagaaagagcaacaccagaaacaacatgatccagaccaagcccaccggcacccagcagagcaccaacaccgccgtgaccctgaccggctga

SEQ ID NO: 5303 - RNA, 345 nt, synthetic construct
  misc_feature 1..345: note = derived and/or modified sequence opt5 fromXCL2__Homo_sapiens__AAH69360
  source 1..345: mol_type = other RNA
atgagactgctcatcctggcccttctgggcatttgcagcctcaccgcttacatcgtggagggggtcggatccgaagtttctcaccggcgcacatgtgtgagcctgacgacccagagacttcccgtgtcccggattaagacatataccatcacagagggctctctgcgcgccgtcattttcatcaccaaaagagggctcaaggtgtgcgcggaccctcaagctacatgggttcgggatgtggtccgcagcatggacagaaaatccaacacccggaataacatgatccagacgaagccgaccggaacacagcagtctaccaatacagccgtgaccctgacgggctga

SEQ ID NO: 5304 - RNA, 345 nt, synthetic construct
  misc_feature 1..345: note = derived and/or modified sequence opt6 fromXCL2__Homo_sapiens__AAH69360
  source 1..345: mol_type = other RNA
atgagactactaatactagcactattaggaatatgctcactaacagcatacatagtagaaggagtaggaagcgaagtatcacacagaagaacatgcgtaagtctaacaacacaaagactaccagtatcaagaataaaaacatacacaataacagaaggaagtctaagagcagtaatattcataacaaaaagaggactaaaagtatgcgcagacccacaagcaacatgggtaagagacgtagtaagatcaatggacagaaaaagcaacacaagaaacaacatgatacaaacaaaaccaacaggaacacaacaatcaacaaacacagcagtaacactaacaggataa

SEQ ID NO: 5305 - protein, 432 aa, synthetic construct
  REGION 1..432: note = Cytosine_Deaminase_codA__Escherichia_coli__A0A024KS17
MWRLTVSNNALQTIINARLPGKEGLWQIHLQDGKISAIDAQSGVMPITENSLDAEQGLVIPPFVEPHIHLDTTQTAGQPNWNQSGTLFEGIERWAERKALLTHDDVKQRAWQTLKWQIANGIQHVRTHVDVSDATLTALKAMLEVKQEVAPWIDLQIVAFPQEGILSYPNGEALLEEALRLGADVVGAIPHFEFTREYGVESLHKTFALAQKYDRLIDVHCDEIDDEQSRFVETVAALAYREGMGARVTASHTTAMHSYNGAYTSRLFRLLKMSGINFVANPLVNIHLQGRFDTYPKRRGITRVKEMLESGINVCFGHDDVFDPWYPLGTANMLQVLHMGLHVCQLMGYGQINDGLNLITHHSARTLNLQDYGIAAGNSANLIILPAENGFDALRRQVPIRYSVRGGKVIASTQPAQTTVYLEQPEAIDYKR

SEQ ID NO: 5306 - RNA, 1299 nt, synthetic construct
  misc_feature 1..1299: note = Cytosine_Deaminase_codA__Escherichia_coli__CDU35197
  source 1..1299: mol_type = other RNA
atgtggaggctaacagtgtcgaataacgctttacaaacaattattaacgcccggttaccaggcaaagaggggctgtggcagattcatctgcaggacggaaaaatcagcgccattgatgcgcaatccggcgtgatgcccataactgaaaacagcctggatgccgaacaaggtttagttataccgccgtttgtggagccacatattcacctggacaccacgcaaaccgccggacaaccaaactggaatcagtccggcacgctgtttgaaggcattgaacgctgggccgagcgcaaagcgttattaacccatgacgacgtgaaacaacgcgcatggcaaacgctgaaatggcagattgccaacggcattcagcatgtgcgtacccatgtcgatgtctccgacgcaacgctgactgcgttgaaagcgatgctggaagtgaaacaggaagttgcgccgtggattgatctgcaaatcgtcgccttcccgcaggaagggattttgtcgtatcccaacggtgaagcgttgctggaagaggcgctacgcttaggggcagatgttgttggggcgattccgcattttgaatttacccgtgaatacggcgtggagtcgctgcataaaaccttcgccctggcgcaaaaatacgaccgtctcatcgacgttcactgtgatgagatcgatgacgagcagtcgcgctttgtcgaaaccgttgctgccctggcgtaccgtgaaggcatgggcgcgcgagtcaccgccagccacaccacggcaatgcactcctataacggggcgtatacctcacgtctgttccgcttgctgaaaatgtccggtattaactttgtcgccaacccgctggtcaatattcatctgcaaggacgattcgatacgtatccaaaacgtcgcggcatcacgcgcgttaaagagatgctggagtccggcattaacgtctgctttggtcacgatgatgtcttcgatccgtggtatccgctgggaacggcgaatatgctgcaagtgctgcatatggggctgcatgtttgccagttgatgggctacgggcagattaacgatggcctgaatttaatcacccaccacagtgccagaacgttgaatttgcaggattacggcattgccgccggaaacagcgcaaacctgattatcctgccggctgaaaatggatttgatgcgctgcgccgtcaggttccgatacgttattcggtacgtggcggcaaggtgattgccagtacacaaccggcacaaaccaccgtatatctggagcagccagaagccatcgattacaaacggtga

SEQ ID NO: 5307 - RNA, 1299 nt, synthetic construct
  misc_feature 1..1299: note = derived and/or modified sequence opt1 fromCytosine_Deaminase_codA__Escherichia_coli__CDU35197
  source 1..1299: mol_type = other RNA
atgtggcgcctgaccgtgagcaacaacgccctccagaccatcatcaacgcccggctgcccggcaaggaggggctgtggcagatccacctccaggacggcaagatctccgcgatcgacgcccagagcggggtcatgccgatcacggagaactccctggacgccgagcagggcctggtgatcccgcccttcgtggagccccacatccacctcgacaccacccagaccgccgggcagcccaactggaaccagagcggcacgctgttcgagggcatcgagcgctgggccgagcggaaggcgctgctcacccacgacgacgtcaagcagcgcgcctggcagaccctgaagtggcagatcgccaacgggatccagcacgtgcggacccacgtggacgtctccgacgccacgctgaccgcgctcaaggccatgctggaggtgaagcaggaggtggccccctggatcgacctgcagatcgtcgccttcccccaggagggcatcctcagctaccccaacggggaggccctgctggaggaggcgctccgcctgggcgccgacgtggtgggggccatcccgcacttcgagttcacccgggagtacggcgtcgagtccctgcacaagaccttcgccctcgcccagaagtacgaccgcctgatcgacgtgcactgcgacgagatcgacgacgagcagagccggttcgtggagacggtcgcggccctggcctaccgcgagggcatgggggcccgggtgaccgcctcccacaccaccgcgatgcacagctacaacggcgcctacacgtcccgcctcttccggctgctgaagatgagcgggatcaacttcgtggccaaccccctcgtcaacatccacctccagggccgcttcgacacctaccccaagcggcgcggcatcacccgggtgaaggagatgctggagtccgggatcaacgtgtgcttcggccacgacgacgtcttcgacccctggtacccgctggggaccgccaacatgctccaggtgctgcacatgggcctgcacgtgtgccagctgatggggtacggccagatcaacgacggcctgaacctcatcacgcaccacagcgcccgcaccctgaacctgcaggactacgggatcgcggccggcaactccgccaacctcatcatcctgcccgccgagaacgggttcgacgcgctgcggcgccaggtccccatccggtacagcgtgcgcggcgggaaggtcatcgcctccacccagcccgcccagaccacggtgtacctcgagcagccggaggccatcgactacaagcgctga

SEQ ID NO: 5308 - RNA, 1299 nt, synthetic construct
  misc_feature 1..1299: note = derived and/or modified sequence opt2 fromCytosine_Deaminase_codA__Escherichia_coli__CDU35197
  source 1..1299: mol_type = other RNA
atgtggcgcctcaccgtctccaacaacgccctccagaccatcatcaacgcccgcctccccggcaaggagggcctctggcagatccacctccaggacggcaagatctccgccatcgacgcccagtccggcgtcatgcccatcaccgagaactccctcgacgccgagcagggcctcgtcatcccccccttcgtcgagccccacatccacctcgacaccacccagaccgccggccagcccaactggaaccagtccggcaccctcttcgagggcatcgagcgctgggccgagcgcaaggccctcctcacccacgacgacgtcaagcagcgcgcctggcagaccctcaagtggcagatcgccaacggcatccagcacgtccgcacccacgtcgacgtctccgacgccaccctcaccgccctcaaggccatgctcgaggtcaagcaggaggtcgccccctggatcgacctccagatcgtcgccttcccccaggagggcatcctctcctaccccaacggcgaggccctcctcgaggaggccctccgcctcggcgccgacgtcgtcggcgccatcccccacttcgagttcacccgcgagtacggcgtcgagtccctccacaagaccttcgccctcgcccagaagtacgaccgcctcatcgacgtccactgcgacgagatcgacgacgagcagtcccgcttcgtcgagaccgtcgccgccctcgcctaccgcgagggcatgggcgcccgcgtcaccgcctcccacaccaccgccatgcactcctacaacggcgcctacacctcccgcctcttccgcctcctcaagatgtccggcatcaacttcgtcgccaaccccctcgtcaacatccacctccagggccgcttcgacacctaccccaagcgccgcggcatcacccgcgtcaaggagatgctcgagtccggcatcaacgtctgcttcggccacgacgacgtcttcgacccctggtaccccctcggcaccgccaacatgctccaggtcctccacatgggcctccacgtctgccagctcatgggctacggccagatcaacgacggcctcaacctcatcacccaccactccgcccgcaccctcaacctccaggactacggcatcgccgccggcaactccgccaacctcatcatcctccccgccgagaacggcttcgacgccctccgccgccaggtccccatccgctactccgtccgcggcggcaaggtcatcgcctccacccagcccgcccagaccaccgtctacctcgagcagcccgaggccatcgactacaagcgctga

SEQ ID NO: 5309 - RNA, 1299 nt, synthetic construct
  misc_feature 1..1299: note = derived and/or modified sequence opt3 fromCytosine_Deaminase_codA__Escherichia_coli__CDU35197
  source 1..1299: mol_type = other RNA
atgtggagactgaccgtgagcaacaatgccctccagacaatcattaacgctaggcttcccggcaaggaggggctgtggcaaatacacttgcaggacggaaaaatctccgcaattgatgcccagtctggtgtcatgcctatcactgaaaattcattagacgcggagcagggcctggttattccaccgttcgtggaaccccatatccacctagatacgacccaaacagctgggcagcctaactggaatcagagtggaactctctttgagggcatagaacggtgggccgagcgcaaggcactgcttacccatgacgatgtaaaacagcgagcctggcaaacactgaagtggcagatcgctaacggtattcagcacgtgcgtacccatgtcgacgtgagcgatgcaactttgacagccctcaaagctatgctggaggttaagcaggaagtggccccatggatcgacctgcaaattgtcgcgttcccccaggaggggatcctctcctaccctaatggagaagcattactggaggaggcccttagattgggcgctgatgtggtaggcgccataccacactttgagttcaccagggaatatggggttgaatctctgcacaagacgtttgcactagctcagaaatacgaccggctcattgatgtgcattgcgacgagatcgatgacgaacaatcgcgcttcgtcgagactgtggccgcgctggcctatagagagggaatgggtgcaagggtgaccgcttcacacacaactgccatgcatagctacaacggcgcttataccagtcggctttttcgcctgttgaagatgtccgggattaatttcgtcgccaaccccctcgttaatatccatctgcagggacgatttgacacataccctaaaagaaggggcatcacccgggtgaaggaaatgttagagtctggtattaacgtatgtttcgggcacgatgacgtgtttgatccatggtatccgctgggaacggcaaatatgctccaggtccttcacatgggcctgcacgtgtgccagttgatgggctacgggcaaataaacgacggactaaatctgatcactcatcacagcgcccgtacactcaacctgcaggattacggtattgctgcgggcaactccgcaaatcttatcatactgcccgccgaaaacgggttcgacgctttgcgcagacaggttcctattaggtattcagtgcggggaggcaaagtcatcgccagtacccagccagcacaaactacagtgtacctcgagcagcccgaagccatcgattataagcgatga

SEQ ID NO: 5310 - RNA, 1299 nt, synthetic construct
  misc_feature 1..1299: note = derived and/or modified sequence opt4 fromCytosine_Deaminase_codA__Escherichia_coli__CDU35197
  source 1..1299: mol_type = other RNA
atgtggagactgaccgtgagcaacaacgccctgcagaccatcatcaacgccagactgcccggcaaggagggcctgtggcagatccacctgcaggacggcaagatcagcgccatcgacgcccagagcggcgtgatgcccatcaccgagaacagcctggacgccgagcagggcctggtgatcccccccttcgtggagccccacatccacctggacaccacccagaccgccggccagcccaactggaaccagagcggcaccctgttcgagggcatcgagagatgggccgagagaaaggccctgctgacccacgacgacgtgaagcagagagcctggcagaccctgaagtggcagatcgccaacggcatccagcacgtgagaacccacgtggacgtgagcgacgccaccctgaccgccctgaaggccatgctggaggtgaagcaggaggtggccccctggatcgacctgcagatcgtggccttcccccaggagggcatcctgagctaccccaacggcgaggccctgctggaggaggccctgagactgggcgccgacgtggtgggcgccatcccccacttcgagttcaccagagagtacggcgtggagagcctgcacaagaccttcgccctggcccagaagtacgacagactgatcgacgtgcactgcgacgagatcgacgacgagcagagcagattcgtggagaccgtggccgccctggcctacagagagggcatgggcgccagagtgaccgccagccacaccaccgccatgcacagctacaacggcgcctacaccagcagactgttcagactgctgaagatgagcggcatcaacttcgtggccaaccccctggtgaacatccacctgcagggcagattcgacacctaccccaagagaagaggcatcaccagagtgaaggagatgctggagagcggcatcaacgtgtgcttcggccacgacgacgtgttcgacccctggtaccccctgggcaccgccaacatgctgcaggtgctgcacatgggcctgcacgtgtgccagctgatgggctacggccagatcaacgacggcctgaacctgatcacccaccacagcgccagaaccctgaacctgcaggactacggcatcgccgccggcaacagcgccaacctgatcatcctgcccgccgagaacggcttcgacgccctgagaagacaggtgcccatcagatacagcgtgagaggcggcaaggtgatcgccagcacccagcccgcccagaccaccgtgtacctggagcagcccgaggccatcgactacaagagatga

SEQ ID NO: 5311 - RNA, 1299 nt, synthetic construct
  misc_feature 1..1299: note = derived and/or modified sequence opt5 fromCytosine_Deaminase_codA__Escherichia_coli__CDU35197
  source 1..1299: mol_type = other RNA
atgtggagactgaccgtgagcaacaatgccctccagacaatcattaacgctcggctgcccggcaaggaggggctttggcaaatccatctgcaggacggaaaaatttccgccatcgatgcgcagtctggcgtcatgcctattacggaaaatagcctcgacgctgagcaggggctggttatcccgcccttcgtggaacctcacatccaccttgataccacacaaaccgccggacagcccaactggaatcagtccggcacactgtttgaggggattgaacgctgggccgagagaaaggctctcctgacccatgacgatgtgaaacagcgggcctggcaaacactgaagtggcagatcgctaacggcattcagcacgtccgcacccatgtggacgtttctgatgccacgctcaccgcgctgaaagccatgcttgaggtgaagcaggaagtcgctccttggatcgacctgcaaattgtggccttcccccaggagggaatcctcagctaccctaatggcgaagctctgcttgaggaggccctgagactcggggcggatgttgtgggagccattccgcactttgagttcacacgggaatatggcgtcgaatccctgcacaagacctttgctctggcccagaaatacgaccgcctcatcgatgtgcattgcgacgagatcgatgacgaacaatctagattcgtggagacagtcgctgccctggcctatcgggaggggatgggagctcgcgttaccgcgagccacacgacagccatgcattcctacaacggcgcttataccagcagactttttcggctgctcaagatgtctgggattaatttcgtggccaaccccctggtgaatatccaccttcagggacgctttgacacataccctaaaagacggggcattacccgcgtcaaggaaatgctggagtccggcatcaacgtgtgtttcgggcacgatgacgtttttgatccctggtatcctctcggaaccgccaatatgctccaggtgctgcatatgggcctgcacgtctgccagctgatggggtacggacaaattaacgacggccttaatctgatcacacatcacagcgctagaacgctcaacctgcaggattacgggatcgccgcgggaaactctgctaatcttattatcctgcccgccgaaaacggcttcgacgccctccggagacaggtgccgattcgctattccgttcggggcgggaaagtgatcgctagcacccagcctgcccaaacaaccgtctacctggagcagcccgaagctattgattataagagatga

SEQ ID NO: 5312 - RNA, 1299 nt, synthetic construct
  misc_feature 1..1299: note = derived and/or modified sequence opt6 fromCytosine_Deaminase_codA__Escherichia_coli__CDU35197
  source 1..1299: mol_type = other RNA
atgtggagactaacagtttcaaataacgcattacaaacaataataaatgctagactcccaggaaaagaaggactatggcaaatccatttacaagatggaaaaatctcagcaatagatgcacaaagtggagtaatgccaataacagaaaacagcctagatgcagaacaaggcttagtaataccaccatttgtagagccacacatacacttagatacgactcaaacagcaggccaaccaaattggaaccaaagtggaacactatttgaaggaatagaaagatgggcagaaagaaaagcattactaacacacgatgacgtaaaacaaagagcatggcaaacattaaaatggcaaatagcaaacggaatccaacatgtaagaacacacgtagacgtatcagacgctacattaacagcactcaaagcaatgctagaagtaaaacaagaagtagccccatggatagatctacaaatagtagcatttcctcaagaaggaatattatcctatcctaatggagaagcactactagaagaagcattacgactaggtgcagacgtagtaggagcaatccctcattttgaattcacaagggaatacggcgtagaaagcttacacaaaacctttgctctagcacaaaaatacgacagattaatagatgtccattgcgacgaaatagacgatgaacaatcaagatttgtagaaacagtagcagcattagcatatagagaaggtatgggtgcaagagtaacagcatcacatactacagcaatgcatagctacaatggtgcatacacatcaagactctttagattacttaaaatgagtggaataaattttgttgctaacccactagtaaacatacaccttcaaggaagattcgatacgtacccaaaaagaagaggtatcacaagagtaaaagagatgttagaatcaggaataaacgtatgcttcggacacgacgatgtatttgacccatggtatccattaggaacagccaatatgctacaagtactacatatgggtctccatgtatgtcaactcatgggatacggtcaaataaacgatggactaaatttaataactcatcactcagcaagaactctaaacctacaagactatggaatagccgcaggaaattcagcaaatttgataatactaccagcagaaaacggttttgacgcactaagaagacaagttccaataagatatagcgtcagaggtggaaaagtaatagcaagcactcaaccagctcaaacaacagtttacttagaacaaccagaagcaatagactataaaagataa

SEQ ID NO: 5313 - protein, 432 aa, synthetic construct
  REGION 1..432: note = Cytosine_Deaminase_codA__Escherichia_coli__A0A0H2V4N7
MWRLTVSNNALQTIINARLPGKEGLWQIHLHDGKISAIDTQSGVMPVTENSLDAEQGLVLPPFVEPHIHLDTTQTAGQPNWNQSGTLFEGIERWAERKALLTHDDVKQRAWQTLKWQIANGIQHVRTHVDVSDATLTALKAMLEVKQEVAPWIDLQIVAFPQEGILSYPNGEALLEEALRLGADVVGAIPHFEFTREYGVESLHKTFALAQKYDRLIDVHCDEIDDEQSRFVETVAALAHREGMGARVTASHTTAMHSYNGAYTSRLFRLLKMSGINFVANPLVNIHLQGRFDTYPKRRGITRVKEMLESGINVCFGHDDVFDPWYPLGTANMLQVLHMGLHVCQLMGYGQINDGLNLITHHSARTLNLQDYGIAAGNSANLIILPAENGFDALRRQVPVRYSVRGGKVMASTQPAQTTVYLEQPEAIDYKR

SEQ ID NO: 5314 - RNA, 1299 nt, synthetic construct
  misc_feature 1..1299: note = Cytosine_Deaminase_codA__Escherichia_coli__AAN78935
  source 1..1299: mol_type = other RNA
atgtggaggctaacagtgtcgaataacgctttacaaacaattattaacgcccggttacccggcaaagaggggctgtggcagattcatcttcacgacggaaaaatcagcgccattgatacgcaatctggtgtgatgcccgtaactgaaaacagcctggatgccgaacaaggtttagttttaccgccgtttgtggagccgcatattcacctggacaccacgcaaaccgccggacaaccgaactggaatcagtccggcacgctgtttgaaggcattgaacgctgggccgagcgcaaagcgttattaacccatgacgatgtgaaacaacgcgcctggcaaacgctgaaatggcagattgccaacggcattcagcatgtgcgtacccatgtcgatgtctccgacgcaacgctgactgcgttgaaagcgatgctggaagtgaaacaggaagttgcgccgtggattgatctgcaaatcgtcgccttcccgcaggaagggattttgtcgtatcccaacggtgaagcgttgctggaagaggcgttacgcttaggggcagacgttgttggggcgattccgcattttgaatttacccgtgaatatggcgtggagtcgctgcataaaaccttcgccctggcgcaaaaatacgaccgtctcatcgatgttcactgtgacgagattgatgatgagcaatcacgctttgtcgaaaccgttgctgccctggcgcaccgtgaaggcatgggcgcgcgagtcaccgccagccatactacggcaatgcactcctataacggggcgtatacttcgcgcctgtttcgtttgctgaaaatgtccggtattaactttgtcgccaacccgttggtcaatattcatctgcaaggacgtttcgatacgtatccaaaacgtcgcggcatcacgcgcgttaaagagatgctggagtccggcattaacgtctgctttggtcacgatgatgtcttcgatccgtggtatccgctgggaacggcgaatatgctgcaagtgctgcatatggggctgcatgtttgccagctgatgggctacgggcagattaacgacggcctgaatttaatcacccaccacagcgccaggacgttgaatttgcaggattacggcattgccgccggaaacagcgccaacctgattatcctgccggctgaaaatgggtttgatgcgttgcgccgtcaggttccggtacgttattcggtacgtggcggtaaggtgatggccagcacacaaccggcacaaaccaccgtatatctggagcagccagaagccatcgattacaaacggtaa

SEQ ID NO: 5315 - RNA, 1299 nt, synthetic construct
  misc_feature 1..1299: note = derived and/or modified sequence opt1 fromCytosine_Deaminase_codA__Escherichia_coli__AAN78935
  source 1..1299: mol_type = other RNA
atgtggcgcctgaccgtgagcaacaacgccctccagaccatcatcaacgcccggctgcccggcaaggaggggctgtggcagatccacctccacgacggcaagatctccgcgatcgacacgcagagcggggtcatgccggtgaccgagaactccctggacgccgagcagggcctggtgctcccgcccttcgtcgagccccacatccacctggacaccacccagacggccgggcagcccaactggaaccagagcggcaccctgttcgagggcatcgagcgctgggccgagcggaaggccctcctgacccacgacgacgtgaagcagcgcgcgtggcagaccctgaagtggcagatcgccaacgggatccagcacgtgcggacgcacgtcgacgtgtccgacgccaccctcaccgccctgaaggcgatgctggaggtgaagcaggaggtcgccccctggatcgacctccagatcgtggccttcccccaggagggcatcctgagctaccccaacggggaggccctgctcgaggaggccctgcgcctgggcgcggacgtggtcggggccatcccgcacttcgagttcacccgggagtacggcgtggagtccctccacaagacgttcgccctggcccagaagtacgaccgcctgatcgacgtgcactgcgacgagatcgacgacgagcagagccggttcgtcgagaccgtggccgcgctcgcccaccgcgagggcatgggggcccgggtgaccgcctcccacaccacggccatgcacagctacaacggcgcgtacacctcccgcctgttccggctgctcaagatgagcgggatcaacttcgtcgccaaccccctggtgaacatccacctccagggccgcttcgacacctaccccaagcggcgcggcatcacccgggtgaaggagatgctggagtccgggatcaacgtctgcttcggccacgacgacgtgttcgacccctggtacccgctggggacggccaacatgctccaggtgctgcacatgggcctgcacgtctgccagctgatggggtacggccagatcaacgacggcctcaacctgatcacccaccacagcgcccgcaccctgaacctccaggactacgggatcgccgcgggcaactccgccaacctgatcatcctgcccgccgagaacgggttcgacgccctccggcgccaggtgcccgtccggtacagcgtgcgcggcgggaaggtgatggcgtccacccagcccgcccagacgaccgtctacctggagcagccggaggccatcgactacaagcgctga

SEQ ID NO: 5316 - RNA, 1299 nt, synthetic construct
  misc_feature 1..1299: note = derived and/or modified sequence opt2 fromCytosine_Deaminase_codA__Escherichia_coli__AAN78935
  source 1..1299: mol_type = other RNA
atgtggcgcctcaccgtctccaacaacgccctccagaccatcatcaacgcccgcctccccggcaaggagggcctctggcagatccacctccacgacggcaagatctccgccatcgacacccagtccggcgtcatgcccgtcaccgagaactccctcgacgccgagcagggcctcgtcctcccccccttcgtcgagccccacatccacctcgacaccacccagaccgccggccagcccaactggaaccagtccggcaccctcttcgagggcatcgagcgctgggccgagcgcaaggccctcctcacccacgacgacgtcaagcagcgcgcctggcagaccctcaagtggcagatcgccaacggcatccagcacgtccgcacccacgtcgacgtctccgacgccaccctcaccgccctcaaggccatgctcgaggtcaagcaggaggtcgccccctggatcgacctccagatcgtcgccttcccccaggagggcatcctctcctaccccaacggcgaggccctcctcgaggaggccctccgcctcggcgccgacgtcgtcggcgccatcccccacttcgagttcacccgcgagtacggcgtcgagtccctccacaagaccttcgccctcgcccagaagtacgaccgcctcatcgacgtccactgcgacgagatcgacgacgagcagtcccgcttcgtcgagaccgtcgccgccctcgcccaccgcgagggcatgggcgcccgcgtcaccgcctcccacaccaccgccatgcactcctacaacggcgcctacacctcccgcctcttccgcctcctcaagatgtccggcatcaacttcgtcgccaaccccctcgtcaacatccacctccagggccgcttcgacacctaccccaagcgccgcggcatcacccgcgtcaaggagatgctcgagtccggcatcaacgtctgcttcggccacgacgacgtcttcgacccctggtaccccctcggcaccgccaacatgctccaggtcctccacatgggcctccacgtctgccagctcatgggctacggccagatcaacgacggcctcaacctcatcacccaccactccgcccgcaccctcaacctccaggactacggcatcgccgccggcaactccgccaacctcatcatcctccccgccgagaacggcttcgacgccctccgccgccaggtccccgtccgctactccgtccgcggcggcaaggtcatggcctccacccagcccgcccagaccaccgtctacctcgagcagcccgaggccatcgactacaagcgctga

SEQ ID NO: 5317 - RNA, 1299 nt, synthetic construct
  misc_feature 1..1299: note = derived and/or modified sequence opt3 fromCytosine_Deaminase_codA__Escherichia_coli__AAN78935
  source 1..1299: mol_type = other RNA
atgtggagactgaccgtgagcaacaatgccctccagacaatcattaacgctaggcttcccggcaaggaggggctgtggcaaatacacttgcatgacggaaaaatctccgcaattgatactcagtctggtgtcatgcctgttacggaaaattcattagacgccgagcagggcctggtgctaccaccgttcgtagaaccccacatccatctcgataccacacagactgcggggcaacctaactggaatcagagtggaaccctgtttgagggcattgaacggtgggctgagcgcaaggcccttctgacacacgacgatgtgaaacagcgagcatggcagaccttgaagtggcaaatcgccaacggtatacagcatgtccgtactcacgtggacgttagcgatgctacactcaccgcactgaaagccatgctggaggtgaagcaggaagtcgctccatggatcgacctccagattgtggccttcccccaagaggggatcttatcctaccctaatggagaagcgctgcttgaggaggcattgagactgggcgccgatgtagttggcgctattccacactttgagttcacgagggaatatggggtggaatctctacataagacttttgccctcgcacagaaatacgaccggctgatcgatgtccactgcgacgagatagatgacgaacagtcgcgcttcgtggagaccgtggctgcccttgcgcatagagagggaatgggtgccagggtcacagcatcacacactaccgctatgcacagctataacggcgcctacacaagtcggctgtttcgcttgctcaagatgtccgggattaatttcgttgctaaccccctggtgaatatccatttacaaggacgatttgacacctatcctaaaagaaggggcattacgcgggtaaaggaaatgctggagtctggtatcaacgtgtgtttcgggcacgatgacgtctttgatccatggtacccgctcggaactgccaatatgcttcaggtgctgcatatgggcttgcacgtttgccagctaatgggctatgggcagatcaacgacggactgaatctcattacacatcacagcgcacgtaccctgaaccttcaagattacggtatagccgctggcaactccgcgaatctgatcattttgcccgcagaaaacgggttcgacgccctccgcagacaggtgcctgtcaggtactcagtgcggggaggcaaagtaatggctagtactcagccagcccagacaaccgtttatctggagcaacccgaagcaatcgattacaagcgatga

SEQ ID NO: 5318 - RNA, 1299 nt, synthetic construct
  misc_feature 1..1299: note = derived and/or modified sequence opt4 fromCytosine_Deaminase_codA__Escherichia_coli__AAN78935
  source 1..1299: mol_type = other RNA
atgtggagactgaccgtgagcaacaacgccctgcagaccatcatcaacgccagactgcccggcaaggagggcctgtggcagatccacctgcacgacggcaagatcagcgccatcgacacccagagcggcgtgatgcccgtgaccgagaacagcctggacgccgagcagggcctggtgctgccccccttcgtggagccccacatccacctggacaccacccagaccgccggccagcccaactggaaccagagcggcaccctgttcgagggcatcgagagatgggccgagagaaaggccctgctgacccacgacgacgtgaagcagagagcctggcagaccctgaagtggcagatcgccaacggcatccagcacgtgagaacccacgtggacgtgagcgacgccaccctgaccgccctgaaggccatgctggaggtgaagcaggaggtggccccctggatcgacctgcagatcgtggccttcccccaggagggcatcctgagctaccccaacggcgaggccctgctggaggaggccctgagactgggcgccgacgtggtgggcgccatcccccacttcgagttcaccagagagtacggcgtggagagcctgcacaagaccttcgccctggcccagaagtacgacagactgatcgacgtgcactgcgacgagatcgacgacgagcagagcagattcgtggagaccgtggccgccctggcccacagagagggcatgggcgccagagtgaccgccagccacaccaccgccatgcacagctacaacggcgcctacaccagcagactgttcagactgctgaagatgagcggcatcaacttcgtggccaaccccctggtgaacatccacctgcagggcagattcgacacctaccccaagagaagaggcatcaccagagtgaaggagatgctggagagcggcatcaacgtgtgcttcggccacgacgacgtgttcgacccctggtaccccctgggcaccgccaacatgctgcaggtgctgcacatgggcctgcacgtgtgccagctgatgggctacggccagatcaacgacggcctgaacctgatcacccaccacagcgccagaaccctgaacctgcaggactacggcatcgccgccggcaacagcgccaacctgatcatcctgcccgccgagaacggcttcgacgccctgagaagacaggtgcccgtgagatacagcgtgagaggcggcaaggtgatggccagcacccagcccgcccagaccaccgtgtacctggagcagcccgaggccatcgactacaagagatga

SEQ ID NO: 5319 - RNA, 1299 nt, synthetic construct
  misc_feature 1..1299: note = derived and/or modified sequence opt5 fromCytosine_Deaminase_codA__Escherichia_coli__AAN78935
  source 1..1299: mol_type = other RNA
atgtggagactgaccgtgagcaacaatgccctccagacaatcattaacgctcggctgcccggcaaggaggggctttggcaaatccatctgcacgacggaaaaatttccgccatcgatacgcagtctggcgtcatgcctgttaccgaaaatagcctcgacgcggagcaggggctggtgcttccgcccttcgtggaacctcacattcatctggatacaacccagacagctggacaacccaactggaatcagtccggcaccctctttgaggggatcgaacgctgggccgagagaaaggccctgctgacacacgacgatgtcaaacagcgggcttggcagaccctcaagtggcaaatcgccaacggcattcagcatgtgcgcacgcacgttgacgtgtctgatgctaccctgacagcccttaaagcgatgctggaggtcaagcaggaagtggccccttggatcgacctccagattgttgctttcccccaagagggaatcctgagctaccctaatggcgaagcccttctggaggaggctctcagactgggggccgatgtggtcggagcgattccgcactttgagttcacccgggaatatggcgtggaatccctgcataagacatttgccctcgctcagaaatacgaccgcctgatcgatgtgcactgcgacgagattgatgacgaacagtctagattcgtcgagaccgttgccgctcttgcccatcgggaggggatgggagcccgcgtgacggctagccacacaaccgcgatgcactcctataacggcgcctacacaagcagactgtttcggctcctgaagatgtctgggatcaatttcgtggctaacccccttgtcaatatccatctgcaaggacgctttgacacctatcctaaaagacggggcattacccgcgtgaaggaaatgctcgagtccggcatcaacgtttgtttcgggcacgatgacgtgtttgatccctggtaccctctgggaacagccaatatgctgcaggtcctccatatgggcctgcacgtgtgccagcttatggggtatggacagattaacgacggcctgaatctcatcacgcatcacagcgccagaaccctgaaccttcaagattacgggattgctgccggaaactctgcgaatctgatcatcctccccgctgaaaacggcttcgacgccctgcggagacaggttccggtgcgctactccgtccggggcgggaaagtgatggccagcacacagcctgctcagaccacagtctatctggagcaacccgaagccattgattacaagagatga

SEQ ID NO: 5320 - RNA, 1299 nt, synthetic construct
  misc_feature 1..1299: note = derived and/or modified sequence opt6 fromCytosine_Deaminase_codA__Escherichia_coli__AAN78935
  source 1..1299: mol_type = other RNA
atgtggagactaacagtctcaaataacgctttacaaacaataataaatgcaagactaccaggaaaagaaggactatggcaaatacacctacacgacggaaaaataagcgcaatagacacacaatcaggagtaatgccagtcacagaaaatagcttagacgctgaacaaggattggtattaccaccatttgtagaaccacacatccacttagacactacacaaacagccggacaaccaaattggaaccaaagtggaacactattcgaaggaatagaaagatgggcagaaagaaaagcactattaacccacgacgacgtaaaacaaagagcatggcaaacactaaaatggcaaatagcaaatgggatacaacatgtacgaacacatgtagatgtatcagatgcaacattaaccgcattgaaagcaatgttagaagtaaaacaagaagtcgcaccatggatagacctacaaattgtcgcattcccccaagaaggaatactatcataccccaatggtgaagcattactagaagaagcactaagactcggagcagatgtagttggagcaataccacactttgaattcactagagaatatggagtcgaaagcctacacaaaacatttgcactagctcaaaaatatgatagattaatagacgtacactgtgatgaaatagatgatgaacaatcaaggtttgtagaaacagtagcagcattagcacatagagaaggaatgggagcaagagtaacagcaagtcatacaacagcaatgcattcatacaacggagcatacacaagcagactatttaggctactaaaaatgtccggaataaattttgtcgcaaacccactagtaaacatacacttacaaggacgattcgacacatacccaaaaagacgaggaatcactagagtaaaagaaatgttagaatcaggaataaacgtatgctttggacatgacgatgtttttgatccctggtatccattaggaacagccaacatgttacaagtactacacatgggactacatgtctgtcaattaatgggttatggacaaataaacgatggtttaaatctaataacacaccactcagcaagaacattaaatttacaagactacggaatagcagcaggaaattcagcaaacttaataatactacctgcagaaaacggattcgacgcgttaagacgacaagtacccgtaagatacagcgtaagaggtggaaaagtaatggcatcaactcaacccgcacaaacaacagtttacttagaacaaccagaagcaatagactataaaagataa

SEQ ID NO: 5321 - protein, 432 aa, synthetic construct
  REGION 1..432: note = Cytosine_Deaminase_codA__Escherichia_coli__A0A0H2YX33
MWRLTVSNNALQTIINAQLPGKEGLWQIHLHDGKISAIDAQSGVMPVTENSLDAEQGLVLPPFVEPHIHLDTTQTAGQPNWNQSGTLFEGIERWAERKALLTHDDVKQRAWQTLKWQIANGIQHVRTHVDVSDATLTALKAMLEVKQEVAPWIDLQIVAFPQEGILSYPNGEALLEEALRLGADVVGAIPHFEFTREYGVESLHKTFALAQKYDRLIDVHCDEIDDEQSRFVETVAALAHREGMGARVTASHTTAMHSYNGAYTSRLFRLLKMSGINFVANPLVNIHLQGRFDTYPKRRGITRVKEMLESGINVCFGHDDVFDPWYPLGTANMLQVLHMGLHVCQLMGYGQINDGLNLITHHSARTLNLQDYGIAAGNSANLIILPAENGFDALRRQVPVRYSVRGGKVIASTQPAQTTVYLEQPEAIDYKR

SEQ ID NO: 5322 - RNA, 1299 nt, synthetic construct
  misc_feature 1..1299: note = Cytosine_Deaminase_codA__Escherichia_coli__ABI99817
  source 1..1299: mol_type = other RNA
atgtggaggctaacagtgtcgaataatgctttacaaacaattattaacgcccagttacccggcaaagaggggctgtggcagattcatcttcacgacggaaaaatcagcgccattgatgcgcaatccggggtgatgcccgtaactgaaaacagcctggatgccgaacaaggtttagttttaccgccgtttgtggagccgcatattcacctggacaccacgcaaaccgccggacaaccgaactggaatcagtccggcacgctgtttgaaggcattgaacgctgggccgagcgcaaagcgttattaactcatgacgatgtgaaacaacgcgcatggcaaacgctgaaatggcagattgccaacggcattcagcatgtgcgtacccatgtcgatgtctccgacgcaacgctgactgcgttgaaagcgatgctggaagtgaaacaggaagttgcgccgtggattgatctgcaaatcgtcgccttcccgcaggaagggattttgtcgtatcccaacggtgaagcgttgctggaagaggcgctacgcttaggggcagatgttgttggggcgattccgcattttgaatttacccgtgaatacggcgtggagtcgctgcataaaaccttcgccctggcgcaaaaatacgaccgtctcatcgacgttcactgtgatgagatcgatgacgagcagtcgcgctttgtcgaaaccgttgctgccctggcgcaccgtgaaggcatgggcgcgcgagtcaccgccagccatactacggcaatgcactcctataacggggcgtatacttcgcgcctgttccgtttgctgaaaatgtccggtattaactttgtcgccaacccgttggtcaatattcatctgcaaggacgtttcgatacgtatccaaaacgtcgcggcatcacgcgcgttaaagagatgctggagtccggcattaacgtctgctttggtcacgatgatgtcttcgatccgtggtatccgctgggaacggcgaatatgctgcaagtgctgcatatggggctgcatgtttgccagctgatgggctacgggcagattaacgacggcctgaatttaatcacccaccacagcgccaggacgttgaatttgcaggattacggcattgccgccggaaacagcgccaacctgattatcctgccggctgaaaatgggtttgatgcgctgcgccgtcaggttccggtacgttattcggtacgtggcggcaaggtgattgccagcacacaaccggcacaaaccaccgtatatctggagcagccagaagccatcgattacaaacggtaa

SEQ ID NO: 5323 - RNA, 1299 nt, synthetic construct
  misc_feature 1..1299: note = derived and/or modified sequence opt1 fromCytosine_Deaminase_codA__Escherichia_coli__ABI99817
  source 1..1299: mol_type = other RNA
atgtggcgcctgaccgtgagcaacaacgccctccagaccatcatcaacgcccagctgcccggcaaggaggggctgtggcagatccacctccacgacggcaagatctccgcgatcgacgcccagagcggggtcatgccggtgacggagaactccctggacgccgagcagggcctggtgctcccgcccttcgtcgagccccacatccacctggacaccacccagaccgccgggcagcccaactggaaccagagcggcacgctgttcgagggcatcgagcggtgggccgagcgcaaggcgctcctgacccacgacgacgtgaagcagcgggcctggcagaccctgaagtggcagatcgccaacgggatccagcacgtgcgcacccacgtcgacgtgtccgacgccacgctcaccgcgctgaaggccatgctggaggtgaagcaggaggtcgccccctggatcgacctccagatcgtggccttcccccaggagggcatcctgagctaccccaacggggaggccctgctcgaggaggcgctgcggctgggcgccgacgtggtcggggccatcccgcacttcgagttcacccgcgagtacggcgtggagtccctccacaagaccttcgccctggcccagaagtacgaccggctgatcgacgtgcactgcgacgagatcgacgacgagcagagccgcttcgtcgagacggtggcggccctcgcccaccgggagggcatgggggcccgcgtgaccgcctcccacaccaccgcgatgcacagctacaacggcgcctacacgtcccggctgttccgcctgctcaagatgagcgggatcaacttcgtcgccaaccccctggtgaacatccacctccagggccggttcgacacctaccccaagcgccggggcatcacccgcgtgaaggagatgctggagtccgggatcaacgtctgcttcggccacgacgacgtgttcgacccctggtacccgctggggaccgccaacatgctccaggtgctgcacatgggcctgcacgtctgccagctgatggggtacggccagatcaacgacggcctcaacctgatcacgcaccacagcgcccggaccctgaacctccaggactacgggatcgcggccggcaactccgccaacctgatcatcctgcccgccgagaacgggttcgacgcgctccgccgccaggtgcccgtccggtacagcgtgcggggcgggaaggtgatcgcctccacccagcccgcccagaccacggtctacctggagcagccggaggccatcgactacaagcgctga

SEQ ID NO: 5324 - RNA, 1299 nt, synthetic construct
  misc_feature 1..1299: note = derived and/or modified sequence opt2 fromCytosine_Deaminase_codA__Escherichia_coli__ABI99817
  source 1..1299: mol_type = other RNA
atgtggcgcctcaccgtctccaacaacgccctccagaccatcatcaacgcccagctccccggcaaggagggcctctggcagatccacctccacgacggcaagatctccgccatcgacgcccagtccggcgtcatgcccgtcaccgagaactccctcgacgccgagcagggcctcgtcctcccccccttcgtcgagccccacatccacctcgacaccacccagaccgccggccagcccaactggaaccagtccggcaccctcttcgagggcatcgagcgctgggccgagcgcaaggccctcctcacccacgacgacgtcaagcagcgcgcctggcagaccctcaagtggcagatcgccaacggcatccagcacgtccgcacccacgtcgacgtctccgacgccaccctcaccgccctcaaggccatgctcgaggtcaagcaggaggtcgccccctggatcgacctccagatcgtcgccttcccccaggagggcatcctctcctaccccaacggcgaggccctcctcgaggaggccctccgcctcggcgccgacgtcgtcggcgccatcccccacttcgagttcacccgcgagtacggcgtcgagtccctccacaagaccttcgccctcgcccagaagtacgaccgcctcatcgacgtccactgcgacgagatcgacgacgagcagtcccgcttcgtcgagaccgtcgccgccctcgcccaccgcgagggcatgggcgcccgcgtcaccgcctcccacaccaccgccatgcactcctacaacggcgcctacacctcccgcctcttccgcctcctcaagatgtccggcatcaacttcgtcgccaaccccctcgtcaacatccacctccagggccgcttcgacacctaccccaagcgccgcggcatcacccgcgtcaaggagatgctcgagtccggcatcaacgtctgcttcggccacgacgacgtcttcgacccctggtaccccctcggcaccgccaacatgctccaggtcctccacatgggcctccacgtctgccagctcatgggctacggccagatcaacgacggcctcaacctcatcacccaccactccgcccgcaccctcaacctccaggactacggcatcgccgccggcaactccgccaacctcatcatcctccccgccgagaacggcttcgacgccctccgccgccaggtccccgtccgctactccgtccgcggcggcaaggtcatcgcctccacccagcccgcccagaccaccgtctacctcgagcagcccgaggccatcgactacaagcgctga

SEQ ID NO: 5325 - RNA, 1299 nt, synthetic construct
  misc_feature 1..1299: note = derived and/or modified sequence opt3 fromCytosine_Deaminase_codA__Escherichia_coli__ABI99817
  source 1..1299: mol_type = other RNA
atgtggagactgaccgtgagcaacaatgccctccagacaatcattaacgctcaacttcccggcaaggaggggctgtggcagatacacttgcatgacggaaaaatctccgcaattgatgcccagtctggtgtcatgcctgttactgaaaattcattagacgcggagcagggcctggtgctaccaccgttcgtagaaccccacatccatctcgatacgacccaaacagctgggcagcctaactggaatcagagtggaactctgtttgagggcattgaaaggtgggccgagcggaaggcacttctgacccacgacgatgtgaaacagcgcgcctggcaaacattgaagtggcagatcgctaacggtatacagcatgtccgaacccacgtggacgttagcgatgcaactctcacagccctgaaagctatgctggaggtgaagcaggaagtcgccccatggatcgacctccaaattgtggcgttcccccaggaggggatcttatcctaccctaatggagaagcactgcttgaggaggccttgcgtctgggcgctgatgtagttggcgccattccacactttgagttcaccagagaatatggggtggaatctctacataagacgtttgcactcgctcagaaatacgacaggctgatcgatgtccactgcgacgagatagatgacgaacaatcgcggttcgtggagactgtggccgcgcttgcccatcgcgagggaatgggtgcaagagtcaccgcttcacacacaactgccatgcacagctataacggcgcttacaccagtaggctgtttcggttgctcaagatgtccgggattaatttcgttgccaaccccctggtgaatatccatttacagggacgctttgacacatatcctaaacgaagaggcattaccagggtaaaggaaatgctggagtctggtatcaacgtgtgtttcgggcacgatgacgtctttgatccatggtacccgctcggaacggcaaatatgcttcaggtgctgcatatgggcttgcacgtttgccagctaatgggctatgggcaaatcaacgacggactgaatctcattactcatcacagcgcccggacactgaaccttcaggattacggtatagctgcgggcaactccgcaaatctgatcattttgcccgccgaaaacgggttcgacgctctccgtcgccaggtgcctgtcagatactcagtgaggggaggcaaagtaatcgccagtacccagccagcacaaactacagtttatctggagcagcccgaagccatagattacaagcggtga

SEQ ID NO: 5326 - RNA, 1299 nt, synthetic construct
  misc_feature 1..1299: note = derived and/or modified sequence opt4 fromCytosine_Deaminase_codA__Escherichia_coli__ABI99817
  source 1..1299: mol_type = other RNA
atgtggagactgaccgtgagcaacaacgccctgcagaccatcatcaacgcccagctgcccggcaaggagggcctgtggcagatccacctgcacgacggcaagatcagcgccatcgacgcccagagcggcgtgatgcccgtgaccgagaacagcctggacgccgagcagggcctggtgctgccccccttcgtggagccccacatccacctggacaccacccagaccgccggccagcccaactggaaccagagcggcaccctgttcgagggcatcgagagatgggccgagagaaaggccctgctgacccacgacgacgtgaagcagagagcctggcagaccctgaagtggcagatcgccaacggcatccagcacgtgagaacccacgtggacgtgagcgacgccaccctgaccgccctgaaggccatgctggaggtgaagcaggaggtggccccctggatcgacctgcagatcgtggccttcccccaggagggcatcctgagctaccccaacggcgaggccctgctggaggaggccctgagactgggcgccgacgtggtgggcgccatcccccacttcgagttcaccagagagtacggcgtggagagcctgcacaagaccttcgccctggcccagaagtacgacagactgatcgacgtgcactgcgacgagatcgacgacgagcagagcagattcgtggagaccgtggccgccctggcccacagagagggcatgggcgccagagtgaccgccagccacaccaccgccatgcacagctacaacggcgcctacaccagcagactgttcagactgctgaagatgagcggcatcaacttcgtggccaaccccctggtgaacatccacctgcagggcagattcgacacctaccccaagagaagaggcatcaccagagtgaaggagatgctggagagcggcatcaacgtgtgcttcggccacgacgacgtgttcgacccctggtaccccctgggcaccgccaacatgctgcaggtgctgcacatgggcctgcacgtgtgccagctgatgggctacggccagatcaacgacggcctgaacctgatcacccaccacagcgccagaaccctgaacctgcaggactacggcatcgccgccggcaacagcgccaacctgatcatcctgcccgccgagaacggcttcgacgccctgagaagacaggtgcccgtgagatacagcgtgagaggcggcaaggtgatcgccagcacccagcccgcccagaccaccgtgtacctggagcagcccgaggccatcgactacaagagatga

SEQ ID NO: 5327 - RNA, 1299 nt, synthetic construct
  misc_feature 1..1299: note = derived and/or modified sequence opt5 fromCytosine_Deaminase_codA__Escherichia_coli__ABI99817
  source 1..1299: mol_type = other RNA
atgtggagactgaccgtgagcaacaatgccctccagacaatcattaacgctcaactgcccggcaaggaggggctttggcagatccaccttcatgacggaaaaatttccgccatcgatgcgcagtctggcgtcatgcctgttacggaaaatagcctcgacgctgagcaggggctggtgcttccgcccttcgtggaacctcacattcatctggataccacacaaaccgccggacagcccaactggaatcagtccggcacactctttgaggggatcgaacggtgggccgagcgcaaggctctgctgacccacgacgatgtcaaacagagagcctggcaaacactcaagtggcagatcgctaacggcattcagcatgtgcggacccacgttgacgtgtctgatgccacgctgaccgcgcttaaagccatgctggaggtcaagcaggaagtggctccttggatcgacctccaaattgttgccttcccccaggagggaatcctgagctaccctaatggcgaagctctgctggaggaggccctccgcctgggggcggatgtggtcggagccattccgcactttgagttcacaagagaatatggcgtggaatccctgcataagacctttgctctcgcccagaaatacgaccggctgatcgatgtgcactgcgacgagattgatgacgaacaatctcgcttcgtcgagacagttgctgcccttgcccatagagaggggatgggagctcgggtgaccgcgagccacacgacagccatgcactcctataacggcgcttacaccagccgcctgtttagactcctgaagatgtctgggatcaatttcgtggccaacccccttgtcaatatccatctgcagggacggtttgacacatatcctaaacgcagaggcattacccgggtgaaggaaatgctcgagtccggcatcaacgtttgtttcgggcacgatgacgtgtttgatccctggtaccctctgggaaccgccaatatgctgcaggtcctccatatgggcctgcacgtgtgccagcttatggggtatggacaaattaacgacggcctgaatctcatcacacatcacagcgctcgcacgctgaaccttcaggattacgggattgccgcgggaaactctgctaatctgatcatcctccccgccgaaaacggcttcgacgccctgagacggcaggttccggtgagatactccgtccgcggcgggaaagtgattgctagcacccagcctgcccaaacaaccgtctatctggagcagcccgaagctatcgattacaagcggtga

SEQ ID NO: 5328 - RNA, 1299 nt, synthetic construct
  misc_feature 1..1299: note = derived and/or modified sequence opt6 fromCytosine_Deaminase_codA__Escherichia_coli__ABI99817
  source 1..1299: mol_type = other RNA
atgtggagattaacagtatcaaataatgcactacaaacaataataaatgcacaactacctggaaaagaaggactatggcaaatacatctacacgatggaaaaatatctgcaatagacgcacaatcaggagtaatgccagtcacagaaaatagcttagacgctgaacaaggactagtactccccccattcgtcgaaccacatatacacttagatactacacaaacagccggacaaccaaattggaatcaatcaggaacattatttgaaggaatagaaagatgggccgaaagaaaagcattactaacacacgatgacgtaaaacaaagagcttggcaaacattaaaatggcaaatagcaaatggcatacagcatgtcagaacacacgtcgatgtatctgacgcaaccctaacagcactaaaagctatgctagaagtaaaacaagaagtagctccatggatagatttacaaatagtcgcatttccacaagaaggaatactatcatatcccaatggagaagctttattagaagaagctttaagactaggtgcagatgtcgttggagcaatccctcatttcgaattcacaagagaatacggagttgaatcactacacaaaacattcgcactagcccaaaaatacgatcgattaatagacgttcattgcgatgaaatagatgatgaacaatcacgatttgttgaaacagtagcagcattagcacatagagaaggcatgggagcacgagtaacagcatcacacacaactgcaatgcactcatacaatggagcatatacatcacggttattcagactactaaaaatgagtgggataaactttgtagccaacccactagtaaacatacacttacaaggacgatttgacacatatcctaaaagacgaggaataaccagagtaaaagaaatgctagaatcaggaatcaatgtatgcttcggacacgatgatgtatttgacccatggtatccacttggcacagcaaatatgttacaagtactccatatgggactacatgtctgtcaactaatgggatacggacaaataaacgatggattaaacctaataacacaccattctgcaagaactttaaatttacaagattatggaatagcagcaggcaattcagcaaaccttataattctacccgcagaaaatggcttcgatgcattaagaagacaagttccagtaagatattcagtaagaggaggaaaagtaatcgcatcaacacaacctgcacaaacaacagtatacctagaacaaccagaagcaatagactataaacgataa

SEQ ID NO: 5329 - protein, 432 aa, synthetic construct
  REGION 1..432: note = Cytosine_Deaminase_codA__Escherichia_coli__F4NM90
MWRLTVSNNALQTIINARLPGKEGLWQIHLQDGKISAIDAQSGVMPITENSLDAEQGLVIPPFVEPHIHLDTTQTAGQPNWNQSGTLFEGIERWAERKALLTHDDVKQRAWQTLKWQIANGIQHVRTHVDVSDATLTALKAMLEVKQEVAPWIDLQIVAFPQEGILSYPNGEALLEEALRLGADVVGAIPHFEFTREYGVESLHKTFALAQKYDRLIDVHCDEIDDEQSRFVETVAALAHREGMGARVTASHTTAMHSYNGAYTSRLFRLLKMSGINFVANPLVNIHLQGRFDTYPKRRGITRVKEMLESGINVCFGHDDVFDPWYPLGTANMLQVLHMGLHVCQLMGYGQINDGLNLITHHSARTLNLQDYGIAAGNSANLIILPAENGFDALRRQVPVRYSVRGGKVIASTQPAQTTVYLEQPEAIDYKR

SEQ ID NO: 5330 - RNA, 1299 nt, synthetic construct
  misc_feature 1..1299: note = Cytosine_Deaminase_codA__Escherichia_coli__EGJ07181
  source 1..1299: mol_type = other RNA
atgtggaggttaacagtgtcgaataacgctttacaaacaattattaacgcccggttaccaggcaaagaggggctgtggcagattcatctgcaggacggaaaaatcagcgccattgatgcgcaatccggcgtgatgcccataactgaaaacagcctggatgccgaacaaggtttagttataccgccgtttgtggagccgcatattcacctggacaccacgcaaaccgccggacaaccgaactggaatcagtccggcacgctgtttgaaggcattgaacgctgggccgagcgcaaagcgttattaacccatgacgatgtgaaacaacgcgcctggcaaacgctgaaatggcagattgccaacggcattcagcatgtgcgtacccatgtcgatgtttcggatgcaacgctaactgcgctgaaagcaatgctggaagtgaagcaggaagtcgcgccgtggattgatctgcaaattgtcgccttccctcaggaagggattttgtcgtatcccaacggtgaagcgttgctggaagaggcgttacgcttaggggcagatgtagtgggggcgattccgcattttgaatttacccgtgaatacggcgtggagtcgctgcataaaaccttcgccctggcgcaaaaatacgaccgtctcatcgacgttcactgtgatgagatcgatgacgagcagtcgcgctttgtcgaaaccgttgctgccctggcgcaccgtgaaggcatgggcgcgcgagtcaccgccagccacaccacggcaatgcactcctataacggggcgtatacctcacgcctgttccgcttgctgaaaatgtccggtattaactttgtcgccaacccgctggtcaatattcatctgcaaggacgtttcgatacgtatccaaaacgtcgcggcatcacgcgcgttaaagagatgctggagtccggcattaacgtctgctttggtcacgatgatgtcttcgatccgtggtatccgctgggaacggcgaatatgctgcaagtgctgcatatggggctgcatgtttgccagttgatgggctacgggcagattaacgatggcctgaatttaatcacccaccacagtgccagaacattgaatttgcaggattacggcattgccgccggaaacagcgcaaacctgattatcctgccggctgaaaatggatttgatgcgctgcgccgtcaggttccggtacgttattcggtacgtggcggcaaggtgattgccagtacacaaccggcacaaaccaccgtatatctggagcagccagaagccatcgattacaaacggtaa

SEQ ID NO: 5331 - RNA, 1299 nt, synthetic construct
  misc_feature 1..1299: note = derived and/or modified sequence opt1 fromCytosine_Deaminase_codA__Escherichia_coli__EGJ07181
  source 1..1299: mol_type = other RNA
atgtggcgcctgaccgtgagcaacaacgccctccagaccatcatcaacgcccggctgcccggcaaggaggggctgtggcagatccacctccaggacggcaagatctccgcgatcgacgcccagagcggggtcatgccgatcacggagaactccctggacgccgagcagggcctggtgatcccgcccttcgtggagccccacatccacctcgacaccacccagaccgccgggcagcccaactggaaccagagcggcacgctgttcgagggcatcgagcgctgggccgagcggaaggcgctgctcacccacgacgacgtcaagcagcgcgcctggcagaccctgaagtggcagatcgccaacgggatccagcacgtgcggacccacgtggacgtctccgacgccacgctgaccgcgctcaaggccatgctggaggtgaagcaggaggtggccccctggatcgacctgcagatcgtcgccttcccccaggagggcatcctcagctaccccaacggggaggccctgctggaggaggcgctccgcctgggcgccgacgtggtgggggccatcccgcacttcgagttcacccgggagtacggcgtcgagtccctgcacaagaccttcgccctcgcccagaagtacgaccgcctgatcgacgtgcactgcgacgagatcgacgacgagcagagccggttcgtggagacggtcgcggccctggcccaccgcgagggcatgggggcccgggtgaccgcctcccacaccaccgcgatgcacagctacaacggcgcctacacgtcccgcctcttccggctgctgaagatgagcgggatcaacttcgtggccaaccccctcgtcaacatccacctccagggccgcttcgacacctaccccaagcggcgcggcatcacccgggtgaaggagatgctggagtccgggatcaacgtgtgcttcggccacgacgacgtcttcgacccctggtacccgctggggaccgccaacatgctccaggtgctgcacatgggcctgcacgtgtgccagctgatggggtacggccagatcaacgacggcctgaacctcatcacgcaccacagcgcccgcaccctgaacctgcaggactacgggatcgcggccggcaactccgccaacctcatcatcctgcccgccgagaacgggttcgacgcgctgcggcgccaggtccccgtgcggtacagcgtccgcggcgggaaggtgatcgcctccacccagcccgcccagaccacggtgtacctcgagcagccggaggccatcgactacaagcgctga

SEQ ID NO: 5332 - RNA, 1299 nt, synthetic construct
  misc_feature 1..1299: note = derived and/or modified sequence opt2 fromCytosine_Deaminase_codA__Escherichia_coli__EGJ07181
  source 1..1299: mol_type = other RNA
atgtggcgcctcaccgtctccaacaacgccctccagaccatcatcaacgcccgcctccccggcaaggagggcctctggcagatccacctccaggacggcaagatctccgccatcgacgcccagtccggcgtcatgcccatcaccgagaactccctcgacgccgagcagggcctcgtcatcccccccttcgtcgagccccacatccacctcgacaccacccagaccgccggccagcccaactggaaccagtccggcaccctcttcgagggcatcgagcgctgggccgagcgcaaggccctcctcacccacgacgacgtcaagcagcgcgcctggcagaccctcaagtggcagatcgccaacggcatccagcacgtccgcacccacgtcgacgtctccgacgccaccctcaccgccctcaaggccatgctcgaggtcaagcaggaggtcgccccctggatcgacctccagatcgtcgccttcccccaggagggcatcctctcctaccccaacggcgaggccctcctcgaggaggccctccgcctcggcgccgacgtcgtcggcgccatcccccacttcgagttcacccgcgagtacggcgtcgagtccctccacaagaccttcgccctcgcccagaagtacgaccgcctcatcgacgtccactgcgacgagatcgacgacgagcagtcccgcttcgtcgagaccgtcgccgccctcgcccaccgcgagggcatgggcgcccgcgtcaccgcctcccacaccaccgccatgcactcctacaacggcgcctacacctcccgcctcttccgcctcctcaagatgtccggcatcaacttcgtcgccaaccccctcgtcaacatccacctccagggccgcttcgacacctaccccaagcgccgcggcatcacccgcgtcaaggagatgctcgagtccggcatcaacgtctgcttcggccacgacgacgtcttcgacccctggtaccccctcggcaccgccaacatgctccaggtcctccacatgggcctccacgtctgccagctcatgggctacggccagatcaacgacggcctcaacctcatcacccaccactccgcccgcaccctcaacctccaggactacggcatcgccgccggcaactccgccaacctcatcatcctccccgccgagaacggcttcgacgccctccgccgccaggtccccgtccgctactccgtccgcggcggcaaggtcatcgcctccacccagcccgcccagaccaccgtctacctcgagcagcccgaggccatcgactacaagcgctga

SEQ ID NO: 5333 - RNA, 1299 nt, synthetic construct
  misc_feature 1..1299: note = derived and/or modified sequence opt3 fromCytosine_Deaminase_codA__Escherichia_coli__EGJ07181
  source 1..1299: mol_type = other RNA
atgtggagactgaccgtgagcaacaatgccctccagacaatcattaacgctaggcttcccggcaaggaggggctgtggcaaatacacttgcaggacggaaaaatctccgcaattgatgcccagtctggtgtcatgcctatcactgaaaattcattagacgcggagcagggcctggttattccaccgttcgtggaaccccatatccacctagatacgacccaaacagctgggcagcctaactggaatcagagtggaactctctttgagggcatagaacggtgggccgagcgcaaggcactgcttacccatgacgatgtaaaacagcgagcctggcaaacactgaagtggcagatcgctaacggtattcagcacgtgcgtacccatgtcgacgtgagcgatgcaactttgacagccctcaaagctatgctggaggttaagcaggaagtggccccatggatcgacctgcaaattgtcgcgttcccccaggaggggatcctctcctaccctaatggagaagcattactggaggaggcccttagattgggcgctgatgtggtaggcgccataccacactttgagttcaccagggaatatggggttgaatctctgcacaagacgtttgcactagctcagaaatacgaccggctcattgatgtgcattgcgacgagatcgatgacgaacaatcgcgcttcgtcgagactgtggccgcgctggcccacagagagggaatgggtgcaagggtgaccgcttcacatacaactgccatgcacagctataacggcgcttacaccagtcggctttttcgcctgttgaagatgtccgggattaatttcgtcgccaaccccctcgttaatatccatctgcagggacgatttgacacatatcctaaaagaaggggcatcacccgggtgaaggaaatgttagagtctggtattaacgtatgtttcgggcacgatgacgtgtttgatccatggtacccgctgggaacggcaaatatgctccaggtccttcacatgggcctgcatgtgtgccagttgatgggctatgggcaaataaacgacggactaaatctgatcactcaccatagcgcccgtacactcaacctgcaggattacggtattgctgcgggcaactccgcaaatcttatcatactgcccgccgaaaacgggttcgacgctttgcgcagacaggttcctgtgaggtactcagtccggggaggcaaagtgattgccagtacccagccagcacaaactacagtatatctcgagcagcccgaagccatcgattacaagcgatga

SEQ ID NO: 5334 - RNA, 1299 nt, synthetic construct
  misc_feature 1..1299: note = derived and/or modified sequence opt4 fromCytosine_Deaminase_codA__Escherichia_coli__EGJ07181
  source 1..1299: mol_type = other RNA
atgtggagactgaccgtgagcaacaacgccctgcagaccatcatcaacgccagactgcccggcaaggagggcctgtggcagatccacctgcaggacggcaagatcagcgccatcgacgcccagagcggcgtgatgcccatcaccgagaacagcctggacgccgagcagggcctggtgatcccccccttcgtggagccccacatccacctggacaccacccagaccgccggccagcccaactggaaccagagcggcaccctgttcgagggcatcgagagatgggccgagagaaaggccctgctgacccacgacgacgtgaagcagagagcctggcagaccctgaagtggcagatcgccaacggcatccagcacgtgagaacccacgtggacgtgagcgacgccaccctgaccgccctgaaggccatgctggaggtgaagcaggaggtggccccctggatcgacctgcagatcgtggccttcccccaggagggcatcctgagctaccccaacggcgaggccctgctggaggaggccctgagactgggcgccgacgtggtgggcgccatcccccacttcgagttcaccagagagtacggcgtggagagcctgcacaagaccttcgccctggcccagaagtacgacagactgatcgacgtgcactgcgacgagatcgacgacgagcagagcagattcgtggagaccgtggccgccctggcccacagagagggcatgggcgccagagtgaccgccagccacaccaccgccatgcacagctacaacggcgcctacaccagcagactgttcagactgctgaagatgagcggcatcaacttcgtggccaaccccctggtgaacatccacctgcagggcagattcgacacctaccccaagagaagaggcatcaccagagtgaaggagatgctggagagcggcatcaacgtgtgcttcggccacgacgacgtgttcgacccctggtaccccctgggcaccgccaacatgctgcaggtgctgcacatgggcctgcacgtgtgccagctgatgggctacggccagatcaacgacggcctgaacctgatcacccaccacagcgccagaaccctgaacctgcaggactacggcatcgccgccggcaacagcgccaacctgatcatcctgcccgccgagaacggcttcgacgccctgagaagacaggtgcccgtgagatacagcgtgagaggcggcaaggtgatcgccagcacccagcccgcccagaccaccgtgtacctggagcagcccgaggccatcgactacaagagatga

SEQ ID NO: 5335 - RNA, 1299 nt, synthetic construct
  misc_feature 1..1299: note = derived and/or modified sequence opt5 fromCytosine_Deaminase_codA__Escherichia_coli__EGJ07181
  source 1..1299: mol_type = other RNA
atgtggagactgaccgtgagcaacaatgccctccagacaatcattaacgctcggctgcccggcaaggaggggctttggcaaatccatctgcaggacggaaaaatttccgccatcgatgcgcagtctggcgtcatgcctattacggaaaatagcctcgacgctgagcaggggctggttatcccgcccttcgtggaacctcacatccaccttgataccacacaaaccgccggacagcccaactggaatcagtccggcacactgtttgaggggattgaacgctgggccgagagaaaggctctcctgacccatgacgatgtgaaacagcgggcctggcaaacactgaagtggcagatcgctaacggcattcagcacgtccgcacccatgtggacgtttctgatgccacgctcaccgcgctgaaagccatgcttgaggtgaagcaggaagtcgctccttggatcgacctgcaaattgtggccttcccccaggagggaatcctcagctaccctaatggcgaagctctgcttgaggaggccctgagactcggggcggatgttgtgggagccattccgcactttgagttcacacgggaatatggcgtcgaatccctgcacaagacctttgctctggcccagaaatacgaccgcctcatcgatgtgcattgcgacgagatcgatgacgaacaatctagattcgtggagacagtcgctgccctggcccaccgggaggggatgggagctcgcgttaccgcgagccatacgacagccatgcactcctataacggcgcttacaccagcagactttttcggctgctcaagatgtctgggattaatttcgtggccaaccccctggtgaatatccaccttcagggacgctttgacacatatcctaaaagacggggcattacccgcgtcaaggaaatgctggagtccggcatcaacgtgtgtttcgggcatgatgacgtttttgatccctggtaccctctcggaaccgccaatatgctccaggtgctgcacatgggcctgcatgtctgccagctgatggggtatggacaaattaacgacggccttaatctgatcacacaccatagcgctagaacgctcaacctgcaggattacgggatcgccgcgggaaactctgctaatcttattatcctgcccgccgaaaacggcttcgacgccctccggagacaggtgccggttcgctactccgtgcggggcgggaaagtcattgctagcacccagcctgcccaaacaaccgtgtatctggagcagcccgaagctatcgattacaagagatga

SEQ ID NO: 5336 - RNA, 1299 nt, synthetic construct
  misc_feature 1..1299: note = derived and/or modified sequence opt6 fromCytosine_Deaminase_codA__Escherichia_coli__EGJ07181
  source 1..1299: mol_type = other RNA
atgtggagattaactgtatcaaataacgcattacaaacaataataaatgcaagactaccaggaaaagaaggtttatggcaaatacatctacaagacggaaaaatatcagccatagacgcacaaagcggcgtaatgccaataaccgaaaatagtttagacgcagaacaaggactagtaataccaccttttgtagaaccacacatacacttagatactacacaaacggcaggacaaccaaattggaatcaatcaggaacactttttgaaggaatagaaagatgggcagaaagaaaagctctgttaactcacgatgatgttaaacaaagagcctggcaaactctcaaatggcaaatagcaaacggaatacaacatgtacgaacacatgttgatgttagcgacgcaacactaacagctttaaaagccatgttagaagtaaaacaagaagtagcaccatggatagatttgcaaatagtagcatttccacaagaaggaatattatcatatcctaatggagaagcactactagaagaagcattaagattaggagcagacgttgtcggtgcaataccacactttgaatttacacgagaatacggagtagaatcactacataaaacatttgcattggcacaaaaatacgacagattaatagatgtacattgcgacgaaattgacgacgaacaatcaagattcgtagaaacagtagcagccttagcacaccgagaagggatgggagcaagagtaacagcaagccatacaacagcaatgcactcatacaatggagcctatacatcaagactattcagactattaaaaatgagtggcatcaactttgtagcaaatccattagtcaacatacacttacaaggtcgatttgatacatatcctaaaagaagaggcatcacaagagtaaaagaaatgttagagtctggaataaatgtatgctttggacatgacgacgtatttgatccctggtatccattaggaaccgctaatatgttacaagtattgcatatgggcttacacgtatgtcaattaatgggttatggccaaataaacgacggcctaaatttaattactcaccatagtgcaagaacattaaacctacaagactatggcatagcagcaggaaactcagctaacttaataatactaccagcagaaaacggctttgatgcactaagaagacaagtaccagtacgatattccgtaagaggaggaaaagtaatagctagcacacaaccagcacaaacaacagtataccttgaacaaccagaagcaatagactataaaagataa

SEQ ID NO: 5337 - protein, 388 aa, synthetic construct
  REGION 1..388: note = Cytosine_Deaminase_codA__Escherichia_coli__H9UNZ4
MPITENSLDAEQGLVIPPFVEPHIHLDTTQTAGQPNWNQSGTLFEGIERWAERKALLTHDDVKQRAWQTLKWQIANGIQHVRTHVDVSDATLTALKAMLEVKQEVAPWIDLQIVAFPQEGILSYPNGEALLEEALRLGADVVGAIPHFEFTREYGVESLHKTFALAQKYDRLIDVHCDEIDDEQSRFVETVAALAHHEGMGARVTASHTTAMHSYNGAYTSRLFRLLKMSGINFVANPLVNIHLQGRFDTYPKRRGITRVKEMLESGINVCFGHDDVFDPWYPLGTANMLQVLHMGLHVCQLMGYGQINDGLNLITHHSARTLNLQDYGIAAGNSANLIILPAENGFDALRRQVPVRYSVRGGKVIASTQPAQTTVYLEQPEAIDYKR

SEQ ID NO: 5338 - RNA, 1167 nt, synthetic construct
  misc_feature 1..1167: note = Cytosine_Deaminase_codA__Escherichia_coli__AFG39237
  source 1..1167: mol_type = other RNA
atgcccataactgaaaacagcctggatgccgaacaaggtttagttataccgccgtttgtggagccacatattcacctggacaccacgcaaaccgccggacaaccgaactggaatcagtccggcacgctgtttgaaggcattgaacgctgggccgagcgcaaagcgttattaacccatgacgatgtgaaacaacgcgcatggcaaacgctgaaatggcagattgccaacggcattcagcatgtgcgtacccatgtcgatgtttcggatgcaacgctaactgcgctgaaagcaatgctggaagtgaagcaggaagtcgcgccgtggattgatctgcaaatcgtcgccttccctcaggaagggattttgtcgtatcccaacggtgaagcgttgctggaagaggcgttacgcttaggggcagatgtagtgggggcgattccgcattttgaatttacccgtgaatacggcgtggagtcgctgcataaaaccttcgccctggcgcaaaaatacgaccgtctcatcgacgttcactgtgatgagatcgatgacgagcagtcgcgctttgtcgaaaccgttgctgccctggcgcaccatgaaggcatgggcgcgcgagtcaccgccagccacaccacggcaatgcactcctataacggggcgtatacctcacgcctgttccgcttgctgaaaatgtccggtattaactttgtcgccaacccgctggtcaatattcatctgcaaggacgtttcgatacgtatccaaaacgtcgcggcatcacgcgcgttaaagagatgctggagtccggcattaacgtctgctttggtcacgatgatgtcttcgatccgtggtatccgctgggaacggcgaatatgctgcaagtgctgcatatggggctgcatgtttgccagttgatgggctacgggcagattaacgatggcctgaatttaatcacccaccacagcgcaaggacgttgaatttgcaggattacggcattgccgccggaaacagcgccaacctgattatcctgccggctgaaaatgggtttgatgcgctgcgccgtcaggttccggtacgttattcggtacgtggcggcaaggtgattgccagcacacaaccggcacaaaccaccgtatatctggagcagccagaagccatcgattacaaacgttga

SEQ ID NO: 5339 - RNA, 1167 nt, synthetic construct
  misc_feature 1..1167: note = derived and/or modified sequence opt1 fromCytosine_Deaminase_codA__Escherichia_coli__AFG39237
  source 1..1167: mol_type = other RNA
atgcccatcaccgagaacagcctggacgccgagcagggcctcgtgatcccgcccttcgtcgagccccacatccacctggacaccacgcagaccgccgggcagcccaactggaaccagtccggcaccctgttcgaggggatcgagcgctgggcggagcggaaggccctcctgacccacgacgacgtgaagcagcgcgcctggcagacgctgaagtggcagatcgccaacggcatccagcacgtgcggacccacgtcgacgtgagcgacgccaccctcaccgcgctgaaggccatgctggaggtgaagcaggaggtcgccccgtggatcgacctccagatcgtggccttcccccaggaggggatcctgtcctaccccaacggcgaggcgctgctcgaggaggccctgcgcctgggcgccgacgtggtcggggccatcccccacttcgagttcacgcgggagtacggcgtggagagcctccacaagaccttcgccctggcgcagaagtacgaccgcctgatcgacgtgcactgcgacgagatcgacgacgagcagtcccggttcgtcgagaccgtggccgccctcgcccaccacgaggggatgggcgcccgcgtgaccgcgagccacacgaccgccatgcactcctacaacggggcctacaccagccggctgttccgcctgctcaagatgtccggcatcaacttcgtcgccaacccgctggtgaacatccacctccagggccggttcgacacctaccccaagcgccgggggatcacgcgcgtgaaggagatgctggagagcggcatcaacgtctgcttcgggcacgacgacgtgttcgacccctggtaccccctgggcaccgccaacatgctccaggtgctgcacatgggcctgcacgtctgccagctgatggggtacggccagatcaacgacgggctcaacctgatcacccaccactccgcgcggaccctgaacctccaggactacggcatcgccgccgggaacagcgccaacctgatcatcctgccggccgagaacggcttcgacgcgctccgccgccaggtgcccgtgcggtactccgtccggggcgggaaggtgatcgccagcacgcagcccgcccagaccaccgtctacctggagcagcccgaggccatcgactacaagcgctga

SEQ ID NO: 5340 - RNA, 1167 nt, synthetic construct
  misc_feature 1..1167: note = derived and/or modified sequence opt2 fromCytosine_Deaminase_codA__Escherichia_coli__AFG39237
  source 1..1167: mol_type = other RNA
atgcccatcaccgagaactccctcgacgccgagcagggcctcgtcatcccccccttcgtcgagccccacatccacctcgacaccacccagaccgccggccagcccaactggaaccagtccggcaccctcttcgagggcatcgagcgctgggccgagcgcaaggccctcctcacccacgacgacgtcaagcagcgcgcctggcagaccctcaagtggcagatcgccaacggcatccagcacgtccgcacccacgtcgacgtctccgacgccaccctcaccgccctcaaggccatgctcgaggtcaagcaggaggtcgccccctggatcgacctccagatcgtcgccttcccccaggagggcatcctctcctaccccaacggcgaggccctcctcgaggaggccctccgcctcggcgccgacgtcgtcggcgccatcccccacttcgagttcacccgcgagtacggcgtcgagtccctccacaagaccttcgccctcgcccagaagtacgaccgcctcatcgacgtccactgcgacgagatcgacgacgagcagtcccgcttcgtcgagaccgtcgccgccctcgcccaccacgagggcatgggcgcccgcgtcaccgcctcccacaccaccgccatgcactcctacaacggcgcctacacctcccgcctcttccgcctcctcaagatgtccggcatcaacttcgtcgccaaccccctcgtcaacatccacctccagggccgcttcgacacctaccccaagcgccgcggcatcacccgcgtcaaggagatgctcgagtccggcatcaacgtctgcttcggccacgacgacgtcttcgacccctggtaccccctcggcaccgccaacatgctccaggtcctccacatgggcctccacgtctgccagctcatgggctacggccagatcaacgacggcctcaacctcatcacccaccactccgcccgcaccctcaacctccaggactacggcatcgccgccggcaactccgccaacctcatcatcctccccgccgagaacggcttcgacgccctccgccgccaggtccccgtccgctactccgtccgcggcggcaaggtcatcgcctccacccagcccgcccagaccaccgtctacctcgagcagcccgaggccatcgactacaagcgctga

SEQ ID NO: 5341 - RNA, 1167 nt, synthetic construct
  misc_feature 1..1167: note = derived and/or modified sequence opt3 fromCytosine_Deaminase_codA__Escherichia_coli__AFG39237
  source 1..1167: mol_type = other RNA
atgcccatcaccgagaacagcctggacgccgaacagggcctcgtgattcctccattcgtcgagccgcacatacatcttgatacaactcaaacggctgggcagcccaattggaaccagtccggaaccctgtttgaaggtatcgagagatgggcagaaaggaaggccttgttaacacacgacgatgttaaacagcgggcgtggcaaactctgaagtggcagattgctaatggcatccagcatgtgcgcacccacgtagacgtgtctgatgccacactaaccgcactcaaagccatgctggaggtcaagcaggaggtggctccttggattgaccttcaaatcgttgcattcccacaggaagggatactgtcataccccaacggagaggccttgctcgaagaggctctgcgactgggcgccgatgtggtcggtgcgatccctcattttgagttcactcgtgaatatggggtggagagtctccacaaaacatttgcattagcccagaagtacgacagactgattgatgtacactgcgacgaaatcgatgacgagcagagcaggttcgttgaaaccgtggctgcccttgcacatcacgagggaatgggcgctcgggtcacggcctcccatactaccgcgatgcactcttataatggcgcctacacatcgcgcttgtttagactgctaaagatgtcagggattaacttcgtggcaaatccactcgtgaacatccatctgcaaggaaggtttgatacttatcccaaacggcgcggtataacccgagtcaaggagatgcttgaaagcggcattaatgtttgtttcgggcacgacgacgtgtttgatccttggtacccactgggaacagctaacatgttgcaggtactccacatgggcctgcatgtgtgccagttaatgggttatgggcaaatcaatgacggactgaacctcattacccaccatagtgccagaacgcttaatctgcaggattacggcatcgctgccggcaactccgcaaatttgatcattctaccggccgagaacgggttcgacgctctgaggcggcaggtccccgtgcgttactctgttcgcggaggtaaagtgatagcgagcactcagcctgcacaaacaaccgtctatctcgaacagccagaggccatcgattacaagagatga

SEQ ID NO: 5342 - RNA, 1167 nt, synthetic construct
  misc_feature 1..1167: note = derived and/or modified sequence opt4 fromCytosine_Deaminase_codA__Escherichia_coli__AFG39237
  source 1..1167: mol_type = other RNA
atgcccatcaccgagaacagcctggacgccgagcagggcctggtgatcccccccttcgtggagccccacatccacctggacaccacccagaccgccggccagcccaactggaaccagagcggcaccctgttcgagggcatcgagagatgggccgagagaaaggccctgctgacccacgacgacgtgaagcagagagcctggcagaccctgaagtggcagatcgccaacggcatccagcacgtgagaacccacgtggacgtgagcgacgccaccctgaccgccctgaaggccatgctggaggtgaagcaggaggtggccccctggatcgacctgcagatcgtggccttcccccaggagggcatcctgagctaccccaacggcgaggccctgctggaggaggccctgagactgggcgccgacgtggtgggcgccatcccccacttcgagttcaccagagagtacggcgtggagagcctgcacaagaccttcgccctggcccagaagtacgacagactgatcgacgtgcactgcgacgagatcgacgacgagcagagcagattcgtggagaccgtggccgccctggcccaccacgagggcatgggcgccagagtgaccgccagccacaccaccgccatgcacagctacaacggcgcctacaccagcagactgttcagactgctgaagatgagcggcatcaacttcgtggccaaccccctggtgaacatccacctgcagggcagattcgacacctaccccaagagaagaggcatcaccagagtgaaggagatgctggagagcggcatcaacgtgtgcttcggccacgacgacgtgttcgacccctggtaccccctgggcaccgccaacatgctgcaggtgctgcacatgggcctgcacgtgtgccagctgatgggctacggccagatcaacgacggcctgaacctgatcacccaccacagcgccagaaccctgaacctgcaggactacggcatcgccgccggcaacagcgccaacctgatcatcctgcccgccgagaacggcttcgacgccctgagaagacaggtgcccgtgagatacagcgtgagaggcggcaaggtgatcgccagcacccagcccgcccagaccaccgtgtacctggagcagcccgaggccatcgactacaagagatga

SEQ ID NO: 5343 - RNA, 1167 nt, synthetic construct
  misc_feature 1..1167: note = derived and/or modified sequence opt5 fromCytosine_Deaminase_codA__Escherichia_coli__AFG39237
  source 1..1167: mol_type = other RNA
atgcccatcaccgagaacagcctggacgccgaacagggcctcgtgattcctccgttcgtcgagccccacatccatctggatacaacgcaaaccgctgggcagcctaattggaaccagtccggaacactttttgaaggcattgagagatgggccgaacggaaggcgctgctcacccacgacgatgttaaacagcgcgcttggcaaacactgaagtggcagatcgccaatgggattcagcatgtgagaacccacgtggacgtctctgatgccacacttaccgctctgaaagccatgctcgaggtgaagcaggaggttgctccctggatcgacctgcaaatcgtggccttccctcaggaaggcattctgagctaccccaacggagaggcgctcctggaagaggcccttcggctgggggctgatgtcgtgggagccatccctcattttgagttcacgcgcgaatatggcgttgagtccctccacaaaacctttgctctggcccagaagtacgacagacttattgatgtgcactgcgacgaaatcgatgacgagcagtctcggttcgtcgaaacagtggcggccctggctcatcacgagggcatgggggcccgcgtgaccgctagccatacaaccgccatgcactcctataatggagcctacacgtctagactctttcggctgctgaagatgagcggcattaacttcgtcgctaatccgctcgttaacatccatctgcaagggcgctttgatacatatcccaaaagacggggaattacccgcgtgaaggagatgcttgaatccggcatcaatgtgtgtttcgggcacgacgacgtctttgatccttggtaccccctgggaacagcgaacatgctccaggtgctgcacatgggccttcatgtttgccagctgatgggctatgggcaaatcaatgacggactcaacctgattacccaccatagcgccagaaccctgaatctccaggattacggcatcgctgccgggaactctgccaatctgattatccttcctgctgagaacggattcgacgccctgcggcgccaggtgcccgtcagatactccgtgcggggcgggaaagttattgcgagcacacagccggctcaaacgaccgtgtatctcgaacagcctgaggccatcgattacaagagatga

SEQ ID NO: 5344 - RNA, 1167 nt, synthetic construct
  misc_feature 1..1167: note = derived and/or modified sequence opt6 fromCytosine_Deaminase_codA__Escherichia_coli__AFG39237
  source 1..1167: mol_type = other RNA
atgccaataacagaaaattcattggatgcagaacaaggattagtaattccaccattcgtagaaccacacatacatttagacacaacacaaacagcaggacaaccaaattggaatcaatcaggaactttattcgaaggaatcgaacgctgggcagaaagaaaagcactattaacacacgacgatgttaaacaaagagcctggcaaactctaaaatggcaaatagcaaacggaatacaacacgtaagaacacacgtagacgtatcagacgcaactttaacagcactaaaagcaatgttagaagtaaaacaagaagtagcaccgtggatagacctacaaatagtagcatttccacaagaaggaatcttaagctatccaaacggagaagcattactagaagaagcactaagactcggagcagatgtagtaggagcaataccacactttgaattcacaagagaatatggagtagaatctttacataaaacatttgcactagcacaaaaatacgacagactcatcgatgtccactgcgatgaaatagacgatgaacaaagtagatttgtcgaaacagttgcagcactagcacatcacgaaggaatgggagcaagagtaacagcatcacatacaacagcaatgcactcatacaatggcgcatacacaagtcgactatttagattattaaaaatgtcaggaataaactttgtagctaacccactagtaaatatccacctccaaggaagattcgacacatacccaaaaagacgaggaatcacaagagtaaaagaaatgttagaaagtggaataaacgtatgctttggacatgacgatgtattcgatccatggtatcctcttggaacagccaatatgttacaagtactacacatgggactacatgtatgccaattaatgggatacggacaaataaacgacggtcttaacttaataacacatcacagtgcaagaacattaaacttacaagactatggcatagcagccggaaattcagcaaatctaataattctaccagcagaaaacggctttgatgcattaagaagacaagttccagtaagatactcagtaagaggaggtaaagtaatcgcatcaacacaaccagcccaaacaacagtatatttagaacaaccagaagcaatagactacaaaagataa

SEQ ID NO: 5345 - protein, 432 aa, synthetic construct; identical to SEQ ID NO: 5321
  REGION 1..432: note = Cytosine_Deaminase_codA__Escherichia_coli__Q1RFJ5

SEQ ID NO: 5346 - RNA, 1299 nt, synthetic construct
  misc_feature 1..1299: note = Cytosine_Deaminase_codA__Escherichia_coli__ABE05869
  source 1..1299: mol_type = other RNA
atgtggaggctaacagtgtcgaataatgctttacaaacaattattaacgcccagttacccggcaaagaggggctgtggcagattcatcttcacgacggaaaaatcagcgccattgatgcgcaatccggggtgatgcccgtaactgaaaacagcctggatgccgaacaaggtttagttttaccgccgtttgtggagccgcatattcacctggacaccacgcaaaccgccggacaaccgaactggaatcagtccggcacgctgtttgaaggcattgaacgctgggccgagcgcaaagcgttattaactcatgacgatgtgaaacaacgcgcatggcaaacgctgaaatggcagattgccaacggcattcagcatgtgcgtacccatgtcgatgtctccgacgcaacgctgactgcgttgaaagcgatgctggaagtgaaacaggaagttgcgccgtggattgatctgcaaatcgtcgccttcccgcaggaagggattttgtcgtatcccaacggtgaagcgctgctggaagaggcgctacgcttaggggcagatgttgttggggcgattccgcattttgaatttacccgtgaatacggcgtggagtcgctgcataaaaccttcgccctggcgcaaaaatacgaccgtctcatcgacgttcactgtgatgagatcgatgacgagcagtcgcgctttgtcgaaaccgttgctgccctggcgcaccgtgaaggcatgggcgcgcgagtcaccgccagccatactacggcaatgcactcctataacggggcgtatacttcgcgcctgttccgtttgctgaaaatgtccggtattaactttgtcgccaacccgttggtcaatattcatctgcaaggacgtttcgatacgtatccaaaacgtcgcggcatcacgcgcgttaaagagatgctggagtccggcattaacgtctgctttggtcacgatgatgtcttcgatccgtggtatccgctgggaacggcgaatatgctgcaagtgctgcatatggggctgcatgtttgccagctgatgggctacgggcagattaacgacggcctgaatttaatcacccaccacagcgccaggacgttgaatttgcaggattacggcattgccgccggaaacagcgccaacctgattatcctgccggctgaaaatgggtttgatgcgctgcgccgtcaggttccggtacgttattcggtacgtggcggcaaggtgattgccagcacacaaccggcacaaaccaccgtatatctggagcagccagaagccatcgattacaaacggtaa

SEQ ID NO: 5347 - RNA, 1299 nt, synthetic construct; identical to SEQ ID NO: 5323
  misc_feature 1..1299: note = derived and/or modified sequence opt1 fromCytosine_Deaminase_codA__Escherichia_coli__ABE05869
  source 1..1299: mol_type = other RNA

SEQ ID NO: 5348 - RNA, 1299 nt, synthetic construct; identical to SEQ ID NO: 5324
  misc_feature 1..1299: note = derived and/or modified sequence opt2 fromCytosine_Deaminase_codA__Escherichia_coli__ABE05869
  source 1..1299: mol_type = other RNA

SEQ ID NO: 5349 - RNA, 1299 nt, synthetic construct; identical to SEQ ID NO: 5325
  misc_feature 1..1299: note = derived and/or modified sequence opt3 fromCytosine_Deaminase_codA__Escherichia_coli__ABE05869
  source 1..1299: mol_type = other RNA

SEQ ID NO: 5350 - RNA, 1299 nt, synthetic construct; identical to SEQ ID NO: 5326
  misc_feature 1..1299: note = derived and/or modified sequence opt4 fromCytosine_Deaminase_codA__Escherichia_coli__ABE05869
  source 1..1299: mol_type = other RNA

SEQ ID NO: 5351 - RNA, 1299 nt, synthetic construct; identical to SEQ ID NO: 5327
  misc_feature 1..1299: note = derived and/or modified sequence opt5 fromCytosine_Deaminase_codA__Escherichia_coli__ABE05869
  source 1..1299: mol_type = other RNA

SEQ ID NO: 5352 - RNA, 1299 nt, synthetic construct
  misc_feature 1..1299: note = derived and/or modified sequence opt6 fromCytosine_Deaminase_codA__Escherichia_coli__ABE05869
  source 1..1299: mol_type = other RNA
atgtggagattaacagtaagcaataacgcactacaaacaataataaatgcacaactcccaggaaaagaaggattatggcaaattcacttacatgacggaaaaatatcagcaatagatgcacaatcaggagtcatgccagtaacagaaaatagccttgacgcagaacaagggctagtcctacccccattcgtagaaccacacatacatttagatactacacaaacagcaggtcaaccaaattggaatcaatcaggaacactatttgaaggaatagaaagatgggcagaaagaaaagcattactaacacatgatgacgtaaaacaaagagcatggcaaacactcaaatggcaaatagccaatggaatacaacatgtaagaactcacgtcgacgtcagtgacgctacattaactgcacttaaagcaatgctggaagtaaaacaagaagtagcaccatggatcgatctacaaatagtagcatttccacaagaaggaatattatcttaccctaatggagaagctttactagaagaagcattaagactaggagctgacgtagtaggagcaataccacactttgaatttacaagagaatatggcgtagaatctttacataagacattcgcactagcacaaaaatacgataggctaatagatgtacattgcgacgaaatagatgatgaacaaagcagattcgtagaaacagtagcagcacttgcacacagagaaggaatgggagcaagagttacagcatcacacacaacagcaatgcatagttacaatggagcatacacaagcagattatttagactcctaaaaatgagtggaataaactttgtagcaaatccactagtaaatatacatttacaaggacgatttgatacttatccaaaaagacgaggaataacaagagtaaaagaaatgctagaatctggcataaatgtgtgcttcggccatgatgatgtctttgatccatggtatccactaggtacagcaaatatgctacaagttctacacatgggattacatgtatgccaacttatgggatatggacaaataaacgacggccttaacctaataacacaccactcagccagaacattaaatttacaagactacggaatagcagcaggaaattcagcaaatctcataatactgccagcagaaaacggatttgatgccttaagaagacaagtacctgttagatacagcgttagaggaggtaaggtaatagcatcaacacaaccagcacaaacaacagtatacctagaacaaccagaagctatagactacaaaagataa

SEQ ID NO: 5353 - protein, 72 aa, synthetic construct
  REGION 1..72: note = Cytosine_Deaminase_codA__Escherichia_coli__Q2VP09
MKQRITVTVDSDSYQLLKAYDVNISGLVSTTMQNEARRLRAERWKAENQEGMAEVARFIEMNGSFADENRDW

SEQ ID NO: 5354 - RNA, 219 nt, synthetic construct
  misc_feature 1..219: note = Cytosine_Deaminase_codA__Escherichia_coli__ACQ41973
  source 1..219: mol_type = other RNA
atgaagcagcgtattacagtgacagttgacagcgacagctatcagttgctcaaggcatatgatgtcaatatctccggtctggtaagcacaaccatgcagaatgaagcccgtcgtctgcgtgccgaacgctggaaagcggaaaatcaggaagggatggctgaggtcgcccggtttattgaaatgaacggctcttttgctgacgagaacagggactggtga

SEQ ID NO: 5355 - RNA, 219 nt, synthetic construct
  misc_feature 1..219: note = derived and/or modified sequence opt1 fromCytosine_Deaminase_codA__Escherichia_coli__ACQ41973
  source 1..219: mol_type = other RNA
atgaagcagcgcatcaccgtgaccgtcgacagcgactcctaccagctgctcaaggcctacgacgtgaacatcagcggcctggtgtccacgaccatgcagaacgaggcccggcgcctgcgggcggagcgctggaaggccgagaaccaggaggggatggccgaggtcgcccggttcatcgagatgaacggcagcttcgccgacgagaaccgcgactggtga

SEQ ID NO: 5356 - RNA, 219 nt, synthetic construct
  misc_feature 1..219: note = derived and/or modified sequence opt2 fromCytosine_Deaminase_codA__Escherichia_coli__ACQ41973
  source 1..219: mol_type = other RNA
atgaagcagcgcatcaccgtcaccgtcgactccgactcctaccagctcctcaaggcctacgacgtcaacatctccggcctcgtctccaccaccatgcagaacgaggcccgccgcctccgcgccgagcgctggaaggccgagaaccaggagggcatggccgaggtcgcccgcttcatcgagatgaacggctccttcgccgacgagaaccgcgactggtga

SEQ ID NO: 5357 - RNA, 219 nt, synthetic construct
  misc_feature 1..219: note = derived and/or modified sequence opt3 fromCytosine_Deaminase_codA__Escherichia_coli__ACQ41973
  source 1..219: mol_type = other RNA
atgaagcagagaatcaccgtgacagtcgacagcgattcctaccaactgctcaaagcctatgacgttaacatttctggccttgtgtcaactacgatgcagaatgaggctaggcggctgcgcgcagaacgatggaaggccgagaaccaggaagggatggcggaggtagctcgtttcatagaaatgaatggaagttttgccgatgagaacagagactggtga

SEQ ID NO: 5358 - RNA, 219 nt, synthetic construct
  misc_feature 1..219: note = derived and/or modified sequence opt4 fromCytosine_Deaminase_codA__Escherichia_coli__ACQ41973
  source 1..219: mol_type = other RNA
atgaagcagagaatcaccgtgaccgtggacagcgacagctaccagctgctgaaggcctacgacgtgaacatcagcggcctggtgagcaccaccatgcagaacgaggccagaagactgagagccgagagatggaaggccgagaaccaggagggcatggccgaggtggccagattcatcgagatgaacggcagcttcgccgacgagaacagagactggtga

SEQ ID NO: 5359 - RNA, 219 nt, synthetic construct
  misc_feature 1..219: note = derived and/or modified sequence opt5 fromCytosine_Deaminase_codA__Escherichia_coli__ACQ41973
  source 1..219: mol_type = other RNA
atgaagcagagaatcaccgtgacagtcgacagcgattcctaccaactgctcaaagcctatgacgttaacatttctggcctggtgagcacgaccatgcagaatgaggctcggcgccttagagccgaacggtggaaggcggagaaccaggaagggatggctgaggtggcccgcttcatcgaaatgaatggatcctttgccgatgagaacagagactggtga

SEQ ID NO: 5360 - RNA, 219 nt, synthetic construct
  misc_feature 1..219: note = derived and/or modified sequence opt6 fromCytosine_Deaminase_codA__Escherichia_coli__ACQ41973
  source 1..219: mol_type = other RNA
atgaaacaaagaataacagtaacagtagatagcgacagctatcaattactaaaagcatatgacgtaaacataagcggactagtaagcacaacaatgcaaaatgaagcaagaagactaagagcagaaagatggaaagcagaaaatcaagaaggaatggcagaagtagcaagatttatagaaatgaatggatcattcgcagacgaaaacagagactggtaa

SEQ ID NO: 5361 - protein, 427 aa, synthetic construct
  REGION 1..427: note = Cytosine_Deaminase_codA__Escherichia_coli__Q53ZC8
MSNNALQTIINARLPGEEGLWQIHLQDGKISAIDAQSGVMPITENSLDAEQGLVIPPFVEPHIHLDTTQTAGQPNWNQSGTLFEGIERWAERKALLTHDDVKQRAWQTLKWQIANGIQHVRTHVDVSDATLTALKAMLEVKQEVAPWIDLQIVAFPQEGILSYPNGEALLEEALRLGADVVGAIPHFEFTREYGVESLHKTFALAQKYDRLIDVHCDEIDDEQSRFVETVAALAHHEGMGARVTASHTTAMHSYNGAYTSRLFRLLKMSGINFVANPLVNIHLQGRFDTYPKRRGITRVKEMLESGINVCFGHDDVFDPWYPLGTANMLQVLHMGLHVCQLMGYGQINDGLNLITHHSARTLNLQDYGIAAGNSANLIILPAENGFDALRRQVPVRYSVRGGKVIASTQPAQTTVYLEQPEAIDYKR

SEQ ID NO: 5362 - RNA, 1284 nt, synthetic construct
  misc_feature 1..1284: note = Cytosine_Deaminase_codA__Escherichia_coli__AAP92816
  source 1..1284: mol_type = other RNA
atgtcgaataacgctttacaaacaattattaacgcccggttaccaggcgaagaggggctgtggcagattcatctgcaggacggaaaaatcagcgccattgatgcgcaatccggcgtgatgcccataactgaaaacagcctggatgccgaacaaggtttagttataccgccgtttgtggagccacatattcacctggacaccacgcaaaccgccggacaaccgaactggaatcagtccggcacgctgtttgaaggcattgaacgctgggccgagcgcaaagcgttattaacccatgacgatgtgaaacaacgcgcatggcaaacgctgaaatggcagattgccaacggcattcagcatgtgcgtacccatgtcgatgtttcggatgcaacgctaactgcgctgaaagcaatgctggaagtgaagcaggaagtcgcgccgtggattgatctgcaaatcgtcgccttccctcaggaagggattttgtcgtatcccaacggtgaagcgttgctggaagaggcgttacgcttaggggcagatgtagtgggggcgattccgcattttgaatttacccgtgaatacggcgtggagtcgctgcataaaaccttcgccctggcgcaaaaatacgaccgtctcatcgacgttcactgtgatgagatcgatgacgagcagtcgcgctttgtcgaaaccgttgctgccctggcgcaccatgaaggcatgggcgcgcgagtcaccgccagccacaccacggcaatgcactcctataacggggcgtatacctcacgcctgttccgcttgctgaaaatgtccggtattaactttgtcgccaacccgctggtcaatattcatctgcaaggacgtttcgatacgtatccaaaacgtcgcggcatcacgcgcgttaaagagatgctggagtccggcattaacgtctgctttggtcacgatgatgtcttcgatccgtggtatccgctgggaacggcgaatatgctgcaagtgctgcatatggggctgcatgtttgccagttgatgggctacgggcagattaacgatggcctgaatttaatcacccaccacagcgcaaggacgttgaatttgcaggattacggcattgccgccggaaacagcgccaacctgattatcctgccggctgaaaatgggtttgatgcgctgcgccgtcaggttccggtacgttattcggtacgtggcggcaaggtgattgccagcacacaaccggcacaaaccaccgtatatctggagcagccagaagccatcgattacaaacgttga

SEQ ID NO: 5363 - RNA, 1284 nt, synthetic construct
  misc_feature 1..1284: note = derived and/or modified sequence opt1 fromCytosine_Deaminase_codA__Escherichia_coli__AAP92816
  source 1..1284: mol_type = other RNA
atgagcaacaacgccctgcagaccatcatcaacgcccgcctccccggcgaggaggggctgtggcagatccacctccaggacggcaagatctccgcgatcgacgcccagagcggggtgatgccgatcaccgagaactccctggacgccgagcagggcctggtcatcccgcccttcgtggagccccacatccacctggacacgacccagaccgccgggcagcccaactggaaccagagcggcaccctcttcgagggcatcgagcggtgggccgagcgcaaggcgctgctgacgcacgacgacgtgaagcagcgggcctggcagaccctcaagtggcagatcgccaacgggatccagcacgtccgcacccacgtggacgtgtccgacgccaccctgacggcgctgaaggccatgctcgaggtcaagcaggaggtggccccctggatcgacctgcagatcgtggccttcccccaggagggcatcctgagctaccccaacggggaggccctcctggaggaggcgctgcggctcggcgccgacgtcgtgggggccatcccgcacttcgagttcacccgcgagtacggcgtggagtccctgcacaagaccttcgccctggcccagaagtacgaccggctcatcgacgtccactgcgacgagatcgacgacgagcagagccgcttcgtggagaccgtggcggccctggcccaccacgagggcatgggggcccgggtcacggcctcccacaccaccgcgatgcacagctacaacggcgcctacacctcccgcctgttccggctcctgaagatgagcgggatcaacttcgtggccaaccccctggtgaacatccacctccagggccgcttcgacacgtaccccaagcggcgcggcatcacccgggtcaaggagatgctggagtccgggatcaacgtgtgcttcggccacgacgacgtgttcgacccctggtacccgctggggaccgccaacatgctccaggtcctgcacatgggcctgcacgtgtgccagctcatggggtacggccagatcaacgacggcctgaacctgatcacccaccacagcgcccgcacgctcaacctgcaggactacgggatcgcggccggcaactccgccaacctgatcatcctccccgccgagaacgggttcgacgcgctgcggcgccaggtgcccgtccggtacagcgtgcgcggcgggaaggtcatcgcctccacccagcccgcccagaccaccgtgtacctggagcagccggaggccatcgactacaagcggtga

SEQ ID NO: 5364 - RNA, 1284 nt, synthetic construct
  misc_feature 1..1284: note = derived and/or modified sequence opt2 fromCytosine_Deaminase_codA__Escherichia_coli__AAP92816
  source 1..1284: mol_type = other RNA
atgtccaacaacgccctccagaccatcatcaacgcccgcctccccggcgaggagggcctctggcagatccacctccaggacggcaagatctccgccatcgacgcccagtccggcgtcatgcccatcaccgagaactccctcgacgccgagcagggcctcgtcatcccccccttcgtcgagccccacatccacctcgacaccacccagaccgccggccagcccaactggaaccagtccggcaccctcttcgagggcatcgagcgctgggccgagcgcaaggccctcctcacccacgacgacgtcaagcagcgcgcctggcagaccctcaagtggcagatcgccaacggcatccagcacgtccgcacccacgtcgacgtctccgacgccaccctcaccgccctcaaggccatgctcgaggtcaagcaggaggtcgccccctggatcgacctccagatcgtcgccttcccccaggagggcatcctctcctaccccaacggcgaggccctcctcgaggaggccctccgcctcggcgccgacgtcgtcggcgccatcccccacttcgagttcacccgcgagtacggcgtcgagtccctccacaagaccttcgccctcgcccagaagtacgaccgcctcatcgacgtccactgcgacgagatcgacgacgagcagtcccgcttcgtcgagaccgtcgccgccctcgcccaccacgagggcatgggcgcccgcgtcaccgcctcccacaccaccgccatgcactcctacaacggcgcctacacctcccgcctcttccgcctcctcaagatgtccggcatcaacttcgtcgccaaccccctcgtcaacatccacctccagggccgcttcgacacctaccccaagcgccgcggcatcacccgcgtcaaggagatgctcgagtccggcatcaacgtctgcttcggccacgacgacgtcttcgacccctggtaccccctcggcaccgccaacatgctccaggtcctccacatgggcctccacgtctgccagctcatgggctacggccagatcaacgacggcctcaacctcatcacccaccactccgcccgcaccctcaacctccaggactacggcatcgccgccggcaactccgccaacctcatcatcctccccgccgagaacggcttcgacgccctccgccgccaggtccccgtccgctactccgtccgcggcggcaaggtcatcgcctccacccagcccgcccagaccaccgtctacctcgagcagcccgaggccatcgactacaagcgctga

SEQ ID NO: 5365 - RNA, 1284 nt, synthetic construct
  misc_feature 1..1284: note = derived and/or modified sequence opt3 fromCytosine_Deaminase_codA__Escherichia_coli__AAP92816
  source 1..1284: mol_type = other RNA
atgagcaacaatgccctgcagaccatcattaacgctagactccccggcgaggaagggctttggcaaatacatctgcaggacggaaagatctccgcaattgatgcccagtctggtgtgatgcctatcacagagaatagtttggacgcggaacagggcttagtcattccaccgttcgttgagccccacatccacctggatactacgcaaaccgctgggcagcctaactggaatcagagtggaacactatttgaaggcatagagaggtgggccgagcggaaagcactcctgactcatgacgatgtgaagcagcgcgcctggcaaacccttaaatggcagatcgctaacggtattcagcacgtacgaacacatgtggacgtcagcgatgcaaccctgactgccttgaaggctatgctcgaagtgaaacaggaggttgccccatggatcgacctgcaaattgtggcgttcccccaggaagggatcctgtcctaccctaatggagaggcactcttagaggaagccctgcgtcttggcgctgatgtcgtgggcgccataccacactttgagttcacaagagaatatggggtagagtctttgcacaagacctttgcactggctcagaagtacgacaggctaattgatgttcattgcgacgaaatcgatgacgagcaatcgcggttcgtggagacggtcgccgcgctcgcccaccatgaaggaatgggtgcacgcgtgactgcttcacacaccacagccatgcacagctataacggcgcttacacttcaagactgtttaggcttctgaaaatgtccgggattaatttcgtggccaaccccttggtcaatatccatctccagggacggtttgacacctatcctaagcgccgaggcatcacaagagttaaagagatgctggaatctggtattaacgtgtgtttcgggcacgatgacgtatttgatccatggtacccgttaggaaccgcaaatatgctccaggtgctgcatatgggccttcacgtctgccagctgatgggctatgggcaaataaacgacggattgaatctaatcacgcatcacagcgccaggactctgaacctccaggattacggtattgctgcgggcaactccgcaaatctgatcatacttcccgccgagaacgggttcgacgctctgcggcgtcaggtgcctgttcgctactcagtgagaggaggcaaggtcattgccagtacacagccagcacaaaccactgtgtatttggaacagcccgaggccatcgattacaaaaggtga

SEQ ID NO: 5366 - RNA, 1284 nt, synthetic construct
  misc_feature 1..1284: note = derived and/or modified sequence opt4 fromCytosine_Deaminase_codA__Escherichia_coli__AAP92816
  source 1..1284: mol_type = other RNA
atgagcaacaacgccctgcagaccatcatcaacgccagactgcccggcgaggagggcctgtggcagatccacctgcaggacggcaagatcagcgccatcgacgcccagagcggcgtgatgcccatcaccgagaacagcctggacgccgagcagggcctggtgatcccccccttcgtggagccccacatccacctggacaccacccagaccgccggccagcccaactggaaccagagcggcaccctgttcgagggcatcgagagatgggccgagagaaaggccctgctgacccacgacgacgtgaagcagagagcctggcagaccctgaagtggcagatcgccaacggcatccagcacgtgagaacccacgtggacgtgagcgacgccaccctgaccgccctgaaggccatgctggaggtgaagcaggaggtggccccctggatcgacctgcagatcgtggccttcccccaggagggcatcctgagctaccccaacggcgaggccctgctggaggaggccctgagactgggcgccgacgtggtgggcgccatcccccacttcgagttcaccagagagtacggcgtggagagcctgcacaagaccttcgccctggcccagaagtacgacagactgatcgacgtgcactgcgacgagatcgacgacgagcagagcagattcgtggagaccgtggccgccctggcccaccacgagggcatgggcgccagagtgaccgccagccacaccaccgccatgcacagctacaacggcgcctacaccagcagactgttcagactgctgaagatgagcggcatcaacttcgtggccaaccccctggtgaacatccacctgcagggcagattcgacacctaccccaagagaagaggcatcaccagagtgaaggagatgctggagagcggcatcaacgtgtgcttcggccacgacgacgtgttcgacccctggtaccccctgggcaccgccaacatgctgcaggtgctgcacatgggcctgcacgtgtgccagctgatgggctacggccagatcaacgacggcctgaacctgatcacccaccacagcgccagaaccctgaacctgcaggactacggcatcgccgccggcaacagcgccaacctgatcatcctgcccgccgagaacggcttcgacgccctgagaagacaggtgcccgtgagatacagcgtgagaggcggcaaggtgatcgccagcacccagcccgcccagaccaccgtgtacctggagcagcccgaggccatcgactacaagagatga

SEQ ID NO: 5367 - RNA, 1284 nt, synthetic construct
  misc_feature 1..1284: note = derived and/or modified sequence opt5 fromCytosine_Deaminase_codA__Escherichia_coli__AAP92816
  source 1..1284: mol_type = other RNA
atgagcaacaatgccctgcagaccatcattaacgctagactccccggcgaggaagggctgtggcaaatccaccttcaggacggaaagatttccgccatcgatgcgcagtctggcgtgatgcctattacagagaatagcctggacgctgaacaggggctcgtcatcccgcccttcgttgagcctcatatccacctggatacgacccaaacagccggacagcccaactggaatcagtccggcaccctttttgaagggattgagcggtgggccgagcgcaaagctctgctcacacatgacgatgtgaagcagagagcctggcaaaccctgaaatggcagatcgctaacggcattcagcacgtgcggacacatgtcgacgtgtctgatgccaccctgacggcgctcaaggccatgctggaagttaaacaggaggtggctccttggatcgaccttcaaattgtcgccttcccccaggaaggaatcctgagctaccctaatggcgaggctctcctggaggaagcccttcgcctgggggcggatgtggttggagccattccgcactttgagttcaccagagaatatggcgtggagtccctccacaagacatttgctctggcccagaagtacgaccggctgatcgatgtccattgcgacgaaatcgatgacgagcaatctcgcttcgtggagaccgtggctgccctcgcccaccatgaagggatgggagctagagtcacagcgagccacaccacggccatgcactcctataacggcgcttacacaagccggctgtttcgccttctgaaaatgtctgggattaatttcgttgccaaccccctcgtgaatatccatctgcagggaagatttgacacctatcctaagcggcgcggcattacaagagtgaaagagatgcttgaatccggcatcaacgtctgtttcgggcacgatgacgtgtttgatccctggtaccctctgggaaccgccaatatgctccaggttctgcatatgggcctgcacgtgtgccagctcatggggtatggacaaattaacgacggcctgaatcttatcacccatcacagcgctcggacactgaacctccaggattacgggatcgccgcgggaaactctgctaatctgattatccttcccgccgagaacggcttcgacgccctgcgcagacaggtcccggtgcggtactccgttagaggcgggaaggtgattgctagcacgcagcctgcccaaaccacagtctatctcgaacagcccgaggctatcgattacaaacgctga

SEQ ID NO: 5368 - RNA, 1284 nt, synthetic construct
  misc_feature 1..1284: note = derived and/or modified sequence opt6 fromCytosine_Deaminase_codA__Escherichia_coli__AAP92816
  source 1..1284: mol_type = other RNA
atgtcaaataacgcattacaaacaataataaatgcaagactacccggagaagaaggactatggcaaatacacttacaagacggaaaaatcagtgctatcgatgcacaatcaggagtaatgccaataactgaaaatagcctagacgcagaacaaggcctagtaataccaccatttgttgaaccgcatatacacctagacacaacacaaacagcagggcaaccaaactggaaccaatcaggaacactatttgaaggaatagaaagatgggctgaaagaaaagcactactaacacacgacgacgtaaaacaacgagcctggcaaacactaaaatggcaaatagcaaacggaatacaacacgttagaactcatgtagatgtctcagatgcaacattaacagcgttaaaagcaatgcttgaagtaaaacaagaagttgcaccatggatagacttacagatagtagcattcccccaagaaggaatactatcataccctaacggagaagcattacttgaagaagctctaagactaggcgcagatgtagtaggagcaataccacacttcgaatttacaagagaatacggagtagaatcactacacaaaacattcgctttagcacaaaaatatgaccgattaatagacgttcactgcgacgaaatcgacgatgagcaatctagattcgtagaaacagtagctgccttagctcatcacgaaggaatgggggcaagagtaacagcatctcatacaacagctatgcactcctacaacggagcatacacaagtcgactatttagattattaaaaatgtcaggcataaattttgtagcaaatccactagtaaatatacacttacaaggtagatttgatacatacccaaaacgacgaggaataacaagagtaaaagaaatgctagaaagcggcataaatgtatgcttcggacacgacgacgtattcgatccatggtatcccctaggaacagcaaatatgctacaagttttacatatgggactacacgtatgtcaattaatgggatacggacaaataaatgacggcctaaatctgataacacaccactcagcacgaacactaaatttacaagactacggaatagcagcaggaaacagcgcaaaccttatcatattaccagcagaaaacggatttgacgcattaagaagacaagtaccagttagatattccgtaagaggaggaaaagtaatagcatctacacaaccagcacaaacaacagtatacctagaacaaccagaagcaatagattacaaaagataa

SEQ ID NO: 5369 - protein, 427 aa, synthetic construct
  REGION 1..427: note = Cytosine_Deaminase_codA__Escherichia_coli__Q6Q8Q1
MSNNALQTIINARLPGEEGLWQIHLQDGKISAIDAQSGVMPITENSLDAEQGLVIPPFVEPHIHLDTTQTAGQPNWNQSGTLFEGIERWAERKALLTHDDVKQRAWQTLKWQIANGIQHVRTHVDVSDATLTALKAMLEVKQEVAPWIDLQIVAFPQEGILSYPNGEALLEEALRLRADVVGAIPHFEFTREYGVESLHKTFALAQKYDRLIDVHCDEIDDEQSRFVETVAALAHHEGMGARVTASHTTAMHSYNGAYTSRLFRLLKMSGINFVANPLVNIHLQGRFDTYPKRRGITRVKEMLESGINVCFGHDDVFDPWYPLGTANMLQVLHMGLHVCQLMGYGQINDGLNLITHHSARTLNLQDYGIAAGNSANLIILPAENGFDALRRQVPVRYSVRGGKVIASTQPAQTTVYLEQPEAIDYKR

SEQ ID NO: 5370 - RNA, 1284 nt, synthetic construct
  misc_feature 1..1284: note = Cytosine_Deaminase_codA__Escherichia_coli__AAS58473
  source 1..1284: mol_type = other RNA
atgtcgaataacgctttacaaacaattattaacgcccggttaccaggcgaagaggggctgtggcagattcatctgcaggacggaaaaatcagcgccattgatgcgcaatccggcgtgatgcccataactgaaaacagcctggatgccgaacaaggtttagttataccgccgtttgtggagccacatattcacctggacaccacgcaaaccgccggacaaccgaactggaatcagtccggcacgctgtttgaaggcattgaacgctgggccgagcgcaaagcgttattaacccatgacgatgtgaaacaacgcgcatggcagacgctgaaatggcagattgccaacggcattcagcatgtgcgtacccatgtcgatgtttcggatgcaacgctaactgcgctgaaagcaatgctggaagtgaagcaggaagtcgcgccgtggattgatctgcaaatcgtcgccttccctcaggaagggattttgtcgtatcccaacggtgaagcgttgctggaagaggcgttacgcttaagggcagatgtagtgggggcgattccgcattttgaatttacccgtgaatacggcgtggagtcgctgcataaaaccttcgccctggcgcaaaaatacgaccgtctcatcgacgttcactgtgatgagatcgatgacgagcagtcgcgctttgtcgaaaccgttgctgccctggcgcaccatgaaggcatgggcgcgcgagtcaccgccagccacaccacggcaatgcactcctataacggggcgtatacctcacgcctgttccgcttgctgaaaatgtccggtattaactttgtcgccaacccgctggtcaatattcatctgcaaggacgtttcgatacgtatccaaaacgtcgcggcatcacgcgcgttaaagagatgctggagtccggcattaacgtctgctttggtcacgatgatgtcttcgatccgtggtatccgctgggaacggcgaatatgctgcaagtgctgcatatggggctgcatgtttgccagttgatgggctacgggcagattaacgatggcctgaatttaatcacccaccacagcgcaaggacgttgaatttgcaggattacggcattgccgccggaaacagcgccaacctgattatcctgccggctgaaaatgggtttgatgcgctgcgccgtcaggttccggtacgttattcggtacgtggcggcaaggtgattgccagcacacaaccggcacaaaccaccgtatatctggagcagccagaagccatcgattacaaacgttga

SEQ ID NO: 5371 - RNA, 1284 nt, synthetic construct
  misc_feature 1..1284: note = derived and/or modified sequence opt1 fromCytosine_Deaminase_codA__Escherichia_coli__AAS58473
  source 1..1284: mol_type = other RNA
atgagcaacaacgccctgcagaccatcatcaacgcccgcctccccggcgaggaggggctgtggcagatccacctccaggacggcaagatctccgcgatcgacgcccagagcggggtgatgccgatcaccgagaactccctggacgccgagcagggcctggtcatcccgcccttcgtggagccccacatccacctggacacgacccagaccgccgggcagcccaactggaaccagagcggcaccctcttcgagggcatcgagcggtgggccgagcgcaaggcgctgctgacgcacgacgacgtgaagcagcgggcctggcagaccctcaagtggcagatcgccaacgggatccagcacgtccgcacccacgtggacgtgtccgacgccaccctgacggcgctgaaggccatgctcgaggtcaagcaggaggtggccccctggatcgacctgcagatcgtggccttcccccaggagggcatcctgagctaccccaacggggaggccctcctggaggaggcgctgcggctccgcgccgacgtcgtgggcgccatcccgcacttcgagttcacccgggagtacggggtggagtccctgcacaagaccttcgccctggcccagaagtacgaccgcctcatcgacgtccactgcgacgagatcgacgacgagcagagccggttcgtggagaccgtggcggccctggcccaccacgagggcatgggcgcccgcgtcacggcctcccacaccaccgcgatgcacagctacaacggggcctacacctcccggctgttccgcctcctgaagatgagcggcatcaacttcgtggccaaccccctggtgaacatccacctccaggggcggttcgacacgtaccccaagcgccggggcatcacccgcgtcaaggagatgctggagtccggcatcaacgtgtgcttcgggcacgacgacgtgttcgacccctggtacccgctgggcaccgccaacatgctccaggtcctgcacatggggctgcacgtgtgccagctcatgggctacgggcagatcaacgacggcctgaacctgatcacccaccacagcgcccggacgctcaacctgcaggactacggcatcgcggccgggaactccgccaacctgatcatcctccccgccgagaacggcttcgacgcgctgcgccgccaggtgcccgtccggtacagcgtgcgcgggggcaaggtcatcgcctccacccagcccgcccagaccaccgtgtacctggagcagccggaggccatcgactacaagcggtga

SEQ ID NO: 5372 - RNA, 1284 nt, synthetic construct
  misc_feature 1..1284: note = derived and/or modified sequence opt2 fromCytosine_Deaminase_codA__Escherichia_coli__AAS58473
  source 1..1284: mol_type = other RNA
atgtccaacaacgccctccagaccatcatcaacgcccgcctccccggcgaggagggcctctggcagatccacctccaggacggcaagatctccgccatcgacgcccagtccggcgtcatgcccatcaccgagaactccctcgacgccgagcagggcctcgtcatcccccccttcgtcgagccccacatccacctcgacaccacccagaccgccggccagcccaactggaaccagtccggcaccctcttcgagggcatcgagcgctgggccgagcgcaaggccctcctcacccacgacgacgtcaagcagcgcgcctggcagaccctcaagtggcagatcgccaacggcatccagcacgtccgcacccacgtcgacgtctccgacgccaccctcaccgccctcaaggccatgctcgaggtcaagcaggaggtcgccccctggatcgacctccagatcgtcgccttcccccaggagggcatcctctcctaccccaacggcgaggccctcctcgaggaggccctccgcctccgcgccgacgtcgtcggcgccatcccccacttcgagttcacccgcgagtacggcgtcgagtccctccacaagaccttcgccctcgcccagaagtacgaccgcctcatcgacgtccactgcgacgagatcgacgacgagcagtcccgcttcgtcgagaccgtcgccgccctcgcccaccacgagggcatgggcgcccgcgtcaccgcctcccacaccaccgccatgcactcctacaacggcgcctacacctcccgcctcttccgcctcctcaagatgtccggcatcaacttcgtcgccaaccccctcgtcaacatccacctccagggccgcttcgacacctaccccaagcgccgcggcatcacccgcgtcaaggagatgctcgagtccggcatcaacgtctgcttcggccacgacgacgtcttcgacccctggtaccccctcggcaccgccaacatgctccaggtcctccacatgggcctccacgtctgccagctcatgggctacggccagatcaacgacggcctcaacctcatcacccaccactccgcccgcaccctcaacctccaggactacggcatcgccgccggcaactccgccaacctcatcatcctccccgccgagaacggcttcgacgccctccgccgccaggtccccgtccgctactccgtccgcggcggcaaggtcatcgcctccacccagcccgcccagaccaccgtctacctcgagcagcccgaggccatcgactacaagcgctga

SEQ ID NO: 5373 - RNA, 1284 nt, synthetic construct
  misc_feature 1..1284: note = derived and/or modified sequence opt3 fromCytosine_Deaminase_codA__Escherichia_coli__AAS58473
  source 1..1284: mol_type = other RNA
atgagcaacaatgccctgcagaccatcattaacgctagactccccggcgaggaagggctttggcaaatacatctgcaggacggaaagatctccgcaattgatgcccagtctggtgtgatgcctatcacagagaatagtttggacgcggaacagggcttagtcattccaccgttcgttgagccccacatccacctggatactacgcaaaccgctgggcagcctaactggaatcagagtggaacactatttgaaggcatagagaggtgggccgagcggaaagcactcctgactcatgacgatgtgaagcagcgcgcctggcaaacccttaaatggcagatcgctaacggtattcagcacgtacgaacacatgtggacgtcagcgatgcaaccctgactgccttgaaggctatgctcgaagtgaaacaggaggttgccccatggatcgacctgcaaattgtggcgttcccccaggaagggatcctgtcctaccctaatggagaggcactcttagaggaagccctgcgtcttagagctgatgtcgtgggcgccataccacactttgagttcacaagggaatatggcgtagagtctttgcacaagacctttgcactggctcagaagtacgaccggctaattgatgttcattgcgacgaaatcgatgacgagcaatcgcgcttcgtggagacggtcgccgcgctcgcccaccatgaagggatgggagcaagagtgactgcttcacacaccacagccatgcacagctataacggtgcttacacttcaaggctgtttcggcttctgaaaatgtccggcattaatttcgtggccaaccccttggtcaatatccatctccaggggcgctttgacacctatcctaagcgaagaggaatcacaagggttaaagagatgctggaatctggcattaacgtgtgtttcggtcacgatgacgtatttgatccatggtacccgttagggaccgcaaatatgctccaggtgctgcatatgggacttcacgtctgccagctgatgggctatggccaaataaacgacgggttgaatctaatcacgcatcacagcgcccggactctgaacctccaggattacggaattgctgcgggtaactccgcaaatctgatcatacttcccgccgagaacggcttcgacgctctgcgtcgccaggtgcctgttagatactcagtgaggggagggaaggtcattgccagtacacagccagcacaaaccactgtgtatttggaacagcccgaggccatcgattacaaacggtga

SEQ ID NO: 5374 - RNA, 1284 nt, synthetic construct
  misc_feature 1..1284: note = derived and/or modified sequence opt4 fromCytosine_Deaminase_codA__Escherichia_coli__AAS58473
  source 1..1284: mol_type = other RNA
atgagcaacaacgccctgcagaccatcatcaacgccagactgcccggcgaggagggcctgtggcagatccacctgcaggacggcaagatcagcgccatcgacgcccagagcggcgtgatgcccatcaccgagaacagcctggacgccgagcagggcctggtgatcccccccttcgtggagccccacatccacctggacaccacccagaccgccggccagcccaactggaaccagagcggcaccctgttcgagggcatcgagagatgggccgagagaaaggccctgctgacccacgacgacgtgaagcagagagcctggcagaccctgaagtggcagatcgccaacggcatccagcacgtgagaacccacgtggacgtgagcgacgccaccctgaccgccctgaaggccatgctggaggtgaagcaggaggtggccccctggatcgacctgcagatcgtggccttcccccaggagggcatcctgagctaccccaacggcgaggccctgctggaggaggccctgagactgagagccgacgtggtgggcgccatcccccacttcgagttcaccagagagtacggcgtggagagcctgcacaagaccttcgccctggcccagaagtacgacagactgatcgacgtgcactgcgacgagatcgacgacgagcagagcagattcgtggagaccgtggccgccctggcccaccacgagggcatgggcgccagagtgaccgccagccacaccaccgccatgcacagctacaacggcgcctacaccagcagactgttcagactgctgaagatgagcggcatcaacttcgtggccaaccccctggtgaacatccacctgcagggcagattcgacacctaccccaagagaagaggcatcaccagagtgaaggagatgctggagagcggcatcaacgtgtgcttcggccacgacgacgtgttcgacccctggtaccccctgggcaccgccaacatgctgcaggtgctgcacatgggcctgcacgtgtgccagctgatgggctacggccagatcaacgacggcctgaacctgatcacccaccacagcgccagaaccctgaacctgcaggactacggcatcgccgccggcaacagcgccaacctgatcatcctgcccgccgagaacggcttcgacgccctgagaagacaggtgcccgtgagatacagcgtgagaggcggcaaggtgatcgccagcacccagcccgcccagaccaccgtgtacctggagcagcccgaggccatcgactacaagagatga

SEQ ID NO: 5375 - RNA, 1284 nt, synthetic construct
  misc_feature 1..1284: note = derived and/or modified sequence opt5 fromCytosine_Deaminase_codA__Escherichia_coli__AAS58473
  source 1..1284: mol_type = other RNA
atgagcaacaatgccctgcagaccatcattaacgctagactccccggcgaggaagggctgtggcaaatccaccttcaggacggaaagatttccgccatcgatgcgcagtctggcgtgatgcctattacagagaatagcctggacgctgaacaggggctcgtcatcccgcccttcgttgagcctcatatccacctggatacgacccaaacagccggacagcccaactggaatcagtccggcaccctttttgaagggattgagcggtgggccgagcgcaaagctctgctcacacatgacgatgtgaagcagagagcctggcaaaccctgaaatggcagatcgctaacggcattcagcacgtgcggacacatgtcgacgtgtctgatgccaccctgacggcgctcaaggccatgctggaagttaaacaggaggtggctccttggatcgaccttcaaattgtcgccttcccccaggaaggaatcctgagctaccctaatggcgaggctctcctggaggaagcccttcgcctgagagcggatgtggttggggccattccgcactttgagttcacccgggaatatggagtggagtccctccacaagacatttgctctggcccagaagtacgaccgcctgatcgatgtccattgcgacgaaatcgatgacgagcaatctagattcgtggagaccgtggctgccctcgcccaccatgaaggcatgggggctcgggtcacagcgagccacaccacggccatgcactcctataacggagcttacacaagccgcctgtttagacttctgaaaatgtctggcattaatttcgttgccaaccccctcgtgaatatccatctgcaggggcggtttgacacctatcctaagcgcagaggaattacacgggtgaaagagatgcttgaatccggcatcaacgtctgtttcggccacgatgacgtgtttgatccctggtaccctctggggaccgccaatatgctccaggttctgcatatgggactgcacgtgtgccagctcatgggctatgggcaaattaacgacggactgaatcttatcacccatcacagcgctcgcacactgaacctccaggattacggcatcgccgcggggaactctgctaatctgattatccttcccgccgagaacggattcgacgccctgagacggcaggtcccggtgagatactccgttcgcggcggcaaggtgattgctagcacgcagcctgcccaaaccacagtctatctcgaacagcccgaggctatcgattacaaacggtga

SEQ ID NO: 5376 - RNA, 1284 nt, synthetic construct
  misc_feature 1..1284: note = derived and/or modified sequence opt6 fromCytosine_Deaminase_codA__Escherichia_coli__AAS58473
  source 1..1284: mol_type = other RNA
atgagtaacaacgcattacaaacaataataaatgcgagattaccaggtgaagaaggactttggcaaatacatttacaagatggaaaaatatctgcaatagacgcacaaagcggagtaatgccaataacagaaaattcactagatgcagaacaaggattagtaataccacctttcgtagaaccacatatacatttagacactacacaaacagcaggtcaaccaaactggaaccaatcaggaacattatttgaaggaatagagagatgggccgaaagaaaagccttactaacacacgacgacgtcaaacaaagagcatggcaaacattaaaatggcaaatagcaaacggaatacaacatgtaagaacacatgtagacgtaagtgacgcaacactaacagcactaaaagcaatgttagaagtaaagcaagaagtagcaccatggatagatctacaaatagtagcattcccccaagaaggaatactatcatatccaaacggagaagcactacttgaagaagccctaagactaagagcagatgtagtaggagcaataccacactttgaattcacaagagaatacggagtagaatcactacataaaacttttgccctagcacaaaaatacgatagactaatagatgtacattgtgacgaaatagacgatgaacaatcacgattcgttgaaaccgtcgctgcactagcacatcacgaagggatgggtgcaagagtaacagcttcacacacaactgccatgcactcttataacggagcatacacaagcagattattcagactattaaaaatgagtggaataaactttgtagctaatcccctagtaaatatacatttacaaggtagatttgacacatacccgaaaagaagaggaataacaagagtaaaagaaatgctagaaagcggcataaacgtatgtttcggacatgacgacgtattcgacccctggtatccattaggaacagccaacatgttacaagtcctacacatgggcctacatgtctgccaacttatgggatacggacaaattaacgacggactaaacttaatcacacatcattccgcaagaacactcaatttacaagactatggtatagcagcaggaaactcagctaacctaataatactacctgcagaaaacggcttcgacgcattaagaagacaagttccagtaagatactcagtacgaggagggaaagtaatagcatcaacgcaaccagctcaaacaacagtatatttagaacaaccagaagcaatagactataaaagataa

SEQ ID NO: 5377 - protein, 432 aa, synthetic construct
  REGION 1..432: note = Cytosine_Deaminase_codA__Escherichia_coli__W8ZNH5
MWRLTVSNNALQTIINARLPGKEGLWQIHFHDGKISAIDAQSGVMPVTENSLDAEQGLVLPPFVEPHIHLDTTQTAGQPNWNQSGTLFEGIERWAERKALLTHDDVKQRAWQTLKWQIANGIQHVRTHVDVSDATLTALKAMLEVKQEVAPWIDLQIVAFPQEGILSYPNGEALLEEALRLGADVVGAIPHFEFTREYGVESLHKTFALAQKYDRLIDVHCDEIDDEQSRFVETVAALAHREGMGARVTASHTTAMHSYNGAYTSRLFRLLKMSGINFVANPLVNIHLQGRFDTYPKRRGITRVKEMLESGINVCFGHDDVFDPWYPLGTANMLQVLHMGLHVCQLMGYGQINDGLNLITHHSARTLNLQDYGIAAGNSANLIILPAENGFDALRRQVPVRYSVRGGKVIASTKPAQTTVYLEQPEAIDYKR

SEQ ID NO: 5378 - RNA, 1299 nt, synthetic construct
  misc_feature 1..1299: note = Cytosine_Deaminase_codA__Escherichia_coli__CDN80736
  source 1..1299: mol_type = other RNA
atgtggaggctaacagtgtcgaataatgctttacaaacaattattaacgcccggttacccggcaaagaggggctgtggcagattcattttcacgacggaaaaatcagcgccattgatgcgcaatccggcgtgatgcccgtaactgaaaacagcctggatgccgaacaaggtttagttttaccgccgtttgtggagccgcatattcacctggacaccacgcaaaccgccggacaaccgaactggaatcagtccggcacgctgtttgaaggcattgaacgctgggccgagcgcaaagcgttattaactcatgacgatgtgaaacaacgcgcatggcaaacgctgaaatggcagattgccaacggcattcagcatgtgcgtacccatgtcgatgtttcggacgcaacgctgactgcgctgaaagcaatgctggaagtgaaacaggaagttgcgccgtggattgatctacaaatcgtcgccttcccgcaggaagggattttgtcgtatcccaatggtgaagcgttgctggaagaggcgttacgcttaggggcagacgttgttggggcgattccgcattttgaatttacccgtgaatatggcgtggagtcgctgcataaaaccttcgccctggcgcaaaaatacgaccgtctcatcgatgttcactgtgacgagattgatgatgagcaatcacgctttgtcgaaaccgttgctgccctggcgcaccgtgaaggcatgggcgcgcgagtcaccgccagccatactacggcaatgcactcctataacggggcgtatacttcgcgcctgtttcgtttgctgaaaatgtccggtattaactttgtcgccaacccgttggtcaatattcatctgcaaggacgtttcgatacgtatccaaaacgtcgcggcatcacgcgcgttaaagagatgctggagtccggcattaacgtctgctttggtcacgatgatgtcttcgatccgtggtatccgctgggaacggcgaatatgctgcaagtgctgcatatggggctgcatgtttgccagctgatgggctatgggcagattaacgacggcctgaatttaatcacccaccacagtgccagaacgttgaatttgcaggattacggcattgccgccggaaacagcgccaacctgattatcctgccggctgaaaatgggtttgacgcgctgcgccgtcaggttccggtgcgctattcggtacgtggcggcaaggtgattgccagcacaaaaccggcacaaaccaccgtatatctggagcagccagaagccatcgattacaaacggtaa

SEQ ID NO: 5379 - RNA, 1299 nt, synthetic construct
  misc_feature 1..1299: note = derived and/or modified sequence opt1 fromCytosine_Deaminase_codA__Escherichia_coli__CDN80736
  source 1..1299: mol_type = other RNA
atgtggcgcctgaccgtgagcaacaacgccctccagaccatcatcaacgcccggctgcccggcaaggaggggctgtggcagatccacttccacgacggcaagatctccgcgatcgacgcccagagcggggtcatgccggtgacggagaactccctcgacgccgagcagggcctggtgctgccgcccttcgtcgagccccacatccacctcgacaccacccagaccgccgggcagcccaactggaaccagagcggcacgctgttcgagggcatcgagcgctgggccgagcggaaggcgctgctcacccacgacgacgtgaagcagcgcgcctggcagaccctgaagtggcagatcgccaacgggatccagcacgtgcggacccacgtcgacgtgtccgacgccacgctgaccgcgctcaaggccatgctggaggtgaagcaggaggtcgccccctggatcgacctgcagatcgtggccttcccccaggagggcatcctcagctaccccaacggggaggccctgctggaggaggcgctccgcctgggcgccgacgtggtcggggccatcccgcacttcgagttcacccgggagtacggcgtggagtccctgcacaagaccttcgccctcgcccagaagtacgaccgcctgatcgacgtgcactgcgacgagatcgacgacgagcagagccggttcgtcgagacggtggcggccctggcccaccgcgagggcatgggggcccgggtgaccgcctcccacaccaccgcgatgcacagctacaacggcgcctacacgtcccgcctcttccggctgctgaagatgagcgggatcaacttcgtcgccaaccccctcgtgaacatccacctccagggccgcttcgacacctaccccaagcggcgcggcatcacccgggtgaaggagatgctggagtccgggatcaacgtctgcttcggccacgacgacgtgttcgacccctggtacccgctggggaccgccaacatgctccaggtgctgcacatgggcctgcacgtctgccagctgatggggtacggccagatcaacgacggcctgaacctcatcacgcaccacagcgcccgcaccctgaacctgcaggactacgggatcgcggccggcaactccgccaacctcatcatcctgcccgccgagaacgggttcgacgcgctgcggcgccaggtgcccgtccggtacagcgtgcgcggcgggaaggtgatcgcctccaccaagcccgcccagaccacggtctacctcgagcagccggaggccatcgactacaagcgctga

SEQ ID NO: 5380 - RNA, 1299 nt, synthetic construct
  misc_feature 1..1299: note = derived and/or modified sequence opt2 fromCytosine_Deaminase_codA__Escherichia_coli__CDN80736
  source 1..1299: mol_type = other RNA
atgtggcgcctcaccgtctccaacaacgccctccagaccatcatcaacgcccgcctccccggcaaggagggcctctggcagatccacttccacgacggcaagatctccgccatcgacgcccagtccggcgtcatgcccgtcaccgagaactccctcgacgccgagcagggcctcgtcctcccccccttcgtcgagccccacatccacctcgacaccacccagaccgccggccagcccaactggaaccagtccggcaccctcttcgagggcatcgagcgctgggccgagcgcaaggccctcctcacccacgacgacgtcaagcagcgcgcctggcagaccctcaagtggcagatcgccaacggcatccagcacgtccgcacccacgtcgacgtctccgacgccaccctcaccgccctcaaggccatgctcgaggtcaagcaggaggtcgccccctggatcgacctccagatcgtcgccttcccccaggagggcatcctctcctaccccaacggcgaggccctcctcgaggaggccctccgcctcggcgccgacgtcgtcggcgccatcccccacttcgagttcacccgcgagtacggcgtcgagtccctccacaagaccttcgccctcgcccagaagtacgaccgcctcatcgacgtccactgcgacgagatcgacgacgagcagtcccgcttcgtcgagaccgtcgccgccctcgcccaccgcgagggcatgggcgcccgcgtcaccgcctcccacaccaccgccatgcactcctacaacggcgcctacacctcccgcctcttccgcctcctcaagatgtccggcatcaacttcgtcgccaaccccctcgtcaacatccacctccagggccgcttcgacacctaccccaagcgccgcggcatcacccgcgtcaaggagatgctcgagtccggcatcaacgtctgcttcggccacgacgacgtcttcgacccctggtaccccctcggcaccgccaacatgctccaggtcctccacatgggcctccacgtctgccagctcatgggctacggccagatcaacgacggcctcaacctcatcacccaccactccgcccgcaccctcaacctccaggactacggcatcgccgccggcaactccgccaacctcatcatcctccccgccgagaacggcttcgacgccctccgccgccaggtccccgtccgctactccgtccgcggcggcaaggtcatcgcctccaccaagcccgcccagaccaccgtctacctcgagcagcccgaggccatcgactacaagcgctga

SEQ ID NO: 5381 - RNA, 1299 nt, synthetic construct
  misc_feature 1..1299: note = derived and/or modified sequence opt3 fromCytosine_Deaminase_codA__Escherichia_coli__CDN80736
  source 1..1299: mol_type = other RNA
atgtggagactgaccgtgagcaacaatgccctccagacaatcattaacgctaggcttcccggcaaggaggggctgtggcaaatacacttccatgacggaaaaatctccgcaattgatgcccagtctggtgtcatgcctgttactgaaaattcattggacgcggagcagggcttagtgctgccaccgtttgtagaaccccacatccatctagatacgacccagacagctgggcaacctaactggaatcagagtggaactctcttcgagggcattgaacggtgggccgagcgcaaggcactgcttacccacgacgatgtgaaacagcgagcctggcagacactgaagtggcaaatcgctaacggtatacagcatgtccgtacccacgtggacgttagcgatgcaactttgacagccctcaaagctatgctggaggtgaagcaggaagtcgccccatggatcgacctgcagattgtggcgtttccccaagaggggatcctctcctaccctaatggagaagcattactggaggaggcccttagattgggcgctgatgtagttggcgccattccacacttcgaatttaccagggagtatggggtggaatctctgcataagacgttcgcactagctcagaaatacgaccggctcatcgatgtccactgcgacgagatagatgacgaacagtcgcgctttgtggagactgtggccgcgctggcccatagagagggaatgggtgcaagggtcaccgcttcacacacaactgccatgcacagctataacggcgcttacaccagtcggcttttccgcctgttgaagatgtccgggattaattttgttgccaaccccctcgtgaatatccatctgcaaggacgattcgacacatatcctaaaagaaggggcattacccgggtaaaggaaatgttagagtctggtatcaacgtgtgttttgggcacgatgacgtcttcgatccatggtacccgctgggaacggcaaatatgctccaggtgcttcatatgggcctgcacgtttgccagttgatgggctatgggcagatcaacgacggactaaatctgattactcatcacagcgcccgtacactcaacctgcaagattacggtatagctgcgggcaactccgcaaatcttatcattctgcccgccgaaaacgggtttgacgctttgcgcagacaggtgcctgtcaggtactcagtgcggggaggcaaagtaatcgccagtaccaagccagcacagactacagtttatctcgagcagcccgaagccatagattacaagcgatga

SEQ ID NO: 5382 - RNA, 1299 nt, synthetic construct
  misc_feature 1..1299: note = derived and/or modified sequence opt4 fromCytosine_Deaminase_codA__Escherichia_coli__CDN80736
  source 1..1299: mol_type = other RNA
atgtggagactgaccgtgagcaacaacgccctgcagaccatcatcaacgccagactgcccggcaaggagggcctgtggcagatccacttccacgacggcaagatcagcgccatcgacgcccagagcggcgtgatgcccgtgaccgagaacagcctggacgccgagcagggcctggtgctgccccccttcgtggagccccacatccacctggacaccacccagaccgccggccagcccaactggaaccagagcggcaccctgttcgagggcatcgagagatgggccgagagaaaggccctgctgacccacgacgacgtgaagcagagagcctggcagaccctgaagtggcagatcgccaacggcatccagcacgtgagaacccacgtggacgtgagcgacgccaccctgaccgccctgaaggccatgctggaggtgaagcaggaggtggccccctggatcgacctgcagatcgtggccttcccccaggagggcatcctgagctaccccaacggcgaggccctgctggaggaggccctgagactgggcgccgacgtggtgggcgccatcccccacttcgagttcaccagagagtacggcgtggagagcctgcacaagaccttcgccctggcccagaagtacgacagactgatcgacgtgcactgcgacgagatcgacgacgagcagagcagattcgtggagaccgtggccgccctggcccacagagagggcatgggcgccagagtgaccgccagccacaccaccgccatgcacagctacaacggcgcctacaccagcagactgttcagactgctgaagatgagcggcatcaacttcgtggccaaccccctggtgaacatccacctgcagggcagattcgacacctaccccaagagaagaggcatcaccagagtgaaggagatgctggagagcggcatcaacgtgtgcttcggccacgacgacgtgttcgacccctggtaccccctgggcaccgccaacatgctgcaggtgctgcacatgggcctgcacgtgtgccagctgatgggctacggccagatcaacgacggcctgaacctgatcacccaccacagcgccagaaccctgaacctgcaggactacggcatcgccgccggcaacagcgccaacctgatcatcctgcccgccgagaacggcttcgacgccctgagaagacaggtgcccgtgagatacagcgtgagaggcggcaaggtgatcgccagcaccaagcccgcccagaccaccgtgtacctggagcagcccgaggccatcgactacaagagatga

SEQ ID NO: 5383 - RNA, 1299 nt, synthetic construct
  misc_feature 1..1299: note = derived and/or modified sequence opt5 fromCytosine_Deaminase_codA__Escherichia_coli__CDN80736
  source 1..1299: mol_type = other RNA
atgtggagactgaccgtgagcaacaatgccctccagacaatcattaacgctcggctgcccggcaaggaggggctttggcaaatccacttccatgacggaaaaatttccgccatcgatgcgcagtctggcgtcatgcctgttacggaaaatagcctggacgctgagcaggggctcgtgctgccgccctttgtggaacctcacattcatcttgataccacacagaccgccggacaacccaactggaatcagtccggcacactgttcgaggggatcgaacgctgggccgagagaaaggctctcctgacccacgacgatgtcaaacagcgggcctggcagacactgaagtggcaaatcgctaacggcattcagcatgtgcgcacccacgttgacgtgtctgatgccacgctcaccgcgctgaaagccatgcttgaggtcaagcaggaagtggctccttggatcgacctgcagattgttgcctttccccaagagggaatcctcagctaccctaatggcgaagctctgcttgaggaggccctgagactcggggcggatgtggtcggagccattccgcacttcgaatttacacgggagtatggcgtggaatccctgcataagaccttcgctctggcccagaaatacgaccgcctcatcgatgtgcactgcgacgagattgatgacgaacagtctagatttgtcgagacagttgctgccctggcccatcgggaggggatgggagctcgcgtgaccgcgagccacacgacagccatgcactcctataacggcgcttacaccagcagacttttccggctgctcaagatgtctgggatcaattttgtggccaaccccctggtcaatatccatcttcaaggacgcttcgacacatatcctaaaagacggggcattacccgcgtgaaggaaatgctggagtccggcatcaacgtttgttttgggcacgatgacgtgttcgatccctggtaccctctcggaaccgccaatatgctgcaggtcctgcatatgggcctccacgtgtgccagctgatggggtatggacagattaacgacggccttaatctgatcacacatcacagcgctagaacgctcaacctgcaagattacgggattgccgcgggaaactctgctaatcttatcatcctgcccgccgaaaacggctttgacgccctccggagacaggttccggtgcgctactccgtccggggcgggaaagtgattgctagcaccaagcctgcccagacaaccgtctatctggagcagcccgaagctatcgattacaagagatga

SEQ ID NO: 5384 - RNA, 1299 nt, synthetic construct
  misc_feature 1..1299: note = derived and/or modified sequence opt6 fromCytosine_Deaminase_codA__Escherichia_coli__CDN80736
  source 1..1299: mol_type = other RNA
atgtggaggttaacagtatctaacaacgcactacaaacaataataaatgctcgacttccaggcaaagaaggactttggcaaatacactttcatgatggcaaaatcagcgcaatagacgcacaatcaggagtgatgcccgtcaccgaaaattcattagacgcagaacaaggactagtcttacccccattcgtagaaccgcatatacacttagatactacacaaacagcaggacaaccaaattggaaccaatctggaacactattcgaaggaatagaaagatgggcagaaagaaaagcactactaacacacgatgacgtaaaacaaagagcatggcaaacactaaaatggcaaatagcaaacggaatccaacacgtacgaacacatgtagatgtctcagacgcaacactaaccgcactaaaagcaatgttagaagtcaaacaagaagtagcaccatggatcgatctacaaatagtagcatttccacaagaaggaatactgagctatccaaacggagaagcattattagaagaagcactaagactaggagcagacgtagtaggtgcaataccacattttgaatttacaagagaatatggcgtagaatctctccacaaaactttcgcactagcacaaaaatatgatagattaatagatgtacattgcgatgaaatagacgatgaacagagtagattcgtagaaacagtagcagcacttgcacatagggaaggtatgggcgcaagagtaacagcaagtcacacaacagcaatgcactcatacaatggagcatataccagtagactctttcgactcctcaaaatgtcaggaataaattttgtagccaaccctctagttaatatacacttacaaggaagattcgacacataccctaaaagaagaggaataacaagagtaaaagaaatgttagaatcaggcataaacgtttgttttggacacgatgatgtatttgatccttggtatccattaggaacagccaatatgttacaagtactccatatgggtttacatgtatgccaattaatgggatacggacaaatcaatgatggattaaacttaataacacaccattcagcaagaacactaaatctacaagattatggaatagcagccggaaattcagcaaatctaataatactaccagcagaaaacggatttgacgccctgagaagacaagtaccagtaagatactcagtaagaggaggaaaagtaatagcatcaacaaaaccagcacaaacaaccgtatacttagaacaaccagaagcaatagactataaaagataa

SEQ ID NO: 5385 - protein, 158 aa, synthetic construct
  REGION 1..158: note Cytosine_Deaminase_fcy1__Saccharomyces_cerevisiae__A0A023ZJ G6
MVTGGMASKWDQKGMDIAYEEAALGYKEGGVPIGGCLINNKDGSVLGRGHNMRFQKGSATLHGEISTLENCGRLEGKVYKDTTLYTTLSPCDMCTGAIIMYGIPRCVVGENVNFKSKGEKYLQTRGHEVVVVDDERCKKIMKQFIDERPQDWFEDIGE

SEQ ID NO: 5386 - RNA, 477 nt, synthetic construct
  misc_feature 1..477: note Cytosine_Deaminase_fcy1__Saccharomyces_cerevisiae__AHY78226
  source 1..477: mol_type = other RNA
atggtgacagggggaatggcaagcaagtgggatcagaagggtatggacattgcctatgaggaggcggccttaggttacaaagagggtggtgttcctattggcggatgtcttatcaataacaaagacggaagtgttctcggtcgtggtcacaacatgagatttcaaaagggatccgccacactacatggtgagatctccactttggaaaactgtgggagattagagggcaaagtgtacaaagataccactttgtatacgacgctgtctccatgcgacatgtgtacaggtgccatcatcatgtatggtattccacgctgtgttgtcggtgagaacgttaatttcaaaagtaagggcgagaaatatttacaaactagaggtcacgaggttgttgttgttgacgatgagaggtgtaaaaagatcatgaaacaatttatcgatgaaagacctcaggattggtttgaagatattggtgagtag

SEQ ID NO: 5387 - RNA, 477 nt, synthetic construct
  misc_feature 1..477: note = derived and/or modified sequence opt1 fromCytosine_Deaminase_fcy1__Saccharomyces_cerevisiae__AHY7 8226
  source 1..477: mol_type = other RNA
atggtgaccggcgggatggccagcaagtgggaccagaagggcatggacatcgcctacgaggaggcggccctggggtacaaggagggcggggtccccatcggcggctgcctcatcaacaacaaggacgggtccgtgctgggccgcgggcacaacatgcggttccagaagggcagcgccaccctgcacggggagatctccacgctcgagaactgcggccgcctggagggcaaggtgtacaaggacaccaccctgtacaccacgctcagcccgtgcgacatgtgcaccggggccatcatcatgtacggcatcccccggtgcgtcgtgggggagaacgtgaacttcaagtccaagggcgagaagtacctgcagacccgcggccacgaggtcgtggtggtcgacgacgagcggtgcaagaagatcatgaagcagttcatcgacgagcgcccccaggactggttcgaggacatcggggagtga

SEQ ID NO: 5388 - RNA, 477 nt, synthetic construct
  misc_feature 1..477: note = derived and/or modified sequence opt2 fromCytosine_Deaminase_fcy1__Saccharomyces_cerevisiae__AHY7 8226
  source 1..477: mol_type = other RNA
atggtcaccggcggcatggcctccaagtgggaccagaagggcatggacatcgcctacgaggaggccgccctcggctacaaggagggcggcgtccccatcggcggctgcctcatcaacaacaaggacggctccgtcctcggccgcggccacaacatgcgcttccagaagggctccgccaccctccacggcgagatctccaccctcgagaactgcggccgcctcgagggcaaggtctacaaggacaccaccctctacaccaccctctccccctgcgacatgtgcaccggcgccatcatcatgtacggcatcccccgctgcgtcgtcggcgagaacgtcaacttcaagtccaagggcgagaagtacctccagacccgcggccacgaggtcgtcgtcgtcgacgacgagcgctgcaagaagatcatgaagcagttcatcgacgagcgcccccaggactggttcgaggacatcggcgagtga

SEQ ID NO: 5389 - RNA, 477 nt, synthetic construct
  misc_feature 1..477: note = derived and/or modified sequence opt3 fromCytosine_Deaminase_fcy1__Saccharomyces_cerevisiae__AHY7 8226
  source 1..477: mol_type = other RNA
atggtgaccggcgggatggccagcaagtgggaccagaaaggaatggatatcgcttacgaggaagcagccctgggttataaggagggcggggtccccattggaggctgcctcataaacaataaagacggttccgttcttgggagaggacacaacatgaggttccaaaagggctctgcgacactgcatggcgaaatctcaactttggagaattgtgggcggttagaaggaaaagtgtacaaggatacgaccctgtatacaactctaagtccttgcgacatgtgtaccggtgctattatcatgtacggcattccacgctgcgtagtgggggagaacgtcaattttaagagcaaaggagagaagtatctccagacacgaggccacgaagtggttgtggtcgatgacgagcgttgtaaaaagatcatgaaacagttcatagatgaaagaccgcaggactggtttgaggatatcggtgagtga

SEQ ID NO: 5390 - RNA, 477 nt, synthetic construct
  misc_feature 1..477: note = derived and/or modified sequence opt4 fromCytosine_Deaminase_fcy1__Saccharomyces_cerevisiae__AHY7 8226
  source 1..477: mol_type = other RNA
atggtgaccggcggcatggccagcaagtgggaccagaagggcatggacatcgcctacgaggaggccgccctgggctacaaggagggcggcgtgcccatcggcggctgcctgatcaacaacaaggacggcagcgtgctgggcagaggccacaacatgagattccagaagggcagcgccaccctgcacggcgagatcagcaccctggagaactgcggcagactggagggcaaggtgtacaaggacaccaccctgtacaccaccctgagcccctgcgacatgtgcaccggcgccatcatcatgtacggcatccccagatgcgtggtgggcgagaacgtgaacttcaagagcaagggcgagaagtacctgcagaccagaggccacgaggtggtggtggtggacgacgagagatgcaagaagatcatgaagcagttcatcgacgagagaccccaggactggttcgaggacatcggcgagtga

SEQ ID NO: 5391 - RNA, 477 nt, synthetic construct
  misc_feature 1..477: note = derived and/or modified sequence opt5 fromCytosine_Deaminase_fcy1__Saccharomyces_cerevisiae__AHY7 8226
  source 1..477: mol_type = other RNA
atggtgaccggcgggatggccagcaagtgggaccagaaaggaatggatatcgcttacgaggaagccgcgctgggctataaggaagggggagtccccattggcgggtgcctcatcaacaataaagacggatccgttctgggcagaggccacaacatgcggttccaaaaggggtctgctacacttcatggagagattagcacgctggagaattgtggccgcctcgaagggaaagtgtacaaggataccacactgtataccacactttccccttgcgacatgtgtaccggagccatcattatgtacggcatcccgagatgcgtggtcggggagaacgtgaattttaagtctaaaggagagaagtatctgcagacacggggccacgaagttgtggtcgtggatgacgagcgctgtaaaaagatcatgaaacagttcattgatgaaagaccccaggactggtttgaggatatcggcgagtga

SEQ ID NO: 5392 - RNA, 477 nt, synthetic construct
  misc_feature 1..477: note = derived and/or modified sequence opt6 fromCytosine_Deaminase_fcy1__Saccharomyces_cerevisiae__AHY7 8226
  source 1..477: mol_type = other RNA
atggtaacaggaggaatggcaagcaaatgggatcaaaaaggaatggacatagcatatgaagaagcagcgttaggatataaagaaggaggagtaccaataggaggatgtttaataaataataaagatggaagcgtattaggaagaggacataatatgagatttcaaaaaggaagtgcaacattacatggagaaataagtacattagaaaattgtggaagactagaaggaaaagtatataaagatacaacattatatacaacattaagtccatgtgacatgtgcacaggagcaataataatgtatggaataccaagatgtgtagtaggagaaaatgtaaattttaaaagtaaaggagaaaaatatttacaaacaaggggacatgaagtagtagtagtagatgacgaaagatgtaaaaaaataatgaaacaatttatagatgaaagaccacaagattggtttgaagatataggagaatag

SEQ ID NO: 5393 - protein, 158 aa, synthetic construct; identical to SEQ ID NO: 5385
  REGION 1..158: note Cytosine_Deaminase_fcy1__Saccharomyces_cerevisiae__A0A024XG F7

SEQ ID NO: 5394 - RNA, 477 nt, synthetic construct; identical to SEQ ID NO: 5386
  misc_feature 1..477: note Cytosine_Deaminase_fcy1__Saccharomyces_cerevisiae__EWG88187
  source 1..477: mol_type = other RNA

SEQ ID NO: 5395 - RNA, 477 nt, synthetic construct; identical to SEQ ID NO: 5387
  misc_feature 1..477: note = derived and/or modified sequence opt1 fromCytosine_Deaminase_fcy1__Saccharomyces_cerevisiae__EWG8 8187
  source 1..477: mol_type = other RNA

SEQ ID NO: 5396 - RNA, 477 nt, synthetic construct; identical to SEQ ID NO: 5388
  misc_feature 1..477: note = derived and/or modified sequence opt2 fromCytosine_Deaminase_fcy1__Saccharomyces_cerevisiae__EWG8 8187
  source 1..477: mol_type = other RNA

SEQ ID NO: 5397 - RNA, 477 nt, synthetic construct; identical to SEQ ID NO: 5389
  misc_feature 1..477: note = derived and/or modified sequence opt3 fromCytosine_Deaminase_fcy1__Saccharomyces_cerevisiae__EWG8 8187
  source 1..477: mol_type = other RNA

SEQ ID NO: 5398 - RNA, 477 nt, synthetic construct; identical to SEQ ID NO: 5390
  misc_feature 1..477: note = derived and/or modified sequence opt4 fromCytosine_Deaminase_fcy1__Saccharomyces_cerevisiae__EWG8 8187
  source 1..477: mol_type = other RNA

SEQ ID NO: 5399 - RNA, 477 nt, synthetic construct; identical to SEQ ID NO: 5391
  misc_feature 1..477: note = derived and/or modified sequence opt5 fromCytosine_Deaminase_fcy1__Saccharomyces_cerevisiae__EWG8 8187
  source 1..477: mol_type = other RNA

SEQ ID NO: 5400 - RNA, 477 nt, synthetic construct
  misc_feature 1..477: note = derived and/or modified sequence opt6 fromCytosine_Deaminase_fcy1__Saccharomyces_cerevisiae__EWG8 8187
  source 1..477: mol_type = other RNA
atggtaacaggaggaatggcaagtaaatgggatcaaaaaggaatggacatagcatatgaagaagcagcactaggatataaagaaggaggagtaccaataggaggatgcttaataaataataaagatgggagtgtattaggaagaggacataatatgagatttcaaaaaggaagtgcaacattacacggagaaataagtacattagaaaactgtggaaggctagaaggaaaagtatataaagatacaacattatatacaacattaagtccatgtgatatgtgtacaggagcaataataatgtatggaataccaagatgtgtagtaggagaaaatgtaaattttaaaagtaaaggagaaaaatatctacaaacaagaggacatgaagtagtagtagtagatgacgaaagatgtaaaaaaataatgaaacaatttatagatgaaagaccacaagattggtttgaagatataggagaataa

SEQ ID NO: 5401 - protein, 158 aa, synthetic construct; identical to SEQ ID NO: 5385
  REGION 1..158: note Cytosine_Deaminase_fcy1__Saccharomyces_cerevisiae__A0A024XU W9

SEQ ID NO: 5402 - RNA, 477 nt, synthetic construct; identical to SEQ ID NO: 5386
  misc_feature 1..477: note Cytosine_Deaminase_fcy1__Saccharomyces_cerevisiae__EWG92959
  source 1..477: mol_type = other RNA

SEQ ID NO: 5403 - RNA, 477 nt, synthetic construct; identical to SEQ ID NO: 5387
  misc_feature 1..477: note = derived and/or modified sequence opt1 fromCytosine_Deaminase_fcy1__Saccharomyces_cerevisiae__EWG9 2959
  source 1..477: mol_type = other RNA

SEQ ID NO: 5404 - RNA, 477 nt, synthetic construct; identical to SEQ ID NO: 5388
  misc_feature 1..477: note = derived and/or modified sequence opt2 fromCytosine_Deaminase_fcy1__Saccharomyces_cerevisiae__EWG9 2959
  source 1..477: mol_type = other RNA

SEQ ID NO: 5405 - RNA, 477 nt, synthetic construct; identical to SEQ ID NO: 5389
  misc_feature 1..477: note = derived and/or modified sequence opt3 fromCytosine_Deaminase_fcy1__Saccharomyces_cerevisiae__EWG9 2959
  source 1..477: mol_type = other RNA

SEQ ID NO: 5406 - RNA, 477 nt, synthetic construct; identical to SEQ ID NO: 5390
  misc_feature 1..477: note = derived and/or modified sequence opt4 fromCytosine_Deaminase_fcy1__Saccharomyces_cerevisiae__EWG9 2959
  source 1..477: mol_type = other RNA

SEQ ID NO: 5407 - RNA, 477 nt, synthetic construct; identical to SEQ ID NO: 5391
  misc_feature 1..477: note = derived and/or modified sequence opt5 fromCytosine_Deaminase_fcy1__Saccharomyces_cerevisiae__EWG9 2959
  source 1..477: mol_type = other RNA

SEQ ID NO: 5408 - RNA, 477 nt, synthetic construct
  misc_feature 1..477: note = derived and/or modified sequence opt6 fromCytosine_Deaminase_fcy1__Saccharomyces_cerevisiae__EWG9 2959
  source 1..477: mol_type = other RNA
atggtaacaggaggaatggcaagtaaatgggatcaaaaaggaatggacatagcatatgaagaagcagcattaggatataaagaaggaggagtaccaataggaggatgcctaataaataataaagacggaagtgtattaggaagaggacataatatgagatttcaaaaaggaagtgcaacattacacggagaaataagtacattagaaaactgtggaagattagaaggaaaagtatataaagatacaacattatatacaacattaagtccatgtgacatgtgcacaggagcaataataatgtatggaataccaagatgtgtggtaggagaaaatgtaaattttaaaagtaaaggagaaaaatatttacaaacaagaggacatgaagtagtagtagtagatgacgaaagatgtaaaaaaataatgaaacaatttatagatgaaagaccacaagattggtttgaagatataggagaataa

SEQ ID NO: 5409 - protein, 158 aa, synthetic construct; identical to SEQ ID NO: 5385
  REGION 1..158: note Cytosine_Deaminase_fcy1__Saccharomyces_cerevisiae__A0A0C5IT D0

SEQ ID NO: 5410 - RNA, 477 nt, synthetic construct; identical to SEQ ID NO: 5386
  misc_feature 1..477: note Cytosine_Deaminase_fcy1__Saccharomyces_cerevisiae__AJP42194
  source 1..477: mol_type = other RNA

SEQ ID NO: 5411 - RNA, 477 nt, synthetic construct; identical to SEQ ID NO: 5387
  misc_feature 1..477: note = derived and/or modified sequence opt1 fromCytosine_Deaminase_fcy1__Saccharomyces_cerevisiae__AJP4 2194
  source 1..477: mol_type = other RNA

SEQ ID NO: 5412 - RNA, 477 nt, synthetic construct; identical to SEQ ID NO: 5388
  misc_feature 1..477: note = derived and/or modified sequence opt2 fromCytosine_Deaminase_fcy1__Saccharomyces_cerevisiae__AJP4 2194
  source 1..477: mol_type = other RNA

SEQ ID NO: 5413 - RNA, 477 nt, synthetic construct; identical to SEQ ID NO: 5389
  misc_feature 1..477: note = derived and/or modified sequence opt3 fromCytosine_Deaminase_fcy1__Saccharomyces_cerevisiae__AJP4 2194
  source 1..477: mol_type = other RNA

SEQ ID NO: 5414 - RNA, 477 nt, synthetic construct; identical to SEQ ID NO: 5390
  misc_feature 1..477: note = derived and/or modified sequence opt4 fromCytosine_Deaminase_fcy1__Saccharomyces_cerevisiae__AJP4 2194
  source 1..477: mol_type = other RNA

SEQ ID NO: 5415 - RNA, 477 nt, synthetic construct; identical to SEQ ID NO: 5391
  misc_feature 1..477: note = derived and/or modified sequence opt5 fromCytosine_Deaminase_fcy1__Saccharomyces_cerevisiae__AJP4 2194
  source 1..477: mol_type = other RNA

SEQ ID NO: 5416 - RNA, 477 nt, synthetic construct
  misc_feature 1..477: note = derived and/or modified sequence opt6 fromCytosine_Deaminase_fcy1__Saccharomyces_cerevisiae__AJP4 2194
  source 1..477: mol_type = other RNA
atggtaacaggaggaatggcaagtaaatgggatcaaaaaggaatggacatagcatatgaagaagcagcattaggatataaagaaggaggagtaccaataggagggtgtttaataaataataaagacggaagtgtattaggaagagggcataatatgagatttcaaaaaggaagtgcaacattacacggagaaataagtacactagaaaactgtggaagactagaaggaaaagtatataaagatacaacattatatacaacattaagtccatgtgacatgtgcacaggagcaataataatgtatggaataccaagatgtgtagtaggagaaaatgtaaattttaaaagtaaaggagaaaaatatttacaaacaagaggacatgaagtagtagtagtagatgacgaaagatgcaaaaaaataatgaaacaatttatagatgaaagaccacaagattggtttgaagatataggagaataa

SEQ ID NO: 5417 - protein, 158 aa, synthetic construct; identical to SEQ ID NO: 5385
  REGION 1..158: note Cytosine_Deaminase_fcy1__Saccharomyces_cerevisiae__A0A0D4WV I5

SEQ ID NO: 5418 - RNA, 477 nt, synthetic construct
  misc_feature 1..477: note Cytosine_Deaminase_fcy1__Saccharomyces_cerevisiae__AJV91284
  source 1..477: mol_type = other RNA
atggtgacagggggaatggcaagcaagtgggatcagaagggtatggacattgcctatgaggaggcggccttaggttacaaagagggtggtgttccaattggcggatgtcttatcaataacaaagacggaagtgttctcggtcgtggtcacaacatgagatttcaaaagggatccgccacactacatggtgagatctccactttggaaaactgtgggagattagagggcaaagtgtacaaagataccactttgtatacgacgctgtctccatgcgacatgtgtacaggtgccatcatcatgtatggtattccacgctgtgttgtcggtgagaacgttaatttcaaaagtaagggcgagaaatatttacaaactagaggtcacgaggttgttgttgttgacgatgagaggtgtaaaaagatcatgaaacaattcatcgatgaaagacctcaggattggtttgaagatattggtgagtag

SEQ ID NO: 5419 - RNA, 477 nt, synthetic construct; identical to SEQ ID NO: 5387
  misc_feature 1..477: note = derived and/or modified sequence opt1 fromCytosine_Deaminase_fcy1__Saccharomyces_cerevisiae__AJV9 1284
  source 1..477: mol_type = other RNA

SEQ ID NO: 5420 - RNA, 477 nt, synthetic construct; identical to SEQ ID NO: 5388
  misc_feature 1..477: note = derived and/or modified sequence opt2 fromCytosine_Deaminase_fcy1__Saccharomyces_cerevisiae__AJV9 1284
  source 1..477: mol_type = other RNA

SEQ ID NO: 5421 - RNA, 477 nt, synthetic construct; identical to SEQ ID NO: 5389
  misc_feature 1..477: note = derived and/or modified sequence opt3 fromCytosine_Deaminase_fcy1__Saccharomyces_cerevisiae__AJV9 1284
  source 1..477: mol_type = other RNA

SEQ ID NO: 5422 - RNA, 477 nt, synthetic construct; identical to SEQ ID NO: 5390
  misc_feature 1..477: note = derived and/or modified sequence opt4 fromCytosine_Deaminase_fcy1__Saccharomyces_cerevisiae__AJV9 1284
  source 1..477: mol_type = other RNA

SEQ ID NO: 5423 - RNA, 477 nt, synthetic construct; identical to SEQ ID NO: 5391
  misc_feature 1..477: note = derived and/or modified sequence opt5 fromCytosine_Deaminase_fcy1__Saccharomyces_cerevisiae__AJV9 1284
  source 1..477: mol_type = other RNA

SEQ ID NO: 5424 - RNA, 477 nt, synthetic construct
  misc_feature 1..477: note = derived and/or modified sequence opt6 fromCytosine_Deaminase_fcy1__Saccharomyces_cerevisiae__AJV9 1284
  source 1..477: mol_type = other RNA
atggtaacaggaggaatggcgagtaaatgggaccaaaaaggaatggatatagcatatgaagaagcagcattaggatataaagaaggaggagtaccaataggagggtgtctaataaataataaagacggaagtgtattaggaagaggacataatatgagatttcaaaaaggaagtgcaacattacatggagaaataagtacattagaaaattgtggaagactagaaggaaaagtatataaagatacaacattatatacaacattaagtccatgtgatatgtgtacaggggcaataataatgtatggaataccaagatgtgtagtaggagaaaatgtaaattttaaaagtaaaggagaaaaatatttacaaacaagaggacatgaagtagtagtagtagatgatgaaagatgtaaaaaaataatgaaacaatttatagatgaaagaccacaagattggtttgaagatataggagaataa

SEQ ID NO: 5425 - protein, 158 aa, synthetic construct; identical to SEQ ID NO: 5385
  REGION 1..158: note Cytosine_Deaminase_fcy1__Saccharomyces_cerevisiae__A0A0D4WY 08

SEQ ID NO: 5426 - RNA, 477 nt, synthetic construct; identical to SEQ ID NO: 5386
  misc_feature 1..477: note Cytosine_Deaminase_fcy1__Saccharomyces_cerevisiae__AJV91722
  source 1..477: mol_type = other RNA

SEQ ID NO: 5427 - RNA, 477 nt, synthetic construct; identical to SEQ ID NO: 5387
  misc_feature 1..477: note = derived and/or modified sequence opt1 fromCytosine_Deaminase_fcy1__Saccharomyces_cerevisiae__AJV9 1722
  source 1..477: mol_type = other RNA

SEQ ID NO: 5428 - RNA, 477 nt, synthetic construct; identical to SEQ ID NO: 5388
  misc_feature 1..477: note = derived and/or modified sequence opt2 fromCytosine_Deaminase_fcy1__Saccharomyces_cerevisiae__AJV9 1722
  source 1..477: mol_type = other RNA

SEQ ID NO: 5429 - RNA, 477 nt, synthetic construct; identical to SEQ ID NO: 5389
  misc_feature 1..477: note = derived and/or modified sequence opt3 fromCytosine_Deaminase_fcy1__Saccharomyces_cerevisiae__AJV9 1722
  source 1..477: mol_type = other RNA

SEQ ID NO: 5430 - RNA, 477 nt, synthetic construct; identical to SEQ ID NO: 5390
  misc_feature 1..477: note = derived and/or modified sequence opt4 fromCytosine_Deaminase_fcy1__Saccharomyces_cerevisiae__AJV9 1722
  source 1..477: mol_type = other RNA

SEQ ID NO: 5431 - RNA, 477 nt, synthetic construct; identical to SEQ ID NO: 5391
  misc_feature 1..477: note = derived and/or modified sequence opt5 fromCytosine_Deaminase_fcy1__Saccharomyces_cerevisiae__AJV9 1722
  source 1..477: mol_type = other RNA

SEQ ID NO: 5432 - RNA, 477 nt, synthetic construct
  misc_feature 1..477: note = derived and/or modified sequence opt6 fromCytosine_Deaminase_fcy1__Saccharomyces_cerevisiae__AJV9 1722
  source 1..477: mol_type = other RNA
atggtaacaggaggaatggcaagtaaatgggatcaaaaaggaatggacatagcatatgaagaagcagcattaggatataaagaaggaggagtaccaataggaggatgcttaataaataataaagatggaagtgtattaggaagaggacataatatgagatttcaaaaaggaagtgcaacattacatggagaaataagcacattagaaaactgtggaagactagaaggaaaagtatataaagatacaacattatatacaacattaagtccatgtgacatgtgcacaggagcaataataatgtatggaataccaagatgtgtagtaggagaaaatgtaaattttaaaagtaaaggagaaaaatatttacaaacaagaggacatgaagtagtagtagtagatgatgaaagatgcaaaaaaataatgaaacaatttatagatgaaagaccacaagattggtttgaagatataggagaataa

SEQ ID NO: 5433 - protein, 158 aa, synthetic construct; identical to SEQ ID NO: 5385
  REGION 1..158: note Cytosine_Deaminase_fcy1__Saccharomyces_cerevisiae__A0A0D4WZ A2

SEQ ID NO: 5434 - RNA, 477 nt, synthetic construct; identical to SEQ ID NO: 5386
  misc_feature 1..477: note Cytosine_Deaminase_fcy1__Saccharomyces_cerevisiae__AJV92162
  source 1..477: mol_type = other RNA

SEQ ID NO: 5435 - RNA, 477 nt, synthetic construct; identical to SEQ ID NO: 5387
  misc_feature 1..477: note = derived and/or modified sequence opt1 fromCytosine_Deaminase_fcy1__Saccharomyces_cerevisiae__AJV9 2162
  source 1..477: mol_type = other RNA

SEQ ID NO: 5436 - RNA, 477 nt, synthetic construct; identical to SEQ ID NO: 5388
  misc_feature 1..477: note = derived and/or modified sequence opt2 fromCytosine_Deaminase_fcy1__Saccharomyces_cerevisiae__AJV9 2162
  source 1..477: mol_type = other RNA

SEQ ID NO: 5437 - RNA, 477 nt, synthetic construct; identical to SEQ ID NO: 5389
  misc_feature 1..477: note = derived and/or modified sequence opt3 fromCytosine_Deaminase_fcy1__Saccharomyces_cerevisiae__AJV9 2162
  source 1..477: mol_type = other RNA

SEQ ID NO: 5438 - RNA, 477 nt, synthetic construct; identical to SEQ ID NO: 5390
  misc_feature 1..477: note = derived and/or modified sequence opt4 fromCytosine_Deaminase_fcy1__Saccharomyces_cerevisiae__AJV9 2162
  source 1..477: mol_type = other RNA

SEQ ID NO: 5439 - RNA, 477 nt, synthetic construct; identical to SEQ ID NO: 5391
  misc_feature 1..477: note = derived and/or modified sequence opt5 fromCytosine_Deaminase_fcy1__Saccharomyces_cerevisiae__AJV9 2162
  source 1..477: mol_type = other RNA

SEQ ID NO: 5440 - RNA, 477 nt, synthetic construct
  misc_feature 1..477: note = derived and/or modified sequence opt6 fromCytosine_Deaminase_fcy1__Saccharomyces_cerevisiae__AJV9 2162
  source 1..477: mol_type = other RNA
atggtaacaggaggaatggcaagtaaatgggatcaaaaaggaatggacatagcatatgaagaagcagcattaggatataaagaaggaggagtaccaataggaggatgcttaataaataataaagacggatcagtattaggaagaggacataatatgagatttcaaaaaggaagtgcaacattacacggagaaataagtacattagaaaactgtggaagactagaaggaaaagtatataaagatacaacattatatacaacattaagtccatgtgacatgtgcacaggagcaataataatgtatggaataccaagatgtgtagtaggagaaaatgtaaattttaaaagtaaaggagaaaaatatttacaaacaagaggacatgaagtagtagtagtagatgacgaaagatgtaaaaaaataatgaaacaatttatagatgaaagaccacaagattggtttgaagatataggagaataa

SEQ ID NO: 5441 - protein, 158 aa, synthetic construct; identical to SEQ ID NO: 5385
  REGION 1..158: note Cytosine_Deaminase_fcy1__Saccharomyces_cerevisiae__A0A0D4WZ Q5

SEQ ID NO: 5442 - RNA, 477 nt, synthetic construct; identical to SEQ ID NO: 5386
  misc_feature 1..477: note Cytosine_Deaminase_fcy1__Saccharomyces_cerevisiae__AJV92601
  source 1..477: mol_type = other RNA

SEQ ID NO: 5443 - RNA, 477 nt, synthetic construct; identical to SEQ ID NO: 5387
  misc_feature 1..477: note = derived and/or modified sequence opt1 fromCytosine_Deaminase_fcy1__Saccharomyces_cerevisiae__AJV9 2601
  source 1..477: mol_type = other RNA

SEQ ID NO: 5444 - RNA, 477 nt, synthetic construct; identical to SEQ ID NO: 5388
  misc_feature 1..477: note = derived and/or modified sequence opt2 fromCytosine_Deaminase_fcy1__Saccharomyces_cerevisiae__AJV9 2601
  source 1..477: mol_type = other RNA

SEQ ID NO: 5445 - RNA, 477 nt, synthetic construct; identical to SEQ ID NO: 5389
  misc_feature 1..477: note = derived and/or modified sequence opt3 fromCytosine_Deaminase_fcy1__Saccharomyces_cerevisiae__AJV9 2601
  source 1..477: mol_type = other RNA

SEQ ID NO: 5446 - RNA, 477 nt, synthetic construct; identical to SEQ ID NO: 5390
  misc_feature 1..477: note = derived and/or modified sequence opt4 fromCytosine_Deaminase_fcy1__Saccharomyces_cerevisiae__AJV9 2601
  source 1..477: mol_type = other RNA

SEQ ID NO: 5447 - RNA, 477 nt, synthetic construct; identical to SEQ ID NO: 5391
  misc_feature 1..477: note = derived and/or modified sequence opt5 fromCytosine_Deaminase_fcy1__Saccharomyces_cerevisiae__AJV9 2601
  source 1..477: mol_type = other RNA

SEQ ID NO: 5448 - RNA, 477 nt, synthetic construct
  misc_feature 1..477: note = derived and/or modified sequence opt6 fromCytosine_Deaminase_fcy1__Saccharomyces_cerevisiae__AJV9 2601
  source 1..477: mol_type = other RNA
atggtaacaggaggaatggcaagtaaatgggatcaaaaaggaatggatatagcatatgaagaagcagcattaggatataaagaaggaggagtaccaataggaggatgtttaataaataataaagatggaagtgtattaggaagaggacataatatgagatttcaaaaaggaagtgcaacattacatggagaaataagtacattagaaaattgtggaagattagaagggaaagtatataaagatacaacattatatacaacattaagtccatgtgatatgtgtacaggagcaataataatgtatggaataccaagatgtgtagtaggagaaaatgtaaattttaaaagtaaaggagaaaaatatttacaaacaagaggacatgaagtagtagtagtagatgatgaaagatgtaaaaaaataatgaaacaatttatagatgaaagaccacaagattggtttgaagatataggagaataa

SEQ ID NO: 5449 - protein, 158 aa, synthetic construct; identical to SEQ ID NO: 5385
  REGION 1..158: note Cytosine_Deaminase_fcy1__Saccharomyces_cerevisiae__A0A0D4X0 R8

SEQ ID NO: 5450 - RNA, 477 nt, synthetic construct; identical to SEQ ID NO: 5418
  misc_feature 1..477: note Cytosine_Deaminase_fcy1__Saccharomyces_cerevisiae__AJV93034
  source 1..477: mol_type = other RNA

SEQ ID NO: 5451 - RNA, 477 nt, synthetic construct; identical to SEQ ID NO: 5387
  misc_feature 1..477: note = derived and/or modified sequence opt1 fromCytosine_Deaminase_fcy1__Saccharomyces_cerevisiae__AJV9 3034
  source 1..477: mol_type = other RNA

SEQ ID NO: 5452 - RNA, 477 nt, synthetic construct; identical to SEQ ID NO: 5388
  misc_feature 1..477: note = derived and/or modified sequence opt2 fromCytosine_Deaminase_fcy1__Saccharomyces_cerevisiae__AJV9 3034
  source 1..477: mol_type = other RNA

SEQ ID NO: 5453 - RNA, 477 nt, synthetic construct; identical to SEQ ID NO: 5389
  misc_feature 1..477: note = derived and/or modified sequence opt3 fromCytosine_Deaminase_fcy1__Saccharomyces_cerevisiae__AJV9 3034
  source 1..477: mol_type = other RNA

SEQ ID NO: 5454 - RNA, 477 nt, synthetic construct; identical to SEQ ID NO: 5390
  misc_feature 1..477: note = derived and/or modified sequence opt4 fromCytosine_Deaminase_fcy1__Saccharomyces_cerevisiae__AJV9 3034
  source 1..477: mol_type = other RNA

SEQ ID NO: 5455 - RNA, 477 nt, synthetic construct; identical to SEQ ID NO: 5391
  misc_feature 1..477: note = derived and/or modified sequence opt5 fromCytosine_Deaminase_fcy1__Saccharomyces_cerevisiae__AJV9 3034
  source 1..477: mol_type = other RNA

SEQ ID NO: 5456 - RNA, 477 nt, synthetic construct
  misc_feature 1..477: note = derived and/or modified sequence opt6 fromCytosine_Deaminase_fcy1__Saccharomyces_cerevisiae__AJV9 3034
  source 1..477: mol_type = other RNA
atggtaacaggaggaatggcaagtaaatgggatcaaaaaggaatggatatagcatatgaagaagcagcattaggatataaagaaggaggagtaccaataggaggatgtttaataaataataaagacggaagtgtattaggaagaggacataatatgagatttcaaaaaggaagcgcaacattacatggagaaataagtacattagaaaattgtggaagattagaaggaaaagtatataaagatacaacattatatacaacattaagtccatgtgatatgtgtacaggagcaataataatgtatggaataccaagatgtgtagtaggagaaaatgtaaattttaaaagtaaaggagaaaaatatttacaaacaagaggacatgaagtagtagtagtggacgatgaaagatgtaaaaaaataatgaaacaatttatagatgaaagaccacaagattggtttgaagatataggagaatag

SEQ ID NO: 5457 - protein, 158 aa, synthetic construct; identical to SEQ ID NO: 5385
  REGION 1..158: note Cytosine_Deaminase_fcy1__Saccharomyces_cerevisiae__A0A0D4X1 95

SEQ ID NO: 5458 - RNA, 477 nt, synthetic construct; identical to SEQ ID NO: 5386
  misc_feature 1..477: note Cytosine_Deaminase_fcy1__Saccharomyces_cerevisiae__AJV93300
  source 1..477: mol_type = other RNA

SEQ ID NO: 5459 - RNA, 477 nt, synthetic construct; identical to SEQ ID NO: 5387
  misc_feature 1..477: note = derived and/or modified sequence opt1 fromCytosine_Deaminase_fcy1__Saccharomyces_cerevisiae__AJV9 3300
  source 1..477: mol_type = other RNA

SEQ ID NO: 5460 - RNA, 477 nt, synthetic construct; identical to SEQ ID NO: 5388
  misc_feature 1..477: note = derived and/or modified sequence opt2 fromCytosine_Deaminase_fcy1__Saccharomyces_cerevisiae__AJV9 3300
  source 1..477: mol_type = other RNA

SEQ ID NO: 5461 - RNA, 477 nt, synthetic construct; identical to SEQ ID NO: 5389
  misc_feature 1..477: note = derived and/or modified sequence opt3 fromCytosine_Deaminase_fcy1__Saccharomyces_cerevisiae__AJV9 3300
  source 1..477: mol_type = other RNA

SEQ ID NO: 5462 - RNA, 477 nt, synthetic construct; identical to SEQ ID NO: 5390
  misc_feature 1..477: note = derived and/or modified sequence opt4 fromCytosine_Deaminase_fcy1__Saccharomyces_cerevisiae__AJV9 3300
  source 1..477: mol_type = other RNA

SEQ ID NO: 5463 - RNA, 477 nt, synthetic construct; identical to SEQ ID NO: 5391
  misc_feature 1..477: note = derived and/or modified sequence opt5 fromCytosine_Deaminase_fcy1__Saccharomyces_cerevisiae__AJV9 3300
  source 1..477: mol_type = other RNA

SEQ ID NO: 5464 - RNA, 477 nt, synthetic construct
  misc_feature 1..477: note = derived and/or modified sequence opt6 fromCytosine_Deaminase_fcy1__Saccharomyces_cerevisiae__AJV9 3300
  source 1..477: mol_type = other RNA
atggtaacaggaggaatggcaagtaaatgggatcaaaaaggaatggatatagcatatgaagaagcagcactaggatataaagaaggaggagtaccaataggaggatgtctaataaataataaagatggaagtgtattaggaagaggacataatatgagatttcaaaaaggaagtgcaacattacatggagaaataagtacattagaaaattgtggaagactagaaggaaaagtatataaagatacaacattatatacaacattaagtccgtgtgatatgtgcacaggagcaataataatgtatggaataccaagatgtgtagtaggagaaaatgtaaattttaaaagcaaaggagaaaaatatttacaaacaagaggacatgaagtagtagtagtagatgatgaaagatgtaaaaaaataatgaaacaatttatagatgaaagaccacaagattggtttgaagatataggagaataa

SEQ ID NO: 5465 - protein, 158 aa, synthetic construct; identical to SEQ ID NO: 5385
  REGION 1..158: note Cytosine_Deaminase_fcy1__Saccharomyces_cerevisiae__A0A0D4X2 R9

SEQ ID NO: 5466 - RNA, 477 nt, synthetic construct
  misc_feature 1..477: note Cytosine_Deaminase_fcy1__Saccharomyces_cerevisiae__AJV93739
  source 1..477: mol_type = other RNA
atggtgacagggggaatggcaagcaagtgggatcagaagggtatggacattgcctatgaggaggcggccttaggttacaaagagggtggtgttccaattggcggatgtcttatcaataacaaagacggaagtgttctcggtcgtggtcacaacatgaggtttcaaaagggatccgccacactacatggtgagatctccactttggaaaactgtgggagattagagggcaaagtgtacaaagataccactttgtatacgacgctgtccccatgcgacatgtgtacaggtgccatcatcatgtatggtattccacgctgtgttgtcggtgagaacgttaatttcaaaagtaagggcgagaaatatttacaaactagaggtcacgaggttgttgttgttgacgatgagaggtgtaaaaagatcatgaaacaatttatcgatgaaagacctcaggattggtttgaagatattggtgagtag

SEQ ID NO: 5467 - RNA, 477 nt, synthetic construct; identical to SEQ ID NO: 5387
  misc_feature 1..477: note = derived and/or modified sequence opt1 fromCytosine_Deaminase_fcy1__Saccharomyces_cerevisiae__AJV9 3739
  source 1..477: mol_type = other RNA

SEQ ID NO: 5468 - RNA, 477 nt, synthetic construct; identical to SEQ ID NO: 5388
  misc_feature 1..477: note = derived and/or modified sequence opt2 fromCytosine_Deaminase_fcy1__Saccharomyces_cerevisiae__AJV9 3739
  source 1..477: mol_type = other RNA

SEQ ID NO: 5469 - RNA, 477 nt, synthetic construct; identical to SEQ ID NO: 5389
  misc_feature 1..477: note = derived and/or modified sequence opt3 fromCytosine_Deaminase_fcy1__Saccharomyces_cerevisiae__AJV9 3739
  source 1..477: mol_type = other RNA

SEQ ID NO: 5470 - RNA, 477 nt, synthetic construct; identical to SEQ ID NO: 5390
  misc_feature 1..477: note = derived and/or modified sequence opt4 fromCytosine_Deaminase_fcy1__Saccharomyces_cerevisiae__AJV9 3739
  source 1..477: mol_type = other RNA

SEQ ID NO: 5471 - RNA, 477 nt, synthetic construct; identical to SEQ ID NO: 5391
  misc_feature 1..477: note = derived and/or modified sequence opt5 fromCytosine_Deaminase_fcy1__Saccharomyces_cerevisiae__AJV9 3739
  source 1..477: mol_type = other RNA

SEQ ID NO: 5472 - RNA, 477 nt, synthetic construct
  misc_feature 1..477: note = derived and/or modified sequence opt6 fromCytosine_Deaminase_fcy1__Saccharomyces_cerevisiae__AJV9 3739
  source 1..477: mol_type = other RNA
atggtaacaggaggaatggcaagtaaatgggatcaaaaaggaatggacatagcatatgaagaagcagcattaggatataaggaaggaggagtaccaataggaggatgcttaataaataataaagacggaagtgtattaggaagaggacataatatgagatttcaaaaaggaagtgcaacactacacggagaaataagtacattagaaaactgtggaagactagaaggaaaagtatataaagatacaacattatatacaacattaagtccatgtgacatgtgcacaggagcaataataatgtatggaataccaagatgtgtagtaggagaaaatgtaaattttaaaagtaaaggagaaaaatatttacaaacaagaggacatgaagtagtagtagtagatgacgaaagatgtaaaaaaataatgaaacaatttatagatgaaagaccacaagattggtttgaagatataggagaataa

SEQ ID NO: 5473 - protein, 158 aa, synthetic construct; identical to SEQ ID NO: 5385
  REGION 1..158: note Cytosine_Deaminase_fcy1__Saccharomyces_cerevisiae__A0A0D4X3 Q1

SEQ ID NO: 5474 - RNA, 477 nt, synthetic construct; identical to SEQ ID NO: 5418
  misc_feature 1..477: note Cytosine_Deaminase_fcy1__Saccharomyces_cerevisiae__AJV94006
  source 1..477: mol_type = other RNA

SEQ ID NO: 5475 - RNA, 477 nt, synthetic construct; identical to SEQ ID NO: 5387
  misc_feature 1..477: note = derived and/or modified sequence opt1 fromCytosine_Deaminase_fcy1__Saccharomyces_cerevisiae__AJV9 4006
  source 1..477: mol_type = other RNA

SEQ ID NO: 5476 - RNA, 477 nt, synthetic construct; identical to SEQ ID NO: 5388
  misc_feature 1..477: note = derived and/or modified sequence opt2 fromCytosine_Deaminase_fcy1__Saccharomyces_cerevisiae__AJV9 4006
  source 1..477: mol_type = other RNA

SEQ ID NO: 5477 - RNA, 477 nt, synthetic construct; identical to SEQ ID NO: 5389
  misc_feature 1..477: note = derived and/or modified sequence opt3 fromCytosine_Deaminase_fcy1__Saccharomyces_cerevisiae__AJV9 4006
  source 1..477: mol_type = other RNA

SEQ ID NO: 5478 - RNA, 477 nt, synthetic construct; identical to SEQ ID NO: 5390
  misc_feature 1..477: note = derived and/or modified sequence opt4 fromCytosine_Deaminase_fcy1__Saccharomyces_cerevisiae__AJV9 4006
  source 1..477: mol_type = other RNA

SEQ ID NO: 5479 - RNA, 477 nt, synthetic construct; identical to SEQ ID NO: 5391
  misc_feature 1..477: note = derived and/or modified sequence opt5 fromCytosine_Deaminase_fcy1__Saccharomyces_cerevisiae__AJV9 4006
  source 1..477: mol_type = other RNA

SEQ ID NO: 5480 - RNA, 477 nt, synthetic construct
  misc_feature 1..477: note = derived and/or modified sequence opt6 fromCytosine_Deaminase_fcy1__Saccharomyces_cerevisiae__AJV9 4006
  source 1..477: mol_type = other RNA
atggtaacaggaggaatggcaagtaaatgggatcaaaaaggaatggacatagcatatgaagaagcagcattaggatataaagaaggaggagtaccaataggaggatgcttaataaataataaagacggaagcgtattaggaagaggacataatatgagatttcaaaaaggaagtgcaacattacacggagaaataagtacattagaaaactgtggaagattagaaggaaaagtatataaagatacaacactatatacaacattaagtccatgtgacatgtgcacaggagcgataataatgtatggaataccaagatgtgtagtaggagaaaatgtaaattttaaaagtaaaggagaaaaatatttacaaacaagaggacatgaagtagtagtagtagatgacgaaagatgtaaaaaaataatgaaacaatttatagatgaaagaccacaagattggtttgaagatataggagaataa

SEQ ID NO: 5481 - protein, 158 aa, synthetic construct; identical to SEQ ID NO: 5385
  REGION 1..158: note Cytosine_Deaminase_fcy1__Saccharomyces_cerevisiae__A0A0D4X4 K1

SEQ ID NO: 5482 - RNA, 477 nt, synthetic construct; identical to SEQ ID NO: 5386
  misc_feature 1..477: note Cytosine_Deaminase_fcy1__Saccharomyces_cerevisiae__AJV94445
  source 1..477: mol_type = other RNA

SEQ ID NO: 5483 - RNA, 477 nt, synthetic construct; identical to SEQ ID NO: 5387
  misc_feature 1..477: note = derived and/or modified sequence opt1 fromCytosine_Deaminase_fcy1__Saccharomyces_cerevisiae__AJV9 4445
  source 1..477: mol_type = other RNA

SEQ ID NO: 5484 - RNA, 477 nt, synthetic construct; identical to SEQ ID NO: 5388
  misc_feature 1..477: note = derived and/or modified sequence opt2 fromCytosine_Deaminase_fcy1__Saccharomyces_cerevisiae__AJV9 4445
  source 1..477: mol_type = other RNA

SEQ ID NO: 5485 - RNA, 477 nt, synthetic construct; identical to SEQ ID NO: 5389
  misc_feature 1..477: note = derived and/or modified sequence opt3 fromCytosine_Deaminase_fcy1__Saccharomyces_cerevisiae__AJV9 4445
  source 1..477: mol_type = other RNA

SEQ ID NO: 5486 - RNA, 477 nt, synthetic construct; identical to SEQ ID NO: 5390
  misc_feature 1..477: note = derived and/or modified sequence opt4 fromCytosine_Deaminase_fcy1__Saccharomyces_cerevisiae__AJV9 4445
  source 1..477: mol_type = other RNA

SEQ ID NO: 5487 - RNA, 477 nt, synthetic construct; identical to SEQ ID NO: 5391
  misc_feature 1..477: note = derived and/or modified sequence opt5 fromCytosine_Deaminase_fcy1__Saccharomyces_cerevisiae__AJV9 4445
  source 1..477: mol_type = other RNA

SEQ ID NO: 5488 - RNA, 477 nt, synthetic construct
  misc_feature 1..477: note = derived and/or modified sequence opt6 fromCytosine_Deaminase_fcy1__Saccharomyces_cerevisiae__AJV9 4445
  source 1..477: mol_type = other RNA
atggtaacaggaggaatggcaagtaaatgggatcaaaaaggaatggatatagcatatgaagaagcagcattaggatataaagaaggaggagtaccaataggaggatgtttaataaataataaagatggaagcgtactaggaagaggacataatatgaggtttcaaaaaggaagcgcaacattacatggagaaataagcacattagaaaattgtgggaggttagaaggaaaagtatataaagatacaacattatatacaacattaagtccatgtgatatgtgtacaggagcaataataatgtatggaataccaagatgtgtagtaggagaaaatgtaaattttaaaagtaaaggagaaaaatatttacaaacaagaggacatgaagtagtagtagtagatgatgaaagatgtaaaaaaataatgaaacaatttatagatgaaagaccacaagattggtttgaagatataggagaataa

SEQ ID NO: 5489 - protein, 158 aa, synthetic construct; identical to SEQ ID NO: 5385
  REGION 1..158: note Cytosine_Deaminase_fcy1__Saccharomyces_cerevisiae__A0A0D4X5 B7

SEQ ID NO: 5490 - RNA, 477 nt, synthetic construct; identical to SEQ ID NO: 5386
  misc_feature 1..477: note Cytosine_Deaminase_fcy1__Saccharomyces_cerevisiae__AJV94715
  source 1..477: mol_type = other RNA
